United States Patent Application Publication US 2020/0163878 A1 - sequence listing, part 47

SEQ ID NO: 175941 - RNA, 1410 nt, Artificial Sequence
  derived and/or modified CDS sequence (opt4) from neuraminidase__InfluenzaA__ABS71662
augaaccccaucaagaagaucaucaccaucggcagcgugagccugaccaucagcaccaucugcuucuucaugcagaucgccauccugaucaccaccgugacccugcacuucaagcaguacgaguucaacagcccccccaacaaccaggugaugcugugcgagcccaccaucaucgagagaaacaucaccgagaucguguaccugaccaacaccaccaucgagaaggagaucugccccaagcuggccgaguacagaaacuggagcaagccccagugcgacaucaccggcuucgcccccuucagcaaggacaacagcaucagacugagcgccggcggcgacaucugggugaccagagagcccuacgugagcugcgaccccgacaagugcuaccaguucgcccugggccagggcaccacccugaacaacgugcacagcaacgacaccgugagagacagaacccccuacagaacccugcugaugaacgagcugggcgugcccuuccaccugggcaccaagcaggugugcaucgccuggagcagcagcagcugccacgacggcaaggccuggcugcacgugugcaucaccggcgacgacaagaacgccaccgccagcuucaucuacaacggcagacugguggacagcaucgugagcuggagcaaggagauccugagaacccaggagagcgagugcgugugcaucaacggcaccugcaccguggugaugaccgacggcagcgccagcggcaaggccgacaccaagauccuguucaucgaggagggcaagaucgugcacaccagcacccugagcggcagcgcccagcacguggaggagugcagcugcuaccccagauaccccggcgugagaugcgugugcagagacaacuggaagggcagcaacagacccaucguggacaucaacaucaaggaccacagcaucgugagcagcuacgugugcagcggccuggugggcgacacccccagaaagaacgacagcagcagcagcagccacugccuggaccccaacaacgaggagggcggccacggcgugaagggcugggccuucgacgacggcaacgacguguggaugggcagaaccaucagcgagaagagcagacugggcuacgagaccuucaaggugaucgagggcuggagcaaccccaacagcaagcugcagaucaacagacaggugaucguggacagaggcaacagaagcggcuacagcggcaucuucagcguggagggcaagagcugcaucaacagaugcuucuacguggagcugaucagaggcagaaaggaggagaccgaggugcuguggaccagcaacagcaucgugguguucugcggcaccagcggcaccuacggcaccggcagcuggcccgacggcgccgacaucaaccugaugcccaucuga

SEQ ID NO: 175942 - RNA, 1410 nt, Artificial Sequence
  derived and/or modified CDS sequence (opt4) from neuraminidase__InfluenzaA__ABS71663
auguaccccaucaagaagaucaucaccaucggcagcgugagccugaccaucagcaccaucugcuucuucaugcagaucgccauccugaucaccaccgugacccugcacuucaagcaguacgaguucaacagcccccccaacaaccaggugaugcugugcgagcccaccaucaucgagagaaacaucaccgagaucguguaccugaccaacaccaccaucgagaaggagaucugccccaagcuggccgaguacagaaacuggagcaagccccagugcgacaucaccggcuucgcccccuucagcaaggacaacagcaucagacugagcgccggcggcgacaucugggugaccagagagcccuacgugagcugcgaccccgacaagugcuaccaguucgcccugggccagggcaccacccugaacaacgugcacagcaacgacaccgugagagacagaacccccuacagaacccugcugaugaacgagcugggcgugcccuuccaccugggcaccaagcaggugugcaucgccuggagcagcagcagcugccacgacggcaaggccuggcugcacgugugcaucaccggcgacgaccagaacgccaccgccagcuucaucuacaacggcagacugguggacagcaucgugagcuggagcaaggagauccugagaacccaggagagcgagugcgugugcaucaacggcaccugcaccguggugaugaccgacggcagcgccagcggcaaggccgacaccaagauccuguucaucgaggagggcaagaucgugcacaccagcacccugagcggcagcgcccagcacguggaggagugcagcugcuaccccagauaccccggcgugagaugcgugugcagagacaacuggaagggcagcaacagacccaucguggacaucaacaucaaggaccacagcaucgugagcagcuacgugugcagcggccuggugggcgacacccccagaaagaacgacagcagcagcagcagccacugccuggaccccaacaacgaggagggcggccacggcgugaagggcugggccuucgacgacggcaacgacguguggaugggcagaaccaucagcgagaagagcagacugggcuacgagaccuucaaggugaucgagggcuggagcaaccccaacagcaagcugcagaugaacagacaggugaucguggacagaggcaacagaagcggcuacagcggcaucuucagcguggagggcaagagcugcaucaacagaugcuucuacguggagcugaucagaggcagaaaggaggagaccgaggugcuguggaccagcaacagcaucgugguguucugcggcaccagcggcaccuacggcaccggcagcuggcccgacggcgccgacaucaaccugaugcccaucuga

SEQ ID NO: 175943 - RNA, 1410 nt, Artificial Sequence
  derived and/or modified CDS sequence (opt4) from neuraminidase__InfluenzaA__ABU40956
augaaccccaaccagaagaucaucaccaucggcagcgugagccugaccaucagcaccaucugcuucuucaugcagaucgccauccugaucaccaccgugacccugcacuucaagcaguacgaguucaacagcccccccaacaaccaggugaugcugugcgagcccaccaucaucgagagaaacaucaccgagaucguguaccugaccaacaccaccaucgagaaggagaucugccccaagcuggccgaguacagaaacuggagcaagccccagugcgacaucaccggcuucgcccccuucagcaaggacaacagcaucagacugagcgccggcggcgacaucugggugaccagagagcccuacgugagcugcgaccccgacaacugcuaccaguucgcccugggccagggcaccacccugaacaacgugcacagcaacgacaccgugagagacagaacccccuacagaacccugcugaugaacgagcugggcgugcccuuccaccugggcaccaagcaggugugcaucgccuggagcagcagcagcugccacgacggcaaggccuggcugcacgugugcaucaccggcgacgacaagaacgccaccgccagcuucaucuacaacggcagacugguggacagcaucgugagcuggagcaaggagauccugagaacccaggagagcgagugcgugugcaucaacggcaccugcaccguggugaugaccgacggcagcgccagcggcaaggccgacaccaagauccuguucaucgaggagggcaagaucgugcacaccagcacccugagcggcagcgcccagcacguggaggagugcagcugcuaccccagauaccccggcgugagaugcgugugcagagacaacuggaagggcagcaacagacccaucaucgacaucaacaucaaggaccacagcaucgugagcagcuacgugugcagcggccuggugggcgacacccccagaaagaacgacagcagcagcagcagccacugccuggaccccaacaacgaggagggcggccacggcgugaagggcugggccuucgacgacggcaacgacguguggaugggcagaaccaucagcgagaagagcagacugggcuacgagaccuucaaggugaucgagggcuggagcaaccccaagagcaagcugcagaucaacagacaggugaucguggacagaggcaacagaagcggcuacagcggcaucuucagcguggagggcaagagcugcaucaacagaugcuucuacguggagcugaucagaggcagaaaggaggagaccgaggugcuguggaccagcaacagcaucgugguguucugcggcaccagcggcaccuacggcaccggcagcuggcccgacggcgccgacaucaaccugaugcccaucuga

SEQ ID NO: 175944 - RNA, 1410 nt, Artificial Sequence
  derived and/or modified CDS sequence (opt4) from neuraminidase__InfluenzaA__ABU50651
augaaccccaaccagaagaucaucaccaucggcagcgugagccugaccaucagcaccaucugcuucuucaugcagaucgccauccugaucaccaccgugacccugcacuucaagcaguacgaguucaacagcccccccaacaaccaggugaugcugugcgagcccaccaucaucgagagaaacaucaccgagaucguguaccugaccaacaccaccaucgagaaggagaucugccccaagcuggccgaguacagaaacuggagcaagccccagugcgacaucaccggcuucgcccccuucagcaaggacaacagcaucagacugagcgccggcggcgacaucugggugaccagagagcccuacgugagcugcgaccccgacaagugcuaccaguucgcccugggccagggcaccacccugaacaacgugcacagcaacgacaccgugagagacagaacccccuacagaacccugcugaugaacgagcugggcgugcccuuccaccugggcaccaagcaggugugcaucgccuggagcagcagcagcugccacgacggcaaggccuggcugcacgugugcaucaccggcgacgacaagaacgccaccgccagcuucaucuacaacggcagacugguggacagcaucgugagcuggagcaaggagauccugagaacccaggagagcgagugcgugugcaucaacggcaccugcaccguggugaugaccgacggcagcgccagcggcaaggccgacaccaagauccuguucaucgaggagggcaagaucgugcacaccagcacccugagcggcagcgcccagcacguggaggagugcagcugcuaccccagauaccccggcgugagaugcgugugcagagacaacuggaagggcagcaacagacccaucguggacaucaacaucaaggaccacagcaucgugagcagcuacgugugcagcggccuggugggcgacacccccagaaagaacgacagcagcagcagcagccacugccuggaccccaacaacgaggagggcggccacggcgugaagggcugggccuucgacgacggcaacgacguguggaugggcagaaccaucagcgagaagagcagacugggcuacgagaccuucaaggugaucgagggcuggagcaaccccaagagcaagcugcagaucaacagacaggugaucguggacagaggcaacagaagcggcuacagcggcaucuucagcguggagggcaagagcugcaucaacagaugcuucuacguggagcugaucagaggcagaaaggaggagaccgaggugcuguggaccagcaacagcaucgugguguucugcggcaccagcggcaccuacggcaccggcagcuggcccgacggcgccgacaucaaccugaugcccaucuga

SEQ ID NO: 175945 - RNA, 1410 nt, Artificial Sequence
  derived and/or modified CDS sequence (opt4) from neuraminidase__InfluenzaA__ABU80180
augaaccccaaccagaagaucaucaccaucggcagcgugagccugaccaucgccaccaucugcuuccugaugcagaucgccauccuggugaccaccgugacccugcacuucaagcaguacgagugcaacagcuuccccaacaaccaggugaugcugugcgagcccaccaucaucgagagaaacaucaccgagaucguguaccugaccaacaccaccaucgagaaggagaucugccccaagcuggccgaguacagaaacuggagcaagccccagugcaacaucaccggcuucgcccccuucagcaaggacaacagcaucagacugagcgccggcggcgacaucugggugaccagagagcccuacgugagcugcgaccccgacaagugcuaccaguucgcccugggccagggcaccacccugaacaacggccacagcaacgacaccgugcacgacagaacccccuacagaacccugcugaugaacgagcugggcgugcccuuccaccugggcaccaagcaggugugcaucgccuggagcagcagcagcugccacgacggcaaggccuggcugcacgugugcgugaccggcgacgacgagaacgccaccgccagcuucaucuacaacggcagacugguggacagcaucggcagcuggagcaagaagauccugagaacccaggagagcgagugcgugugcaucaacggcaccugcaccguggugaugaccgacggcagcgccagcggcaaggccgacaccaagauccuguucaucgaggagggcaagaucgugcacaccagcagccugagcggcagcgcccagcacguggaggagugcagcugcuaccccagauaccccggcgugagaugcgugugcagagacaacuggaagggcagcaacagacccaucguggacaucaacgugaaggacuacagcaucgugagcagcuacgugugcagcggccuggugggcgacacccccagaaagaacgacagcagcagcagcagccacugccuggaccccaacaacgaggagggcggccacggcgugaagggcugggccuucgacgacggcaacgacguguggaugggcagaaccaucagcgagaagcugagaagcggcuacgagaccuucaaggugaucgagggcuggagcaagcccaacagcaagcugcagaucaacagacaggugaucguggacagaggcaacagaagcggcuacagcggcaucuucagcguggagggcaagagcugcaucaacagaugcuucuacguggagcugaucagaggcagaaagcaggagaccgaggugcuguggaccagcaacagcaucgugguguucugcggcaccagcggcaccuacggcaccggcagcuggcccgacggcgccgacaucaaccugaugcccaucuga

SEQ ID NO: 175946 - RNA, 1413 nt, Artificial Sequence; identical to SEQ ID NO: 174888
  derived and/or modified CDS sequence (opt4) from neuraminidase__InfluenzaA__ABU80301

SEQ ID NO: 175947 - RNA, 1413 nt, Artificial Sequence
  derived and/or modified CDS sequence (opt4) from neuraminidase__InfluenzaA__ABU80312
augaacaccaaccagaagaucaucaccaucggcagcaucagcaucgccaucggcaucaucagccugaugcugcagaucggcaacaucaucagcaucugggccagccacagcauccagaccggcagccagaaccacaccggcaucugcaaccagagaaucaucaccuacgagaacagcaccugggugaaccacaccuacgugaacaucaacaacaccaacgugguggccggcaaggacaagaccagcgugacccuggccggcaacagcagccugugcagcaucagcggcugggccaucuacaccaaggacaacagcaucagaaucggcagcaagggcgacguguucgugaugagagagcccuucaucagcugcagccaccuggagugcagaaccuucuuccugacccagggcgcccugcugaacgacaagcacagcaacggcaccgugaaggacagaagccccuacagagcccugaugagcugcccccugggcgaggcccccagccccuacaacagcaaguucgagagcguggccuggagcgccagcgccugccacgacggcaugggcuggcugaccaucggcaucagcggccccgacaacggcgccguggccgugcugaaguacaacggcaucaucaccgagaccaucaagagcuggaagaagagaauccugagaacccaggagagcgagugcgugugcgugaacggcagcugcuucaccaucaugaccgacggccccagcaacggcgccgccagcuacaagaucuucaagaucgagaagggcaaggugaccaagagcaucgagcugaacgcccccaacuuccacuacgaggagugcagcugcuaccccgacaccggcaccgugaugugcgugugcagagacaacuggcacggcagcaacagacccugggugagcuucaaccagaaccuggacuaccagaucggcuacaucugcagcggcguguucggcgacaaccccagacccaaggacggcgagggcagcugcaaccccgugaccguggacggcgccgacggcgugaagggcuucagcuacaaguacggcaacggcguguggaucggcagaaccaagagcaacagacugagaaagggcuucgagaugaucugggaccccaacggcuggaccgacaccgacagcaacuucagcgugaagcaggacgugguggccaucaccgacuggagcggcuacagcggcagcuucgugcagcaccccgagcugaccggccuggacugcaucagacccugcuucuggguggagcuggugagaggccugcccagagagaacaccaccaucuggaccagcggcagcagcaucagcuucugcggcgugaacagcgacaccgccaacuggagcuggcccgacggcgccgagcugcccuucaccaucgacaaguga

SEQ ID NO: 175948 - RNA, 1410 nt, Artificial Sequence; identical to SEQ ID NO: 174790
  derived and/or modified CDS sequence (opt4) from neuraminidase__InfluenzaA__ABU80323

SEQ ID NO: 175949 - RNA, 1410 nt, Artificial Sequence
  derived and/or modified CDS sequence (opt4) from neuraminidase__InfluenzaA__ABU80334
augaaccccaaccagaagaucaucaccaucggcagcgugagccugaccaucgccaccaucugcuuccugaugcagaucgccauccuggugaccaccgugacccugcacuucaagcaguacgagugcaacagcccccccaacaaccaggugaugcugugcgagcccaccaucaucgagagaaacaucaccgagaucguguaccugaccaacaccaccaucgagaaggagaucugccccaagcuggccgaguacagaaacuggagcaagccccagugcaacaucaccggcuucgcccccuucagcaaggacaacagcaucagacugagcgccggcggcgacaucugggugaccagagagcccuacgugagcugcgaccccgacaagugcuaccaguucgcccugggccagggcaccacccugaacaacggccacagcaacgacaccgugcacgacagaacccccuacagaacccugcugaugaacgagcugggcgugcccuuccaccugggcaccagacaggugugcaucgccuggagcagcagcagcugccacgacggcaaggccuggcugcacgugugcgugaccggcgacgacgagaacgccaccgccagcuucaucuacaacggcagacugguggacagcaucggcagcuggagcaagaagacccugagaacccaggagagcgagugcgugugcaucaacggcaccugcaccguggugaugaccgacggcagcgccagcggcaaggccgacaccaagauccuguucaucgaggagggcaagaucauccacaucagcacccugagcggcagcgcccagcacguggaggagugcagcugcuaccccagauaccccggcgugagaugcgugugcagagacaacuggaagggcagcaacagacccaucguggacaucaacgugaaggacuacagcaucgugagcagcuacgugugcagcggccuggugggcgacacccccagaaagaacgacagcuucagcagcagccacugccuggaccccaacaacgaggagggcggccacggcgugaagggcugggccuucgacgacggcaacgacguguggaugggcagaaccaucagcgagaagcugagaagcggcuacgagaccuucaaggugaucgagggcuggagcaagcccaacagcaagcugcagaucaacagacaggugaucguggagagaggcaacagaagcggcuacagcggcaucuucagcguggagggcaagagcugcaucaacagaugcuucuacguggagcugaucagaggcagaaaggaggagaccgaggugugguggaccagcaacagcaucgugguguucugcggcaccagcggcaccuacggcaccggcagcuggcccgacggcgccgacaucaaccugaugcccaucuga

SEQ ID NO: 175950 - RNA, 1410 nt, Artificial Sequence; identical to SEQ ID NO: 174214
  derived and/or modified CDS sequence (opt4) from neuraminidase__InfluenzaA__ABU92762

SEQ ID NO: 175951 - RNA, 1410 nt, Artificial Sequence
  derived and/or modified CDS sequence (opt4) from neuraminidase__InfluenzaA__ABU92764
augaaccccaaccagaagaucaucaccaucggcagcgugagccugaccaucgccaccaucugcuuccugaugcagaucgccauccuggugaccaccgugacccugcacuucaagcaguacgagugcaacagcccccccaacaaccaggugaugcugugcgagcccaccaucauggagagaaacaucaccgagaucguguaccugaccaacaccaccaucgagaaggagaucugccccaagcuggccgaguacagaaacuggagcaagccccagugcaacgugaccggcuucgcccccuucagcaaggacaacagcaucagacugagcgccggcggcgacaucugggugaccagagagcccuacgugagcugcgaccccgacaagugcuaccaguucgcccugggccagggcaccacccugaacaacggccacagcaacgacaccgugcacgacagaacccccuacagaacccugcugaugaacgagcugggcgugcccuuccaccugggcaccagacaggugugcaucgccuggagcagcagcagcugccacgacggcaaggccuggcugcacgugugcgugaccggcgacgacgagaacgccaccgccagcuucaucuacaacggcagacugguggacagcaucggcagcuggagcaagaagauccugagaacccaggagagcgagugcgugugcaucaacggcaccugcaccguggugaugaccgacggcagcgccagcggcaaggccgacaccaagauccuguucaucgaggagggcaagaucgugcacaucagcacccugagcggcagcgcccagcacguggaggagugcagcugcuaccccagauaccccggcgugagaugcgugugcagagacaacuggaagggcagcaacagacccaucguggacaucaacgugaaggacuacagcaucgugagcagcuacgugugcagcggccuggugggcgacacccccagaaagaacgacagcuucagcagcagccacugccuggaccccaacaacgaggagggcggccacggcgugaagggcugggccuucgacgacggcaacgacguguggaugggcagaaccaucagcgagaagcugagaagcggcuacgagaccuucaaggugaucgagggcuggagcaagcccaacagcaagcugcagaucaacagacaggugaucguggagagaggcaacagaagcggcuacagcggcaucuucagcguggagggcaagagcugcaucaacagaugcuucuacguggagcugaucagaggcaagaaggaggagaccgaggugugguggaccagcaacagcaucgugguguucugcggcaccagcggcaccuacggcaccggcagcuggcccgacggcgccgacaucaaccugaugcccaucuga

SEQ ID NO: 175952 - RNA, 1410 nt, Artificial Sequence; identical to SEQ ID NO: 174214
  derived and/or modified CDS sequence (opt4) from neuraminidase__InfluenzaA__ABU92765

SEQ ID NO: 175953 - RNA, 1410 nt, Artificial Sequence; identical to SEQ ID NO: 174214
  derived and/or modified CDS sequence (opt4) from neuraminidase__InfluenzaA__ABU92766

SEQ ID NO: 175954 - RNA, 1410 nt, Artificial Sequence; identical to SEQ ID NO: 174214
  derived and/or modified CDS sequence (opt4) from neuraminidase__InfluenzaA__ABU92767

SEQ ID NO: 175955 - RNA, 1410 nt, Artificial Sequence; identical to SEQ ID NO: 174214
  derived and/or modified CDS sequence (opt4) from neuraminidase__InfluenzaA__ABU92768

SEQ ID NO: 175956 - RNA, 1410 nt, Artificial Sequence; identical to SEQ ID NO: 174121
  derived and/or modified CDS sequence (opt4) from neuraminidase__InfluenzaA__ABU92769

SEQ ID NO: 175957 - RNA, 1410 nt, Artificial Sequence; identical to SEQ ID NO: 174313
  derived and/or modified CDS sequence (opt4) from neuraminidase__InfluenzaA__ABU92770

SEQ ID NO: 175958 - RNA, 1410 nt, Artificial Sequence
  derived and/or modified CDS sequence (opt4) from neuraminidase__InfluenzaA__ABU92771
augaaccccaaccagaagaucaucaccaucggcagcgugagccugaccaucgccaccaucugcuuccugaugcagaucgccauccuggugaccaccgugacccugcacuucaagcaguacgagugcaacagcccccccaacaaccaggugaugcugugcgagcccaccaucaucgagagaaacaucaccgagaucguguaccugaccaacaccaccaucgagaaggagaucugccccaagcuggccgaguacagaaacuggagcaagccccagugcaacaucaccggcuucgcccccuucagcaaggacaacagcaucagacugagcgccggcggcgacaucugggugaccagagagcccuacgugagcugcgaccccaacaagugcuaccaguucgcccugggccagggcaccacccugaacaacggccacagcaacgacaccgugcacgacagaacccccuacagaacccugcugaugaacgagcugggcgugcccuuccaccugggcaccaagcaggugugcaucgccuggagcagcagcagcugccacgacggcaaggccuggcugcacgugugcgugaccggcgacgacgagaacgccaccgccagcuucaucuacaacggcagacugguggacagcaucggcagcuggagcaagaagauccugagaacccaggagagcgagugcgugugcaucaacggcaccugcaccguggugaugaccgacggcagcgccagcggcaaggccgacaccaagauccuguucaucgaggagggcaagaucgugcacaccagccugcugagcggcagcgcccagcacguggaggagugcagcugcuaccccagauaccccggcgugagaugcgugugcagagacaacuggaagggcagcaacagacccaucguggacaucaacgugaaggacuacagcaucgugagcagcuacgugugcagcggccuggugggcgacacccccagaaagaacgacagcagcagcagcagccacugccuggaccccaacaacgaggagggcggccacggcgugaagggcugggccuucgacgacggcaacgacguguggaugggcagaaccaucagcgagaagcugagaagcggcuacgagaccuucaaggugaucgagggcuggagcaagcccaacagcaagcugcagaucaacagacaggugaucguggacagaggcaacagaagcggcuacagcggcaucuucagcguggagggcaagagcugcaucaacagaugcuucuacguggagcugaucagaggcagaaagcaggagaccgaggugcuguggaccagcaacagcaucgugguguucugcggcaccagcggcaccuacggcaccggcagcuggcccgacggcgccgacaucaaccugaugcccaucuga

SEQ ID NO: 175959 - RNA, 1410 nt, Artificial Sequence
  derived and/or modified CDS sequence (opt4) from neuraminidase__InfluenzaA__ABU92772
augaaccccaaccagaagaucaucaccaucggcagcgugagccugaccaucgccaccaucugcuuccugaugcagaucgccauccuggugaccaccgugacccugcacuucaagcaguacgagugcaacagcccccccaacaaccaggugaugcugugcgagcccaccaucaucgagagaaacaucaccgagaucguguaccugaccaacaccaccaucgagaaggagaucugccccaagcuggccgaguacagaaacuggagcaagccccagugcaacaucaccggcuucgcccccuucagcaaggacaacagcaucagacugagcgccggcggcgacaucugggugaccagagagcccuacgugagcugcgaccccgacaagugcuaccaguucgcccugggccagggcaccacccugaacaacggccacagcaacgacaccgugcacgacagaacccccuacagaacccugcugaugaacgagcugggcgugcccuuccaccugggcaccagacaggugugcaucgccuggagcagcagcagcugccacgacggcaaggccuggcugcacgugugcgugaccggcgacgacgagaacgccaccgccagcuucaucuacaacggcagacugguggacagcaucggcagcuggagcaagaacauccugagaacccaggagagcgagugcgugugcaucaacggcaccugcaccguggugaugaccgacggcagcgccagcggcaaggccgacaccaagauccuguucaucgaggagggcaagaucgugcacaucagcacccugagcggcagcgcccagcacguggaggagugcagcugcuaccccagauaccccggcgugagaugcgugugcagagacaacuggaagggcagcaacagacccaucguggacaucaacgugaaggacuacagcaucgugagcagcuacgugugcagcggccuggugggcgacacccccagaaagaacgacagcuucagcagcagccacugccuggaccccaacaacgaggagggcggccacggcgugaagggcugggccuucgacgacggcaacgacguguggaugggcagaaccaucagcgagaagcugagaagcggcuacgagaccuucaaggugaucgagggcuggagcaagcccaacagcaagcugcagaucaacagacaggugaucguggagagaggcaacagaagcggcuacagcggcaucuucagcguggagggcaagagcugcaucaacagaugcuucuacguggagcugaucagaggcagaaaggaggagaccgaggugugguggaccagcaacagcaucgugguguucugcggcaccagcggcaccuacggcaccggcagcuggcccgacggcgccgacaucaaccugaugcccaucuga

SEQ ID NO: 175960 - RNA, 1410 nt, Artificial Sequence
  derived and/or modified CDS sequence (opt4) from neuraminidase__InfluenzaA__ABU92773
augaaccccaaccagaagaucaucaccaucggcagcgugagccugaccaucgccaccaucugcuuccugaugcagaucgccauccuggugaccaccgugacccugcacuucaagcaguacgagugcaacagcccccccaacaaccaggugaugcugugcgagcccaccaucaucgagagaaacaucaccgagaccguguaccugaccaacaccaccaucgagaaggagaucugccccaagcuggccgaguacagaaacuggagcaagccccagugcaacaucaccggcuucgcccccuucagcaaggacaacagcaucagacugagcgccggcggcgacaucugggugaccagagagcccuacgugagcugcgaccccgacaagugcuaccaguucgcccugggccagggcaccacccugaacaacggccacagcaacgacaccgugcacgacagaacccccuacagaacccugcugaugaacgagcugggcgugcccuuccaccugggcaccagacaggugugcaucgccuggagcagcagcagcugccacgacggcaaggccuggcugcacgugugcgugaccggcgacgacgagaacgccaccgccagcuucaucuacaacggcagacugguggacagcaucggcagcuggagcaagaagauccugagaacccaggagagcgagugcgugugcaucaacggcaccugcaccguggugaugaccgacggcagcgccagcggcaaggccgacaccaagauccuguucaucgaggagggcaagaucgugcacaucagcacccugagcggcagcgcccagcacguggaggagugcagcugcuaccccagauaccccggcgugagaugcgugugcagagacaacuggaagggcagcaacagacccaucguggacaucaacgugaaggacuacagcaucgugagcagcuacgugugcagcggccuggugggcgacacccccagaaagaacgacagcuucagcagcagccacugccuggaccccaacaacgaggagggcggccacggcgugaagggcugggccuucgacgacggcaacgacguguggaugggcagaaccaucagcgagaagcugagaagcggcuacgagaccuucaaggugaucgagggcuggagcaagcccaacagcaagcugcagaccaacagacaggugaucguggagagaggcaacagaagcggcuacagcggcaucuucagcguggagggcaagagcugcaucaacagaugcuucuacguggagcugaucagaggcagaaaggaggagaccgaggugugguggaccagcaacagcaucgugguguucugcggcaccagcggcaccuacggcaccggcagcuggcccgacggcgccgacaucaaccugaugcccaucuga

SEQ ID NO: 175961 - RNA, 1410 nt, Artificial Sequence
  derived and/or modified CDS sequence (opt4) from neuraminidase__InfluenzaA__ABU92774
augaaccccaacagaaagaucaucaccaucggcagcgugagccugaccaucgccaccaucugcuuccugaugcagaucgccauccuggugaccaccgugacccugcacuucaagcaguacgagugcaacagcccccccaacaaccaggugaugcugugcgagcccaccaucaucgagagaaacaucaccgagaccguguaccugaccaacaccaccaucgagaaggagaucugccccaagcuggccgaguacagaaacuggagcaagccccagugcaacaucaccggcuucgcccccuucagcaaggacaacagcaucagacugagcgccggcggcgacaucugggugaccagagagcccuacgugagcugcgaccccgacaagugcuaccaguucgcccugggccagggcaccacccugaacaacggccacagcaacgacaccgugcacgacagaacccccuacagaacccugcugaugaacgagcugggcgugcccuuccaccugggcaccagacaggugugcaucgccuggagcagcagcagcugccacgacggcaaggccuggcugcacgugugcgugaccggcgacgacgagaacgccaccgccagcuucaucuacaacggcagacugguggacagcaucggcagcuggagcaagaagauccugagaacccaggagagcgagugcgugugcaucaacggcaccugcaccguggugaugaccgacggcagcgccagcggcaaggccgacaccaagauccuguucaucgaggagggcaagaucgugcacaucagcacccugagcggcagcgcccagcacguggaggagugcagcugcuaccccagauaccccggcgugagaugcgugugcagagacaacuggaagggcagcaacagacccaucguggacaucaacgugaaggacuacagcaucgugagcagcuacgugugcagcggccuggugggcgacacccccagaaagaacgacagcuucagcagcagccacugccuggaccccaacaacgaggagggcggccacggcgugaagggcugggccuucgacgacggcaacgacguguggaugggcagaaccaucagcgagaagcugagaagcggcuacgagaccuucaaggugaucgagggcuggagcaagcccaacagcaagcugcagaccaacagacaggugaucguggagagaggcaacagaagcggcuacagcggcaucuucagcguggagggcaagagcugcaucaacagaugcuucuacguggagcugaucagaggcagaaaggaggagaccgaggugugguggaccagcaacagcaucgugguguucugcggcaccagcggcaccuacggcaccggcagcuggcccgacggcgccgacaucaaccugaugcccaucuga

SEQ ID NO: 175962 - RNA, 1410 nt, Artificial Sequence
  derived and/or modified CDS sequence (opt4) from neuraminidase__InfluenzaA__ABU92775
augaaccccaaccagaagaucaucaccaucggcagcgugagccugaccaucgccaccaucugcuuccugaugcagaucgccauccuggugaccaccgugacccugcacuucaagcaguacgagugcaacagcccccccaacaaccaggugaugcugugcgagcccaccaucaucgagagaaacaucaccgagaucguguaccugaccaacaccaccaucgagaaggagaucugccccaagcuggccgaguacagaaacuggagcaagccccagugcaacaucaccggcuucgcccccuucagcaaggacaacagcaucagacugagcgccggcggcgacaucugggugaccagagagcccuacgugagcugcgaccccgacaagugcuaccaguucgcccugggccagggcaccacccugaacaacggccacagcaacgacaccgugcacgacagaacccccuacagaacccugcugaugaacgagcugggcgugcccuuccaccugggcaccagacaggugugcaucgccuggagcagcagcagcugccacgacggcaaggccuggcugcacgugugcgugaccggcgacgacaagaacgccaccgccagcuucaucuacaacggcagacugguggacagcaucggcagcuggagcaagaagauccugagaacccaggagagcgagugcgugugcaucaacggcaccugcaccguggugaugaccgacggcagcgccagcggcaaggccgacaccaagauccuguucaucgaggagggcaagaucgugcacaucagcacccugagcggcagcgcccagcacguggaggagugcagcugcuaccccagauaccccggcgugagaugcgugugcagagacaacuggaagggcagcaacagacccaucguggacaucaacgugaaggacuacagcaucgugagcagcuacgugugcagcggccuggugggcgacacccccagaaagaacgacagcuucagcagcagccacugccuggaccccaacaacgaggagggcggccacggcgugaagggcugggccuucgacgacggcaacgacguguggaugggcagaaccaucagcgagaagcugagaagcggcuacgagaccuucaaggugaucgagggcuggagcaagcccaacagcaagcugcagaucaacagacaggugaucguggagagaggcaacagaagcggcuacagcggcaucuucagcguggagggcaagagcugcaucaacagaugcuucuacguggagcugaucagaggcagaaaggaggagaccgaggugugguggaccagcaacagcaucgugguguucugcggcaccagcggcaccuacggcaccggcagcuggcccgacggcgccgacaucaaccugaugcccaucuga

SEQ ID NO: 175963 - RNA, 1410 nt, Artificial Sequence; identical to SEQ ID NO: 174387
  derived and/or modified CDS sequence (opt4) from neuraminidase__InfluenzaA__ABU92777

SEQ ID NO: 175964 - RNA, 1410 nt, Artificial Sequence
  derived and/or modified CDS sequence (opt4) from neuraminidase__InfluenzaA__ABU92778
augaaccccaaccagaagaucaucaccaucggcagcgugagccugaccaucagcaccaucugcuucuucaugcagaucgccauccugaucaccaccgugacccugcacuucaagcaguacgaguucaacagcccccccaacaaccaggugaugcugugcgagcccaccaucaucgagagaaacaucaccgagaucguguaccugaccaacaccaccaucgagaaggaggugugccccaagcuggccgaguacagaaacuggagcaagccccagugcaacaucaccggcuucgcccccuucagcaaggacaacagcaucagacugagcgccggcggcgacaucugggugaccagagagcccuacgugagcugcgaccccgacaagugcuaccaguucgcccugggccagggcaccacccugaacaacgugcacagcaacgacaccgugcacgacagaacccccuacagaacccugcugaugaacgagcugggcgugcccuuccaccugggcaccaagcaggugugcaucgccuggagcagcagcagcugccacgacggcaaggccuggcugcacgugugcgugaccggcgacgacaagaacgccaccgccagcuucaucuacaacggcagacugguggacagcaucgugagcuggagcaaggagauccugagaacccaggagagcgagugcgugugcaucaacggcaccugcaccguggugaugaccgacggcagcgccagcggcaaggccgacaccaagauccuguucaucgaggagggcaagaucgugcacaccagcacccugagcggcagcgcccagcacguggaggagugcagcugcuaccccagauaccccggcgugagaugcgugugcagagacaacuggaagggcagcaacagacccaucguggacaucaacaucaaggacuacagcaucgugagcagcuacgugugcagcggccuggugggcgacacccccagaaagaacgacagcagcagcagcagccacugccuggaccccaacaacgaggagggcggccacggcgugaagggcugggccuucgacgacggcaacgacguguggaugggcagaaccaucagcgagaagcugagaagcggcuacgagaccuucaaggugaucgagggcuggagcaaccccaacagcaagcugcagaucaacagacaggugaucguggacagaggcaacagaagcggcuacagcggcaucuucagcguggagggcaagagcugcaucaacagaugcuucuacguggagcugaucagaggcagaaaggaggagaccgaggugcuguggaccagcaacagcaucgugguguucugcggcaccagcggcaccuacggcaccggcagcuggcccgacggcgccgacaucaaccugaugcccaucuga

SEQ ID NO: 175965 - RNA, 1410 nt, Artificial Sequence; identical to SEQ ID NO: 174285
  derived and/or modified CDS sequence (opt4) from neuraminidase__InfluenzaA__ABU92779

SEQ ID NO: 175966 - RNA, 1410 nt, Artificial Sequence; identical to SEQ ID NO: 174285
  derived and/or modified CDS sequence (opt4) from neuraminidase__InfluenzaA__ABU92780

SEQ ID NO: 175967 - RNA, 1410 nt, Artificial Sequence; identical to SEQ ID NO: 174285
  derived and/or modified CDS sequence (opt4) from neuraminidase__InfluenzaA__ABU92781

SEQ ID NO: 175968 - RNA, 1410 nt, Artificial Sequence
  derived and/or modified CDS sequence (opt4) from neuraminidase__InfluenzaA__ABU92782
augaaccccaaccagaagaucaucaccaucggcagcgugagccugaccaucgccgccaucugcuuccugaugcagaucgccauccuggugaccaccgugacccugcacuucaagcagcacgagugcaacagcccccccaacaaccaggugaugcugugcgagcccaccaucaucgagagaaacaucaccgagaucguguaccugaccaacaccaccaucgagaaggagaucugccccaagcuggccgaguacagaaacuggagcaagccccagugcaacaucaccggcuucgcccccuucagcaaggacaacagcaucagacugagcgccggcggcgacaucugggugaccagagagcccuacgugagcugcgaccccgacaagugcuaccaguucgcccugggccagggcaccacccugaacaacggccacagcaacgacaccgugcacgacagaacccccuacagaacccugcugaugaacgagcugggcgugcccuuccaccugggcaccagacaggugugcaucgccuggagcagcagcagcugccacgacggcaaggccuggcugcacgugugcgugaccggcgacgacaagaacgccaccgccagcuucaucuacaacggcagacugguggacagcaucggcagcuggagcaagaagauccugagaacccaggagagcgagugcgugugcaucaacggcaccugcaccguggugaugaccgacggcagcgccagcggcaaggccgacaccaagauccuguucaucgaggagggcaagaucgugcacaucagcacccugagcggcagcgcccagcacguggaggagugcagcugcuaccccagauaccccggcgugagaugcgugugcagagacaacuggaagggcagcaacagacccaucguggacaucaacgugaaggacuacagcaucgugagcagcuacgugugcagcggccuggugggcgacacccccagaaagaacgacagcuucagcagcagccacugccuggaccccaacaacgaggagggcggccacggcgugaagggcugggccuucgacgacggcaacgacguguggaugggcagaaccaucagcgagaagcugagaagcggcuacgagaccuucaaggugaucgagggcuggagcaagcccaacagcaagcugcagaucaacagacaggugaucguggagagaggcaacagaagcggcuacagcggcaucuucagcguggagggcaagagcugcaucaacagaugcuucuacguggagcugaucagaggcagaagagaggagaccgaggugugguggaccagcaacagcaucgugguguucugcggcaccagcggcaccuacggcaccggcagcuggcccgacggcgccgacaucaaccugaugcccaucuga

SEQ ID NO: 175969 - RNA, 1410 nt, Artificial Sequence; identical to SEQ ID NO: 174285
  derived and/or modified CDS sequence (opt4) from neuraminidase__InfluenzaA__ABU92783

SEQ ID NO: 175970 - RNA, 1410 nt, Artificial Sequence; identical to SEQ ID NO: 174285
  derived and/or modified CDS sequence (opt4) from neuraminidase__InfluenzaA__ABU92784

SEQ ID NO: 175971 - RNA, 1410 nt, Artificial Sequence; identical to SEQ ID NO: 174285
  derived and/or modified CDS sequence (opt4) from neuraminidase__InfluenzaA__ABU92785

SEQ ID NO: 175972 - RNA, 1410 nt, Artificial Sequence; identical to SEQ ID NO: 174285
  derived and/or modified CDS sequence (opt4) from neuraminidase__InfluenzaA__ABU92786

SEQ ID NO: 175973 - RNA, 1410 nt, Artificial Sequence
  derived and/or modified CDS sequence (opt4) from neuraminidase__InfluenzaA__ABU92787
augaaccccaaccagaagaucaucaccaucggcagcgugagccugaccaucgccgccaucugcuuccugaugcagaucgccauccuggugaccaccgugacccugcacuucaagcagcacgagugcaacagcccccccaacaaccaggugaugcugugcgagcccaccaucaucgagagaaacaucaccgagaucguguaccugaccaacaccaccaucgagaaggagaucugccccaagcuggccgaguacagaaacuggagcaagccccagugcaacaucaccggcuucgcccccuucagcaaggacaacagcaucagacugagcgccggcggcgacaucugggugaccagagagcccuacgugagcugcgaccccgacaagugcuaccaguucgcccugggccagggcaccacccugaacaacggccacagcaacgacaccgugcacgacagaacccccuacagaacccugcugaugaacgagcugggcgugcccuuccaccugggcaccagacaggugugcaucgccuggagcagcagcagcugccacgacggcaaggccuggcugcacgugugcgugaccggcgacgacaagaacgccaccgccagcuucaucuacaacggcagacugguggacagcaucggcagcuggagcaagaagauccugagaacccaggagagcgagugcgugugcaucaacggcaccugcaccguggugaugaccgacggcagcgccagcggcaaggccgacaccaagauccuguucaucgaggagggcaagaucgugcacaucagcacccugagcggcagcgcccagcacguggaggagugcagcugcuaccccagacaccccggcgugagaugcgugugcagagacaacuggaagggcagcaacagacccaucguggacaucaacgugaaggacuacagcaucgugagcagcuacgugugcagcggccuggugggcgacacccccagaaagaacgacagcuucagcagcagccacugccuggaccccaacaacgaggagggcggccacggcgugaagggcugggccuucgacgacggcaacgacguguggaugggcagaaccaucagcgagaagcugagaagcggcuacgagaccuucaaggugaucgagggcuggagcaagcccaacagcaagcugcagaucaacagacaggugaucguggagagaggcaacagaagcggcuacagcggcaucuucagcguggagggcaagagcugcaucaacagaugcuucuacguggagcugaucagaggcagaaaggaggagaccgaggugugguggaccagcaacagcaucgugguguucugcggcaccagcggcaccuacggcaccggcagcuggcccgacggcgccgacaucaaccugaugcccaucuga

SEQ ID NO: 175974 - RNA, 1410 nt, Artificial Sequence
  derived and/or modified CDS sequence (opt4) from neuraminidase__InfluenzaA__ABU92789
augaaccccaaccagaagaucaucaccaucggcagcgugagccugaccaucagcaccaucugcuucuucaugcagaucgccauccugaucaccaccgugacccugcacuucaagcaguacgaguucaaccccccccccaacaaccaggugaugcugugcgagcccaccaucaucgagagaaacaucaccgagaucguguaccugaccaacaccaccaucgagaaggagaucugccccaagcuggccgaguacagaaacuggagcaagccccagugcagcaucaccggcuucgcccccuucagcaaggacaacagcaucagacugagcgccggcggcgacaucugggugaccagagagcccuacgugagcugcgaccccgacaagugcuaccaguucgcccugggccagggcaccacccugaacaacgugcacagcaacgacaccgugcacgacagaacccccuacagaacccugcugaugaacgagcugggcgugcccuuccaccugggcaccaagcaggugugcaucgccuggagcagcagcagcugccacgacggcaaggccuggcugcacgugugcgugaccggcgacgacaagaacgccaccgccagcuucaucuacaacggcagacugguggacagcaucgugagcuggagcaaggagauccugagaacccaggagagcgagugcgugugcaucaacggcaccugcaccguggugaugaccgacggcagcgccagcggcaaggccgacaccaagauccuguucaucgaggagggcaagaucgugcacaccagcacccugagcggcagcgcccagcacguggaggagugcagcugcuaccccagauaccccggcgugagaugcgugugcagagacaacuggaagggcagcaacagacccaucguggacaucaacaucaaggacuacagcaucgugagcagcuacgugugcagcggccuggugggcgacacccccagaaagaacgacagcagcagcagcagccacugccuggaccccaacaacgaggagggcggccacggcgugaagggcugggccuucgacgacggcaacgacguguggaugggcagaaccaucagcgagaagagcagaagcggcuacgagaccuucaaggugaucgagggcuggagcaaccccaacagcaagcugcagaucaacagacaggugaucguggacagaggcaacagaagcggcuacagcggcaucuucagcguggagggcaagagcugcaucaacagaugcuucuacguggagcugaucagaggcagaaaggaggagaccgaggugcuguggaccagcaacagcaucgugguguucugcggcaccagcggcaccuacggcaccggcagcuggcccgacggcgccgacaucaaccugaugcccaucuga

SEQ ID NO: 175975 - RNA, 1410 nt, Artificial Sequence; identical to SEQ ID NO: 174387
  derived and/or modified CDS sequence (opt4) from neuraminidase__InfluenzaA__ABU92790

SEQ ID NO: 175976 - RNA, 1410 nt, Artificial Sequence
  derived and/or modified CDS sequence (opt4) from neuraminidase__InfluenzaA__ABU92791
augaaccccaaccagaagaucaucaccaucggcagcgugagccugaccaucagcaccaucugcuucuucaugcagaucgccauccugaucaccaccgugacccugcacuucaagcaguacgaguucaacagcccccccaacaaccaggugaugcugugcgagcccaccaucaucgagagaaacaucaccgagaucguguaccugaccaacaccaccaucgagaaggagaucugccccaagcuggccgaguacagaaacuggagcaagccccagugcgacaucaccggcuucgcccccuucagcaaggacaacagcaucagacugagcgccggcggcgacaucugggugaccagagagcccuacgugagcugcgaccccgacaagugcuaccaguucgcccugggccagggcaccacccugaacaacgugcacagcaacgacaccgugcacgacagaacccccuacagaacccugcugaugaacgagcugggcgugcccuuccaccugggcaccaagcaggugugcaucgccuggagcagcagcagcugccacgacggcaaggccuggcugcacgugugcgugaccggcgacgacaagaacgccaccgccagcuucaucuacaacggcagacugguggacagcaucgugagcuggagcaagaagauccugagaacccaggagagcgagugcgugugcaucaacggcaccugcaccguggugaugaccgacggcagcgccagcggcaaggccgacaccaagauccuguucaucgaggagggcaagaucgugcacaccagcacccugagcggcagcgcccagcacguggaggagugcagcugcuaccccagauaccccggcgugagaugcgugugcagagacaacuggaagggcagcaacagacccaucguggacaucaacaucaaggacuacagcaccgugagcagcuacgugugcagcggccuggugggcgacacccccagaaagaacgacagcagcagcagcagccacugccuggaccccaacaacgaggagggcggccacggcgugaagggcugggccuucgacgacggcaacgacguguggaugggcagaaccaucagcgagaagcugagaagcggcuacgagaccuucaaggugaucgagggcuggagcaaccccaacagcaagcugcagaucaacagacaggugaucguggacagaggcaacagaagcggcuacagcggcaucuucagcguggagggcaagagcugcaucaacagaugcuucuacguggagcugaucagaggcagaaaggaggagaccgaggugcuguggaccagcaacagcaucgugguguucugcggcaccagcggcaccuacggcaccggcagcuggcccgacggcgccgacaucaaccugaugcccaucuga

SEQ ID NO: 175977 - RNA, 1410 nt, Artificial Sequence
  derived and/or modified CDS sequence (opt4) from neuraminidase__InfluenzaA__ABU92792
augaaccccaaccagaagaucaucaccaucggcagcgugagccugaccaucagcaccaucugcuucuucaugcagaucgccauccugaucaccaccgugacccugcacuucaagcaguacguguucaacagcccccccaacaaccaggugaugcugugcgagcccaccaucaucgagagaaacaucaccgagaucguguaccugaccaacaccaccaucgagaaggagaucugccccaagcuggccgaguacagaaacuggagcaagccccagugcgacaucaccggcuucgcccccuucagcaaggacaacagcaucagacugagcgccggcggcgacaucugggugaccagagagcccuacgugagcugcgaccccgacaagugcuaccaguucgcccugggccagggcaccacccugaacaacgugcacagcaacgacaccgugcacgacagaacccccuacagaacccugcugaugaacgagcugggcgugcccuuccaccugggcaccaagcaggugugcaucgccuggagcagcagcagcugccacgacggcaaggccuggcugcacgugugcgugaccggcgacgacaagaacgccaccgccagcuucaucuacaacggcagacugguggacagcguggugagcuggagcaaggacauccugagaacccaggagagcgagugcgugugcaucaacggcaccugcaccguggugaugaccgacggcagcgccagcggcaaggccgacaccaagauccuguucaucgaggagggcaagaucgugcacaccagcacccugagcggcagcgcccagcacguggaggagugcagcugcuaccccagauaccccggcgugagaugcgugugcagagacaacuggaagggcagcaacagacccaucguggacaucaacaucaagaacuacagcaucgugagcagcuacgugugcagcggccuggugggcgacacccccagaaagaccgacagcagcagcagcagccacugccuggaccccaacaacgaggagggcggccacggcgugaagggcugggccuucgacgacggcaacgacguguggaugggcagaaccaucagcgagaagcugagacugggcuacgagaccuucaaggugaucgagggcuggagcaaccccaacagcaagcugcagaucaacagacaggugaucguggacagaggcaacagaagcggcuacagcggcaucuucagcguggagggcaagagcugcaucaacagaugcuucuacguggagcugaucagaggcagaaaggaggagaccgaggugcuguggaccagcaacagcaucgugguguucugcggcaccagcggcaccuacggcaccggcagcuggcccgacggcgccgacaucaaccugaugcccaucuga

SEQ ID NO: 175978 - RNA, 1410 nt, Artificial Sequence; identical to SEQ ID NO: 174867
  derived and/or modified CDS sequence (opt4) from neuraminidase__InfluenzaA__ABU92793

SEQ ID NO: 175979 - RNA, 1410 nt, Artificial Sequence; identical to SEQ ID NO: 175974
  derived and/or modified CDS sequence (opt4) from neuraminidase__InfluenzaA__ABU92794

SEQ ID NO: 175980 - RNA, 1410 nt, Artificial Sequence; identical to SEQ ID NO: 174285
  derived and/or modified CDS sequence (opt4) from neuraminidase__InfluenzaA__ABU92795

SEQ ID NO: 175981 - RNA, 1410 nt, Artificial Sequence; identical to SEQ ID NO: 174285
  derived and/or modified CDS sequence (opt4) from neuraminidase__InfluenzaA__ABU92796

SEQ ID NO: 175982 - RNA, 1410 nt, Artificial Sequence
  derived and/or modified CDS sequence (opt4) from neuraminidase__InfluenzaA__ABU92797
augaaccccaaccagaagaucaucaccaucggcagcgugagccugaccaucgccgccaucugcuuccugaugcagaucgccauccuggugaccaccgugacccugcacuucaagcagcacgagugcaacagcccccccaacaaccaggugaugcugugcgagcccaccaucaucgagagaaacaucaccgagaucguguaccugaccaacaccaccaucgagaaggagaucugccccaagcuggccgaguacagaaacuggagcaagccccagugcaacaucaccggcuucgcccccuucagcaaggacaacagcaucagacugagcgccggcggcgacaucugggugaccagagagcccuacgugagcugcgaccccgacaagugcuaccaguucgcccugggccagggcaccacccugaacaacggccacagcaacgacaccgugcacgacagaacccccuacagaacccugcugaugaacgagcugggcgugcccuuccaccugggcaccagacaggugugcaucgccuggagcagcagcagcugccacgacggcaaggccuggcugcacgugugcgugaccggcgacgacaagaacgccaccgccagcuucaucuacaacggcagacugguggacagcaucggcagcuggagcaagagaauccugagaacccaggagagcgagugcgugugcaucaacggcaccugcaccguggugaugaccgacggcagcgccagcggcaaggccgacaccaagauccuguucaucgaggagggcaagaucgugcacaucagcacccugagcggcagcgcccagcacguggaggagugcagcugcuaccccagauaccccggcgugagaugcgugugcagagacaacuggaagggcagcaacagacccaucguggacaucaacgugaaggacuacagcaucgugagcagcuacgugugcagcggccuggugggcgacacccccagaaagaacgacagcuucagcagcagccacugccuggaccccaacaacgaggagggcggccacggcgugaagggcugggccuucgacgacggcaacgacguguggaugggcagaaccaucaacgagaagcugagaagcggcuacgagaccuucaaggugaucgagggcuggagcaagcccaacagcaagcugcagaucaacagacaggugaucguggagagaggcaacagaagcggcuacagcggcaucuucagcguggagggcaagagcugcaucaacagaugcuucuacguggagcugaucagaggcagaaaggaggagaccgaggugugguggaccagcaacagcaucgugguguucugcggcaccagcggcaccuacggcaccggcagcuggcccgacggcgccgacaucaaccugaugcccaucuga

SEQ ID NO: 175983 - RNA, 1410 nt, Artificial Sequence; identical to SEQ ID NO: 174285
  derived and/or modified CDS sequence (opt4) from neuraminidase__InfluenzaA__ABU92798

SEQ ID NO: 175984 - RNA, 1410 nt, Artificial Sequence; identical to SEQ ID NO: 174285
  derived and/or modified CDS sequence (opt4) from neuraminidase__InfluenzaA__ABU92799

SEQ ID NO: 175985 - RNA, 1410 nt, Artificial Sequence; identical to SEQ ID NO: 174285
  derived and/or modified CDS sequence (opt4) from neuraminidase__InfluenzaA__ABU92800

SEQ ID NO: 175986 - RNA, 1410 nt, Artificial Sequence
  derived and/or modified CDS sequence (opt4) from neuraminidase__InfluenzaA__ABU92801
augaaccccaaccagaagaucaucaccaucggcagcgugagccugaccaucgccgccaucugcuuccugaugcagaucgccauccuggugaccaccgugacccugcacuucaagcagcacgagugcaacagcccccccaacaaccaggugaugcugugcgagcccaccaucaucgagagaaacaucaccgagaucgugcaccugaccaacaccaccaucgagaaggagaucugccccaagcuggccgaguacagaaacuggagcaagccccagugcaacaucaccggcuucgcccccuucagcaaggacaacagcaucagacugagcgccggcggcgacaucugggugaccagagagcccuacgugagcugcgaccccgacaagugcuaccaguucgcccugggccagggcaccacccugaacaacggccacagcaacgacaccgugcacgacagaacccccuacagaacccugcugaugaacgagcugggcgugcccuuccaccugggcaccagacaggugugcaucgccuggagcagcagcagcugccacgacggcaaggccuggcugcacgugugcgugaccggcgacgacaagaacgccaccgccagcuucaucuacaacggcagacugguggacagcaucggcagcuggagcaagaagauccugagaacccaggagagcgagugcgugugcaucaacggcaccugcaccguggugaugaccgacggcagcgccagcggcaaggccgacaccaagauccuguucaucgaggagggcaagaucgugcacaucagcacccugagcggcagcgcccagcacguggaggagugcagcugcuaccccagauaccccggcgugagaugcgugugcagagacaacuggaagggcagcaacagacccaucguggacaucaacgugaaggacuacagcaucgugagcagcuacgugugcagcggccuggugggcgacacccccagaaagaacgacagcuucagcagcagccacugccuggaccccaacaacgaggagggcggccacggcgugaagggcugggccuucgacgacggcaacgacguguggaugggcagaaccaucagcgagaagcugagaagcggcuacgagaccuucaaggugaucgagggcuggagcaagcccaacagcaagcugcagaucaacagacaggugaucguggagagaggcaacagaagcggcuacagcggcaucuucagcguggagggcaagagcugcaucaacagaugcuucuacguggagcugaucagaggcagaaaggaggagaccgaggugugguggaccagcaacagcaucgugguguucugcggcaccagcggcaccuacggcaccggcagcuggcccgacggcgccgacaucaaccugaugcccaucuga

SEQ ID NO: 175987 - RNA, 1410 nt, Artificial Sequence; identical to SEQ ID NO: 174285
  derived and/or modified CDS sequence (opt4) from neuraminidase__InfluenzaA__ABU92802

SEQ ID NO: 175988 - RNA, 1410 nt, Artificial Sequence; identical to SEQ ID NO: 174285
  derived and/or modified CDS sequence (opt4) from neuraminidase__InfluenzaA__ABU92804

SEQ ID NO: 175989 - RNA, 1410 nt, Artificial Sequence
  derived and/or modified CDS sequence (opt4) from neuraminidase__InfluenzaA__ABU92805
augaaccccaaccagaagaucaucaccaucggcagcgugagccugaccaucagcaccaucugcuucuucaugcagaucgccauccugaucaccaccgugacccugcacuucaagcaguacgaguucaacagcccccccaacaaccaggugaugcugugcgagcccaccaucaucgagagaaacaucaccgagaucguguaccugaccaacaccaccaucgagaaggagaucugccccaagcuggccgaguacagaaacuggagcaagccccagugcaacaucaccggcuucgcccccuucagcaaggacaacagcaucagacugagcgccggcggcgacaucugggugaccagagagcccuacgugagcugcgaccccgacaagugcuaccaguucgcccugggccagggcaccacccugaacaacgugcacagcaacgacaccgugcacgacagaacccccuacagaacccugcugaugaacgagcugggcgugcccuuccaccugggcaccaagcaggugugcaucgccuggagcagcagcagcugccacgacggcaaggccuggcugcacgugugcgugaccggcgacgacgagaacgccaccgccagcuucaucuacaacggcagacugguggacagcaucgugagcuggagcaagaagauccugagaacccaggagagcgagugcgugugcaucaacggcaccugcaccguggugaugaccgacggcagcgccagcggcaaggccgacaccaagauccuguucaucgaggagggcaagaucgugcacaccagcacccugagcggcagcgcccagcacguggaggagugcagcugcuaccccagauaccccggcgugagaugcgugugcagagacaacuggaagggcagcaacagacccaucguggacaucaacaucaaggacuacagcaucgugagcagcuacgugugcagcggccuggugggcgacacccccagaaagaacgacagcagcagcagcagccacugccuggaccccaacaacgaggagggcggccacggcgugaagggcugggccuucgacgacggcaacgacguguggaugggcagaaccaucagcgagaagcugagaagcggcuacgagaccuucaaggugaucgagggcuggagcaaccccaacagcaagcugcagaucaacagacaggugaucguggacagaggcaacagaagcggcuacagcggcaucuucagcguggagggcaagagcugcaucaacagaugcuucuacguggagcugaucagaggcagaaagcaggagaccgaggugcuguggaccagcaacagcaucgugguguucugcggcaccagcggcaccuacggcaccggcagcuggcccgacggcgccgacaucaaccugaugcccaucuga

SEQ ID NO: 175990 - RNA, 1410 nt, Artificial Sequence; identical to SEQ ID NO: 175989
  derived and/or modified CDS sequence (opt4) from neuraminidase__InfluenzaA__ABU92806

SEQ ID NO: 175991 - RNA, 1410 nt, Artificial Sequence
  derived and/or modified CDS sequence (opt4) from neuraminidase__InfluenzaA__ABU92808
augaaccccaaccagaagaucaucaccaucggcagcgugagccugaccaucgccaccaucugcuuccugaugcagaucaccauccuggugaccaccgugacccugcacuucaagcaguacgagugcaacagcccccccaacaaccaggugaugcugugcgagcccaccaucaucgagagaaacaucaccgagaucguguaccugaccaacaccaccaucgagaaggagaucugccccaagcuggccgaguacagaaacuggagcaagccccagugcaacaucaccggcuucgcccccuucagcaaggacaacagcaucagacugagcgccggcggcgacaucugggugaccagagagcccuacgugagcugcgaccccgacaagugcuaccaguucgcccugggccagggcaccacccugaacaacggccacagcaacgacaccgugcacgacagaacccccuacagaacccugcugaugaacgagcugggcgugcccuuccaccugggcaccagacaggugugcaucgccuggagcagcagcagcugccacgacggcaaggccuggcugcacgugugcgugaccggcgacgacaagaacgccaccgccagcuucaucuacaacggcagacugguggacagcaucggcagcuggagcaagaagauccugagaacccaggagagcgagugcgugugcaucaacggcaccugcaccguggugaugaccgacggcagcgccagcggcaaggccgacaccaagauccuguucaucgaggagggcaagaucauccacaucagcacccugagcggcagcgcccagcacguggaggagugcagcugcuaccccagauaccccggcgugagaugcgugugcagagacaacuggaagggcagcaacagacccaucguggacaucaacgugaaggacuacagcaucgugagcagcuacgugugcagcggccuggugggcgacacccccagaaagaacgacagcagcagcagcagccacugccuggaccccaacaacgaggagggcggccacggcgugaagggcugggccuucgacgacggcaacgacguguggaugggcagaaccaucagcgagaagcugagaagcggcuacgagaccuucaaggugaucgagggcuggagcaagcccaacagcaagcugcagaucaacagacaggugaucguggagagaggcaacagaagcggcuacagcggcaucuucagcguggagggcaagagcugcaucaacagaugcuucuacguggagcugaucagaggcagaaaggaggagaccgaggugugguggaccagcaacagcaucgugguguucugcggcaccagcggcaccuacggcaccggcagcuggcccgacggcgccgacaucaaccugaugcccaucuga

SEQ ID NO: 175992 - RNA, 1410 nt, Artificial Sequence
  derived and/or modified CDS sequence (opt4) from neuraminidase__InfluenzaA__ABU92809
augaaccccaaccagaagaucaucaccaucggcagcgugagccugaccaucagcaccaucugcuucuucaugcagaucgccauccugaucaccaccgugacccugcacuucaagcaguacgaguucaacagcccccccaacaaccaggugaugcugugcgagcccaccaucaucgagagaaacaucaccgagaucguguaccugaccaacaccaccaucgagaaggagaucugccccaagcuggccgaguacagaaacuggagcaagccccagugcaacaucaccggcuucgcccccuucagcaaggacaacagcaucagacugagcgccggcggcgacaucugggugaccagagagcccuacgugagcugcgaccccgacaagugcuaccaguucgcccugggccagggcaccacccugaacaacgugcacagcaacgacaccgugcacgacagaacccccuacagaacccugcugaugaacgagcugggcgugcccuuccaccugggcaccaagcaggugugcaucgccuggagcagcagcagcugccacgacggcaaggccuggcugcacgugugcgugaccggcgacgacaagaacgccaccgccagcuucaucuacaacggcagacugguggacagcaucgugagcuggagcaaggagauccugagaacccaggagagcgagugcgugugcaucaacggcaccugcaccguggugaugaccgacggcagcgccagcggcaaggccgacaccaagauccuguucaucgaggagggcaagaucgugcacaccagcacccugagcggcagcgcccagcacguggaggagugcagcugcuaccccagauaccccggcgugagaugcgugugcagagacaacuggaagggcagcaacagacccaucguggacaucaacaucaaggacuacagcaucgugagcagcuacgugugcagcggccuggugggcgacacccccagaaagaacgacagcagcagcagcggccacugccuggaccccaacaacgaggagggcggccacggcgugaagggcugggccuucgacgacggcaacgacguguggaugggcagaaccaucagcgagaagcugagaagcggcuacgagaccuucaaggugaucgagggcuggagcaaccccaacagcaagcugcagaucaacagacaggugaucguggacagaggcaacagaagcggcuacagcggcaucuucagcguggagggcaagagcugcaucaacagaugcuucuacguggagcugaucagaggcagaaaggaggagaccgacgugcuguggaccagcaacagcaucgugguguucugcggcaccagcggcaccuacggcaccggcagcuggcccgacggcgccgacaucaaccugaugcccaucuga

SEQ ID NO: 175993 - RNA, 1410 nt, Artificial Sequence
  derived and/or modified CDS sequence (opt4) from neuraminidase__InfluenzaA__ABU92810
augaaccccaaccagaagaucaucaccaucggcagcgugagccugaccaucgccgccaucugcuuccugaugcagaucgccauccuggugaccaccgugacccugcacuucaagcagcacgagugcaacagcccccccaacaaccaggugaugcugugcgagcccaccaucaucgagagaaacaucaccgagaucguguaccugaccaacaccaccaucgagaaggagaucugccccaagcuggccgaguacagaaacuggagcaagccccagugcaacaucaccggcuucgcccccuucagcaaggacaacagcaucagacugagcgccggcggcgacaucugggugaccagagagcccuacgugagcugcgaccccgacaagugcuaccaguucgcccugggccagggcaccacccugaacaacggccacagcaacgacaccgugcacgacagaacccccuacagaacccugcugaugaacgagcugggcgugcccuuccaccugggcaccagacaggugugcaucgccuggagcagcagcagcugccacgacggcaaggccuggcugcacgugugcgugaccggcgacgacaagaacgccaccgccagcuucaucuacaacggcagacugguggacagcaucggcagcuggagcaagaagauccugagaacccaggagagcgagugcgugugcaucaacggcaccugcaccguggugaugaccgacggcagcgccagcggcaaggccgacaccaagauccuguucaucgaggagggcaagaucgugcacaucagcacccugagcggcagcgcccagcacguggaggagugcagcugcuaccccagauaccccggcgugagaugcgugugcagagacaacuggaagggcagcaacagacccaucguggacaucaacgugaaggacuacagcaucgugagcagcuacgugugcagcggccuggugggcgacacccccagaaagaacgacagcuucagcagcagccacugccuggaccccaacaacgaggagggcggccacggcgugaagggcugggccuucgacgacggcaacgacguguggaugggcagaaccaucagcgagaagcugagaagcggcuacgagaccuucaaggugaucgagggcuggagcaagcccaacagcaagcugcagaucaacagacaggugaucguggagggcggcaacagaagcggcuacagcggcaucuucagcguggagggcaagagcugcaucaacagaugcuucuacguggagcugaucagaggcagaaaggaggagaccgaggugugguggaccagcaacagcaucgugguguucugcggcaccagcggcaccuacggcaccggcagcuggcccgacggcgccgacaucaaccugaugcccaucuga

SEQ ID NO: 175994 - RNA, 1410 nt, Artificial Sequence
  derived and/or modified CDS sequence (opt4) from neuraminidase__InfluenzaA__ABU92811
augaaccccaaccagaagaucaucaccaucggcagcgugagccugaccaucgccgccaucugcuuccugaugcagaucgccauccuggugaccaccgugacccugcacuucaagcagcacgagugcaacagcccccccaacaaccaggugaugcugugcgagcccaccaugaucgagagaaacaucaccgagaucguguaccugaccaacaccaccaucgagaaggagaucugccccaagcuggccgaguacagaaacuggagcaagccccagugcaacaucaccggcuucgcccccuucagcaaggacaacagcaucagacugagcgccgugggcgacaucugggugaccagagagcccuacgugagcugcgaccccgacaagugcuaccaguucgcccugggccagggcaccacccugaacaacggccacagcaacgacaccgugcacgacagaacccccuacagaacccugcugaugaacgagcugggcgugcccuuccaccugggcaccagacaggugugcaucgccuggagcagcagcagcugccacgacggcaaggccuggcugcacgugugcgugaccggcgacgacaagaacgccaccgccagcuucaucuacaacggcagacugguggacagcaucggcagcuggagcaagaagauccugagaacccaggagagcgagugcgugugcaucaacggcaccugcaccguggugaugaccgacggcagcgccagcggcaaggccgacaccaagauccuguucaucgaggagggcaagaucgugcacaucagcacccugagcggcagcgcccagcacguggaggagugcagcugcuaccccagauaccccggcgugagaugcgugugcagagacaacuggaagggcagcaacagacccaucguggacaucaacgugaaggacuacagcaucgugagcagcuacgugugcagcggccuggugggcgacacccccagaaagaacgacagcuucagcagcagccacugccuggaccccaacaacgaggagggcggccacggcgugaagggcugggccuucgacgacggcaacgacguguggaugggcagaaccaucagcgagaagcugagaagcggcuacgagaccuucaaggugaucgagggcuggagcaagcccaacagcaagcugcagaucaacagacaggugaucguggagagaggcaacagaagcggcuacagcggcaucuucagcguggagggcaagagcugcaucaacagaugcuucuacguggagcugaucagaggcagaaaggaggagaccgaggugugguggaccagcaacagcaucgugguguucugcggcaccagcggcaccuacggcaccggcagcuggcccgacggcgccgacaucaaccugaugcccaucuga

SEQ ID NO: 175995 - RNA, 1410 nt, Artificial Sequence; identical to SEQ ID NO: 174285
  derived and/or modified CDS sequence (opt4) from neuraminidase__InfluenzaA__ABU92814

SEQ ID NO: 175996 - RNA, 1410 nt, Artificial Sequence; identical to SEQ ID NO: 174774
  derived and/or modified CDS sequence (opt4) from neuraminidase__InfluenzaA__ABU92815

SEQ ID NO: 175997 - RNA, 1410 nt, Artificial Sequence; identical to SEQ ID NO: 174285
  derived and/or modified CDS sequence (opt4) from neuraminidase__InfluenzaA__ABU92816

SEQ ID NO: 175998 - RNA, 1410 nt, Artificial Sequence
  derived and/or modified CDS sequence (opt4) from neuraminidase__InfluenzaA__ABU92817
augaaccccaaccagaagaucaucaccaucggcagcgugagccugaccaucgccgccaucugcuuccugaugcagaucgccauccuggugaccaccgugacccugcacuucaagcagcacgagugcaacagcccccccaacaaccaggugaugcugugcgagcccaccaucaucgagagaaacaucaccgagaucguguaccugaccaacaccaccaucgagaaggagaucugccccaagcuggccgaguacagaaacuggagcaagccccagugcaacaucaccggcuucgcccccuucagcaaggacaacagcaucagacugagcgccggcggcgacaucugggugaccagagagcccuacgugagcugcgaccccgacaagugcuaccaguucgcccugggccagggcaccacccugaacaacggccacagcaacgacaccgugcacgacagaacccccuacagaacccugcugaugaacgagcugggcgugcccuuccaccugggcaccagacaggugugcaucgccuggagcagcagcagcugccacgacggcaaggccuggcugcacgugugcgugaccggcgacgacaagaacgccaccgccagcuucaucuacaacggcagacugguggacagcaucggcagcuggagcaagaagauccugagaacccaggagagcgagugcgugugcaucaacggcaccugcaccguggugaugaccgacggcagcgccagcggcaaggccgacaccaagauccuguucaucgaggagggcaagaucgugcacaucagcacccugagcggcagcgcccagcacguggaggagugcagcugcuaccccagauaccccggcgugagaugcgugugcagagacaacuggaagggcagcaacagacccaucguggacaucaacgugaaggacuacagcaucgugagcagcuacgugugcagcggccuggugggcgacacccccagaaagaacgacagcuucagcagcagccacugccuggaccccaacaacgaggagggcggccacggcgugaagggcugggccuucgacgacggcaacgacguguggaugggcagaaccaucagcgagaagcugagaagcggcuacgagaccuucaaggugaucgagggcuggagcaagcccaacagcaagcugcagaucaacagacaggugaucguggagagaggcaacagaagcggcuacagcggcaucuucagcguggagagcaagagcugcaucaacagaugcuucuacguggagcugaucagaggcagaaaggaggagaccgaggugugguggaccagcaacagcaucgugguguucugcggcaccagcggcaccuacggcaccggcagcuggcccgacggcgccgacaucaaccugaugcccaucuga

SEQ ID NO: 175999 - RNA, 1410 nt, Artificial Sequence; identical to SEQ ID NO: 174285
  derived and/or modified CDS sequence (opt4) from neuraminidase__InfluenzaA__ABU92818

SEQ ID NO: 176000 - RNA, 1410 nt, Artificial Sequence; identical to SEQ ID NO: 174285
  derived and/or modified CDS sequence (opt4) from neuraminidase__InfluenzaA__ABU92819

SEQ ID NO: 176001 - RNA, 1410 nt, Artificial Sequence; identical to SEQ ID NO: 174285
  derived and/or modified CDS sequence (opt4) from neuraminidase__InfluenzaA__ABU92821

SEQ ID NO: 176002 - RNA, 1410 nt, Artificial Sequence; identical to SEQ ID NO: 174285
  derived and/or modified CDS sequence (opt4) from neuraminidase__InfluenzaA__ABU92822

SEQ ID NO: 176003 - RNA, 1410 nt, Artificial Sequence; identical to SEQ ID NO: 174197
  derived and/or modified CDS sequence (opt4) from neuraminidase__InfluenzaA__ABU92823

SEQ ID NO: 176004 - RNA, 1410 nt, Artificial Sequence
  derived and/or modified CDS sequence (opt4) from neuraminidase__InfluenzaA__ABU92824
augaaccccaaccagaagaucaucaccaucggcagcgugagccugaccaucgccgccaucugcuuccugaugcagaucgccauccuggugaccaccgugacccugcacuucaagcagcacgagugcaacagcccccccaacaaccaggugaugcugugcgagcccaccaucaucgagagaaacaucaccgagaucguguaccugaccaacaccaccaucgagaaggagaucugccccaagcuggccgaguacagaaacuggagcaagccccagugcaacaucaccggcuucgcccccuucagcaaggacaacagcaucagacugagcgccggcggcgacaucugggugaccagagagcccuacgugagcugcgaccccgacaagugcuaccaguucgcccugggccagggcaccacccugaacaacggccacagcaacgacaccgugcacgacagaacccccuacagaacccugcugaugaacgagcugggcgugcccuuccaccugggcaccagacaggugugcaucgccuggagcagcagcagcugccacgacggcaaggccuggcugcacgugugcgugaccggcgacgacaagaacgccaccgccagcuucaucuacaacggcagacugguggacagcaucggcagcuggagcaagaagauccugagaacccaggagagcgagugcgugugcaucaacggcaccugcaccguggugaugaccgacggcagcgccagcggcaaggccgacaccaagauccuguucaucgaggagggcaagaucgugcacaucagcacccugagcggcagcgcccagcacguggaggagugcagcugcuaccccagauaccccggcgugagaugcgugugcagagacaacuggaagggcagcaacagacccaucguggacaucaacgugaaggacuacagcaucgugagcagcuacgugugcagcggccuggugggcgacacccccagaagaaacgacagcuucagcagcagccacugccuggaccccaacaacgaggagggcggccacggcgugaagggcugggccuucgacgacggcaacgacguguggaugggcagaaccaucagcgagaagcugagaagcggcuacgagaccuucaaggugaucgagggcuggagcaagcccaacagcaagcugcagaucaacagacaggugaucguggagagaggcaacagaagcggcuacagcggcaucuucagcguggagggcaagagcugcaucaacagaugcuucuacguggagcugaucagaggcagaaaggaggagaccgaggugugguggaccagcaacagcaucgugguguucugcggcaccagcggcaccuacggcaccggcagcuggcccgacggcgccgacaucaaccugaugcccaucuga

SEQ ID NO: 176005 - RNA, 1410 nt, Artificial Sequence
  derived and/or modified CDS sequence (opt4) from neuraminidase__InfluenzaA__ABU92825
augaaccccaaccagaagaucaucaccaucggcagcgugagccugaccaucagcaccaucugcuucuucaugcagaucgccauccugaucaccaccgugacccugcacuucaagcaguacgaguucaacagcccccccaacaaccaggugaugcugugcgagcccaccaucaucgagagaaacaucaccgagaucguguaccugaccaacaccaccaucgagaaggagaucugccccaagcuggccgaguacagaaacuggagcaagccccagugcgacaucaccggcuucgcccccuucagcaaggacaacagcaucagacugagcgccggcggcgacaucugggugaccagagagcccuacgugagcugcgaccccaacaagugcuaccaguucgcccugggccagggcaccacccugaacaacgugcacagcaacgacaccgugcacgacagaacccccuacagaacccugcugaugaacgagcugggcgugcccuuccaccugggcaccaagcaggugugcaucgccuggagcagcagcagcugccacgacggcaaggccuggcugcacgugugcgugaccggcgacgacaagaacgccaccgccagcuucaucuacaacggcagacugguggacagcaucgugagcuggagcaagaagauccugagaacccaggagagcgagugcgugugcaucaacggcaccugcaccguggugaugaccgacggcagcgccagcggcaaggccgacaccaagauccuguucaucgaggagggcaagaucgugcacaccagcacccugagcggcagcgcccagcacguggaggagugcagcugcuaccccagauaccccggcgugagaugcgugugcagagacaacuggaagggcagcaacagacccaucguggacaucaacaucaaggacuacagcaucgugagcagcuacgugugcagcggccuggugggcgacacccccagaaagaacgacagcagcagcagcagccacugccuggaccccaacaacgaggagggcggccacggcgugaagggcugggccuucgacgacggcaacgacguguggaugggcagaaccaucagcgagaagagcagaagcggcuacgagaccuucaaggugaucgagggcuggagcaaccccaacagcaagcugcagaucaacagacaggugaucguggacagaggcaacagaagcggcuacagcggcaucuucagcguggagggcaagagcugcaucaacagaugcuucuacguggagcugaucagaggcagaaaggaggagaccgaggugcuguggaccagcaacagcaucgugguguucugcggcaccagcggcaccuacggcaccggcagcuggcccgacggcgccgacaucaaccugaugcccaucuga

SEQ ID NO: 176006 - RNA, 1410 nt, Artificial Sequence; identical to SEQ ID NO: 176005
  derived and/or modified CDS sequence (opt4) from neuraminidase__InfluenzaA__ABU92826

SEQ ID NO: 176007 - RNA, 1410 nt, Artificial Sequence; identical to SEQ ID NO: 174285
  derived and/or modified CDS sequence (opt4) from neuraminidase__InfluenzaA__ABU92827

SEQ ID NO: 176008 - RNA, 1410 nt, Artificial Sequence; identical to SEQ ID NO: 174285
  derived and/or modified CDS sequence (opt4) from neuraminidase__InfluenzaA__ABU92828

SEQ ID NO: 176009 - RNA, 1410 nt, Artificial Sequence; identical to SEQ ID NO: 174774
  derived and/or modified CDS sequence (opt4) from neuraminidase__InfluenzaA__ABU92829

SEQ ID NO: 176010 - RNA, 1410 nt, Artificial Sequence
  derived and/or modified CDS sequence (opt4) from neuraminidase__InfluenzaA__ABU92830
augaaccccaaccagaagaucaucaccaucggcagcgugagccugaccaucgccgccaucugcuuccugaugcagaucgccauccuggugaccaccgugacccugcacuucaagcagcacgagugcaacagcccccccaacaaccaggugaugcugugcgagcccaccaucaucgagagaaacaucaccgagaucguguaccugaccaacaccaccaucgagaaggagaucugccccaagcuggccgaguacagaaacuggagcaagccccagugcaacaucaccggcuucgcccccuucagcaaggacaacagcaucagacugagcgccggcggcgacaucugggugaccagagagcccuacgugagcugcgaccccgacaagugcuaccaguucgcccugggccagggcaccacccugaacaacggccacagcaacgacaccgugcacgacagaacccccuacagaacccugcugaugaacgagcugggcgugcccuuccaccugggcaccagacaggugugcaucgccuggagcagcagcagcugccacgacggcaaggccuggcugcacgugugcgugaccggcgacgacaagaacgccaccgccagcuucaucuacaacggcagacugguggacagcaucggcagcuggagcaagaagauccugagaacccaggagagcgagugcgugugcaucaacggcaccugcaccguggugaugaccgacggcagcgccagcggcaaggccgacaccaagauccuguucaucgaggagggcaagaucgugcacaucagcacccugagcggcagcgcccagcacguggaggagugcagcugcuaccccagauaccccggcgugagaugcgugugcagagacaacuggaagggcagcaacagacccaucguggacaucaacgugaaggacuacagcaucgugagcagcuacgugugcagcggccuggugggcgacacccccagaaagaacgacagcuucagcagcagcagaugccuggaccccaacaacgaggagggcggccacggcgugaagggcugggccuucgacgacggcaacgacguguggaugggcagaaccaucagcgagaagcugagaagcggcuacgagaccuucaaggugaucgagggcuggagcaagcccaacagcaagcugcagaucaacagacaggugaucguggagagaggcaacagaagcggcuacagcggcaucuucagcguggagggcaagagcugcaucaacagaugcuucuacguggagcugaucagaggcagaaaggaggagaccgaggugugguggaccagcaacagcaucgugguguucugcggcaccagcggcaccuacggcaccggcagcuggcccgacggcgccgacaucaaccugaugcccaucuga

SEQ ID NO: 176011 - RNA, 1410 nt, Artificial Sequence; identical to SEQ ID NO: 174285
  derived and/or modified CDS sequence (opt4) from neuraminidase__InfluenzaA__ABU92831

SEQ ID NO: 176012 - RNA, 1410 nt, Artificial Sequence; identical to SEQ ID NO: 174285
  derived and/or modified CDS sequence (opt4) from neuraminidase__InfluenzaA__ABU92832

SEQ ID NO: 176013 - RNA, 1410 nt, Artificial Sequence; identical to SEQ ID NO: 174285
  derived and/or modified CDS sequence (opt4) from neuraminidase__InfluenzaA__ABU92833

SEQ ID NO: 176014 - RNA, 1410 nt, Artificial Sequence
  derived and/or modified CDS sequence (opt4) from neuraminidase__InfluenzaA__ABU92834
augaaccccaaccagaagaucaucaccaucggcagcgugagccugaccaucgccgccaucugcuuccugaugcacaucgccauccuggugaccaccgugacccugcacuucaagcagcacgagugcaacagcccccccaacaaccaggugaugcugugcgagcccaccaucaucgagagaaacaucaccgagaucguguaccugaccaacaccaccaucgagaaggagaucugccccaagcuggccgaguacagaaacuggagcaagccccagugcaacaucaccggcuucgcccccuucagcaaggacaacagcaucagacugagcgccggcggcgacaucugggugaccagagagcccuacgugagcugcgaccccgacaagugcuaccaguucgcccugggccagggcaccacccugaacaacggccacagcaacgacaccgugcacgacagaacccccuacagaacccugcugaugaacgagcugggcgugcccuuccaccugggcaccagacaggugugcaucgccuggagcagcagcagcugccacgacggcaaggccuggcugcacgugugcgugaccggcgacgacgagaacgccaccgccagcuucaucuacaacggcagacugguggacagcaucggcagcuggagcaagaagauccugagaacccaggagagcgagugcgugugcaucaacggcaccugcaccguggugaugaccgacggcagcgccagcggcaaggccgacaccaagauccuguucaucgaggagggcaagaucgugcacaucagcacccugagcggcagcgcccagcacguggaggagugcagcugcuaccccagauaccccggcgugagaugcgugugcagagacaacuggaagggcagcaacagacccaucguggacaucaacgugaaggacuacagcaucgugagcagcuacgugugcagcggccuggugggcgacacccccagaaagaacgacagcuucagcagcagccacugccuggaccccaacaacgaggagggcggccacggcgugaagggcugggccuucgacgacggcaacgacguguggaugggcagaaccaucagcgagaagcugagaagcggcuacgagaccuucaaggugaucgagggcuggagcaagcccaacagcaagcugcagaucaacagacaggugaucguggagagaggcaacagaagcggcuacagcggcaucuucagcguggagggcaagagcugcaucaacagaugcuucuacguggagcugaucagaggcagaaaggaggagaccgaggugugguggaccagcaacagcaucgugguguucugcggcaccagcggcaccuacggcaccggcagcuggcccgacggcgccgacaucagccugaugcccaucuga

SEQ ID NO: 176015 - RNA, 1410 nt, Artificial Sequence; identical to SEQ ID NO: 174285
  derived and/or modified CDS sequence (opt4) from neuraminidase__InfluenzaA__ABU92835

SEQ ID NO: 176016 - RNA, 1410 nt, Artificial Sequence; identical to SEQ ID NO: 174285
  derived and/or modified CDS sequence (opt4) from neuraminidase__InfluenzaA__ABU92836

SEQ ID NO: 176017 - RNA, 1410 nt, Artificial Sequence
  derived and/or modified CDS sequence (opt4) from neuraminidase__InfluenzaA__ABU92837
augaaccccaaccagaagaucaucaccaucggcagcgugagccugaccaucagcaccaucugcuucuucaugcagaucgccauccugaucaccaccgugacccugcacuucaagcaguacgaguucaacagcccccccaacaaccaggugaugcugugcgagcccaccaucaucgagagaaacaucaccgagaucguguaccugaccaacaccaccaucgagaaggagaucugccccaagcuggccgaguacagaaacuggagcaagccccagugcgacaucaccggcuucgcccccuucagcaaggacaacagcaucagacugagcgccggcggcgacaucugggugaccagagagcccuacgugagcugcgaccccgacaagugcuaccaguucgcccugggccagggcaccacccugaacaacgugcacagcaacgacaccgugcacgacagaacccccuacagaacccugcugaugaacgagcugggcgugcccuuccaccugggcaccaagcaggugugcaucgccuggagcagcagcagcugccacgacggcaaggccuggcugcacgugugcgugaccggcgacgacaagaacgccaccgccagcuucaucuacaacggcagacugguggacagcaucgugagcuggagcaagaagauccugagaacccaggagagcgagugcgugugcaucaacggcaccugcaccguggugaugaccgacggcagcgccagcggcaaggccgacaccaagauccuguucaucgaggagggcaagaucgugcacaccagcacccugagcggcagcgcccagcacguggaggagugcagcugcuaccccagauaccccggcgugagaugcgugugcagagacaacuggaagggcagcaacagacccaucguggacaucaacaucaaggacuacagcaucgccagcagcuacgugugcagcggccuggugggcgacacccccagaaagaacgacagcagcagcagcagccacugccuggaccccaacaacgaggagggcggccacggcgugaagggcugggccuucgacgacggcaacgacguguggaugggcagaaccaucagcgagaagcugagaagcggcuacgagaccuucaaggugaucgagggcuggagcaaccccaacagcaagcugcagaucaacagacaggugaucguggacagaggcaacagaagcggcuacagcggcaucuucagcguggagggcaagagcugcgugaacagaugcuucuacguggagcugaucagaggcagaaaggaggagaccgaggugcuguggaccagcaacagcaucgugguguucugcggcaccagcggcaccuacggcaccggcagcuggcccgacggcgccgacaucaaccugaugcccaucuga

SEQ ID NO: 176018 - RNA, 1410 nt, Artificial Sequence; identical to SEQ ID NO: 174285
  derived and/or modified CDS sequence (opt4) from neuraminidase__InfluenzaA__ABU92838

SEQ ID NO: 176019 - RNA, 1410 nt, Artificial Sequence; identical to SEQ ID NO: 174121
  derived and/or modified CDS sequence (opt4) from neuraminidase__InfluenzaA__ABU92839

SEQ ID NO: 176020 - RNA, 1410 nt, Artificial Sequence
  derived and/or modified CDS sequence (opt4) from neuraminidase__InfluenzaA__ABU92840
augaaccccaaccagaagaucaucaccaucggcagcgugagccugaccaucgccaccaucugcuuccugaugcagaucgccauccuggugaccaccgugacccugcacuucaagcaguacgagugcaacagcccccccaacaaccaggugaugcugugcgagcccaccaucaucgagagaaacaucaccgagaucguguaccugaccaacaccaccaucgagaaggagaucugccccaagcuggccgaguacagaaacuggagcaagccccagugcaacaucaccggcuucgcccccuucagcaaggacaacagcaucagacugagcgccggcggcgacaucugggugaccagagagcccuacgugagcugcgaccccgacaagugcuaccaguucgcccugggccagggcaccacccugaacaacggccacagcaacgacaccgugcacgacagaacccccuacagaacccugcugaugaacgagcugggcgugcccuuccaccugggcaccaagcaggugugcaucgccuggagcagcagcagcugccacgacggcaaggccuggcugcacgugugcgugaccggcgacgacgagaacgccaccgccagcuucaucuacaacggcagacugguggacagcaucggcagcuggagcaagaagauccugagaacccaggagagcgagugcgugugcaucaacggcaccugcaccguggugaugaccgacggcagcgccagcggcaaggccgacaccaagauccuguucaucgaggagggcaagaucgugcacaucagccugcugagcggcagcgcccagcacguggaggagugcagcugcuaccccagauaccccggcgugagaugcgugugcagagacaacuggaagggcagcaacagacccaucguggacaucaacgugaaggacuacagcaucgugagcagcuacgugugcagcggccuggugggcgacacccccagaaagaacgacagcagcagcagcagccacugccuggaccccaacaacgaggagggcggccacggcgugaagggcugggccuucgacgacggcaacgacguguggaugggcagaaccaucagcgagaagcugagaagcggcuacgagaccuucaaggugaucgagggcuggagcaagcccaacagcaagcugcagaucaacagacaggugaucguggacagagacaacagaagcggcuacagcggcaucuucagcguggagggcaagagcugcaucaacagaugcuucuacguggagcugaucagaggcagaaagcaggagaccgaggugcuguggaccagcaacagcaucgugguguucugcggcaccagcggcaccuacggcaccggcagcuggcccgacggcgccgacaucaaccugaugcccaucuga

SEQ ID NO: 176021 - RNA, 1410 nt, Artificial Sequence
  derived and/or modified CDS sequence (opt4) from neuraminidase__InfluenzaA__ABU92841
augaaccccaaccagaagaucaucaccaucggcagcgugagccugaccaucgccaccaucugcuuccugaugcagaucgccauccuggugaccaccgugacccugcacuucaagcaguacgagugcaacagcccccccaacaaccaggugaugcugugcgagcccaccaucaucgagagaaacaucaccgagaucguguaccugaccaacaccaccaucgagaaggagaucugccccaagcuggccgaguacagaaacuggagcaagccccagugcaacaucaccggcuucgcccccuucagcaaggacaacagcaucagacugagcgccggcggcgacaucugggugaccagagagcccuacgugagcugcgaccccgacaagugcuaccaguucgcccugggccagggcaccacccugaacaacggccacagcaacgacaccgugcacgacagaacccccuacagaacccugcugaugaacgagcugggcgugcccuuccaccugggcaccaagcaggugugcaucgccuggagcagcagcagcugccacgacggcaaggccuggcugcacgugugcgugaccggcgacgacgagaacgccaccgccagcuucaucuacaacggcagacugguggacagcaucggcagcuggagcaagaagauccugagaacccaggagagcgagugcgugugcaucaacggcaccugcaccguggugaugaccgacggcagcgccagcggcaaggccgacaccaagauccuguucaucgaggagggcaagaucgugcacaccagccugcugagcggcagcgcccagcacguggaggagugcagcugcuaccccagauaccccggcgugagaugcgugugcagagacaacuggaagggcagcaacagacccaucguggacaucaacgugaaggacuacagcaucgugagcagcuacgugugcagcggccuggugggcgacacccccagaaagaacgacagcagcagcagcagccacugccuggaccccaacaacgaggagggcggccacggcgugaagggcugggccuucgacgacggcaacgacguguggaugggcagaaccaucagcgagaagcugagaagcggcuacgagaccuucaaggugaucgagggcuggagcaagcccaacagcaagcugcagaucaacagacaggugaucguggacagagacaacagaagcggcuacagcggcaucuucagcguggagggcaagagcugcaucaacagaugcuucuacguggagcugaucagaggcagaaagcaggagaccgaggugcuguggaccagcaacagcaucgugguguucugcggcaccagcggcaccuacggcaccggcagcuggcccgacggcgccgacaucaaccugaugcccaucuga

SEQ ID NO: 176022 - RNA, 1410 nt, Artificial Sequence
  derived and/or modified CDS sequence (opt4) from neuraminidase__InfluenzaA__ABU92842
augaaccccaaccagaagaucaucaccaucggcagcgugagccugaccaucgccaccaucugcuuccugaugcagaucgccauccuggugaccaccgugacccugcacuucaagcaguacgacugcaacagcccccccaacaaccaggugaugcugugcgagcccaccaucaucgagagaaacaucaccgagaucguguaccugaccaacaccaccaucgagaaggagaucugccccaagcuggccgaguacagaaacuggagcaagccccagugcaacaucaccggcuucgcccccuucagcaaggacaacagcaucagacugagcgccggcggcgacaucugggugaccagagagcccuacgugagcugcgaccccgacaagugcuaccaguucgcccugggccagggcaccacccugaacaacggccacagcaacgacaccgugcacgacagaacccccuacagaacccugcugaugaacgagcugggcgugcccuuccaccugggcaccaagcaggugugcaucgccuggagcagcagcagcugccacgacggcaaggccuggcugcacgugugcgugaccggcgacgacgagaacgccaccgccagcuucaucuacaacggcagacugguggacagcaucggcagcuggagcaagaagauccugagaacccaggagagcgagugcgugugcaucaacggcaccugcaccguggugaugaccgacggcagcgccagcggcaaggccgacaccaagauccuguucaucgaggagggcaagaucgugcacaccagccugcugagcggcagcgcccagcacguggaggagugcagcugcuaccccagauaccccggcgugagaugcgugugcagagacaacuggaagggcagcaacagacccaucguggacaucaacgugaaggacuacagcaucgugagcagcuacgugugcagcggccuggugggcgacacccccagaaagaacgacagcagcagcagcagccacugccuggaccccaacaacgaggagggcggccacggcgugaagggcugggccuucgacgacggcaacgacguguggaugggcagaaccaucagcgagaagcugagaagcggcuacgagaccuucaaggugaucgagggcuggagcaagcccaacagcaagcugcagaucaacagacaggugaucguggacagaggcaacagaagcggcuacagcggcaucuucagcguggagggcaagagcugcaucaacagaugcuucuacguggagcugaucagaggcagaaagcaggagaccgaggugcuguggaccagcaacagcaucgugguguucugcggcaccagcggcaccuacggcaccggcagcuggcccgacggcgccgacaucaaccugaugcccaucuga

SEQ ID NO: 176023 - RNA, 1410 nt, Artificial Sequence; identical to SEQ ID NO: 174121
  derived and/or modified CDS sequence (opt4) from neuraminidase__InfluenzaA__ABU92843

SEQ ID NO: 176024 - RNA, 1410 nt, Artificial Sequence; identical to SEQ ID NO: 175809
  derived and/or modified CDS sequence (opt4) from neuraminidase__InfluenzaA__ABU92844

SEQ ID NO: 176025 - RNA, 1410 nt, Artificial Sequence; identical to SEQ ID NO: 174121
  derived and/or modified CDS sequence (opt4) from neuraminidase__InfluenzaA__ABU92845

SEQ ID NO: 176026 - RNA, 1410 nt, Artificial Sequence; identical to SEQ ID NO: 174121
  derived and/or modified CDS sequence (opt4) from neuraminidase__InfluenzaA__ABU92846

SEQ ID NO: 176027 - RNA, 1410 nt, Artificial Sequence; identical to SEQ ID NO: 174121
  derived and/or modified CDS sequence (opt4) from neuraminidase__InfluenzaA__ABU92847

SEQ ID NO: 176028 - RNA, 1410 nt, Artificial Sequence; identical to SEQ ID NO: 174121
  derived and/or modified CDS sequence (opt4) from neuraminidase__InfluenzaA__ABU92848

SEQ ID NO: 176029 - RNA, 1410 nt, Artificial Sequence; identical to SEQ ID NO: 174774
  derived and/or modified CDS sequence (opt4) from neuraminidase__InfluenzaA__ABU92849

SEQ ID NO: 176030 - RNA, 1410 nt, Artificial Sequence
  derived and/or modified CDS sequence (opt4) from neuraminidase__InfluenzaA__ABU92850
augaaccccaaccagaagaucaucaccaucggcagcgugagccugaccaucagcaccaucugcuucuucaugcagaucgccauccugaucaccaccgugacccugcacuucaagcaguacgaguucaacagcccccccaacaaccaggugaugcugugcgagcccaccaucaucgagagaaacaucaccgagaucguguaccugaccaacaccaccaucgagaaggagaucugccccaagcugguggaguacagaaacuggagcaagccccagugcgacaucaccggcuucgcccccuucagcaaggacaacagcaucagacugagcgccggcggcgacaucugggugaccagagagcccuacgugagcugcgaccccgacaagugcuaccaguucgcccugggccagggcaccacccugaacaacgugcacagcaacgacaccgugcacgacagaacccccuacagaacccugcugaugaccgagcugggcgugcccuuccaccugggcaccaagcaggugugcaucgccuggagcagcagcagcugccacgacggcaaggccuggcugcacgugugcgugaccggcgacgacaagaacgccaccgccagcuucaucuacaacggcagacugguggacagcaucgugagcuggagcaagaagauccugagaacccaggagagcgagugcgugugcaucaacggcaccugcaccguggugaugaccgacggcagcgccagcggcaaggccgacaccaagauccuguucaucgaggagggcaagaucgugcacaccagcacccugagcggcagcgcccagcacguggaggagugcagcugcuaccccagauaccccggcgugagaugcgugugcagagacaacuggaagggcagcaacagacccaucguggacaucaacaucaaggacuacagcaucgugagcagcuacgugugcagcggccuggugggcgacacccccagaaagaacgacagcagcagcagcagccacugccuggaccccaacaacgaggagggcggccacggcgugaagggcugggccuucgacgacggcaacgacguguggaugggcagaaccaucagcgagaagcugagaagcggcuacgagaccuucaaggugaucgagggcuggagcaaccccaacagcaagcugcagaucaacagacaggugaucguggacagaggcaacagaagcggcuacagcggcaucuucagcguggagggcaagagcugcaucaacagaugcuucuacguggagcugaucagaggcagaaaggaggagaacgaggugcuguggaccagcaacagcaucgugguguucugcggcaccagcggcaccuacggcaccggcagcuggcccgacggcgccgacaucaaccugaugcccaucuga

SEQ ID NO: 176031 - RNA, 1410 nt, Artificial Sequence
  derived and/or modified CDS sequence (opt4) from neuraminidase__InfluenzaA__ABU92851
augaaccccaaccagaagaucaucaccaucggcagcgugagccugaccaucagcaccaucugcuucuucaugcagaucgccauccugaucaccaccgugacccugcacuucaagcaguacgaguucaacagcccccccaacaaccaggugaugcugugcgagcccaccaucaucgagagaaacaucaccgagaucguguaccugaccaacaccaccaucgagaaggagaucugccccaagcuggccgaguacagaaacuggagcaagccccagugcagcaucaccggcuucgcccccuucagcaaggacaacagcaucagacugagcgccggcggcgacaucugggugaccagagagcccuacgugagcugcgaccccgacaagugcuaccaguucgcccugggccagggcaccacccugaacaacgugcacagcaacgacaccgugcacgacagaacccccuacagaacccugcugaugaacgagcugggcgugcccuuccaccugggcaccaagcaggugugcaucgccuggagcagcagcagcugccacgacggcaaggccuggcugcacgugugcgugaccggcgacgacaagaacgccaccgccagcuucaucuacaacggcagacugguggacagcaucgugagcuggagcaaggagauccugagaacccaggagagcgagugcgugugcaucaacggcaccugcaccguggugaugaccgacggcagcgccagcggcaaggccgacaccaagauccuguucaucgaggagggcaagaucgugcacaccagcacccugagcggcagcgcccagcacguggaggagugcagcugcuaccccagauaccccggcgugagaugcgugugcagagacaacuggaagggcagcaacagacccaucguggacaucaacaucaaggacuacagcaucgugagcagcuacgugugcagcggccuggugggcgacacccccagaaaggacgacagcagcagcagcagccacugccuggaccccaacaacgaggagggcggccacggcgugaagggcugggccuucgacgacggcaacgacguguggaugggcagaaccaucagcgagaagagcagaagcggcuacgagaccuucaaggugaucgagggcuggagcaaccccaacagcaagcugcagaucaacagacaggugaucguggacagaggcaacagaagcggcuacagcggcaucuucagcguggagggcaagagcugcaucaacagaugcuucuacguggagcugaucagaggcagaaaggaggagaccgaggugcuguggaccagcaacagcaucgugguguucugcggcaccagcggcaccuacggcaccggcagcuggcccgacggcgccgacaucaaccugaugcccaucuga

SEQ ID NO: 176032 - RNA, 1410 nt, Artificial Sequence; identical to SEQ ID NO: 174285
  derived and/or modified CDS sequence (opt4) from neuraminidase__InfluenzaA__ABU92852

SEQ ID NO: 176033 - RNA, 1410 nt, Artificial Sequence
  derived and/or modified CDS sequence (opt4) from neuraminidase__InfluenzaA__ABU92853
augaaccccaaccagaagaucaucaccaucggcagcgugagccugaccaucgccgccaucugcuuccugaugcagaucgccauccuggugaccaccgugacccugcacuucaagcagcacgagugcaacagcccccccaagaaccaggugaugcugugcgagcccaccaucaucgagagaaacaucaccgagaucguguacaugaccaacaccaccaucgagaaggagaucugccccaagcuggccgaguacagaaacuggagcaagccccagugcaacaucaccggcuucgcccccuucagcaaggacaacagcaucagacugagcgccggcggcgacaucugggugaccagagagcccuacgugagcugcgaccccgacaagugcuaccaguucgcccugggccagggcaccacccugaacaacggccacagcaacgacaccgugcacgacagaacccccuacagaacccugcugaugaacgagcugggcgugcccuuccaccugggcaccagacaggugugcaucgccuggagcagcagcagcugccacgacggcaaggccuggcugcacgugugcgugaccggcgacgacaagaacgccaccgccagcuucaucuacaacggcagacugguggacagcaucgugagcuggagcaagaagauccugagaacccaggagagcgagugcgugugcaucaacggcaccugcaccguggugaugaccgacggcagcgccagcggcaaggccgacaccaagauccuguucaucgaggagggcaagaucgugcacaucagcacccugagcggcagcgcccagcacguggaggagugcagcugcuaccccagauaccccggcgugagaugcgugugcagagacaacuggaagggcagcaacagacccaucguggacaucaacgugaaggacuacagcaucgugagcagcuacgugugcagcggccuggugggcgacacccccagaaagaacgacagcuucagcagcagccacugccuggaccccaacaacgaggagggcggccacggcgugaagggcugggccuucgacgacggcaacgacguguggaugggcagaaccaucagcgagaagcugagaagcggcuacgagaccuucaaggugaucgagggcuggagcaagcccaacagcaagcugcagaucaacagacaggugaucguggagagaggcaacagaagcggcuacagcggcaucuucagcguggagggcaagagcugcaucaacagaugcuucuacguggagcugaucagaggcagaaaggaggagaccgaggugugguggaccagcaacagcaucgugguguucugcggcaccagcggcaccuacggcaccggcagcuggcccgacggcgccgacaucaaccugaugcccaucuga

SEQ ID NO: 176034 - RNA, 1410 nt, Artificial Sequence; identical to SEQ ID NO: 174285
  derived and/or modified CDS sequence (opt4) from neuraminidase__InfluenzaA__ABU92854

SEQ ID NO: 176035 - RNA, 1410 nt, Artificial Sequence
  derived and/or modified CDS sequence (opt4) from neuraminidase__InfluenzaA__ABU92855
augaaccccaaccagaagaucaucaccaucggcagcgugagccugaccaucgccgccaucugcuuccugaugcagaucgccauccuggugaccaccgugacccugcacuucaagcagcacgagugcaacagcccccccaacaaccaggugaugcugugcgagcccaccaucaucgagagaaacaucaccgagaucguguaccugaccaacaccaccaucgagaaggagaucugccccaagcuggccgaguacagaaacuggagcaagccccagugcaacaucaccggcuucgcccccuucagcaaggacaacagcaucagacugagcgccggcggcgacaucugggugaccagagagcccuacgugagcugcgaccccgacaagugcuaccaguucgcccugggccagggcaccacccugaacaacggccacagcaacgacaccgugcacgacagaacccccuacagaacccugcugaugaacgagcugggcgugcccuuccaccugggcaccagacaggugugcaucgccuggagcagcagcagcugccacgacggcaaggccuggcugcacgugugcgugaccggcgacgacaagaacgccaccgccagcuucaucuacaacggcagacugguggacagcaucggcagcuggagcaagaagauccugagaacccaggagagcgagugcgugugcaucaacggcaccugcaccguggugaugaccgacggcagcgccagcggcaaggccgacaccaagauccuguucaucgaggagggcaagaucgugcacaucagcacccugagcggcagcgcccagcacguggaggagugcagcugcuaccccagauaccccggcgugagaugcgugugcagagacaacuggaagggcagcaacagacccaucguggacaucaacgugaaggacuacagcaucgugagcagcuacgugugcagcggccuggugggcgacacccccagaaagaacgacagcuucagcagcagccacugccuggaccccaacaacgaggagggcggccacggcgugaagggcugggccuucgacgacggcaacgacguguggaugggcagaaccaucagcgagaagcugagaagcggcuacgagaccuucaaggugaucgagggcuggagcaagcccaacagcaagcugcagaucaacagacaggugaucaucgagagaggcaacagaagcggcuacagcggcaucuucagcguggagggcaagagcugcaucaacagaugcuucuacguggagcugaucagaggcagaaaggaggagaccgaggugugguggaccagcaacagcaucgugguguucugcggcaccagcggcaccuacggcaccggcagcuggcccgacggcgccgacaucaaccugaugcccaucuga

SEQ ID NO: 176036 - RNA, 1410 nt, Artificial Sequence; identical to SEQ ID NO: 174205
  derived and/or modified CDS sequence (opt4) from neuraminidase__InfluenzaA__ABU92856

SEQ ID NO: 176037 - RNA, 1410 nt, Artificial Sequence; identical to SEQ ID NO: 174285
  derived and/or modified CDS sequence (opt4) from neuraminidase__InfluenzaA__ABU92857

SEQ ID NO: 176038 - RNA, 1410 nt, Artificial Sequence
  derived and/or modified CDS sequence (opt4) from neuraminidase__InfluenzaA__ABU92858
augaaccccaaccagaagaucaucaccaucggcagcgugagccugaccaucagcaccaucugcuucuucaugcagaucgccauccugaucaccaccgugacccugcacuucaagcaguacgaguucaacagcccccccaacaaccaggugauccugugcgagcccaccaucaucgagagaaacaucaccgagaucguguaccugaccaacaccaccaucgagaaggagaucugccccaagcuggccgaguacagaaacuggagcaagccccagugcgacaucaccggcuucgcccccuucagcaaggacaacagcaucagacugagcgccggcggcgacaucugggugaccagagagcccuacgugagcugcgaccccgacaagugcuaccaguucgcccugggccagggcaccacccugaacaacgugcacagcaacgacaccgugcacgacagaacccccuacagaacccugcugaugaacgagcugggcgugcccuuccaccugggcaccaagcaggugugcaucgccuggagcagcagcagcugccacgacggcaaggccuggcugcacgugugcgugaccggcgacgacaagaacgccaccgccagcuucaucuacaacggcagacugguggacagcaucgugagcuggagcaagaagauccugagaacccaggagagcgagugcgugugcaucaacggcaccugcaccguggugaugaccgacggcagcgccagcggcaaggccgacaccaagauccuguucaucgaggagggcaagaucgugcacaccagcacccugagcggcagcgcccagcacguggaggagugcagcugcuaccccagauaccccggcgugagaugcgugugcagagacaacuggaagggcagcaacagacccaucguggacaucaacaucaaggacuacagcaucgugagcagcuacgugugcagcggccuggugggcgacacccccagaaagaacgacagcagcagcagcagccacugccuggaccccaacaacgaggagggcggccacggcgugaagggcugggccuucgacgacggcaacgacguguggaugggcagaaccaucagcgagaagcugagaagcggcuacgagaccuucaaggugaucgagggcuggagcaaccccaacagcaagcugcagaucaacagacaggugaucguggacagaggcaacagaagcggcuacagcggcaucuucagcguggagggcaagagcugcaucaacagaugcuucuacguggagcugaucagaggcagaaaggaggagaccgaggugcuguggaccagcaacagcaucgugguguucugcggcaccagcggcaccuacggcaccggcagcuggcccgacggcgccgacaucaaccugaugcccaucuga

SEQ ID NO: 176039 - RNA, 1410 nt, Artificial Sequence
  derived and/or modified CDS sequence (opt4) from neuraminidase__InfluenzaA__ABU92859
augaaccccaaccagaagaucaucaccaucggcagcgugagccugaccaucgccgccaucugcuuccugaugcagaucgccauccuggugaccaccgugacccugcacuucaagcagcacgagugcaacagcccccccaacaaccaggugaugcugugcgagcccaccaucaucgagagaaacaucaccgagaucguguaccugaccaacaccaccaucgagaaggagaucugccccaagcuggccggcuacagaaacuggagcaagccccagugcaacaucaccggcuucgcccccuucagcaaggacaacagcaucagacugagcgccggcggcgacaucugggugaccagagagcccuacgugagcugcgaccccgacaagugcuaccaguucgcccugggccagggcaccacccugaacaacggccacagcaacgacaccgugcacgacagaacccccuacagaacccugcugaugaacgagcugggcgugcccuuccaccugggcaccagacaggugugcaucgccuggagcagcagcagcugccacgacggcaaggccuggcugcacgugugcgugaccggcgacgacaagaacgccaccgccagcuucaucuacaacggcagacugguggacagcaucggcagcuggagcaagaagauccugagaacccaggagagcgagugcgugugcaucaacggcaccugcaccguggugaugaccgacggcagcgccagcggcaaggccgacaccaagauccuguucaucgaggagggcaagaucgugcacaucagcacccugagcggcagcgcccagcacguggaggagugcagcugcuaccccagauaccccggcgugagaugcgugugcagagacaacuggaagggcagcaacagacccaucguggacaucaacgugaaggacuacagcaucgugagcagcuacgugugcagcggccuggugggcgacacccccagaaagaacgacagcuucagcagcagccacugccuggaccccaacaacgaggagggcggccacggcgugaagggcugggccuucgacgacggcaacgacguguggaugggcagaaccaucagcgagaagcugagaagcggcuacgagaccuucaaggugaucgagggcuggagcaagcccaacagcaagcugcagaucaacagacaggugaucguggagagaggcaacagaagcggcuacagcggcaucuucagcguggagggcaagagcugcaucaacagaugcuucuacguggagcugaucagaggcagaaaggaggagaccgaggugugguggaccagcaacagcaucgugguguucugcggcaccagcggcaccuacggcaccggcagcuggcccgacggcgccgacaucaaccugaugcccaucuga

SEQ ID NO: 176040 - RNA, 1410 nt, Artificial Sequence
  derived and/or modified CDS sequence (opt4) from neuraminidase__InfluenzaA__ABU92860
augaaccccaaccagaagaucaucaccaucggcagcgugagccugaccaucgccgccaucugcuuccugaugcagaucgccauccuggugaccaccgugacccugcacuucaagcagcacgagugcaacagcccccccaacaaccaggugaugcugugcgagcccaccaucaucgagagaaacaucaccgagaucguguaccugaccaacaccaccaucgagaaggagaucugccccaagcuggccgaguacagaaacuggagcaagccccagugcaacaucaccggcuucgcccccuucagcaaggacaacagcaucagacugagcgccggcggcgacaucugggugaccagagagcccuacgugagcugcgaccccgacaagugcuaccaguucgcccugggccagggcaccacccugaacaacggccacagcaacgacaccgugcacgacagaacccccuacagaacccugcugaugaacgagcugggcgugcccuuccaccugggcaccagacaggugugcaucgccuggagcagcagcagcugccacgacggcaaggccuggcugcacgugugcgugaccggcgacgacaagaacgccaccgccagcuucaucuacaacggcagacugguggacagcaucggcagcugguacaagaagauccugagaacccaggagagcgagugcgugugcaucaacggcaccugcaccguggugaugaccgacggcagcgccagcggcaaggccgacaccaagauccuguucaucgaggagggcaagaucgugcacaucagcacccugagcggcagcgcccagcacguggaggagugcagcugcuaccccagauaccccggcgugagaugcgugugcagagacaacuggaagggcagcaacagacccaucguggacaucaacgugaaggacuacagcaucaucagcagcuacgugugcagcggccuggugggcgacacccccagaaagaacgacagcuucagcagcagccacugccuggaccccaacaacgaggagggcggccacggcgugaagggcugggccuucgacgacggcaacgacguguggaugggcagaaccaucagcgagaagcugagaagcggcuacgagaccuucaaggugaucgagggcuggagcaagcccaacagcaagcugcagaucaacagacaggugaucguggagagaggcaacagaagcggcuacagcggcaucuucagcguggagggcaagagcugcaucaacagaugcuucuacguggagcugaucagaggcagaaaggaggagaccgaggugugguggaccagcaacagcaucgugguguucugcggcaccagcggcaccuacggcaccggcagcuggcccgacggcgccgacaucaaccugaugcccaucuga

SEQ ID NO: 176041 - RNA, 1410 nt, Artificial Sequence
  derived and/or modified CDS sequence (opt4) from neuraminidase__InfluenzaA__ABU92861
augaaccccaaccagaagaucaucaccaucggcagcgugagccugaccaucgccgccaucugcuuccugaugcagaucgccauccuggugaccaccgugacccugcacuucaagcagcacgagugcaacagcccccccaacaaccaggugaugcugugcgagcccaccaucaucgagagaaacaucaccgagaucguguaccugaccaacaccaccaucgagaaggagaucugccccaagcuggccgaguacagaaacuggagcaagccccagugcaacaucaccggcuucgcccccuucagcaaggacaacagcaucagacugagcgccggcggcgacaucugggugaccagagagcccuacgugagcugcgaccccgacaagugcuaccaguucgcccugggccagggcaccacccugaacaacggccacagcaacgacaccgugcacgacagaacccccuacagaacccugcugaugaacgagcugggcgugcccuuccaccugggcaccagacaggugugcauggccuggagcagcagcagcugccacgacggcaaggccuggcugcacgugugcgugaccggcgacgacaagaacgccaccgccagcuucaucuacaacggcagacugguggacagcaucggcagcuggagcaagaagauccugagaacccaggagagcgagugcgugugcaucaacggcaccugcaccguggugaugaccgacggcagcgccagcggcaaggccgacaccaagauccuguucaucgaggagggcaagaucgugcacaucagcacccugagcggcagcgcccagcacguggaggagugcagcugcuaccccagauaccccggcgugagaugcgugugcagagacaacuggaagggcagcaacagacccaucguggacaucaacgugaaggacuacagcaucgugagcagcuacgugugcagcggccuggugggcgacacccccagaaagaacgacagcuucagcagcagccacugccuggaccccaacaacgaggagggcggccacggcgugaagggcugggccuucgacgacggcaacgacguguggaugggcagaaccaucagcgagaagcugagaagcggcuacgagaccuucaaggugaucgagggcuggagcaagcccaacagcaagcugcagaucaacagacaggugaucguggagagaggcaacagaagcggcuacagcggcaucuucagcguggagggcaagagcugcaucaacagaugcuucuacguggagcugaucagaggcagaaaggaggagaccgaggugugguggaccagcaacagcaucgugguguucugcggcaccagcggcaccuacggcaccggcagcuggcccgacggcgccgacaucaaccugaugcccaucuga

SEQ ID NO: 176042 - RNA, 1410 nt, Artificial Sequence
  derived and/or modified CDS sequence (opt4) from neuraminidase__InfluenzaA__ABU92862
augaaccccaaccagaagaucaucaccaucggcagcgugagccugaccaucgccgccaucugcuuccugaugcagaucgccauccuggugaccaccgugacccugcacuucaagcagcacgagugcaacagcccccccaacaaccaggugaugcugugcgagcccaccaucaucgagagaaacaucaccgagaucguguaccugaccaacaccaccaucgagaaggagaucugccccaagcuggccgaguacagaaacuggagcaagccccagugcaacaucaccggcuucgcccccuucagcagagacaacagcaucagacugagcgccggcggcgacaucugggugaccagagagcccuacgugagcugcgaccccgacaagugcuaccaguucgcccugggccagggcaccacccugaacaacggccacagcaacgacaccgugcacgacagaacccccuacagaacccugcugaugaacgagcugggcgugcccuuccaccugggcaccagacaggugugcaucgccuggagcagcagcagcugccacgacggcaaggccuggcugcacgugugcgugaccggcgacgacaagaacgccaccgccagcuucaucuacaacggcagacugguggacagcaucggcagcuggagcaagaagauccugagaacccaggagagcgagugcgugugcaucaacggcaccugcaccguggugaugaccgacggcagcgccagcggcaaggccgacaccaagauccuguucaucgaggagggcaagaucgugcacaucagcacccugagcggcagcgcccagcacguggaggagugcagcugcuaccccagauaccccggcgugagaugcgugugcagagacaacuggaagggcagcaacagacccaucguggacaucaacgugaaggacuacagcaucgugagcagcuacgugugcagcggccuggugggcgacacccccagaaagaacgacagcuucagcagcagccacugccuggaccccaacaacgaggagggcggccacggcgugaagggcugggccuucgacgacggcaacgacguguggaugggcagaaccaucagcgagaagcugagaagcggcuacgagaccuucaaggugaucgagggcuggagcaagcccaacagcaagcugcagaucaacagacaggugaucguggagagaggcaacagaagcggcuacagcggcaucuucagcguggagggcaagagcugcaucaacagaugcuucuacguggagcugaucagaggcagaaaggaggagaccgaggugugguggaccagcaacagcaucgugguguucugcggcaccagcggcaccuacggcaccggcagcuggcccgacggcgccgacaucaaccugaugcccaucuga

SEQ ID NO: 176043 - RNA, 1410 nt, Artificial Sequence; identical to SEQ ID NO: 174285
  derived and/or modified CDS sequence (opt4) from neuraminidase__InfluenzaA__ABU92863

SEQ ID NO: 176044 - RNA, 1410 nt, Artificial Sequence
  derived and/or modified CDS sequence (opt4) from neuraminidase__InfluenzaA__ABU92865
augaaccccaaccagaagaucaucaccaucggcagcgugagccugaccaucagcaccaucugcuucuucaugcagaucgccauccugaucaccaccgugacccugcacuucaagcaguacgaguucaacagcccccccaacaaccaggugaugcugugcgagcccaccaucaucgagagaaacaucaccgagaucguguaccugaccaacaccaccaucgagaaggagaucugccccaagcuggccgaguacagaaacuggagcaagccccagugcgacaucaccggcuucgcccccuucagcaaggacaacagcaucagacugagcgccggcggcgacaucugggugaccagagagcccuacgugagcugcgaccuggacaagugcuaccaguucgcccugggccagggcaccacccugaacaacgugcacagcaacgacaccgugcacgacagaacccccuacagaacccugcugaugaacgagcugggcgugcccuuccaccugggcaccaagcaggugugcaucgccuggagcagcagcagcugccacgacggcaaggccuggcugcacgugugcgugaccggcgacgacaagaacgccaccgccagcuucaucuacaacggcagacugguggacagcaucgugagcuggagcaagaagauccugagaacccaggagagcgagugcgugugcaucaacggcaccugcaccguggugaugaccgacggcagcgccagcggcaaggccgacaccaagauccuguucaucgaggagggcaagaucgugcacaccagcacccugagcggcagcgcccagcacguggaggagugcagcugcuaccccagauaccccggcgugagaugcgugugcagagacaacuggaagggcagcaacagacccaucguggacaucaacaucaaggacuacagcaucgugagcagcuacgugugcagcggccuggugggcgacacccccagaaagaacgacagcagcagcagcagccacugccuggaccccaacaacgaggagggcggccacggcgugaagggcugggccuucgacgacggcaacgacguguggaugggcagaaccaucagcgagaagcugagaagcggcuacgagaccuucaaggugaucgagggcuggagcaaccccaacagcaagcugcagaucaacagacaggugaucguggacagaggcaacagaagcggcuacagcggcaucuucagcguggagggcaagagcugcaucaacagaugcuucuacguggagcugaucagaggcagaaaggaggagaccgaggugcuguggaccagcaacagcaucgugguguucugcggcaccagcggcaccuacggcaccggcagcuggcccgacggcgccgacaucaaccugaugcccaucuga

SEQ ID NO: 176045 - RNA, 1410 nt, Artificial Sequence
  derived and/or modified CDS sequence (opt4) from neuraminidase__InfluenzaA__ABU92866
augaaccccaaccagaagaucaucaccaucggcagcgugagccugaccaucagcaccaucugcuucuucaugcagaucgccauccugaucaccaccgugacccugcacuucaagcaguacgaguucaacagcccccccaacaaccaggugaugcugugcgagcccaccaucaucgagagaaacaucaccgagaucguguaccugaccaacaccaccaucgagaaggaggugugccccaagcuggccgaguacagaaacuggagcaagccccagugcgacaucaccggcuucgcccccuucagcaaggacaacagcaucagacugagcgccggcggcgacaucugggugaccagagagcccuacgugagcugcgaccccgacaagugcuaccaguucgcccugggccagggcaccacccugaacaacgugcacagcaacgacaccgugcacgacagaacccccuacagaacccugcugaugaacgagcugggcgugcccuuccaccugggcaccaagcaggugugcaucgccuggagcagcagcagcugccacgacggcaaggccuggcugcacgugugcgugaccggcgacgacaagaacgccaccgccagcuucaucuacaacggcagacugguggacagcaucgugagcuggagcaaggagauccugagaacccaggagagcgagugcgugugcaucaacggcaccugcaccguggugaugaccgacggcagcgccagcggcaaggccgacaccaagauccuguucaucgaggagggcaagaucgugcacaccagcacccugagcggcagcgcccagcacguggaggagugcagcugcuaccccagauaccccggcgugagaugcgugugcagagacaacuggaagggcagcaacagacccaucguggacaucaacaucaaggacuacagcaucgugagcagcuacgugugcagcggccuggugggcgacacccccagaaagaacgacagcagcagcaacagccacugccuggaccccaacaacgaggagggcggccacggcgugaagggcugggccuucgacgacggcaacgacguguggaugggcagaaccaucagcgagaagcugagaagcggcuacgagaccuucaaggugaucgagggcuggagcaaccccaacagcaagcugcagaucaacagacaggugaucguggacagaggcaacagaagcggcuacagcggcaucuucagcguggagggcaagagcugcaucaacagaugcuucuacguggagcugaucagaggcagaaaggaggagaccgaggugcuguggaccagcaacagcaucgugguguucugcggcaccagcggcaccuacggcaccggcagcuggcccgacggcgccgacaucaaccugaugcccaucuga

SEQ ID NO: 176046 - RNA, 1410 nt, Artificial Sequence; identical to SEQ ID NO: 174867
  derived and/or modified CDS sequence (opt4) from neuraminidase__InfluenzaA__ABU92867

SEQ ID NO: 176047 - RNA, 1410 nt, Artificial Sequence; identical to SEQ ID NO: 175974
  derived and/or modified CDS sequence (opt4) from neuraminidase__InfluenzaA__ABU92868

SEQ ID NO: 176048 - RNA, 1410 nt, Artificial Sequence; identical to SEQ ID NO: 174754
  derived and/or modified CDS sequence (opt4) from neuraminidase__InfluenzaA__ABU92869

SEQ ID NO: 176049 - RNA, 1410 nt, Artificial Sequence; identical to SEQ ID NO: 175944
  derived and/or modified CDS sequence (opt4) from neuraminidase__InfluenzaA__ABU92870

SEQ ID NO: 176050 - RNA, 1410 nt, Artificial Sequence
  derived and/or modified CDS sequence (opt4) from neuraminidase__InfluenzaA__ABU92872
augaaccccaaccagaagaucaucaccaucggcagcgugagccugaccaucgccgccaucugcuuccugaugcagaucgccauccuggugaccaccgugacccugcacuucaagcagcacgagugcaacagcccccccaacaaccaggugaugcugugcgagcccaccaucaucgagagaaacaucaccgagaucguguaccugaccaacaccaccaucgagaaggagaucugccccaagcuggccgaguacagaaacuggagcaagccccagugcaacaucaccggcuucgcccccuucagcaaggacaacagcaucagacugagcgccggcggcgacaucugggugaccagagagcccuacgugagcugcgaccccgacaagugcuaccaguucgcccugggccagggcaccacccugaacaacggccacagcaacgacaccgugcacgacagaacccccuacagaacccugcugaugaacgagcugggcgugcccuuccaccugggcaccagacaggugugcaucgccuggagcagcagcagcugccacgacggcaaggccuggcugcacgugugcgugaccggcgacgacaagaacgccaccgccagcuucaucuacaacggcagacugguggacagcaucggcagcuggagcaagaagauccugagaacccaggagagcgagugcgugugcaucaacggcaccugcaccguggugaugaccgacggcagcgccagcggcaaggccgacaccaagauccuguucaucgaggagggcaagaucgugcacaucagcacccugagcggcagcgcccagcacguggaggagugcagcugcuaccccagauaccccggcgugagaugcgugugcagagacaacuggaagggcagcaacagacccaucguggacaucaacgugaaggacuacaacaucgugagcagcuacgugugcagcggccuggugggcgacacccccagaaagaacgacagcuucagcagcagccacugccuggaccccaacaacgaggagggcggccacggcgugaagggcugggccuucgacgacggcaacgacguguggaugggcagaaccaucagcgagaagcugagaagcggcuacgagaccuucaaggugaucgagggcuggagcaagcccaacagcaagcugcagaucaacagacaggugaucguggagagaggcaacagaagcggcuacagcggcaucuucagcguggagggcaagagcugcaucaacagaugcuucuacguggagcugaucagaggcagaaaggaggagaccgaggugugguggaccagcaacagcaucgugguguucugcggcaccagcggcaccuacggcaccggcagcuggcccgacggcgccgacaucaaccugaugcccaucuga

SEQ ID NO: 176051 - RNA, 1410 nt, Artificial Sequence
  derived and/or modified CDS sequence (opt4) from neuraminidase__InfluenzaA__ABU92873
augaaccccaaccagaagaucaucaccaucggcagcgugagccugaccaucagcaccaucugcuucuucaugcagaucgccauccugaucaccaccgugacccugcacuucaagcaguacgaguucaacagcccccccaacaaccaggugaugcugugcgagcccaccaucaucgagagaaacaucaccgagaucguguaccugaccaacaccaccaucgagaaggagaucugccccaagcuggccgaguacagaaacuggagcaagccccagugcaacaucaccggcuucgcccccuucagcaaggacaacagcaucagacugagcgccggcggcgacaucugggugaccagagagcccuacgugagcugcgaccccgacaagugcuaccaguucgcccugggccagggcaccacccugaacaacgugcacagcaacgacaccgugcacgacagaacccccuacagaacccugcugaugaacgagcugggcgugcccuuccaccugggcaccaagcaggugugcaucgccuggagcagcagcagcugccacgacggcaaggccuggcugcacgugugcgugaccggcgacgacgagaacgccaccgccagcuucaucuacaacggcagacugguggacagcaucgugagcuggagcaagaagauccugagaacccaggagagcgagugcgugugcaucaacggcaccugcaccguggugaugaccgacggcagcgccagcggcaaggccgacaccaagauccuguucaucgaggagggcaagaucgugcacaccagcacccugagcggcagcgcccagcacguggaggagugcagcugcuaccccagauaccccggcgugagaugcgugugcagagacaacuggaagggcagcaacagacccaucguggacaucaacaucaaggacuacagcaucgugagcagcuacgugugcagcggccuggugggcgacacccccagaaagaacgacagcagcagcagcagccacugccuggaccccaacaacgaggagggcggccacggcgugaagggcugggccuucgacgacggcaacgacguguggaugggcagaaccaucagcgagaagcugagaagcggcuacgagaccuucaaggugaucgagggcuggagcaaccccaacagcaagcugcagaucaacagacaggugaucguggacagaggcaacagaagcggcuacagcggcaucuucagcguggagggcaagagcugcaucaacagaugcuucuacguggagcugaucagaggcagaaagcaggagaccgaggugcuguggaccagcaacagcaucgugguguucugcggcaccagcggcaccuacggcaccggcagcuggcccgacggcgccgacaucaacaucaugcccaucuga

SEQ ID NO: 176052 - RNA, 1410 nt, Artificial Sequence; identical to SEQ ID NO: 175989
  derived and/or modified CDS sequence (opt4) from neuraminidase__InfluenzaA__ABU92874

SEQ ID NO: 176053 - RNA, 1410 nt, Artificial Sequence; identical to SEQ ID NO: 174285
  derived and/or modified CDS sequence (opt4) from neuraminidase__InfluenzaA__ABU92875

SEQ ID NO: 176054 - RNA, 1410 nt, Artificial Sequence; identical to SEQ ID NO: 174285
  derived and/or modified CDS sequence (opt4) from neuraminidase__InfluenzaA__ABU92876

SEQ ID NO: 176055 - RNA, 1410 nt, Artificial Sequence; identical to SEQ ID NO: 174205
  derived and/or modified CDS sequence (opt4) from neuraminidase__InfluenzaA__ABU92877

SEQ ID NO: 176056 - RNA, 1410 nt, Artificial Sequence; identical to SEQ ID NO: 174285
  derived and/or modified CDS sequence (opt4) from neuraminidase__InfluenzaA__ABU92878

SEQ ID NO: 176057 - RNA, 1410 nt, Artificial Sequence
  derived and/or modified CDS sequence (opt4) from neuraminidase__InfluenzaA__ABU92879
augaaccccaaccagaagaucaucaccaucggcagcgugagccugaccaucgccaccaucugcuuccugaugcagaucgccauccuggugaccaccgugacccugcacuucaagcagcacgagugcaacagcccccccaacaaccaggugaugcugugcgagcccaccaucaucgagagaaacaucaccgagaucguguaccugaccaacaccaccaucgagaaggagaucugccccaagcuggccgaguacagaaacuggagcaagccccagugcaacaucaccggcuucgcccccuucagcaaggacaacagcaucagacugagcgccggcggcgacaucugggugaccagagagcccuacgugagcugcgaccccgacaagugcuaccaguucgcccugggccagggcaccacccugaacaacggccacagcaacgacaccgugcacgacagaacccccuacagaacccugcugaugaacgagcugggcgugcccuuccaccugggcaccagacaggugugcaucgccuggagcagcagcagcugccacgacggcaaggccuggcugcacgugugcgugaccggcgacgacaagaacgccaccgccagcuucaucuacaacggcagacugguggacagcaucggcagcuggagcaagaagauccugagaacccaggagagcgagugcgugugcaucaacggcaccugcaccguggugaugaccgacggcagcgccagcggcaaggccgacaccaagauccuguucaucgaggagggcaagaucgugcacaucagcacccugagcggcagcgcccagcacguggaggagugcagcugcuaccccagauaccccggcgugagaugcgugugcagagacaacuggaagggcagcaacagacccaucguggacaucaacgugaaggacuacagcaucgugagcagcuacgugugcagcggccuggugggcgacacccccagaaagaacgacagcuucagcagcagccacugccuggaccccaacaacgaggagggcggccacggcgugaagggcugggccuucgacgacggcaacgacguguggaugggcagaaccaucagcgagaagcugagaagcggcuacgagaccuucaaggugaucgagggcuggagcaagcccaacagcaagcugcagaucaacagacaggugaucguggagagaggcaacagaagcggcuacagcggcaucuucagcguggagggcaagagcugcaucaacagaugcuucuacguggagcugaucagaggcagaaagggcgagaccgaggugugguggaccagcaacagcaucgugguguucugcggcaccagcggcaccuacggcaccggcagcuggcccgacggcgccgacaucaaccugaugcccaucuga

SEQ ID NO: 176058 - RNA, 1410 nt, Artificial Sequence; identical to SEQ ID NO: 176050
  derived and/or modified CDS sequence (opt4) from neuraminidase__InfluenzaA__ABU92880

SEQ ID NO: 176059 - RNA, 1410 nt, Artificial Sequence; identical to SEQ ID NO: 174285
  derived and/or modified CDS sequence (opt4) from neuraminidase__InfluenzaA__ABU92881

SEQ ID NO: 176060 - RNA, 1410 nt, Artificial Sequence; identical to SEQ ID NO: 174285
  derived and/or modified CDS sequence (opt4) from neuraminidase__InfluenzaA__ABU92882

SEQ ID NO: 176061 - RNA, 1410 nt, Artificial Sequence
  derived and/or modified CDS sequence (opt4) from neuraminidase__InfluenzaA__ABU92883
augaaccccaaccagaagaucaucaccaucggcagcgugagccugaccaucgccgccaucugcuuccugaugcagaucgccauccuggugaccaccgugacccugcacuucaagcagcacgagugcaacagcccccccaagaaccaggugaugcugugcgagcccaccaucaucgagagaaacaucaccgagaucguguaccugaccaacaccaccaucgagaaggagaucugccccaagcuggccgaguacagaaacuggagcaagccccagugcaacaucaccggcuucgcccccuucagcaaggacaacagcaucagacugagcgccggcggcgacaucugggugaccagagagcccuacgugagcugcgaccccgacaagugcuaccaguucgcccugggccagggcaccacccugaacaacggccacagcaacgacaccgugcacgacagaacccccuacagaacccugcugaugaacgagcugggcgugcccuuccaccugggcaccagacaggugugcaucgccuggagcagcagcagcugccacgacggcaaggccuggcugcacgugugcgugaccggcgacgacaagaacgccaccgccagcuucaucuacaacggcagacugguggacagcaucgugagcuggagcaagaagauccugagaacccaggagagcgagugcgugugcaucaacggcaccugcaccguggugaugaccgacggcagcgccagcggcaaggccgacaccaagauccuguucaucgaggagggcaagaucgugcacaucagcacccugagcggcagcgcccagcacguggaggagugcagcugcuaccccagauaccccggcgugagaugcgugugcagagacaacuggaagggcagcaacagacccaucguggacaucaacgugaaggacuacagcaucgugagcagcuacgugugcagcggccuggugggcgacacccccagaaagaacgacagcuucagcagcagccacugccuggaccccaacaacgaggagggcggccacggcgugaagggcugggccuucgacgacggcaacgacguguggaugggcagaaccaucagcgagaagcugagaagcggcuacgagaccuucaaggugaucgagggcuggagcaagcccaacagcaagcugcagaucaacagacaggugaucguggagagaggcaacagaagcggcuacagcggcaucuucagcguggagggcaagagcugcaucaacagaugcuucuacguggagcugaucagaggcagaaaggaggagaccgaggugugguggaccagcaacagcaucgugguguucugcggcaccagcggcaccuacggcaccggcagcuggcccgacggcgccgacaucaaccugaugcccaucuga

SEQ ID NO: 176062 - RNA, 1410 nt, Artificial Sequence; identical to SEQ ID NO: 174285
  derived and/or modified CDS sequence (opt4) from neuraminidase__InfluenzaA__ABU92884

SEQ ID NO: 176063 - RNA, 1410 nt, Artificial Sequence; identical to SEQ ID NO: 174285
  derived and/or modified CDS sequence (opt4) from neuraminidase__InfluenzaA__ABU92885

SEQ ID NO: 176064 - RNA, 1410 nt, Artificial Sequence; identical to SEQ ID NO: 174774
  derived and/or modified CDS sequence (opt4) from neuraminidase__InfluenzaA__ABU92886

SEQ ID NO: 176065 - RNA, 1410 nt, Artificial Sequence; identical to SEQ ID NO: 174285
  derived and/or modified CDS sequence (opt4) from neuraminidase__InfluenzaA__ABU92887

SEQ ID NO: 176066 - RNA, 1410 nt, Artificial Sequence
  derived and/or modified CDS sequence (opt4) from neuraminidase__InfluenzaA__ABU92888
augaaccccaaccagaagaucaucaccaucggcagcgugagccugaccaucagcaccaucugcuucuucaugcagaucgccauccugaucaccaccgugacccugcacuucaagcaguacgaguucaacagcccccccaacaaccaggugaugcugugcgagcccaccaucaucgagagaaacaucaccgagaucguguaccugaccaacaccaccaucgagaaggagaucugccccaagcuggccgaguacagaaacuggagcaagccccagugcaacaucaccggcuucgcccccuucagcaaggacaacagcaucagacugagcgccggcggcgacaucugggugaccagagagcccuacgugagcugcgaccccgacaagugcuaccaguucgcccugggccagggcaccacccugaacaacgugcacagcaacgacaccgugcacgacagaacccccuacagaacccugcugaugaacgagcugggcgugcccuuccaccugggcaccaagcaggugugcaucgccuggagcagcagcagcugccacgacggcaaggccuggcugcacgugugcgugaccggcgacgacgagaacgccaccgccagcuucaucuacaacggcagacugguggacagcaucgugagcuggagcaagaagauccugagaacccaggagagcgagugcgugugcaucaacggcaccugcaccguggugaugaccgacggcagcgccagcggcaaggccgacaccaagauccuguucaucgaggagggcaagaucgugcacaccagcacccugagcggcagcgcccagcacguggaggagugcagcugcuaccccagauaccccggcgugagaugcgugugcagagacaacuggaagggcagcaacagacccaucguggacaucaacaucaaggacuacagcaucaucagcagcuacgugugcagcggccuggugggcgacacccccagaaagaacgacagcagcagcagcagccacugccuggaccccaacaacgaggagggcggccacggcgugaagggcugggccuucgacgacggcaacgacguguggaugggcagaaccaucagcgagaagcugagaagcggcuacgagaccuucaaggugguggagggcuggagcaaccccaacagcaagcugcagaucaacagacaggugaucguggacagagacaacagaagcggcuacagcggcaucuucagcguggagggcaagagcugcaucaacagaugcuucuacguggagcugaucagaggcagaaaccaggagaccgaggugcuguggaccagcaacagcaucgugguguucugcggcaccagcggcaccuacggcaccggcagcuggcccgacggcgccgacaucaaccugaugcccaucuga

SEQ ID NO: 176067 - RNA, 1410 nt, Artificial Sequence; identical to SEQ ID NO: 175989
  derived and/or modified CDS sequence (opt4) from neuraminidase__InfluenzaA__ABU92889

SEQ ID NO: 176068 - RNA, 1410 nt, Artificial Sequence
  derived and/or modified CDS sequence (opt4) from neuraminidase__InfluenzaA__ABU92890
augaaccccaaccagaagaucaucaccaucggcagcgugagccugaccaucgccgccaucugcuuccugaugcagaucgccauccuggugaccaccgugacccugcacuucaagcagcacgagugcaacagcccccccaacaaccaggugaugcugugcgagcccaccaucaucgagagaaacaucaccgagaucguguaccugaccaacaccaccaucgagaaggagaucugccccaagcuggccgaguacagaaacuggagcaagccccagugcaacaucaccggcuucgcccccuucagcaaggacaacagcaucagacugagcgccggcggcgacaucugggugaccagagagcccuacgugagcugcgaccccgacaagugcuaccaguucgcccugggccagggcaccacccugaacaacggccacagcaacgacaccgugcacgacagaacccccuacagaacccugcugaugaacgagcugggcgugcccuuccaccugggcaccagacaggugugcaucgccuggagcagcagcagcugccacgacggcaaggccuggcugcacgugugcgugaccggcgacgacaagaacgccaccgccagcuucaucuacaacggcagacugguggacagcaucggcagcuggagcaagaagauccugagaacccaggagagcgagugcgugugcaucaacggcaccugcaccguggugaugaccgacggcagcgccagcggcaaggccgacaccaagauccuguucaucgaggagggcaagaucgugcacaucagcacccugagcggcagcgcccagcacguggaggagugcagcugcuaccccagauaccccggcgugagaugcgugugcagagacaacuggaagggcagcaacagacccaucguggacaucaacgugaaggacuacagcaucgugagcagcuacgugugcagcggccuggugggcgacacccccagaaagaacgacagcuucagcagcagccacugccuggaccccaacaacgaggagggcggccacggcgugaagggcugggccuucgacgacggcaacgacguguggaugggcagaaccaucagcgagaagcugagaagcggcuacgagaccuucaaggugaucgagggcuggagcaagcccaacagcaagcugcagaucaacagacaggugaucguggagagaggcaacagaagcggcuacagcggcaucuucagcguggagggcaagagcugcaucaacagaugcuucuacguggagcuggugagaggcagaaaggaggagaccgaggugugguggaccagcaacagcaucgugguguucugcggcaccagcggcaccuacggcaccggcagcuggcccgacggcgccgacaucaaccugaugcccaucuga

SEQ ID NO: 176069 - RNA, 1410 nt, Artificial Sequence; identical to SEQ ID NO: 176005
  derived and/or modified CDS sequence (opt4) from neuraminidase__InfluenzaA__ABU92891

SEQ ID NO: 176070 - RNA, 1410 nt, Artificial Sequence
  derived and/or modified CDS sequence (opt4) from neuraminidase__InfluenzaA__ABU92892
augaaccccaaccagaagaucaucaccaucggcagcgugagccugaccaucagcaccaucugcuucuucaugcagaucgccauccugaucaccaccgugacccugcacuucaagcaguacgaguucaacagcccccccaacaaccaggugaugcugugcgagcccaccaucaucgagagaaacaucaccgagaucguguaccugaccaacaccaccaucgagaaggagaucugccccaagcuggccgaguacagaaacuggagcaagccccagugcgacaucaccggcuucgcccccuucagcaaggacaacagcaucagacugagcgccggcggcaacaucugggugaccagagagcccuacgugagcugcgaccccgacaagugcuaccaguucgcccugggccagggcaccacccugaacaacgugcacagcaacgacaccgugcacgacagaacccccuacagaacccugcugaugaacgagcugggcgugcccuuccaccugggcaccaagcaggugugcaucgccuggagcagcagcagcugccacgacggcaaggccuggcugcacgugugcgugaccggcgacgacaagaacgccaccgccagcuucaucuacaacggcagacugguggacagcaucgugagcuggagcaagaagauccugagaacccaggagagcgagugcgugugcaucaacggcaccugcaccguggugaugaccgacggcagcgccagcggcaaggccgacaccaagauccuguucaucgaggagggcaagaucgugcacaccagcacccugagcggcagcgcccagcacguggaggagugcagcugcuaccccagauaccccggcgugagaugcgugugcagagacaacuggaagggcagcaacagacccaucguggacaucaacaucaaggacuacagcaucgugagcagcuacgugugcagcggccuggugggcgacacccccagaaagaacgacagcagcagcagcagccacugccuggaccccaacaacgaggagggcggccacggcgugaagggcugggccuucgacgacggcaacgacguguggaugggcagaaccaucagcgagaagcugagaagcggcuacgagaccuucaaggugaucgagggcuggagcaaccccaacagcaagcugcagaucaacagacaggugaucguggacagaggcaacagaagcggcuacagcggcaucuucagcguggagggcaagagcugcaucaacagaugcuucuacguggagcugaucagaggcagaaaggaggagaccgaggugcuguggaccagcaacagcaucgugguguucugcggcaccagcggcaccuacggcaccggcagcuggcccgacggcgccgacaucaaccugaugcccaucuga

SEQ ID NO: 176071 - RNA, 1410 nt, Artificial Sequence; identical to SEQ ID NO: 174867
  derived and/or modified CDS sequence (opt4) from neuraminidase__InfluenzaA__ABU92893

SEQ ID NO: 176072 - RNA, 1410 nt, Artificial Sequence
  derived and/or modified CDS sequence (opt4) from neuraminidase__InfluenzaA__ABU92895
augaaccccaaccagaagaucaucaccgugggcagcgugagccugaccaucagcaccaucugcuucuucaugcagaucgccauccugaucaccaccgugacccugcacuucaagcaguacgaguucaacagcccccccaacaaccaggugaugcugugcgagcccaccaucaucgagagaaacaucaccgagaucguguaccugaccaacaccaccaucgagaaggagaucugccccaagcuggccgaguacagaaacuggagcaagccccagugcgacaucaccggcuucgcccccuucagcaaggacaacagcaucagacugagcgccggcggcgacaucugggugaccagagagcccuacgugagcugcgaccccgacaagugcuaccaguucgcccugggccagggcaccacccugaacaacgugcacagcaacgacaccgugcacgacagaacccccuacagaacccugcugaugaacgagcugggcgugcccuuccaccugggcaccaagcaggugugcaucgccuggagcagcagcagcugccacgacggcaaggccuggcugcacgugugcgugaccggcgacgacaagaacgccaccgccagcuucaucuacaacggcagacugguggacagcaucgugagcuggagcaaggagauccugagaacccaggagagcgagugcgugugcaucaacggcaccugcaccguggugaugaccgacggcagcgccagcggcaaggccgacaccaagauccuguucaucgaggagggcaagaucgugcacaccagcacccugagcggcagcgcccagcacguggaggagugcagcugcuaccccagauaccccggcgugagaugcgugugcagagacaacuggaagggcagcaacagacccaucguggacaucaacaucaaggacuacagcaucgccagcagcuacgugugcagcggccuggugggcgacacccccagaaagaacgacagcagcagcagcagccacugccuggaccccaacaacgaggagggcggccacggcgugaagggcugggccuucgacgacggcaacgacguguggaugggcagaaccaucagcgagaagcugagaagcggcuacgagaccuucaaggugaucgagggcuggagcaaccccaacagcaagcugcagaucaacagacaggugaucguggacagaggcaacagaagcggcuacagcggcaucuucagcguggagggcaagagcugcaucaacagaugcuucuacguggagcugaucagaggcagaaaggaggagaccgaggugcuguggaccagcaacagcaucgugguguucugcggcaccagcggcaccuacggcaccggcagcuggcccgacggcgccgacaucaaccugaugcccaucuga

SEQ ID NO: 176073 - RNA, 1410 nt, Artificial Sequence
  derived and/or modified CDS sequence (opt4) from neuraminidase__InfluenzaA__ABU92896
augaaccccaaccagaagaucaucaccaucggcagcgugagccugaccaucagcaccaucugcuucuucaugcagaucgccauccugaucaccaccgugacccugcacuucaagcaguacgaguucaacagcccccccaacaaccaggugaugcugugcgagcccaccaucaucgagagaaacaucaccgagaucguguaccugaccaacaccaccaucgagaaggagaucugccccaagcuggccgaguacagaaacuggagcaagccccagugcgacaucaccggcuucgcccccuucagcaaggacaacagcaucagacugagcgccggcggcgacaucugggugaccagagagcccuacgugagcugcgaccccgacaagugcuaccaguucgcccugggccagggcaccacccugaacaacgugcacagcaacgacaccgugagagacagaacccccuacagaacccugcugaugaacgagcugggcgugcccuuccaccugggcaccaagcaggugugcaucgccuggagcagcagcagcugccacgacggcaaggccuggcugcacgugugcaucaccggcaacgacaagaacgccaccgccagcuucaucuacaacggcagacugguggacagcaucgugagcuggagcaaggagauccugagaacccaggagagcgagugcgugugcaucaacggcaccugcaccguggugaugaccgacggcagcgccagcggcaaggccgacaccaagauccuguucaucgaggagggcaagaucgugcacaccagcacccugagcggcagcgcccagcacguggaggagugcagcugcuaccccagauaccccggcgugagaugcgugugcagagacaacuggaagggcagcaacagacccaucguggacaucaacaucaaggaccacagcaucgugagcagcuacgugugcagcggccuggugggcgacacccccagaaagaacgacagcagcagcagcagccacugccuggaccccaacaacgaggagggcggccacggcgugaagggcugggccuucgacgacagaaacgacguguggaugggcagaaccaucagcgagaagagcagacugggcuacgagaccuucaaggugaucgagggcuggagcaaccccaacagcaagcugcagaucaacagacaggugaucguggacagaggcaacagaagcggcuacagcggcaucuucagcguggagggcaagagcugcaucaacagaugcuucuacguggagcugaucagaggcagaaaggaggagaccgaggugcuguggaccagcaacagcaucgugguguucugcggcaccagcggcaccuacggcaccggcagcuggcccgacggcgccgacaucaaccugaugcccaucuga

SEQ ID NO: 176074 - RNA, 1410 nt, Artificial Sequence
  derived and/or modified CDS sequence (opt4) from neuraminidase__InfluenzaA__ABU92897
augaaccccaaccagaagaucaucaccaucggcagcgugagccugaccaucagcaccaucugcuucuucaugcagaucgccauccugaucaccaccgugacccugcacuucaagcaguacgagcugaacagcccccccaacaaccaggugaugcugugcgagcccaccaucaucgagagaaacaucaccgagaucguguaccugaccaacaccaccaucgagaaggagaucugccccaagcuggccgaguacagaaacuggagcaagccccagugcaacaucaccggcuucgcccccuucagcaaggacaacagcaucagacugagcgccggcggcgacaucugggugaccagagagcccuacgugagcugcgaccccgacaagugcuaccaguucgcccugggccagggcaccacccugaacaacgugcacagcaacgacaccgugcacgacagaacccccuacagaacccugcugaugaacgagcugggcgugcccuuccaccugggcaccaagcaggugugcaucgccuggagcagcagcagcugccacgacggcaaggccuggcugcacgugugcgugaccggcgacgacaagaacgccaccgccagcuucaucuacaacggcagacugguggacagcaucgugagcuggagcaaggagauccugagaacccaggagagcgagugcgugugcaucaacggcaccugcaccguggugaugaccgacggcagcgccagcggcaaggccgacaccaagauccuguucaucgaggagggcaagaucgugcacaccagcacccugagcggcagcgcccagcacguggaggagugcagcugcuaccccagauaccccggcgugagaugcgugugcagagacaacuggaagggcagcaacagacccaucguggacaucaacaucaaggacuacagcaucgugagcagcuacgugugcagcggccuggugggcgacacccccagaaagaacgacagcagcagcagcagccacugccuggaccccaacaacgaggagggcggccacggcgugaagggcugggccuucgacgacggcaacgacguguggaugggcagaaccaucagcgagaagagcagaagcggcuacgagaccuucaaggugaucgagggcuggagcaaccccaacagcaagcugcagaucaacagacaggugaucguggacagaggcaacagaagcggcuacagcggcaucuucagcguggagggcaagagcugcaucaacagaugcuucuacguggagcugaucagaggcagaaaggaggagaccgaggugcuguggaccagcaacagcaucgugguguucugcggcaccagcggcaccuacggcaccggcagcuggcccgacggcgccgacaucaaccugaugcccaucuga

SEQ ID NO: 176075 - RNA, 1410 nt, Artificial Sequence
  derived and/or modified CDS sequence (opt4) from neuraminidase__InfluenzaA__ABU92898
augaaccccaaccagaagaucaucaccaucggcagcgugagccugaccaucagcaccaucugcuucuucaugcagaucgccauccugaucaccaccgugacccugcacuucaagcaguacgaguucaacagcccccccaacaaccaggugaugcugugcgagcccaccaucaucgagagaaacaucaccgagaucguguaccugaccaacaccaccaucgagaaggagaucugccccaagcuggccgaguacagaaacuggagcaagccccagugcgacaucaccggcuucgcccccuucagcaaggacaacagcaucagacugagcgccggcggcgacaucugggugaccagagagcccuacgugagcugcgaccccgacaagugcuaccaguucgcccugggccagggcaccacccugaacaacgugcacagcaacgacaccgugcacgacagaacccccuacagaacccugcugaugaacgagcugggcgugcccuuccaccugggcaccaagcaggugugcaucgccuggagcagcagcagcugccacgacggcaaggccuggcugcacgugugcgugaccggcgacgacaagaacgccaccgccagcuucaucuacaacggcagacugguggacagcguggugagcuggagcaaggacauccugagaacccaggagagcgagugcgugugcaucaacggcaccugcaccguggugaugaccgacggcagcgccagcggcaaggccgacaccaagauccuguucaucgaggagggcaagaucgugcacaccagcacccugagcggcagcgcccagcacguggaggagugcagcugcuaccccagauaccccggcgugagaugcgugugcagagacaacuggaagggcagcaacagacccaucguggacaucaacaucaagaacuacagcaucgugagcagcuacgugugcagcggccuggugggcgacacccccagaaagaccgacagcagcagcagcagccacugccuggaccccaacaacgaggagggcggccacggcgugaagggcugggccuucgacgacggcaacgacguguggaugggcagaaccaucagcgagaagcugagacugggcuacgagaccuucaaggugaucgagggcuggagcaaccccaacagcaagcugcagaucaacagacaggugaucguggacagaggcaacagaaccggcuacagcggcaucuucagcguggagggcaagagcugcaucaacagaugcuucuacguggagcugaucagaggcagaaaggaggagaccgaggugcuguggaccagcaacagcaucgugguguucugcggcaccagcggcaccuacggcaccggcagcuggcccgacggcgccgacaucaaccugaugcccaucuga

SEQ ID NO: 176076 - RNA, 1410 nt, Artificial Sequence; identical to SEQ ID NO: 174285
  derived and/or modified CDS sequence (opt4) from neuraminidase__InfluenzaA__ABU92899

SEQ ID NO: 176077 - RNA, 1410 nt, Artificial Sequence
  derived and/or modified CDS sequence (opt4) from neuraminidase__InfluenzaA__ABU92900
augaaccccaaccagaagaucaucaccaucggcagcgugagccugaccaucgccgccaucugcuuccugaugcagaucgccauccuggugaccaccgugacccugcacuucaagcagcacgagugcaaccccccccccaacaaccaggugaugcugugcgagcccaccaucaucgagagaaacaucaccgagaucguguaccugaccaacaccaccaucgagaaggagaucugccccaagcuggccgaguacagaaacuggagcaagccccagugcaacaucaccggcuucgcccccuucagcaaggacaacagcaucagacugagcgccggcggcgacaucugggugaccagagagcccuacgugagcugcgaccccgacaagugcuaccaguucgcccugggccagggcaccacccugaacaacggccacagcaacgacaccgugcacgacagaacccccuacagaacccugcugaugaacgagcugggcgugcccuuccaccugggcaccagacaggugugcaucgccuggagcagcagcagcugccacgacggcaaggccuggcugcacgugugcgugaccggcgacgacaagaacgccaccgccagcuucaucuacaacggcagacugguggacagcaucggcagcuggagcaagaagauccugagaacccaggagagcgagugcgugugcaucaacggcaccugcaccguggugaugaccgacggcagcgccagcggcaaggccgacaccaagauccuguucaucgaggagggcaagaucgugcacaucagcacccugagcggcagcgcccagcacguggaggagugcagcugcuaccccagauaccccggcgugagaugcgugugcagagacaacuggaagggcagcaacagacccaucguggacaucaacgugaaggacuacagcaucgugagcagcuacgugugcagcggccuggugggcgacacccccagaaagaacgacagcuucagcagcagccacugccuggaccccaacaacgaggagggcggccacggcgugaagggcugggccuucgacgacggcaacgacguguggaugggcagaaccaucagcgagaagcugagaagcggcuacgagaccuucaaggugaucgagggcuggagcaagcccaacagcaagcugcagaucaacagacaggugaucguggagagaggcaacagaagcggcuacagcggcaucuucagcguggagggcaagagcugcaucaacagaugcuucuacguggagcugaucagaggcagaaaggaggagaccgaggugugguggaccagcaacagcaucgugguguucugcggcaccagcggcaccuacggcaccggcagcuggcccgacggcgccgacaucaaccugaugcccaucuga

SEQ ID NO: 176078 - RNA, 1410 nt, Artificial Sequence
  derived and/or modified CDS sequence (opt4) from neuraminidase__InfluenzaA__ABU92901
augaaccccaaccagaagaucaucaccaucggcagcgugagccugaccaucgccgccaucugcuuccugaugcagaucgccauccuggugaccaccgugacccugcacuucaagcagcacgagugcaacagcccccccaacaaccaggugaugcugugcgagcccaccaucaucgagagaaacaucaccgagaucguguaccugaccaacaccaccaucgagaaggagaucugccccaagcuggccgaguacagaaacuggagcaagccccagugcaacaucaccggcuucgcccccuucagcaaggacaacagcaucagacugagcgccggcggcgacaucugggugaccagagagcccuacgugagcugcgaccccgacaagugcuaccaguucgcccugggccagggcaccacccugaacaacggccacagcaacgacaccgugcacgacagaacccccuacagaacccugcugaugaacgagcugggcgugcccuuccaccugggcaccagacaggugugcaucgccuggagcagcagcagcugccacgacggcaaggccuggcugcacgugugcgugaccggcgacgacaagaacgccaccgccagcuucaucuacaacggcagacugguggacagcaucagcagcuggagcaagaagauccugagaacccaggagagcgagugcgugugcaucaacggcaccugcaccguggugaugaccgacggcagcgccagcggcaaggccgacaccaagauccuguucaucgaggagggcaagaucgugcacaucagcacccugagcggcagcgcccagcacguggaggagugcagcugcuaccccagauaccccggcgugagaugcgugugcagagacaacuggaagggcagcaacagacccaucguggacaucaacgugaaggacuacagcaucgugagcagcuacgugugcagcggccuggugggcgacacccccagaaagaacgacagcuucagcagcagccacugccuggaccccaacaacgaggagggcggccacggcgugaagggcugggccuucgacgacggcaacgacguguggaugggcagaaccaucagcgagaagcugagaagcggcuacgagaccuucaaggugaucgagggcuggagcaagcccaacagcaagcugcagaucaacagacaggugaucguggagagaggcaacagaagcggcuacagcggcaucuucagcguggagggcaagagcugcaucaacagaugcuucuacguggagcugaucagaggcagaaaggaggagaccgaggugugguggaccagcaacagcaucgugguguucugcggcaccagcggcaccuacggcaccggcagcuggcccgacggcgccgacaucaaccugaugcccaucuga

SEQ ID NO: 176079 - RNA, 1410 nt, Artificial Sequence; identical to SEQ ID NO: 174285
  derived and/or modified CDS sequence (opt4) from neuraminidase__InfluenzaA__ABU92902

SEQ ID NO: 176080 - RNA, 1410 nt, Artificial Sequence; identical to SEQ ID NO: 174285
  derived and/or modified CDS sequence (opt4) from neuraminidase__InfluenzaA__ABU92903

SEQ ID NO: 176081 - RNA, 1410 nt, Artificial Sequence; identical to SEQ ID NO: 175240
  derived and/or modified CDS sequence (opt4) from neuraminidase__InfluenzaA__ABU92904

SEQ ID NO: 176082 - RNA, 1410 nt, Artificial Sequence; identical to SEQ ID NO: 174285
  derived and/or modified CDS sequence (opt4) from neuraminidase__InfluenzaA__ABU92905

SEQ ID NO: 176083 - RNA, 1410 nt, Artificial Sequence
  derived and/or modified CDS sequence (opt4) from neuraminidase__InfluenzaA__ABU92906
augaaccccaaccagaagaucaucaccaucggcagcgugagccugaccaucgccgccaucugcuuccugaugcagaucgccauccuggugaccaccgugacccugcacuucaagcagcacgagugcaacagcccccccaacaaccaggugaugcugugcgagcccaccaucaucgagagaaacaucaccgagaucguguaccugaccaacaccaccaucgagaaggagaucugccccaagcuggccgaguacagaaacuggagcaagccccagugcaacaucaccggcuucgcccccuucagcaaggacaacagcaucagacugagcgccggcggcgacaucugggugaccagagagcccuacgugagcugcgaccccgacaagugcuaccaguucgcccugggccagggcaccacccugaacaacggccacagcaacgacaccgugcacgacagaacccccuacagaacccugcugaugaacgagcugggcgugcccuuccaccugggcaccagacaggugugcaucgccuggagcagcagcagcugccacgacggcaaggccuggcugcacgugugcgugaccggcgacgacaagaacgccaccgccagcuucaucuacaacggcagacugguggacagcaucggcagcuggagcaagaagauccugagaacccaggagagcgagugcgugugcaucaacggcaccugcaccguggugaugaccgacggcagcgccagcggcaaggccgacaccaagauccuguucaucgaggagggcaagaucgugcacaucagcacccugagcggcagcgcccagcacguggaggagugcagcugcuaccccagauaccccggcgugagaugcgugugcagagacaacuggaagggcagcaacagacccaucguggacaucaacgugaaggacuacagcaucgugagcagcuacgugugcagcggccuggugggcgacacccccagaaagaacgacagcuucagcagcagccacugccuggaccccaacaacgaggagggcggccacggcgugaagggcugggccuucgacgacggcaacgacguguggaugggcagaaccaucagcgagaagcugagaagcggcuacgagaccuucaaggugaucgagggcuggagcaagcccaacagcaagcugcagaucaacagacaggugaucguggagagaggcaacagaagcggcuacagcggcaucuucagcguggagggcaagagcugcaucaacagaugcuucuacguggagcugaucagaggcagaaaggaggagaccgaggugugguggaccagcaacagcaucgugguguucugcggcaccagcggcaccuacggcaccggcagcuggcccgacggcgccgacaucaagcugaugcccaucuga

SEQ ID NO: 176084 - RNA, 1410 nt, Artificial Sequence
  derived and/or modified CDS sequence (opt4) from neuraminidase__InfluenzaA__ABU92907
augaaccccaaccagaagaucaucaccaucggcagcaucagccugaccaucgccgccaucugcuuccugaugcagaucgccauccuggugaccaccgugacccugcacuucaagcagcacgagugcaacagcccccccaacaaccaggugaugcugugcgagcccaccaucaucgagagaaacaucaccgagaucguguaccugaccaacaccaccaucgagaaggagaucugccccaagcuggccgaguacagaaacuggagcaagccccagugcaacaucaccggcuucgcccccuucagcaaggacaacagcaucagacugagcgccggcggcgacaucugggugaccagagagcccuacgugagcugcgaccccgacaagugcuaccaguucgcccugggccagggcaccacccugaacaacggccacagcaacgacaccgugcacgacagaacccccuacagaacccugcugaugaacgagcugggcgugcccuuccaccugggcaccagacaggugugcaucgccuggagcagcagcagcugccacgacggcaaggccuggcugcacgugugcgugaccggcgacgacaagaacgccaccgccagcuucaucuacaacggcagacugguggacagcaucggcagcuggagcaagaagauccugagaacccaggagagcgagugcgugugcaucaacggcaccugcaccguggugaugaccgacggcagcgccagcggcaaggccgacaccaagauccuguucaucgaggagggcaagaucgugcacaucagcacccugagcggcagcgcccagcacguggaggagugcagcugcuaccccagauaccccggcgugagaugcgugugcagagacaacuggaagggcagcaacagacccaucguggacaucaacgugaaggacuacagcaucgugagcagcuacgugugcagcggccuggugggcgacacccccagaaagaacgacagcuucagcagcagccacugccuggaccccaacaacgaggagggcggccacggcgugaagggcugggccuucgacgacggcaacgacguguggaugggcagaaccaucagcgagaagcugagaagcggcuacgagaccuucaaggugaucgagggcuggagcaagcccaacagcaagcugcagaucaacagacaggugaucguggagagaggcaacagaagcggcuacagcggcaucuucagcguggagggcaagagcugcaucaacagaugcuucuacguggagcugaucagaggcagaaaggaggagaccgaggugugguggaccagcaacagcaucgugguguucugcggcaccagcggcaccuacggcaccggcagcuggcccgacggcgccgacaucaaccugaugcccaucuga

SEQ ID NO: 176085 - RNA, 1410 nt, Artificial Sequence; identical to SEQ ID NO: 174285
  derived and/or modified CDS sequence (opt4) from neuraminidase__InfluenzaA__ABU92908

SEQ ID NO: 176086 - RNA, 1410 nt, Artificial Sequence; identical to SEQ ID NO: 174285
  derived and/or modified CDS sequence (opt4) from neuraminidase__InfluenzaA__ABU92909

SEQ ID NO: 176087 - RNA, 1410 nt, Artificial Sequence
  derived and/or modified CDS sequence (opt4) from neuraminidase__InfluenzaA__ABU92910
augaaccccaaccagaagaucaucaccaucggcagcgugagccugaccaucgccaccaucugcuuccugacccagaucgccauccugaucaccaccgugacccugcacuucaagcaguacgagugcaacagcccccccaacaaccaggugaugcugugcgagcccaccaucaucgagagaaacaucaccgagaucguguaccugaccaacaccaccaucgagaaggagaucugccccaagcuggccgaguacagaaacuggagcaagccccagugcaacaucaccggcuucgcccccuucagcaaggacaacagcaucagacugagcgccggcggcgacaucugggugaccagagagcccuacgugagcugcgaccccgacaagugcuaccaguucgcccugggccagggcaccacccugaacaacggccacagcaacgacaccgugcacgacagaacccccuacagaacccugcugaugaacgagcugggcgugcccuuccaccugggcaccaagcaggugugcaucgccuggagcagcagcagcugccacgacggcaaggccuggcugcacgugugcgugaccggcgacgacaagaacgccaccgccagcuucaucuacaacggcagacugguggacagcaucggcagcuggagcaagaagauccugagaacccaggagagcgagugcgugugcaucaacggcaccugcaccguggugaugaccgacggcagcgccagcggcaaggccgacaccaagauccuguucaucgaggagggcaagaucgugcacaccagccugcugagcggcagcgcccagcacguggaggagugcagcugcuaccccagauaccccggcgugagaugcgugugcagagacaacuggaagggcagcaacagacccaucguggacaucaacgugagagacuacagcaucgugagcagcuacgugugcagcggccuggugggcgacacccccagaaagaacgacagcagcagcagcagccacugccuggaccccaacaacgaggagggcggccacggcgugaagggcugggccuucgacgacggcaacgacguguggaugggcagaaccaucagcgagaagcugagaagcggcuacgagaccuucaaggugaucgagggcuggagcaagcccaacagcaagcugcagaucaacagacaggugaucguggacaagggcaacagaagcggcuacagcggcaucuucagcguggagggcaagagcugcaucaacagaugcuucuacguggagcugaucagaggcagaaaccaggagaccgaggugcuguggaccagcaacagcaucgugguguucugcggcaccagcggcaccuacggcaccggcagcuggcccgacggcgccgacaucaaccugaugcccaucuga

SEQ ID NO: 176088 - RNA, 1410 nt, Artificial Sequence
  derived and/or modified CDS sequence (opt4) from neuraminidase__InfluenzaA__ABU92911
augaaccccaaccagaagaucaucaccaucggcagcgugagccugaccaucgccaccaucugcuuccugacccagaucgccauccuggugaccaccgugacccugcacuucaagcaguacgagugcaacagcccccccaacaaccaggugaugcugugcgagcccaccaucaucgagagaaacaucaccgagaucguguaccugaccaacaccaccaucgagaaggagaucugccccaagcaggccgaguacagaaacuggagcaagccccagugcaacaucaccggcuucgcccccuucagcaaggacaacagcaucagacugagcgccggcggcgacaucugggugaccagagagcccuacgugagcugcgaccccgacaagugcuaccaguucgcccugggccagggcaccacccugaacaacggccacagcaacgacaccgugcacgacagaacccccuacagaacccugcugaugaacgagcugggcgugcccuuccaccugggcaccaagcaggugugcaucgccuggagcagcagcagcugccacgacggcaaggccuggcugcacgugugcgugaccggcgacgacaagaacgccaccgccagcuucaucuacaacggcagacugguggacagcaucggcagcuggagcaagaagauccugagaacccaggagagcgagugcgugugcaucaacggcaccugcaccguggugaugaccgacggcagcgccagcggcaaggccgacaccaagauccuguucaucaaggagggcaagaucgugcacaccagccugcugagcggcagcgcccagcacguggaggagugcagcugcuaccccagauaccccggcgugagaugcgugugcagagacaacuggaagggcagcaacagacccaucguggacaucaacgugaaggacuacagcaucgugagcagcuacgugugcagcggccuggugggcgacacccccagaaagaacgacagcagcagcagcagccacugccuggaccccaacaacgaggagggcggccacggcgugaagggcugggccuucgacgacggcaacgacguguggaugggcagaaccaucagcgagaagcugagaagcggcuacgagaccuucaaggugaucgagggcuggagcaagcccaacagcaagcugcagaucaacagacaggugaucguggacagagacaacagaagcggcuacagcggcaucuucagcguggagggcaagagcugcaucaacagaugcuucuacguggagcugaucagaggcagaaaccaggagaccgaggugcuguggaccagcaacagcaucgugguguucugcggcaccagcggcaccuacggcaccggcagcuggcccgacggcgccgacaucaaccugaugcccaucuga

SEQ ID NO: 176089 - RNA, 1410 nt, Artificial Sequence
  derived and/or modified CDS sequence (opt4) from neuraminidase__InfluenzaA__ABU92913
augaaccccaaccagaagaucaucaccaucggcagcgugagccugaccaucgccaccaucugcuuccugacccagaucgccauccuggugaccaccgugacccugcacuucaagcaguacgagugcaacagcccccccaacaaccaggugaugcugugcgagcccaccaucaucgagagaaacaucaccgagaucguguaccugaccaacaccaccaucgagaaggagaucugccccaagcuggccgaguacagaaacuggagcaagccccagugcaacaucaccggcuucgcccccuucagcaaggacaacagcaucagacugagcgccggcggcgacaucugggugaccagagagcccuacgugagcugcgaccccgacaagugcuaccaguucgcccugggccagggcaccacccugaacaacggccacagcaacgacaccgugcacgacagaacccccuacagaacccugcugaugaacgagcugggcgugcccuuccaccugggcaccaagcaggugugcaucgccuggagcagcagcagcugccacgacggcaaggccuggcugcacgugugcgugaccggcgacgacaagaacgccaccgccagcuucaucuacaacggcagacugguggacagcaucggcagcuggagcaagaagauccugagaacccaggagagcgagugcgugugcaucaacggcaccugcaccguggugaugaccgacggcagcgccagcggcaaggccgacaccaagauccuguucaucaaggagggcaagaucgugcacaccagccugcugagcggcagcgcccagcacguggaggagugcagcugcuaccccagauaccccggcgugagaugcgugugcagagacaacuggaagggcagcaacagacccaucguggacaucaacgugaaggacuacagcaucgugagcagcuacgugugcagcggccuggugggcgacacccccagaaagaacgacagcagcagcagcagccacugccuggaccccaacaacgaggagggcggccacggcgugaagggcugggccuucgacgacggcaacgacguguggaugggcagaaccaucagcgagaagcugagaagcggcuacgagaccuucaaggugaucgagggcuggagcaagcccaacagcaagcugcagaucaacagacaggugaucguggacagagacaacagaagcggcuacagcggcaucuucagcguggagggcaagagcugcaucaacagaugcuucuacguggagcugaucagaggcagaaaccaggagaccgaggugcuguggaccagcaacagcaucgugguguucugcggcaccagcggcaccuacggcaccggcagcuggcccgacggcgccgacaucaaccugaugcccaucuga

SEQ ID NO: 176090 - RNA, 1413 nt, Artificial Sequence
  derived and/or modified CDS sequence (opt4) from neuraminidase__InfluenzaA__ABV29560
augaaccccaaccagaagaucaucaccaucggcagcaucagcaucgccaucggcaucaucagccugaugcugcagaucggcaacaucaucagcaucugggccagccacagcauccagaccggcagccagaaccacaccggcaucugcaaccagagaaucaucaccuacgagaacagcaccugggugaaccacaccuacgugagcaucaacaacaccaacgugguggccggcaaggacaagaccagcgugacccuggccggcaacagcagccugugcagcaucagcggcugggccaucuacaccaaggacaacagcaucagaaucggcagcaagggcgacguguucgugaucagagagcccuucaucagcugcagccaccuggagugcagaaccuucuuccugacccagggcgcccugcugaacgacaagcacagcaacggcaccgugaaggacagaagccccuacagagcccugaugagcugcccccugggcgaggcccccagccccuacaacagcaaguucgagagcguggccuggagcgccagcgccugccacgacggcaugggcuggcugaccaucggcaucagcggccccgacaacggcgccguggccgugcugaaguacaacggcaucaucaccgagaccaucaagagcuggaagaagagaauccugagaacccaggagagcgagugcgugugcgugaacggcagcugcuucaccaucaugaccgacggccccagcaacggcgccgccagcuacaagaucuucaagaucgagaagggcaaggugaccaagagcaucgagcugaacgcccccaacuuccacuacgaggagugcagcugcuaccccgacaccggcaccgugaugugcgugugcagagacaacuggcacggcagcaacagacccugggugagcuucaaccagaaccuggacuaccagaucggcuacaucugcagcggcguguucggcgacaaccccagacccaaggacggcaagggcagcugcaaccccgugaccguggacggcgccgacggcgugaagggcuucagcuacaaguacggcaacggcguguggaucggcagaaccaagagcaacagacugagaaagggcuucgagaugaucugggaccccaacggcuggaccgacaccgacagcgacuucagcgugaagcaggacgugguggccaucaccgacuggagcggcuacagcggcagcuucgugcagcaccccgagcugaccggccuggacugcaucagacccugcuucuggguggagcuggugagaggccugcccagagagaacaccaccaucuggaccagcggcagcagcaucagcuucugcggcguggacagcgacaccgccaacuggagcuggcccgacggcgccgagcugcccuucaccaucgacaaguga

SEQ ID NO: 176091 - RNA, 1413 nt, Artificial Sequence; identical to SEQ ID NO: 176090
  derived and/or modified CDS sequence (opt4) from neuraminidase__InfluenzaA__ABV29571

SEQ ID NO: 176092 - RNA, 1413 nt, Artificial Sequence; identical to SEQ ID NO: 176090
  derived and/or modified CDS sequence (opt4) from neuraminidase__InfluenzaA__ABV29582

SEQ ID NO: 176093 - RNA, 1413 nt, Artificial Sequence; identical to SEQ ID NO: 176090
  derived and/or modified CDS sequence (opt4) from neuraminidase__InfluenzaA__ABV29615

SEQ ID NO: 176094 - RNA, 1413 nt, Artificial Sequence
  derived and/or modified CDS sequence (opt4) from neuraminidase__InfluenzaA__ABV29637
augaaccccaaccagaagaucaucaccaucggcagcaucagcaucgccaucggcaucaucagccugaugcugcagaucggcaacaucaucagcaucugggccagccacagcauccagaccggcagccagaaccacaccggcaucugcaaccagagaaucaucaccuacgagaacagcaccugggugaaccacaccuacgugaacaucaacaacaccaacgugguggccggcaaggacaagaccagcgugacccuggccggcaacagcagccugugcagcaucagcggcugggccaucuacaccaaggacaacagcaucagaaucggcagcaagggcgacguguucgugaucagagagcccuucaucagcugcagccaccuggagugcagaaccuucuuccugacccagggcgcccugcugaacgacaagcacagcaacggcaccgugaaggacagaagccccuacagagcccugaugagcugcccccugggcgaggcccccagccccuacaacagcaaguucgagagcguggccuggagcgccagcgccugccacgacggcaugggcuggcugaccaucggcaucagcggccccgacaacggcgccguggccgugcugaaguacaacggcaucaucaccgagaccaucaagagcuggaagaagagaauccugagaacccaggagagcgagugcgugugcgugaacggcagcugcuucaccaucaugaccgacggccccagcaacggcaccgccagcuacaagaucuucaagaucgagaagggcaaggugaccaagagcaucgagcugaacgcccccaacuuccacuacgaggagugcagcugcuaccccgacaccggcaccgugaugugcgugugcagagacaacuggcacggcagcaacagacccugggugagcuucaaccagaaccuggacuaccaggugggcuacaucugcagcggcguguucggcgacaaccccagacccaaggacggcaagggcagcugcaaccccaugaccguggacggcgccgacggcgugaagggcuucagcuacaaguacggcaacggcguguggaucggcagaaccaagagcaacaagcugagaaagggcuucgagaugaucugggaccccaacggcuggaccgacaccgacagcgacuucagcgugaagcaggacgugguggccaucagcgacuggagcggcuacagcggcagcuucgugcagcaccccgagcugaccggccuggacugcaucagacccugcuucuggguggagcuggugagaggccugcccagagagaacaccaccaucuggaccagcggcagcagcaucagcuucugcggcguggacagcgacaccgccaacuggagcuggcccgacggcgccgagcugcccuucaccaucgacaaguga

SEQ ID NO: 176095 - RNA, 1413 nt, Artificial Sequence; identical to SEQ ID NO: 176090
  derived and/or modified CDS sequence (opt4) from neuraminidase__InfluenzaA__ABV29648

SEQ ID NO: 176096 - RNA, 1413 nt, Artificial Sequence; identical to SEQ ID NO: 176090
  derived and/or modified CDS sequence (opt4) from neuraminidase__InfluenzaA__ABV29659

SEQ ID NO: 176097 - RNA, 1413 nt, Artificial Sequence; identical to SEQ ID NO: 176090
  derived and/or modified CDS sequence (opt4) from neuraminidase__InfluenzaA__ABV29670

SEQ ID NO: 176098 - RNA, 1413 nt, Artificial Sequence
  derived and/or modified CDS sequence (opt4) from neuraminidase__InfluenzaA__ABV29681
augaaccccaaccagaagaucaucaccaucggcagcaucagcaucgccaucggcaucaucagccugaugcugcagaucggcaacaucaucagcaucugggccagccacagcauccagaccggcagccagaaccacaccggcaucugcaaccagagaaucaucaccuacgagaacagcaccugggugaaccacaccuacgugagcaucaacaacaccaacgugguggccggcaaggacaagaccagcgugacccuggccggcaacagcagccugugcagcaucagcggcugggccaucuacaccaaggacaacagcaucagaaucggcagcaagggcgacguguucgugaucagagagcccuucaucagcugcagccaccuggagugcagaaccuucuuccugacccagggcgcccugcugaacgacaagcacagcaacggcaccgugaaggacagaagccccuacagagcccugaugagcugcccccugggcgaggcccccagccccuacaacagcaaguucgagagcguggccuggagcgccagcgccugccacgacggcaugggcuggcugaccaucggcaucagcggccccgacaacggcgccguggccgugcugaaguacaacggcaucaucaccgagaccaucaagagcuggaagaagagaauccugagaacccaggagagcgagugcgugugcgugaacggcagcugcuucaccaucaugaccgacggccccagcaacggcgccgccagcuacaagaucuucaagaucgagaagggcaaggugaccaagagcaucgagcugaacgcccccaacuuccacuacgaggagugcagcugcuaccccgacaccggcaccgugaugugcgugugcagagacaacuggcacggcagcaacagacccugggugagcuucaaccagaaccuggacuaccagaucggcuacaucugcagcggcguguucggcgacaaccccagacccaaggacggcaagggcagcugcaaccccgugaccguggacggcgccgacggcgugaagggcuucagcuacaaguacggcaacggcguguggaucggcagaaccaagagcaacagacugagaaagggcuucgagaugaucugggaccccaacggcuggaccgacaccgacagcgacuucagcgugaagcaggacgugguggccaucaccgacuggagcggcuacagcggcagcuucgugcagcaccccgagcugaccggccuggacugcaucagacccugcuucuggguggagcuggugagaggccugcccagagagaacaccaccaucuggaccagcggcagcagcaucagcuucugcggcaucgacagcgacaccgccaacuggagcuggcccgacggcgccgagcugcccuucaccaucgacaaguga

SEQ ID NO: 176099 - RNA, 1413 nt, Artificial Sequence; identical to SEQ ID NO: 176090
  derived and/or modified CDS sequence (opt4) from neuraminidase__InfluenzaA__ABV29692

SEQ ID NO: 176100 - RNA, 1413 nt, Artificial Sequence; identical to SEQ ID NO: 176090
  derived and/or modified CDS sequence (opt4) from neuraminidase__InfluenzaA__ABV29703

SEQ ID NO: 176101 - RNA, 1410 nt, Artificial Sequence
  derived and/or modified CDS sequence (opt4) from neuraminidase__InfluenzaA__ABV29714
augaaccccaaccagaagaucaucaccaucggcagcgugagccugaccaucagcaccaucugcuucuucaugcagaucgccauccugaucaccaccgugacccugcacuucaagcaguacgaguucaacagcccccccaacaaccaggugaugcugugcgagcccaccaucaucgagagaaacaucaccgagaucguguaccugaccaacaccaccaucgagaaggagaucugccccaagcuggccgaguacagaaacuggagcaagccccagugcgacaucaccggcuucgcccccuucagcaaggacaacagcaucagacugagcgccggcggcgacaucugggugaccagagagcccuacgugagcugcgaccccgacaagugcuaccaguucgcccugggccagggcaccacccugaacaacgugcacagcaacgacaccgugagagacagaacccccuacagaacccugcugaugaacgagcugggcgugcccuuccaccugggcaccaagcaggugugcaucgccuggagcagcagcagcugccacgacggcaaggccuggcugcacgugugcaucaccggcgacgacaagaacgccaccgccagcuucaucuacaacggcagacugguggacagcaucgugagcuggagcaaggagauccugagaacccaggagagcgagugcgugugcaucaacggcaccugcaccguggugaugaccgacggcagcgccagcggcgaggccgacaccaagauccuguucaucgaggagggcaagaucgugcacaccagcacccugagcggcagcgcccagcacguggaggagugcagcugcuaccccagauaccccggcgugagaugcgugugcagagacaacuggaagggcagcaacagacccaucguggacaucaacaucaaggaccacagcaucgugagcagcuacgugugcagcggccuggugggcgacacccccagaaagaacgacagcagcagcagcagccacugccuggaccccaacaacgaggagggcggccacggcgugaagggcugggccuucgacgacggcaacgacguguggaugggcagaaccaucagcgagaagagcagacugggcuacgagaccuucaaggugaucgagggcuggagcaaccccaagagcaagcugcagaucaacagacaggugaucguggacagaggcaacagaagcggcuacagcggcaucuucagcguggagggcaagagcugcaucaacagaugcuucuacguggagcugaucagaggcagaaaggaggagaccgaggugcuguggaccagcaacagcaucgugguguucugcggcaccagcggcaccuacggcaccggcagcuggcccgacggcgccgacaucaaccugaugcccaucuga

SEQ ID NO: 176102 - RNA, 1410 nt, Artificial Sequence
  derived and/or modified CDS sequence (opt4) from neuraminidase__InfluenzaA__ABV29725
augaaccccaaccagaagaucaucaccaucggcagcgugagccugaccaucagcaccaucugcuucuucaugcagaccgccauccugaucaccaccgugacccugcacuucaagcaguacgaguucaacagcccccccaacaaccagggcaugcugugcgagcccaccaucaucgagagaaacaucaccgagaucguguaccugaccaacaccaccaucgagaaggagaucugccccaagcuggccgaguacagaaacuggagcaagccccagugcgacaucaccggcuucgcccccuucagcaaggacaacagcaucagacugagcgccggcggcgacaucugggugaccagagagcccuacgugagcugcgaccccgacaagugcuaccaguucgcccugggccagggcaccacccugaacaacgugcacagcaacgacaccgugagagacagaacccccuacagaacccugcugaugaacgagcugggcgugcccuuccaccugggcaccaagcaggugugcaucgccuggagcagcagcagcugccacgacggcaaggccuggcugcacgugugcaucaccggcgacgacaagaacgccaccgccagcuucaucuacaacggcagacugguggacagcaucgugagcuggagcaaggagauccugagaacccaggagagcgagugcgugugcaucaacggcaccugcaccguggugaugaccgacggcagcgccagcggcaaggccgacaccaagauccuguucaucgaggagggcaagaucgugcacaccagcacccugagcggcagcgcccagcacguggaggagugcagcugcuuccccagauaccccggcgugagaugcgugugcagagacaacuggaagggcagcaacagacccaucguggacaucaacaucaaggaccacagcaucgugagcagcuacgugugcagcggccuggugggcgacacccccagaaagaacgacagcagcagcagcagccacugccuggaccccaacaacgaggagggcggccacggcgugaagggcugggccuucgacgacggcaacgacguguggaugggcagaaccaucagcgagaagagcagacugggcuacgagaccuucaaggugaucgagggcuggagcaaccccaagagcaagcugcagaucaacagacaggugaucguggacagaggcaacagaagcggcuacagcggcaucuucagcguggagggcaagagcugcaucaacagaugcuucuacguggagcugaucagaggcagaaaggaggagaccgaggugcuguggaccagcaacagcaucgugguguucugcggcaccagcggcaccuacggcaccggcagcuggcccgacggcgccgacaucaaccugaugcccaucuga

SEQ ID NO: 176103 - RNA, 1413 nt, Artificial Sequence
  derived and/or modified CDS sequence (opt4) from neuraminidase__InfluenzaA__ABV29736
augaaccccaaccagaagaucaucaccaucggcagcaucagcaucgccaucggcaucaucagccugaugcugcagaucggcaacaucaucagcaucugggccagccacagcauccagaccggcagccagaaccacaccggcaucugcaaccagagaaucaucaccuacgagaacagcaccugggugaaccacaccuacgugaacaucaacaacaccaacguggugaccggcaaggacaagaccagcgugacccuggccggcaacagcagccugugcagcaucagcggcugggccaucuacaccaaggacaacagcaucagaaucggcagcaagggcgacguguucgugaucagagagcccuucaucagcugcagccaccuggagugcagaaccuucuuccugacccagggcgcccugcugaacgacaagcacagcaacggcaccgugaaggacagaagccccuacagagcccugaugagcugcccccugggcgaggcccccagccccuacaacagcaaguucgagagcguggccuggagcgccagcgccugccacgacggcaugggcuggcugaccaucggcaucagcggccccgacaacggcgccguggccgugcugaaguacaacggcaucaucaccgagaccaucaagagcuggaagaagagaauccugagaacccaggagagcgagugcgugugcgugaacggcagcugcuucaccaucaugaccgacggccccagcgacggcgccgccagcuacaagaucuucaagaucgagaagggcaaggugaccaagagcaucgagcugaacgcccccaacuuccacuacgaggagugcagcugcuaccccgacaccggcaccgugaugugcgugugcagagacaacuggcacggcagcaacagacccugggugagcuucaaccagaaccuggacuaccagaucggcuacaucugcagcggcguguucggcgacaaccccagacccaaggacggcaagggcagcugcaaccccgugaccguggacggcgccgacggcgugaagggcuucagcuacaaguacggcaacggcguguggaucggcagaaccaagagcaacaagcugagaaagggcuucgagaugaucugggaccccaacggcuggaccgacaccgacaacgacuucagcgugaagcaggacgugguggccaucaccgacuggagcggcuacagcggcagcuucgugcagcaccccgagcugaccggccuggacugcaucagacccugcuucuggguggagcuggugagaggccugcccagagagaacaccaccaucuggaccagcggcagcagcaucagcuucugcggcguggacagcgacaccgccaacuggagcuggcccgacggcgccgagcugcccuucaccaucgacaaguga

SEQ ID NO: 176104 - RNA, 1413 nt, Artificial Sequence
  derived and/or modified CDS sequence (opt4) from neuraminidase__InfluenzaA__ABV29747
augaaccccaaccagaagaucaucaccaucggcagcaucagcaucgccaucggcaucaucagccugaugcugcagaucggcaacaucaucagcaucugggccagccacagcauccagaccggcagccagaaccacaccggcaucugcaaccagagaaucaucaccuacgagaacagcaccugggugaaccacaccuacgugagcaucaacaacaccaacgugguggccggcaaggacaagaccagcgugacccuggccggcaacagcagccugugcagcaucagcggcugggccaucuacaccaaggacaacagcaucagaaucggcagcaagggcgacguguucgugaucagagagcccuucaucagcugcagccaccuggagugcagaaccuucuuccugacccagggcgcccugcugaacgacaagcacagcaacggcaccgugaaggacagaagccccuacagagcccugaugagcugcccccugggcgaggcccccagccccuacaacagcaaguucgagagcguggccuggagcgccagcgccugccacgacggcaugggcuggcugaccaucggcaucagcggccccgacaacggcgccguggccgugcugaaguacaacggcaucaucaccgagaccaucaagagcuggaagaagagaauccugagaacccaggagagcgagugcgugugcgugaacggcagcugcuucaccaucaugaccgacggccccagcaacggcgccgccagcuacaagaucuucaagaucgagaagggcaaggugaccaagagcaucgagcugaacgcccccaacuuccacuacgaggagugcagcugcuaccccgacaccggcaccgugaugugcgugugcagagacaacuggcacggcagcaacagacccugggugagcuucaaccagaaccuggacuaccagaucggcuacaucugcagcggcguguucggcgacaaccccagacccaaggacggcaagggcagcugcaaccccgugaccguggacggcgccgacggcgugaagggcuucagcuacaaguacggcaacggcguguggaucggcagaaccaagagcaacagacugagaaagggcuucgagaugaucugggaccccaacggcuggaccgacaccgacagcgacuucagcgugagacaggacgugguggccaucaccgacuggagcggcuacagcggcagcuucgugcagcaccccgagcugaccggccuggacugcaucagacccugcuucuggguggagcuggugagaggccugcccagagagaacaccaccaucuggaccagcggcagcagcaucagcuucugcggcguggacagcgacaccgccaacuggagcuggcccgacggcgccgagcugcccuucaccaucgacaaguga

SEQ ID NO: 176105 - RNA, 1413 nt, Artificial Sequence; identical to SEQ ID NO: 176090
  derived and/or modified CDS sequence (opt4) from neuraminidase__InfluenzaA__ABV29769

SEQ ID NO: 176106 - RNA, 1413 nt, Artificial Sequence
  derived and/or modified CDS sequence (opt4) from neuraminidase__InfluenzaA__ABV29780
augaaccccaaccagaagaucaucaccaucggcagcaucagcaucgccaucggcaucaucagccugaugcugcagaucggcaacaucaucagcaucugggccagccacagcauccagaccggcagccagaaccacaccggcaucugcaaccagagaaucaucaccuacgagaacagcaccugggugaaccacaccuacgugaacaucaacaacaccaacguggugaccggcaaggacaagaccagcgugacccuggccggcaacagcagccugugcagcaucagcggcugggccaucuacaccaaggacaacagcaucagaaucggcagcaagggcgacguguucgugaucagagagcccuucaucagcugcagccaccuggagugcagaaccuucuuccugacccagggcgcccugcugaacgacaagcacagcaacggcaccgugaaggacagaagccccuacagagcccugaugagcugcccccugggcgaggcccccagccccuacaacagcaaguucgagagcguggccuggagcgccagcgccugccacgacggcaugggcuggcugaccaucggcaucagcggccccgacaacggcgccguggccgugcugaaguacaacggcaucaucaccgagaccaucaagagcuggaagaagagaauccugagaacccaggagagcgagugcgugugcgugaacggcagcugcuucaccaucaugaccgacggccccagcgacggcgccgccagcuacaagaucuucaagaucgagaagggcaaggugaccaagagcaucgagcugaacgcccccaacuuccacuacgaggagugcagcugcuaccccgacaccggcaccgugaugugcgugugcagagacaacuggcacggcagcaacagacccugggugagcuucaaccagaaccuggacuaccagaucggcuacaucugcagcggcguguucggcgacaaccccagacccaaggacggcaagggcagcugcaaccccgugaccguggacggcgccgacggcgugaagggcuucagcuacaaguacggcaacggcguguggaucggcagaaccaagagcagcaagcugagaaagggcuucgagaugaucugggaccccaacggcuggaccgacaccgacaacgacuucagcgugaagcaggacgugguggccaucaccgacuggagcggcuacagcggcagcuucgugcagcaccccgagcugaccggccuggacugcaucagacccugcuucuggguggagcuggugagaggccugcccagagagaacaccaccaucuggaccagcggcagcagcaucagcuucugcggcguggacagcgacaccgccaacuggagcuggcccgacggcgccgagcugcccuucaccaucgacaaguga

SEQ ID NO: 176107 - RNA, 1413 nt, Artificial Sequence; identical to SEQ ID NO: 176090
  derived and/or modified CDS sequence (opt4) from neuraminidase__InfluenzaA__ABV29791

SEQ ID NO: 176108 - RNA, 1413 nt, Artificial Sequence; identical to SEQ ID NO: 176090
  derived and/or modified CDS sequence (opt4) from neuraminidase__InfluenzaA__ABV29802

SEQ ID NO: 176109 - RNA, 1410 nt, Artificial Sequence; identical to SEQ ID NO: 175944
  derived and/or modified CDS sequence (opt4) from neuraminidase__InfluenzaA__ABV29824

SEQ ID NO: 176110 - RNA, 1413 nt, Artificial Sequence; identical to SEQ ID NO: 176090
  derived and/or modified CDS sequence (opt4) from neuraminidase__InfluenzaA__ABV29835

SEQ ID NO: 176111 - RNA, 1413 nt, Artificial Sequence
  derived and/or modified CDS sequence (opt4) from neuraminidase__InfluenzaA__ABV29846
augaaccccaaccagaagaucaucaccaucggcagcaucagcaucgccaucggcaucaucagccugaugcugcagaucggcaacaucaucagcaucugggccagccacagcauccagaucggcagccagaaccacaccggcaucugcaaccagagaaucaucaccuacgagaacagcaccugggugaaccacaccuacgugaacaucaacaacaccaacgugguggccggcaaggacaagaccagcgugacccuggccggcaacagcagccugugcagcaucagcggcugggccaucuacaccaaggacaacagcaucagaaucggcagcaagggcgacguguucgugaucagagagcccuucaucagcugcagccaccuggagugcagaaccuucuuccugacccagggcgcccugcugaacgacaagcacagcaacggcaccgugaaggacagaagccccuacagagcccugaugagcugcccccugggcgaggcccccagccccuacaacagcaaguucgagagcguggccuggagcgccagcgccugccacgacggcaugggcuggcugaccaucggcaucagcggccccgacaacggcgccguggccgugcugaaguacaacggcaucaucaccgagaccaucaagagcuggaagaagagaauccugagaacccaggagagcgagugcgugugcgugaacggcagcugcuucaccaucaugaccgacggccccagcaacggcgccgccagcuacaagaucuucaagaucgagaagggcaaggugaccaagagcaucgagcugaacgcccccaacuuccacuacgaggagugcagcugcuaccccgacaccggcaccgugaugugcgugugcagagacaacuggcacggcagcaacagacccugggugagcuucaaccagaaccuggacuaccaggugggcuacaucugcagcggcguguucggcgacaaccccagacccaaggacggcaagggcagcugcaaccccaugaccguggacggcgccgacggcgugaagggcuucagcuacaaguacggcaacggcguguggaucggcagaaccaagagcaacaagcugagaaagggcuucgagaugaucugggaccccaacggcuggaccgacaccgacagcgacuucagcgugaagcaggacgugguggccaucaccgacuggagcggcuacagcggcagcuucgugcagcaccccgagcugaccggccuggacugcaucagacccugcuucuggguggagcuggugagaggccugcccagagagaacaccaccaucuggaccagcggcagcagcaucagcuucugcggcguggacagcgacaccgccaacuggagcuggcccgacggcgccgagcugcccuucaccaucgacaaguga

SEQ ID NO: 176112 - RNA, 1413 nt, Artificial Sequence
  derived and/or modified CDS sequence (opt4) from neuraminidase__InfluenzaA__ABV29879
augaaccccaaccagaagaucaucaccaucggcagcaucagcaucgccaucggcaucaucagccugaugcugcagaucggcaacaucaucagcaucugggccagccacagcauccagaccggcagccagaaccacaccggcaucugcaaccagagaaucaucaccuacgagaacagcaccugggugaaccacaccuacgugagcaucaacaacaccaacgugguggccggcaaggacaagaccagcgugacccuggccggcaacagcagccugugcagcaucagcggcugggccaucuacaccaaggacaacagcaucagaaucggcagcaagggcgacguguucaucaucagagagcccuucaucagcugcagccaccuggagugcagaaccuucuuccugacccagggcgcccugcugaacgacaagcacagcaacggcaccgugaaggacagaagccccuacagagcccugaugagcugcccccugggcgaggcccccagccccuacaacagcaaguucgagagcguggccuggagcgccagcgccugccacgacggcaugggcuggcugaccaucggcaucagcggccccgacaacggcgccguggccgugcugaaguacaacggcaucaucaccgagaccaucaagagcuggaagaagagaauccugagaacccaggagagcgagugcgugugcgugaacggcagcugcuucaccaucaugaccgacggccccagcaacggcgccgccagcuacaagaucuucaagaucgagaagggcaaggugaccaagagcaucgagcugaacgcccccaacuuccacuacgaggagugcagcugcuaccccgacaccggcaccgugaugugcgugugcagagacaacuggcacggcagcaacagacccugggugagcuucaaccagaaccuggacuaccagaucggcuacaucugcagcggcguguucggcgacaaccccagacccaaggacggcaagggcagcugcaaccccgugaccguggacggcgccgacggcgugaagggcuucagcuacaaguacggcaacggcguguggaucggcagaaccaagagcaacagacugagaaagggcuucgagaugaucugggaccccaacggcuggaccgacaccgacagcgacuucagcgugaagcaggacgugguggccaucaccgacuggagcggcuacagcggcagcuucgugcagcaccccgagcugaccggccuggacugcaucagacccugcuucuggguggagcuggugagaggccugcccagagagaacaccaccaucuggaccagcggcagcagcaucagcuucugcggcguggacagcgacaccgccaacuggagcuggcccgacggcgccgagcugcccuucaccaucgacaaguga

SEQ ID NO: 176113 - RNA, 1413 nt, Artificial Sequence; identical to SEQ ID NO: 176090
  derived and/or modified CDS sequence (opt4) from neuraminidase__InfluenzaA__ABV29890

SEQ ID NO: 176114 - RNA, 1410 nt, Artificial Sequence; identical to SEQ ID NO: 175944
  derived and/or modified CDS sequence (opt4) from neuraminidase__InfluenzaA__ABV29901

SEQ ID NO: 176115 - RNA, 1410 nt, Artificial Sequence
  derived and/or modified CDS sequence (opt4) from neuraminidase__InfluenzaA__ABV29912
augaaccccaaccagaagaucaucaccaucggcagcgugagccugaccaucagcaccaucugcuucuucaugcagaucgccauccugaucaccaccgugacccugcacuucaagcaguacgaguucaacagcccccccaacaaccaggugaugcugugcgagcccaccaucaucgagagaaacaucaccgagaucguguaccugaccaacaccaccaucgagaaggagaucugccccaagcuggccgaguacagaaacuggagcaagccccagugcgacaucaccggcuucgcccccuucagcaaggacaacagcaucagacugagcgccggcggcgacaucugggugaccagagagcccuacgugagcugcgaccccgacaagugcuaccaguucgcccugggccagggcaccacccugaacaacgugcacagcaacgacaccgugcacgacagaacccccuacagaacccugcugaugaacgagcugggcgugcccuuccaccugggcaccaagcaggugugcaucgccuggagcagcagcagcugccacgacggcaaggccuggcugcacgugugcgugaccggcgacgacaagaacgccaccgccagcuucaucuacaacggcagacugguggacagcaucgugagcuggagcaaggacauccugagaacccaggagagcgagugcaucugcaucaacggcaccugcaccguggugaugaccgacggcagcgccagcggcaaggccgacaccaagauccuguucaucgaggagggcaagaucgugcacaccagcacccugagcggcagcgcccagcacguggaggagugcagcugcuaccccagauaccccggcgugagaugcgugugcagagacaacuggaagggcagcaacagacccaucguggacaucaacaucaaggacuacagcaucgugagcagcuacgugugcagcggccuggugggcgacacccccagaaagaacgacagcagcagcagcagccacugccuggaccccaacaacgaggagggcggccacggcgugaagggcugggccuucgacgacggcaacgacguguggaugggcagaaccaucagcgagaagcugagacugggcuacgagaccuucaaggugaucgagggcuggagcaaccccaacagcaagcugcagaucaacagacaggugaucguggacaagggcaacagaagcggcuacagcggcaucuucagcguggagggcaagagcugcaucaacagaugcuucuacguggagcugaucagaggcagaaaggaggagaccgaggugcuguggaccagcaacagcaucgugguguucugcggcaccagcggcaccuacggcaccggcagcuggcccgacggcgccgacaucaaccugaugcccaucuga

SEQ ID NO: 176116 - RNA, 1413 nt, Artificial Sequence
  derived and/or modified CDS sequence (opt4) from neuraminidase__InfluenzaA__ABV29923
augaaccccaaccagaagaucaucaccaucggcagcaucagcaucgccaucggcaucaucagccugaugcugcagaucggcaacaucaucagcaucugggccagccacagcauccagaccggcagccagaaccacaccggcaucugcaaccagagaaucaucaccuacgagaacagcaccugggugaaccacaccuacgugaacaucaacaacaccaacgugguggccggcaaggacaagaccagcgugacccuggccggcaacagcagccugugcagcaucagcggcugggccaucuacaccaaggacaacagcaucagaaucggcagcaagggcgacguguucgugaucagagagcccuucaucagcugcagccaccuggagugcagaaccuucuuccugacccagggcgcccugcugaacgacaagcacagcaacggcaccgugaaggacagaagccccuacagagcccugaugagcugcccccugggcgaggcccccagccccuacaacagcaaguucgagagcguggccuggagcgccagcgccugccacgacggcaugggcuggcugaccaucggcaucagcggccccgacaacggcgccguggccgugcugaaguacaacggcaucaucaccgagaccaucaagagcuggaagaagagaauccugagaacccaggagagcgagugcgugugcgugaacggcagcugcuucaccaucaugaccgacggccccagcaacggcgccgccagcuacaagaucuucaagaucgagaagggcaaggugaccaagagcaucgagcugaacgcccccaacuuccacuacgaggagugcagcugcuaccccgacaccggcaccgugaugugcgugugcagagacaacuggcacggcagcaacagacccugggugagcuucaaccagaaccuggacuaccaggugggcuacaucugcagcggcguguucggcgacaaccccagacccaaggacggcaagggcagcugcaaccccaugaccguggacggcgccgacggcgugaagggcuucagcuacaaguacggcaacggcguguggaucggcagaaccaagagcaacaagcugagaaagggcuucgagaugaucugggaccccaacggcuggaccgacaccgacagcgacuucagcgugaagcaggacgugguggccaucaccgacuggagcggcuacagcggcagcuucgugcagcaccccgagcugaccggccuggacugcaucagacccugcuucuggguggagcuggugagaggccugcccagagagaacgccaccaucuggaccagcggcagcagcaucagcuucugcggcguggacagcgacaccgccaacuggagcuggcccgacggcgccgagcugcccuucaccaucgacaaguga

SEQ ID NO: 176117 - RNA, 1410 nt, Artificial Sequence
  derived and/or modified CDS sequence (opt4) from neuraminidase__InfluenzaA__ABV29934
augaaccccaaccagaagaucaucaccaucggcagcgugagccugaccaucagcaccaucugcuucuucaugcagaucgccauccugaucaccaccgugacccugcacuucaagcaguacgaguucaacagcccccccaacaaccaggugaugcugugcgagcccaccaucaucgagagaaacaucaccgagaucguguaccugaccaacaccaccaucgagaaggagaucugccccaagcuggccgaguacagaaacuggagcaagccccagugcgacaucaccggcuucgcccccuucagcaaggacaacagcaucagacugagcgccggcggcgacaucugggugaccagagagcccuacgugagcugcgaccccgacaagugcuaccaguucgcccugggccagggcaccacccugaacaacgugcacagcaacgacaccgugagagacagaacccccuacagaacccugcugaugaacgagcugggcgugcccuuccaccugggcaccaagcaggugugcaucgccuggagcagcagcagcugccacgacggcaaggccuggcugcacgugugcaucaccggcgacgacaagaacgccaccgccagcuucaucuacaacggcagacugguggacagcaucgugagcuggagcaaggagauccugagaacccaggagagcgagugcgugugcaucaacggcaccugcaccguggugaugaccgacggcagcgccagcggcaaggccgacaccaagauccuguucaucgaggagggcaagaucgugcacaccagcacccugagcggcagcgcccagcacguggaggagugcagcugcuaccccagauaccccggcgugagaugcgugugcagagacaacuggaagggcagcaacagacccaucguggacaucaacaucaaggaccacagcaucgugagcagcuacgugugcagcggccuggugggcgacacccccagaaagaacgacagcagcagcagcagccacugccuggaccccaacaacgaggagggcggccacggcgugaagggcugggccuucgacgacggcaacgacguguggaugggcagaaccaucagcgagaagagcagacugggcuacgagaccuucaaggugaucgagggcuggagcaaccccaagagcaagcugcagaucaacagacaggugaucguggacagaggcaacagaaccggcuacagcggcaucuucagcguggagggcaagagcugcaucaacagaugcuucuacguggagcugaucagaggcagaaaggaggagaccgaggugcuguggaccagcaacagcaucgugguguucugcggcaccagcggcaccuacggcaccggcagcuggcccgacggcgccgacaucaaccugaugcccaucuga

SEQ ID NO: 176118 - RNA, 1413 nt, Artificial Sequence; identical to SEQ ID NO: 176103
  derived and/or modified CDS sequence (opt4) from neuraminidase__InfluenzaA__ABV29945

SEQ ID NO: 176119 - RNA, 1413 nt, Artificial Sequence
  derived and/or modified CDS sequence (opt4) from neuraminidase__InfluenzaA__ABV29956
augaaccccaaccagaagaucaucaccaucggcagcaucagcaucgccaucggcaucaucagccugaugcugcagaucggcaacaucaucagcaucugggccagccacagcauccagaccggcagccagaaccacaccggcaucugcaaccagagaaucaucaccuacgagaacagcaccugggugaaccacaccuacgugagcaucaacaacaccaacgugguggccggcaaggacaagaccagcgugacccuggccggcaacagcagccugugcagcaucagcggcugggccaucuacaccaaggacaacagcaucagaaucggcagcaagggcgacguguucgugaucagagagcccuucaucagcugcagccaccuggagugcagaaccuucuuccugacccagggcgcccugcugaacgacaagcacagcaacggcaccgugaaggacagaagccccuacagagcccugaugagcugcccccugggcgaggcccccagccccuacaacagcaaguucgagagcguggccuggagcgccagcgccugccacgacggcaugggcuggcugaccaucggcaucagcggccccgacaacggcgccguggccgugcugaaguacaagggcaucaucaccgagaccaucaagagcuggaagaagagaauccugagaacccaggagagcgagugcgugugcgugaacggcagcugcuucaccaucaugaccgacggccccagcaacggcgccgccagcuacaagaucuucaagaucgagaagggcaaggugaccaagagcaucgagcugaacgcccccaacuuccacuacgaggagugcagcugcuaccccgacaccggcaccgugaugugcgugugcagagacaacuggcacggcagcaacagacccugggugagcuucaaccagaaccuggacuaccagaucggcuacaucugcagcggcguguucggcgacaaccccagacccaaggacggcaagggcagcugcaaccccgugaccguggacggcgccgacggcgugaagggcuucagcuacaaguacggcaacggcguguggaucggcagaaccaagagcaacagacugagaaagggcuucgagaugaucugggaccccaacggcuggaccgacaccgacagcgacuucagcgugaagcaggacgugguggccaucaccgacuggagcggcuacagcggcagcuucgugcagcaccccgagcugaccggccuggacugcaucagacccugcuucuggguggagcuggugagaggccugcccagagagaacaccaccaucuggaccagcggcagcagcaucagcuucugcggcguggacagcgacaccgccaacuggagcuggcccgacggcgccgagcugcccuucaccaucgacaaguga

SEQ ID NO: 176120 - RNA, 1413 nt, Artificial Sequence
  derived and/or modified CDS sequence (opt4) from neuraminidase__InfluenzaA__ABV29989
augaaccccaaccagaagaucaucaccaucggcagcaucagcaucgccaucggcaucaucagccugaugcugcagaucggcaacaucaucagcaucugggccagccacagcauccagaccggcagccagaaccacaccggcaucugcaaccagagaaucaucaccuacgagaacagcaccugggugaaccacaccuacgugagcaucaacaacaccaacgugguggccggcaaggacaagaccagcgugacccuggccggcaacagcagccugugcagcaucagcggcugggccaucuacaccaaggacaacagcaucagaaucggcagcaagggcgacguguucgugaugagagagcccuucaucagcugcagccaccuggagugcagaaccuucuuccugacccagggcgcccugcugaacgacaagcacagcaacggcaccgugaaggacagaagccccuacagagcccugaugagcugcccccugggcgaggcccccagccccuacaacagcaaguucgagagcguggccuggagcgccagcgccugccacgacggcaugggcuggcugaccaucggcaucagcggccccgacaacggcgccguggccgugcugaaguacaacggcaucaucaccgagaccaucaagagcuggaagaagagaauccugagaacccaggagagcgagugcgugugcgugaacggcagcugcuucaccaucaugaccgacggccccagcaacggcgccgccagcuacaagaucuucaagaucgagaagggcaaggugaccaagagcaucgagcugaacgcccccaacuuccacuacgaggagugcagcugcuaccccgacaccggcaccgugaugugcgugugcagagacaacuggcacggcagcaacagacccugggugagcuucaaccagaaccuggacuaccagaucggcuacaucugcagcggcguguucggcgacaaccccagacccaaggacggcaagggcagcugcaaccccgugaccguggacggcgccgacggcgugaagggcuucagcuacaaguacggcaacggcguguggaucggcagaaccaagagcaacagacugagaaagggcuucgagaugaucugggaccccaacggcuggaccgacaccgacagcgacuucagcgugaagcaggacgugguggccaucaccgacuggagcggcuacagcggcagcuucgugcagcaccccgagcugaccggccuggacugcaucagacccugcuucuggguggagcuggugagaggccugcccagagagaacaccaccaucuggaccagcggcagcagcaucagcuucugcggcguggacagcgacaccgccaacuggagcuggcccgacggcgccgagcugcccuucaccaucgacaaguga

SEQ ID NO: 176121 - RNA, 1413 nt, Artificial Sequence; identical to SEQ ID NO: 176090
  derived and/or modified CDS sequence (opt4) from neuraminidase__InfluenzaA__ABV30000

SEQ ID NO: 176122 - RNA, 1413 nt, Artificial Sequence; identical to SEQ ID NO: 176090
  derived and/or modified CDS sequence (opt4) from neuraminidase__InfluenzaA__ABV30011

SEQ ID NO: 176123 - RNA, 1413 nt, Artificial Sequence; identical to SEQ ID NO: 176090
  derived and/or modified CDS sequence (opt4) from neuraminidase__InfluenzaA__ABV30022

SEQ ID NO: 176124 - RNA, 1413 nt, Artificial Sequence
  derived and/or modified CDS sequence (opt4) from neuraminidase__InfluenzaA__ABV30044
augaaccccaaccagaagaucaucaccaucggcagcaucagcaucgccaucggcaucaucagccugaugcugcagaucggcaacaucaucagcaucugggccagccacagcauccagaccggcagccagaaccacaccggcaucugcaaccagagaaucaucaccuacgagaacagcaccugggugaaccacaccuacgugaacaucaacaacaccaacgugguggccggcaaggacaagaccagcggcacccuggccggcaacagcagccugugcagcaucagcggcugggccaucuacaccaaggacaacagcaucagaaucggcagcaagggcgacguguucgugaucagagagcccuucaucagcugcagccaccuggagugcagaaccuucuuccugacccagggcgcccugcugaacgacaagcacagcaacggcaccgugaaggacagaagccccuacagagcccugaugagcugcccccugggcgaggcccccagccccuacaacagcaaguucgagagcguggccuggagcgccagcgccugccacgacggcaugggcuggcugaccaucggcaucagcggccccgacaacggcgccguggccgugcugaaguacaacggcaucaucaccgagaccaucaagagcuggaagaagagaauccugagaacccaggagagcgagugcgugugcgugaacggcagcugcuucaccaucaugaccgacggccccagcaacggcgccgccagcuacaagaucuucaagaucgagaagggcaaggugaccaagagcaucgagcugaacgcccccaacuuccacuacgaggagugcagcugcuaccccgacaccggcaccgugaugugcgugugcagagacaacuggcacggcagcaacagacccugggugagcuucaaccagaaccuggacuaccaggugggcuacaucugcagcggcguguucggcgacaaccccagacccaaggacggcaagggcagcugcaaccccaugaccguggacggcgccgacggcgugaagggcuucagcuacaaguacggcaacggcguguggaucggcagaaccaagagcaacaagcugagaaagggcuucgagaugaucugggaccccaacggcuggaccgacaccgacagcgacuucagcgugaagcaggacgugguggccaucaccgacuggagcggcuacagcggcagcuucgugcagcaccccgagcugaccggccuggacugcaucagacccugcuucuggguggagcuggugagaggccugcccagagagaacaccaccaucuggaccagcggcagcagcaucagcuucugcggcguggacagcgacaccgccaacuggagcuggcccgacggcgccgagcugcccuucaccaucgacaaguga

SEQ ID NO: 176125 - RNA, 1413 nt, Artificial Sequence
  derived and/or modified CDS sequence (opt4) from neuraminidase__InfluenzaA__ABV30055
augaaccccaaccagaagaucaucaccaucggcagcaucagcaucgccaucggcaucaucagccugaugcugcagaucggcaacaucaucagcaucugggccagccacagcauccagaccggcagccagaaccacaccggcaucugcaaccagagaaucaucaccuacgagaacagcaccugggugaaccacaccuacgugaacaucaacaacaccaacgugguggccggcaaggacaagaccagcgugacccuggccggcaacagcagccugugcagcaucagcggcugggccaucuacaccaaggacaacagcaucagaaucggcagcaagggcgacguguucgugaucagagagcccuucaucagcugcagccaccuggagugcagaaccuucuuccugacccagggcgcccugcugaacgacaagcacagcaacggcaccgugaaggacagaagccccuacagagcccugaugagcugcccccugggcgaggcccccagccccuacaacagcaaguucgagagcguggccuggagcgccagcgccugccacgacggcaugggcuggcugaccaucggcaucagcggccccgacaacggcgccguggccgugcugaaguacaacggcaucaucaccgagaccaucaagagcuggaagaagagaauccugagaacccaggagagcgagugcgugugcgugaacggcagcugcuucaccaucaugaccgacggccccagcaacggcgccgccagcuacaagaucuucaagaucgagaagggcaaggugaccaagagcaucgagcugaacgcccccaacuuccacuacgaggagugcagcugcuaccccgacaccggcaccgugaugugcgugugcagagacaacuggcacggcagcaacagacccugggugagcuucaaccagaaccuggacuaccaggugggcuacaucugcagcggcguguucggcgacaaccccagacccaaggacggcaagggcagcugcaaccccaugaccguggacggcgccgacggcgugaagggcuucagcuacaaguacggcaacggcguguggaucggcagaaccaagagcaacaagcugagaaagggcuucgagaugaucugggaccccaacggcuggaccgacaccgacagcgacuucagcgugaagcaggacgugguggccaucaccgacuggagcggcuacagcggcagcuucgugcagcaccccgagcugaccggccuggacugcaucagacccugcuucuggguggagcuggugagaggccugcccagagagaacaccaccaucuggaccagcggcagcagcaucagcuucugcggcguggacagcgacaccgccaacuggagcuggcccgacggcgccgagcugcccuucaccaucgacaaguga

SEQ ID NO: 176126 - RNA, 1410 nt, Artificial Sequence
  derived and/or modified CDS sequence (opt4) from neuraminidase__InfluenzaA__ABV30077
augaaccccaaccagaagaucaucaccaucggcagcgugagccugaccaucagcaccaucugcuucuucaugcagaccgccauccugaucaccaccgugacccugcacuucaagcaguacgaguucaacagcccccccaacaaccaggugaugcugugcgagcccaccaucaucgagagaaacaucaccgagaucguguaccugaccaacaccaccaucgagaaggagaucugccccaagcuggccgaguacagaaacuggagcaagccccagugcgacaucaccggcuucgcccccuucagcaaggacaacagcaucagacugagcgccggcggcgacaucugggugaccagagagcccuacgugagcugcgaccccgacaagugcuaccaguucgcccugggccagggcaccacccugaacaacgugcacagcaacgacaccgugagagacagaacccccuacagaacccugcugaugaacgagcugggcgugcccuuccaccugggcaccaagcaggugugcaucgccuggagcagcagcagcugccacgacggcaaggccuggcugcacgugugcaucaccggcgacgacaagaacgccaccgccagcuucaucuacaacggcagacugguggacagcaucgugagcuggagcaaggagauccugagaacccaggagagcgagugcgugugcaucaacggcaccugcaccguggugaugaccgacggcagcgccagcggcaaggccgacaccaagauccuguucaucgaggagggcaagaucgugcacaccagcacccugagcggcagcgcccagcacguggaggagugcagcugcuaccccagauaccccggcgugagaugcgugugcagagacaacuggaagggcagcaacagacccaucguggacaucaacaucaaggaccacagcaucgugagcagcuacgugugcagcggccuggugggcgacacccccagaaagaacgacagcagcagcagcagccacugccuggaccccaacaacgaggagggcggccacggcgugaagggcugggccuucgacgacggcaacgacguguggaugggcagaaccaucagcgagaagagcagacugggcuacgagaccuucaaggugaucgagggcuggagcaaccccaagagcaagcugcagaucaacagacaggugaucguggacagaggcaacagaagcggcuacagcggcaucuucagcguggagggcaagagcugcaucaacagaugcuucuacguggagcugaucagaggcagaaaggaggagaccgaggugcuguggaccagcaacagcaucgugguguucugcggcaccagcggcaccuacggcaccggcagcuggcccgacggcgccgacaucaaccugaugcccaucuga

SEQ ID NO: 176127 - RNA, 1413 nt, Artificial Sequence; identical to SEQ ID NO: 176090
  derived and/or modified CDS sequence (opt4) from neuraminidase__InfluenzaA__ABV30088

SEQ ID NO: 176128 - RNA, 1413 nt, Artificial Sequence; identical to SEQ ID NO: 176090
  derived and/or modified CDS sequence (opt4) from neuraminidase__InfluenzaA__ABV30099

SEQ ID NO: 176129 - RNA, 1413 nt, Artificial Sequence
  derived and/or modified CDS sequence (opt4) from neuraminidase__InfluenzaA__ABV30110
augaaccccaaccagaagaucaucaccaucggcagcaucagcaucgccaucggcaucaucagccugaugcugcagaucggcaacaucaucagcaucugggccagccacagcauccagaccggcagccagaaccacaccggcaucugcaaccagagaaucaucaccuacgagaacagcaccugggugaaccacaccuacgugagcaucaacaacaccaacgugguggccggcaaggacaagaccagcgugacccuggccggcaacagcagccugugcagcaucagcggcugggccaucuacaccaaggacaacagcaucagaaucggcagcaagggcgacguguucgugaucagagagcccuucaucagcugcagccaccuggagugcagaaccuucuuccugacccagggcgcccugcugaacgacaagcacagcaacggcaccgugaaggacagaagccccuacagagcccugaugagcugcccccugggcgaggcccccagccccuacaacagcaaguucgagagcguggccuggagcgccagcgccugccacgacggcaugggcuggcugaccaucggcaucagcggccccgacaacggcgccguggccgugcugaaguacaacggcaucaucaccggcaccaucaagagcuggaagaagagaauccugagaacccaggagagcgagugcgugugcgugaacggcagcugcuucaccaucaugaccgacggccccagcaacggcgccgccagcuacaagaucuucaagaucgagaagggcaaggugaccaagagcaucgagcugaacgcccccaacuuccacuacgaggagugcagcugcuaccccgacaccggcaccgugaugugcgugugcagagacaacuggcacggcagcaacagacccugggugagcuucaaccagaaccuggacuaccagaucggcuacaucugcagcggcguguucggcgacaaccccagacccaaggacggcaagggcagcugcaaccccgugaccguggacggcgccgacggcgugaagggcuucagcuacaaguacggcaacggcguguggaucggcagaaccaagagcaacagacugagaaagggcuucgagaugaucugggaccccaacggcuggaccgacaccgacagcgacuucagcgugaagcaggacgugguggccaucaccgacuggagcggcuacagcggcagcuucgugcagcaccccgagcugaccggccuggacugcaucagacccugcuucuggguggagcuggugagaggccugcccagagagaacaccaccaucuggaccagcggcagcagcaucagcuucugcggcguggacagcgacaccgccaacuggagcuggcccgacggcgccgagcugcccuucaccaucgacaaguga

SEQ ID NO: 176130 - RNA, 1413 nt, Artificial Sequence; identical to SEQ ID NO: 176090
  derived and/or modified CDS sequence (opt4) from neuraminidase__InfluenzaA__ABV30132

SEQ ID NO: 176131 - RNA, 1413 nt, Artificial Sequence
  derived and/or modified CDS sequence (opt4) from neuraminidase__InfluenzaA__ABV30143
augaaccccaaccagaagaucaucaccaucggcagcaucagcaucgccaucggcaucaucagccugaugcugcagaucggcaacaucaucagcaucugggccagccacagcauccagaccggcagccagaaccacaccggcaucugcaaccagagaaucaucaccuacgagaacagcaccugggugaaccacaccuacgugaacaucaacaacaccaacgugguggccggcaaggacaagaccagcgugacccuggccggcaacagcagccugugcagcaucagcggcugggccaucuacaccaaggacaacagcaucagaaucggcagcaagggcgacguguucgugaucagagagcccuucaucagcugcagccaccuggagugcagaaccuucuuccugacccagggcgcccugcugaacgacaagcacagcaacggcaccgugaaggacagaagccccuacagagcccugaugagcugcccccugggcgaggcccccagccccuacaacagcaaguucgagagcguggccuggagcgccagcgccugccacgacggcaugggcuggcugaccaucggcaucagcggccccgacaacggcgccguggccgugcugaaguacaacggcaucaucaccgagaccaucaagagcuggaagaagagaauccugagaacccaggagagcgagugcgugugcgugaacggcagcugcuucaccaucaugaccgacggccccagcaacggcgccgccagcuacaagaucuucaagaucgagaagggcaaggugaccaagagcaucgagcugaacgcccccaacuuccacuacgaggagugcagcugcuaccccgacaccggcaccgugaugugcgugugcagagacaacuggcacggcagcaacagacccugggugagcuucaaccagaaccuggacuaccagaucggcuacaucugcagcggcguguucggcgacaaccccagacccaaggacggcaagggcagcugcaaccccgugaccguggacggcgccgacggcgugaagggcuucagcuacaaguacggcaacggcguguggaucggcagaaccaagagcaacagacugagaaagggcuucgagaugaucugggaccccaacggcuggaccaacaccgacagcgacuucagcgugaagcaggacgugguggccaucaccgacuggagcggcuacagcggcagcuucgugcagcaccccgagcugaccggccuggacugcaucagacccugcuucuggguggagcuggugagaggccugcccagagagaacaccaccaucuggaccagcggcagcagcaucagcuucugcggcguggacagcgacaccgccaacuggagcuggcccgacggcgccgagcugcccuucaccaucgacaaguga

SEQ ID NO: 176132 - RNA, 1413 nt, Artificial Sequence; identical to SEQ ID NO: 176116
  derived and/or modified CDS sequence (opt4) from neuraminidase__InfluenzaA__ABV30154

SEQ ID NO: 176133 - RNA, 1413 nt, Artificial Sequence
  derived and/or modified CDS sequence (opt4) from neuraminidase__InfluenzaA__ABV30165
augaaccccaaccagaagaucaucaccaucggcagcaucagcaucgccaucggcaucaucagccugaugcugcagaucggcaacaucaucagcaucugggccagccacagcauccagaccggcagccagaaccacaccggcaucugcaaccagagaaucaucaccuacgagaacagcaccugggugaaccacaccuacgugagcaucaacaacaccaacgugguggccggcaaggacaagaccagcgugacccuggccggcaaccugagccugugcagcaucagcggcugggccaucuacaccaaggacaacagcaucagaaucggcagcaagggcgacguguucgugaucagagagcccuucaucagcugcagccaccuggagugcagaaccuucuuccugacccagggcgcccugcugaacgacaagcacagcaacggcaccgugaaggacagaagccccuacagagcccugaugagcugcccccugggcgaggcccccagccccuacaacagcaaguucgagagcguggccuggagcgccagcgccugccacgacggcaugggcuggcugaccaucggcaucagcggccccgacaacggcgccguggccgugcugaaguacaacggcaucaucaccgagaccaucaagagcuggaagaagagaauccugagaacccaggagagcgagugcgugugcgugaacggcagcugcuucaccaucaugaccgacggccccagcaacggcgccgccagcuacaagaucuucaagaucgagaagggcaaggugaccaagagcaucgagcugaacgcccccaacuuccacuacgaggagugcagcugcuaccccgacaccggcaccgugaugugcgugugcagagacaacuggcacggcagcaacagacccugggugagcuucaaccagaaccuggacuaccagaucggcuacaucugcagcggcguguucggcgacaaccccagacccaaggacggcaagggcagcugcaaccccgugaccguggacggcgccgacggcgugaagggcuucagcuacaaguacggcaacggcguguggaucggcagaaccaagagcaacagacugagaaagggcuucgagaugaucugggaccccaacggcuggaccgacaccgacagcgacuucagcgugaagcaggacgugguggccaucaccgacuggagcggcuacagcggcagcuucgugcagcaccccgagcugaccggccuggacugcaucagacccugcuucuggguggagcuggugagaggccugcccagagagaacaccaccaucuggaccagcggcagcagcaucagcuucugcggcguggacagcgacaccgccaacuggagcuggcccgacggcgccgagcugcccuucaccaucgacaaguga

SEQ ID NO: 176134 - RNA, 1413 nt, Artificial Sequence; identical to SEQ ID NO: 176090
  derived and/or modified CDS sequence (opt4) from neuraminidase__InfluenzaA__ABV30187

SEQ ID NO: 176135 - RNA, 1413 nt, Artificial Sequence; identical to SEQ ID NO: 176090
  derived and/or modified CDS sequence (opt4) from neuraminidase__InfluenzaA__ABV30198

SEQ ID NO: 176136 - RNA, 1410 nt, Artificial Sequence; identical to SEQ ID NO: 175944
  derived and/or modified CDS sequence (opt4) from neuraminidase__InfluenzaA__ABV30209

SEQ ID NO: 176137 - RNA, 1410 nt, Artificial Sequence; identical to SEQ ID NO: 176126
  derived and/or modified CDS sequence (opt4) from neuraminidase__InfluenzaA__ABV30220

SEQ ID NO: 176138 - RNA, 1410 nt, Artificial Sequence; identical to SEQ ID NO: 176126
  derived and/or modified CDS sequence (opt4) from neuraminidase__InfluenzaA__ABV30231

SEQ ID NO: 176139 - RNA, 1410 nt, Artificial Sequence
  derived and/or modified CDS sequence (opt4) from neuraminidase__InfluenzaA__ABV30264
augaaccccaaccagaagaucaucaccaucggcagcgugagccugaccaucagcaccaucugcuucuucaugcagaucgccauccugaucaccaccgugacccugcacuucaagcaguacgaguucagcagcccccccaacaaccaggugaugcugugcgagcccaccaucaucgagagaaacaucaccgaggugguguaccugaccaacaccaccaucgagaaggagaucugccccaagcuggccgaguacagaaacuggagcaagccccagugcgacaucaccggcuucgcccccuucagcaaggacaacagcaucagacugagcgccggcggcgacaucugggugaccagagagcccuacgugagcugcgaccccgacaagugcuaccaguucgcccugggccagggcaccacccugaacaacgugcacagcaacgacaccgugcacgacagaacccccuacagaacccugcugaugaacgagcugggcgugcccuuccaccugggcaccaagcaggugugcaucgccuggagcagcagcagcugccacgacggcaaggccuggcugcacgugugcgugaccggcgacgacaagaacgccaccgccagcuucaucuacaacggcagacugguggacagcaucgugagcuggagcaaggagauccugagaacccaggagagcgagugcgugugcaucaacggcaccugcaccguggugaugaccgacggcagcgccagcggcaaggccgacaccaagauccuguucaucgaggagggcaagaucgugcacaccagcacccugagcggcagcgcccagcacguggaggagugcagcugcuaccccagauaccccggcgugagaugcgugugcagagacaacuggaagggcagcaacagacccaucguggacaucaacaucaaggacuacagcaucgugagcagauacgugugcagcggccuggugggcgacacccccagaaagaacgacagcagcagcagcagccacugccuggaccccaacaacgaggagggcggccacggcgugaagggcugggccuucgacgacggcaacgacguguggaugggcagaaccaucagcgagaagagcagaagcggcuacgagaccuucaaggugaucgagggcuggagcaaccccaacagcaagcugcagaucaacagacaggugaucguggacagaggcaacagaagcggcuacagcggcaucuucagcguggagggcaagagcugcaucaacagaugcuucuacguggagcugaucagaggcagaaaggaggagaccgaggugcuguggaccagcaacagcaucgugguguucugcggcaccagcggcaccuacggcaccggcagcuggcccgacggcgccgacaucaaccugaugcccaucuga

SEQ ID NO: 176140 - RNA, 1410 nt, Artificial Sequence
  derived and/or modified CDS sequence (opt4) from neuraminidase__InfluenzaA__ABV30275
augaaccccaaccagaagaucaucaccaucggcagcgugagccugaccaucagcaccaucugcuucuucaugcagaccgccauccugaucaccaccgugacccugcacuucaagcaguacgaguucaacagcacccccaacaaccaggugaugcugugcgagcccaccaucaucgagagaaacaucaccgagaucguguaccugaccaacaccaccaucgagaaggagaucugccccaagcuggccgaguacagaaacuggagcaagccccagugcgacaucaccggcuucgcccccuucagcaaggacaacagcaucagacugagcgccggcggcgacaucugggugaccagagagcccuacgugagcugcgaccccgacaagugcuaccaguucgcccugggccagggcaccacccugaacaacgugcacagcaacgacaccgugagagacagaacccccuacagaacccugcugaugaacgagcugggcgugcccuuccaccugggcaccaagcaggugugcaucgccuggagcagcagcagcugccacgacggcaaggccuggcugcacgugugcaucaccggcgacgacaagaacgccaccgccagcuucaucuacaacggcagacugguggacagcaucgugagcuggagcaaggagauccugagaacccaggagagcgagugcgugugcaucaacggcaccugcaccguggugaugaccgacggcagcgccagcggcaaggccgacaccaagauccuguucaucgaggagggcaagaucgugcacaccagcacccugagcggcagcgcccagcacguggaggagugcagcugcuaccccagauaccccggcgugagaugcgugugcagagacaacuggaagggcagcaacagacccaucguggacaucaacaucaaggaccacagcaucgugagcagcuacgugugcagcggccuggugggcgacacccccagaaagaacgacagcagcagcagcagccacugccuggaccccaacaacgaggagggcggccacggcgugaagggcugggccuucgacgacggcaacgacguguggaugggcagaaccaucagcgagaagagcagacugggcuacgagaccuucaaggugaucgagggcuggagcaaccccaagagcaagcugcagaucaacagacaggugaucguggacagaggcaacagaagcggcuacagcggcaucuucagcguggagggcaagagcugcaucaacagaugcuucuacguggagcugaucagaggcagaaaggaggagaccgaggugcuguggaccagcaacagcaucgugguguucugcggcaccagcggcaccuacggcaccggcagcuggcccgacggcgccgacaucaaccugaugcccaucuga

SEQ ID NO: 176141 - RNA, 1413 nt, Artificial Sequence; identical to SEQ ID NO: 176131
  derived and/or modified CDS sequence (opt4) from neuraminidase__InfluenzaA__ABV30297

SEQ ID NO: 176142 - RNA, 1413 nt, Artificial Sequence
  derived and/or modified CDS sequence (opt4) from neuraminidase__InfluenzaA__ABV30308
augaaccccaaccagaagaucaucaccaucggcagcaucagcaucgccaucggcaucaucagccugaugcugcagaucggcaacaucaucagcaucugggccagccacagcauccagaccggcagccagaaccacaccggcaucugcaaccagagaaucaucaccuacgagaacagcaccugggugaaccacaccuacgugagcaucaacaacaccaacgugguggccggcaaggacaagaccagcgugacccuggccggcaacagcagccugugcagcaucagcggcugggccaucuacaccaaggacaacagcaucagaaucggcagcaagggcgacguguucgugaucagagagcccuucaucagcugcagccaccuggagugcagaaccuucuuccugacccagggcgcccugcugaacgacaagcacagcaacggcaccgugaaggacagaagccccuacagagcccugaugagcugcccccugggcgaggcccccagccccuacaacagcaaguucgagagcguggccuggagcgccagcgccugccacgacggcaugggcuggcugaccaucggcaucagcggccccgacaacggcgccguggccgugcugaaguacaacggcaucaucaccgagaccaucaagagcuggaagaagagaauccugagaacccaggagagcgagugcgugugccugaacggcagcugcuucaccaucaugaccgacggccccagcaacggcgccgccagcuacaagaucuucaagaucgagaagggcaaggugaccaagagcaucgagcugaacgcccccaacuuccacuacgaggagugcagcugcuaccccgacaccggcaccgugaugugcgugugcagagacaacuggcacggcagcaacagacccugggugagcuucaaccagaaccuggacuaccagaucggcuacaucugcagcggcguguucggcgacaaccccagacccaaggacggcaagggcagcugcaaccccgugaccguggacggcgccgacggcgugaagggcuucagcuacaaguacggcaacggcguguggaucggcagaaccaagagcaacagacugagaaagggcuucgagaugaucugggaccccaacggcuggaccgacaccgacagcgacuucagcgugaagcaggacgugguggccaucaccgacuggagcggcuacagcggcagcuucgugcagcaccccgagcugaccggccuggacugcaucagacccugcuucuggguggagcuggugagaggccugcccagagagaacaccaccaucuggaccagcggcagcagcaucagcuucugcggcguggacagcgacaccgccaacuggagcuggcccgacggcgccgagcugcccuucaccaucgacaaguga

SEQ ID NO: 176143 - RNA, 1413 nt, Artificial Sequence
  derived and/or modified CDS sequence (opt4) from neuraminidase__InfluenzaA__ABV30319
augaaccccaaccagaagaucaucaccaucggcagcaucagcaucgccaucggcaucaucagccugaugcugcagaucggcaacaucgugagcaucugggccagccacagcauccagaccggcagccagaaccacaccggcaucugcaaccagagaaucaucaccuacgagaacagcaccugggugaaccacaccuacgugagcaucaacaacaccaacgugguggccggcaaggacaagaccagcgugacccuggccggcaacagcagccugugcagcaucagcggcugggccaucuacaccaaggacaacagcaucagaaucggcagcaagggcgacguguucgugaucagagagcccuucaucagcugcagccaccuggagugcagaaccuucuuccugacccagggcgcccugcugaacgacaagcacagcaacggcaccgugaaggacagaagccccuacagagcccugaugagcugcccccugggcgaggcccccagccccuacaacagcaaguucgagagcguggccuggagcgccagcgccugccacgacggcaugggcuggcugaccaucggcaucagcggccccgacaacggcgccguggccgugcugaaguacaacggcaucaucaccgagaccaucaagagcuggaagaagagaauccugagaacccaggagagcgagugcgugugcgugaacggcagcugcuucaccaucaugaccgacggccccagcaacggcgccgccagcuacaagaucuucaagaucgagaagggcaaggugaccaagagcaucgagcugaacgcccccaacuuccacuacgaggagugcagcugcuaccccgacaccggcaccgugaugugcgugugcagagacaacuggcacggcagcaacagacccugggugagcuucaaccagaaccuggacuaccagaucggcuacaucugcagcggcguguucggcgacaaccccagacccaaggacggcaagggcagcugcaaccccgugaccguggacggcgccgacggcgugaagggcuucagcuacaaguacggcaacggcguguggaucggcagaaccaagagcaacagacugagaaagggcuucgagaugaucugggaccccaacggcuggaccgacaccgacagcgacuucagcgugaagcaggacgugguggccaucaccgacuggagcggcuacagcggcagcuucgugcagcaccccgagcugaccggccuggacugcaucagacccugcuucuggguggagcuggugagaggccugcccagagagaacaccaccaucuggaccagcggcagcagcaucagcuucugcggcguggacagcgacaccgccaacuggagcuggcccgacggcgccgagcugcccuucaccaucgacaaguga

SEQ ID NO: 176144 - RNA, 1413 nt, Artificial Sequence; identical to SEQ ID NO: 176131
  derived and/or modified CDS sequence (opt4) from neuraminidase__InfluenzaA__ABV30330

SEQ ID NO: 176145 - RNA, 1413 nt, Artificial Sequence; identical to SEQ ID NO: 176090
  derived and/or modified CDS sequence (opt4) from neuraminidase__InfluenzaA__ABV30341

SEQ ID NO: 176146 - RNA, 1413 nt, Artificial Sequence; identical to SEQ ID NO: 176090
  derived and/or modified CDS sequence (opt4) from neuraminidase__InfluenzaA__ABV30363

SEQ ID NO: 176147 - RNA, 1413 nt, Artificial Sequence; identical to SEQ ID NO: 176090
  derived and/or modified CDS sequence (opt4) from neuraminidase__InfluenzaA__ABV30374

SEQ ID NO: 176148 - RNA, 1410 nt, Artificial Sequence
  derived and/or modified CDS sequence (opt4) from neuraminidase__InfluenzaA__ABV30385
augaaccccaaccagaagaucaucaccaucggcagcgugagccugaccaucagcaccaucugcuucuucaugcagaucgccauccugaucaccaccgugacccugcacuucaagcaguacgaguucagccccccccccaacaaccaggugaugcugugcgagcccaccaucaucgagagaaacaucaccgagaucguguaccugaccaacaccaccaucgagaaggagaucugccccaagcuggccgaguacagaaacuggagcaagccccagugcgacaucaccggcuucgcccccuucagcaaggacaacagcaucagacugagcgccggcggcgacaucugggugaccagagagcccuacgugagcugcgaccccgacaagugcuaccaguucgcccugggccagggcaccacccugaacaacgugcacagcaacgacaccgugcacgacagaacccccuacagaacccugcugaugaacgagcugggcgugcccuuccaccugggcaccaagcaggugugcaucgccuggagcagcagcagcugccacgacggcaaggccuggcugcacgugugcgugaccggcgacgacaagaacgccaccgccagcuucaucuacaacggcagacugguggacagcaucgugagcuggagcaaggagauccugagaacccaggagagcgagugcgugugcaucaacggcaccugcaccguggugaugaccgacggcagcgccagcggcaaggccgacaccaagauccuguucaucgaggagggcaagaucgugcacaccagcacccugagcggcagcgcccagcacguggaggagugcagcugcuaccccagauaccccggcgugagaugcgugugcagagacaacuggaagggcagcaacagacccaucguggacaucaacaucaaggacuacagcaucgugagcagauacgugugcagcggccuggugggcgacacccccagaaagaacgacagcagcagcagcagccacugccuggaccccaacaacgaggagggcggccacggcgugaagggcugggccuucgacgacggcaacgacguguggaugggcagaaccaucagcgagaagagcagaagcggcuacgagaccuucaaggugaucgagggcuggagcaaccccaacagcaagcugcagaucaacagacaggugaucguggacagaggcaacagaagcggcuacagcggcaucuucagcguggagggcaagagcugcaucaacagaugcuucuacguggagcugaucagaggcagaaaggaggagaccgaggugcuguggaccagcaacagcaucgugguguucugcggcaccagcggcaccuacggcaccggcagcuggcccgacggcgccgacaucaaccugaugcccaucuga

SEQ ID NO: 176149 - RNA, 1410 nt, Artificial Sequence
  derived and/or modified CDS sequence (opt4) from neuraminidase__InfluenzaA__ABV30396
augaaccccaaccagaagaucaucaccaucggcagcgugagccugaccaucagcaccaucugcuucuucaugcagaucgccauccugaucaccaccgugacccugcacuucaagcaguacgaguucaacagcagccccaacaaccaggugaugcugugcgagcccaccaucaucgagagaaacaucaccgagaucguguaccugaccaacaccaccaucgagaaggagaucugccccaagcugagcgaguacagaaacuggagcaagccccagugcaacaucaccggcuucgcccccuucagcaaggacaacagcaucagacugagcgccggcggcgacaucugggugaccagagagcccuacgugagcugcgaccccgacaagugcuaccaguucgcccugggccagggcaccacccugaacaacgugcacagcaacgacaccgugcacgacagaacccccuacagaacccugcugaugaacgagcugggcgugcccuuccaccugggcaccaagcaggugugcaucgccuggagcagcagcagcugccacgacggcaaggccuggcugcacgugugcgugaccggcgacgacaagaacgccaccgccagcuucaucuacaacggcagacugguggacagcaucgugagcuggagcaaggagauccugagaacccaggagagcgagugcgugugcaucaacggcaccugcaccguggugaugaccgacggcagcgccagcggcaaggccgacaccaagauccuguucaucgaggagggcaagaucgugcacaccagcacccugagcggcagcgcccagcacguggaggagugcagcugcuaccccagauaccccggcgugagaugcgugugcagagacaacuggaagggcagcaacagacccaucguggacaucaacaucaaggacuacagcaucgugagcagcuacgugugcagcggccuggugggcgacacccccagaaagaacgacagcagcagcagcagccacugccuggaccccaacaacgaggagggcggccacggcgugaagggcugggccuucgacgacggcaacgacguguggaugggcagaaccaucagcgagaagcugagaagcggcuacgagaccuucaaggugaucgagggcuggagcaaccccaacagcaagcugcagaucaacagacaggugaucguggacagaggcaacagaagcggcuacagcggcaucuucagcguggagggcaagagcugcaucaacagaugcuucuacguggagcugaucagaggcagaaaggaggagaacgaggugcuguggaccagcaacagcaucgugguguucugcggcaccagcggcaccuacggcaccggcagcuggcccgacggcgccgacaucaaccugaugcccaucuga

SEQ ID NO: 176150 - RNA, 1410 nt, Artificial Sequence
  derived and/or modified CDS sequence (opt4) from neuraminidase__InfluenzaA__ABV30407
augaaccccaaccagaagaucaucaccaucggcagcgugagccugaccaucagcaccaucugcuucuucaugcagaucgccauccugaucaccaccgugacccugcacuucaagcaguacgaguucaacagcccccccaacaaccaggugaugcugugcgagcccaccaucaucgagagaaacaucaccgagaucguguaccugaccaacaccaccaucgagaaggagaucugccccaagcuggccgaguacagaaacuggagcaagccccagugcgacaucaccggcuucgcccccuucagcaaggacaacagcaucagacugagcgccggcggcgacaucugggugaccagagagcccuacgugagcugcgaccccgacaagugcuaccaguucgcccugggccagggcaccacccugaacaacgugcacagcaacgacaccgugagagacagaacccccuacagaacccugcugaugaacgagcugggcgugcccuuccaccugggcaccaagcaggugugcaucgccuggagcagcagcagcugccacgacggcaaggccuggcugcacgugugcaucaccggcgacgacaagaacgccaccgccagcuucaucuacaacggcagacugguggacagcaucgugagcuggagcaaggagauccugagaacccaggagagcgagugcgugugcaucaacggcaccugcaccguggugaugaccgacggcagcgccagcggcaaggccgacaccaagauccuguucaucgaggagggcaagaucgugcacaccagcacccugagcggcagcgcccagcacguggaggagugcagcugcuaccccagauaccccggcgugagaugcgugugcagagacaacuggaagggcagcaacagacccaucguggacaucaacaucaaggaccacagcaucgugagcagcuacgugugcagcggccuggugggcgacacccccagaaagaacgacagcagcagcagcggccacugccuggaccccaacaacgaggagggcggccacggcgugaagggcugggccuucgacgacggcaacgacguguggaugggcagaaccaucagcgagaagagcagacugggcuacgagaccuucaaggugaucgagggcuggagcaaccccaagagcaagcugcagaucaacagacaggugaucguggacagaggcaacagaagcggcuacagcggcaucuucagcguggagggcaagagcugcaucaacagaugcuucuacguggagcugaucagaggcagaaaggaggagaccgaggugcuguggaccagcaacagcaucgugguguucugcggcaccagcggcaccuacggcaccggcagcuggcccgacggcgccgacaucaaccugaugcccaucuga

SEQ ID NO: 176151 - RNA, 1410 nt, Artificial Sequence
  derived and/or modified CDS sequence (opt4) from neuraminidase__InfluenzaA__ABV30418
augaaccccaaccagaagaucaucaccaucggcagcgugagccugaccaucagcaccaucugcuucuucaugcagaucgccauccugaucaccaccgugacccugcacuucaagcaguacgaguucagcagccugcccaacaaccaggugaugcugugcgagcccaccaucaucgagagaaacaucaccgagaucguguaccugaccaacaccaccaucgagaaggagaucugccccaagcuggccgaguacagaaacuggagcaagccccagugcgacaucaccggcuucgcccccuucagcaaggacaacagcaucagacugagcgccggcggcgacaucugggugaccagagagcccuacgugagcugcgaccccgacaagugcuaccaguucgcccugggccagggcaccacccugaacaacgugcacagcaacgacaccgugcacgacagaacccccuacagaacccugcugaugaacgagcugggcgugcccuuccaccugggcaccaagcaggugugcaucgccuggagcagcagcagcugccacgacggcaaggccuggcugcacgugugcgugaccggcgacgacaagaacgccaccgccagcuucaucuacaacggcagacugguggacagcaucgugagcuggagcaaggagauccugagaacccaggagagcgagugcgugugcaucaacggcaccugcaccguggugaugaccgacggcagcgccagcggcaaggccgacaccaagauccuguucaucgaggagggcaagaucgugcacaccagcacccugagcggcagcgcccagcacguggaggagugcagcugcuaccccagauaccccggcgugagaugcgugugcagagacaacuggaagggcagcaacagacccaucguggacaucaacaucaaggacuacagcaucgugagcagauacgugugcagcggccuggugggcgacacccccagaaagaacgacagcagcagcagcagccacugccuggaccccaacaacgaggagggcggccacggcgugaagggcugggccuucgacgacggcaacgacguguggaugggcagaaccaucagcgagaagagcagaagcggcuacgagaccuucaaggugaucgagggcuggagcaaccccaacagcaagcugcagaucaacagacaggugaucguggacagaggcaacagaagcggcuacagcggcaucuucagcguggagggcaagagcugcaucaacagaugcuucuacguggagcugaucagaggcagaagagaggagaccgaggugcuguggaccagcaacagcaucgugguguucugcggcaccagcggcaccuacggcaccggcagcuggcccgacggcgccgacaucaaccugaugcccaucuga

SEQ ID NO: 176152 - RNA, 1410 nt, Artificial Sequence; identical to SEQ ID NO: 176117
  derived and/or modified CDS sequence (opt4) from neuraminidase__InfluenzaA__ABV30429

SEQ ID NO: 176153 - RNA, 1410 nt, Artificial Sequence; identical to SEQ ID NO: 176117
  derived and/or modified CDS sequence (opt4) from neuraminidase__InfluenzaA__ABV30440

SEQ ID NO: 176154 - RNA, 1410 nt, Artificial Sequence; identical to SEQ ID NO: 176117
  derived and/or modified CDS sequence (opt4) from neuraminidase__InfluenzaA__ABV30451

SEQ ID NO: 176155 - RNA, 1413 nt, Artificial Sequence; identical to SEQ ID NO: 176090
  derived and/or modified CDS sequence (opt4) from neuraminidase__InfluenzaA__ABV30462

SEQ ID NO: 176156 - RNA, 1410 nt, Artificial Sequence; identical to SEQ ID NO: 176117
  derived and/or modified CDS sequence (opt4) from neuraminidase__InfluenzaA__ABV30473

SEQ ID NO: 176157 - RNA, 1410 nt, Artificial Sequence
  derived and/or modified CDS sequence (opt4) from neuraminidase__InfluenzaA__ABV30484
augaaccccaaccagaagaucaucaccaucggcagcgugagccugaccaucagcaccaucugcuucuucaugcagaucgccauccugaucaccaccgugacccugcacuucaagcaguacgaguucaacagcccccccaacaaccaggugaugcugugcgagcccaccaucaucgagagaaacaucaccgagaucguguaccugaccaacaccaccaucgagaaggagaucugccccaagcuggccgaguacagaaacuggagcaagccccagugcgacaucaccggcuucgcccccuucagcaaggacaacagcaucagacugagcgccggcggcgacaucugggugaccagagagcccuacgugagcugcgaccccgacaagugcuaccaguucgcccugggccagggcaccacccugaacaacgugcacagcaacgacaccgugcacgacagaacccccuacagaacccugcugaugaacgagcugggcgugcccuuccaccugggcaccaagcaggugugcaucgccuggagcagcagcagcugccacgacggcaaggccuggcugcacgugugcgugaccggcgacgacaagaacgccaccgccagcuucaucuacaacggcagacugguggacagcaucgugagcuggagcaaggagauccugagaacccaggagagcgagugcgugugcaucaacggcaccugcaccguggugaugaccgacggcagcgccagcggcaaggccgacaccaagauccuguucaucgaggagggcaagaucgugcacaccagcacccugagcggcagcgcccagcacguggaggagugcagcugcuaccccagauaccccggcgugagaugcgugugcagagacaacuggaagggcagcaacagacccaucguggacaucaacaucaaggacuacagcaucgugagcagauacgugugcagcggccuggugggcgacacccccagaaagaacgacagcagcagcaacagccacugccuggaccccaacaacgaggagggcggccacggcgugaagggcugggccuucgacgacggcaacgacguguggaugggcagaaccaucagcgagaagagcagaagcggcuacgagaccuucaaggugaucgagggcuggagcaaccccaacagcaagcugcagaucaacagacaggugaucguggacagaggcaacagaagcggcuacagcggcaucuucagcguggagggcaagagcugcaucaacagaugcuucuacguggagcugaucagaggcagaaaggaggagaccgaggugcuguggaccagcaacagcaucgugguguucugcggcaccagcggcaccuacggcaccggcagcuggcccgacggcgccgacaucaaccugaugcccaucuga

SEQ ID NO: 176158 - RNA, 1413 nt, Artificial Sequence; identical to SEQ ID NO: 176129
  derived and/or modified CDS sequence (opt4) from neuraminidase__InfluenzaA__ABV30495

SEQ ID NO: 176159 - RNA, 1413 nt, Artificial Sequence; identical to SEQ ID NO: 176090
  derived and/or modified CDS sequence (opt4) from neuraminidase__InfluenzaA__ABV30506

SEQ ID NO: 176160 - RNA, 1410 nt, Artificial Sequence; identical to SEQ ID NO: 176126
  derived and/or modified CDS sequence (opt4) from neuraminidase__InfluenzaA__ABV30517

SEQ ID NO: 176161 - RNA, 1413 nt, Artificial Sequence
  derived and/or modified CDS sequence (opt4) from neuraminidase__InfluenzaA__ABV30528
augaacagcaaccagaagaucaucaccaucggcagcaucagcaucgccaucggcaucaucagccugaugcugcagaucggcaacaucaucagcaugugggccagccacagcauccagaccggcagccagaaccacaccggcaucugcaaccagagaaucaucaccuacgagaacagcaccugggugaaccacaccuacgugaacaucaacaacaccaacgugguggccggcaaggacaagaccagcgugacccuggccggcaacagcagccugugcagcaucagcggcugggccaucuacaccaaggacaacagcaucagaaucggcagcaagggcgacguguucgugaucagagagcccuucaucagcugcagccaccuggagugcagaaccuucuuccugacccagggcgcccugcugaacgacaagcacagcaacggcaccgugaaggacagaagccccuacagagcccugaugagcugcccccugggcgaggcccccagccccuacaacagcaaguucgagagcguggccuggagcgccagcgccugccacgacggcaugggcuggcugaccaucggcaucagcggccccgacaacggcgccguggccgugcugaaguacaacggcaucaucaccgagaccaucaagagcuggaagaagagaauccugagaacccaggagagcgagugcgugugcgugaacggcagcugcuucaccaucaugaccgacggccccagcaacggcgccgccagcuacaagaucuucaagaucgagaagggcaaggugaccaagagcaucgagcugaacgcccccaacuuccacuacgaggagugcagcugcuaccccgacaccggcaccgugaugugcgugugcagagacaacuggcacggcagcaacagacccugggugagcuucaaccagaaccuggacuaccaggugggcuacaucugcagcggcguguucggcgacaaccccagacccaaggacggcaagggcagcugcaaccccaugaccguggacggcgccgacggcgugaagggcuucagcuacaaguacggcaacggcguguggaucggcagaaccaagagcaacaagcugagaaagggcuucgagaugaucugggaccccaacggcuggaccgacaccgacagcgacuucagcgugaagcaggacgugguggccaucaccgacuggagcggcuacagcggcagcuucgugcagcaccccgagcugaccggccuggacugcaucagacccugcuucuggguggagcuggugagaggccugcccagagagaacgccaccaucuggaccagcggcagcagcaucagcuucugcggcguggacagcgacaccgccaacuggagcuggcccgacggcgccgagcugcccuucaccaucgacaaguga

SEQ ID NO: 176162 - RNA, 1413 nt, Artificial Sequence; identical to SEQ ID NO: 176090
  derived and/or modified CDS sequence (opt4) from neuraminidase__InfluenzaA__ABV30539

SEQ ID NO: 176163 - RNA, 1413 nt, Artificial Sequence; identical to SEQ ID NO: 176090
  derived and/or modified CDS sequence (opt4) from neuraminidase__InfluenzaA__ABV30561

SEQ ID NO: 176164 - RNA, 1413 nt, Artificial Sequence; identical to SEQ ID NO: 176090
  derived and/or modified CDS sequence (opt4) from neuraminidase__InfluenzaA__ABV30572

SEQ ID NO: 176165 - RNA, 1413 nt, Artificial Sequence; identical to SEQ ID NO: 176090
  derived and/or modified CDS sequence (opt4) from neuraminidase__InfluenzaA__ABV30583

SEQ ID NO: 176166 - RNA, 1413 nt, Artificial Sequence; identical to SEQ ID NO: 176090
  derived and/or modified CDS sequence (opt4) from neuraminidase__InfluenzaA__ABV30594

SEQ ID NO: 176167 - RNA, 1413 nt, Artificial Sequence
  derived and/or modified CDS sequence (opt4) from neuraminidase__InfluenzaA__ABV30605
augaaccccaaccagaagaucaucaccaucggcagcaucagcaucgccaucggcaucaucagccugaugcugcagaucggcaacaucaucagcaucugggccagccacagcauccagaccggcagccagaaccacaccggcaucugcaaccagagaaucaucaccuacgagaacagcaccugggugaaccacaccuacgugagcaucaacaacaccaacgugguggugggcaaggacaagaccagcgugacccuggccggcaacagcagccugugcagcaucagcggcugggccaucuacaccaaggacaacagcaucagaaucggcagcaagggcgacguguucgugaucagagagcccuucaucagcugcagccaccuggagugcagaaccuucuuccugacccagggcgcccugcugaacgacaagcacagcaacggcaccgugaaggacagaagccccuacagagcccugaugagcugcccccugggcgaggcccccagccccuacaacagcaaguucgagagcguggccuggagcgccagcgccugccacgacggcaugggcuggcugaccaucggcaucagcggccccgacaacggcgccguggccgugcugaaguacaacggcaucaucaccgagaccaucaagagcuggaagaagagaauccugagaacccaggagagcgagugcgugugcgugaacggcagcugcuucaccaucaugaccgacggccccagcaacggcgccgccagcuacaagaucuucaagaucgagaagggcaaggugaccaagagcaucgagcugaacgcccccaacuuccacuacgaggagugcagcugcuaccccgacaccggcaccgugaugugcgugugcagagacaacuggcacggcagcaacagacccugggugagcuucaaccagaaccuggacuaccagaucggcuacaucugcagcggcguguucggcgacaaccccagacccaaggacggcaagggcagcugcaaccccgugaccguggacggcgccgacggcgugaagggcuucagcuacaaguacggcaacggcguguggaucggcagaaccaagagcaacagacugagaaagggcuucgagaugaucugggaccccaacggcuggaccgacaccgacagcgacuucagcgugaagcaggacgugguggccaucaccgacuggagcggcuacagcggcagcuucgugcagcaccccgagcugaccggccuggacugcaucagacccugcuucuggguggagcuggugagaggccugcccagagagaacaccaccaucuggaccagcggcagcagcaucagcuucugcggcguggacagcgacaccgccaacuggagcuggcccgacggcgccgagcugcccuucaccaucgacaaguga

SEQ ID NO: 176168 - RNA, 1413 nt, Artificial Sequence; identical to SEQ ID NO: 176090
  derived and/or modified CDS sequence (opt4) from neuraminidase__InfluenzaA__ABV30616

SEQ ID NO: 176169 - RNA, 1413 nt, Artificial Sequence; identical to SEQ ID NO: 176090
  derived and/or modified CDS sequence (opt4) from neuraminidase__InfluenzaA__ABV30627

SEQ ID NO: 176170 - RNA, 1410 nt, Artificial Sequence
  derived and/or modified CDS sequence (opt4) from neuraminidase__InfluenzaA__ABV30649
augaaccccaaccagaagaucaucaccaucggcagcgugagccugaccaucagcaccaucugcuucuucaugcagaucgccauccugaucaccaccgugacccugcacuucaagcaguacgaguucaacagcccccccaacaaccaggugaugcugugcgagcccaccaucaucgagagaaacaucaccgagaucguguaccugaccaacaccaccaucgagaaggagaucugccccaagcuggccgaguacagaaacuggagcaagccccagugcgacaucaccggcuucgcccccuucagcaaggacaacagcaucagacugagcgccggcggcgacaucugggugaccagagagcccuacgugagcugcgaccccgacaagugcuaccaguucgcccugggccagggcaccacccugaacaacgugcacagcaacgacaccgugagagacagaacccccuacagaacccugcugaugaacgagcugggcgugcccuuccaccugggcaccaagcaggugugcaucgccuggagcagcagcagcugccacgacggcaaggccuggcugcacgugugcaucaccggcgacgacaagaacgccaccgccagcuucaucuacaacggcagacugguggacagcaucgugagcuggagcaaggagauccugagaacccaggagagcgagugcgugugcaucaacggcaccugcaccguggugaugaccgacggcagcgccagcggcaacgccgacaccaagauccuguucaucgaggagggcaagaucgugcacaccagcacccugagcggcagcgcccagcacguggaggagugcagcugcuaccccagauaccccggcgugagaugcgugugcagagacaacuggaagggcagcaacagacccaucguggacaucaacaucaaggaccacagcaucgugagcagcuacgugugcagcggccuggugggcgacacccccagaaagaacgacagcagcagcagcagccacugccuggaccccaacaacgaggagggcggccacggcgugaagggcugggccuucgacgacggcaacgacguguggaugggcagaaccaucagcgagaagagcagacugggcuacgagaccuucaaggugaucgagggcuggagcaaccccaagagcaagcugcagaucaacagacaggugaucguggacagaggcaacagaagcggcuacagcggcaucuucagcguggagggcaagagcugcaucaacagaugcuucuacguggagcugaucagaggcagaaaggaggagaccgaggugcuguggaccagcaacagcaucgugguguucugcggcaccagcggcaccuacggcaccggcagcuggcccgacggcgccgacaucaaccugaugcccaucuga

SEQ ID NO: 176171 - RNA, 1410 nt, Artificial Sequence; identical to SEQ ID NO: 175944
  derived and/or modified CDS sequence (opt4) from neuraminidase__InfluenzaA__ABV30660

SEQ ID NO: 176172 - RNA, 1413 nt, Artificial Sequence
  derived and/or modified CDS sequence (opt4) from neuraminidase__InfluenzaA__ABV45852
augaaccccaaccagaagaucaucaccaucggcagcaucagcaucgccaucggcaucaucagccugaugcugcagaucggcaacaucaucagcaucugggccagccacagcauccagaccggcagccagaaccacaccggcaucugcaaccagagaaucaucaccuacgagaacagcaccugggugaaccacaccuacgugaacaucaacaacaccaacgugguggccggcaaggacaagaccagcgugacccuggccggcaacagcagccugugcagcaucagcggcugggccaucuacaccaaggacaacagcaucagaaucggcagcaagggcgacguguucgugaucagagagcccuucaucagcugcagccaccuggagugcagaaccuucuuccugacccagggcgcccugcugaacgacaagcacagcaacggcaccgugaaggacagaagccccuacagagcccugaugagcugcccccugggcgaggcccccagccccuacaacagcaaguucgagagcguggccuggagcgccagcgccugccacgacggcaugggcuggcugaccaucggcaucagcggccccgacaacggcgccguggccgugcugaaguacaacggcaucaucaccgagaccaucaagagcuggaagaagagaauccugagaacccaggagagcgagugcgugugcgugaacggcagcugcuucaccaucaugaccgacggccccaacaacggcgccgccagcuacaagaucuucaagaucgagaagggcaaggugaccaagagcaucgagcugaacgcccccaacuuccacuacgaggagugcagcugcuaccccgacaccggcaccgugaugugcgugugcagagacaacuggcacggcagcaacagacccugggugagcuucaaccagaaccuggacuaccagaucggcuacaucugcagcggcguguucggcgacaaccccagacccaaggacggcgagggcagcugcaaccccgugaccguggacggcgccgacggcgugaagggcuucagcuacaaguacggcaacggcguguggaucggcagaaccaagagcaacagacugagaaagggcuucgagaugaucugggaccccaacggcuggaccgacaccgacagcaacuucagcgugaagcaggacgugguggccaucaccgacuggagcggcuacagcggcagcuucgugcagcaccccgagcugaccggccuggacugcaucagacccugcuucuggguggagcuggugagaggccugcccagagagaacaccaccaucuggaccagcggcagcagcaucagcuucugcggcgugaacagcgacaccgccaacuggagcuggcccgacggcgccgagcugcccuucaccaucgacaaguga

SEQ ID NO: 176173 - RNA, 1410 nt, Artificial Sequence; identical to SEQ ID NO: 175944
  derived and/or modified CDS sequence (opt4) from neuraminidase__InfluenzaA__ABV45863

SEQ ID NO: 176174 - RNA, 1413 nt, Artificial Sequence
  derived and/or modified CDS sequence (opt4) from neuraminidase__InfluenzaA__ABV45874
augaaccccaaccagaagaucaucaccaucggcagcaucagcaucgccaucggcaucaucagccugaugcugcagaucggcaacaucaucagcaucugggccagcuacagcauccagaccggcagccagaaccacaccggcaucugcaaccagagaaucaucaccuacgagaacagcaccugggugaaccacaccuacgugagcaucaacaacaccaacgugguggccggcaaggacaagaccagcgugacccuggccggcaacagcagccugugcagcaucagcggcugggccaucuacaccaaggacaacagcaucagaaucggcagcaagggcgacguguucgugaucagagagcccuucaucagcugcagccaccuggagugcagaaccuucuuccugacccagggcgcccugcugaacgacaagcacagcaacggcaccgugaaggacagaagccccuacagagcccugaugagcugcccccugggcgaggcccccagccccuacaacagcaaguucgagagcguggccuggagcgccagcgccugccacgacggcaugggcuggcugaccaucggcaucagcggccccgacaacggcgccguggccgugcugaaguacaacggcaucaucaccgagaccaucaagagcuggaagaagagaauccugagaacccaggagagcgagugcgugugcgugaacggcagcugcuucaccaucaugaccgacggccccagcaacggcgccgccagcuacaagaucuucaagaucgagaagggcaaggugaccaagagcaucgagcugaacgcccccaacuuccacuacgaggagugcagcugcuaccccgacaccggcaccgugaugugcgugugcagagacaacuggcacggcagcaacagacccugggugagcuucaaccagaaccuggacuaccagaucggcuacaucugcagcggcguguucggcgacaaccccagacccaaggacggcaagggcagcugcaaccccgugaccguggacggcgccgacggcgugaagggcuucagcuacaaguacggcaacggcguguggaucggcagaaccaagagcaacagacugagaaagggcuucgagaugaucugggaccccaacggcuggaccgacaccgacagcgacuucagcgugaagcaggacgugguggccaucaccgacuggagcggcuacagcggcagcuucgugcagcaccccgagcugaccggccuggacugcaucagacccugcuucuggguggagcuggugagaggccugcccagagagaacaccaccaucuggaccagcggcagcagcaucagcuucugcggcguggacagcgacaccgccaacuggagcuggcccgacggcgccgagcugcccuucaccaucgacaaguga

SEQ ID NO: 176175 - RNA, 1413 nt, Artificial Sequence; identical to SEQ ID NO: 176090
  derived and/or modified CDS sequence (opt4) from neuraminidase__InfluenzaA__ABV45885

SEQ ID NO: 176176 - RNA, 1413 nt, Artificial Sequence; identical to SEQ ID NO: 176103
  derived and/or modified CDS sequence (opt4) from neuraminidase__InfluenzaA__ABV45896

SEQ ID NO: 176177 - RNA, 1413 nt, Artificial Sequence; identical to SEQ ID NO: 176090
  derived and/or modified CDS sequence (opt4) from neuraminidase__InfluenzaA__ABV45918

SEQ ID NO: 176178 - RNA, 1413 nt, Artificial Sequence
  derived and/or modified CDS sequence (opt4) from neuraminidase__InfluenzaA__ABV45929
augaaccccaaccagaagaucaucaccaucggcagcaucagcaucgccaucggcaucaucagccugaugcugcagaucggcaacaucaucagcaugugggccagccacagcauccagaccggcagccagaaccacaccggcaucugcaaccagagaaucaucaccuacgagaacagcaccugggugaaccacaccuacgugaacaucaacaacaccaacguggugaccggcaaggacaagaccagcgugacccuggccggcaacagcagccugugcagcaucagcggcugggccaucuacaccaaggacaacagcaucagaaucggcagcaagggcgacguguucgugaucagagagcccuucaucagcugcagccaccuggagugcagaaccuucuuccugacccagggcgcccugcugaacgacaagcacagcaacggcaccgugaaggacagaagccccuacagagcccugaugagcugcccccugggcgaggcccccagccccuacaacagcaaguucgagagcguggccuggagcgccagcgccugccacgacggcaugggcuggcugaccaucggcaucagcggccccgacaacggcgccguggccgugcugaaguacaacggcaucaucaccgagaccaucaagagcuggaagaagagaauccugagaacccaggagagcgagugcgugugcgugaacggcagcugcuucaccaucaugaccgacggccccagcgacggcgccgccagcuacaagaucuucaagaucgagaagggcaaggugaccaagagcaucgagcugaacgcccccaacuuccacuacgaggagugcagcugcuaccccgacaccggcaccgugaugugcgugugcagagacaacuggcacggcagcaacagacccugggugagcuucaaccagaaccuggacuaccagaucggcuacaucugcagcggcguguucggcgacaaccccagacccaaggacggcaagggcagcugcaaccccgugaccguggacggcgccgacggcgugaagggcuucagcuacaaguacggcaacggcguguggaucggcagaaccaagagcaacaagcugagaaagggcuucgagaugaucugggaccccaacggcuggaccgacaccgacaacgacuucagcgugaagcaggacgugguggccaucaccgacuggagcggcuacagcggcagcuucgugcagcaccccgagcugaccggccuggacugcaucagacccugcuucuggguggagcuggugagaggccugcccagagagaacgccaccaucuggaccagcggcagcagcaucagcuucugcggcguggacagcgacaccgccaacuggagcuggcccgacggcgccgagcugcccuucaccaucgacaaguga

SEQ ID NO: 176179 - RNA, 1413 nt, Artificial Sequence
  derived and/or modified CDS sequence (opt4) from neuraminidase__InfluenzaA__ABV45940
augaaccccaaccagaagaucaucaccaucggcagcaucagcaucgccaucggcaucaucagccugaugcugcagaucggcaacaucaucagcaucugggccagccacagcauccagaccggcagccagaaccacaccggcaucugcaaccagagaaucaucagauacgagaacagcaccugggugaaccacaccuacgugaacaucaacaacaccaacgugguggccggcaaggacaagaccagcgugacccuggccggcaacagcagccugugcagcaucagcggcugggccaucuacaccaaggacaacagcaucagaaucggcagcaagggcgacguguucgugaucagagagcccuucaucagcugcagccaccuggagugcagaaccuucuuccugacccagggcgcccugcugaacgacaagcacagcaacggcaccgugaaggacagaagccccuacagagcccugaugagcugcccccugggcgaggcccccagccccuacaacagcaaguucgagagcguggccuggagcgccagcgccugccacgacggcaugggcuggcugaccaucggcaucagcggccccgacaacggcgccguggccgugcugaaguacaacggcaucaucaccgagaccaucaagagcuggaagaagcagauccugagaacccaggagagcgagugcgugugcgugaacggcagcugcuucaccaucaugaccgacggccccagcaacggcgccgccagcuacaagaucuucaagaucgagaagggcaaggugaccaagagcaucgagcugaacgcccccaacuuccacuacgaggagugcagcugcuaccccgacaccggcaccgugaugugcgugugcagagacaacuggcacggcagcaacagacccugggugagcuucaaccagagccuggacuaccaggugggcuacaucugcagcggcguguucggcgacaaccccagacccaaggacggcaagggcagcugcaaccccaugaccguggacggcgccgacggcgugaagggcuucagcuacaaguacggcaacggcguguggaucggcagaaccaagagcaacaagcugagaaagggcuucgagaugaucugggaccccaacggcuggaccgacaccgacagcgacuucagcgugaagcaggacgugguggccaucaccgacuggagcggcuacagcggcagcuucgugcagcaccccgagcugaccggccuggacugcaucagacccugcuucuggguggagcuggugagaggccugcccagagagaacaccaccaucuggaccagcggcagcagcaucagcuucugcggcguggacagcgacaccgccaacuggagcuggcccgacggcgccgagcugcccuucaccaucgacaaguga

SEQ ID NO: 176180 - RNA, 1413 nt, Artificial Sequence; identical to SEQ ID NO: 176116
  derived and/or modified CDS sequence (opt4) from neuraminidase__InfluenzaA__ABV45951

SEQ ID NO: 176181 - RNA, 1410 nt, Artificial Sequence
  derived and/or modified CDS sequence (opt4) from neuraminidase__InfluenzaA__ABV45973
augaaccccaaccagaagaucaucaccaucggcagcgugagccugaccaucagcaccaucugcuucuucaugcagaucgccauccugaucaccaccgugacccugcacuucaagcaguacgaguucaacagcccccccaacaaccaggugaugcugugcgagcccaccaucaucgagagaaacaucaccgagaucguguaccugaccaacaccaccaucgagaaggagaucugccccaagcuggccgaguacagaaacuggagcaagccccagugcgacaucaccggcuucgcccccuucagcaaggacaacagcaucagacugagcgccggcggcgacaucugggugaccagagagcccuacgugagcugcgaccccgacaagugcuaccaguucgcccugggccagggcaccacccugaacaacgugcacagcaacgacaccgugagagacagaacccccuacagaacccugcugaugaacgagcugggcgugcccuuccaccugggcaccaagcaggugugcaucgccuggagcagcagcagcugccacgacggcaaggccuggcugcacgugugcaucaccggcgacgacaagaacgccaccgccagcuucaucuacaacggcagacugguggacagcaucgugagcuggagcaaggagauccugagaacccaggagagcgagugcgugugcaucaacggcaccugcaccguggugaugaccgacggcagcgccagcggcgaggccgacaccaagauccuguucaucgaggagggcaagaucgugcacaccagcacccugagcggcagcgcccagcacguggaggagugcagcugcuaccccagauaccccggcgugagaugcgugugcagagacaacuggaagggcagcaacagacccaucguggacaucaacaucaaggaccacagcaucgugagcagcuacgugugcagcggccuggugggcgacacccccagaaagaacgacagcagcagcagcagccacugccuggaccccaacaacgaggagggcggccacggcgugaagggcugggccuucgacgacggcaacgacguguggaugggcagaaccaucagcgagaagagcagacugggcuacgagaccuucaaggugaucgagggcuggagcaaccccaagagcaagcugcagaucaacagacaggugaucguggacagaggcaacagaagcggcuacagcggcaucuucagcguggagggcaagagcugcaucaacagaugcuucuacguggagcugaucagaggcagaaaggaggagaccgacgugcuguggaccagcaacagcaucgugguguucugcggcaccagcggcaccuacggcaccggcagcuggcccgacggcgccgacaucaaccugaugcccaucuga

SEQ ID NO: 176182 - RNA, 1410 nt, Artificial Sequence
  derived and/or modified CDS sequence (opt4) from neuraminidase__InfluenzaA__ABV45984
augaaccccaaccagaagaucaucaccaucggcagcgugagccugaccaucagcaccaucugcuucuucaugcagaucgccauccuggugaccaccgugacccugcacuucaagcaguacgaguucaacagcccccccaacaaccaggugaugcugugcgagcccaccaucaucgagagaaacaucaccgagaucguguaccugaccaacaccaccaucgagaaggagaucugccccaagcuggccgaguacagaaacuggagcaagccccagugcgacaucaccggcuucgcccccuucagcaaggacaacagcaucagacugagcgccggcggcgacaucugggugaccagagagcccuacgugagcugcgaccccgacaagugcuaccaguucgcccugggccagggcaccacccugaacaacgugcacagcaacgacaccgugagagacagaacccccuacagaacccugcugaugaacgagcugggcgugcccuuccaccugggcaccaagcaggugugcaucgccuggagcagcagcagcugccacgacggcaaggccuggcugcacgugugcaucaccggcgacgacaagaacgccaccgccagcuucaucuacaacggcagacugguggacagcaucgugagcuggagcaaggagauccugagaacccaggagagcgagugcgugugcaucaacggcaccugcaccguggugaugaccgacggcagcgccagcggcaaggccgacaccaagauccuguucaucgaggagggcaagaucgugcacaccagcacccugagcggcagcgcccagcacguggaggagugcagcugcuaccccagauaccccggcgugagaugcgugugcagagacaacuggaagggcagcaacagacccaucguggacaucaacaucaaggaccacagcaucgugagcagcuacgugugcagcggccuggugggcgacacccccagaaagaacgacagcagcagcagcagccacugccuggaccccaacaacgaggagggcggccacggcgugaagggcugggccuucgacgacggcaacgacguguggaugggcagaaccaucagcgagaagagcagacugggcuacgagaccuucaaggugaucgagggcuggagcaaccccaagagcaagcugcagaucaacagacaggugaucguggacagaggcaacagaagcggcuacagcggcaucuucagcguggagggcaagagcugcaucaacagaugcuucuacguggagcugaucagaggcagaaaggaggagaccgaggugcuguggaccagcaacagcaucgugguguucugcggcaccagcggcaccuacggcaccggcagcuggcccgacggcgccgacaucaaccugaugcccaucuga

SEQ ID NO: 176183 - RNA, 1410 nt, Artificial Sequence; identical to SEQ ID NO: 175944
  derived and/or modified CDS sequence (opt4) from neuraminidase__InfluenzaA__ABV45995

SEQ ID NO: 176184 - RNA, 1413 nt, Artificial Sequence; identical to SEQ ID NO: 176103
  derived and/or modified CDS sequence (opt4) from neuraminidase__InfluenzaA__ABV82554

SEQ ID NO: 176185 - RNA, 1410 nt, Artificial Sequence; identical to SEQ ID NO: 176126
  derived and/or modified CDS sequence (opt4) from neuraminidase__InfluenzaA__ABV82565

SEQ ID NO: 176186 - RNA, 1410 nt, Artificial Sequence; identical to SEQ ID NO: 176126
  derived and/or modified CDS sequence (opt4) from neuraminidase__InfluenzaA__ABW36171

SEQ ID NO: 176187 - RNA, 1413 nt, Artificial Sequence; identical to SEQ ID NO: 176142
  derived and/or modified CDS sequence (opt4) from neuraminidase__InfluenzaA__ABW36193

SEQ ID NO: 176188 - RNA, 1413 nt, Artificial Sequence; identical to SEQ ID NO: 176090
  derived and/or modified CDS sequence (opt4) from neuraminidase__InfluenzaA__ABW36204

SEQ ID NO: 176189 - RNA, 1413 nt, Artificial Sequence
  derived and/or modified CDS sequence (opt4) from neuraminidase__InfluenzaA__ABW36215
augaaccccaaccagaagaucaucaccaucggcagcaucagcaucgccaucggcaucaucagccugaugcugcagaucggcaacaucaucagcaucugggccagccacagcauccagaccggcagccagaaccacaccggcaucugcaaccagagaaucaucaccuacgagaacagcaccugggugaaccacaccuacgugaacaucaacaacaccaacgugguggccggcaaggacaagaccagcgugacccuggccggcaacagcagccugugcagcaucagcggcugggccaucuacaccaaggacaacagcaucagaaucggcagcaagggcgacguguucgugaucagagagcccuucaucagcugcagccaccuggagugcagaaccuucuuccugacccagggcgcccugcugaacgacaagcacagcaacggcaccgugaaggacagaagccccuacagagcccugaugagcugcccccugggcgaggcccccagccccuacaacagcaaguucgagagcguggccuggagcgccagcgccugccacgacggcaagggcuggcugaccaucggcaucagcggccccgacaacggcgccguggccgugcugaaguacaacggcaucaucaccgagaccaucaagagcuggaacaagcagauccugagaacccaggagagcgagugcgugugcgugaacggcagcugcuucaccaucaugaccgacggccccagcaacggcgccgccagcuacaagaucuucaagaucgagaagggcaaggugaccaagagcaucgagcugaacgcccccaacuuccacuacgaggagugcagcugcuaccccgacaccggcaccgugaugugcgugugcagagacaacuggcacggcagcaacagacccugggugagcuucaaccagaaccuggacuaccagaucggcuacaucugcagcggcguguucggcgacaaccccagacccaaggacggcagaggcagcugcaaccccgugaccguggacggcgccgacggcgugaagggcuucagcuacaaguacggcaacggcguguggaucggcagaaccaagagcaacagacugagaaagggcuucgagaugaucugggaccccaacggcuggaccgacaccgacagccacuucagcgugaagcaggacgugguggccaucaccgacuggagcggcuacagcggcagcuucgugcagcaccccgagcugaccggccuggacugcaucaagcccugcuucuggguggagcuggugagaggccugcccagagagaacaccaccaucuggaccagcggcagcagcaucagcuucugcggcguggacagcgacaccgccaacuggagcuggcccgacggcgccgagcugcccuucaucaucgacaaguga

SEQ ID NO: 176190 - RNA, 1413 nt, Artificial Sequence; identical to SEQ ID NO: 176090
  derived and/or modified CDS sequence (opt4) from neuraminidase__InfluenzaA__ABW36226

SEQ ID NO: 176191 - RNA, 1413 nt, Artificial Sequence
  derived and/or modified CDS sequence (opt4) from neuraminidase__InfluenzaA__ABW36237
augaaccccaaccagaagaucaucaccaucggcagcaucagcaucaccaucggcaucaucagccugaugcugcagaucggcaacaucaucagcaucugggccagccacagcauccagaccggcagccagaaccacaccggcaucugcaaccagagaaucaucaccuacgagaacagcaccugggugaaccacaccuacgugaacaucaacaacaccaacgugguggccggcaaggacaagaccagcgugacccuggccggcaacagcagccugugcagcaucagcggcugggccaucuacaccaaggacaacagcaucagaaucggcagcaagggcgacguguucgugaucagagagcccuucaucagcugcagccaccuggagugcagaaccuucuuccugacccagggcgcccugcugaacgacaagcacagcaacggcaccgugaaggacagaagccccuacagagcccugaugagcugcccccugggcgaggcccccagccccuacaacagcaaguucgagagcguggccuggagcgccagcgccugccacgacggcaugggcuggcugaccaucggcaucagcggccccgacaacggcgccguggccgugcugaaguacaacggcaucaucaccgagaccaucaagagcuggaagaagagaauccugagaacccaggagagcgagugcgugugcgugaacggcagcugcuucaccaucaugaccgacggccccagcaacggcgccgccagcuacaagaucuucaagaucgagaagggcaaggugaccaagagcaucgagcugaacgcccccaacuuccacuacgaggagugcagcugcuaccccgacaccggcaccgugaugugcgugugcagagacaacuggcacggcagcaacagacccugggugagcuucaaccagaaccuggacuaccaggugggcuacaucugcagcggcguguucggcgacaaccccagacccaaggacggcaagggcagcugcaaccccaugaccguggacggcgccgacggcgugaagggcuucagcuacaaguacggcaacggcguguggaucggcagaaccaagagcaacaagcugagaaagggcuucgagaugaucugggaccccaacggcuggaccgacaccgacagcgacuucagcgugaagcaggacgugguggccaucaccgacuggagcggcuacagcggcagcuucgugcagcaccccgagcugaccggccuggacugcaucagacccugcuucuggguggagcuggugagaggccugcccagagagaacaccaccaucuggaccagcggcagcagcaucagcuucugcggcguggacagcgacaccgccaacuggagcuggcccgacggcgccgagcugcccuucaccaucgacaaguga

SEQ ID NO: 176192 - RNA, 1413 nt, Artificial Sequence; identical to SEQ ID NO: 176090
  derived and/or modified CDS sequence (opt4) from neuraminidase__InfluenzaA__ABW36248

SEQ ID NO: 176193 - RNA, 1413 nt, Artificial Sequence
  derived and/or modified CDS sequence (opt4) from neuraminidase__InfluenzaA__ABW36259
augaaccccaaccagaagaucaucaccaucggcagcaucagcaucgccaucggcaucaucagccugaugcugcagaucggcaacaucaucagcaucugggccagccacagcauccagaccggcagccagaacaacaccggcaucugcaaccagagaaucaucaccuacgagaacagcaccugggugaaccacaccuacgugaacaucaacaacaccaacgugguggccggcaaggacaagaccagcgugacccuggccggcaacagcagccugugcagcaucagcggcugggccaucuacaccaaggacaacagcaucagaaucggcagcaagggcgacguguucgugaucagagagcccuucaucagcugcagccaccuggagugcagaaccuucuuccugacccagggcgcccugcugaacgacaagcacagcaacggcaccgugaaggacagaagccccuacagagcccugaugagcugcccccugggcgaggcccccagccccuacaacagcaaguucgagagcguggccuggagcgccagcgccugccacgacggcaugggcuggcugaccaucggcaucagcggccccgacaacggcgccguggccgugcugaaguacaacggcaucaucaccggcaccaucaagagcuggaagaagcagauccugagaacccaggagagcgagugcgugugcaugaacggcagcugcuucaccaucaugaccgacggccccagcaacagagccgccagcuacaagaucuucaagaucgagaagggcaaggugaccaagagcaucgagcugaacgcccccaacuuccacuacgaggagugcagcugcuaccccgacaccggcaucgugaugugcgugugcagagacaacuggcacggcagcaacagacccugggugagcuucaaccagaaccuggacuaccagaucggcuacaucugcagcggcgugcugggcgacaaccccagacccgaggacggcgagggcagcugcaaccccgugaccguggacggcgccgacggcgugaagggcuucagcuacaaguacgacaacggcguguggaucggcagaaccaagagcaacagacugagaaagggcuucgagaugaucugggaccccaacggcuggaccaacaccgacagcgacuucagcgugaagcaggacgugguggccaucaccgacuggagcggcuacagcggcagcuucgugcagcaccccgagcugaccggccuggacugcaucagacccugcuucuggguggagcuggugagaggccugcccagagagaacaccaccaucuggaccagcggcagcagcaucagcuucugcggcgugagcagcgacaccgccaacuggagcuggcccgacggcgccgagcugcccuucaccaucgacaaguga

SEQ ID NO: 176194 - RNA, 1413 nt, Artificial Sequence; identical to SEQ ID NO: 176090
  derived and/or modified CDS sequence (opt4) from neuraminidase__InfluenzaA__ABW36281

SEQ ID NO: 176195 - RNA, 1413 nt, Artificial Sequence; identical to SEQ ID NO: 176090
  derived and/or modified CDS sequence (opt4) from neuraminidase__InfluenzaA__ABW36292

SEQ ID NO: 176196 - RNA, 1413 nt, Artificial Sequence; identical to SEQ ID NO: 176103
  derived and/or modified CDS sequence (opt4) from neuraminidase__InfluenzaA__ABW36303

SEQ ID NO: 176197 - RNA, 1413 nt, Artificial Sequence
  derived and/or modified CDS sequence (opt4) from neuraminidase__InfluenzaA__ABW36314
augaaccccaaccagaagaucaucaccaucggcagcaucugcauggccaucggcaucaucagccugauccugcagaucggcaacaucaucagcaucugggugagccacagcauccagaccggcagccagaaccacaccggcaucugcaaccagagaaucaucaccuacgagaacagcaccugggugaaccagaccuacgugaacaucagcaacaccaacgugguggccggcaaggacaccaccagcaugacccuggccggcaacagcagccugugccccaucagaggcugggccaucuacagcaaggacaacagcaucagaaucggcagcaagggcgacguguucgugaucagagagcccuucaucagcugcagccaccuggagugcagaaccuucuuccugacccagggcgcccugcugaacgacaagcacagcaacggcaccgugaaggacagaagccccuacagagcccugaugagcugccccaucggcgaggcccccagccccuacaacagcagauucgagagcguggccuggagcgccagcgccugccacgacggcaugggcuggcugaccaucggcaucagcggccccgacgacggcgccguggccgugcugaaguacaacggcaucaucaccgagaccaucaagagcuggagaaagcagauccugagaacccaggagagcgagugcgugugcgugaacggcagcugcuucaccaucaugaccgacggccccagcgacggccaggccagcuacagaaucuucaagaucgagaagggcaagaucaccaagagcaucgagcuggacgcccccaacuuccacuacgaggagugcagcugcuaccccgacaccggcaccgugaugugcgugugcagagacaacuggcacggcagcaacagacccugggugagcuucaaccagaaccuggacuaccagaucggcuacaucugcagcggcguguucggcgacaaccccagacccaaggacggcaagggcagcugcgaccccgugaacguggacggcgccgacggcgugaagggcuucagcuacagauacggcaacggcguguggaucggcagaaccaagagcaacagcagcagaaagggcuucgagaugaucugggaccccaacggcuggaccgacaccgacagcaacuuccuggugaagcaggacgugguggccaugaccgacuggagcggcuacagcggcagcuucgugcagcaccccgagcugaccggccuggacugcaugagacccugcuucuggguggagcugaucagaggcagacccagagagaagaccaccaucuggaccagcggcagcagcaucagcuucugcggcgugaacagcgacaccgugaacuggagcuggcccgacggcgccgagcugcccuucaccaucgacaaguga

SEQ ID NO: 176198 - RNA, 1410 nt, Artificial Sequence
  derived and/or modified CDS sequence (opt4) from neuraminidase__InfluenzaA__ABW38366
augaaccccaaccagaagaucaucaccaucggcagcgugagccugaccaucagcaccaucugcuucuucaugcagaucgccauccugaucaccaccgugacccugcacuucaagcaguacgaguucaacagcccccccaacaaccaggugaugcugugcgagcccaccaucaucgagagaaacaucaccgagaucguguaccugaccaacaccaccaucgagaaggagaucugccccaagcuggccgaguacagaaacuggagcaagccccagugcaacaucaccggcuucgcccccuucagcaaggacaacagcaucagacugagcgccggcggcgacaucugggugaccagagagcccuacgugagcugcgaccccgacaagugcuaccaguucgcccugggccagggcaccacccugaacaacgugcacagcaacgacaccgugcacgacagaacccccuacagaacccugcugaugaacgagcugggcgugcccuuccaccugggcaccaagcaggugugcaucgccuggagcagcagcagcugccacgacggcaaggccuggcugcacgugugcgugaccggcgacgacaagaacgccaccgccagcuucaucuacaacggcagacugguggacagcaucgccagcuggagcaaggagauccugagaacccaggagagcgagugcgugugcaucaacggcaccugcaccguggugaugaccgacggcagcgccagcggcaaggccgacaccaagauccuguucaucgaggagggcaagaucgugcacaccagcacccugagcggcagcgcccagcacguggaggagugcagcugcuaccccagauaccccggcgugagaugcgugugcagagacaacuggaagggcagcaacagacccaucguggacaucaacaucaaggacuacagcaucgugagcagcuacgugugcagcggccuggugggcgacacccccagaaagaacgacagcagcagcagcagccacugccuggaccccaacaacgaggagggcggccacggcgugaagggcugggccuucgacgacggcaacgacguguggaugggcagaaccaucagcgagaagcugagaagcggcuacgagaccuucaaggugaucgagggcuggagcaaccccaacagcaagcugcagaucaacagacaggugaucguggacagaggcaacagaagcggcuacagcggcaucuucagcguggagggcaagagcugcaucaacagaugcuucuacguggagcugaucagaggcagaaaggaggagaccgaggugcuguggaccagcaacagcaucgugguguucugcggcaccagcggcaccuacggcaccggcagcuggcccgacggcgccgacaucaaccugaugcccaucuga

SEQ ID NO: 176199 - RNA, 1413 nt, Artificial Sequence; identical to SEQ ID NO: 176189
  derived and/or modified CDS sequence (opt4) from neuraminidase__InfluenzaA__ABW39780

SEQ ID NO: 176200 - RNA, 1413 nt, Artificial Sequence
  derived and/or modified CDS sequence (opt4) from neuraminidase__InfluenzaA__ABW39809
augaaccccaaccagaagaucaucaccaucggcagcaucagcaucgccaucggcaucaucagccugaugcugcagaucggcaacaucaucagcaucugggccagccacagcauccagaccggcagccagaaccacaccggcaucugcaaccagagaaucaucaccuacgagaacagcaccugggugaaccacaccuacgugagcaucaacaacaccaacgugguggccggcaaggacaagacccuggugacccuggccggcaacagcagccugugcagcaucagcggcugggccaucuacaccaaggacaacagcaucagaaucggcagcaagggcgacguguucgugaucagagagcccuucaucagcugcagccaccuggagugcagaaccuucuuccugacccagggcgcccugcugaacgacaagcacagcaacggcaccgugaaggacagaagccccuacagagcccugaugagcugcccccugggcgaggcccccagccccuacaacagcaaguucgagagcguggccuggagcgccagcgccugccacgacggcaugggcuggcugaccaucggcaucagcggccccgacaacggcgccguggccgugcugaaguacaacggcaucaucaccgagaccaucaagagcuggaagaagagaauccugagaacccaggagagcgagugcgugugcgugaacggcagcugcuucaccaucaugaccgacggccccagcaacggcgccgccagcuacaagaucuucaagaucgagaagggcaaggugaccaagagcaucgagcugaacgcccccaacuuccacuacgaggagugcagcugcuaccccgacaccggcaccgugaugugcgugugcagagacaacuggcacggcagcaacagacccugggugagcuucaaccagaaccuggacuaccagaucggcuacaucugcagcggcguguucggcgacaaccccagacccaaggacggcaagggcagcugcaaccccgugaccguggacggcgccgacggcgugaagggcuucagcuacaaguacggcaacggcguguggaucggcagaaccaagagcaacagacugagaaagggcuucgagaugaucugggaccccaacggcuggaccgacaccgacagcgacuucagcgugaagcaggacgugguggccaucaccgacuggagcggcuacagcggcagcuucgugcagcaccccgagcugaccggccuggacugcaucagacccugcuucuggguggagcuggugagaggccugcccagagagaacaccaccaucuggaccagcggcagcagcaucagcuucugcggcguggacagcgacaccgccaacuggagcuggcccgacggcgccgagcugcccuucaccaucgacaaguga

SEQ ID NO: 176201 - RNA, 1413 nt, Artificial Sequence; identical to SEQ ID NO: 176103
  derived and/or modified CDS sequence (opt4) from neuraminidase__InfluenzaA__ABW39820

SEQ ID NO: 176202 - RNA, 1413 nt, Artificial Sequence
  derived and/or modified CDS sequence (opt4) from neuraminidase__InfluenzaA__ABW39831
augaaccccaaccagaagaucaucaccaucggcagcaucagcaucgccaucggcaucaucagccugaugcugcagaucggcaacaucaucagcaucugggccagccacagcauccagaccggcagccagaaccacaccggcaucugcaaccagagaaucaucaccuacgagaacagcaccugggugaaccacaccuacgugaacaucaacaacaccaacgugguggccggcaaggacaagacccccgugacccuggugggcaacagcagccugugcagcaucagcggcugggccaucuacaccaaggacaacagcaucagaaucggcagcaagggcgacguguucgugaucagagagcccuucaucagcugcagccaccuggagugcaagaccuucuuccugacccagggcgcccugcugaacgacaagcacagcaacggcaccgugaaggacagaagccccuacagagcccugaugagcugcccccugggcgaggcccccagccccuacaacagcaaguucgagagcguggccuggagcgccagcgccugccacgacggcaucggcuggcugaccaucggcaucagcggccccgacaacggcgccguggccgugcugaaguacaacggcaucaucaccggcaccaucaagagcuggaagaagcagauccugagaacccaggagagcgagugcgugugcaugaacggcagcugcuucaccaucaugaccgacggccccagcaacggcgccgccagcuacaagaucuucaagaucgagaagggcaaggugaccaagagcauggagcugaacgcccccaacuuccacuacgaggagugcagcugcuaccccgacaccggcaccgugaugugcgugugcagagacaacuggcacggcagcaacagacccugggugagcuucaaccagaaccuggacuaccagaucggcuacaucugcagcggcguguucggcgacaaccccagacccaaggacggcgagggcagcugcaaccccgugaccguggacggcgccaacggcgugaagggcuucagcuacaaguacggcaacggcguguggaucggcagaaccaagagcaacagaaucagaaagggcuucgagaugaucugggaccccaacggcuggaccaacaccgacagcgacuucagcgugaagcaggacaucguggccaucaccgacuggagcggcuacagcggcagcuucgugcagcaccccgagcugaccggccuggacugcaucagacccugcuucuggguggagcuggugagaggccugcccagagagaacaccaccaucuggaccagcggcagcagcaucagcuucugcggcgugaacggcgacaucgccaacuggagcuggcccgacggcgccgagcugcccuucaccaucgacaaguga

SEQ ID NO: 176203 - RNA, 1413 nt, Artificial Sequence; identical to SEQ ID NO: 176116
  derived and/or modified CDS sequence (opt4) from neuraminidase__InfluenzaA__ABW39842

SEQ ID NO: 176204 - RNA, 1413 nt, Artificial Sequence; identical to SEQ ID NO: 176090
  derived and/or modified CDS sequence (opt4) from neuraminidase__InfluenzaA__ABW39864

SEQ ID NO: 176205 - RNA, 1410 nt, Artificial Sequence; identical to SEQ ID NO: 176126
  derived and/or modified CDS sequence (opt4) from neuraminidase__InfluenzaA__ABW39875

SEQ ID NO: 176206 - RNA, 1413 nt, Artificial Sequence
  derived and/or modified CDS sequence (opt4) from neuraminidase__InfluenzaA__ABW39886
augaaccccaaccagaagaucaucaccaucggcagcaucagcaucgccaucggcaucaucagccugauccugcagaucggcaacaucaucagcaucugggccagccacagcauccagaccagaaaccagaaccacaccggcaucugcaaccagagaaucaucaccuacgagaacagcaccugggugaaccacaccuacgugagcaucaacaacaccaacgugguggccggcaaggacaagaccagcgugacccuggccggcaacagcagccugugcagcaucagcggcugggccaucuacaccaaggacaacagcaucagaaucggcagcaagggcgacguguucgugaucagagagcccuucaucagcugcagccaccuggagugcagaaccuucuuccugacccagggcgcccugcugaacgacaagcacagcaacggcaccgugaaggacagaagccccuacagagcccugaugagcugcccccugggcgaggcccccagccccuacaacagcaaguucgagagcguggccuggagcgccagcgccugccacgacggcaugggcuggcugaccaucggcaucagcggccccgacaacggcgccguggccgugcugaaguacaacggcaucaucaccgagaccaucaagagcuggaagaagagaauccugagaacccaggagagcgagugcgugugcgugaacggcagcugcuucaccaucaugaccgacggccccagcaacggcgccgccagcuacaagaucuucaagaucgagaagggcaaggugaccaagagcaucgagcugaacgcccccaacuuccacuacgaggagugcagcugcuaccccgacaccggcaccgugaugugcgugugcagagacaacuggcacggcagcaacagacccugggugagcuucaaccagaaccuggacuaccagaucggcuacaucugcagcggcguguucggcgacaaccccagacccaaggacggcaagggcagcugcaaccccgugaccguggacggcgccgacggcgugaagggcuucagcuacaaguacggcaacggcguguggaucggcagaaccaagagcaacagacugagaaagggcuucgagaugaucugggaccccaacggcuggaccgacaccgacagcgacuucagcgugaagcaggacgugguggccaucaccgacuggagcggcuacagcggcagcuucgugcagcaccccgagcugaccggccuggacugcaucagacccugcuucuggguggagcuggugagaggccugcccagagagaacaccaccaucuggaccagcggcagcagcaucagcuucugcggcguggacagcgacaccgccaacuggagcuggcccgacggcgccgagcugcccuucaccaucgacaaguga

SEQ ID NO: 176207 - RNA, 1413 nt, Artificial Sequence; identical to SEQ ID NO: 176090
  derived and/or modified CDS sequence (opt4) from neuraminidase__InfluenzaA__ABW39897

SEQ ID NO: 176208 - RNA, 1413 nt, Artificial Sequence
  derived and/or modified CDS sequence (opt4) from neuraminidase__InfluenzaA__ABW39908
augaaccccaaccagaagaucaucaccaucggcagcaucagcaucgccaucggcaucaccagccugaugcugcagaucggcaacaucaucagcaucugggccagccacagcauccagaccggcagccagaaccacaccggcaucugcaaccagagaaucaucaccuacgagaacagcaccugggugaaccacaccuacgugagcaucaacaacaccaacgugguggccggcaaggacaagaccagcgugacccuggccggcaacagcagccugugcagcaucagcggcugggccaucuacaccaaggacaacagcaucagaaucggcagcaagggcgacguguucgugaucagagagcccuucaucagcugcagccaccuggagugcagaaccuucuuccugacccagggcgcccugcugaacgacaagcacagcaacggcaccgugaaggacagaagccccuacagagcccugaugagcugcccccugggcgaggcccccagccccuacaacagcaaguucgagagcguggccuggagcgccagcgccugccacgacggcaugggcuggcugaccaucggcaucagcggccccgacaacggcgccguggccgugcugaaguacaacggcaucaucaccgagaccaucaagagcuggaagaagagaauccugagaacccaggagagcgagugcgugugcgugaacggcagcugcuucaccaucaugaccgacggccccagcaacggcgccgccagcuacaagaucuucaagaucgagaagggcaaggugaccaagagcaucgagcugaacgcccccaacuuccacuacgaggagugcagcugcuaccccgacaccggcaccgugaugugcgugugcagagacaacuggcacggcagcaacagacccugggugagcuucaaccagaaccuggacuaccagaucggcuacaucugcagcggcguguucggcgacaaccccagacccaaggacggcaagggcagcugcaaccccgugaccguggacggcgccgacggcgugaagggcuucagcuacaaguacggcaacggcguguggaucggcagaaccaagagcaacagacugagaaagggcuucgagaugaucugggaccccaacggcuggaccgacaccgacagcgacuucagcgugaagcaggacgugguggccaucaccgacuggagcggcuacagcggcagcuucgugcagcaccccgagcugaccggccuggacugcaucagacccugcuucuggguggagcuggugagaggccugcccagagagaacaccaccaucuggaccagcggcagcagcaucagcuucugcggcguggacagcgacaccgccaacuggagcuggcccgacggcgccgagcugcccuucaccaucgacaaguga

SEQ ID NO: 176209 - RNA, 1413 nt, Artificial Sequence
  derived and/or modified CDS sequence (opt4) from neuraminidase__InfluenzaA__ABW39930
augaaccccaaccagaagaucaucaccaucggcagcaucagcaucgccaucggcaucaucagccugaugcugcagaucggcaacaucaucagcaucugggccagccacagcauccagaccggcagccagaaccacaccggcaucugcaaccagagaaucaucaccuacgagaacagcaccugggugaaccacaccuacgugagcaucaacaacaccaacgugguggccggcaaggacaagaccagcgugacccuggccggcaacagcagccugugcagcaucagcggcugggccaucuacaccaaggacaacagcaucagaaucggcagcaagggcgacguguucgugaucagagagcccuucaucagcugcagccaccuggagugcagaaccuucuuccugacccagggcgcccugcugaacgacaagcacagcaacggcaccgugaaggacagaagccccuacagagcccugaugagcugcccccugggcgaggcccccagccccuacaacagcaaguucgagagcguggccuggagcgccagcgccugccacgacggcaugggcuggcugaccaucggcaucagcggccccgacaacggcgccguggccgugcugaaguacaacggcaucaucaccgagaccaucaagagcuggaagaagagaauccugagaacccaggagagcgagugcgugugcgugaacggcagcugcuucaccaucaugaccgacggccccagcgacggcgccgccagcuacaagaucuucaagaucgagaagggcaaggugaccaagagcaucgagcugaacgcccccaacuuccacuacgaggagugcagcugcuaccccgacaccggcaccgugaugugcgugugcagagacaacuggcacggcagcaacagacccugggugagcuucaaccagaaccuggacuaccagaucggcuacaucugcagcggcguguucggcgacaaccccagacccaaggacggcaagggcagcugcaaccccgugaccguggacggcgccgacggcgugaagggcuucagcuacaaguacggcaacggcguguggaucggcagaaccaagagcaacagacugagaaagggcuucgagaugaucugggaccccaacggcuggaccgacaccgacagcgacuucagcgugaagcaggacgugguggccaucaccgacuggagcggcuacagcggcagcuucgugcagcaccccgagcugaccggccuggacugcaucagacccugcuucuggguggagcuggugagaggccugcccagagagaacaccaccaucuggaccagcggcagcagcaucagcuucugcggcguggacagcgacaccgccaacuggagcuggcccgacggcgccgagcugcccuucaccaucgacaaguga

SEQ ID NO: 176210 - RNA, 1413 nt, Artificial Sequence
  derived and/or modified CDS sequence (opt4) from neuraminidase__InfluenzaA__ABW39952
augaaccccaaccagaagaucaucaccaucggcagcaucagcaucaccaucggcaucaucagccugaugcugcagaucggcaacaucaucagcaucugggccagccacagcauccagaccggcagccagaaccacaccggcaugugcaaccagagaaucaucaccuacgagaacagcaccugggugaaccacaccuacgugagcaucaacaacaccaacgugguggccggcaaggacaagaccagcgugacccuggccggcaacagcagccugugcagcaucagcggcugggccaucuacaccaaggacaacagcaucagaaucggcagcaagggcgacguguucgugaucagagagcccuucaucagcugcagccaccuggagugcagaaccuucuuccugacccagggcgcccugcugaacgacaagcacagcaacggcaccgugaaggacagaagccccuacagagcccugaugagcugcccccugggcgaggcccccagccccuacaacagcaaguucgagagcguggccuggagcgccagcgccugccacgacggcaugggcuggcugaccaucggcaucagcggccccgacaacggcgccguggccgugcugaaguacaacggcaucaucaccgagaccaucaagagcuggaagaagagaauccugagaacccaggagagcgagugcgugugcgugaacggcagcugcuucaccaucaugaccgacggccccagcaacggcgccgccagcuacaagaucuucaagaucgagaagggcaaggugaccaagagcaucgagcugaacgcccccaacuuccacuacgaggagugcagcugcuaccccgacaccggcaccgugaugugcgugugcagagacaacuggcacggcagcaacagacccugggugagcuucaaccagaaccuggacuaccagaucggcuacaucugcagcggcguguucggcgacaaccccagacccaaggacggcaagggcagcugcaaccccgugaccguggacggcgccgacggcgugaagggcuucagcuacaaguacggcaacggcguguggaucggcagaaccaagagcaacagacugagaaagggcuucgagaugaucugggaccccaacggcuggaccgacaccgacagcgacuucagcgugaagcaggacgugguggccaucaccgacuggagcggcuacagcggcagcuucgugcagcaccccgagcugaccggccuggacugcaucagacccugcuucuggguggagcuggugagaggccugcccagagagaacaccaccaucuggaccagcggcagcagcaucagcuucugcggcguggacagcgacaccgccaacuggagcuggcccgacggcgccgagcugcccuucaccaucgacaaguga

SEQ ID NO: 176211 - RNA, 1413 nt, Artificial Sequence; identical to SEQ ID NO: 176090
  derived and/or modified CDS sequence (opt4) from neuraminidase__InfluenzaA__ABW39963

SEQ ID NO: 176212 - RNA, 1413 nt, Artificial Sequence; identical to SEQ ID NO: 176090
  derived and/or modified CDS sequence (opt4) from neuraminidase__InfluenzaA__ABW39985

SEQ ID NO: 176213 - RNA, 1413 nt, Artificial Sequence
  derived and/or modified CDS sequence (opt4) from neuraminidase__InfluenzaA__ABW39996
augaaccccaaccagaagaucaucaccaucggcagcaucagcaucgccaucggcaucaucagccugaugcugcagaucggcaacaucaucagcaucugggccagccacagcauccagaccggcagccagaaccacaccggcaucugcaaccagagaaucaucaccuacgagaacagcaccugggugaaccacaccuacgugaacaucaacaacaccaacgugguggccggcaaggacaagaccagcgugacccuggccggcaacagcagccugugcagcaucagcggcugggccaucuacaccaaggacaacagcaucagaaucggcagcaagggcgacguguucgugaucagagagcccuucaucagcugcagccaccuggagugcagaaccuucuuccugacccagggcgcccugcugaacgacaagcacagcaacggcaccgugaaggacagaagccccuacagagcccugaugagcugcccccugggcgaggcccccagccccuacaacagcaaguucgagagcguggccuggagcgccagcgccugccacgacggcaugggcuggcugaccaucggcaucagcggccccgacaacggcgccguggccgugcugaaguacaacggcaucaucaccgagaccaucaagagcuggaagaagagaauccugagaacccaggagagcgagugcgugugcgugaacggcagcugcuucaccaucaugaccgacggccccagcaacggcaccgccagcuacaagaucuucaagaucgagaagggcaaggugaccaagagcaucgagcugaacgcccccaacuuccacuacgaggagugcagcugcuaccccgacaccggcaccgugaugugcgugugcagagacaacuggcacggcagcaacagacccugggugagcuucaaccagaaccuggacuaccaggugggcuacaucugcagcggcguguucggcgacaaccccagacccaaggacggcaagggcagcugcaaccccaugaccguggacggcgccgacggcgugaagggcuucagcuacaaguacggcaacggcguguggaucggcagaaccaagagcaacaagcugagaaagggcuucgagaugaucugggaccccaacggcuggaccgacaccgacagcgacuucagcgugaagcaggacgugguggccaucaccgacuggagcggcuacagcggcagcuucgugcagcaccccgagcugaccggccuggacugcaucagacccugcuucuggguggagcuggugagaggccugcccagagagaacaccaccaucuggaccagcggcagcagcaucagcuucugcggcguggacagcgacaccgccaacuggagcuggcccgacggcgccgagcugcccuucaccaucgacaaguga

SEQ ID NO: 176214 - RNA, 1413 nt, Artificial Sequence; identical to SEQ ID NO: 176090
  derived and/or modified CDS sequence (opt4) from neuraminidase__InfluenzaA__ABW40007

SEQ ID NO: 176215 - RNA, 1413 nt, Artificial Sequence
  derived and/or modified CDS sequence (opt4) from neuraminidase__InfluenzaA__ABW40018
augaaccccaaccagaagaucaucaccaucggcagcaucagcaucgccaucggcaucaucagccugaugcugcagaucggcaacaucaucagcaucugggccagccacagcauccagaccggcagccagaaccacaccggcaucugcaaccagagaaucaucaccuacgagaacagcaccugggugaaccacaccuacgugaacaucaacaacaccaacgugguggccggcaaggacaagaccagcgugacccuggccggcaacagcagccugugcagcaucagcggcugggccaucuacaccaaggacaacagcaucagaaucggcagcaagggcgacguguucgugaucagagagcccuucaucagcugcagccaccuggagugcagaaccuucuuccugacccagggcgcccugcugaacgacaagcacagcaacggcaccgugaaggacagaagccccuacagagcccugaugagcugcccccugggcgaggcccccagccccuacaacagcaaguucgagagcguggccuggagcgccagcgccugccacgacggcaugggcuggcugaccaucggcaucagcggccccgacaacggcgccguggccgugcugaaguacaacggcaucaucaccgagaccaucaagagcuggaagaagagaauccugagaacccaggagagcgagugcgugugcgugaacggcagcugcuucaccaucaugaccgacggccccagcaacggcgccgccagcuacaagaucuucaagaucgagaagggcaaggugaccaagagcaucgagcugaacgcccccaacuuccacuacgaggagugcagcugcuaccccgacaccggcaccgugaugugcgugugcagagacaacuggcacggcagcaacagacccugggugagcuucaaccagaaccuggacuaccagaucggcuacaucugcagcggcguguucggcgacaaccccagacccaaggacggcaagggcagcugcaaccccgugaccguggacggcgccgacggcaucaagggcuucagcuacaaguacggcaacggcguguggaucggcagaaccaagagcaacagacugagaaagggcuucgagaugaucugggaccccaacggcuggaccaacaccgacagcgacuucagcgugaagcaggacgugguggccaucaccgacuggagcggcuacagcggcagcuucgugcagcaccccgagcugaccggccuggacugcaucagacccugcuucuggguggagcuggugagaggccugcccagagagaacaccaccaucuggaccagcggcagcagcaucagcuucugcggcguggacggcgacaccgccaacuggagcuggcccgacggcgccgagcugcccuucaccaucgacaaguga

SEQ ID NO: 176216 - RNA, 1410 nt, Artificial Sequence; identical to SEQ ID NO: 175944
  derived and/or modified CDS sequence (opt4) from neuraminidase__InfluenzaA__ABW40029

SEQ ID NO: 176217 - RNA, 1413 nt, Artificial Sequence
  derived and/or modified CDS sequence (opt4) from neuraminidase__InfluenzaA__ABW40040
augaaccccaaccagaagaucaucaccaucggcagcaucagcaucgccaucggcaucaucagccugaugcugcagaucggcaacaucaucagcaucugggccagccacagcauccagaccggcagccagaaccacaccggcaucugcaaccagagaaucaucaccuacgagaacagcaccugggugaaccacaccuacgugagcaucaacaacaccaacgugguggccggcaaggacaagaccagcgugacccuggccggcaacagcagccugugcagcaucagcggcugggccaucuacaccaaggacaacagcaucagaaucggcagcaagggcgacguguucgugaucagagagcccuucaucagcugcagccaccuggagugcagaaccuucuuccugacccagggcgcccugcugaacgacaagcacagcaacggcaccgugaaggacagaagccccuacagagcccugaugagcugcccccugggcgaggcccccagccccuacaacagcaaguucgagagcguggccuggagcgccagcgccugccacgacggcaugggcuggcugaccaucggcaucagcggccccgacaacggcgccguggccgugcugaaguacaacggcaucaucaccgagaccaucaagagcuggaagaagagaauccugagaacccaggagagcgagugcgugugcgugaacggcagcugcuucaccaucaugaccgacggccccagcaacggcgccgccagcuacaagaucuucaagaucgagaagggcaaggugaccaagagcaucgagcugaacgcccccaacuuccacuacgaggagugcagcugcuaccccgacaccggcaccgugaugugcgugugcagagacaacuggcacggcagcaacagacccugggugagcuucaaccagaaccuggacuaccagaucggcuacaucugcagcggcguguucggcgacaaccccagacccaaggacggcaagggcagcugcaaccccgugaccguggacggcgccgacggcgugaagggcuucagcuacaaguacggcaacggcaucuggaucggcagaaccaagagcaacagacugagaaagggcuucgagaugaucugggaccccaacggcuggaccgacaccgacagcgacuucagcgugaagcaggacgugguggccaucaccgacuggagcggcuacagcggcagcuucgugcagcaccccgagcugaccggccuggacugcaucagacccugcuucuggguggagcuggugagaggccugcccagagagaacaccaccaucuggaccagcggcagcagcaucagcuucugcggcguggacagcgacaccgccaacuggagcuggcccgacggcgccgagcugcccuucaccaucgacaaguga

SEQ ID NO: 176218 - RNA, 1413 nt, Artificial Sequence; identical to SEQ ID NO: 176090
  derived and/or modified CDS sequence (opt4) from neuraminidase__InfluenzaA__ABW40051

SEQ ID NO: 176219 - RNA, 1413 nt, Artificial Sequence; identical to SEQ ID NO: 176090
  derived and/or modified CDS sequence (opt4) from neuraminidase__InfluenzaA__ABW40062

SEQ ID NO: 176220 - RNA, 1410 nt, Artificial Sequence; identical to SEQ ID NO: 176126
  derived and/or modified CDS sequence (opt4) from neuraminidase__InfluenzaA__ABW40084

SEQ ID NO: 176221 - RNA, 1413 nt, Artificial Sequence
  derived and/or modified CDS sequence (opt4) from neuraminidase__InfluenzaA__ABW40095
augaaccccaaccagaagaucaucaccaucggcagcaucagcguggccaucggcaucaucagccugaugcugcagaucggcaacaucaucagcaucugggccagccacagcauccagaccggcagccagaaccacaccggcaucugcaaccagagaaucaucaccuacgagaacagcaccugggugaaccacaccuacgugagcaucaacaacaccaacgugguggccggcaaggacaagaccagcgugacccuggccggcaacagcagccugugcagcaucagcggcugggccaucuacaccaaggacaacagcaucagaaucggcagcaagggcgacguguucgugaucagagagcccuucaucagcugcagccaccuggagugcagaaccuucuuccugacccagggcgcccugcugaacgacaagcacagcaacggcaccgugaaggacagaagccccuacagagcccugaugagcugcccccugggcgaggcccccagccccuacaacagcaaguucgagagcguggccuggagcgccagcgccugccacgacggcaugggcuggcugaccaucggcaucagcggccccgacaacggcgccguggccgugcugaaguacaacggcaucaucaccgagaccaucaagagcuggaagaagagaauccugagaacccaggagagcgagugcgugugcgugaacggcagcugcuucaccaucaugaccgacggccccagcaacggcgccgccagcuacaagaucuucaagaucgagaagggcaaggugaccaagagcaucgagcugaacgcccccaacuuccacuacgaggagugcagcugcuaccccgacaccggcaccgugaugugcgugugcagagacaacuggcacggcagcaacagacccugggugagcuucaaccagaaccuggacuaccagaucggcuacaucugcagcggcguguucggcgacaaccccagacccaaggacggcaagggcagcugcaaccccaugaccguggacggcgccgacggcgugaagggcuucagcuacaaguacggcaacggcguguggaucggcagaaccaagagcaacagacugagaaagggcuucgagaugaucugggaccccaacggcuggaccgacaccgacagcgacuucagcgugaagcaggacgugguggccaucaccgacuggagcggcuacagcggcagcuucgugcagcaccccgagcugaccggccuggacugcaucagacccugcuucuggguggagcuggugagaggccugcccagagagaacaccaccaucuggaccagcggcagcagcaucagcuucugcggcguggacagcgacaccgccaacuggagcuggcccgacggcgccgagcugcccuucaccaucgacaaguga

SEQ ID NO: 176222 - RNA, 1413 nt, Artificial Sequence
  derived and/or modified CDS sequence (opt4) from neuraminidase__InfluenzaA__ABW40106
augaaccccaaccagaagaucaucaccaucggcagcaucagcaucgccaucggcaucaucagccugaugcugcagaucggcaacaucaucagcaucugggccagccacagcauccagaccggcagccagaaccacaccggcaucugcaaccagagaaucaucaccuacgagaacagcaccugggugaaccacaccuacgugagcaucaacaacaccaacgugguggccggcaaggacaagaccagcgugacccuggccggcaacagcagccugugcagcaucagcggcugggccaucuacaccaaggacaacagcaucagaaucggcagcaagggcgacguguucgugaucagagagcccuucaucagcugcagccaccuggagugcagaaccuucuuccugacccagggcgcccugcugaacgacaagcacagcaacggcaccgugaaggacagaagccccuacagagcccugaugagcugcccccugggcgaggcccccagccccuacaacagcaaguucgagagcguggccuggagcgccagcgccugccacgacggcaugggcuggcugaccaucggcaucagcggccccgacaacggcgccguggccgugcugaaguacaacggcaucaucaccgagaccaucaagagcuggaagaagagaauccugagaacccaggagagcgagugcgugugccugaacggcagcugcuucaccaucaugaccgacggccccagcaacggcgccgccagcuacaagaucuucaagaucgagaagggcaaggugaccaagagcaucgagcugaacgcccccaacuuccacuacgaggagugcagcugcuaccccgacaccggcaccgugaugugcgugugcagagacaacuggcacggcagcaacagacccugggugagcuucaaccagaaccuggacuaccagaucggcuacaucugcagcggcguguucggcgacaaccccagacccaaggacggcaagggcagcugcaaccccgugaccguggacggcgccgacggcgugaagggcuucagcuacaaguacggcaacggcguguggaucggcagaaccaagagcaacagacugagaaagggcuucgagauggugugggaccccaacggcuggaccgacaccgacagcgacuucagcgugaagcaggacgugguggccaucaccgacuggagcggcuacagcggcagcuucgugcagcaccccgagcugaccggccuggacugcaucagacccugcuucuggguggagcuggugagaggccugcccagagagaacaccaccaucuggaccagcggcagcagcaucagcuucugcggcguggacagcgacaccgccaacuggagcuggcccgacggcgccgagcugcccuucaccaucgacaaguga

SEQ ID NO: 176223 - RNA, 1413 nt, Artificial Sequence; identical to SEQ ID NO: 176090
  derived and/or modified CDS sequence (opt4) from neuraminidase__InfluenzaA__ABW40117

SEQ ID NO: 176224 - RNA, 1413 nt, Artificial Sequence; identical to SEQ ID NO: 176090
  derived and/or modified CDS sequence (opt4) from neuraminidase__InfluenzaA__ABW40128

SEQ ID NO: 176225 - RNA, 1410 nt, Artificial Sequence; identical to SEQ ID NO: 175944
  derived and/or modified CDS sequence (opt4) from neuraminidase__InfluenzaA__ABW40139

SEQ ID NO: 176226 - RNA, 1413 nt, Artificial Sequence; identical to SEQ ID NO: 176090
  derived and/or modified CDS sequence (opt4) from neuraminidase__InfluenzaA__ABW40150

SEQ ID NO: 176227 - RNA, 1413 nt, Artificial Sequence; identical to SEQ ID NO: 176090
  derived and/or modified CDS sequence (opt4) from neuraminidase__InfluenzaA__ABW40161

SEQ ID NO: 176228 - RNA, 1410 nt, Artificial Sequence
  derived and/or modified CDS sequence (opt4) from neuraminidase__InfluenzaA__ABW40172
augaaccccaaccagaagaucaucaccaucggcagcgugagccugaccaucagcaccaucugcuucuucaugcagaucgccauccugaucaccaccgugacccugcacuucaagcaguacgaguucaacagcccccccaacaaccaggugaugcugugcgagcccaccaucaucgagagaaacaucaccgagaucguguaccugaccaacaccaccaucgagaaggagaucugccccaagcuggccgaguacagaaacuggagcaagccccagugcgacaucaccggcuucgcccccuucagcaaggacaacagcaucagacugagcgccggcggcgacaucugggugaccagagagcccuacgugagcugcgaccccgacaagugcuaccaguucgcccugggccagggcaccacccugaacaacgugcacagcaacgacaccgugagagacagaacccccuacagaacccugcugaugaacgagcugggcgugcccuuccaccugggcaccaagcaggugugcaucgccuggagcagcagcagcugccacgacggcaaggccuggcugcacgugugcaucaccggcgacgacaagaacgccaccgccagcuucaucuacaacggcagacugguggacagcaucgugagcuggagcaaggagauccugagaacccaggagagcgagugcgugugcaucaacggcaccugcaccguggugaugaccgacggcagcgccagcggcaaggccgacaccaagauccuguucaucgaggagggcaagaucgugcacaccagcacccugagcggcagcgcccagcacguggaggagugcagcugcuaccccagauaccccggcgugagaugcgugugcagagacaacuggaagggcagcaacagacccaucguggacaucaacaucaaggaccacagcaucgugagcagcuacgugugcagcggccuggugggcgacacccccagaaagaacgacagcagcagcagcagccacugccuggaccccaacaacgaggagggcggccacggcgugaagggcugggccuucgacgacggcaacgacguguggaugggcagaaccaucagcgagaagagcagacugggcuacgagaccuucaaggugaucgagggcuggagcaaccccaagagcaagcugcagaucaacagacaggugaucguggacagaggcaacagaagcggcuacagcggcaucuucagcguggagggcaagagcugcaucaacagaugcuucuacguggagcugaccagaggcagaaaggaggagaccgaggugcuguggaccagcaacagcaucgugguguucugcggcaccagcggcaccuacggcaccggcagcuggcccgacggcgccgacaucaaccugaugcccaucuga

SEQ ID NO: 176229 - RNA, 1413 nt, Artificial Sequence; identical to SEQ ID NO: 176090
  derived and/or modified CDS sequence (opt4) from neuraminidase__InfluenzaA__ABW40183

SEQ ID NO: 176230 - RNA, 1410 nt, Artificial Sequence; identical to SEQ ID NO: 175944
  derived and/or modified CDS sequence (opt4) from neuraminidase__InfluenzaA__ABW40194

SEQ ID NO: 176231 - RNA, 1413 nt, Artificial Sequence; identical to SEQ ID NO: 176125
  derived and/or modified CDS sequence (opt4) from neuraminidase__InfluenzaA__ABW40205

SEQ ID NO: 176232 - RNA, 1413 nt, Artificial Sequence; identical to SEQ ID NO: 176129
  derived and/or modified CDS sequence (opt4) from neuraminidase__InfluenzaA__ABW40216

SEQ ID NO: 176233 - RNA, 1413 nt, Artificial Sequence; identical to SEQ ID NO: 176129
  derived and/or modified CDS sequence (opt4) from neuraminidase__InfluenzaA__ABW40227

SEQ ID NO: 176234 - RNA, 1413 nt, Artificial Sequence; identical to SEQ ID NO: 176090
  derived and/or modified CDS sequence (opt4) from neuraminidase__InfluenzaA__ABW40238

SEQ ID NO: 176235 - RNA, 1410 nt, Artificial Sequence
  derived and/or modified CDS sequence (opt4) from neuraminidase__InfluenzaA__ABW40249
augaaccccaaccagaagaucaucaccaucggcagcgugagccugaccaucagcaccaucugcuucuucaugcagaucgccauccugaucaccaccgugacccugcacuucaagcaguacgaguucaacagcccccccaacaaccaggugaugcugugcgagcccaccaucaucgagagaaacaucaccgagaucguguaccugaccaacaccaccaucgagaaggagaucugccccaagcuggccgaguacagaaacuggagcaagccccagugcgacaucaccggcuucgcccccuucagcaaggacaacagcaucagacugagcgccggcggcgacaucugggugaccagagagcccuacgugagcugcgaccccgacaagugcuaccaguucgcccugggccagggcaccacccugaacaacgugcacagcaacgacaccgugagagacagaacccccuacagaacccugcugaugaacgagcugggcgugcccuuccaccugggcaccaagcaggugugcaucgccuggagcagcagcagcugccacgacggcaaggccuggcugcacgugugcaucaccggcgacgacaagaacgccaccgccagcuucaucuacaacggcagacugguggacagcaucgugagcuggagcaaggagauccugagaacccaggagagcgagugcgugugcaucaacggcaccugcaccguggugaugaccgacggcagcgccagcggcaaggccgacaccaagauccuguucaucgaggagggcaagaucgugcacaccagcacccugagcggcagcgcccagcacguggaggagugcagcugcuaccccagauaccccggcgugagaugcgugugcagagacaacuggaagggcagcaacagacccaucguggacaucaacaucaaggaccacagcaucgugagcagcuacgugugcagcggccuggugggcgacacccccagaaagaacgacagcagcagcagcagccacugccuggaccccaacaacgaggagggcggccacggcgugaagggcugggccuucgacgacggcaacgacguguggaugggcagaaccaucagcgagaagagcagacugggcuacgagaccuucaaggugaucgagggcuggagcaaccacaagagcaagcugcagaucaacagacaggugaucguggacagaggcaacagaagcggcuacagcggcaucuucagcguggagggcaagagcugcaucaacagaugcuucuacguggagcugaucagaggcagaaaggaggagaccgaggugcuguggaccagcaacagcaucgugguguucugcggcaccagcggcaccuacggcaccggcagcuggcccgacggcgccgacaucaaccugaugcccaucuga

SEQ ID NO: 176236 - RNA, 1413 nt, Artificial Sequence; identical to SEQ ID NO: 176090
  derived and/or modified CDS sequence (opt4) from neuraminidase__InfluenzaA__ABW40260

SEQ ID NO: 176237 - RNA, 1410 nt, Artificial Sequence
  derived and/or modified CDS sequence (opt4) from neuraminidase__InfluenzaA__ABW40271
augaaccccaaccagaagaucaucaccaucggcagcgugagccugaccaucagcaccaucugcuucuucaugcagaucgccauccugaucaccaccgugacccugcacuucaagcaguacgaguucaacagcccccccaacaaccaggugaugcugugcgagcccaccaucaucgagagaaacaucaccgagaucguguaccugaccaacaccaccaucgagaaggagaucugccccaagcuggccgagcacagaaacuggagcaagccccagugcgacaucaccggcuucgcccccuucagcaaggacaacagcaucagacugagcgccggcggcgacaucugggugaccagagagcccuacgugagcugcgaccccgacaagugcuaccaguucgcccugggccagggcaccacccugaacaacgugcacagcaacgacaccgugagagacagaacccccuacagaacccugcugaugaacgagcugggcgugcccuuccaccugggcaccaagcaggugugcaucgccuggagcagcagcagcugccacgacggcaaggccuggcugcacgugugcaucaccggcgacgacaagaacgccaccgccagcuucaucuacaacggcagacugguggacagcaucgugagcuggagcaaggagauccugagaacccaggagagcgagugcgugugcaucaacggcaccugcaccguggugaugaccgacggcagcgccagcggcaaggccgacaccaagauccuguucaucgaggagggcaagaucgugcacaccagcacccugagcggcagcgcccagcacguggaggagugcagcugcuaccccagauaccccggcgugagaugcgugugcagagacaacuggaagggcagcaacagacccaucguggacaucaacaucaaggaccacagcaucgugagcagcuacgugugcagcggccuggugggcgacacccccagaaagaacgacagcagcagcagcagccacugccuggaccccaacaacgaggagggcggccacggcgugaagggcugggccuucgacgacggcaacgacguguggaugggcagaaccaucagcgagaagagcagacugggcuacgagaccuucaaggugaucgagggcuggagcaaccccaagagcaagcugcagaucaacagacaggugaucguggacagaggcaacagaagcggcuacagcggcaucuucagcguggagggcaagagcugcaucaacagaugcuucuacguggagcugaucagaggcagaaaggaggagaccgaggugcuguggaccagcaacagcaucgugguguucugcggcaccagcggcaccuacggcaccggcagcuggcccgacggcgccgacaucaaccugaugcccaucuga

SEQ ID NO: 176238 - RNA, 1413 nt, Artificial Sequence; identical to SEQ ID NO: 176090
  derived and/or modified CDS sequence (opt4) from neuraminidase__InfluenzaA__ABW40282

SEQ ID NO: 176239 - RNA, 1413 nt, Artificial Sequence; identical to SEQ ID NO: 176125
  derived and/or modified CDS sequence (opt4) from neuraminidase__InfluenzaA__ABW40293

SEQ ID NO: 176240 - RNA, 1413 nt, Artificial Sequence; identical to SEQ ID NO: 176090
  derived and/or modified CDS sequence (opt4) from neuraminidase__InfluenzaA__ABW40304

SEQ ID NO: 176241 - RNA, 1413 nt, Artificial Sequence; identical to SEQ ID NO: 176090
  derived and/or modified CDS sequence (opt4) from neuraminidase__InfluenzaA__ABW40315

SEQ ID NO: 176242 - RNA, 1410 nt, Artificial Sequence; identical to SEQ ID NO: 175944
  derived and/or modified CDS sequence (opt4) from neuraminidase__InfluenzaA__ABW40326

SEQ ID NO: 176243 - RNA, 1413 nt, Artificial Sequence; identical to SEQ ID NO: 176131
  derived and/or modified CDS sequence (opt4) from neuraminidase__InfluenzaA__ABW40337

SEQ ID NO: 176244 - RNA, 1413 nt, Artificial Sequence; identical to SEQ ID NO: 176125
  derived and/or modified CDS sequence (opt4) from neuraminidase__InfluenzaA__ABW40359

SEQ ID NO: 176245 - RNA, 1413 nt, Artificial Sequence
  derived and/or modified CDS sequence (opt4) from neuraminidase__InfluenzaA__ABW40370
augaaccccaaccagaagaucaucaccaucggcagcaucagcaucgccaucggcaucaucagccugaugcugcagaucggcaacaucaucagcaucugggccagccacagcauccagaccggcagccagaaccacaccggcaucugcaaccagagaaucaucaccuacgagaacagcaccugggugaaccacaccuacgugagcaucaacaacaccaacgugguggccggcaaggacaagaccagcgugacccuggccggcaacagcagccugugcagcaucagcggcugggccaucuacaccaaggacaacagcaucagaaucggcagcaagggcgacguguucgugaucagagagcccuucaucagcugcagccaccuggagugcagaaccuucuuccugacccagggcgcccugcugaacgacaagcacagcaacggcaccgugaaggacagaagccccuacagagcccugaugagcugcccccugggcgaggcccccagccccuacaacagcaaguucgagagcguggccuggagcgccagcgccugccacgacggcaugggcuggcugaccaucggcaucagcggccccgacaacggcgccguggccgugcugaaguacaacggcaucaucaccgagaccaucaagagcuggaagaagagaauccugagaacccaggagagcgagugcgugugcgugaacggcagcugcuucaccaucaugaccgacggccccagcaacggcgccgccagcuacaagaucuucaagaucgagaagggcaaggugaccaagagcaucgagcugaacgcccccaacuuccacuacgaggagugcagcugcuaccccgacagcggcaccgugaugugcgugugcagagacaacuggcacggcagcaacagacccugggugagcuucaaccagaaccuggacuaccagaucggcuacaucugcagcggcguguucggcgacaaccccagacccaaggacggcaagggcagcugcaaccccgugaccguggacggcgccgacggcgugaagggcuucagcuacaaguacggcaacggcguguggaucggcagaaccaagagcaacagacugagaaagggcuucgagaugaucugggaccccaacggcuggaccgacaccgacagcgacuucagcgugaagcaggacgugguggccaucaccgacuggagcggcuacagcggcagcuucgugcagcaccccgagcugaccggccuggacugcaucagacccugcuucuggguggagcuggugagaggccugcccagagagaacaccaccaucuggaccagcggcagcagcaucagcuucugcggcguggacagcgacaccgccaacuggagcuggcccgacggcgccgagcugcccuucaccaucgacaaguga

SEQ ID NO: 176246 - RNA, 1413 nt, Artificial Sequence; identical to SEQ ID NO: 176090
  derived and/or modified CDS sequence (opt4) from neuraminidase__InfluenzaA__ABW40403

SEQ ID NO: 176247 - RNA, 1413 nt, Artificial Sequence
  derived and/or modified CDS sequence (opt4) from neuraminidase__InfluenzaA__ABW40414
augaaccccaaccagaagaucaucaccaucggcagcaucagcaucgccaucggcaucaucagccugaugcugcagaucggcaacaucaucagcaucugggccagccacagcauccagaccggcagccagaaccacaccggcaucugcaaccagagaaucaucaccuacgagaacagcaccugggugaaccacaccuacgugagcaucaacaacaccaacgugguggccggcaaggacaagaccagcgugacccuggccggcaacagcagccugugcagcaucagcggcugggccaucuacaccaaggacaacagcaucagaaucggcagcaagggcgacguguucgugaucagagagcccuucaucagcugcagccaccuggagugcagaaccuucuuccugacccagggcgcccugcugaacgacaagcacagcaacggcaccgugaaggacagaagccccuacagagcccugaugagcugcccccugggcgaggcccccagccccuacaacagcaaguucgagagcguggccuggagcgccagcgccugccacgacggcaugggcuggcugaccaucggcaucagcggccccgacaacggcgccguggccgugcugaaguacaacggcaucaucaccgagaccaucaagagcuggaagaagagaauccugagaacccaggagagcgagugcgugugcgugaacggcagcugcuucaccaucaugaccgacggccccagcaacggcgccgccagcuacaagaucuucaagaucgagaagggcaaggugaccaagagcaucgagcugaacgcccccaacuuccacuacgaggagugcagcugcuaccccgacaccggcaccgugaugugcgugugcagagacaacuggcacggcagcaacagacccugggugagcuucgaccagaaccuggacuaccagaucggcuacaucugcagcggcguguucggcgacaaccccagacccaaggacggcaagggcagcugcaaccccgugaccguggacggcgccgacggcgugaagggcuucagcuacaaguacggcaacggcguguggaucggcagaaccaagagcaacagacugagaaagggcuucgagaugaucugggaccccaacggcuggaccgacaccgacagcgacuucagcgugaagcaggacgugguggccaucaccgacuggagcggcuacagcggcagcuucgugcagcaccccgagcugaccggccuggacugcaucagacccugcuucuggguggagcuggugagaggccugcccagagagaacaccaccaucuggaccagcggcagcagcaucagcuucugcggcguggacagcgacaccgccaacuggagcuggcccgacggcgccgagcugcccuucaccaucgacaaguga

SEQ ID NO: 176248 - RNA, 1413 nt, Artificial Sequence; identical to SEQ ID NO: 176090
  derived and/or modified CDS sequence (opt4) from neuraminidase__InfluenzaA__ABW40425

SEQ ID NO: 176249 - RNA, 1413 nt, Artificial Sequence; identical to SEQ ID NO: 176131
  derived and/or modified CDS sequence (opt4) from neuraminidase__InfluenzaA__ABW40436

SEQ ID NO: 176250 - RNA, 1413 nt, Artificial Sequence
  derived and/or modified CDS sequence (opt4) from neuraminidase__InfluenzaA__ABW40447
augaaccccaaccagaagaucaucaccaucggcagcaucagcaucgccaucggcaucaucagccugaugcugcagaucggcaacaucaucagcaucugggccagccacagcauccagaccggcagccagaaccacaccggcaucugcaaccagagaaucaucaccuacgagaacagcaccugggugaaccacaccuacgugaacaucaacaacaccaacgugguggccggcaaggacaagaccagcgugacccuggccggcaacagcagccugugcagcaucagcggcugggccaucuacaccaaggacaacagcaucagaaucggcagcaagggcgacguguucgugaucagagagcccuucaucagcugcagccaccuggagugcagaaccuucuuccugacccagggcgcccugcugaacgacaagcacagcaacggcaccgugaaggacagaagccccuacagagcccugaugagcugcccccugggcgaggcccccagccccuacaacagcaaguucgagagcguggccuggagcgccagcgccugccacgacggcaugggcuggcugaccaucggcaucagcggccccgacaacggcgccguggccgugcugaaguacaacggcaucaucaccgagaccaucaagagcuggaagaagagaauccugagaacccaggagagcgagugcgugugcgugaacggcagcugcuucaccaucaugaccgacggccccagcaacggcgccgccagcuacaagaucuucaagaucgagaagggcaaggugaccaagagcaucgagcugaacgcccccaacuuccacuacgaggagugcagcugcuaccccgacaccggcaccgugaugugcgugugcagagacaacuggcacggcagcaacagacccugggugagcuucaaccagaaccuggacuaccaggugggcuacaucugcagcggcguguucggcgacaaccccagacccaaggacggcaagggcagcugcaaccccaugaccguggacggcgccgacggcgugaagggcuucagcuacaaguacggcaacggcguguggaucggcagaaccaagagcaacaagcugagaaagggcuucgagaugaucugggaccccaacggcuggaccgacaccgacagcgacuucagcgugaagcaggacgugguggccaucaccgacuggagcggcuacagcggcagcuucgugcagcaccccgagcugaccggccugaacugcaucagacccugcuucuggguggagcuggugagaggccugcccagagagaacaccaccaucuggaccagcggcagcagcaucagcuucugcggcguggacagcgacaccgccaacuggagcuggcccgacggcgccgagcugcccuucaccaucgacaaguga

SEQ ID NO: 176251 - RNA, 1413 nt, Artificial Sequence; identical to SEQ ID NO: 176116
  derived and/or modified CDS sequence (opt4) from neuraminidase__InfluenzaA__ABW40458

SEQ ID NO: 176252 - RNA, 1413 nt, Artificial Sequence; identical to SEQ ID NO: 176090
  derived and/or modified CDS sequence (opt4) from neuraminidase__InfluenzaA__ABW40469

SEQ ID NO: 176253 - RNA, 1413 nt, Artificial Sequence; identical to SEQ ID NO: 176090
  derived and/or modified CDS sequence (opt4) from neuraminidase__InfluenzaA__ABW40491

SEQ ID NO: 176254 - RNA, 1413 nt, Artificial Sequence; identical to SEQ ID NO: 176090
  derived and/or modified CDS sequence (opt4) from neuraminidase__InfluenzaA__ABW40502

SEQ ID NO: 176255 - RNA, 1413 nt, Artificial Sequence; identical to SEQ ID NO: 176131
  derived and/or modified CDS sequence (opt4) from neuraminidase__InfluenzaA__ABW40513

SEQ ID NO: 176256 - RNA, 1413 nt, Artificial Sequence; identical to SEQ ID NO: 176090
  derived and/or modified CDS sequence (opt4) from neuraminidase__InfluenzaA__ABW40524

SEQ ID NO: 176257 - RNA, 1413 nt, Artificial Sequence
  derived and/or modified CDS sequence (opt4) from neuraminidase__InfluenzaA__ABW40546
augaaccccaaccagaagaucaucaccaucggcagcaucagcaucgccaucggcaucaucagccugaugcugcagaucggcaacaucaucagcaucugggccagccacagcauccagaccggcagccagaaccacaccggcaucugcaaccagagaaucaucaccuacgagaacagcaccugggugaaccacaccuacgugaacaucaacaacaccaacgugguggccggcaaggacaagaccagcgugacccuggccggcaacagcagccugugcagcaucagcggcugggccaucuacaccaaggacaacagcaucagaaucggcagcaagggcgacguguucgugaucagagagcccuucaucagcugcagccaccuggagugcagaaccuucuuccugacccagggcgcccugcugaacgacaagcacagcaacggcaccgugaaggacagaagccccuacagagcccugaugagcugcccccugggcgaggcccccagccccuacaacagcaaguucgagagcguggccuggagcgccagcgccugccacgacggcaugggcuggcugaccaucggcaucagcggccccgacaacggcgccguggccgugcugaaguacaacggcaucaucaccgagaccaucaagagcuggaagaagagaauccugagaacccaggagagcgagugcgugugcgugaacggcagcugcuucaccaucaugaccgacggccccagcaacggcgccgccagcuacaagaucuucaagaucgagaagggcaaggugaccaagagcauggagcugaacgcccccaacuuccacuacgaggagugcagcugcuaccccgacaccggcaccgugaugugcgugugcagagacaacuggcacggcagcaacagacccugggugagcuucaaccagaaccuggacuaccagaucggcuacaucugcagcggcguguucggcgacaaccccagacccaaggacggcaagggcagcugcaaccccgugaccguggacggcgccgacggcgugaagggcuucagcuacaaguacggcaacggcguguggaucggcagaaccaagagcaacagacugagaaagggcuucgagaugaucugggaccccaacggcuggaccgacaccgacagcgacuucagcgugaagcaggacgugguggccaucaccgacuggagcggcuacagcggcagcuucgugcagcaccccgagcugaccggccuggacugcaucagacccugcuucuggguggagcuggugagaggccugcccagagagaacaccaccaucuggaccagcggcagcagcaucagcuucugcggcguggacagcgacaccgccaacuggagcuggcccgacggcgccgagcugcccuucaccaucgacaaguga

SEQ ID NO: 176258 - RNA, 1413 nt, Artificial Sequence; identical to SEQ ID NO: 176090
  derived and/or modified CDS sequence (opt4) from neuraminidase__InfluenzaA__ABW40557

SEQ ID NO: 176259 - RNA, 1413 nt, Artificial Sequence
  derived and/or modified CDS sequence (opt4) from neuraminidase__InfluenzaA__ABW40568
augaaccccaaccagaagaucaucaccaucggcagcaucagcaucgccaucggcaucaucagccugaugcugcagaucggcaacaucaucagcaucugggccagccacagcauccagaccggcagccagaaccacaccggcaucugcaaccagagaaucaucaccuacgagaacagcaccugggugaaccacaccuacgugagcaucaacaacaccaacgugguggccggcaaggacaagaccagcgugacccuggccggcaacagcagccugugcagcaucagcggcugggccaucuacaccaaggacaacagcaucagaaucggcagcaagggcgacguguucgugaucagagagcccuucaucagcugcagccaccuggagugcagaaccuucuuccugacccagggcgcccugcugaacgacaagcacagcaacggcaccgugaaggacagaagccccuacagagcccugaugagcugcccccugggcgaggcccccagccccuacaacagcaaguucgagagcguggccuggagcgccagcgccugccacgacggcaugggcuggcugaccaucggcaucagcggccccgacaacggcgccguggccgugcugaaguacaacggcaucaucaccgagaccaucaagagcuggaagaagcagauccugagaacccaggagagcgagugcgugugcgugaacggcagcugcuucaccaucaugaccgacggccccagcaacggcgccgccagcuacaagaucuucaagaucgagaagggcaaggugaccaagagcaucgagcugaacgcccccaacuuccacuacgaggagugcagcugcuaccccgacaccggcaccgugaugugcgugugcagagacaacuggcacggcagcaacagacccugggugagcuucaaccagaaccuggacuaccagaucggcuacaucugcagcggcguguucggcgacaaccccagacccaaggacggcaagggcagcugcaaccccgugaccguggacggcgccgacggcgugaagggcuucagcuacaaguacggcaacggcguguggaucggcagaaccaagagcaacagacugagaaagggcuucgagaugaucugggaccccaacggcuggaccgacaccgacagcgacuucagcgugaagcaggacgugguggccaucaccgacuggagcggcuacagcggcagcuucgugcagcaccccgagcugaccggccuggacugcaucagacccugcuucuggguggagcuggugagaggccugcccagagagaacaccaccaucuggaccagcggcagcagcaucagcuucugcggcguggacagcgacaccgccaacuggagcuggcccgacggcgccgagcugcccuucaccaucgacaaguga

SEQ ID NO: 176260 - RNA, 1413 nt, Artificial Sequence
  derived and/or modified CDS sequence (opt4) from neuraminidase__InfluenzaA__ABW40579
augaaccccaaccagaagaucaucaccaucggcagcaucagcaucgccaucggcaucaucagccugaugcugcagaucggcaacaucaucagcaucugggccagccacagcauccagaccggcagccagaaccacaccggcaucugcaaccagagaaucaucaccuacgagaacagcaccugggugaaccacaccuacgugagcaucaacaacaccaacgugguggccggcaaggacaagaccagcgugacccuggccggcaacagcagccugugcagcaucagcggcugggccaucuacaccaaggacaacagcaucagaaucggcagcaagggcgacguguucgugaucagagagcccuucaucagcugcagccaccuggagugcagaaccuucuuccugacccagggcgcccugcugaacgacaagcacagcaacggcaccgugaaggacagaagccccuacagagcccugaugagcugcccccugggcgaggcccccagccccuacaacagcaaguucgagagcguggccuggagcgccagcgccugccacgacggcaugggcuggcugaccaucggcaucagcggccccgacaacggcgccguggccgugcugaaguacaacggcaucaucaccgagaccaucaagagcuggaagaagagaauccugagaacccaggagagcgagugcgugugcgugaacggcagcugcuucaccaucaugaccgacggccccaacaacggcgccgccagcuacaagaucuucaagaucgagaagggcaaggugaccaagagcaucgagcugaacgcccccaacuuccacuacgaggagugcagcugcuaccccgacaccggcaccgugaugugcgugugcagagacaacuggcacggcagcaacagacccugggugagcuucaaccagaaccuggacuaccagaucggcuacaucugcagcggcguguucggcgacaaccccagacccaaggacggcaagggcagcugcaaccccgugaccguggacggcgccgacggcgugaagggcuucagcuacaaguacggcaacggcguguggaucggcagaaccaagagcaacagacugagaaagggcuucgagaugaucugggaccccaacggcuggaccgacaccgacagcgacuucagcgugaagcaggacgugguggccaucaccgacuggagcggcuacagcggcagcuucgugcagcaccccgagcugaccggccuggacugcaucagacccugcuucuggguggagcuggugagaggccugcccagagagaacaccaccaucuggaccagcggcagcagcaucagcuucugcggcguggacagcgacaccgccaacuggagcuggcccgacggcgccgagcugcccuucaccaucgacaaguga

SEQ ID NO: 176261 - RNA, 1413 nt, Artificial Sequence
  derived and/or modified CDS sequence (opt4) from neuraminidase__InfluenzaA__ABW40601
augaaccccaaccagaagaucaucaccaucggcagcaucagcaucgccaucggcgugaucagccugaugcugcagaucggcaacaucaucagcaucugggccagccacagcauccagaccggcagccagaaccacaccggcaucugcaaccagagaaucaucaccuacgagaacagcaccugggugaaccacaccuacgugaacaucaacaacaccaacgugguggccggcaaggacaagaccagcgugacccuggccggcaacagcagccugugcagcaucagcggcugggccaucuacaccaaggacaacagcaucagaaucggcagcaagggcgacguguucgugaucagagagcccuucaucagcugcagccaccuggagugcagaaccuucuuccugacccagggcgcccugcugaacgacaagcacagcaacggcaccgugaaggacagaagccccuacagagcccugaugagcugcccccugggcgaggcccccagccccuacaacagcaaguucgagagcguggccuggagcgccagcgccugccacgacggcaugggcuggcugaccaucggcaucagcggccccgacaacggcgccguggccgugcugaaguacaacggcaucaucaccgagaccaucaagagcuggaagaagagaauccugagaacccaggagagcgagugcgugugcgugaacggcagcugcuucaccaucaugaccgacggccccagcaacggcgccgccagcuacaagaucuucaagaucgagaagggcaaggugaccaagagcaucgagcugaacgcccccaacuuccacuacgaggagugcagcugcuaccccgacaccggcaccgugaugugcgugugcagagacaacuggcacggcagcaacagacccugggugagcuucaaccagaaccuggacuaccagaucggcuacaucugcagcggcguguucggcgacaaccccagacccaaggacggcaagggcagcugcaaccccgugaccguggacggcgccgacggcaucaagggcuucagcuacaaguacggcaacggcguguggaucggcagaaccaagagcaacagacugagaaagggcuucgagaugaucugggaccccaacggcuggaccaacaccgacagcgacuucagcgugaagcaggacgugguggccaucaccgacuggagcggcuacagcggcagcuucgugcagcaccccgagcugaccggccuggacugcaucagacccugcuucuggguggagcuggugagaggccugcccagagagaacaccaccaucuggaccagcggcagcagcaucagcuucugcggcguggacggcgacaccgccaacuggagcuggcccgacggcgccgagcugcccuucaccaucgacaaguga

SEQ ID NO: 176262 - RNA, 1413 nt, Artificial Sequence; identical to SEQ ID NO: 176125
  derived and/or modified CDS sequence (opt4) from neuraminidase__InfluenzaA__ABW40612

SEQ ID NO: 176263 - RNA, 1413 nt, Artificial Sequence; identical to SEQ ID NO: 176090
  derived and/or modified CDS sequence (opt4) from neuraminidase__InfluenzaA__ABW40623

SEQ ID NO: 176264 - RNA, 1410 nt, Artificial Sequence; identical to SEQ ID NO: 175944
  derived and/or modified CDS sequence (opt4) from neuraminidase__InfluenzaA__ABW40634

SEQ ID NO: 176265 - RNA, 1413 nt, Artificial Sequence; identical to SEQ ID NO: 176090
  derived and/or modified CDS sequence (opt4) from neuraminidase__InfluenzaA__ABW40645

SEQ ID NO: 176266 - RNA, 1410 nt, Artificial Sequence
  derived and/or modified CDS sequence (opt4) from neuraminidase__InfluenzaA__ABW40656
augaaccccaaccagaagaucaucaccaucggcagcgugagccugaccaucagcaccaucugcuucuucaugcagaucgccauccugaucaccaccgugacccugcacuucaagcaguacgaguucaacagcccccccaacaaccaggugaugcugugcgagcccaccaucaucgagagaaacaucaccgagaucguguaccugaccaacaccaccaucgagaaggagaucugccccaagcuggccgaguacagaaacuggagcaagccccagugcgacaucaccggcuucgcccccuucagcaaggacaacagcaucagacugagcgccggcggcggcaucugggugaccagagagcccuacgugagcugcgaccccgacaagugcuaccaguucgcccugggccagggcaccacccugaacaacgugcacagcaacgacaccgugagagacagaacccccuacagaacccugcugaugaacgagcugggcgugcccuuccaccugggcaccaagcaggugugcaucgccuggagcagcagcagcugccacgacggcaaggccuggcugcacgugugcaucaccggcgacgacaagaacgccaccgccagcuucaucuacaacggcagacugguggacagcaucgugagcuggagcaaggagauccugagaacccaggagagcgagugcgugugcaucaacggcaccugcaccguggugaugaccgacggcagcgccagcggcaaggccgacaccaagauccuguucaucgaggagggcaagaucgugcacaccagcacccugagcggcagcgcccagcacguggaggagugcagcugcuaccccagauaccccggcgugagaugcgugugcagagacaacuggaagggcagcaacagacccaucguggacaucaacaucaaggaccacagcaucgugagcagcuacgugugcagcggccuggugggcgacacccccagaaagaacgacagcagcagcagcagccacugccuggaccccaacaacgaggagggcggccacggcgugaagggcugggccuucgacgacggcaacgacguguggaugggcagaaccaucagcgagaagagcagacugggcuacgagaccuucaaggugaucgagggcuggagcaaccccaagagcaagcugcagaucaacagacaggugaucguggacagaggcaacagaagcggcuacagcggcaucuucagcguggagggcaagagcugcaucaacagaugcuucuacguggagcugaucagaggcagaaaggaggagaccgaggugcuguggaccagcaacagcaucgugguguucugcggcaccagcggcaccuacggcaccggcagcuggcccgacggcgccgacaucaaccugaugcccaucuga

SEQ ID NO: 176267 - RNA, 1413 nt, Artificial Sequence; identical to SEQ ID NO: 176131
  derived and/or modified CDS sequence (opt4) from neuraminidase__InfluenzaA__ABW40667

SEQ ID NO: 176268 - RNA, 1413 nt, Artificial Sequence; identical to SEQ ID NO: 176116
  derived and/or modified CDS sequence (opt4) from neuraminidase__InfluenzaA__ABW40678

SEQ ID NO: 176269 - RNA, 1413 nt, Artificial Sequence; identical to SEQ ID NO: 176125
  derived and/or modified CDS sequence (opt4) from neuraminidase__InfluenzaA__ABW71297

SEQ ID NO: 176270 - RNA, 1413 nt, Artificial Sequence; identical to SEQ ID NO: 176131
  derived and/or modified CDS sequence (opt4) from neuraminidase__InfluenzaA__ABW71308

SEQ ID NO: 176271 - RNA, 1413 nt, Artificial Sequence; identical to SEQ ID NO: 176090
  derived and/or modified CDS sequence (opt4) from neuraminidase__InfluenzaA__ABW71319

SEQ ID NO: 176272 - RNA, 1413 nt, Artificial Sequence; identical to SEQ ID NO: 176090
  derived and/or modified CDS sequence (opt4) from neuraminidase__InfluenzaA__ABW71330

SEQ ID NO: 176273 - RNA, 1413 nt, Artificial Sequence
  derived and/or modified CDS sequence (opt4) from neuraminidase__InfluenzaA__ABW71341
augaaccccaaccagaagaucaucaccaucggcagcaucagcaucgccaucggcaucaucagccugaugcugcagaucggcaacaucaucagcaucugggccagccacagcauccagaccggcagccagaaccacaccggcaucugcaaccagagaaucaucaccuacgagaacagcaccugggugaaccacaccuacgugagcaucaacaacaccaacgugguggccggcaaggacaagaccagcgugacccuggccggcaacagcagccugugcagcaucagcggcugggccaucuacaccaaggacaacagcaucagaaucggcagcaagggcgacguguucgugaucagagagcccuucaucagcugcagccaccuggagugcagaaccuucuuccugacccagggcgcccugcugaacgacaagcacagcaacggcaccgugaaggacagaagccccuacagagcccugaugagcugcccccugggcgaggcccccagccccuacaacagcaaguucgagagcguggccuggagcgccagcgccugccacgacggcaugggcuggcugaccaucggcaucagcggccccgacaacggcgccguggccgugcugaaguacaacggcaucaucaccgagaccaucaagagcuggaagaagagaauccugagaacccaggagagcgagugcgugugcgugaacggcagcugcuucaccaucaugaccgacggccccagcaacggcgccgccagcuacaagaucuucaagaucgagaagggcaaggugaccaagagcaucgagcugaacgcccccaacuuccacuacgaggagugcagcugcuaccccgacaccggcaccgugaugugcgugugcagagacaacuggcacggcagcaacagacccugggugagcuucaaccagaaccuggacuaccagaucggcuacaucugcagcggcguguucggcgacaaccccagacccaaggacggcaagggcagcugcaaccccgugaccguggacggcgccgacggcgugaagggcuucagcuacaaguacggcaacggcguguggcugggcagaaccaagagcaacagacugagaaagggcuucgagaugaucugggaccccaacggcuggaccgacaccgacagcgacuucagcgugaagcaggacgugguggccaucaccgacuggagcggcuacagcggcagcuucgugcagcaccccgagcugaccggccuggacugcaucagacccugcuucuggguggagcuggugagaggccugcccagagagaacaccaccaucuggaccagcggcagcagcaucagcuucugcggcguggacagcgacaccgccaacuggagcuggcccgacggcgccgagcugcccuucaccaucgacaaguga

SEQ ID NO: 176274 - RNA, 1410 nt, Artificial Sequence; identical to SEQ ID NO: 176117
  derived and/or modified CDS sequence (opt4) from neuraminidase__InfluenzaA__ABW71352

SEQ ID NO: 176275 - RNA, 1413 nt, Artificial Sequence; identical to SEQ ID NO: 176131
  derived and/or modified CDS sequence (opt4) from neuraminidase__InfluenzaA__ABW71363

SEQ ID NO: 176276 - RNA, 1413 nt, Artificial Sequence; identical to SEQ ID NO: 176116
  derived and/or modified CDS sequence (opt4) from neuraminidase__InfluenzaA__ABW71374

SEQ ID NO: 176277 - RNA, 1413 nt, Artificial Sequence; identical to SEQ ID NO: 176090
  derived and/or modified CDS sequence (opt4) from neuraminidase__InfluenzaA__ABW71385

SEQ ID NO: 176278 - RNA, 1413 nt, Artificial Sequence
  derived and/or modified CDS sequence (opt4) from neuraminidase__InfluenzaA__ABW71396
augaaccccaaccagaagaucaucaccaucggcagcaucagcaucgccaucggcaucaucagccugaugcugcagaucggcaacaucaucagcaucugggccagccacagcgugcagaccggcagccagaaccacaccggcaucugcaaccagagaaucaucaccuacgagaacagcaccugggugaaccacaccuacgugaacaucaacaacaccaacgugguggccggcaaggacaagaccagcgugacccuggccggcaacagcagccugugcagcaucagcggcugggccaucuacaccaaggacaacagcaucagaaucggcagcaagggcgacguguucgugaucagagagcccuucaucagcugcagccaccuggagugcagaaccuucuuccugacccagggcgcccugcugaacgacaagcacagcaacggcaccgugaaggacagaagccccuacagagcccugaugagcugcccccugggcgaggcccccagccccuacaacagcaaguucgagagcguggccuggagcgccagcgccugccacgacggcaugggcuggcugaccaucggcaucagcggccccgacaacggcgccguggccgugcugaaguacaacggcaucaucaccgagaccaucaagagcuggaagaagagaauccugagaacccaggagagcgagugcgugugcgugaacggcagcugcuucaccaucaugaccgacggccccagcaacggcgccgccagcuacaagaucuucaagaucgagaagggcaaggugaccaagagcaucgagcugaacgcccccaacuuccacuacgaggagugcagcugcuaccccgacaccggcaccgugaugugcgugugcagagacaacuggcacggcagcaacagacccugggugagcuucaaccagaaccuggacuaccaggugggcuacaucugcagcggcguguucggcgacaaccccagacccaaggacggcaagggcagcugcaaccccaugaccguggacggcgccgacggcgugaagggcuucagcuacaaguacggcaacggcguguggaucggcagaaccaagagcaacaagcugagaaagggcuucgagaugaucugggaccccaacggcuggaccgacaccgacagcgacuucagcgugaagcaggacgugguggccaucaccgacuggagcggcuacagcggcagcuucgugcagcaccccgagcugaccggccuggacugcaucagacccugcuucuggguggagcuggugagaggccugcccagagagaacgccaccaucuggaccagcggcagcagcaucagcuucugcggcguggacagcgacaccgccaacuggagcuggcccgacggcgccgagcugcccuucaccaucgacaaguga

SEQ ID NO: 176279 - RNA, 1413 nt, Artificial Sequence
  derived and/or modified CDS sequence (opt4) from neuraminidase__InfluenzaA__ABW71407
augaaccccaaccagaagaucaucaccaucggcagcaucagcaucgccaucggcaucaucagccugaugcugcagaucggcaacaucaucagcaucugggccagccacagcauccagaccggcagccagaaccacaccggcaucugcaaccagagaaucaucaccuacgagaacagcaccugggugaaccacaccuacgugaacaucaacaacaccaacgugguggccggcaaggacaagaccagcgugacccuggccggcaacagcagccugugcagcaucagcggcugggccaucuacaccaaggacaacagcaucagaaucggcagcaagggcgacguguucgugaucagagagcccuucaucagcugcagccaccuggagugcagaaccuucuuccugacccagggcgcccugcugaacgacaagcacagcaacggcaccgugaaggacagaagccccuacagagcccugaugagcugcccccugggcgaggcccccagccccuacaacagcaaguucgagagcguggccuggagcgccagcgccugccacgacggcaugggcuggcugaccaucggcaucagcggccccgacaacggcgccguggccgugcugaaguacaacggcaucaucaccgagaccaucaagagcuggaagaagagaauccugagaacccaggagagcgagugcgugugcgugaacggcagcugcuucaccaucaugaccgacggccccagcaacggcgccgccagcuacaagaucuucaagaucgagaagggcaaggugaccaagagcaucgagcugaacgcccccaacuuccacuacgaggagugcagcugcuaccccgacaccggcaccgugaugugcgugugcagagacaacuggcacggcagcaacagacccugggugagcuucaaccagaaccuggacuaccaggugggcuacaucugcagcggcguguucggcgacaaccccagacccaaggacggcaagggcagcugcaaccccaugaccguggacggcgccgacggcgugaagggcuucagcuacaaguacggcaacggcguguggaucggcagaaccaagagcaacaagaucagaaagggcuucgagaugaucugggaccccaacggcuggaccgacaccgacagcgacuucagcgugaagcaggacgugguggccaucaccgacuggagcggcuacagcggcagcuucgugcagcaccccgagcugaccggccuggacugcaucagacccugcuucuggguggagcuggugagaggccugcccagagagaacaccaccaucuggaccagcggcagcagcaucagcuucugcggcguggacagcgacaccgccaacuggagcuggcccgacggcgccgagcugcccuucaccaucgacaaguga

SEQ ID NO: 176280 - RNA, 1413 nt, Artificial Sequence; identical to SEQ ID NO: 176116
  derived and/or modified CDS sequence (opt4) from neuraminidase__InfluenzaA__ABW71418

SEQ ID NO: 176281 - RNA, 1413 nt, Artificial Sequence; identical to SEQ ID NO: 176090
  derived and/or modified CDS sequence (opt4) from neuraminidase__InfluenzaA__ABW71440

SEQ ID NO: 176282 - RNA, 1413 nt, Artificial Sequence; identical to SEQ ID NO: 176090
  derived and/or modified CDS sequence (opt4) from neuraminidase__InfluenzaA__ABW71451

SEQ ID NO: 176283 - RNA, 1413 nt, Artificial Sequence; identical to SEQ ID NO: 176125
  derived and/or modified CDS sequence (opt4) from neuraminidase__InfluenzaA__ABW71462

SEQ ID NO: 176284 - RNA, 1410 nt, Artificial Sequence; identical to SEQ ID NO: 174387
  derived and/or modified CDS sequence (opt4) from neuraminidase__InfluenzaA__ABW80980

SEQ ID NO: 176285 - RNA, 1410 nt, Artificial Sequence; identical to SEQ ID NO: 174231
  derived and/or modified CDS sequence (opt4) from neuraminidase__InfluenzaA__ABW80981

SEQ ID NO: 176286 - RNA, 1413 nt, Artificial Sequence
  derived and/or modified CDS sequence (opt4) from neuraminidase__InfluenzaA__ABW81474
augaaccccaaccagaagaucaucaccaucggcagcaucagcguggccaucggcaucaucagccugauccugcagaucggcaacaucaucagcaucugggccagccacagcauccagaccggcagccagaacuacaccggcaucugcaaccagaagaucaucaccuacgagaacagaaccugggugaaccagaccuacgugaacuucaacaacaccaacgugguggccggcaaggacaagcccagcaugacccuggccggcaacagcagccugugccccaucagaggcugggccaucuacaccaaggacaacagcaucagaaucggcagcaagggcgacguguucgugaucagagagcccuucaucagcugcagccaccuggagugcagaaccuucuuccugacccagggcgcccugcugaacgacaagcacagcaacggcaccaucaaggacagaagccccuucagagcccugaugagcugcccccugggcgaggcccccagccccuacaacagcagauucgagagcguggccuggagcgccagcgccugccacgacggccugggcuggcugaccaucggcaucagcggccccgacaacggcgccguggccgugcugaaguacaacggcaucaucaccgagaccaucaagagcuggaagaagcagauccugagaacccaggagagcgagugcgugugcgugaacggcagcugcuucaccaucaugaccgacggccccagcaacagagccgccagcuacagaaucuucaagaucgagaagggcagagugaccaagagcaucgagcuggacgcccccaacuaccacuacgaggagugcagcugcuaccccgacaccggcaccgugaugugcgugugcagagacaacuggcacggcagcaacagacccugggugagcuucaaccagaaccuggacuaccagaucggcuacaucugcagcggcguguucggcgacaaccccagacccaaggacggcgagggcagcugcaaccccgugaccguggacggcgccgacggcgugaagggcuucagcuacagauacggcaacggcguguggaucggcagaaccaagagcaacagacugagaaagggcuucgagaugaucugggaccccaacggcuggaccgacaccgacagcgacuucagcaugaagcaggacgugguggccaugaccgacuggagcggcuacagcggcagcuucgugcagcaccccgagcugaccggccuggacugcaugagacccugcuucuggguggagcuggugagaggccugcccagagagaacaccaccaucuggaccagcggcagcagcaucagcuucugcggcgugaacagcgagaccgccaacuggagcuggcccgacggcgccgagcugcccuucaccaucgacaaguga

SEQ ID NO: 176287 - RNA, 1413 nt, Artificial Sequence
  derived and/or modified CDS sequence (opt4) from neuraminidase__InfluenzaA__ABW81475
augaaccccaaccagaagaucaucaccaucggcagcaucagcaucgccaucggcaucaucagccugaugcugcagaucggcaacaucaucagcaucugggccagccacagcauccagaccggcagccagaaccacaccggcaucugcaaccagagaaucaucaccuacgagaacagcaccugggugaaccacaccuacgugaacaucaacaacaccaacgugguggccggcaaggacaagagcagcgugacccuggccggcaacagcagccugugcagcaucagcggcugggccaucuacaccaaggacaacagcaucagaaucggcagcaagggcgacguguucgugaucagagagcccuucaucagcugcagccaccuggagugcagaaccuucuuccugacccagggcgcccugcugaacgacaagcacagcaacggcaccgugaaggacagaagccccuacagagcccugaugagcugcccccugggcgaggcccccagccccuacaacagcaaguucgagagcguggccuggagcgccagcgccugccacgacggcaugggcuggcugaccaucggcaucagcggccccgacaacggcgccguggccgugcugaaguacaacggcaucaucaccgagaccaucaagagcuggaagaagagaauccugagaacccaggagagcgagugcgugugcgugaacggcagcugcuucaccaucaugaccgacggccccagcaacggcgccgccagcuacaagaucuucaagaucgagaagggcaaggugaccaagagcaucgagcugaacgcccccaacuuccacuacgaggagugcagcugcuaccccgacaccggcaccgugaugugcgugugcagagacaacuggcacggcagcaacagacccugggugagcuucaaccagaaccuggacuaccagaucggcuacaucugcagcggcguguucggcgacaaccccagacccaaggacggcgagggcagcugcaaccccgugaccguggacggcgccgacggcgugaagggcuucagcuacaaguacggcaacggcguguggaucggcagaaccaagagcaacagacugagaaagggcuucgagaugaucugggaccccaacggcuggaccgacaccgacagcgacuucagccugaagcaggacgugguggccaucaccgacuggagcggcuacagcggcagcuucgugcagcaccccgagcugaccggccuggacugcaucagacccugcuucuggguggagcuggugagaggccugcccagagagaacaccaccaucuggaccagcggcagcagcaucagcuucugcggcgugaacagcgacaccgccaacuggagcuggcccgacggcgccgagcugcccuucaccaucgacaaguga

SEQ ID NO: 176288 - RNA, 1413 nt, Artificial Sequence
  derived and/or modified CDS sequence (opt4) from neuraminidase__InfluenzaA__ABW81477
augaaccccaaccagaagaucaucaccaucggcagcaucagcaucgccaucggcaucaucagccugaugcugcagaucggcaacaucaucagcaucugggccagccacagcauccagaccggcagccagaaccacaccggcgugugcaaccagagaaucaucaccuacgagaacagcaccugggugaaccacaccuacgugaacaucaacaacaccaacgugaucgccggcaaggacaagaccagcgugacccuggccggcaacagcagccugugcagcaucagcggcugggccaucuacaccaaggacaacagcaucagaaucggcagcaagggcgacguguucgugaucagagagcccuucaucagcugcagccaccuggagugcagaaccuucuuccugacccagggcgcccugcugaacgacaagcacagcaacggcaccgugaaggacagaagccccuacagagcccugaugagcugcccccugggcgaggcccccagccccuacaacagcaaguucgagagcguggccuggagcgccagcgccugccacgacggcaugggcuggcugaccaucggcaucagcggccccgacaacggcgccguggccgugcugaaguacaacggcaucaucaccgagaccaucaagagcuggaagaagcagauccugagaacccaggagagcgagugcgugugcgugaacggcagcugcuucaccaucaugaccgacggccccagcaacggcgccgccagcuacaagaucuucaagaucgagaagggcaaggugaccaagagcaucgagcugagcgcccccaacuuccacuacgaggagugcagcugcuaccccgacaccggcaccgugaugugcgugugcagagacaacuggcacggcagcaacagacccugggugagcuucaaccagaaccuggacuaccagaucggcuacaucugcagcggcguguucggcgacaaccccagacccaaggacggcgagggcagcugcaaccccgugaccguggacggcgccaacggcgugaagggcuucagcuacaaguacggcaacggcguguggaucggcagaaccaagagcaacagacugagaaagggcuucgagaugaucugggaccccaacggcuggcccgacaccgacagcgacuucagcgugaagcaggacgugguggccaucaccgacuggagcggcuacagcggcagcuucgugcagcaccccgagcugaccggccuggacugcaucagacccugcuucuggguggagcuggugagaggccugcccaaggagaacaccaccaucuggaccagcggcagcagcaucagcuucugcggcgugaacagcgacaccgccaacuggagcuggcccgacggcgccgagcugcccuucaccaucgacaaguga

SEQ ID NO: 176289 - RNA, 1413 nt, Artificial Sequence
  derived and/or modified CDS sequence (opt4) from neuraminidase__InfluenzaA__ABW81478
augaaccccaaccagaagaucaucaccaucggcagcaucagcaucgccaucggcaucaucagccugaugcugcagaucggcaacaucaucagcaucugggccagccacagcauccagaccggcagccagaaccacaccggcaucugcaaccagagaaucaucaccuacgagaacagcaccugggugaaccacaccuacgugaacaucaacaacaccaacgugguggccggcaaggacaagaccagcgugacccuggccggcaacagcagccugugcagcaucagcggcugggccaucuacaccaaggacaacagcaucagaaucggcagcaagggcgacguguucgugaucagagagcccuucaucagcugcagccaccuggagugcagaaccuucuuccugacccagggcgcccugcugaacgacaagcacagcaacggcaccgugaaggacagaagccccuacagagcccugaugagcugcccccugggcgaggcccccagccccuacaacagcaaguucgagagcguggccuggagcgccagcgccugccacgacggcaugggcuggcugaccaucggcaucagcggccccgacaacggcgccguggccgugcugaaguacaacggcaucaucaccgagaccaucaagagcuggaagaagagaauccugagaacccaggagagcgagugcgugugcgugaacggcagcugcuucaccaucaugaccgacggccccagcaacggcgccgccagcuacaagaucuucaagaucgagaagggcaaggugaccaagagcaucgagcugaacgcccccaacuuccacuacgaggagugcagcugcuaccccgacaccggcaccgugaugugcgugugcagagacaacuggcacggcagcaacagacccugggugagcuucaaccagaaccuggacuaccagaucggcuacaucugcagcggcguguucggcgacaaccccagacccaaggacggcgagggcagcugcaaccccgugaccguggacggcgccgacggcgugaagggcuucagcuacaaguacggcaacggcguguggaucggcagaaccaagaacaacagacugagaaagggcuucgagaugaucugggaccccaacggcuggaccgacaccgacagcgacuucagcgugaagcaggacgugguggccaucaccgacuggagcggcuacagcggcagcuucgugcagcaccccgagcugaccggccuggacugcaucagacccugcuucuggguggagcuggugagaggccugcccagagagaacaccaccaucuggaccagcggcagcagcaucagcuucugcggcgugaacagcgacaccgccaacuggagcuggcccgacggcgccgagcugcccuucaccaucgacaaguga

SEQ ID NO: 176290 - RNA, 1413 nt, Artificial Sequence
  derived and/or modified CDS sequence (opt4) from neuraminidase__InfluenzaA__ABW81479
augaaccccaaccagaagaucaucaccaucggcagcaucagcguggccaucggcaucaucagccugauccugcagaucggcaacaucaucagcaucugggccagccacagcauccagaccggcagccagaacuacaccggcaucugcaaccagaagaucaucaccuacgagaacagaaccugggugaaccagaccuacgugaacaucaacaacaccaacgugguggccggcaaggacaagcccagcaugacccuggccggcaacagcagccugugccccaucagaggcugggccaucuacaccaaggacaacagcaucagaaucggcagcaagggcgacguguucgugaucagagagcccuucaucagcugcagccaccuggagugcagaaccuucuuccugacccagggcgcccugcugaacgacaagcacagcaacggcaccaucaaggacagaagccccuucagagcccugaugagcugcccccugggcgaggcccccagccccuacaacagcagauucgagagcguggccuggagcgccagcgccugccacgacggccugggcuggcugaccaucggcaucagcggccccgacaacggcgccguggccgugcugaaguacaacggcaucaucaccgagaccaucaagagcuggaagaagcagauccugagaacccaggagagcgagugcgugugcgugaacggcagcugcuucaccaucaugaccgacggccccagcaacagagccgccagcuacagaaucuucaagaucgagaagggcagagugaccaagagcaucgagcuggacgcccccaacuaccacuacgaggagugcagcugcuaccccgacaccggcaccgugaugugcgugugcagagacaacuggcacggcagcaacagacccugggugagcuucaaccagaaccuggacuaccagaucggcuacaucugcagcggcguguucggcgacaaccccagacccaaggacggcgagggcagcugcaaccccgugaccguggacggcgccgacggcaucaagggcuucagcuacagauacggcaacggcguguggaucggcagaaccaagagcaacagacugagaaagggcuucgagaugaucugggaccccaacggcuggaccgacaccgacagcgacuucagcaugaagcaggacgugguggccaugaccgacuggagcggcuacagcggcagcuucgugcagcaccccgagcugaccggccuggacugcaugagacccugcuucuggguggagcuggugagaggccugcccagagagaacaccaccaucuggaccagcggcagcagcaucagcuucugcggcgugaacagcgagaccgccaacuggagcuggcccgacggcgccgagcugcccuucaccaucgacaaguga

SEQ ID NO: 176291 - RNA, 1413 nt, Artificial Sequence; identical to SEQ ID NO: 174456
  derived and/or modified CDS sequence (opt4) from neuraminidase__InfluenzaA__ABW81480

SEQ ID NO: 176292 - RNA, 1413 nt, Artificial Sequence
  derived and/or modified CDS sequence (opt4) from neuraminidase__InfluenzaA__ABW81481
augaaccccaaccagaagaucaucaccaucggcagcaucagcguggccaucggcaucaucagccugauccugcagaucggcaacaucaucagcaucugggccagccacagcauccagaccggcagccagaacuacaccggcaucugcaaccagaagaucaucaccuacgagaacagaaccugggugaaccagaccuacgugaacaucaacaacaccaacgugguggccggcaaggacaagcccagcaugacccuggccggcaacagcagccugugccccaucagaggcugggccaucuacaccaaggacaacagcaucagaaucggcagcaagggcgacguguucgugaucagagagcccuucaucagcugcagccaccuggagugcagaaccuucuuccugacccagggcgcccugcugaacgacaagcacagcaacggcaccaucaaggacagaagccccuucagagcccugaugagcugcccccugggcgaggcccccagccccuacaacagcagauucgagagcguggccuggagcgccagcgccugccacgacggccugggcuggcugaccaucggcaucagcggccccgacaacggcgccguggccgugcugaaguacaacggcaucaucaccgagaccaucaagagcuggaagaagcagauccugagaacccaggagagcgagugcgugugcgugaacggcagcugcuucaccaucaugaccgacggccccagcaacagagccgccagcuacagaaucuucaagaucgagaagggcagagugaccaagagcaucgagcuggacgcccccaacuaccacuacgaggagugcagcugcuaccccgacaccggcaccgugaugugcgugugcagagacaacuggcacggcagcaacagacccugggugagcuucaaccagaaccuggacuaccagaucggcuacaucugcagcggcguguucggcgacaaccccagacccaaggacggcgagggcagcugcaaccccgugaccguggacggcgccgacggcgugaagggcuucagcuacagauacggcaacggcguguggaucggcagaaccaagagcaacagacugagaaagggcuucgagaugaucugggaccccaacggcuggaccgacaccgacagcgacuucagcaugaagcaggacgugguggccaugaccgacuggagcggcuacagcggcagcuucgugcagcaccccgagcugaccggccuggacugcaugagacccugcuucuggguggagcuggugagaggccugcccagagagaacaccaccaucuggaccagcggcagcagcaucagcuucugcggcgugaacagcgagaccgccaacuggagcuggcccgacggcgccgagcugcccuucaccaucgacaaguga

SEQ ID NO: 176293 - RNA, 1413 nt, Artificial Sequence
  derived and/or modified CDS sequence (opt4) from neuraminidase__InfluenzaA__ABW81482
augaaccccaaccagaagaucaucaccaucggcagcaucagcguggccaucggcaucaucagccugauccugcagaucggcaacaucaucagcaucugggccagccacagcauccagaccggcagccagaacuacaccggcaucugcaaccagaagaucaucaccuacgagaacagaaccugggugaaccagaccuacgugaacaucaacaacaccaacgugguggccggcaaggacaagcccagcaugacccuggccggcaacagcagccugugccccaucagaggcugggccaucuacaccaaggacaacagcaucagaaucggcagcaagggcgacguguucgugaucagagagcccuucaucagcugcagccaccuggagugcagaaccuucuuccugacccagggcgcccugcugaacgacaagcacagcaacggcaccaucaaggacagaagccccuucagagcccugaugagcugcccccugggcgaggcccccagccccuacaacagcagauucgagagcguggccuggagcgccagcgccugccacgacggccugggcuggcugaccaucggcaucagcggccccgacaacggcgccguggccgugcugaaguacaacggcaucaucaccgagaccaucaagagcuggaagaagcagauccugagaacccaggagagcgagugcgugugcgugaacggcagcugcuucaccaucaugaccgacggccccagcaacagagccgccagcuacagaaucuucaagaucgagaagggcagagugaccaagagcaucgagcuggacgcccccaacuaccacuacgaggagugcagcugcuaccccgacaccggcaccgugaugugcgugugcagagacaacuggcacggcagcaacagacccugggugagcuucaaccagaaccuggacuaccagaucggcuacaucugcagcggcguguucggcgacaaccccagacccaaggacggcgagggcagcugcaaccccgugaccguggacggcgccgacggcgugaagggcuucagcuacagauacggcaacggcguguggaucggcagaaccaagagcaacagacugagaaagggcuucgagaugaucugggaccccaacggcuggaccgacaccgacagcgacuucagcaugaagcaggacgugguggccaugaccgacuggagcggcuacagcggcagcuucgugcagcaccccgagcugaccggccuggccugcaugagacccugcuucuggguggagcuggugagaggccugcccagagagaacaccaccaucuggaccagcggcagcagcaucagcuucugcggcgugaacagcgagaccgccaacuggagcuggcccgacggcgccgagcugcccuucaccaucgacaaguga

SEQ ID NO: 176294 - RNA, 1413 nt, Artificial Sequence; identical to SEQ ID NO: 174446
  derived and/or modified CDS sequence (opt4) from neuraminidase__InfluenzaA__ABW81483

SEQ ID NO: 176295 - RNA, 1413 nt, Artificial Sequence
  derived and/or modified CDS sequence (opt4) from neuraminidase__InfluenzaA__ABW81484
augaaccccaaccagaagaucaucaccaucggcagcaucagcaucgccaucggcaucaucagccugaugcugcagaucggcaacaucaucagcaucugggccagccacagcauccagaccggcaaccagaaccacaccggcaucugcaaccagagaaucaucaccuacgagaacagcaccugggugaaccacaccuacgugaacaucaacaacaccaacgugguggccggcaagggcaagaccagcgugacccuggccggcaacagcagccugugcagcaucagcggcugggccaucuacaccaaggacaacagcaucagaaucggcagcaagggcgacguguucgugaucagagagcccuucaucagcugcagccaccuggagugcagaaccuucuuccugacccagggcgcccugcugaacgacaagcacagcaacggcaccgugaaggacagaagccccuacagagcccugaugagcugcccccugggcgaggcccccagccccuacaacagcaaguucgagagcguggccuggagcgccagcgccugccacgacggcaugggcuggcugaccaucggcaucagcggccccgacaacggcgccguggccgugcugaaguacaacggcaucaucaccgagaccaucaagagcuggaagaagagaauccugagaacccaggagagcgagugcgugugcgugaacggcagcugcuucaccaucaugaccgacggccccagcaacggcgccgccagcuacaagaucuucaagaucgagaagggcaaggugaccaagagcaucgagcugaacgcccccaacuuccacuacgaggagugcagcugcuaccccgacaccggcaccgugaugugcgugugcagagacaacuggcacggcagcaacagacccugggugagcuucaaccagaaccuggacuaccagaucggcuacaucugcagcggcguguucggcgacaaccccagacccaaggacggcaagggcagcugcaaccccgugaccguggacggcgccgacggcgugaagggcuucagcuacaaguacggcaacggcguguggaucggcagaaccaagagcaacagacugagaaagggcuucgagaugaucugggaccccaacggcuggaccgacaccgacagcgacuucagcgugaagcaggacgugguggccaucaccgacuggagcggcuacagcggcagcuucgugcagcaccccgagcugaccggccuggacugcaucagacccugcuucuggguggagcuggugagaggccugcccagagagaacaccaccaucuggaccagcggcagcagcaucagcuucugcggcguggacagcgacaccgccaacuggagcuggcccgacggcgccgagcugcccuucaccaucgacaaguga

SEQ ID NO: 176296 - RNA, 1413 nt, Artificial Sequence
  derived and/or modified CDS sequence (opt4) from neuraminidase__InfluenzaA__ABW81487
augaaccccaaccagaagaucaucaccaucggcagcaucagcaucgccaucggcaucaucagccugaugcugcagaucggcaacaucaucagcaucugggccagccacagcauccagaccggcagccagaaccacaccggcaucugcaaccagagaaucaucaccuacgagaacagcaccugggugaaccacaccuacgugaacaucaacaacaccaacgugguggccggcaaggacaagaccagcgugacccuggccggcaacagcagccugugcagcaucagcggcugggccaucuacaccaaggacaacagcaucagaaucggcagcaagggcgacguguucgugaucagagagcccuucaucagcugcagccaccuggagugcagaaccuucuuccugacccagggcgcccugcugaacgacaagcacagcaacggcaccgugaaggacagaagccccuacagagcccugaugagcugcccccugggcgaggcccccagccccuacaacagcaaguucgagagcguggccuggagcgccagcgccugccacgacggcaugggcuggcugaccaucggcaucagcggccccgacaacggcgccguggccgugcugaaguacaacggcaucaucaccgagaccaucaagagcuggaagaagagaauccugagaacccaggagagcgagugcgugugcgugaacggcagcugcuucaccaucaugaccgacggccccagcaacggcgccgccagcuacaagaucuucaagaucgagaagggcaaggugaccaagagcaucgagcugaacgcccccaacuuccacuacgaggagugcagcugcuaccccgacaccggcaccgugaugugcgugugcagagacaacuggcacggcagcaacagacccugggugagcuucaaccagaaccuggacuaccagaucggcuacaucugcagcggcguguucggcgacaaccccagacccaaggacggcaagggcagcugcaaccccgugaccguggacggcgccgacggcgugaagggcuucagcuacaaguacggcaacggcguguggaucggcagaaccaagagcaacagacugagaaagggcuucgagaugaucugggaccccaacggcuggaccgacaccgacagcgacuucagcgugaagcaggacgugguggccaucaccgacuggagcggcuacagcggcagcuucauccagcaccccgagcugaccggccuggacugcaucagacccugcuucuggguggagcuggugagaggccugcccagagagaacaccaccaucuggaccagcggcagcagcaucagcuucugcggcguggacagcgacaccgccaacuggagcuggcccgacggcgccgagcugcccuucaccaucgacaaguga

SEQ ID NO: 176297 - RNA, 1413 nt, Artificial Sequence; identical to SEQ ID NO: 174446
  derived and/or modified CDS sequence (opt4) from neuraminidase__InfluenzaA__ABW81488

SEQ ID NO: 176298 - RNA, 1413 nt, Artificial Sequence; identical to SEQ ID NO: 174446
  derived and/or modified CDS sequence (opt4) from neuraminidase__InfluenzaA__ABW81489

SEQ ID NO: 176299 - RNA, 1413 nt, Artificial Sequence
  derived and/or modified CDS sequence (opt4) from neuraminidase__InfluenzaA__ABW81490
augaaccccaaccagaagaucaucaccaucggcagcaucagcaucgccaucggcaucaucagccugaugcugcagaucggcaacaucaucagcaucugggccagccacagcauccagaccggcagccagaaccacaccggcaucugcaaccagagaaucaucaccuacgagaacagcaccugggugaaccacaccuacgugaacaucaacaacaccaacgugguggccggcaaggacaagaccagcgugacccuggccggcaacagcagccugugcagcaucagcggcugggccaucuacaccaaggacaacagcaucagaaucggcagcaagggcgacguguucgugaucagagagcccuucaucagcugcagccaccuggagugcaagaccuucuuccugacccagggcgcccugcugaacgacaagcacagcaacggcaccgugaaggacagaagccccuacagagcccugaugagcugcccccugggcgaggcccccagccccuacaacagcaaguucgagagcguggccuggagcgccagcgccugccacgacggcaugggcuggcugaccaucggcaucagcggccccgacaacggcgccguggccgugcugaaguacaacggcaucaucaccgagaccaucaagagcuggaagaagagaauccugagaacccaggagagcgagugcgugugcgugaacggcagcugcuucaccaucaugaccgacggccccagcaacggcgccgccagcuacaagaucuucaagaucgagaagggcaaggugaccaagagcaucgagcugaacgcccccaacuuccacuacgaggagugcagcugcuaccccgacaccggcaccgugaugugcgugugcagagacaacuggcacggcagcaacagacccugggugagcuucaaccagaaccuggacuaccagaucggcuacaucugcagcggcguguucggcgacaaccccagacccaaggacggcaagggcagcugcaaccccgugaccguggacggcgccgacggcgugaagggcuucagcuacaaguacggcaacggcguguggaucggcagaaccaagagcaacagacugagaaagggcuucgagaugaucugggaccccaacggcuggaccgacaccgacagcgacuucagcgugaagcaggacgugguggccaucaccgacuggagcggcuacagcggcagcuucgugcagcaccccgagcugaccggccuggacugcaucagacccugcuucuggguggagcuggugagaggccugcccagagagaacaccaccaucuggaccagcggcagcagcaucagcuucugcggcguggacagcgacaccgccaacuggagcuggcccgacggcgccgagcugcccuucaccaucgacaaguga

SEQ ID NO: 176300 - RNA, 1413 nt, Artificial Sequence
  derived and/or modified CDS sequence (opt4) from neuraminidase__InfluenzaA__ABW81491
augaaccccaaccagaagaucaucaccaucggcagcaucagcaucgccaucggcaucaucagccugaugcugcagaucggcaacaucaucagcaucugggccagccacagcauccagaccggcagccagaaccacaccggcaucugcaaccagagaaucaucaccuacgagaacagcaccugggugaaccacaccuacgugaacaucaacaacaccaacgugguggccggcaaggacaagaccagcgugacccuggccggcaacagcagccugugcagcaucagcggcugggccaucuacaccaaggacaacagcaucagaaucggcagcaagggcgacguguucgugaucagagagcccuucaucagcugcagccaccuggagugcagaaccuucuuccugacccagggcgcccugcugaacgacaagcacagcaacggcaccgugaaggacagaagccccuacagagcccugaugagcugcccccugggcgaggcccccagccccuacaacagcaaguucgagagcguggccuggagcgccagcgccugccacgacggcaugggcuggcugaccaucggcaucagcggccccgacaacggcgccguggccgugcugaaguacaacggcaucaucaccgagaccaucaagagcugggagaagagaauccugagaacccaggagagcgagugcgugugcgugaacggcagcugcuucaccaucaugaccgacggccccagcaacggcgccgccagcuacaagaucuucaagaucgagaagggcaaggugaccaagagcaucgagcugaacgcccccaacuuccacuacgaggagugcagcugcuaccccgacaccggcaccgugaugugcgugugcagagacaacuggcacggcagcaacagacccugggugagcuucaaccagaaccuggacuaccagaucggcuacaucugcagcggcguguucggcgacaaccccagacccaaggacggcaagggcagcugcaaccccgugaccguggacggcgccgacggcgugaagggcuucagcuacaaguacggcaacggcguguggaucggcagaaccaagagcaacagacugagaaagggcuucgagaugaucugggaccccaacggcuggaccgacaccgacagcgacuucagcgugaagcaggacgugguggccaucaccgacuggagcggcuacagcggcagcuucgugcagcaccccgagcugaccggccuggacugcaucagacccugcuucuggguggagcuggugagaggccugcccagagagaacaccaccaucuggaccagcggcagcagcaucagcuucugcggcguggacagcgacaccgccaacuggagcuggcccgacggcgccgagcugcccuucaccaucgacaaguga

SEQ ID NO: 176301 - RNA, 1413 nt, Artificial Sequence
  derived and/or modified CDS sequence (opt4) from neuraminidase__InfluenzaA__ABW81492
augaaccccaaccagaagaucaucaccaucggcagcaucagcaucgccaucggcaucaucagccugaugcugcagaucggcaacaucaucagcaucugggccagccacagcauccagaccggcagccagaaccacaccggcaucugcaaccagagaaucaucaccuacgagaacagcaccugggugaaccacaccuacgugaacaucaacaacaccaacgugguggccggcaaggacaagaccagcgugacccuggccggcaacagcagccugugcagcaucagcggcugggccaucuacaccaaggacaacagcaucagaaucggcagcaagggcgacguguucgugaucagagagcccuucaucagcugcagccaccuggagugcagaaccuucuuccugacccagggcgcccugcugaacgacaagcacagcaacggcaccgugaaggacagaagccccuacagagcccugaugagcugcccccugggcgaggcccccagccccuacaacagcaaguucgagagcguggccuggagcgccagcgccugccacgacggcaugggcuggcugaccaucggcaucagcggccccgacaacggcgccguggccgugcugaaguacaacggcaucaucaccgagaccaucaagagcuggaagaagagaauccugagaacccaggagagcgagugcgugugcgugaacggcagcugcuucaccaucaugaccgacggccccagcaacggcgccgccagcuacaagaucuucaagaucgagaagggcaaggugaccaagagcaucgagcugaacgcccccaacuuccacuacgaggagugcagcugcuaccccgacaccggcaccgugaugugcgugugcagagacaacuggcacggcagcaacagacccugggugagcuucaaccagaaccuggacuaccagaucggcuacaucugcagcggcguguucggcgacaaccccagacccaaggacggcaagggcagcugcaaccccgugaccguggacggcgccgacggcgugaagggcuucagcuacaaguacggcaacggcguguggaucggcagaaccaagagcaacagacugagaaagggcuucgagaugaucugggaccccaacggcuggaccgacaccgacagcgacuucagcgugaagcaggacgugguggccaucaccgacuggagcggcuacagcggcagcuucgugcagcaccccgagcugaccggccuggacugcaucagacccugcuucuggguggagcuggugagaggccugcccagagagaacaccaccaucugggccagcggcagcagcaucagcuucugcggcguggacagcgacaccgccaacuggagcuggcccgacggcgccgagcugcccuucaccaucgacaaguga

SEQ ID NO: 176302 - RNA, 1413 nt, Artificial Sequence; identical to SEQ ID NO: 174446
  derived and/or modified CDS sequence (opt4) from neuraminidase__InfluenzaA__ABW81493

SEQ ID NO: 176303 - RNA, 1413 nt, Artificial Sequence; identical to SEQ ID NO: 174446
  derived and/or modified CDS sequence (opt4) from neuraminidase__InfluenzaA__ABW81494

SEQ ID NO: 176304 - RNA, 1413 nt, Artificial Sequence; identical to SEQ ID NO: 174446
  derived and/or modified CDS sequence (opt4) from neuraminidase__InfluenzaA__ABW81495

SEQ ID NO: 176305 - RNA, 1413 nt, Artificial Sequence; identical to SEQ ID NO: 176300
  derived and/or modified CDS sequence (opt4) from neuraminidase__InfluenzaA__ABW81497

SEQ ID NO: 176306 - RNA, 1413 nt, Artificial Sequence
  derived and/or modified CDS sequence (opt4) from neuraminidase__InfluenzaA__ABW81498
augaaccccaaccagaagaucaucaccaucggcagcaucagcaucgccaucggcaucaucagccugaugcugcagaucggcaacaucaucagcaucugggccagccacagcauccagaccggcagccagaaccacaccggcaucugcaaccagagaaucaucaccuacgagaacagcaccugggugaaccacaccuacgugaacaucaacaacaccaacgugguggccggcaaggacaagaccagcgugacccuggccggcaacagcagccugugcagcaucagcggcugggccaucuacaccaaggacaacagcaucagaaucggcagcaagggcgacguguucgugaucagagagcccuucaucagcugcagccaccuggagugcagaaccuucuuccugacccagggcgcccugcugaacgacaagcacagcaacggcaccgugaaggacagaagccccuacagagcccugaugagcugcccccugggcgaggcccccagccccuacaacagcaaguucgagagcguggccuggagcgccagcgccugccacgacggcaugggcuggcugaccaucggcaucagcggccccgacaacggcgccguggccgugcugaaguacaacggcaucaucaccgagaccaucaagagcugggagaagagaauccugagaacccaggagagcgagugcgugugcgugaacggcagcugcuucaccaucaugaccgacggccccagcaacggcgccgccagcuacaagaucuucaagaucgagaagggcaaggugaccaagagcaucgagcugaacgcccccaacuuccacuacgaggagugcagcugcuaccccgacaccggcaccgugaugugcgugugcagagacaacuggcacggcagcaacagacccugggugagcuucaaccagaaccuggacuaccaggugggcuacaucugcagcggcguguucggcgacaaccccagacccaaggacggcaagggcagcugcaaccccgugaccguggacggcgccgacggcgugaagggcuucagcuacaaguacggcaacggcguguggaucggcagaaccaagagcaacagacugagaaagggcuucgagaugaucugggaccccaacggcuggaccgacaccgacagcgacuucagcgugaagcaggacgugguggccaucaccgacuggagcggcuacagcggcagcuucgugcagcaccccgagcugaccggccuggacugcaucagacccugcuucuggguggagcuggugagaggccugcccagagagaacaccaccaucuggaccagcggcagcagcaucagcuucugcggcguggacagcgacaccgccaacuggagcuggcccgacggcgccgagcugcccuucaccaucgacaaguga

SEQ ID NO: 176307 - RNA, 1413 nt, Artificial Sequence
  derived and/or modified CDS sequence (opt4) from neuraminidase__InfluenzaA__ABW81499
augaaccccaaccagaagaucaucaccaucggcagcaucagcaucgccaucggcaucaucagccugaugcugcagaucggcaacaucaucagcaucugggccagccacagcauccagaccggcagccagaaccacaccggcaucugcaaccagagaaucaucaccuacgagaacagcaccugggugaaccacaccuacgugaacaucaacaacaccaacgugguggccggcagagacaagaccagcgugacccuggccggcaacagcagccugugcagcaucagcggcugggccaucuacaccaaggacaacagcaucagaaucggcagcaagggcgacguguucgugaucagagagcccuucaucagcugcagccaccuggagugcagaaccuucuuccugacccagggcgcccugcugaacgacaagcacagcaacggcaccgugaaggacagaagccccuacagagcccugaugagcugcccccugggcgaggcccccagccccuacaacagcaaguucgagagcguggccuggagcgccagcgccugccacgacggcaugggcuggcugaccaucggcaucagcggccccgacaacggcgccguggccgugcugaaguacaacggcaucaucaccgagaccaucaagagcuggaagaagagaauccugagaacccaggagagcgagugcgugugcgugaacggcagcugcuucaccaucaugaccgacggccccagcaacggcgccgccagcuacaagaucuucaagaucgagaagggcaaggugaccaagagcaucgagcugaacgcccccaacuuccacuacgaggagugcagcugcuaccccgacaccggcaccgugaugugcgugugcagagacaacuggcacggcagcaacagacccugggugagcuucaaccagaaccuggacuaccagaucggcuacaucugcagcggcguguucggcgacaaccccagacccaaggacggcaagggcagcugcaaccccgugaccguggacggcgccgacggcgugaagggcuucagcuacaaguacggcaacggcguguggaucggcagaaccaagagcaacagacugagaaagggcuucgagaugaucugggaccccaacggcuggaccgacaccgacagcgacuucagcgugaagcaggacgugguggccaucaccgacuggagcggcuacagcggcagcuucgugcagcaccccgagcugaccggccuggacugcaucagacccugcuucuggguggagcuggugagaggccugcccagagagaacaccaccaucuggaccagcggcagcagcaucagcuucugcggcguggacagcgacaccgccaacuggagcuggcccgacggcgccgagcugcccuucaccaucgacaaguga

SEQ ID NO: 176308 - RNA, 1413 nt, Artificial Sequence
  derived and/or modified CDS sequence (opt4) from neuraminidase__InfluenzaA__ABW81500
augaaccccaaccagaagaucaucaccaucggcagcaucagcaucgccaucggcaucaucagccugaugcugcagaucggcaacaucaucagcaucugggccagccacagcauccagaccggcagccagaaccacaccggcaucugcaaccagagaaucaucaccuacgagaacagcaccugggugaaccacaccuacgugaacaucaacaacaccaacgugguggccggcaaggacaagaccagcgugacccuggccggcaacagcagccugugcagcaucagcggcugggccaucuacaccaaggacaacagcaucagaaucggcagcaagggcgacguguucgugaucagagagcccuucaucagcugcagccaccuggagugcagaaccuucuuccugacccagggcgcccugcugaacgacaagcacagcaacggcaccgugaaggacagaagccccuacagagcccugaugagcugcccccugggcgaggcccccagccccuacaacagcaaguucgagagcguggccuggagcgccagcgccugccacgacggcaugggcuggcugaccaucggcaucagcggccccgacaacggcgccguggccgugcugaaguacaacggcaucaucaccgagaccaucaagagcuggaagaagagaauccugagaacccaggagagcgagugcgugugcgugaacggcagcugcuucaccaucaugaccgacggccccagcaacggcgccgccagcuacaagaucuucaagaucgagaagggcaaggugaccaagagcaucgagcugaacgcccccaacuuccacuacgaggagugcagcugcuaccccgacaccggcaccgugaugugcgugugcagagacaacuggcacggcagcaacagacccugggugagcuucaaccagaaccuggacuaccagaucggcuacaucugcagcggcguguucggcgacaaccccagacccaaggacggcaagggcagcugcaaccccgugaccgccgacggcgccgacggcgugaagggcuucagcuacaaguacggcaacggcguguggaucggcagaaccaagagcaacagacugagaaagggcuucgagaugaucugggaccccaacggcuggaccgacaccgacagcgacuucagcgugaagcaggacgugguggccaucaccgacuggagcggcuacagcggcagcuucgugcagcaccccgagcugaccggccuggacugcaucagacccugcuucuggguggagcuggugagaggccugcccagagagaacaccaccaucuggaccagcggcagcagcaucagcuucugcggcguggacagcgacaccgccaacuggagcuggcccgacggcgccgagcugcccuucaccaucgacaaguga

SEQ ID NO: 176309 - RNA, 1413 nt, Artificial Sequence
  derived and/or modified CDS sequence (opt4) from neuraminidase__InfluenzaA__ABW81501
augaaccccaaccagaagaucaucaccaucggcagcaucagcaucgccaucggcaucaucagccugaugcugcagaucggcaacaucaucagcaucugggccagccacagcauccagaccggcagccagaaccacaccggcaucugcaaccagaagaucaucaccuacgagaacagcaccugggugaaccacaccuacgugaacaucaacaacaccaacgugguggccggcaaggacaagaccagcgugacccuggccggcaacagcagccugugcagcgugagcggcugggccaucuacaccaaggacaacagcaucagaaucggcagcaagggcgacguguucgugaucagagagcccuucaucagcugcagccaccuggagugcagaaccuucuuccugacccagggcgcccugcugaacgacaagcacagcaacggcaccgugaaggacagaagccccuacagagcccugaugagcugcccccugggcgaggcccccagccccuacaacagcaaguucgagagcguggccuggagcgccagcgccugccacgacggcaugggcuggcugaccaucggcaucagcggccccgacaacggcgccguggccgugcugaaguacaacggcaucaucaccgagaccaucaagagcuggaagaagagaauccugagaacccaggagagcgagugcgugugcgugaacggcagcugcuucaccaucaugaccgacggccccagcaacggcgccgccagcuacaagaucuucaagaucgagaagggcaaggugaccaagagcaucgagcugaacgcccccaacuuccacuacgaggagugcagcugcuaccccgacaccggcaccgugaugugcgugugcagagacaacuggcacggcagcaacagacccugggugagcuucaaccagaaccuggacuaccagaucggcuacaucugcagcggcguguucggcgacaaccccagacccaaggacggcaagggcagcugcaaccccgugaccguggacggcgccgacggcgugaagggcuucagcuacaaguacggcaacggcguguggaucggcagaaccaagagcaacagacugagaaagggcuucgagaugaucugggaccccaacggcuggaccgacaccgacagcgacuucagcgugaagcaggacgugguggccaucaccgacuggagcggcuacagcggcagcuucgugcagcaccccgagcugaccggccuggacugcaucagacccugcuucuggguggagcuggugagaggccugcccagagagaacaccaccaucuggaccagcggcagcagcaucagcuucugcggcguggacagcgacaccgccaacuggagcuggcccgacggcgccgagcugcccuucaccaucgacaaguga

SEQ ID NO: 176310 - RNA, 1413 nt, Artificial Sequence; identical to SEQ ID NO: 176131
  derived and/or modified CDS sequence (opt4) from neuraminidase__InfluenzaA__ABW86324

SEQ ID NO: 176311 - RNA, 1413 nt, Artificial Sequence; identical to SEQ ID NO: 176103
  derived and/or modified CDS sequence (opt4) from neuraminidase__InfluenzaA__ABW86335

SEQ ID NO: 176312 - RNA, 1413 nt, Artificial Sequence; identical to SEQ ID NO: 176090
  derived and/or modified CDS sequence (opt4) from neuraminidase__InfluenzaA__ABW86346

SEQ ID NO: 176313 - RNA, 1413 nt, Artificial Sequence; identical to SEQ ID NO: 176090
  derived and/or modified CDS sequence (opt4) from neuraminidase__InfluenzaA__ABW86357

SEQ ID NO: 176314 - RNA, 1413 nt, Artificial Sequence; identical to SEQ ID NO: 176090
  derived and/or modified CDS sequence (opt4) from neuraminidase__InfluenzaA__ABW86368

SEQ ID NO: 176315 - RNA, 1413 nt, Artificial Sequence; identical to SEQ ID NO: 176116
  derived and/or modified CDS sequence (opt4) from neuraminidase__InfluenzaA__ABW86379

SEQ ID NO: 176316 - RNA, 1413 nt, Artificial Sequence; identical to SEQ ID NO: 176090
  derived and/or modified CDS sequence (opt4) from neuraminidase__InfluenzaA__ABW86390

SEQ ID NO: 176317 - RNA, 1413 nt, Artificial Sequence; identical to SEQ ID NO: 176131
  derived and/or modified CDS sequence (opt4) from neuraminidase__InfluenzaA__ABW86401

SEQ ID NO: 176318 - RNA, 1413 nt, Artificial Sequence; identical to SEQ ID NO: 176090
  derived and/or modified CDS sequence (opt4) from neuraminidase__InfluenzaA__ABW86412

SEQ ID NO: 176319 - RNA, 1413 nt, Artificial Sequence
  derived and/or modified CDS sequence (opt4) from neuraminidase__InfluenzaA__ABW86423
augaaccccaaccagaagaucaucaccaucggcagcaucagcaucgccaucggcaucaucagccugaugcugcagaucggcaacaucaucagcaucugggccagccacagcauccagaccggcagccagaaccacaccggcaucugcaaccagagaaucaucaccuacgagaacagcaccugggugaaccacaccuacgugaacaucaacaacaccaacgugguggccggcaaggacaagaccagcgugacccuggccggcaacagcagccugugcagcaucagcggcugggccaucuacaccaaggacaacagcaucagaaucggcagcaagggcgacguguucgugaucagagagcccuucaucagcugcagccaccuggagugcagaaccuucuuccugacccagggcgcccugcugaacgacaagcacagcaacggcaccgugaaggacagaagccccuacagagcccugaugagcugcccccugggcgaggcccccagccccuacaacagcaaguucgagagcguggccuggagcgccagcgccugccacgacggcaugggcuggcugaccaucggcaucagcggccccgacaacggcgccguggccgugcugaaguacaacggcaucaucaccgagaccaucaagagcuggaagaagagaauccugagaacccaggagagcgagugcgugugcgugaacggcagcugcuucgccaucaugaccgacggccccagcaacggcgccgccagcuacaagaucuucaagaucgagaagggcaaggugaccaagagcaucgagcugaacgcccccaacuuccacuacgaggagugcagcugcuaccccgacaccggcaccgugaugugcgugugcagagacaacuggcacggcagcaacagacccugggugagcuucaaccagaaccuggacuaccaggugggcuacaucugcagcggcguguucggcgacaaccccagacccaaggacggcaagggcagcugcaaccccaugaccguggacggcgccgacggcgugaagggcuucagcuacaaguacggcaacggcguguggaucggcagaaccaagagcaacaagcugagaaagggcuucgagaugaucugggaccccaacggcuggaccgacaccgacagcgacuucagcgugaagcaggacgugguggccaucaccgacuggagcggcuacagcggcagcuucgugcagcaccccgagcugaccggccuggacugcaucagacccugcuucuggguggagcuggugagaggccugcccagagagaacaccaccaucuggaccagcggcagcagcaucagcuucugcggcguggacagcgacaccgccaacuggagcuggcccgacggcgccgagcugcccuucaccaucgacaaguga

SEQ ID NO: 176320 - RNA, 1413 nt, Artificial Sequence; identical to SEQ ID NO: 176090
  derived and/or modified CDS sequence (opt4) from neuraminidase__InfluenzaA__ABW86434

SEQ ID NO: 176321 - RNA, 1413 nt, Artificial Sequence; identical to SEQ ID NO: 176090
  derived and/or modified CDS sequence (opt4) from neuraminidase__InfluenzaA__ABW86445

SEQ ID NO: 176322 - RNA, 1413 nt, Artificial Sequence; identical to SEQ ID NO: 176125
  derived and/or modified CDS sequence (opt4) from neuraminidase__InfluenzaA__ABW86456

SEQ ID NO: 176323 - RNA, 1413 nt, Artificial Sequence
  derived and/or modified CDS sequence (opt4) from neuraminidase__InfluenzaA__ABW86467
augaacaccaaccagaagaucaucaccaucggcagcaucagcaucgccaucggcaucaucagccugaugcugcagaucggcaacaucaucagcaucugggccagccacagcauccagaccggcagccagaaccacaccggcaucugcaaccagagaaucaucaccuacgagaacagcaccugggugaaccacaccuacgugagcaucaacaacaccaacgugguggccggcaaggacaagaccagcgugacccuggccggcaacagcagccugugcagcaucagcggcugggccaucuacaccaaggacaacagcaucagaaucggcagcaagggcgacguguucgugaucagagagcccuucaucagcugcagccaccuggagugcagaaccuucuuccugacccagggcgcccugcugaacgacaagcacagcaacggcaccgugaaggacagaagccccuacagagcccugaugagcugcccccugggcgaggcccccagccccuacaacagcaaguucgagagcguggccuggagcgccagcgccugccacgacggcaugggcuggcugaccaucggcaucagcggccccgacaacggcgccguggccgugcugaaguacaacggcaucaucaccgagaccaucaagagcuggaagaagagaauccugagaacccaggagagcgagugcgugugcgugaacggcagcugcuucaccaucaugaccgacggccccagcaacggcgccgccagcuacaagaucuucaagaucgagaagggcaaggugaccaagagcaucgagcugaacgcccccaacuuccacuacgaggagugcagcugcuaccccgacaccggcaccgugaugugcgugugcagagacaacuggcacggcagcaacagacccugggugagcuucaaccagaaccuggacuaccagaucggcuacaucugcagcggcguguucggcgacaaccccagacccaaggacggcaagggcagcugcaaccccgugaccguggacggcgccgacggcgugaagggcuucagcuacaaguacggcaacggcguguggaucggcagaaccaagagcaacagacugagaaagggcuucgagaugaucugggaccccaacggcuggaccgacaccgacagcgacuucagcaucaagcaggacgugguggccaucaccgacuggagcggcuacagcggcagcuucgugcagcaccccgagcugaccggccuggacugcaucagacccugcuucuggguggagcuggugagaggccugcccagagagaacaccaccaucuggaccagcggcagcagcaucagcuucugcggcguggacagcgacaccgccaacuggagcuggcccgacggcgccgagcugcccuucaccaucgacaaguga

SEQ ID NO: 176324 - RNA, 1413 nt, Artificial Sequence; identical to SEQ ID NO: 176125
  derived and/or modified CDS sequence (opt4) from neuraminidase__InfluenzaA__ABW86478

SEQ ID NO: 176325 - RNA, 1413 nt, Artificial Sequence
  derived and/or modified CDS sequence (opt4) from neuraminidase__InfluenzaA__ABW86489
augaaccccaaccagaagaucaucaccaucggcagcaucagcaucgccaucggcaucaucagccugaugcugcagaucggcaacaucaucagcaucugggccagccacagcauccagaccggcagccagaaccacaccggcaucugcaaccagagaaucaucaccuacgagaacagcaccugggugaaccacaccuacgugagcaucaacaacaccaacgugguggccggcaaggacaagaccagcgugacccuggccggcaacagcagccugugcagcaucagcggcugggccaucuacaccaaggacaacagcaucagaaucggcagcaagggcgacguguucgugaucagagagcccuucaucagcugcagccaccuggagugcagaaccuucuuccugacccagggcgcccugcugaacgacaagcacagcaacggcaccgugaaggacagaagccccuacagagcccugaugagcugcccccugggcgaggcccccagccccuacaacagcaaguucgagagcguggccuggagcgccagcgccugccacgacggcaugggcuggcugaccaucggcaucagcggccccgacaacggcgccguggccgugcugaaguacaacggcaucaucaccgagaccaucaagagcuggaagaagagaauccugagaacccaggagagcgagugcgugugcgugaacggcagcugcuucaccaucaugaccgacggccccagcaacggcgccgccagcuacaagaucuucaagaucgagaagggcaaggugaccaagagcaucgagcugaacgcccccaacuuccacuacgaggagugcagcugcuaccccgacaccggcaccgugaugugcgugugcagagacaacuggcacggcagcaacagacccugggugagcuucaaccagaaccuggacuaccagaucggcuacaucugcagcggcguguucggcgacaaccccagacccaaggacggcaagggcagcugcaaccccgugaccguggacggcgccgacggcgugaagggcuucagcuacaaguacggcaacggcguguggaucggcagaaccaagagcaacagacugagaaagggcuucgagaugaucugggaccccaacggcuggaccgacaccgacagcgacuucagcgugaagcaggacguggugggcaucaccgacuggagcggcuacagcggcagcuucgugcagcaccccgagcugaccggccuggacugcaucagacccugcuucuggguggagcuggugagaggccugcccagagagaacaccaccaucuggaccagcggcagcagcaucagcuucugcggcguggacagcgacaccgccaacuggagcuggcccgacggcgccgagcugcccuucaccaucgacaaguga

SEQ ID NO: 176326 - RNA, 1413 nt, Artificial Sequence
  derived and/or modified CDS sequence (opt4) from neuraminidase__InfluenzaA__ABW86500
augaaccccaaccagaagaucaugaccaucggcagcaucagcaucgccaucggcaucaucagccugaugcugcagaucggcaacaucaucagcaucugggccagccacagcauccagaccggcagccagaaccacaccggcaucugcaaccagagaaucaucaccuacgagaacagcaccugggugaaccacaccuacgugaacaucaacaacaccaacgugguggccggcaaggacaagaccagcgugacccuggccggcaacagcagccugugcagcaucagcggcugggccaucuacaccaaggacaacagcaucagaaucggcagcaagggcgacguguucgugaucagagagcccuucaucagcugcagccaccuggagugcagaaccuucuuccugacccagggcgcccugcugaacgacaagcacagcaacggcaccgugaaggacagaagccccuacagagcccugaugagcugcccccugggcgaggcccccagccccuacaacagcaaguucgagagcguggccuggagcgccagcgccugccacgacggcaugggcuggcugaccaucggcaucagcggccccgacaacggcgccguggccgugcugaaguacaacggcaucaucaccgagaccaucaagagcuggaagaagagaauccugagaacccaggagagcgagugcgugugcgugaacggcagcugcuucaccaucaugaccgacggccccagcaacggcgccgccagcuacaagaucuucaagaucgagaagggcaaggugaccaagagcaucgagcugaacgcccccaacuuccacuacgaggagugcagcugcuaccccgacaccggcaccgugaugugcgugugcagagacaacuggcacggcagcaacagacccugggugagcuucaaccagaaccuggacuaccagaucggcuacaucugcagcggcguguucggcgacaaccccagacccaaggacggcaagggcagcugcaaccccgugaccguggacggcgccgacggcgugaagggcuucagcuacaaguacggcaacggcguguggaucggcagaaccaagagcaacagacugagaaagggcuucgagaugaucugggaccccaacggcuggaccaacaccgacagcgacuucagcaugaagcaggacgugguggccaucaccgacuggagcggcuacagcggcagcuucgugcagcaccccgagcugaccggccuggacugcaucagacccugcuucuggguggagcuggugagaggccugcccagagagaacaccaccaucuggaccagcggcagcagcaucagcuucugcggcguggacagcgacaccgccaacuggagcuggcccgacggcgccgagcugcccuucaccaucgacaaguga

SEQ ID NO: 176327 - RNA, 1413 nt, Artificial Sequence; identical to SEQ ID NO: 176090
  derived and/or modified CDS sequence (opt4) from neuraminidase__InfluenzaA__ABW86511

SEQ ID NO: 176328 - RNA, 1413 nt, Artificial Sequence
  derived and/or modified CDS sequence (opt4) from neuraminidase__InfluenzaA__ABW86522
augaaccccaaccagaagaucaucaccaucggcagcaucagcaucgccaucggcaucaucagccugaugcugcagaucggcaacaucaucagcaucugggccagccacagcauccagaccggcagccagaaccacaccggcaucugcaaccagagaaucaucaccuacgagaacagcaccugggugaaccacaccuacgugaacaucaacaacaccaacgugguggccggcaaggacaagaccagcgugacccuggccggcaacagcagccugugcagcaucagcggcugggccaucuacaccaaggacaacagcaucagaaucggcagcaagggcgacguguucgugaucagagagcccuucaucagcugcagccaccuggagugcagaaccuucuuccugacccagggcgcccugcugaacgacaagcacagcaacggcaccgugaaggacagaagccccuacagagcccugaugagcugcccccugggcgaggcccccagccccuacaacagcaaguucgagagcguggccuggagcgccagcgccugccacgacggcaugggcuggcugaccaucggcaucagcggccccgacaacggcgccguggccgugcugaaguacaacggcaucaucaccgagaccaucaagagcuggaagaagagaauccugagaacccaggagagcgagugcgugugcgugaacggcagcugcuucaccaucaugaccgacggccccagcaacggcgccgccagcuacaagaucuucaagaucgagaagggcaaggugaccaagagcaucgagcugaacgcccccaacuuccacuacgaggagugcagcugcuaccccgacaccggcaccgugaugugcgugugcagagacaacuggcacggcagcaacagacccugggugagcuucaaccagaaccuggacuaccaggugggcuacaucugcagcggcguguucggcgacaaccccagacccaaggacggcaagggcagcugcaaccccaugaccguggacggcgccgacggcgugaagggcuucagcuacaaguacggcaacggcguguggaucggcagaaccaagagcaacaagcugagaaagggcuucgagaugaucugggaccccaacggcuggaccgacaccgacagcgacuucagcgugaagcaggacgugguggccgugaccgacuggagcggcuacagcggcagcuucgugcagcaccccgagcugaccggccuggacugcaucagacccugcuucuggguggagcuggugagaggccugcccagagagaacgccaccaucuggaccagcggcagcagcaucagcuucugcggcguggacagcgacaccgccaacuggagcuggcccgacggcgccgagcugcccuucaccaucgacaaguga

SEQ ID NO: 176329 - RNA, 1413 nt, Artificial Sequence; identical to SEQ ID NO: 176090
  derived and/or modified CDS sequence (opt4) from neuraminidase__InfluenzaA__ABW86533

SEQ ID NO: 176330 - RNA, 1413 nt, Artificial Sequence; identical to SEQ ID NO: 176125
  derived and/or modified CDS sequence (opt4) from neuraminidase__InfluenzaA__ABW86544

SEQ ID NO: 176331 - RNA, 1413 nt, Artificial Sequence; identical to SEQ ID NO: 176090
  derived and/or modified CDS sequence (opt4) from neuraminidase__InfluenzaA__ABW86555

SEQ ID NO: 176332 - RNA, 1410 nt, Artificial Sequence
  derived and/or modified CDS sequence (opt4) from neuraminidase__InfluenzaA__ABW86566
augaaccccaaccagaagaucaucaccaucggcagcgugagccugaccaucagcaccaucugcuucuucaugcagaccgccauccugaucaccaccgugacccugcacuucaagcaguacgaguucaacagcccccccaacaaccaggugaugcugugcgagcccaccgugaucgagagaaacaucaccgagaucguguaccugaccaacaccaccaucgagaaggagaucugccccaagcuggccgaguacagaaacuggagcaagccccagugcgacaucaccggcuucgcccccuucagcaaggacaacagcaucagacugagcgccggcggcgacaucugggugaccagagagcccuacgugagcugcgaccccgacaagugcuaccaguucgcccugggccagggcaccacccugaacaacgugcacagcaacgacaccgugagagacagaacccccuacagaacccugcugaugaacgagcugggcgugcccuuccaccugggcaccaagcaggugugcaucgccuggagcagcagcagcugccacgacggcaaggccuggcugcacgugugcaucaccggcgacgacaagaacgccaccgccagcuucaucuacaacggcagacugguggacagcaucgugagcuggagcaaggagauccugagaacccaggagagcgagugcgugugcaucaacggcaccugcaccguggugaugaccgacggcagcgccagcggcaaggccgacaccaagauccuguucaucgaggagggcaagaucgugcacaccagcacccugagcggcagcgcccagcacguggaggagugcagcugcuaccccagauaccccggcgugagaugcgugugcagagacaacuggaagggcagcaacagacccaucguggacaucaacaucaaggaccacagcaucgugagcagcuacgugugcagcggccuggugggcgacacccccagaaagaacgacagcagcagcagcagccacugccuggaccccaacaacgaggagggcggccacggcgugaagggcugggccuucgacgacggcaacgacguguggaugggcagaaccaucagcgagaagagcagacugggcuacgagaccuucaaggugaucgagggcuggagcaaccccaagagcaagcugcagaucaacagacaggugaucguggacagaggcaacagaagcggcuacagcggcaucuucagcguggagggcaagagcugcaucaacagaugcuucuacguggagcugaucagaggcagaaaggaggagaccgaggugcuguggaccagcaacagcaucgugguguucugcggcaccagcggcaccuacggcaccggcagcuggcccgacggcgccgacaucaaccugaugcccaucuga

SEQ ID NO: 176333 - RNA, 1413 nt, Artificial Sequence; identical to SEQ ID NO: 176116
  derived and/or modified CDS sequence (opt4) from neuraminidase__InfluenzaA__ABW86609

SEQ ID NO: 176334 - RNA, 1413 nt, Artificial Sequence; identical to SEQ ID NO: 175119
  derived and/or modified CDS sequence (opt4) from neuraminidase__InfluenzaA__ABW91188

SEQ ID NO: 176335 - RNA, 1410 nt, Artificial Sequence
  derived and/or modified CDS sequence (opt4) from neuraminidase__InfluenzaA__ABW91210
augaaccccaaccagaagaucaucaccaucggcagcgugagccugaccaucagcaccaucugcuucuucaugcagaucgccauccugaucaccaccgugacccugcacuucaagcaguacgaguucaacagcccccccaacaaccaggugauccugugcgagcccaccaucaucgagagaaacaucaccgagaucguguaccugaccaacaccaccaucgagaaggagaucugccccaagcuggccgaguacagaaacuggagcaagccccagugcgacaucaccggcuucgcccccuucagcaaggacaacagcaucagacugagcgccggcggcgacaucugggugaccagagagcccuacgugagcugcgaccccgacaagugcuaccaguucgcccugggccagggcaccacccugaacaacgugcacagcaacgacaccgugagagacagaacccccuacagaacccugcugaugaacgagcugggcgugcccuuccaccugggcaccaagcaggugugcaucgccuggagcagcagcagcugccacgacggcaaggccuggcugcacgugugcaucaccggcgacgacaagaacgccaccgccagcuucaucuacaacggcagacugguggacagcaucgugagcuggagcaaggagauccugagaacccaggagagcgagugcgugugcaucaacggcaccugcaccguggugaugaccgacggcagcgccagcggcaaggccgacaccaagauccuguucaucgaggagggcaagaucgugcacaccagcacccugagcggcagcgcccagcacguggaggagugcagcugcuaccccagauaccccggcgugagaugcgugugcagagacaacuggaagggcagcaacagacccaucguggacaucaacaucaaggaccacagcaucgugagcagcuacgugugcagcggccuggugggcgacacccccagaaagaacgacagcagcagcagcagccacugccuggaccccaacaacgaggagggcggccacggcgugaagggcugggccuucgacgacggcaacgacguguggaugggcagaaccaucagcgagaagagcagacugggcuacgagaccuucaaggugaucgagggcuggagcaaccccaagagcaagcugcagaucaacagacaggugaucguggacagaggcaacagaagcggcuacagcggcaucuucagcguggagggcaagagcugcaucaacagaugcuucuacguggagcugaucagaggcagaaaggaggagaccgaggugcuguggaccagcaacagcaucgugguguucugcggcaccagcggcaccuacggcaccggcagcuggcccgacggcgccgacaucaaccugaugcccaucuga

SEQ ID NO: 176336 - RNA, 1413 nt, Artificial Sequence; identical to SEQ ID NO: 176090
  derived and/or modified CDS sequence (opt4) from neuraminidase__InfluenzaA__ABW91221

SEQ ID NO: 176337 - RNA, 1410 nt, Artificial Sequence
  derived and/or modified CDS sequence (opt4) from neuraminidase__InfluenzaA__ABW91232
augaaccccaaccagaagaucaucaccaucggcagcgugagccugaccaucagcaccaucugcuucuucaugcagaucgccauccugaucaccaccgugacccugcacuucaagcaguacgaguucaacagcccccccaacaaccaggugaugcugugcgagagcaccaucaucgagagaaacaucaccgagaucguguaccugaccaacaccaccaucgagaaggagaucugccccaagcuggccgaguacagaaacuggagcaagccccagugcgacaucaccggcuucgcccccuucagcaaggacaacagcaucagacugagcgccggcggcgacaucugggugaccagagagcccuacgugagcugcgaccccgacaagugcuaccaguucgcccugggccagggcaccacccugaacaacgugcacagcaacgacaccgugagagacagaacccccuacagaacccugcugaugaacgagcugggcgugcccuuccaccugggcaccaagcaggugugcaucgccuggagcagcagcagcugccacgacggcaaggccuggcugcacgugugcaucaccggcgacgacaagaacgccaccgccagcuucaucuacaacggcagacugguggacagcaucgugagcuggagcaaggagauccugagaacccaggagagcgagugcgugugcaucaacggcaccugcaccguggugaugaccgacggcagcgccagcggcaaggccgacaccaagauccuguucaucgaggagggcaagaucgugcacaccagcacccugagcggcagcgcccagcacguggaggagugcagcugcuaccccagauaccccggcgugagaugcgugugcagagacaacuggaagggcagcaacagacccaucguggacaucaacaucaaggaccacagcaucgugagcagcuacgugugcagcggccuggugggcgacacccccagaaagaacgacagcagcagcagcggccacugccuggaccccaacaacgaggagggcggccacggcgugaagggcugggccuucgacgacggcaacgacguguggaugggcagaaccaucagcgagaagagcagacugggcuacgagaccuucaaggugaucgagggcuggagcaaccccaagagcaagcugcagaucaacagacaggugaucguggacagaggcaacagaagcggcuacagcggcaucuucagcguggagggcaagagcugcaucaacagaugcuucuacguggagcugaucagaggcagaaaggaggagaccgaggugcuguggaccagcaacagcaucgugguguucugcggcaccagcggcaccuacggcaccggcagcuggcccgacggcgccgacaucaaccugaugcccaucuga

SEQ ID NO: 176338 - RNA, 1410 nt, Artificial Sequence; identical to SEQ ID NO: 176126
  derived and/or modified CDS sequence (opt4) from neuraminidase__InfluenzaA__ABW91243

SEQ ID NO: 176339 - RNA, 1410 nt, Artificial Sequence; identical to SEQ ID NO: 175944
  derived and/or modified CDS sequence (opt4) from neuraminidase__InfluenzaA__ABW91254

SEQ ID NO: 176340 - RNA, 1410 nt, Artificial Sequence; identical to SEQ ID NO: 175944
  derived and/or modified CDS sequence (opt4) from neuraminidase__InfluenzaA__ABW91265

SEQ ID NO: 176341 - RNA, 1413 nt, Artificial Sequence; identical to SEQ ID NO: 176090
  derived and/or modified CDS sequence (opt4) from neuraminidase__InfluenzaA__ABW91276

SEQ ID NO: 176342 - RNA, 1413 nt, Artificial Sequence
  derived and/or modified CDS sequence (opt4) from neuraminidase__InfluenzaA__ABW91287
augaaccccaaccagaagaucaucaccaucggcagcaucagcaucgccaucggcaucaucagccugauccugcagaucggcaacaucaucagcaucugggccagccacagcauccagaccggcagccagaaccacaccggcaucugcaaccagagaaucaucaccuacgagaacagcaccugggugaacaacaccuacgugaacaucaacaacaccaacgugguggccgagaaggacaagaccagcgugacccuggccggcaacagcagccugugcagcaucagcggcugggccaucuacaccaaggacaacagcaucagaaucggcagcaagggcgacaucuucgugaucagagagcccuucaucagcugcagccaccuggagugcagaaccuucuuccugacccagggcgcccugcugaacgacaagcacagcaacggcaccgugaaggacagaagccccuacagagcccugaugagcugcccccugggcgaggcccccagccccuacaacagcagauucgagagcguggccuggagcgccagcgccugccacgacggcaugggcuggcugaccaucggcaucagcggccccgacaacggcgccguggccgugcugaaguacaacggcaucaucaccgagaccaucaagagcuggaagaagagaauccugagaacccaggagagcgagugcgugugcaugaacggcagcugcuucaccaucaugaccgacggccccagcaacggcgccgccagcuacaagaucuucaagaucgagaagggcaaggugaccaagaccaucgagcugaacgcccccaacuuccacuacgaggagugcagcugcuaccccgacaccggcaccgugaugugcgugugcagagacaacuggcacggcagcaacagacccugggugagcuucaaccagaaccuggacuaccagaucggcuacaucugcagcggcguguucggcgacaaccccagacccaaggacggcgagggcagcugcaaccccgugaccguggacggcgccgacggcgugaagggcuucagcuacaaguacggcaacggcguguggaucggcagaaccaagagcaacagacugagaaagggcuucgagaugaucugggaccccaacggcuggaccaacaccgacagcgacuucagcgugaagcaggacaucguggccaucaccgacuggagcggcuacagcggcagcuucgugcagcaccccgagcugaccggccuggacugcaucagacccugcuucuggguggagcuggugagaggccugcccagagagaacaccaccaucuggaccagcggcagcagcaucagcuucugcggcgugaacagcggcaccgccaacuggagcuggcccgacggcgccgagcugcccuucaccaucgacaaguga

SEQ ID NO: 176343 - RNA, 1413 nt, Artificial Sequence; identical to SEQ ID NO: 176090
  derived and/or modified CDS sequence (opt4) from neuraminidase__InfluenzaA__ABW91298

SEQ ID NO: 176344 - RNA, 1413 nt, Artificial Sequence
  derived and/or modified CDS sequence (opt4) from neuraminidase__InfluenzaA__ABW91309
augaaccccaaccagaagaucaucaccaucggcagcaucagcaucgccaucggcaucaucagccugaugcugcagaucggcaacaucaucagcaucugggccagccacagcauccagaccggcagccagaaccacaccggcaucugcaaccagagaaucaucaccuacgagaacagcaccugggugaaccacaccuacgugagcaucaacaacaccaacgugguggccggcaaggacaagaccagcgugacccuggccggcaacagcagccugugcagcaucagcggcugggccaucuacaccaaggacaacagcaucagaaucggcagcaagggcgacguguucgugaucagagagcccuucaucagcugcagccaccuggagugcagaaccuucuuccugacccagggcgcccugcugaacgacaagcacagcaacggcaccgugaaggacagaagccccuacagagcccugaugagcugcccccugggcgaggcccccagccccuacaacagcaaguucgagagcguggccuggagcgccagcgccugccacgacggcaugggcuggcugaccaucggcaucagcggccccgacaacggcgccguggccgugcugaaguacaacggcaucaucaccgagaccaucaagagcuggaagaagagaauccugagaacccaggagagcgagugcgugugcgugaacggcagcugcuucaccaucaugaccgacggccccagcgacggcgccgccagcuacaagaucuucaagaucgagaagggcaaggugaccaagagcaucgagcugaacgcccccaacuuccacuacgaggagugcagcugcuaccccgacaccggcaccgugaugugcgugugcagagacaacuggcacggcagcaacagacccugggugagcuucaaccagaaccuggacuaccagaucggcuacaucugcagcggcguguucggcgacaaccccagacccaaggacggcaagggcagcugcaaccccgugaccgccgacggcgccgacggcgugaagggcuucagcuacaaguacggcaacggcguguggaucggcagaaccaagagcaacagacugagaaagggcuucgagaugaucugggaccccaacggcuggaccgacaccgacagcgacuucagcgugaagcaggacgugguggccaucaccgacuggagcggcuacagcggcagcuucgugcagcaccccgagcugaccggccuggacugcaucagacccugcuucuggguggagcuggugagaggccugcccagagagaacaccaccaucuggaccagcggcagcagcaucagcuucugcggcguggacagcgacaccgccaacuggagcuggcccgacggcgccgagcugcccuucaccaucgacaaguga

SEQ ID NO: 176345 - RNA, 1413 nt, Artificial Sequence; identical to SEQ ID NO: 176090
  derived and/or modified CDS sequence (opt4) from neuraminidase__InfluenzaA__ABW91320

SEQ ID NO: 176346 - RNA, 1413 nt, Artificial Sequence; identical to SEQ ID NO: 176090
  derived and/or modified CDS sequence (opt4) from neuraminidase__InfluenzaA__ABW91331

SEQ ID NO: 176347 - RNA, 1413 nt, Artificial Sequence; identical to SEQ ID NO: 176090
  derived and/or modified CDS sequence (opt4) from neuraminidase__InfluenzaA__ABW91342

SEQ ID NO: 176348 - RNA, 1413 nt, Artificial Sequence; identical to SEQ ID NO: 176090
  derived and/or modified CDS sequence (opt4) from neuraminidase__InfluenzaA__ABW91353

SEQ ID NO: 176349 - RNA, 1413 nt, Artificial Sequence
  derived and/or modified CDS sequence (opt4) from neuraminidase__InfluenzaA__ABW91364
augaacaccaaccagaagaucaucaccaucggcagcaucagcaucgccaucggcaucaucagccugaugcugcagaucggcaacaucaucagcaucugggccagccacagcauccagaccggcagccagaaccacaccggcaucugcaaccagagaaucaucaccuacgagaacagcaccugggugaaccacaccuacgugaacaucaacaacaccaacguggugaccggcaaggacaagaccagcgugacccuggccggcaacagcagccugugcagcaucagcggcugggccaucuacaccaaggacaacagcaucagaaucggcagcaagggcgacguguucgugaucagagagcccuucaucagcugcagccaccuggagugcagaaccuucuuccugacccagggcgcccugcugaacgacaagcacagcaacggcaccgugaaggacagaagccccuacagagcccugaugagcugcccccugggcgaggcccccagccccuacaacagcaaguucgagagcguggccuggagcgccagcgccugccacgacggcaugggcuggcugaccaucggcaucagcggccccgacaacggcgccguggccgugcugaaguacaacggcaucaucaccgagaccaucaagagcuggaagaagagaauccugagaacccaggagagcgagugcgugugcgugaacggcagcugcuucaccaucaugaccgacggccccagcgacggcgccgccagcuacaagaucuucaagaucgagaagggcaaggugaccaagagcaucgagcugaacgcccccaacuuccacuacgaggagugcagcugcuaccccgacaccggcaccgugaugugcgugugcagagacaacuggcacggcagcaacagacccugggugagcuucaaccagaaccuggacuaccagaucggcuacaucugcagcggcguguucggcgacaaccccagacccaaggacggcaagggcagcugcaaccccgugaccguggacggcgccgacggcgugaagggcuucagcuacaaguacggcaacggcguguggaucggcagaaccaagagcaacaagcugagaaagggcuucgagaugaucugggaccccaacggcuggaccgacaccgacaacgacuucagcgugaagcaggacgugguggccaucaccgacuggagcggcuacagcggcagcuucgugcagcaccccgagcugaccggccuggacugcaucagacccugcuucuggguggagcuggugagaggccugcccagagagaacaccaccaucuggaccagcggcagcagcaucagcuucugcggcguggacagcgacaccgccaacuggagcuggcccgacggcgccgagcugcccuucaccaucgacaaguga

SEQ ID NO: 176350 - RNA, 1413 nt, Artificial Sequence; identical to SEQ ID NO: 176090
  derived and/or modified CDS sequence (opt4) from neuraminidase__InfluenzaA__ABW91375

SEQ ID NO: 176351 - RNA, 1413 nt, Artificial Sequence; identical to SEQ ID NO: 176116
  derived and/or modified CDS sequence (opt4) from neuraminidase__InfluenzaA__ABW91386

SEQ ID NO: 176352 - RNA, 1410 nt, Artificial Sequence
  derived and/or modified CDS sequence (opt4) from neuraminidase__InfluenzaA__ABW91397
augaaccccaaccagaagaucaucaccaucggcagcgugagccugaccaucagcaccaucugcuucuucaugcagaucgccauccugaucaccaccgugacccugcacuucaagcaguacgaguucaacagcccccccaacaaccaggugaugcugugcgagcccaccaucaucgagagaaacaucaccgagaucguguaccugaccaacaccaccaucgagaaggagaucugccccaagcuggccgaguacagaaacuggagcaagccccagugcgacaucaccggcuucgcccccuucagcaaggacaacagcaucagacugagcgccggcggcgacaucugggugaccagagagcccuacgugagcugcgaccccgacaagugcuaccaguucgcccugggccagggcaccacccugaacaacgugcacagcaacgacaccgugagagacagaacccccuacagaacccugcugaugaacgagcugggcgugcccuuccaccugggcaccaagcaggugugcaucgccuggagcagcagcagcugccacgacggcaaggccuggcugcacgugugcaucaccggcgacgacaagaacgccaccgccagcuucaucuacaacggcagacugguggacagcaucgugagcuggagcaaggagauccugagaacccaggagagcgagugcaucugcaucaacggcaccugcaccguggugaugaccgacggcagcgccagcggcaaggccgacaccaagauccuguucaucgaggagggcaagaucgugcacaccagcacccugagcggcagcgcccagcacguggaggagugcagcugcuaccccagauaccccggcgugagaugcgugugcagagacaacuggaagggcagcaacagacccaucguggacaucaacaucaaggaccacagcaucgugagcagcuacgugugcagcggccuggugggcgacacccccagaaagaacgacagcagcagcagcagccacugccuggaccccaacaacgaggagggcggccacggcgugaagggcugggccuucgacgacggcaacgacguguggaugggcagaaccaucagcgagaagagcagacugggcuacgagaccuucaaggugaucgagggcuggagcaaccccaagagcaagcugcagaucaacagacaggugaucguggacagaggcaacagaagcggcuacagcggcaucuucagcguggagggcaagagcugcaucaacagaugcuucuacguggagcugaucagaggcagaaaggaggagaccgaggugcuguggaccagcaacagcaucgugguguucugcggcaccagcggcaccuacggcaccggcagcuggcccgacggcgccgacaucaaccugaugcccaucuga

SEQ ID NO: 176353 - RNA, 1413 nt, Artificial Sequence; identical to SEQ ID NO: 176261
  derived and/or modified CDS sequence (opt4) from neuraminidase__InfluenzaA__ABW91408

SEQ ID NO: 176354 - RNA, 1413 nt, Artificial Sequence
  derived and/or modified CDS sequence (opt4) from neuraminidase__InfluenzaA__ABW91419
augaaccccaaccagaagaucaucaccaucggcagcaucagcaucgccaucggcaucaucagccugaugcugcagaucggcaacaucaucagcaucugggccagccacagcauccagaccggcagccagaaccacaccggcaucugcaaccagagaaucaucaccuacgagaacagcaccugggugaaccacaccuacgugaacaucaacaacaccaacgugguggccgagaaggacaagaccagcgugacccuggccggcaacagcagccugugcagcaucagcggcugggccaucuacaccaaggacaacagcaucagaaucggcagcaagggcgacguguucgugaucagagagcccuucaucagcugcagccaccuggagugcagaaccuucuuccugacccagggcgcccugcugaacgacaagcacagcaacggcaccgugaaggacagaagccccuacagagcccugaugagcugcccccugggcgaggcccccagccccuacaacagcaaguucgagagcguggccuggagcgccagcgccugccacgacggcaugggcuggcugaccaucggcaucagcggccccgacaacggcgccguggccgugcugaaguacaacggcaucaucaccgagaccaucaagagcuggaagaagagaauccugagaacccaggagagcgagugcgugugcgugaacggcagcugcuucaccaucaugaccgacggccccagcaacggcgccgccagcuacaagaucuucaagaucgagaagggcaaggugaccaagagcaucgagcugaacgcccccaacuuccacuacgaggagugcagcugcuaccccgacaccggcaccgugaugugcgugugcagagacaacuggcacggcagcaacagacccugggugagcuucaaccagaaccuggacuaccaggugggcuacaucugcagcggcguguucggcgacaaccccagacccaaggacggcaagggcagcugcaaccccaugaccguggacggcgccgacggcgugaagggcuucagcuacaaguacggcaacggcguguggaucggcagaaccaagagcaacaagcugagaaagggcuucgagaugaucugggaccccaacggcuggaccgacaccgacagcgacuucagcgugaagcaggacgugguggccaucaccgacuggagcggcuacagcggcagcuucgugcagcaccccgagcugaccggccuggacugcaucagacccugcuucuggguggagcuggugagaggccugcccagagagaacaccaccaucuggaccagcggcagcagcaucagcuucugcggcguggacagcgacaccgccaacuggagcuggcccgacggcgccgagcugcccuucaccaucgacaaguga

SEQ ID NO: 176355 - RNA, 1413 nt, Artificial Sequence
  derived and/or modified CDS sequence (opt4) from neuraminidase__InfluenzaA__ABW91430
augaaccccaaccagaagaucaucaccaucggcagcaucagcaucgccaucggcaucaucagccugaugcugcagaucggcaacaucaucagcaucugggccagccacagcauccagaccggcagccagaaccacaccggcaucugcaaccagagaaucaucaccuacgagaacagcaccugggugaaccacaccuacgugaacaucaacaacaccaacgugguggccggcaaggacaagaccagcgugacccuggccggcaacagcagccugugcagcaucagcggcugggccaucuacaccaaggacaacagcaucagaaucggcagcaagggcgacguguucgugaucagagagcccuucaucagcugcagccaccuggagugcagaaccuucuuccugacccagggcgcccugcugaacgacaagcacagcaacggcaccgugaaggacagaagccccuacagagcccugaugagcugcccccugggcgaggcccccagccccuacaacagcaaguucgagagcguggccuggagcgccagcgccugccacgacggcaugggcuggcugaccaucggcaucagcggccccgacaacggcagcguggccgugcugaaguacaacggcaucaucaccgagaccaucaagagcuggaagaagagaauccugagaacccaggagagcgagugcgugugcgugaacggcagcugcuucaccaucaugaccgacggccccagcaacggcgccgccagcuacaagaucuucaagaucgagaagggcaaggugaccaagagcaucgagcugaacgcccccaacuuccacuacgaggagugcagcugcuaccccgacaccggcaccgugaugugcgugugcagagacaacuggcacggcagcaacagacccugggugagcuucaaccagaaccuggacuaccaggugggcuacaucugcagcggcguguucggcgacaaccccagacccaaggacggcaagggcagcugcaaccccaugaccguggacggcgccgacggcgugaagggcuucagcuacaaguacggcaacggcguguggaucggcagaaccaagagcaacaagcugagaaagggcuucgagaugaucugggaccccaacggcuggaccgacaccgacagcgacuucagcgugaagcaggacgugguggccaucaccgacuggagcggcuacagcggcagcuucgugcagcaccccgagcugaccggccuggacugcaucagacccugcuucuggguggagcuggugagaggccugcccagagagaacaccaccaucuggaccagcggcagcagcaucagcuucugcggcguggacagcgacaccgccaacuggagcuggcccgacggcgccgagcugcccuucaccaucgacaaguga

SEQ ID NO: 176356 - RNA, 1410 nt, Artificial Sequence; identical to SEQ ID NO: 175944
  derived and/or modified CDS sequence (opt4) from neuraminidase__InfluenzaA__ABW91441

SEQ ID NO: 176357 - RNA, 1413 nt, Artificial Sequence; identical to SEQ ID NO: 176131
  derived and/or modified CDS sequence (opt4) from neuraminidase__InfluenzaA__ABW91452

SEQ ID NO: 176358 - RNA, 1413 nt, Artificial Sequence; identical to SEQ ID NO: 176131
  derived and/or modified CDS sequence (opt4) from neuraminidase__InfluenzaA__ABW91463

SEQ ID NO: 176359 - RNA, 1413 nt, Artificial Sequence; identical to SEQ ID NO: 176090
  derived and/or modified CDS sequence (opt4) from neuraminidase__InfluenzaA__ABW91474

SEQ ID NO: 176360 - RNA, 1413 nt, Artificial Sequence; identical to SEQ ID NO: 176131
  derived and/or modified CDS sequence (opt4) from neuraminidase__InfluenzaA__ABW91485

SEQ ID NO: 176361 - RNA, 1413 nt, Artificial Sequence; identical to SEQ ID NO: 176090
  derived and/or modified CDS sequence (opt4) from neuraminidase__InfluenzaA__ABW91496

SEQ ID NO: 176362 - RNA, 1413 nt, Artificial Sequence; identical to SEQ ID NO: 176116
  derived and/or modified CDS sequence (opt4) from neuraminidase__InfluenzaA__ABW91507

SEQ ID NO: 176363 - RNA, 1413 nt, Artificial Sequence; identical to SEQ ID NO: 176131
  derived and/or modified CDS sequence (opt4) from neuraminidase__InfluenzaA__ABW91518

SEQ ID NO: 176364 - RNA, 1413 nt, Artificial Sequence
  derived and/or modified CDS sequence (opt4) from neuraminidase__InfluenzaA__ABW91529
augaaccccaaccagaagaucaucaccaucggcagcaucagcaucgccaucggcaccaucagccugaugcugcagaucggcaacaucaucagcaucugggccagccacagcauccagaccggcagccagaaccacaccggcaucugcaaccagagaaucaucaccuacgagaacagcaccugggugaaccacaccuacgugagcaucaacaacaccaacgugguggccggcaaggacaagaccagcgugacccuggccggcaacagcagccugugcagcaucagcggcugggccaucuacaccaaggacaacagcaucagaaucggcagcaagggcgacguguucgugaucagagagcccuucaucagcugcagccaccuggagugcagaaccuucuuccugacccagggcgcccugcugaacgacaagcacagcaacggcaccaucaaggacagaagccccuacagagcccugaugagcugcccccugggcgaggcccccagccccuacaacagcaaguucgagagcguggccuggagcgccagcgccugccacgacggcaugggcuggcugaccaucggcaucagcggccccgacaacggcgccguggccgugcugaaguacaacggcaucaucaccgagaccaucaagagcuggaagaagagaauccugagaacccaggagagcgagugcgugugcgugaacggcagcugcuucaccaucaugaccgacggccccagcaacggcgccgccagcuacaagaucuucaagaucgagaagggcaaggugaccaagagcaucgagcugaacgcccccaacuuccacuacgaggagugcagcugcuaccccgacaccggcaccgugaugugcgugugcagagacaacuggcacggcagcaacagacccugggugagcuucaaccagaaccuggacuaccagaucggcuacaucugcagcggcguguucggcgacaaccccagacccaaggacggcaagggcagcugcaaccccgugaccguggacggcgccgacggcgugaagggcuucagcuacaaguacggcaacggcguguggaucggcagaaccaagagcaacagacugagaaagggcuucgagaugaucugggaccccaacggcuggaccgacaccgacagcgacuucagcgugaagcaggacgugguggccaucaccgacuggagcggcuacagcggcagcuucgugcagcaccccgagcugaccggccuggacugcaucagacccugcuucuggguggagcuggugagaggccugcccagagagaacaccaccaucuggaccagcggcagcagcaucagcuucugcggcguggacagcgacaccgccaacuggagcuggcccgacggcgccgagcugcccuucaccaucgacaaguga

SEQ ID NO: 176365 - RNA, 1413 nt, Artificial Sequence
  derived and/or modified CDS sequence (opt4) from neuraminidase__InfluenzaA__ABW91540
augaaccccaaccagaagaucaucaccaucggcagcaucagcaucgccaucggcaucaucagccugaugcugcagaucggcaacaucaucagcaucugggccagccacagcauccagaccggcagccagaaccacaccggcaucugcaaccagagaaucaucaccuacgagaacagcaccuggaugaaccacaccuacgugagcaucaacaacaccaacgugguggccggcaaggacaagaccagcgugacccuggccggcaacagcagccugugcagcaucagcggcugggccaucuacaccaaggacaacagcaucagaaucggcagcaagggcgacguguucgugaucagagagcccuucaucagcugcagccaccuggagugcagaaccuucuuccugacccagggcgcccugcugaacgacaagcacagcaacggcaccgugaaggacagaagccccuacagagcccugaugagcugcccccugggcgaggcccccagccccuacaacagcaaguucgagagcguggccuggagcgccagcgccugccacgacggcaugggcuggcugaccaucggcaucagcggccccgacaacggcgccguggccgugcugaaguacaacggcaucaucaccgagaccaucaagagcuggaagaagagaauccugagaacccaggagagcgagugcgugugcgugaacggcagcugcuucaccaucaugaccgacggccccagcaacggcgccgccagcuacaagaucuucaagaucgagaagggcaaggugaccaagagcguggagcugaacgcccccaacuuccacuacgaggagugcagcugcuaccccgacaccggcaccgugaugugcgugugcagagacaacuggcacggcagcaacagacccugggugagcuucaaccagaaccuggacuaccagaucggcuacaucugcagcggcguguucggcgacaaccccagacccaaggacggcaagggcagcugcaaccccgugaccguggacggcgccgacggcgugaagggcuucagcuacaaguacggcaacggcguguggaucggcagaaccaagagcaacagacugagaaagggcuucgagaugaucugggaccccaacggcuggaccgacaccgacagcgacuucagcgugaagcaggacgugguggccaucaccgacuggagcggcuacagcggcagcuucgugcagcaccccgagcugaccggccuggacugcaucagacccugcuucuggguggagcuggugagaggccugcccagagagaacaccaccaucuggaccagcggcagcagcaucagcuucugcggcguggacagcgacaccgccaacuggagcuggcccgacggcgccgagcugcccuucaccaucgacaaguga

SEQ ID NO: 176366 - RNA, 1410 nt, Artificial Sequence
  derived and/or modified CDS sequence (opt4) from neuraminidase__InfluenzaA__ABW91551
augaaccccaaccagaagaucaucaccaucggcagcgugagccugaccaucagcaccaucugcuucuucaugcagaucgccauccugaucaccaccgugacccugcacuucaagcaguacgaguucaacuucccccccaacaaccaggugaugcugugcgagcccaccaucaucgagagaaacaucaccgagaucguguaccugaccaacaccaccaucgagaaggagaucugccccaagcuggccgaguacagaaacuggagcaagccccagugcgacaucaccggcuucgcccccuucagcaaggacaacagcaucagacugagcgccggcggcgacaucugggugaccagagagcccuacgugagcugcgaccccgacaagugcuaccaguucgcccugggccagggcaccacccugaacaacgugcacagcaacgacaccgugagagacagaacccccuacagaacccugcugaugaacgagcugggcgugcccuuccaccugggcaccaagcaggugugcaucgccuggagcagcagcagcugccacgacggcaaggccuggcugcacgugugcaucaccggcgacgacaagaacgccaccgccagcuucaucuacaacggcagacugguggacagcaucgugagcuggagcaaggagauccugagaacccaggagagcgagugcgugugcaucaacggcaccugcaccguggugaugaccgacggcagcgccagcggcaaggccgacaccaagauccuguucaucgaggagggcaagaucgugcacaccagcacccugagcggcagcgcccagcacguggaggagugcagcugcuaccccagauaccccggcgugagaugcgugugcagagacaacuggaagggcagcaacagacccaucguggacaucaacaucaaggaccacagcaucgugagcagcuacgugugcagcggccuggugggcgacacccccagaaagaacgacagcagcagcagcagccacugccuggaccccaacaacgaggagggcggccacggcgugaagggcugggccuucgacgacggcaacgacguguggaugggcagaaccaucagcgagaagagcagacugggcuacgagaccuucaaggugaucgagggcuggagcaaccccaagagcaagcugcagaucaacagacaggugaucguggacagaggcaacagaagcggcuacagcggcaucuucagcguggagggcaagagcugcaucaacagaugcuucuacguggagcugaucagaggcagaaaggaggagaccgaggugcuguggaccagcaacagcaucgugguguucugcggcaccagcggcaccuacggcaccggcagcuggcccgacggcgccgacaucaaccugaugcccaucuga

SEQ ID NO: 176367 - RNA, 1413 nt, Artificial Sequence; identical to SEQ ID NO: 176090
  derived and/or modified CDS sequence (opt4) from neuraminidase__InfluenzaA__ABW91562

SEQ ID NO: 176368 - RNA, 1413 nt, Artificial Sequence; identical to SEQ ID NO: 176125
  derived and/or modified CDS sequence (opt4) from neuraminidase__InfluenzaA__ABW91584

SEQ ID NO: 176369 - RNA, 1413 nt, Artificial Sequence; identical to SEQ ID NO: 176090
  derived and/or modified CDS sequence (opt4) from neuraminidase__InfluenzaA__ABW91595

SEQ ID NO: 176370 - RNA, 1413 nt, Artificial Sequence; identical to SEQ ID NO: 176131
  derived and/or modified CDS sequence (opt4) from neuraminidase__InfluenzaA__ABW91606

SEQ ID NO: 176371 - RNA, 1413 nt, Artificial Sequence; identical to SEQ ID NO: 176125
  derived and/or modified CDS sequence (opt4) from neuraminidase__InfluenzaA__ABW91617

SEQ ID NO: 176372 - RNA, 1413 nt, Artificial Sequence; identical to SEQ ID NO: 176090
  derived and/or modified CDS sequence (opt4) from neuraminidase__InfluenzaA__ABW91628

SEQ ID NO: 176373 - RNA, 1413 nt, Artificial Sequence; identical to SEQ ID NO: 176090
  derived and/or modified CDS sequence (opt4) from neuraminidase__InfluenzaA__ABW91639

SEQ ID NO: 176374 - RNA, 1410 nt, Artificial Sequence; identical to SEQ ID NO: 175944
  derived and/or modified CDS sequence (opt4) from neuraminidase__InfluenzaA__ABW91650

SEQ ID NO: 176375 - RNA, 1350 nt, Artificial Sequence
  derived and/or modified CDS sequence (opt4) from neuraminidase__InfluenzaA__ABX10517
augaaccccaacaagaagaucaucaccaucggcagcaucugcauggugaccggcauggugagccugaugcugcagaucggcaaccugaucagcaucugggugagccacagcauccacaccggcaaccagcacaaggccgagcccaucagcaacaccaacuuccugaccgagaaggccguggccagcgugaagcuggccggcaacagcagccugugccccaucaacggcugggccgugcacagcaaggacaacagcaucagaaucggcagcaagggcgacguguucgugaucagagagcccuucaucagcugcagccaccuggagugcagaaccuucuuccugacccagggcgcccugcugaacgacaagcacagcaacggcaccgugaaggacagaagcccccacagaacccugaugagcugccccgugggcgaggcccccagccccuacaacagcagauucgagagcguggccuggagcgccagcgccugccacgacggcaccagcuggcugaccaucggcaucagcggccccgacaacggcgccguggccgugcugaaguacaacggcaucaucaccgacaccaucaagagcuggagaaacaacauccugagaacccaggagagcgagugcgccugcgugaacggcagcugcuucaccgugaugaccgacggccccagcaacggccaggccagccacaagaucuucaagauggagaagggcaagguggugaagagcguggagcuggacgcccccaacuaccacuacgaggagugcagcugcuaccccgacgccggcgagaucaccugcgugugcagagacaacuggcacggcagcaacagacccugggugagcuucaaccagaaccuggaguaccagaucggcuacaucugcagcggcguguucggcgacaaccccagacccaacgacggcaccggcagcugcggccccgugagcagcaacggcgccuacggcgugaagggcuucagcuucaaguacggcaacggcguguggaucggcagaaccaagagcaccaacagcagaagcggcuucgagaugaucugggaccccaacggcuggaccgagaccgacagcagcuucagcgugaagcaggacaucguggccaucaccgacuggagcggcuacagcggcagcuucgugcagcaccccgagcugaccggccuggacugcaucagacccugcuucuggguggagcugaucagaggcagacccaaggagagcaccaucugggccagcggcagcagcaucagcuucugcggcgugaacagcgacaccgugggcuggagcuggcccgacggcgccgagcugcccuucaccaucgacaaguga

SEQ ID NO: 176376 - RNA, 1410 nt, Artificial Sequence; identical to SEQ ID NO: 175989
  derived and/or modified CDS sequence (opt4) from neuraminidase__InfluenzaA__ABX10527

SEQ ID NO: 176377 - RNA, 1413 nt, Artificial Sequence
  derived and/or modified CDS sequence (opt4) from neuraminidase__InfluenzaA__ABX58242
augaaccccaaccagaagaucaucaccaucggcagcaucagcaucgccaucggcaucaucagccugaugcugcagaucggcaacaucaucagcaucuggaccagccacagcauccagaccggcagccagaaccacaccggcaucugcaaccagagaaucaucaccuacgagaacagcaccugggugaaccacaccuacgugagcaucaacaacaccaacgugguggccggcaaggacaagaccagcgugacccuggccggcaacagcagccugugcagcaucagcggcugggccaucuacaccaaggacaacagcaucagaaucggcagcaagggcgacguguucgugaucagagagcccuucaucagcugcagccaccuggagugcagaaccuucuuccugacccagggcgcccugcugaacgacaagcacagcaacggcaccgugaaggacagaagccccuacagagcccugaugagcugcccccugggcgaggcccccagccccuacaacagcaaguucgagagcguggccuggagcgccagcgccugccacgacggcaugggcuggcugaccaucggcaucagcggccccgacaacggcgccguggccgugcugaaguacaacggcaucaucaccgagaccaucaagagcuggaagaagagaauccugagaacccaggagagcgagugcgugugcgugaacggcagcugcuucaccaucaugaccgacggccccagcaacggcgccgccagcuacaagaucuucaagaucgagaagggcaaggugaccaagagcaucgagcugaacgcccccaacuuccacuacgaggagugcagcugcuaccccgacaccggcaccgugaugugcgugugcagagacaacuggcacggcagcaacagacccugggugagcuucaaccagaaccuggacuaccagaucggcuacaucugcagcggcguguucggcgacaaccccagacccaaggacggcaagggcagcugcaaccccgugaccguggacggcgccgacggcgugaagggcuucagcuacaaguacggcaacggcguguggaucggcagaaccaagagcaacagacugagaaagggcuucgagaugaucugggaccccaacggcuggaccgacaccgacagcgacuucagcgugaagcaggacgugguggccaucaccgacuggagcggcuacagcggcagcuucgugcagcaccccgagcugaccggccuggacugcaucagacccugcuucuggguggagcuggugagaggccugcccagagagaacaccaccaucuggaccagcggcagcagcaucagcuucugcggcguggacagcgacaccgccaacuggagcuggcccgacggcgccgagcugcccuucaccaucgacaaguga

SEQ ID NO: 176378 - RNA, 1413 nt, Artificial Sequence; identical to SEQ ID NO: 176189
  derived and/or modified CDS sequence (opt4) from neuraminidase__InfluenzaA__ABX58253

SEQ ID NO: 176379 - RNA, 1413 nt, Artificial Sequence; identical to SEQ ID NO: 176090
  derived and/or modified CDS sequence (opt4) from neuraminidase__InfluenzaA__ABX58264

SEQ ID NO: 176380 - RNA, 1413 nt, Artificial Sequence; identical to SEQ ID NO: 176090
  derived and/or modified CDS sequence (opt4) from neuraminidase__InfluenzaA__ABX58275

SEQ ID NO: 176381 - RNA, 1413 nt, Artificial Sequence; identical to SEQ ID NO: 176090
  derived and/or modified CDS sequence (opt4) from neuraminidase__InfluenzaA__ABX58286

SEQ ID NO: 176382 - RNA, 1413 nt, Artificial Sequence
  derived and/or modified CDS sequence (opt4) from neuraminidase__InfluenzaA__ABX58297
augaaccccaaccagaagaucaucaccaucggcagcaucagcaucgccaucggcaucaucagccugaugcugcagaucggcaacaucaucagcaucugggccagccacagcauccagaccggcagccagaaccacaccggcaucugcaaccagaagaucaucaccuacgagaacagcaccugggugaaccacaccuacgugagcaucaacaacaccaacgugguggccggcaaggacaagaccagcgugacccuggccggcaacagcagccugugcagcaucagcggcugggccaucuacaccaaggacaacagcaucagaaucggcagcaagggcgacguguucgugaucagagagcccuucaucagcugcagccaccuggagugcagaaccuucuuccugacccagggcgcccugcugaacgacaagcacagcaacggcaccgugaaggacagaagccccuacagagcccugaugagcugcccccugggcgaggcccccagccccuacaacagcaaguucgagagcguggccuggagcgccagcgccugccacgacggcaugggcuggcugaccaucggcaucagcggccccgacaacggcgccguggccgugcugaaguacaacggcaucaucaccgagaccaucaagagcuggaagaagagaauccugagaacccaggagagcgagugcgugugcgugaacggcagcugcuucaccaucaugaccgacggccccagcaacggcgccgccagcuacaagaucuucaagaucgagaagggcaaggugaccaagagcaucgagcugaacgcccccaacuuccacuacgaggagugcagcugcuaccccgacaccggcaccgugaugugcgugugcagagacaacuggcacggcagcaacagacccugggugagcuucaaccagaaccuggacuaccagaucggcuacaucugcagcggcguguucggcgacaaccccagacccaaggacggcaagggcagcugcaaccccgugaccguggacggcgccgacggcgugaagggcuucagcuacaaguacggcaacggcguguggaucggcagaaccaagagcaacagacugagaaagggcuucgagaugaucugggaccccaacggcuggaccgacaccgacagcgacuucagcgugaagcaggacgugguggccaucaccgacuggagcggcuacagcggcagcuucgugcagcaccccgagcugaccggccuggacugcaucagacccugcuucuggguggagcuggugagaggccugcccagagagaacaccaccaucuggaccagcggcagcagcaucagcuucugcggcguggacagcgacaccgccaacuggagcuggcccgacggcgccgagcugcccuucaccaucgacaaguga

SEQ ID NO: 176383 - RNA, 1413 nt, Artificial Sequence; identical to SEQ ID NO: 176261
  derived and/or modified CDS sequence (opt4) from neuraminidase__InfluenzaA__ABX58308

SEQ ID NO: 176384 - RNA, 1413 nt, Artificial Sequence
  derived and/or modified CDS sequence (opt4) from neuraminidase__InfluenzaA__ABX58319
augaaccccaaccagaagaucaucaccaucggcagcaucagcaucgccaucggcaucaucagccugaugcugcagaucggcaacaucaucagcaucugggccagccacagcauccagaccggcagccagaaccacaccggcaucugcaaccagagaaucaucaccuacgagaacagcaccugggugaaccacaccuacgugagcaucaacaacaccaacgugguggccggcaaggacaagaccagcgugacccuggccggcaacagcagccugugcagcaucagcggcugggccaucuacaccaaggacaacagcaucagaaucggcagcaagggcgacguguucgugaucagagagcccuucaucagcugcagccaccuggagugcagaaccuucuuccugacccagggcgcccugcugaacgacaagcacagcaacggcaccaucaaggacagaagccccuacagagcccugaugagcugcccccugggcgaggcccccagccccuacaacagcaaguucgagagcguggccuggagcgccagcgccugccacgacggcaugggcuggcugaccaucggcaucagcggccccgacaacggcgccguggccgugcugaaguacaacggcaucaucaccgagaccaucaagagcuggaagaagagaauccugagaacccaggagagcgagugcgugugcgugaacggcagcugcuucaccaucaugaccgacggccccagcaacggcgccgccagcuacaagaucuucaagaucgagaagggcaaggugaccaagagcaucgagcugaacgcccccaacuuccacuacgaggagugcagcugcuaccccgacaccggcaccgugaugugcgugugcagagacaacuggcacggcagcaacagacccugggugagcuucaaccagaaccuggacuaccagaucggcuacaucugcagcggcguguucggcgacaaccccagacccaaggacggcaagggcagcugcaaccccgugaccguggacggcgccgacggcgugaagggcuucagcuacaaguacggcaacggcguguggaucggcagaaccaagagcaacagacugagaaagggcuucgagaugaucugggaccccaacggcuggaccgacaccgacagcgacuucagcgugaagcaggacgugguggccaucaccgacuggagcggcuacagcggcagcuucgugcagcaccccgagcugaccggccuggacugcaucagacccugcuucuggguggagcuggugagaggccugcccagagagaacaccaccaucuggaccagcggcagcagcaucagcuucugcggcguggacagcgacaccgccaacuggagcuggcccgacggcgccgagcugcccuucaccaucgacaaguga

SEQ ID NO: 176385 - RNA, 1413 nt, Artificial Sequence; identical to SEQ ID NO: 176261
  derived and/or modified CDS sequence (opt4) from neuraminidase__InfluenzaA__ABX58352

SEQ ID NO: 176386 - RNA, 1413 nt, Artificial Sequence; identical to SEQ ID NO: 176090
  derived and/or modified CDS sequence (opt4) from neuraminidase__InfluenzaA__ABX58363

SEQ ID NO: 176387 - RNA, 1413 nt, Artificial Sequence; identical to SEQ ID NO: 176090
  derived and/or modified CDS sequence (opt4) from neuraminidase__InfluenzaA__ABX58385

SEQ ID NO: 176388 - RNA, 1413 nt, Artificial Sequence; identical to SEQ ID NO: 176090
  derived and/or modified CDS sequence (opt4) from neuraminidase__InfluenzaA__ABX58396

SEQ ID NO: 176389 - RNA, 1413 nt, Artificial Sequence
  derived and/or modified CDS sequence (opt4) from neuraminidase__InfluenzaA__ABX58407
augaaccccaaccagaagaucaucaccaucggcagcaucagcaucgccaucggcaucaucagccugaugcugcagaucggcaacaucaucagcaucugggccagccacagcauccagaccggcagccagaaccacaccggcaucugcaaccagagaaucaucaccuacgagaacagcaccugggugaaccacaccuacgugagcaucaacaacaccaacgugguggccggcaaggacaagaccagcgugacccuggccggcaacagcagccugugccccaucagcggcugggccaucuacaccaaggacaacagcaucagaaucggcagcaagggcgacguguucgugaucagagagcccuucaucagcugcagccaccuggagugcagaaccuucuuccugacccagggcgcccugcugaacgacaagcacagcaacggcaccgugaaggacagaagccccuacagagcccugaugagcugcccccugggcgaggcccccagccccuacaacagcaaguucgagagcguggccuggagcgccagcgccugccacgacggcaugggcuggcugaccaucggcaucagcggccccgacaacggcgccguggccgugcugaaguacaacggcaucaucaccgagaccaucaagagcuggaagaagagaauccugagaacccaggagagcgagugcgugugcgugaacggcagcugcuucaccaucaugaccgacggccccagcaacggcgccgccagcuacaagaucuucaagaucgagaagggcaaggugaccaagagcaucgagcugaacgcccccaacuuccacuacgaggagugcagcugcuaccccgacaccggcaccgugaugugcgugugcagagacaacuggcacggcagcaacagacccugggugagcuucaaccagaaccuggacuaccagaucggcuacaucugcagcggcguguucggcgacaaccccagacccaaggacggcaagggcagcugcaaccccgugaccguggacggcgccgacggcgugaagggcuucagcuacaaguacggcaacggcguguggaucggcagaaccaagagcaacagacugagaaagggcuucgagaugaucugggaccccaacggcuggaccgacaccgacagcgacuucagcgugaagcaggacgugguggccaucaccgacuggagcggcuacagcggcagcuucgugcagcaccccgagcugaccggccuggacugcaucagacccugcuucuggguggagcuggugagaggccugcccagagagaacaccaccaucuggaccagcggcagcagcaucagcuucugcggcguggacagcgacaccgccaacuggagcuggcccgacggcgccgagcugcccuucaccaucgacaaguga

SEQ ID NO: 176390 - RNA, 1413 nt, Artificial Sequence; identical to SEQ ID NO: 176131
  derived and/or modified CDS sequence (opt4) from neuraminidase__InfluenzaA__ABX58418

SEQ ID NO: 176391 - RNA, 1413 nt, Artificial Sequence; identical to SEQ ID NO: 176090
  derived and/or modified CDS sequence (opt4) from neuraminidase__InfluenzaA__ABX58429

SEQ ID NO: 176392 - RNA, 1413 nt, Artificial Sequence; identical to SEQ ID NO: 176090
  derived and/or modified CDS sequence (opt4) from neuraminidase__InfluenzaA__ABX58440

SEQ ID NO: 176393 - RNA, 1413 nt, Artificial Sequence
  derived and/or modified CDS sequence (opt4) from neuraminidase__InfluenzaA__ABX58451
augaaccccaaccagaagaucaucaccaucggcagcaucagcaucgccaucggcaccaucagccugaugcugcagaucggcaacaucaucagcaucugggccagccacagcauccagaccggcagccagaaccacaccggcaucugcaaccagagaaucaucaccuacgagaacagcaccugggugaaccacaccuacgugagcaucaacaacaccaacgugguggccggcaaggacaagaccagcgugacccuggccggcaacagcagccugugcagcaucagcggcugggccaucuacaccaaggacaacagcaucagaaucggcagcaagggcgacguguucgugaucagagagcccuucaucagcugcagccaccuggagugcagaaccuucuuccugacccagggcgcccugcugaacgacaagcacagcaacggcaccgugaaggacagaagccccuacagagcccugaugagcugcccccugggcgaggcccccagccccuacaacagcaaguucgagagcguggccuggagcgccagcgccugccacgacggcaugggcuggcugaccaucggcaucagcggccccgacaacggcgccguggccgugcugaaguacaacggcaucaucaccgagaccaucaagagcuggaagaagagaauccugagaacccaggagagcgagugcgugugcgugaacggcagcugcuucaccaucaugaccgacggccccagcaacggcgccgccagcuacaagaucuucaagaucgagaagggcaaggugaccaagagcaucgagcugaacgcccccaacuuccacuacgaggagugcagcugcuaccccgacaccggcaccgugaugugcgugugcagagacaacuggcacggcagcaacagacccugggugagcuucaaccagaaccuggacuaccagaucggcuacaucugcagcggcguguucggcgacaaccccagacccaaggacggcaagggcagcugcaaccccgugaccguggacggcgccgacggcgugaagggcuucagcuacaaguacggcaacggcguguggaucggcagaaccaagagcaacagacugagaaagggcuucgagaugaucugggaccccaacggcuggaccgacaccgacagcgacuucagcgugaagcaggacgugguggccaucaccgacuggagcggcuacagcggcagcuucgugcagcaccccgagcugaccggccuggacugcaucagacccugcuucuggguggagcuggugagaggccugcccagagagaacaccaccaucuggaccagcggcagcagcaucagcuucugcggcguggacagcgacaccgccaacuggagcuggcccgacggcgccgagcugcccuucaccaucgacaaguga

SEQ ID NO: 176394 - RNA, 1413 nt, Artificial Sequence; identical to SEQ ID NO: 176131
  derived and/or modified CDS sequence (opt4) from neuraminidase__InfluenzaA__ABX58462

SEQ ID NO: 176395 - RNA, 1413 nt, Artificial Sequence; identical to SEQ ID NO: 176090
  derived and/or modified CDS sequence (opt4) from neuraminidase__InfluenzaA__ABX58473

SEQ ID NO: 176396 - RNA, 1413 nt, Artificial Sequence; identical to SEQ ID NO: 176131
  derived and/or modified CDS sequence (opt4) from neuraminidase__InfluenzaA__ABX58484

SEQ ID NO: 176397 - RNA, 1413 nt, Artificial Sequence
  derived and/or modified CDS sequence (opt4) from neuraminidase__InfluenzaA__ABX58495
augaaccccaaccagaagaucaucaccaucggcagcaucagcaucgccaucggcaucaucagccugaugcugcagaucggcaacaucaucagcaucugggccagccacagcauccagaccggcagccagaaccacaccggcaucugcaaccagagaaucaucaccuacgagaacagcaccugggugaaccacaccuacgugagcaucaacaacaccaacgugguggccggcaaggacaagaccagcgugacccuggccggcaacagcagccugugcagcaucagcggcugggccaucuacaccaaggacaacagcaucagaaucggcagcaagggcgacguguucgugaucagagagcccuucaucagcugcagccaccuggagugcagaaccuucuuccugacccagggcgcccugcugaacgacaagcacagcaacagaaccgugaaggacagaagccccuacagagcccugaugagcugcccccugggcgaggcccccagccccuacaacagcaaguucgagagcguggccuggagcgccagcgccugccacgacggcaugggcuggcugaccaucggcaucagcggccccgacaacggcgccguggccgugcugaaguacaacggcaucaucaccgagaccaucaagagcuggaagaagagaauccugagaacccaggagagcgagugcgugugcgugaacggcagcugcuucaccaucaugaccgacggccccagcaacggcgccgccagcuacaagaucuucaagaucgagaagggcaaggugaccaagagcaucgagcugaacgcccccaacuuccacuacgaggagugcagcugcuaccccgacaccggcaccgugaugugcgugugcagagacaacuggcacggcagcaacagacccugggugagcuucaaccagaaccuggacuaccagaucggcuacaucugcagcggcguguucggcgacaaccccagacccaaggacggcaagggcagcugcaaccccgugaccguggacggcgccgacggcgugaagggcuucagcuacaaguacggcaacggcguguggaucggcagaaccaagagcaacagacugagaaagggcuucgagaugaucugggaccccaacggcuggaccgacaccgacagcgacuucagcgugaagcaggacgugguggccaucaccgacuggagcggcuacagcggcagcuucgugcagcaccccgagcugaccggccuggacugcaucagacccugcuucuggguggagcuggugagaggccugcccagagagaacaccaccaucuggaccagcggcagcagcaucagcuucugcggcguggacagcgacaccgccaacuggagcuggcccgacggcgccgagcugcccuucaccaucgacaaguga

SEQ ID NO: 176398 - RNA, 1413 nt, Artificial Sequence; identical to SEQ ID NO: 176125
  derived and/or modified CDS sequence (opt4) from neuraminidase__InfluenzaA__ABX58506

SEQ ID NO: 176399 - RNA, 1413 nt, Artificial Sequence; identical to SEQ ID NO: 176131
  derived and/or modified CDS sequence (opt4) from neuraminidase__InfluenzaA__ABX58528

SEQ ID NO: 176400 - RNA, 1413 nt, Artificial Sequence; identical to SEQ ID NO: 176131
  derived and/or modified CDS sequence (opt4) from neuraminidase__InfluenzaA__ABX58539

SEQ ID NO: 176401 - RNA, 1413 nt, Artificial Sequence
  derived and/or modified CDS sequence (opt4) from neuraminidase__InfluenzaA__ABX58550
augaaccccaaccagaagaucaucaccaucggcagcaucagcaucgccaucggcaucaucagccugaugcugcagaucggcaacaucaucagcaucugggccagccacagcauccagaccggcagccagaaccacaccggcaucugcaaccagagaaucaucaccuacgagaacagcaccugggugaaccacaccuacgugagcaucaacaacaccaacgugguggccggcaaggacaagaccagcgugacccuggccggcaacagcagccugugcagcaucagcggcugggccaucuacaccaaggacaacagcaucagaaucggcagcaagggcgacguguucgugaucagagagcccuucaucagcugcagccaccuggagugcagaaccuucuuccugacccagggcgcccugcugaacgacaagcacagcaacggcaccgugaaggacagaagccccuacagagcccugaugagcugcccccugggcgaggcccccagccccuacaacagcaaguucgagagcguggccuggagcgccagcgccugccacgacggcaugggcuggcugaccaucggcaucagcggccccgacaacggcgccguggccgugcugaaguacaacggcaucaucaccgagaccaucaagagcuggaagaagagaauccugagaacccaggagagcgagugcgugugcgugaacggcagcugcuucaccaucaugaccgacggccccagcaacggcgccgccagcuacaagaucuucaagaucgagaagggcaaggugaccaagagcaucgagcugaacgcccccaacuuccacuacgaggagugcagcugcuaccccgacaccggcaccgugaugugcgugugcagagacaacuggcacggcagcaacagacccugggugagcuucaaccagaaccuggacuaccagaucggcuacaucugcagcggcguguucggcgacaaccccagacccaaggacggcaagggcagcugcaaccccgugaccguggacggcgccgacggcgugaagggcuucagcuacaaguacggcaacggcguguggaucggcagaaccaagagcaacagacugagaaagggcuucgagaugaucugggaccccaacggcuggaccgacaccgacagcgacuucagcgugaagcaggacgugguggccaucaccgacuggagcggcuacagcggcagcuucgugcagcaccccgagcugaccggccuggacugcaucagacccugcuucuggguggagcuggugagaggccugcccagagagaacaccaccaucuggaccagcggcagcagcaucagcuucugcggcguggacagcgacaccgccaacuggagcuggcccgacggcgccgagcugcccuucaccguggacaaguga

SEQ ID NO: 176402 - RNA, 1413 nt, Artificial Sequence; identical to SEQ ID NO: 176090
  derived and/or modified CDS sequence (opt4) from neuraminidase__InfluenzaA__ABX58561

SEQ ID NO: 176403 - RNA, 1413 nt, Artificial Sequence
  derived and/or modified CDS sequence (opt4) from neuraminidase__InfluenzaA__ABX58572
augaaccccaaccagaagaucaucaccaucggcagcaucagcaucgccaucggcaucaucagccugaugcugcagaucggcaacaucaucagcaucugggccagccacagcauccagaccggcagccagaaccacaccggcaucugcaaccagagaaucaucaccuacgagaacagcaccugggugaaccacaccuacgugagcaucaacaacaccaacgugguggccggcaaggacaagaccagcgugacccuggccggcaacagcagccugugcagcaucagcggcugggccaucuacaccaaggacaacagcaucagaaucggcagcaagggcgacguguucgugaucagagagcccuucaucagcugcagccaccuggagugcagaaccuucuuccugacccagggcgcccugcugaacgacaagcacagcaacggcaccgugaaggacagaagccccuacagagcccugaugagcugcccccugggcgaggcccccagccccuacaacagcaaguucgagagcguggccuggagcgccagcgccugccacgacggcaugggcuggcugaccaucggcaucagcggccccgacaacggcgccguggccgugcugaaguacaacggcaucaucaccgagaccaucaagagcuggaagaagagaauccugagaacccaggagagcgagugcgugugcgugaacggcagcugcuucaccaucaugaccgacggccccagcaacggcgccgccagcuacaagaucuucaagaucgagaagggcaaggugaccaagagcaucgagcugaacgcccccaacuuccacuacgaggagugcagcugcuaccccgacaccggcaccgugaugugcgugugcagagacaacuggcacggcagcaacagacccugggugagcuucaaccagaaccuggacuaccagaucggcuacaucugcagcggcguguucggcgacaaccccagacccaaggacggcaagggcagcugcaaccccaugaccguggacggcgccgacggcgugaagggcuucagcuacaaguacggcaacggcguguggaucggcagaaccaagagcaacagacugagaaagggcuucgagaugaucugggaccccaacggcuggaccgacaccgacagcgacuucagcgugaagcaggacgugguggccaucaccgacuggagcggcuacagcggcagcuucgugcagcaccccgagcugaccggccuggacugcaucagacccugcuucuggguggagcuggugagaggccugcccagagagaacaccaccaucuggaccagcggcagcagcaucagcuucugcggcguggacagcgacaccgccaacuggagcuggcccgacggcgccgagcugcccuucaccaucgacaaguga

SEQ ID NO: 176404 - RNA, 1413 nt, Artificial Sequence; identical to SEQ ID NO: 176090
  derived and/or modified CDS sequence (opt4) from neuraminidase__InfluenzaA__ABX58583

SEQ ID NO: 176405 - RNA, 1413 nt, Artificial Sequence; identical to SEQ ID NO: 176090
  derived and/or modified CDS sequence (opt4) from neuraminidase__InfluenzaA__ABX58594

SEQ ID NO: 176406 - RNA, 1413 nt, Artificial Sequence; identical to SEQ ID NO: 176116
  derived and/or modified CDS sequence (opt4) from neuraminidase__InfluenzaA__ABX58605

SEQ ID NO: 176407 - RNA, 1413 nt, Artificial Sequence; identical to SEQ ID NO: 176116
  derived and/or modified CDS sequence (opt4) from neuraminidase__InfluenzaA__ABX58616

SEQ ID NO: 176408 - RNA, 1413 nt, Artificial Sequence; identical to SEQ ID NO: 176090
  derived and/or modified CDS sequence (opt4) from neuraminidase__InfluenzaA__ABX58627

SEQ ID NO: 176409 - RNA, 1413 nt, Artificial Sequence; identical to SEQ ID NO: 176090
  derived and/or modified CDS sequence (opt4) from neuraminidase__InfluenzaA__ABX58638

SEQ ID NO: 176410 - RNA, 1413 nt, Artificial Sequence
  derived and/or modified CDS sequence (opt4) from neuraminidase__InfluenzaA__ABX58682
augaaccccaaccagaagaucaucaccaucggcagcaucagcaucgccaucggcaucaucagccugaugcugcagaucggcaacaucaucagcaucugggccagccacagcauccagaccggcagccagaaccacaccggcaucugcaaccagagaaucaucaccuacgagaacagcaccugggugaaccacaccuacgugagcaucaacaacaccaacgugguggccggcaaggacaagaccagcgugacccuggccggcaacagcagccugugcagcaucagcggcugggccaucuacaccaaggacaacagcaucagaaucggcagcaagggcgacguguucgugaucagagagcccuucaucagcugcagccaccuggagugcagaaccuucuuccugacccagggcgcccugcugaacgacaagcacagcaacggcaccgugaaggacagaagccccuacagagcccugaugagcugcccccugggcgaggcccccagccccuacaacagcaaguucgagagcguggccuggagcgccagcgccugccacgacggcaugggcuggcugaccaucggcaucagcggccccgacaacggcgccguggccgugcugaaguacaacggcaucaucaccgagaccaucaagagcuggaagaagagaauccugagaacccaggagagcgagugcgugugcgugaacggcagcugcuucaccaucaugaccgacggccccagcaacggcgccgccagcuacaagaucuucaagaucgagaagggcaaggugaccaagagcaucgagcugaacgcccccaacuuccacuacgaggagugcagcugcuaccccgacaccggcaccaugaugugcgugugcagagacaacuggcacggcagcaacagacccugggugagcuucaaccagaaccuggacuaccagaucggcuacaucugcagcggcguguucggcgacaaccccagacccaaggacggcaagggcagcugcaaccccgugaccguggacggcgccgacggcgugaagggcuucagcuacaaguacggcaacggcguguggaucggcagaaccaagagcaacagacugagaaagggcuucgagaugaucugggaccccaacggcuggaccgacaccgacagcgacuucagcgugaagcaggacgugguggccaucaccgacuggagcggcuacagcggcagcuucgugcagcaccccgagcugaccggccuggacugcaucagacccugcuucuggguggagcuggugagaggccugcccagagagaacaccaccaucuggaccagcggcagcagcaucagcuucugcggcguggacagcgacaccgccaacuggagcuggcccgacggcgccgagcugcccuucaccaucgacaaguga

SEQ ID NO: 176411 - RNA, 1413 nt, Artificial Sequence
  derived and/or modified CDS sequence (opt4) from neuraminidase__InfluenzaA__ABX58693
augaaccccaaccagaagaucaucaccaucggcagcaucagcaucgccaucggcaucaucagccugaugcugcagaucggcaacaucaucagcaucugggccagccacagcauccagaccggcagccagaacaacaccggcaucugcaaccagagaaucaucaccuacgagaacagcaccugggugaaccacaccuacgugaacaucaacaacaccaacgugguggccggcaaggacaagaccagcgugacccuggccggcaacagcagccugugcagcaucagcggcugggccaucuacaccaaggacaacagcaucagaaucggcagcaagggcgacguguucgugaucagagagcccuucaucagcugcagccaccuggagugcagaaccuucuuccugacccagggcgcccugcugaacgacaagcacagcaacggcaccgugaaggacagaagccccuacagagcccugaugagcugcccccugggcgaggcccccagccccuacaacagcaaguucgagagcguggccuggagcgccagcgccugccacgacggcaugggcuggcugaccaucggcaucagcggccccgacaacggcgccguggccgugcugaaguacaacggcaucaucaccggcaccaucaagagcuggaagaagcagauccugagaacccaggagagcgagugcgugugcaugaacggcagcugcuucaccaucaugaccgacggccccagcaacagagccgccagcuacaagaucuucaagaucgagaagggcaaggugaccaagagcaucgagcugaacgcccccaacuuccacuacgaggagugcagcugcuaccccgacaccggcaucgugaugugcgugugcagagacaacuggcacggcagcaacagacccugggugagcuucaaccagaaccuggacuaccagaucggcuacaucugcagcggcgugcugggcgacaaccccagacccgaggacggcgagggcagcugcaaccccgugaccguggacggcgccgacggcgugaagggcuucagcuacaaguacgacaacggcguguggaucggcagaaccaagagcaacagacugagaaagggcuucgagaugaucugggaccccaacggcuggaccaacaccgacagcgacuucagcgugaagcaggacgugguggccaucaccgacuggagcggcuacagcggcagcuucgugcagcaccccgagcugaccggccuggacugcaucagacccugcuucuggguggagcuggugagaggccugcccagagagaacaccaccaucuggaccagcggcagcagcaucagcuucugcggcgugaacagcgacaccgccaacuggagcuggcccgacggcgccgagcugcccuucaccaucgacaaguga

SEQ ID NO: 176412 - RNA, 1413 nt, Artificial Sequence; identical to SEQ ID NO: 176261
  derived and/or modified CDS sequence (opt4) from neuraminidase__InfluenzaA__ABX58704

SEQ ID NO: 176413 - RNA, 1413 nt, Artificial Sequence; identical to SEQ ID NO: 176189
  derived and/or modified CDS sequence (opt4) from neuraminidase__InfluenzaA__ABX58715

SEQ ID NO: 176414 - RNA, 1350 nt, Artificial Sequence
  derived and/or modified CDS sequence (opt4) from neuraminidase__InfluenzaA__ABY19420
augaaccccaaccagaaggugaucaccaucggcagcaucugcauggugaucggcaucgugagccugaugcugcagaucggcaacaugaucagcaucugggugagccacagcauccagaccggcaaccagaaccagguggagcccaucaucaacaccaacuuccugaccggcaaggccguggccagcaucacccuggccggcaacagcagccugugccccaucagaggcugggccauccacagcaaggacaacagcaucagaaucggcagcaagggcgacguguucgugaucagagagcccuucaucagcugcagccaccuggagugcagaaccuucuuccugacccagggcgcccugcugaacgacaagcacagcaacggcaccgugaaggacagaagcccccacagaacccugaugagcugccccgugggcgaggcccccagccccuacaacagcagauucgagagcguggccuggagcgccagcgccugccacgacggcaccagcuggcugaccaucggcaucagcggccccgacaacggcgccguggccgugcugaaguacaacggcaucaucaccgacaccaucaagagcuggagaaacaacauccugagaacccaggagagcgagugcgccugcgugaacggcagcugcuucaccgugaugaccgacggccccagcaacggccaggccagcuacaagaucuucaagauggagaagggcaaggugaucaagagcguggagcuggacgcccccaacuaccacuacgaggagugcagcugcuaccccgacgccggcgagaucaccugcgugugcagagacaacuggcacggcagcaacagacccugggugagcuucaaccagaaccuggaguaccagaucggcuacaucugcagcggcguguucggcgacaaccccagacccaacgacggcaccggcagcugcggccccgugagccacaacggcgccuacggcgugaagggcuucagcuucaaguacggcaacggcguguggaucggcagaaccaagagccccaacagcagaagcggcuucgagaugaucugggaccccaacggcuggagcgagaccgacagcagcuucagcgugaagcaggacaucguggccaucaccgacuggagcggcuacagcggcagcuucgugcagcaccccgagcugaccggccuggacugcaucagacccugcuucuggguggagcugaucagaggcagacccaaggagagcaccguguggaccagcggcagcagcaucagcuucugcggcgugaacagcgacaccgugagcuggagcuggcccgacggcgccgagcugcccuucagcaucgacaaguga

SEQ ID NO: 176415 - RNA, 1350 nt, Artificial Sequence
  derived and/or modified CDS sequence (opt4) from neuraminidase__InfluenzaA__ABY19421
augaaccccaaccagaagaucaucaccaucggcagcaucugcauggugaucggcaucgugagccugaugcugcagaucggcaacaugaucagcaucugggugagccacagcauccagaccggcaaccagaaccagguggagcccaucaucaacaccaacuuccugaccggcaaggccguggccagcaucacccuggccggcaacagcagccugugccccaucagaggcugggccauccacagcaaggacaacagcaucagaaucggcagcaagggcgacguguucgugaucagagagcccuucaucagcugcagccaccuggagugcagaaccuucuuccugacccagggcgcccugcugaacgacaagcacagcaacggcaccgugaaggacagaagcccccacagaacccugaugagcugccccgugggcgaggcccccagccccuacaacagcagauucgagagcguggccuggagcgccagcgccugccacgacggcaccagcuggcugaccaucggcaucagcggccccgacaacggcgccguggccgugcugaaguacaacggcaucaucaccgacaccaucaagagcuggagaaacaacauccugagaacccaggagagcgagugcgccugcgugaacggcagcugcuucaccgugaugaccgacggccccagcaacggccaggccagcuacaagaucuucaagauggagaagggcaaggugaucaagagcguggagcuggacgcccccaacuaccacuacgaggagugcagcugcuaccccgacgccggcgagaucaccugcgugugcagagacaacuggcacggcagcaacagacccugggugagcuucaaccagaaccuggaguaccagaucggcuacaucugcagcggcguguucggcgacaaccccagacccaacgacggcaccggcagcugcggccccgugagccacaacggcgccuacggcgugaagggcuucagcuucaaguacggcaacggcguguggaucggcagaaccaagagccccaacagcagaagcggcuucgagaugaucugggaccccaacggcuggagcgagaccgacagcagcuucagcgugaagcaggacaucguggccaucaccgacuggagcggcuacagcggcagcuucgugcagcaccccgagcugaccggccuggacugcaucagacccugcuucuggguggagcugaucagaggcagacccaaggagagcaccguguggaccagcggcagcagcaucagcuucugcggcgugaacagcgacaccgugagcuggagcuggcccgacggcgccgagcugcccuucagcaucgacaaguga

SEQ ID NO: 176416 - RNA, 1413 nt, Artificial Sequence
  derived and/or modified CDS sequence (opt4) from neuraminidase__InfluenzaA__ABY51020
augaaccccaaccagaagaucaucaccaucggcagcaucagcaucgccaucggcaucaucagccugaugcugcagaucggcaacaucaucagcaucugggccagccacagcauccagaccggcagccagaaccacaccggcaucugcaaccagagaaucaucaccuacgagaacagcaccugggugaaccacaccuacgugagcaucaacaacaccaacgugguggccggcaaggacaagaccagcgugacccuggccggcaacagcagccugugcagcaucagcggcugggccaucuacaccaaggacaacagcaucagaaucggcagcaagggcgacguguucgugaucagagagcccuucaucagcugcagccaccuggagugcagaaccuucuuccugacccagggcgcccugcugaacgacaagcacagcaacggcaccgugaaggacagaagccccuacagagcccugaugagcugcccccugggcgaggcccccagccccuacaacagcaaguucgagagcguggccuggagcgccagcgccugccacgacggcaugggcuggcugaccaucggcaucagcggccccgacaacggcgccguggccgugcugaaguacaacggcaucaucaccgagaccaucaagagcuggaagaagagaauccugagaacccaggagagcgagugcgugugcgugaacggcagcugcuucaccaucaugaccgacggccccagcaacggcgccgccagcuacaagaucuucaagaucgagaagggcaaggugaccaagagcaucgagcugaacgcccccaacuuccacuacgaggagugcagcugcuaccccgacaccggcaccgugaugugcgugugcagagacaacuggcacggcagcaacagacccugggugagcuucaaccagaaccuggacuaccagaucggcuacaucugcagcggcguguucggcgacaaccccagacccaaggacggcaagggcagcugcaacccccugaccguggacggcgccgacggcgugaagggcuucagcuacaaguacggcaacggcguguggaucggcagaaccaagagcaacagacugagaaagggcuucgagaugaucugggaccccaacggcuggaccgacaccgacagcgacuucagcgugaagcaggacgugguggccaucaccgacuggagcggcuacagcggcagcuucgugcagcaccccgagcugaccggccuggacugcaucagacccugcuucuggguggagcuggugagaggccugcccagagagaacaccaccaucuggaccagcggcagcagcaucagcuucugcggcguggacagcgacaccgccaacuggagcuggcccgacggcgccgagcugcccuucaccaucgacaaguga

SEQ ID NO: 176417 - RNA, 1410 nt, Artificial Sequence; identical to SEQ ID NO: 176126
  derived and/or modified CDS sequence (opt4) from neuraminidase__InfluenzaA__ABY51031

SEQ ID NO: 176418 - RNA, 1413 nt, Artificial Sequence
  derived and/or modified CDS sequence (opt4) from neuraminidase__InfluenzaA__ABY51042
augaaccccaaccagaagaucaucaccaucggcagcaucagcaucgccaucggcaucaucagccugaugcugcagaucggcaacaucaucagcaucugggccagccacagcauccagaccggcagccagaaccacaccggcaucugcaaccagagaaucaucaccuacgagaacagcaccugggugaaccacaccuacgugaacaucaacaacaccaacgugguggccggcaaggacaagaccagcgugacccuggccggcaacagcagccugugcagcaucagcggcugggccaucuacaccaaggacaacagcaucagaaucggcagcaagggcgacguguucgugaucagagagcccuucaucagcugcagccaccuggagugcagaaccuucuuccugacccagggcgcccugcugaacgacaagcacagcaacggcaccgugaaggacagaagccccuacagagcccugaugagcugcccccugggcgaggcccccagccccuacaacagcaaguucgagagcguggccuggagcgccagcgccugccacgacggcaugggcuggcugaccaucggcaucagcggccccgacaacggcgccguggccgugcugaaguacaacggcaucaucaccggcaccaucaagagcuggaagaagcagauccugagaacccaggagagcgagugcgugugcaugaacggcagcugcuucaccaucaugaccgacggccccagcaacagagccgccagcuacaagaucuucaagaucgagaagggcaaggugaccaagagcaucgagcugaacgcccccaacuuccacuacgaggagugcagcugcuaccccgacaccggcaucgugaugugcgugugcagagacaacuggcacggcagcaacagacccugggugagcuucaaccagaaccuggacuaccagaucggcuacaucugcagcggcguguucggcgacaaccccagacccaaggacggcgagggcagcugcaaccccgugaccguggacggcgccgacggcgugaagggcuucagcuacaaguacgacaacggcguguggaucggcagaaccaagagcaacagacugagaaagggcuucgagaugaucugggaccccaacggcuggaccaacaccgacagcgacuucagcgugaagcaggacgugguggccaucaccgacuggagcggcuacagcggcagcuucgugcagcaccccgagcugaccggccuggacugcaucagacccugcuucuggguggagcuggugagaggccugcccagagagaacaccaccaucuggaccagcggcagcagcaucagcuucugcggcgugaacagcgacaccgccaacuggagcuggcccgacggcgccgagcugcccuucaccaucgacaaguga

SEQ ID NO: 176419 - RNA, 1413 nt, Artificial Sequence
  derived and/or modified CDS sequence (opt4) from neuraminidase__InfluenzaA__ABY51053
augaaccccaaccagaagaucaucaccaucggcagcaucagcaucgccaucggcaucaucagccugaugcugcagaucggcaacaucaucagcaucugggccagccacagcauccagaccggcagccagaacaacaccggcaucugcaaccagagaaucaucaccuacgagaacagcaccugggugaaccacaccuacgugaacaucaacaacaccaacgugguggccggcaaggacaagaccagcgugacccuggccggcaacagcagccugugcagcaucagcggcugggccaucuacaccaaggacaacagcaucagaaucggcagcaagggcgacguguucgugaucagagagcccuucaucagcugcagccaccuggagugcagaaccuucuuccugacccagggcgcccugcugaacgacaagcacagcaacggcaccgugaaggacagaagccccuacagagcccugaugagcugcccccugggcgaggcccccagccccuacaacagcaaguucgagagcguggccuggagcgccagcgccugccacgacggcaugggcuggcugaccaucggcaucagcggccccgacaacggcgccguggccgugcugaaguacaacggcaucaucaccggcaccaucaagagcuggaagaagcagauccugagaacccaggagagcgagugcgugugcaugaacggcagcugcuucaccaucaugaccgacggccccagcaacagagccgccagcuacaagaucuucaagaucgagaagggcaaggugaccaagagcaucgagcugaacgcccccaacuuccacuacgaggagugcagcugcuaccccgacaccggcaucgugaugugcgugugcagagacaacuggcacggcagcaacagacccugggugagcuucaaccagaaccuggacuaccagaucggcuacaucugcagcggcguguucggcgacaaccccagacccgaggacggcgagggcagcugcaaccccgugaccguggacggcaccgacggcgugaagggcuucagcuacaaguacgacaacggcguguggaucggcagaaccaagagcaacagacugagaaagggcuucgagaugaucugggaccccaacggcuggaccaacaccgacagcgacuucagcgugaagcaggacgugguggccaucaccgacuggagcggcuacagcggcagcuucgugcagcaccccgagcugaccggccuggacugcaucagacccugcuucuggguggagcuggugagaggccugcccagagagaacaccaccaucuggaccagcggcagcagcaucagcuucugcggcgugaacagcgacaccgccaacuggagcuggcccgacggcgccgagcugcccuucaccaucgacaaguga

SEQ ID NO: 176420 - RNA, 1413 nt, Artificial Sequence; identical to SEQ ID NO: 176189
  derived and/or modified CDS sequence (opt4) from neuraminidase__InfluenzaA__ABY51064

SEQ ID NO: 176421 - RNA, 1413 nt, Artificial Sequence; identical to SEQ ID NO: 176090
  derived and/or modified CDS sequence (opt4) from neuraminidase__InfluenzaA__ABY51075

SEQ ID NO: 176422 - RNA, 1413 nt, Artificial Sequence
  derived and/or modified CDS sequence (opt4) from neuraminidase__InfluenzaA__ABY51086
augaaccccaaccagaagaucaucaccaucggcagcaucagcaucgccaucggcaucaucagcaucaugcugcagaucggcaacaucaucagcaucugggccagccacagcauccagaccggcagccagaaccacaccggcaucugcaaccagagaaucaucaccuacgagaacagcaccugggugaaccacaccuacgugaacaucaacaacaccaacgugguggccgagaaggacaagaccagcgugacccuggccggcaacagcagccugugcagcaucagcggcugggccaucuacaccaaggacaacagcaucagaaucggcagcaagggcgacguguucgugaucagagagcccuucaucagcugcagccaccuggagugcagaaccuucuuccugacccagggcgcccugcugaacgacaagcacagcaacggcaccgugaaggacagaagccccuacagagcccugaugagcugcccccugggcgaggcccccagccccuacaacagcaaguucgagagcguggccuggagcgccagcgccugccacgacggcaugggcuggcugaccaucggcaucagcggccccgacaacggcgccguggccgugcugaaguacaacggcaucaucaccgagaccaucaagagcuggaagaagagaauccugagaacccaggagagcgagugcgugugcgugaacggcagcugcuucaccaucaugaccgacggccccagcaacggcgccgccagcuacaagaucuucaagaucgagaagggcaaggugaccaagagcaucgagcugaacgcccccaacuuccacuacgaggagugcagcugcuaccccgacaccggcaccgugaugugcgugugcagagacaacuggcacggcagcaacagacccugggugagcuucaaccagaaccuggacuaccagaucggcuacaucugcagcggcguguucggcgacaaccccagacccaaggacggcaagggcagcugcaaccccgugaccguggacggcgccgacggcaucaagggcuucagcuacaaguacggcaacggcguguggaucggcagaaccaagagcaacagacugagaaagggcuucgagaugaucugggaccccaacggcuggaccaacaccgacagcgacuucagcgugaagcaggacgugguggccaucaccgacuggagcggcuacagcggcagcuucgugcagcaccccgagcugaccggccuggacugcaucagacccugcuucuggguggagcuggugagaggccugcccagagagaacaccaccaucuggaccagcggcagcagcaucagcuucugcggcguggacggcgacaccgccaacuggagcuggcccgacggcgccgagcugcccuucaccaucgacaaguga

SEQ ID NO: 176423 - RNA, 1413 nt, Artificial Sequence
  derived and/or modified CDS sequence (opt4) from neuraminidase__InfluenzaA__ABY51097
augaaccccaaccagaagaucaucaccaucggcagcaucagcaucgccaucggcaucaucagccugaugcugcagaucggcaacaucaucagcaucugggccagccacagcauccagaccggcagccagaaccacaccggcaucugcaaccagagaaucaucaccuacgagaacagcaccugggugaaccacaccuacgugagcaucaacaacaccaacgugguggccggcaaggacaagaccagcgugacccuggccggcaacagcagccugugcagcaucagcggcugggccaucuacaccaaggacaacagcaucagaaucggcagcaagggcgacguguucgugaucagagagcccuucaucagcugcagccaccuggagugcagaaccuucuuccugacccagggcgcccugcugaacgacaagcacagcaacggcaccgugaaggacagaagccccuacagagcccugaugagcugcccccugggcgaggcccccagccccuacaacagcaaguucgagagcguggccuggagcgccagcgccugccacgacggcaugggcuggcugaccaucggcaucagcggccccgacaacggcgccguggccgugcugaaguacaacggcaucaucaccgagaccaucaagagcuggaagaagagaauccugagaacccaggagagcgagugcgugugcgugaacggcagcugcuucaccaucaugaccgacggccccagcaacggcgccgccagcuacaagaucuucaagaucgagaagggcaaggugaccaagagcguggagcugaacgcccccaacuuccacuacgaggagugcagcugcuaccccgacaccggcaccgugaugugcgugugcagagacaacuggcacggcagcaacagacccugggugagcuucaaccagaaccuggacuaccagaucggcuacaucugcagcggcguguucggcgacaaccccagacccaaggacggcaagggcagcugcaaccccgugaccguggacggcgccgacggcgugaagggcuucagcuacaaguacggcaacggcguguggaucggcagaaccaagagcaacagacugagaaagggcuucgagaugaucugggaccccaacggcuggaccgacaccgacagcgacuucagcgugaagcaggacgugguggccaucaccgacuggagcggcuacagcggcagcuucgugcagcaccccgagcugaccggccuggacugcaucagacccugcuucuggguggagcuggugagaggccugcccagagagaacaccaccaucuggaccagcggcagcagcaucagcuucugcggcguggacagcgacaccgccaacuggagcuggcccgacggcgccgagcugcccuucaccaucgacaaguga

SEQ ID NO: 176424 - RNA, 1413 nt, Artificial Sequence
  derived and/or modified CDS sequence (opt4) from neuraminidase__InfluenzaA__ABY51108
augaaccccaaccagaagaucaucaccaucggcagcaucagcaucgccaucggcaucaucagccugaugcugcagaucggcaacaucaucagcaucugggccagccacagcauccagaccggcagccagaaccacaccggcaucugcaaccagagaaucaucaccuacgagaacagcaccugggugaaccacaccuacgugagcaucaacaacaccaacgugguggccggcaaggacaagaccagcgugacccuggccggcaacagcagccugugcagcaucagcggcugggccaucuacaccaaggacaacagcaucagaaucggcagcaagggcgacguguucgugaucagagagcccuucaucagcugcagccaccuggagugcagaaccuucuuccugacccagggcgcccugcugaacgacaagcacagcaacggcaccgugaaggacagaagccccuacagagcccugaugagcugcccccugggcgaggcccccagccccuacaacagcaaguucgagagcguggccuggagcgccagcgccugccacgacggcaugggcuggcugaccaucggcaucagcggccccgacaacggcgccguggccgugcugaaguacaacggcaucaucaccgagaccaucaagagcuggaagaagagaauccugagaacccaggagagcgagugcgugugcgugaacggcagcugcuucaccaucaugaccgacggccccagcaacggcgccgccagcuacaagaucuucaagaucgagaagggcaaggugaccaagagcaucgagcugaacgcccccaacuuccacuacgaggagugcagcugcuaccccgacaccggcaccgugaugugcgugugcagagacaacuggcacggcagcaacagacccugggugagcuucaaccagaaccuggacuaccagaucggcuacaucugcagcggcguguucggcgacaaccccagacccaaggacggcaagggcagcugcaaccccgugaccguggacggcgccgacggcgugaagggcuucagcuacaaguacggcaacggcguguggaucggcagaaccaagagcaacagacugagaaagggcuucgagaugaucugggaccccaacggcuggaccgacaccgacagcgacuucagcgugaagcaggacaucguggccaucaccgacuggagcggcuacagcggcagcuucgugcagcaccccgagcugaccggccuggacugcaucagacccugcuucuggguggagcuggugagaggccugcccagagagaacaccaccaucuggaccagcggcagcagcaucagcuucugcggcguggacagcgacaccgccaacuggagcuggcccgacggcgccgagcugcccuucaccaucgacaaguga

SEQ ID NO: 176425 - RNA, 1413 nt, Artificial Sequence; identical to SEQ ID NO: 176090
  derived and/or modified CDS sequence (opt4) from neuraminidase__InfluenzaA__ABY51119

SEQ ID NO: 176426 - RNA, 1410 nt, Artificial Sequence; identical to SEQ ID NO: 175944
  derived and/or modified CDS sequence (opt4) from neuraminidase__InfluenzaA__ABY51130

SEQ ID NO: 176427 - RNA, 1413 nt, Artificial Sequence; identical to SEQ ID NO: 176131
  derived and/or modified CDS sequence (opt4) from neuraminidase__InfluenzaA__ABY51141

SEQ ID NO: 176428 - RNA, 1413 nt, Artificial Sequence
  derived and/or modified CDS sequence (opt4) from neuraminidase__InfluenzaA__ABY51152
augaaccccaaccagaagaucaucaccaucggcagcaucagcaucgccaucggcaucaucagccugaugcugcagaucggcaacaucaucagcaucugggccagccacagcauccagaccggcagccagaaccacaccggcaucugcaaccagagaaucaucaccuacgagaacagcaccugggugaaccacaccuacgugagcaucaacaacaccaacgugguggccggcaaggacaagaccagcgugacccuggccggcaacagcagccugugcagcaucagcggcugggccaucuacaccaaggacaacagcaucagaaucggcagcaagggcgacguguucgugaucagagagcccuucaucagcugcagccaccuggagugcagaaccuucuuccugacccagggcgcccugcugaacgacaagcacagcaacggcaccgugaaggacagaagccccuacagagcccugaugagcugcccccugggcgaggcccccagccccuacaacagcaaguucgagagcguggccuggagcgccagcgccugccacgacggcaugggcuggcugaccaucggcaucagcggccccgacaacggcgccguggccgugcugaaguacaacggcaucaucaccgagaccaucaagagcuggaagaagagaauccugagaacccaggagagcgagugcgugugcgugaacggcagcugcuucaccaucaugaccgacggccccagcaacggcgccgccagcuacaagaucuucaagaucgagaagggcaaggugaccaagagcaucgagcugaacgcccccaacuuccacuacgaggagugcagcugcuaccccgacaccggcaccgugaugugcgugugcagagacaacuggcacggcagcaacagacccugggugagcuucaaccagaaccuggacuaccagaucggcuacaucugcagcggcguguucggcgacaaccccagacccaaggacggcaagggcagcugcaaccccgugaccguggacggcgccgacggcgugaagggcuucagcuacaaguacggcaacggcguguggaucggcagaaccaagagcaacagacugagaaagggcuucgagaugaucugggaccccaacggcuggaccgacaccgacagcgacuucagcgugaagcaggacgugguggccaucaccgacuggagcggcuacagcggcagcuucgugcagcaccccgagcugaccggccuggacugcaucagacccugcuucuggguggagcuggugagaggccugcccagagagaacaccaccaucuggaccagcggcagcagcaucagcuucugcggcgugaacagcgacaccgccaacuggagcuggcccgacggcgccgagcugcccuucaccaucgacaaguga

SEQ ID NO: 176429 - RNA, 1413 nt, Artificial Sequence
  derived and/or modified CDS sequence (opt4) from neuraminidase__InfluenzaA__ABY51163
augaaccccaaccagaagaucaucaccaucggcagcaucagcaucgccaucggcaucaucagccugaugcugcagaucggcaacaucaucagcaucugggccagccacagcauccagaccggcagccagaaccacaccggcaucugcaaccagagaaucaucaccuacgagaacagcaccugggugaaccacaccuacgugaacaucaacaacaccaacgugguggccggcaaggacaagaccagcgugauccuggccggcaacagcagccugugcagcaucagcggcugggccaucuacaccaaggacaacagcaucagaaucggcagcaagggcgacguguucgugaucagagagcccuucaucagcugcagccaccuggagugcagaaccuucuuccugacccagggcgcccugcugaacgacaagcacagcaacggcaccgugaaggacagaagccccuacagagcccugaugagcugcccccugggcgaggcccccagccccuacaacagcaaguucgagagcguggccuggagcgccagcgccugccacgacggcaugggcuggcugaccaucggcaucagcggccccgacaacggcgccguggccgugcugaaguacaacggcaucaucaccgagaccaucaagagcuggaagaagagaauccugagaacccaggagagcgagugcgugugcgugaacggcagcugcuucaccaucaugaccgacggccccagcaacggcgccgccagcuacaagaucuucaagaucgagaagggcaaggugaccaagagcaucgagcugaacgcccccaacuuccacuacgaggagugcagcugcuaccccgacaccggcaccgugaugugcgugugcagagacaacuggcacggcagcaacagacccugggugagcuucaaccagaaccuggacuaccagaucggcuacaucugcagcggcguguucggcgacaaccccagacccaaggacggcaagggcagcugcaaccccgugaccguggacggcgccgacggcgugaagggcuucagcuacaaguacggcaacggcguguggaucggcagaaccaagagcaacagacugagaaagggcuucgagaugaucugggaccccaacggcuggaccgacaccgacagcgacuucagcgugaagcaggacgugguggccaucaccgacuggagcggcuacagcggcagcuucgugcagcaccccgagcugaccggccuggacugcaucagacccugcuucuggguggagcuggugagaggccugcccagagagaacaccaccaucuggaccagcggcagcagcaucagcuucugcggcguggacagcgacaccgccaacuggagcuggcccgacggcgccgagcugcccuucaccaucgacaaguga

SEQ ID NO: 176430 - RNA, 1413 nt, Artificial Sequence
  derived and/or modified CDS sequence (opt4) from neuraminidase__InfluenzaA__ABY51174
augaaccccaaccagaagaugaucaccaucggcagcaucagcaucgccaucggcaucaucagccugaugcugcagaucggcaacaucaucagcaucugggccagccacagcauccagaccggcagccagaaccacaccggcaucugcaaccagagaaucaucaccuacgagaacagcaccugggugaaccacaccuacgugaacaucaacaacaccaacgugguggccggcaaggacaagaccagcgugacccuggccggcaacagcagccugugcagcaucagcggcugggccaucuacaccaaggacaacagcaucagaaucggcagcaagggcgacguguucgugaucagagagcccuucaucagcugcagccaccuggagugcagaaccuucuuccugacccagggcgcccugcugaacgacaagcacagcaacggcaccgugaaggacagaagccccuacagagcccugaugagcugcccccugggcgaggcccccagccccuacaacagcaaguucgagagcguggccuggagcgccagcgccugccacgacggcaugggcuggcugaccaucggcaucagcggccccgacaacggcgccguggccgugcugaaguacaacggcaucaucaccgagaccaucaagagcuggaagaagagaauccugagaacccaggagagcgagugcgugugcgugaacggcagcugcuucaccaucaugaccgacggccccagcaacggcgccgccagcuacaagaucuucaagaucgagaagggcaaggugaccaagagcaucgagcugaacgcccccaacuuccacuacgaggagugcagcugcuaccccgacaccggcaccgugaugugcgugugcagagacaacuggcacggcagcaacagacccugggugagcuucaaccagaaccuggacuaccaggugggcuacaucugcagcggcguguucggcgacaaccccagacccaaggacggcaagggcagcugcaaccccaugaccguggacggcgccgacggcgugaagggcuucagcuacaaguacggcaacggcguguggaucggcagaaccaagagcaacaagcugagaaagggcuucgagaugaucugggaccccaacggcuggaccgacaccgacagcgacuucagcgugaagcaggacgugguggccaucaccgacuggagcggcuacagcggcagcuucgugcagcaccccgagcugaccggccuggacugcaucagacccugcuucuggguggagcuggugagaggccugcccagagagaacaccaccaucuggaccagcggcagcagcaucagcuucugcggcguggacagcgacaccgccaacuggagcuggcccgacggcgccgagcugcccuucaccaucgacaaguga

SEQ ID NO: 176431 - RNA, 1413 nt, Artificial Sequence; identical to SEQ ID NO: 176090
  derived and/or modified CDS sequence (opt4) from neuraminidase__InfluenzaA__ABY51185

SEQ ID NO: 176432 - RNA, 1413 nt, Artificial Sequence; identical to SEQ ID NO: 176125
  derived and/or modified CDS sequence (opt4) from neuraminidase__InfluenzaA__ABY51196

SEQ ID NO: 176433 - RNA, 1410 nt, Artificial Sequence; identical to SEQ ID NO: 176126
  derived and/or modified CDS sequence (opt4) from neuraminidase__InfluenzaA__ABY51229

SEQ ID NO: 176434 - RNA, 1413 nt, Artificial Sequence
  derived and/or modified CDS sequence (opt4) from neuraminidase__InfluenzaA__ABY51240
augaaccccaaccagaagaucaucaccaucggcagcaucagcaucgccaucggcaucaucagccugaugcugcagaucggcaacaucaucagcgugugggccagccacagcauccagaccggcagccagaaccacaccggcaucugcaaccagagaaucaucaccuacgagaacagcaccugggugaaccacaccuacgugagcaucaacaacaccaacgugguggccggcaaggacaagaccagcgugacccuggccggcaacagcagccugugcagcaucagcggcuggagcaucuacaccaaggacaacagcaucagaaucggcagcaagggcgacguguucgugaucagagagcccuucaucagcugcagccaccuggagugcagaaccuucuuccugacccagggcgcccugcugaacgacaagcacagcaacggcaccgugaaggacagaagccccuacagagcccugaugagcugcccccugggcgaggcccccagccccuacaacagcaaguucgagagcguggccuggagcgccagcgccugccacgacggcaugggcuggcugaccaucggcaucagcggccccgacaacggcgccguggccgugcugaaguacaacggcaucaucaccgagaccaucaagagcuggaagaagagaauccugagaacccaggagagcgagugcgugugcgugaacggcagcugcuucaccaucaugaccgacggccccagcaacggcgccgccagcuacaagaucuucaagaucgagaagggcaaggugaccaagagcaucgagcugaacgcccccaacuuccacuacgaggagugcagcugcuaccccgacaccggcaccgugaugugcgugugcagagacaacuggcacggcagcaacagacccugggugagcuucaaccagaaccuggacuaccagaucggcuacaucugcagcggcguguucggcgacaaccccagacccaaggacggcaagggcagcugcaaccccgugaccguggacggcgccgacggcgugaagggcuucagcuacaaguacggcaacggcguguggaucggcagaaccaagagcaacagacugagaaagggcuucgagaugaucugggaccccaacggcuggaccgacaccgacagcgacuucagcgugaagcaggacgugguggccaucaccgacuggagcggcuacagcggcagcuucgugcagcaccccgagcugaccggccuggacugcaucagacccugcuucuggguggagcuggugagaggccugcccagagagaacaccaccaucuggaccagcggcagcagcaucagcuucugcggcguggacagcgacaccgccaacuggagcuggcccgacggcgccgagcugcccuucaccaucgacaaguga

SEQ ID NO: 176435 - RNA, 1413 nt, Artificial Sequence; identical to SEQ ID NO: 176116
  derived and/or modified CDS sequence (opt4) from neuraminidase__InfluenzaA__ABY51251

SEQ ID NO: 176436 - RNA, 1413 nt, Artificial Sequence
  derived and/or modified CDS sequence (opt4) from neuraminidase__InfluenzaA__ABY51262
augaaccccaaccagaagaucaucaccaucggcagcaucagcaucgccaucggcaucaucagccugaugcugcagaucggcaacaucaucagcaucugggccagccacagcauccagaccggcagccagaaccacaccggcaucugcaaccagagaaucaucaccuacgagaacagcaccugggugaaccacaccuacgugagcaucaacaacaccaacgugguggccggcaaggacaagaccagcgugacccuggccggcaacagcagccugugcagcaucagcggcugggccaucuacaccaaggacaacagcaucagaaucggcagcaagggcgacguguucgugaucagagagcccuucaucagcugcagccaccuggagugcagaaccuucuuccugacccagggcgcccugcugaacgacaagcacagcaacggcaccgugaaggacagaagccccuacagagcccugaugagcugcccccugggcgaggcccccagccccuacaacagcaaguucgagagcguggccuggagcgccagcgccugccacgacggcaugggcuggcugaccaucggcaucagcggccccgacaacggcgccguggccgugcugaaguacaacggcaucaucaccgagaccaucaagagcuggaagaagagaauccugagaacccaggagagcgagugcgugugcgugaacggcagcugcuucaccaucaugaccgacggccccagcaacggcgccgccagcuacaagaucuucaagaucgagaagggcaaggugaccaagagcaucgagcugaacgcccccaacuuccacuacgaggagugcagcugcuaccccgacaccggcaccgugaugugcgugugcagagacaacuggcacggcagcaacagacccugggugagcuucaaccagaaccuggacuaccagaucggcuacaucugcagcggcguguucggcgacaaccccagacccaaggacggcaagggcagcugcaaccccgugaccguggacggcgccgacggcgugaagggcuucagcuacaaguacggcaacggcguguggaucggcagaaccaagagcaacagacugagaaagggcuucgagaugaucugggaccccaacggcuggaccgacaccgacagcgacuucagcgugaagcaggacgugguggccaucaccgacuggagcggcuacagcggcagcuucgugcagcaccccgagcugaccggccuggacugcaucagacccugcuucuggguggagcuggugagaggccugcccagagagaacgccaccaucuggaccagcggcagcagcaucagcuucugcggcguggacagcgacaccgccaacuggagcuggcccgacggcgccgagcugcccuucaccaucgacaaguga

SEQ ID NO: 176437 - RNA, 1410 nt, Artificial Sequence; identical to SEQ ID NO: 175944
  derived and/or modified CDS sequence (opt4) from neuraminidase__InfluenzaA__ABY51273

SEQ ID NO: 176438 - RNA, 1350 nt, Artificial Sequence
  derived and/or modified CDS sequence (opt4) from neuraminidase__InfluenzaA__ABY76285
augaaccccaaccagaagaucaucaccaucggcagcaucugcauggugaucggcaucgugagccugaugcugcagaucggcaacaugaucagcaucugggugagccacagcauccagaccggcaaccagagacaggccgagcccaucagcaacaccaaguuccugaccgagaaggccguggccagcgugacccuggccggcaacagcagccugugccccaucagcggcugggccguguacagcaaggacaacagcaucagaaucggcagcaagggcgacguguucgugaucagagagcccuucaucagcugcagccaccuggagugcagaaccuucuuccugacccagggcgcccugcugaacgacaagcacagcaacggcaccgugaaggacagaagcccccacagaacccugaugagcugccccgugggcgaggcccccagccccuacaacagcagauucgagagcguggccuggagcgccagcgccugccacgacggcaccagcuggcugaccaucggcaucagcggccccgacaacggcgccguggccgugcugaaguacaacggcaucaucaccgacaccaucaagagcuggagaaacaacauccugagaacccaggagagcgagugcgccugcgugaacggcagcugcuucaccgugaugaccgacggccccagcaacggccaggccagcuacaagaucuucaagauggagaagggcaagguggugaagagcguggagcuggacgcccccaacuaccacuacgaggagugcagcugcuaccccgacgccggcgagaucaccugcgugugcagagacaacuggcacggcagcaacagacccugggugagcuucaaccagaaccuggaguaccagaucggcuacaucugcagcggcguguucggcgacaaccccagacccaacgacggcaccggcagcugcggccccgugagccccaacggcgccuacggcgugaagggcuucagcuucaaguacggcaacggcguguggaucggcagaaccaagagcaccaacagcagaagcggcuucgagaugaucugggaccccaacggcuggaccggcaccgacagcagcuucagcgugaagcaggacaucguggccaucaccgacuggagcggcuacagcggcagcuucgugcagcaccccgagcugaccggccuggacugcaucagacccugcuucuggguggagcugaucagaggcagacccaaggagagcaccaucuggaccagcggcagcagcaucagcuucugcggcgugaacagcgacaccgugagcuggagcuggcccgacggcgccgagcugcccuucaccaucgacaaguga

SEQ ID NO: 176439 - RNA, 1413 nt, Artificial Sequence
  derived and/or modified CDS sequence (opt4) from neuraminidase__InfluenzaA__ABY81352
augaaccccaaccagaagaucaucaccaucggcagcaucugcauggccaucggcaucaucagccugauccugcagaucggcagcaucaucagcaucugggugagccacagcauccagaccggcagccagaaccacaccggcaucugcaaccagagaaucaucaccuacgagaacagcaccugggugaaccagaccuacgugaacaucagcaacaccaacgugguggccggcaaggacaccaccagcaugacccuggccggcaacagcagccugugccccaucagaggcugggccaucuacagcaaggacaacagcaucagaaucggcagcaagggcgacguguucgugaucagagagcccuucaucagcugcagccaccuggagugcagaaccuucuuccugacccagggcgcccugcugaacgacaagcacagcaacggcaccgugaaggacagaagccccuacagagcccugaugagcugccccaucggcgaggcccccagccccuacaacagcagauucgagagcguggccuggagcgccagcgccugccacgacggcaugggcuggcugaccaucggcaucagcggccccgacgacggcgccguggccgugcugaaguacaacggcaucaucaccgagaccaucaagagcuggagaaagcagauccugagaacccaggagagcgagugcgugugcgugaacggcagcugcuucaccaucaugaccgacggccccagcgacggccaggccagcuacagaaucuucaagaucgagaagggcaagaucaccaagagcaucgagcuggacgcccccaacagccacuacgaggagugcagcugcuaccccgacaccggcaccgugaugugcgugugcagagacaacuggcacggcagcaacagacccugggugagcuucaaccagaaccuggacuaccagaucggcuacaucugcagcggcguguucggcgacaaccccagacccaaggacggcaagggcagcugcgaccccgugaacguggacggcgccgacggcgugaagggcuucagcuacagauacggcaacggcguguggaucggcagaaccaagagcaacagcagcagaaagggcuucgagaugaucugggaccccaacggcuggaccgacaccgacagcaacuuccuggugaagcaggacgugguggccaugaccgacuggagcggcuacagcggcagcuucgugcagcaccccgagcugaccggccuggacugcaugagacccugcuucuggguggagcugaucagaggcagacccagagagaagaccaccaucuggaccagcggcagcagcaucagcuucugcggcgugaacagcgacaccgugaacuggagcuggcccgacggcgccgagcugcccuucaccaucgacaaguga

SEQ ID NO: 176440 - RNA, 1413 nt, Artificial Sequence
  derived and/or modified CDS sequence (opt4) from neuraminidase__InfluenzaA__ABY81363
augaaccccaaccagaagaucaucaccaucggcagcaucagcaucgccaucggcaucaucagccugaugcugcagaucggcaacaucaucagcaucugggccagccacagcauccagaucggcagccagaaccacaccggcaucugcaaccagagaaucaucaccuacgagaacagcaccugggugaaccacaccuacgugagcaucaacaacaccaacgugguggccggcaaggacaagaccagcgugacccuggccggcaacagcagccugugcagcaucagcggcugggccaucuacaccaaggacaacagcaucagaaucggcagcaagggcgacguguucgugaucagagagcccuucaucagcugcagccaccuggagugcagaaccuucuuccugacccagggcgcccugcugaacgacaagcacagcaacggcaccgugaaggacagaagccccuacagagcccugaugagcugcccccugggcgaggcccccagccccuacaacagcaaguucgagagcguggccuggagcgccagcgccugccacgacggcaugggcuggcugaccaucggcaucagcggccccgacaacggcgccguggccgugcugaaguacaacggcaucaucaccgagaccaucaagagcuggaagaagagaauccugagaacccaggagagcgagugcgugugcgugaacggcagcugcuucaccaucaugaccgacggccccagcaacggcgccgccagcuacaagaucuucaagaucgagaagggcaaggugaccaagagcaucgagcugaacgcccccaacuuccacuacgaggagugcagcugcuaccccgacaccggcaccgugaugugcgugugcagagacaacuggcacggcagcaacagacccugggugagcuucaaccagaaccuggacuaccagaucggcuacaucugcagcggcguguucggcgacaaccccagacccaaggacggcaagggcagcugcaaccccgugaccguggacggcgccgacggcgugaagggcuucagcuacaaguacggcaacggcguguggaucggcagaaccaagagcaacagacugagaaagggcuucgagaugaucugggaccccaacggcuggaccgacaccgacagcgacuucagcgugaagcaggacgugguggccaucaccgacuggagcggcuacagcggcagcuucgugcagcaccccgagcugaccggccuggacugcaucagacccugcuucuggguggagcuggugagaggccugcccagagagaacaccaccaucuggaccagcggcagcagcaucagcuucugcggcguggacagcgacaccgccaacuggagcuggcccgacggcgccgagcugcccuucaccaucgacaaguga

SEQ ID NO: 176441 - RNA, 1410 nt, Artificial Sequence; identical to SEQ ID NO: 176126
  derived and/or modified CDS sequence (opt4) from neuraminidase__InfluenzaA__ABY81374

SEQ ID NO: 176442 - RNA, 1413 nt, Artificial Sequence; identical to SEQ ID NO: 176090
  derived and/or modified CDS sequence (opt4) from neuraminidase__InfluenzaA__ABY81385

SEQ ID NO: 176443 - RNA, 1413 nt, Artificial Sequence
  derived and/or modified CDS sequence (opt4) from neuraminidase__InfluenzaA__ABY81407
augaaccccaaccagaagaucaucaccaucggcagcaucagcaucgccaucggcaccaucagccugaugcugcagaucggcaacaucaucagcaucugggccagccacagcauccagaccggcagccagaaccacaccggcaucugcaaccagagaaucaucaccuacgagaacagcaccugggugaaccacaccuacgugagcaucaacaacaccaacgugguggccggcaaggacaagaccagcgugacccuggccggcaacagcagccugugcagcaucagcggcugggccaucuacaccaaggacaacagcaucagaaucggcagcaagggcgacguguucgugaucagagagcccuucaucagcugcagccaccuggagugcagaaccuucuuccugacccagggcgcccugcugaacgacaagcacagcaacggcaccgugaaggacagaagccccuacagagcccugaugagcugcccccugggcgaggcccccagccccuacaacagcaaguucgagagcguggccuggagcgccagcgccugccacgacggcaugggcuggcugaccaucggcaucagcggccccgacaacggcgccguggccgugcugaaguacaacggcaucaucaccgagaccaucaagagcuggaagaagagaauccugagaacccaggagagcgagugcgugugcgugaacggcagcugcuucaccaucaugaccgacggccccagcaacggcgccgccagcuacaagaucuucaagaucgagaagggcaaggugaccaagagcaucgagcugaacgcccccaacuuccacuacgaggagugcagcugcuaccccgacaccggcaccgugaugugcgugugcagagacaacuggcacggcagcaacagacccugggugagcuucaaccagaaccuggacuaccagaucggcuacaucugcagcggcguguucggcgacaaccccagacccaaggacggcaagggcagcugcaaccccgugaccguggacggcgccgacggcgugaagggcuucagcuacaaguacggcaacggcguguggaucggcagaaccaagagcaacagacugagaaagggcuucgagaugaucugggaccccaacggcuggaccgacaccgacagcgacuuccuggugaagcaggacgugguggccaucaccgacuggagcggcuacagcggcagcuucgugcagcaccccgagcugaccggccuggacugcaucagacccugcuucuggguggagcuggugagaggccugcccagagagaacaccaccaucuggaccagcggcagcagcaucagcuucugcggcguggacagcgacaccgccaacuggagcuggcccgacggcgccgagcugcccuucaccaucgacaaguga

SEQ ID NO: 176444 - RNA, 1410 nt, Artificial Sequence; identical to SEQ ID NO: 176126
  derived and/or modified CDS sequence (opt4) from neuraminidase__InfluenzaA__ACA24505

SEQ ID NO: 176445 - RNA, 1413 nt, Artificial Sequence; identical to SEQ ID NO: 176090
  derived and/or modified CDS sequence (opt4) from neuraminidase__InfluenzaA__ACA24516

SEQ ID NO: 176446 - RNA, 1413 nt, Artificial Sequence; identical to SEQ ID NO: 176090
  derived and/or modified CDS sequence (opt4) from neuraminidase__InfluenzaA__ACA24527

SEQ ID NO: 176447 - RNA, 1410 nt, Artificial Sequence
  derived and/or modified CDS sequence (opt4) from neuraminidase__InfluenzaA__ACA24692
augaaccccaaccagaagaucaucaccaucggcagcgugagccugaccaucagcaccaucugcuucuucaugcagaucgccauccugaucaccaccgugacccugcacuucaagcaguacgaguucagccccccccccaacaaccaggugaugcugugcgagcccaccaucaucgagagaaacaucaccgagaucguguaccugaccaacaccaccaucgagaaggagaucugccccaagcuggccgaguacagaaacuggagcaagccccagugcgacaucaccggcuucgcccccuucagcaaggacaacagcaucagacugagcgccggcggcgacaucugggugaccagagagcccuacgugagcugcgaccccgacaagugcuaccaguucgcccugggccagggcaccacccugaacaacgugcacagcaacgacaccgugcacgacagaacccccuacagaacccugcugaugaacgagcugggcgugcccuuccaccugggcaccaagcaggugugcaucgccuggagcagcagcagcugccacgacggcaaggccuggcugcacgugugcgugaccggcgacgacaagaacgccaccgccagcuucaucuacaacggcagacugguggacagcaucgugagcuggagcaaggagauccugagaacccaggagagcgagugcgugugcaucaacggcaccugcaccguggugaugaccgacggcagcgccagcggcaaggccgacaccaagauccuguucaucgaggagggcaagaucgugcacaccagcacccugagcggcagcgcccagcacguggaggagugcagcugcuaccccagauaccccggcgugagaugcgugugcagagacaacuggaagggcagcaacagacccaucguggacaucaacaucaaggacuacagcaucgugagcaaguacgugugcagcggccuggugggcgacacccccagaaagaacgacagcagcagcagcagccacugccuggaccccaacaacgaggagggcggccacggcgugaagggcugggccuucgacgacggcaacgacguguggaugggcagaaccaucagcgagaagagcagaagcggcuacgagaccuucaaggugaucgagggcuggagcaaccccaacagcaagcugcagaucaacagacaggugaucguggacagaggcaacagaagcggcuacagcggcaucuucagcguggagggcaagagcugcaucaacagaugcuucuacguggagcugaucagaggcagaaacgaggagaccgaggugcuguggaccagcaacagcaucgugguguucugcggcaccagcggcaccuacggcaccggcagcuggcccgacggcgccgacaucaaccugaugcccaucuga

SEQ ID NO: 176448 - RNA, 1410 nt, Artificial Sequence
  derived and/or modified CDS sequence (opt4) from neuraminidase__InfluenzaA__ACA24703
augaaccccaaccagaagaucaucaccaucggcagcgugagccugaccaucagcaccaucugcuucuucaugcagaucgccauccugaucaccaccgugacccugcacuucaagcaguacgaguucagcagcccccccaacaaccaggugaugcugugcgagcccaccaucaucgagagaaacaucaccgagaucguguaccugaccaacaucaccaucgagaaggagaccugccccaagcuggccgaguacagaaacuggagcaagccccagugcgacaucaccggcuucgcccccuucagcaaggacaacagcaucagacugagcgccggcggcgacaucugggugaccagagagcccuacgugagcugcgaccccgacaagugcuaccaguucgcccugggccagggcaccacccugaacaacgugcacagcaacgacaccgugcacgacagaacccccuacagaacccugcugaugaacgagcugggcgugcccuuccaccugggcaccaagcaggugugcaucgccuggagcagcagcagcugccacgacggcaaggccuggcugcacgugugcgugaccggcgacgacaagaacgccaccgccagcuucaucuacaacggcagacugguggacagcaucgugagcuggagcaaggagauccugagaacccaggagagcgagugcgugugcaucaacggcaccugcaccguggugaugaccgacggcagcgccagcggcaacgccgacaccaagauccuguucaucgaggagggcaagaucgugcacaccagcacccugagcggcagcgcccagcacguggaggagugcagcugcuaccccagauaccccggcgugagaugcgugugcagagacaacuggaagggcagcaacagacccaucguggacaucaacaucaaggacuacagcaucgugagcagauacgugugcagcggccuggugggcgacacccccagaaagaacgacagcagcagcagcagccacugccuggaccccaacaacgaggagggcggccacggcgugaagggcugggccuucgacgacggcaacgacguguggaugggcagaaccaucagcgagaagagcagaagcggcuacgagaccuucaaggugaucgagggcuggagcaaccccaacagcaagcugcagaucaacagacaggugaucguggacagaggcaacagaagcggcuacagcggcaucuucagcguggagggcaagagcugcaucaacagaugcuucuacguggagcugaucagaggcagaaaggaggagaccgaggugcuguggaccagcaacagcaucgugguguucugcggcaccagcggcaccuacggcaccggcagcuggcccgacggcgccgacaucaaccugaugcccaucuga

SEQ ID NO: 176449 - RNA, 1413 nt, Artificial Sequence
  derived and/or modified CDS sequence (opt4) from neuraminidase__InfluenzaA__ACA33539
augaaccccuaccagaagaucaucaccaucggcagcaucagcaucgccaucggcaucaucagccugaugcugcagaucggcaacaucaucagcaucugggccagccacagcauccagaccggcagccagaaccacaccggcaucugcaaccagagaaucaucaccuacgagaacagcaccugggugaaccacaccuacgugagcaucaacaacaccaacgugguggccggcaaggacaagaccagcgugacccuggccggcaacagcagccugugcagcaucagcggcugggccaucuacaccaaggacaacagcaucagaaucggcagcaagggcgacguguucgugaucagagagcccuucaucagcugcagccaccuggagugcagaaccuucuuccugacccagggcgcccugcugaacgacaagcacagcaacggcaccgugaaggacagaagccccuacagagcccugaugagcugcccccugggcgaggcccccagccccuacaacagcaaguucgagagcguggccuggagcgccagcgccugccacgacggcaugggcuggcugaccaucggcaucagcggccccgacaacggcgccguggccgugcugaaguacaacggcaucaucaccgagaccaucaagagcuggaagaagagaauccugagaacccaggagagcgagugcgugugcgugaacggcagcugcuucaccaucaugaccgacggccccagcaacggcgccgccagcuacaagaucuucaagaucgagaagggcaaggugaccaagagcaucgagcugaacgcccccaacuucuacuacgaggagugcagcugcuaccccgacaccggcaccgugaugugcgugugcagagacaacuggcacggcagcaacagacccugggugagcuucaaccagaaccuggacuaccagaucggcuacaucugcagcggcguguucggcgacaaccccagacccaaggacggcaagggcagcugcaaccccgugaccguggacggcgccgacggcgugaagggcuucagcuacaaguacggcaacggcguguggaucggcagaaccaagagcaacagacugagaaagggcuucgagaugaucugggaccccaacggcuggaccgacaccgacagcgacuucagcgugaagcaggacgugguggccaucaccgacuggagcggcuacagcggcagcuucgugcagcaccccgagcugaccggccuggacugcaucagacccugcuucuggguggagcuggugagaggccugcccagagagaacaccaccaucuggaccagcggcagcagcaucagcuucugcggcguggacagcgacaccgccaacuggagcuggcccgacggcgccgagcugcccuucaccaucgacaaguga

SEQ ID NO: 176450 - RNA, 1413 nt, Artificial Sequence
  derived and/or modified CDS sequence (opt4) from neuraminidase__InfluenzaA__ACA33540
augaaccccaaccagaagaucaucaccaucggcagcaucagcaucgccaucggcaucaucagccugaugcugcagaucggcaacaucaucagcaucugggccagccacagcauccagaccggcagccagaaccacaccggcaucugcaaccagagaaucaucaccuacgagaacagcaccugggugaaccacaccuacgugagcaucaacaacaccaacgugguggccggcaaggacaagaccagcgugacccuggccggcaacagcagccugugcagcaucagcggcugggccaucuacaccaaggacaacagcaucagaaucggcagcaagggcgacguguucgugaucagagagcccuucaucagcugcagccaccuggagugcagaaccuucuuccugacccagggcgcccugcugaacgacaagcacagcaacggcaccgugaaggacagaagccccuacagagcccugaugagcugcccccugggcgaggcccccagccccuacaacagcaaguucgagagcguggccuggagcgccagcgccugccacgacggcaugggcuggcugaccaucggcaucagcggccccgacaacggcgccguggccgugcugaaguacaacggcaucaucaccgagaccaucaagagcuggaagaagagaauccugagaacccaggagagcgagugcgugugcgugaacggcagcugcuucaccaucaugaccgacggccccagcaacggcgccgccagcuacaagaucuucaagaucgagaagggcaaggugaccaagagcaucgagcugaacgcccccaacuucuacuacgaggagugcagcugcuaccccgacaccggcaccgugaugugcgugugcagagacaacuggcacggcagcaacagacccugggugagcuucaaccagaaccuggacuaccagaucggcuacaucugcagcggcguguucggcgacaaccccagacccaaggacggcaagggcagcugcaaccccgugaccguggacggcgccgacggcgugaagggcuucagcuacaaguacggcaacggcguguggaucggcagaaccaagagcaacagacugagaaagggcuucgagaugaucugggaccccaacggcuggaccgacaccgacagcgacuucagcgugaagcaggacgugguggccaucaccgacuggagcggcuacagcggcagcuucgugcagcaccccgagcugaccggccuggacugcaucagacccugcuucuggguggagcuggugagaggccugcccagagagaacaccaccaucuggaccagcggcagcagcaucagcuucugcggcguggacagcgacaccgccaacuggagcuggcccgacggcgccgagcugcccuucaccaucgacaaguga

SEQ ID NO: 176451 - RNA, 1413 nt, Artificial Sequence
  derived and/or modified CDS sequence (opt4) from neuraminidase__InfluenzaA__ACA33582
augaaccccaaccagaagaucaucaccaucggcagcaucagcaucgccaucggcaucaucagccugaugcugcagaucggcaacaucaucagcaucugggccagccacagcauccagaccggcagccagaaccacaccggcaucugcaaccagagaaucaucaccuacgagaacagcaccugggugaaccacaccuacgugagcaucaacaacaccaacgugguggccggcaaggacaagaccagcgugacccuggccggcaacagcagccugugcagcaucagcggcugggccaucuacaccaaggacaacagcaucagaaucggcagcaagggcgacguguucgugaucagagagcccuucaucagcugcagccaccuggagugcagaaccuucuuccugacccagggcgcccugcugaacgacaagcacagcaacggcaccgugaaggacagaagccccuacagagcccugaugagcugcccccugggcgaggcccccagccccuacaacagcaaguucgagagcguggccuggagcgccagcgccugccacgacggcaugggcuggcugaccaucggcaucagcggccccgacaacggcgccguggccgugcugaaguacaacggcaucaucaccgagaccaucaagagcuggaagaagagaauccugagaacccaggagagcgagugcgugugcgugaacggcagcugcuucaccaucaugaccgacggccccagcaacggcgccgccagcuacaagaucuucaagaucgagaagggcaaggugaccaagagcaucgagcugaacgcccccaacuucuacuacgaggagugcagcugcuaccccgacaccggcaccgugaugugcgugugcagagacaacuggcacggcagcaacagacccugggugagcuucaaccagaaccuggacuaccagaucggcuacaucugcagcggcguguucggcgacaaccccagacccaaggacggcaagggcagcugcaaccccaugaccguggacggcgccgacggcgugaagggcuucagcuacaaguacggcaacggcguguggaucggcagaaccaagagcaacagacugagaaagggcuucgagaugaucugggaccccaacggcuggaccgacaccgacagcgacuucagcgugaagcaggacgugguggccaucaccgacuggagcggcuacagcggcagcuucgugcagcaccccgagcugaccggccuggacugcaucagacccugcuucuggguggagcuggugagaggccugcccagagagaacaccaccaucuggaccagcggcagcagcaucagcuucugcggcguggacagcgacaccgccaacuggagcuggcccgacggcgccgagcugcccuucaccaucgacaaguga

SEQ ID NO: 176452 - RNA, 1413 nt, Artificial Sequence
  derived and/or modified CDS sequence (opt4) from neuraminidase__InfluenzaA__ACA33622
augaaccccaaccagaagaucaucaccaucggcagcaucagcaucgccaucggcaucaucagccugaugcugcagaucggcaacaucaucagcaucugggccagccacagcauccagaccggcagccagaaccacaccggcaucugcaaccagagaaucaucaccuacgagaacagcaccugggugaaccacaccuacgugaacaucaacaacaccaacgugguggccggcaaggacaagaccagcgugacccuggccggcaacagcagccugugcagcaucagcggcugggccaucuacaccaaggacaacagcaucagaaucggcagcaagggcgacguguucgugaucagagagcccuucaucagcugcagccaccuggagugcagaaccuucuuccugacccagggcgcccugcugaacgacaagcacagcaacggcaccgugaaggacagaagccccuacagagcccugaugagcugcccccugggcgaggcccccagccccuacaacagcaaguucgagagcguggccuggagcgccagcgccugccacgacggcaugggcuggcugaccaucggcaucagcggccccgacaacggcgccguggccgugcugaaguacaacggcaucaucaccgagaccaucaagagcuggaagaagagaauccugagaacccaggagagcgagugcgugugcgugaacggcagcugcuucaccaucaugaccgacggccccagcaacggcgccgccagcuacaagaucuucaagaucgagaagggcaaggugaccaagagcaucgagcugaacgcccccaacuucuacuacgaggagugcagcugcuaccccgacaccggcaccgugaugugcgugugcagagacaacuggcacggcagcaacagacccugggugagcuucaaccagaaccuggacuaccagaucggcuacaucugcagcggcguguucggcgacaaccccagacccaaggacggcaagggcagcugcaaccccgugaccguggacggcgccgacggcgugaagggcuucagcuacaaguacggcaacggcguguggaucggcagaaccaagagcaacagacugagaaagggcuucgagaugaucugggaccccaacggcuggaccaacaccgacagcgacuucagcgugaagcaggacgugguggccaucaccgacuggagcggcuacagcggcagcuucgugcagcaccccgagcugaccggccuggacugcaucagacccugcuucuggguggagcuggugagaggccugcccagagagaacaccaccaucuggaccagcggcagcagcaucagcuucugcggcguggacagcgacaccgccaacuggagcuggcccgacggcgccgagcugcccuucaccaucgacaaguga

SEQ ID NO: 176453 - RNA, 1413 nt, Artificial Sequence; identical to SEQ ID NO: 176129
  derived and/or modified CDS sequence (opt4) from neuraminidase__InfluenzaA__ACA96522

SEQ ID NO: 176454 - RNA, 1362 nt, Artificial Sequence
  derived and/or modified CDS sequence (opt4) from neuraminidase__InfluenzaA__ACC55274
augaaccccaaccagaagaucaucaccaucggcagcgugagccugaccaucgccaccgugugcuuccugaugcagaucgccauccuggccaugaccgugacccugcacuucagacagaacgagugcagcaucagcgccaacagccagguggugcccugcgagcccaccaccgagaaggaggugugcagcaaggugguggacuacagaagcuggagcaagccccagugccagaucaccggcuucgcccccuucagcaaggacaacagcaucagacugagcgccggcggcgacaucuggaucaccagagagcccuacgugagcugcgacaccagcaagugcuaccaguucgcccugggccagggcaccacccuggacaacgagcacagcaacggcaccauccacgacagaaucccccacagaacccugcugaugaacgagcugggcgugcccuuccaccugggcaccagacaggugugcaucgccuggagcagcagcagcugccacgacggcaaggccuggcugcacgugugcgugaccggcgacgacagaaacgccaccgccagcuucaucuacaacggcaugcugguggacagcaucggcagcuggagccagaacauccugagaacccaggagagcgagugcgugugcaucaacggcagcugcaccguggugaugaccgacggcagcgccagcggcaaggccgacaccagaauccuguucgugaaggagggcaagaucgugcacaucagcccccugagcggcagcgcccagcacaucgaggagugcagcugcuaccccagauaccccaacgugagaugcgugugcagagacaacuggaagggcagcaacagacccgugaucgacaucaacaugaccgacuacagcaucgacagcagcuacgugugcagcggccuggugggcgacacccccagaaacgaggacagcagcagcagcagcaacugcagagaccccaacgaggagagaggcaaccccggcgugaagggcugggccuucgacagcggcgacgacguguggaugggcagaaccaucagcagagacagcagaagcggcuacgagaccuucagagugaucggcggcuggaccaccgccaacagcaagagccagaccaacagacaggugaucguggacaacaacaacuggagcggcuacagcggcaucuucagcguggagcacaagagcugcaucaacagaugcuucuacguggagcugaucagaggcagacccaaggagaccagagugugguggaccagcaacagcaucgugguguucugcggcaccagcggcaccuacggcaccggcagcuggcccgacggcgccaacaucaacuucaugcccaucuga

SEQ ID NO: 176455 - RNA, 1413 nt, Artificial Sequence; identical to SEQ ID NO: 176389
  derived and/or modified CDS sequence (opt4) from neuraminidase__InfluenzaA__ACC61967

SEQ ID NO: 176456 - RNA, 1413 nt, Artificial Sequence
  derived and/or modified CDS sequence (opt4) from neuraminidase__InfluenzaA__ACD11077
augaaccccaaccagaagaucaucaccaucggcagcaucugcauggccaucggcaucaucagccugauccugcagaucggcaacaucaucagcaucugggugagccacagcauccagaccggcagccagaaccacaccggcaucugcaaccagagaaucaucaccuacgagaacagcaccugggugaaccagaccuacgugaacaucagcaacaccaacgugguggccggcaaggugaccaccagcaugacccuggccggcaacagcagccugugccccaucagaggcugggccaucuacagcaaggacaacagcaucagaaucggcagcaagggcgacguguucgugaucagagagcccuucaucagcugcagccaccuggagugcagaaccuucuuccugacccagggcgcccugcugaacgacaagcacagcaacggcaccgugaaggacagaagccccuacagagcccugaugagcugccccaucggcgaggcccccagccccuacaacagcagauucgagagcguggccuggagcgccagcgccugccacgacggcaugggcuggcugaccaucggcaucagcggccccgacgacggcgccguggccgugcugaaguacaacggcaucaucaccgagaccaucaagagcuggagaaagcagauccugagaacccaggagagcgagugcgugugcgugaacggcagcugcuucaccaucaugaccgacggccccagcgacggccccgccagcuacagaaucuucaagaucgagaagggcaagaucaccaagagcaucgagcuggacgcccccaacagccacuacgaggagugcagcugcuaccccgacaccggcaccgugaugugcgugugcagagacaacuggcacggcagcaacagacccugggugagcuucaaccagaaccuggacuaccagaucggcuacaucugcagcggcguguucggcgacaaccccagacccaaggacggcaagggcagcugcgaccccgugaacguggacggcgccgacggcgugaagggcuucagcuacagauacggcaacggcguguggaucggcagaaccaagagcaacaacagcagaaagggcuucgagaugaucugggaccccaacggcuggaccgacaccgacagcaacuuccuggugaagcaggacgugguggccaugaccgacuggagcggcuacagcggcagcuucgugcagcaccccgagcugaccggccuggacugcaugagacccugcuucuggguggagcugaucagaggcagacccagagagaagaccaccaucuggaccagcggcagcagcaucagcuucugcggcgugaacagcgacaccgugaacuggagcuggcccgacggcgccgagcugccccugaccaucgacaaguga

SEQ ID NO: 176457 - RNA, 1413 nt, Artificial Sequence
  derived and/or modified CDS sequence (opt4) from neuraminidase__InfluenzaA__ACD11078
augaaccccaaccagaagaucaucaccaucggcagcaucugcauggccaucggcaucaucagccugauccugcagaucggcaacaucaucagcaucugggugagccacagcauccagaccggcagccagaaccacaccggcaucugcaaccagagaaucaucaccuacgagaacagcaccugggugaaccagaccuacgugaacaucagcaacaccaacgugguggccggcaaggacaccaccagcaugacccuggccggcaacagcagccugugccccaucagaggcugggccaucuacagcaaggacaacagcaucagaaucggcagcaagggcgacguguucgugaucagagagcccuucaucagcugcagccaccuggagugcagaaccuucuuccugacccagggcgcccugcugaacgacaagcacagcaacggcaccgugaaggacagaagccccuacagagcccugaugagcugccccaucggcgaggcccccagccccuacaacagcagauucgagagcguggccuggagcgccagcgccugccacgacggcaugggcuggcugaccaucggcaucagcggccccgacgacggcgccguggccgugcugaaguacaacggcaucaucaccgagaccaucaagagcuggagaaagcagauccugagaacccaggagagcgagugcgugugcgugaacggcagcugcuucaccaucaugaccgacggccccagcgacggccccgccagcuacagaaucuucaagaucgagaagggcaagaucaccaagagcaucgagcuggacgcccccaacagccacuacgaggagugcagcugcuaccccgacaccggcaccgugaugugcgugugcagagacaacuggcacggcagcaacagacccugggugagcuucaaccagaaccuggacuaccagaucggcuacaucugcagcggcguguucggcgacaaccccagacccaaggacggcaagggcagcugcgaccccgugaacguggacggcgccgacggcgugaagggcuucagcuacagauacggcaacggcguguggaucggcagaaccaagagcaacagcagcagaaagggcuucgagaugaucugggaccccaacggcuggaccgacaccgacagcaacuuccuggugaagcaggacgugguggccaugaccgacuggagcggcuacagcggcagcuucgugcagcaccccgagcugaccggccuggacugcaugagacccugcuucuggguggagcugaucagaggcagacccagagagaagaccaccaucuggaccagcggcagcagcaucagcuucugcggcgugaacagcgacaccgugaacuggagcuggcccgacggcgccgagcugccccugaccaucgacaaguga

SEQ ID NO: 176458 - RNA, 1413 nt, Artificial Sequence
  derived and/or modified CDS sequence (opt4) from neuraminidase__InfluenzaA__ACD11079
augaaccccaaccagaagaucaucaccaucggcagcaucugcauggccaucggcaucaucagccugauccugcagaucggcaacaucaucagcaucugggugagccacagcauccagaccggcagccagaaccacaccggcaucugcaaccagagaaucaucaccuacgagaacagcaccugggugaaccagaccuacgugaacaucagcaacaccaacgugguggccggcaaggacaccaccagcaugacccuggccggcaacagcagccugugccccaucagaggcugggccaucuacagcaaggacaacagcaucagaaucggcagcaagggcgacguguucgugaucagagagcccuucaucagcugcagccaccuggagugcagaaccuucuuccugacccagggcgcccugcugaacgacaagcacagcaacggcaccgugaaggacagaagccccuacagagcccugaugagcugccccaucggcgaggcccccagccccuacaacagcagauucgagagcguggccuggagcgccagcgccugccacgacggcaugggcuggcugaccaucggcaucagcggccccgacgacggcgccguggccgugaucaaguacaacggcaucaucaccgagaccaucaagagcuggagaaagcagauccugagaacccaggagagcgagugcgugugcgugaacggcagcugcuucaccaucaugaccgacggccccagcgacggccccgccagcuacagaaucuucaagaucgagaagggcaagaucaccaagagcaucgagcuggacgcccccaacagccacuacgaggagugcagcugcuaccccgacaccggcaccgugaugugcgugugcagagacaacuggcacggcagcaacagacccugggugagcuucaaccagaaccuggacuaccagaucggcuacaucugcagcggcguguucggcgacaaccccagacccaaggacggcaagggcagcugcgaccccgugaacguggacggcgccgacggcgugaagggcuucagcuacagauacggcaacggcguguggaucggcagaaccaagagcaacagcagcagaaagggcuucgagaugaucugggaccccaacggcuggaccgacaccgacagcaacuuccuggugaagcaggacgugguggccaugaccgacuggagcggcuacagcggcagcuucgugcagcaccccgagcugaccggccuggacugcaugagacccugcuucuggguggagcugaucagaggcagacccagagagaagaccaccaucuggaccagcggcagcagcaucagcuucugcggcgugaacagcgacaccgugaacuggagcuggcccgacggcgccgagcugccccugaccaucgacaaguga

SEQ ID NO: 176459 - RNA, 1413 nt, Artificial Sequence; identical to SEQ ID NO: 176090
  derived and/or modified CDS sequence (opt4) from neuraminidase__InfluenzaA__ACD56116

SEQ ID NO: 176460 - RNA, 1413 nt, Artificial Sequence; identical to SEQ ID NO: 176090
  derived and/or modified CDS sequence (opt4) from neuraminidase__InfluenzaA__ACD56127

SEQ ID NO: 176461 - RNA, 1410 nt, Artificial Sequence; identical to SEQ ID NO: 175944
  derived and/or modified CDS sequence (opt4) from neuraminidase__InfluenzaA__ACD56261

SEQ ID NO: 176462 - RNA, 1410 nt, Artificial Sequence
  derived and/or modified CDS sequence (opt4) from neuraminidase__InfluenzaA__ACD56272
augaaccccaaccagaagaucaucaccaucggcagcgugagccugaccaucagcaccaucugcuucuucaugcagaucgccauccugaucaccaccgugacccugcacuucaagcaguacgaguucagcagcccccccaacaaccaggugaugcugugcgagcccaccaucaucgagagaaacaucaccgagaucguguaccugaccaacaccaccaucgagaaggagaucugccccaagcuggccgaguacagaaacuggagcaagccccagugcgacaucaccggcuucgcccccuucagcaaggacaacagcaucagacugagcgccggcggcgacaucugggugaccagagagcccuacgugagcugcgaccccgacaagugcuaccaguucgcccugggccagggcaccacccugaacaacgugcacagcaacgacaccgugcacgacagaacccccuacagaacccugcugaugaacgagcugggcgugcccuuccaccugggcaccaagcaggugugcaucgccuggagcagcagcagcugccacgacggcaaggccuggcugcacgugugcgugaccggcgacgacaagaacgccaccgccagcuucaucuacaacggcagacugguggacagcaucgugagcuggagcaaggagauccugagaacccaggagagcgagugcgugugcaucaacggcaccugcaccguggugaugaccgacggcagcgccagcggcaaggccgacaccaagauccuguucaucgaggagggcaagaucgugcacaccagcacccugagcggcagcgcccagcacguggaggagugcagcugcuaccccagauaccccggcgugagaugcgugugcagagacaacuggaagggcagcaacagacccaucguggacaucaacaucaaggacuacagcaucgugagcagauacgugugcagcggccuggugggcgacacccccagaaagaacgacagcagcagcagcagccacugccuggaccccaacaacgaggagggcggccacggcgugaagggcugggccuucgacgacggcaacgacguguggaugggcagaaccaucagcgagaagagcagaagcggcuacgagaccuucaaggugaucgagggcuggagcaaccccaacagcaagcugcagaucaacagacaggugaucguggacagaggcaacagaagcggcuacagcggcaucuucagcguggagggcaagagcugcaucaacagaugcuucuacguggagcugaucagaggcagaaaggaggagaccgaggugcuguggaccagcaacagcaucgugguguucugcggcaccagcggcaccuacggcaccggcagcuggcccgacggcgccgacaucaaccugaugcccaucuga

SEQ ID NO: 176463 - RNA, 1413 nt, Artificial Sequence
  derived and/or modified CDS sequence (opt4) from neuraminidase__InfluenzaA__ACD56283
augaaccccaaccagaagaucaucaccaucggcagcaucagcauggccaucggcaucaucagccugaugcugcagaucggcaacaucaucagcaucugggccagccacagcauccagaccggcagccagaaccacaccggcaucugcaaccagagaaucaucaccuacgagaacagcaccugggugaaccacaccuacgugagcaucaacaacaccaacgugguggccggcaaggacaagaccagcgugacccuggccggcaacagcagccugugcagcaucagcggcugggccaucuacaccaaggacaacagcaucagaaucggcagcaagggcgacguguucgugaucagagagcccuucaucagcugcagccaccuggagugcagaaccuucuuccugacccagggcgcccugcugaacgacaagcacagcaacggcaccgugaaggacagaagccccuacagagcccugaugagcugcccccugggcgaggcccccagccccuacaacagcaaguucgagagcguggccuggagcgccagcgccugccacgacggcaugggcuggcugaccaucggcaucagcggccccgacaacggcgccguggccgugcugaaguacaacggcaucaucaccgagaccaucaagagcuggaagaagagaauccugagaacccaggagagcgagugcgugugcgugaacggcagcugcuucaccaucaugaccgacggccccagcaacggcgccgccagcuacaagaucuucaagaucgagaagggcaaggugaccaagagcaucgagcugaacgcccccaacuuccacuacgaggagugcagcugcuaccccgacaccggcaccgugaugugcgugugcagagacaacuggcacggcagcaacagacccugggugagcuucaaccagaaccuggacuaccagaucggcuacaucugcagcggcguguucggcgacaaccccagacccaaggacggcaagggcagcugcaaccccgugaccguggacggcgccgacggcgugaagggcuucagcuacaaguacggcaacggcguguggaucggcagaaccaagagcaacagacugagaaagggcuucgagaugaucugggaccccaacggcuggaccgacaccgacagcgacuucagcgugaagcaggacgugguggccaucaccgacuggagcggcuacagcggcagcuucgugcagcaccccgagcugaccggccuggacugcaucagacccugcuucuggguggagcuggugagaggccugcccagagagaacaccaccaucuggaccagcggcagcagcaucagcuucugcggcguggacagcgacaccgccaacuggagcuggcccgacggcgccgagcugcccuucaccaucgacaaguga

SEQ ID NO: 176464 - RNA, 1410 nt, Artificial Sequence
  derived and/or modified CDS sequence (opt4) from neuraminidase__InfluenzaA__ACD56305
augaaccccaaccagaagaucaucaccaucggcagcgugagccugaccaucgccaccgugugcuuccugaugcagaucgccauccuggugaccaccgugacccugcacuucaagcagcacgagugcgacagccccgccagcaaccaggugaugcccugcgagcccaucaucaucgagagaaacaucaccgagaucguguaccugaacaacaccaccaucgagaaggagaucugccccgaggugguggaguacagaaacuggagcaagccccagugccagaucaccggcuucgcccccuucagcaaggacaacagcaucagacugagcgccggcggcgacaucugggugaccagagagcccuacgugagcugcgaccccggcaagugcuaccaguucgcccugggccagggcaccacccuggacaacaagcacagcaacgacaccauccacgacagaaucccccacagaacccugcugaugaacgagcugggcgugcccuuccaccugggcaccagacaggugugcguggccuggagcagcagcagcugccacgacggcaaggccuggcugcacgugugcgugaccggcgacgacaagaacgccaccgccagcuucaucuacgacggcagacugguggacagcaucggcagcuggagccagaacauccugagaacccaggagagcgagugcgugugcaucaacggcaccugcaccguggugaugaccgacggcagcgccagcggcagagccgacaccagaauccuguucaucgaggagggcaagaucgugcacaucagcccccugagcggcagcgcccagcacguggaggagugcagcugcuaccccagauaccccgacgugagaugcaucugcagagacaacuggaagggcagcaacagacccgugaucgacaucaacauggaggacuacagcaucgacagcagcuacgugugcagcggccuggugggcgacacccccagaaacgacgacagaagcagcaacagcaacugcagagaccccaacaacgagagaggcaaccccggcgugaagggcugggccuucgacaacggcgacgacguguggaugggcagaaccaucagcaaggaccugagaagcggcuacgagaccuucaaggugaucggcggcuggagcacccccaacagcaagagccagaucaacagacaggugaucguggacagcaacaacuggagcggcuacagcggcaucuucagcguggagggcaagagcugcaucaacagaugcuucuacguggagcugaucagaggcagacagcaggagaccagagugugguggaccagcaacagcaucgugguguucugcggcaccagcggcaccuacggcaccggcagcuggcccgacggcgccaacaucaacuucaugcccaucuga

SEQ ID NO: 176465 - RNA, 1410 nt, Artificial Sequence
  derived and/or modified CDS sequence (opt4) from neuraminidase__InfluenzaA__ACD56316
augaaccccaaccagaagaucaucaccaucggcagcgugagccugaccaucgccaccgugugcuuccugaugcagaucgccauccuggugaccaccgugacccugcacuucaagcagcacgagugcgacagccccgccagcaaccaggugaugcccugcgagcccaucaucaucgagagaaacaucaccgagaucguguaccugaacaacaccaccaucgagaaggagaucugccccgaggugguggaguacagaaacuggagcaagccccagugccagaucaccggcuucgcccccuucagcaaggacaacagcaucagacugagcgccggcggcgacaucugggugaccagagagcccuacgugagcugcgaccccggcaagugcuaccaguucgcccugggccagggcaccacccuggacaacaagcacagcaacgacaccauccacgacagaaucccccacagaacccugcugaugaacgagcugggcgugcccuuccaccugggcaccagacaggugugcguggccuggagcagcagcagcugccacgacggcaaggccuggcugcacgugugcgugaccggcgacgacaagaacgccaccgccagcuucaucuacgacggcagacugauggacagcaucggcagcuggagccagaacauccugagaacccaggagagcgagugcgugugcaucaacggcaccugcaccguggugaugaccgacggcagcgccagcggcagagccgacaccagaauccuguucaucgaggagggcaagaucgugcacaucagcccccugagcggcagcgcccagcacguggaggagugcagcugcuaccccagauaccccgacgugagaugcaucugcagagacaacuggaagggcagcaacagacccgugaucgacaucaacauggaggacuacagcaucgacagcagcuacgugugcagcggccuggugggcgacacccccagaaacgacgacagaagcagcaacagcaacugcagaaaccccaacaacgagagaggcaaccccggcgugaagggcugggccuucgacaacggcgacgacguguggaugggcagaaccaucagcaaggaccugagaagcggcuacgagaccuucaaggugaucggcggcuggagcacccccaacagcaagagccagaucaacagacaggugaucguggacagcaacaacuggagcggcuacagcggcaucuucagcguggagggcaagagaugcaucaacagaugcuucuacguggagcugaucagaggcagacagcaggagaccagagugugguggaccagcaacagcaucgugguguucugcggcaccagcggcaccuacggcaccggcagcuggcccgacggcgccaacaucaacuucaugcccaucuga

SEQ ID NO: 176466 - RNA, 1410 nt, Artificial Sequence
  derived and/or modified CDS sequence (opt4) from neuraminidase__InfluenzaA__ACD56327
augaaccccaaccagaagaucaucaccaucggcagcgugagccugaccaucgccaccgugugcuuccugaugcagaucgccauccuggccaccaccgugacccugcacuucaagcagcacgagugcgacagccccgccagcaaccaggugaugcccugcgagcccaucaucaucgagagaaacaucaccgagaucguguaccugaacaacaccaccaucgagaaggagaucugccccgaggugguggaguacagaaacuggagcaagccccagugccagaucaccggcuucgcccccuucagcaaggacaacagcaucagacugagcgccggcggcgacaucugggugaccagagagcccuacgugagcugcgaccccagcaagugccaccaguucgcccugggccagggcaccacccuggagaacaagcacagcaacggcaccaagcacgacagaaucccccacagaacccugcugaugaacgagcugggcgugcccuuccaccugggcaccaagcaggugugcguggccuggagcagcagcagcugccacgacggcaaggccuggcugcacgugugcgugaccggcgacgacagaaacgccaccgccagcuucaucuacggcggcagacugguggacagcaucgugagcuggagccagaacauccugagaacccaggagagcgagugcgugugcaucaacggcaccugcaccguggugaugaccgacggcagcgccagcggcagagccgacaccagaauccuguucaucaaggagggcaagaucgugcacaucagcccccugagcggcagcgcccagcacaucgaggagugcagcugcuaccccagauaccccgacgugagaugcaucugcagagacaacuggaagggcagcaacagacccgugaucgacaucaacauggaggacuacagcaucgacagcagcuacgugugcagcggccuggugggcgacacccccagaaacgacgacagcagcagcaacagcaacugcagagaccccaacaacgagagaggcaaccccggcgugaagggcugggccuucgacaacggcgacgacguguggaugggcagaaccaucagcaaggacagcagaagcggcuacgagaccuucaaggugaucggcggcuggagcacccccaacagcaagagccaggugaacagacaggugaucguggacagcaacaacuggagcggcuacagcggcaucuucagcguggagggcaagagcugcaucaacagaugcuucuacguggagcugaucagaggcagaccccaggagaccagagugugguggaccagcaacagcaucgugguguucugcggcaccagcggcaccuacggcaccggcagcuggcccgacggcgccaacaucaacuucaugcccaucuga

SEQ ID NO: 176467 - RNA, 1410 nt, Artificial Sequence
  derived and/or modified CDS sequence (opt4) from neuraminidase__InfluenzaA__ACD85190
augaaccccaaccagaagaucaucaccaucggcagcgugagccugaccaucgccaccgugugcuuccugaugcagaucgccauccuggugaccaccgugacccugcacuucaagcagcacgagugcgacagccccgccagcaaccaggugaugcccugcgagcccaucaucaucgagagaaacaucaccgagaucguguaccugaacaacaccaccaucgagaaggagaucugccccaaggugguggaguacagaaacuggagcaagccccagugccagaucaccggcuucgcccccuucagcaaggacaacagcaucagacugagcgccggcggcgacaucugggugaccagagagcccuacgugagcugcgaccccggcaagugcuaccaguucgcccugggccagggcaccacccuggacaacaagcacagcaacgacaccauccacgacagaaucccccacagaacccugcugaugaacgagcugggcgugcccuuccaccugggcaccagacaggugugcaucgccuggagcagcagcagcugccacgacggcaaggccuggcugcacgugugcgugaccggcgacgacaagaacgccaccgccagcuucaucuacgacggcagacugguggacagcaucggcagcuggagccagaacauccugagaacccaggagagcgagugcgugugcaucaacggcaccugcaccguggugaugaccgacggcagcgccagcggcagagccgacaccagaauccuguucaucgaggagggcaagaucgugcacaucagcccccugagcggcagcgcccagcacguggaggagugcagcugcuaccccagauaccccgacgugagaugcaucugcagagacaacuggaagggcagcaacagacccaucaucgacaucaacauggaggacuacagcaucgacagcagcuacgugugcagcggccuggugggcgacacccccagaaacgacgacagaagcagcaacagcaacugcagaaaccccaacaacgagagaggcaaccccggcgugaagggcugggccuucgacaacggcgacgacguguggaugggcagaaccaucagcaaggaccugagaagcggcuacgagaccuucaaggugaucggcggcuggagcacccccaacagcaagagccagaucaacagacaggugaucguggacagcaacaacuggagcggcuacagcggcaucuucagcguggagggcaagagcugcaucaacagaugcuucuacguggagcugaucagaggcagacagcaggagaccagagugugguggaccagcaacagcaucgugguguucugcggcaccagcggcaccuacggcaccggcagcuggcccgacggcgccaacaucaacuucaugcccaucuga

SEQ ID NO: 176468 - RNA, 1410 nt, Artificial Sequence
  derived and/or modified CDS sequence (opt4) from neuraminidase__InfluenzaA__ACD85201
augaaccccaaccagaagaucaucaccaucggcagcgugagccugaccaucgccaccgugugcuuccugaugcagaucgccauccuggugaccaccgugacccugcacuucaagcagcacgagugcgacagccccgccagcaaccaggugaugcccugcgagcccaucaucaucgagagaaacaucaccgagaucguguaccugaacaacaccaccaucgagaaggagaucugccccaaggugguggaguacagaaacuggagcaagccccagugccagaucaccggcuucgcccccuucagcaaggacaacagcaucagacugagcgccggcggcgacaucugggugaccagagagcccuacgugagcugcgaccccggcaagugcuaccaguucgcccugggccagggcaccacccuggacaacaagcacagcaacgacaccauccacgacagaaucccccacagaacccugcugaugaacgagcugggcgugcccuuccaccugggcaccagacaggugugcaucgccuggagcagcagcagcugccacgacggcaaggccuggcugcacgugugcgugaccggcgacgacaagaacgccaccgccagcuucaucuacgacggcagacugguggacagcaucagcagcuggagccagaacauccugagaacccaggagagcgagugcgugugcaucaacggcaccugcaccguggugaugaccgacggcagcgccagcggcagagccgacaccagaauccuguucaucgaggagggcaagaucgugcacaucagcccccugagcggcagcgcccagcacguggaggagugcagcugcuaccccagauaccccgacgugagaugcaucugcagagacaacuggaagggcagcaacagacccgugaucgacaucaacauggaggacuacagcaucgacagcagcuacgugugcagcggccuggugggcgacacccccagaaacgacgacagaagcagcaacagcaacugcagaaaccccaacaacgagagaggcaaccccggcgugaagggcugggccuucgacaacggcgacgacguguggaugggcagaaccaucagcaaggaccugagaagcggcuacgagaccuucaaggugaucggcggcuggagcacccccaacagcaagagccagaucaacagacaggugaucguggacagcaacaacuggagcggcuacagcggcaucuucagcguggagggcaagagcugcaucaacagaugcuucuacguggagcugaucagaggcagacagcaggagaccagagugugguggaccagcaacagcaucgugguguucugcggcaccagcggcaccuacggcaccggcagcuggcccgacggcgccaacaucaacuucaugcccaucuga

SEQ ID NO: 176469 - RNA, 1410 nt, Artificial Sequence
  derived and/or modified CDS sequence (opt4) from neuraminidase__InfluenzaA__ACD85212
augaaccccaaccagaagaucaucaccaucggcagcgugagccugaccaucgccaccgugugcuuccugaugcagaucgccauccuggccaccaccgugacccugcacuucaagcagcacgagugcgacagccccgccagcaaccaggugaugcccugcgagcccaucaucaucgagagaaacaucaaggagaucguguaccugaacaacaccaccaucgagaaggagaucugccccgaggugguggaguacagaaacuggagcaagccccagugccagaucaccggcuucgcccccuucagcaaggacaacagcaucagacugagcgccggcggcgacaucugggugaccagagagcccuacgugagcugcgaccccggcaagugcuaccaguucgcccugggccagggcaccacccuggacaacaagcacagcaacggcaccauccacgacagaaucccccacagaacccugcugaugaacgagcugggcgugcccuuccaccugggcaccaagcaggugugcguggccuggagcagcagcagcugccacgacggcaaggccuggcugcacgugugcgugaccggcgacgacagaaacgccaccgccagcuucaucuacgacggcagacugguggacagcaucggcagcuggagccagaacauccugagaacccaggagagcgagugcgugugcaucaacggcaccugcaccguggugaugaccgacggcagcgccagcggcagagccgacaccagaauccuguucaucaaggagggcaagaucgugcacaucagcccccugagcggcagcgcccagcacaucgaggagugcagcugcuaccccagauaccccgacgugagaugcaucugcagagacaacuggaagggcagcaacagacccgugaucgacaucaacauggaggacuacagcaucgacagcagcuacgugugcagcggccuggugggcgacacccccagaaacgacgacagcagcagcaacagcaacugcagagaccccaacaacgagagaggcaaccccggcgugaagggcugggccuucgacaacggcgacgacguguggaugggcagaaccaucaacaaggacagcagaagcggcuacgagaccuucaaggugaucggcggcuggagcacccccaacagcaagagccaggugaacagacaggugaucguggacaacaacaacuggagcggcuacagcggcaucuucagcguggagggcaagagcugcaucaacagaugcuucuacguggagcugaucagaggcagaccccaggagaccagagugugguggaccagcaacagcaucgugguguucugcggcaccagcggcaccuacggcaccggcagcuggcccgacggcgccaacaucaacuucaugcccaucuga

SEQ ID NO: 176470 - RNA, 1410 nt, Artificial Sequence
  derived and/or modified CDS sequence (opt4) from neuraminidase__InfluenzaA__ACD85223
augaaccccaaccagaagaucaucaccaucggcagcgugagccugaccaucgccaccgccugcuuccugaugcagaucgccauccuggugaccaccgugacccugcacuucaagcagcacgagugcgacagccccgccagcaaccaggugaugcccugcgagcccaucaucaucgagagaaacaucaccgagaucguguaccugaacaacaccaccaucgagaaggagaucugccccaaggugguggaguacagaaacuggagcaagccccagugccagaucaccggcuucgcccccuucagcaaggacaacagcaucagacugagcgccggcggcgacaucugggugaccagagagcccuacgugagcugcgaccccggcaagugcuaccaguucgcccugggccagggcaccacccuggacaacaagcacagcaacgacaccauccacgacagaaucccccacagaacccugcugaugaacgagcugggcgugcccuuccaccugggcaccagacaggugugcaucgccuggagcagcagcagcugccacgacggcaaggccuggcugcacgugugcgugaccggcgacgacaagaacgccaccgccagcuucaucuacgacggcagacugguggacagcaucggcagcuggagccagaacauccugagaacccaggagagcgagugcgugugcaucaacggcaccugcaccguggugaugaccgacggcagcgccagcggcagagccgacaccagaauccuguucaucgaggagggcaagaucgugcacaucagcccccugagcggcagcgcccagcacguggaggagugcagcugcuaccccagauaccccgacgugagaugcaucugcagagacaacuggaagggcagcaacagacccaucaucgacaucaacauggaggacuacagcaucgacagcagcuacgugugcagcggccuggugggcgacacccccagaaacgacgacagaagcagcaacagcaacugcagaaaccccaacaacgagagaggcaaccccggcgugaagggcugggccuucgacaacggcgacgacguguggaugggcagaaccaucagcaaggaccugagaagcggcuacgagaccuucaaggugaucggcggcuggagcacccccaacagcaagagccagaucaacagacaggugaucguggacagcaacaacuggagcggcuacagcggcaucuucagcguggagggcaagagcugcaucaacagaugcuucuacguggagcugaucagaggcagacagcaggagaccagagugugguggaccagcaacagcaucgugguguucugcggcaccagcggcaccuacggcaccggcagcuggcccgacggcgccaacaucaacuucaugcccaucuga

SEQ ID NO: 176471 - RNA, 1410 nt, Artificial Sequence
  derived and/or modified CDS sequence (opt4) from neuraminidase__InfluenzaA__ACD85234
augaaccccaaccagaagaucaucaccaucggcagcgugagccugaccaucgccaccgugugcuuccugaugcagaucgccauccuggccaccaccgugacccugcacuucaagcagcacgagugcgacagccccgccagcaaccaggugaugcccugcgagcccaucaucaucgagagaaacaucaccgagaucguguaccugaacaacaccaccaucgagaaggagaucugccccgaggugguggaguacagaaacuggagcaagccccagugccagaucaccggcuucgcccccuucagcaaggacaacagcaucagacugagcgccgacggcgacaucugggugaccagagagcccuacgugagcugcgaccccggcaagugcuaccaguucgcccugggccagggcaccacccuggacaacaagcacagcaacggcaccauccacgacagaaucccccacagaacccugcugaugaacgagcugggcgugcccuuccaccugggcaccaagcaggugugcguggccuggagcagcagcagcugccacgacggcaaggccuggcugcacgugugcgugaccggcgacgacagaaacgccaccgccagcuucaucuacgacggcagacugguggacagcaucggcagcuggagccagaacauccugagaacccaggagagcgagugcgugugcaucaacggcaccugcaccguggugaugaccgacggcagcgccagcggcagagccgacaccagaauccuguucaucaaggagggcaagaucgugcacaucagcccccugagcggcagcgcccagcacaucgaggagugcagcugcuaccccagauaccccgacgugagaugcaucugcagagacaacuggaagggcagcaacagacccgugaucgacaucaacauggaggacuacagcaucgacagcagcuacgugugcagcggccuggugggcgacacccccagaaacgacgacagcagcagcaacagcaacugcagagaccccaacaacgagagaggcaaccccggcgugaagggcugggccuucgacaacggcgacgacguguggaugggcagaaccaucagcaaggaccugagaagcggcuacgagaccuucaaggugaucggcggcuggagcacccccaacagcaagagccaggugaacagacaggugaucguggacaacaacaacuggagcggcuacagcggcaucuucagcguggagggcaagagcugcaucaacagaugcuucuacguggagcugaucagaggcagaccccaggagaccagagugugguggaccagcaacagcaucgugguguucugcggcaccagcggcaccuacggcaccggcagcuggcccgacggcgccaacaucaacuucaugcccaucuga

SEQ ID NO: 176472 - RNA, 1410 nt, Artificial Sequence
  derived and/or modified CDS sequence (opt4) from neuraminidase__InfluenzaA__ACD85245
augaaccccaaccagaagaucaucaccaucggcagcgugagccugaucaucgccaccgugugcuuccugaugcagaucgccauccuggugaccaccgugacccugcacuucaagcagcacgagugcgacagccccgccagcaaccaggugaugcccugcgagcccaucaucaucgagagaaacaucaccgagaucguguaccugaacaacaccaccaucgagaaggagaucugccccagagugguggaguacagaaacuggagcaagccccagugccagaucaccggcuucgcccccuucagcaaggacaacagcaucagacugagcgccggcggcgacaucugggugaccagagagcccuacgugagcugcgaccccggcaagugcuaccaguucgcccugggccagggcaccacccuggacaacaagcacagcaacgacaccauccacgacagaaucccccacagaacccugcugaugaacgagcugggcgugcccuuccaccugggcaccagacaggugugcaucgccuggagcagcagcagcugccacgacggcaaggccuggcugcacgugugcaucaccggcgacgacaagaacgccaccgccagcuucaucuacgacggcagacugguggacagcaucggcagcuggagccagaacauccugagaacccaggagagcgagugcgugugcaucaacggcaccugcaccguggugaugaccgacggcagcgccagcggcagagccgacaccagaauccuguucaucgaggagggcaagaucgugcacaucagcccccugagcggcagcgcccagcacguggaggagugcagcugcuaccccagauaccccggcgugagaugcaucugcagagacaacuggaagggcagcaacagacccgugguggacaucaacauggaggacuacagcaucgacagcagcuacgugugcagcggccuggugggcgacacccccagaaacgacgacagaagcagcaacagcaacugcagaaaccccaacaacgagagaggcaaccagggcgugaagggcugggccuucgacaacggcgacgacguguggaugggcagaaccaucagcaaggaccugagaagcggcuacgagaccuucaaggugaucggcggcuggagcacccccaacagcaagagccagaucaacagacaggugaucguggacagcgacgacagaagcggcuacagcggcaucuucagcguggagggcaagagcugcaucaacagaugcuucuacguggagcugaucagaggcagaaagcaggagaccagagugugguggaccagcaacagcaucgugguguucugcggcaccagcggcaccuacggcaccggcagcuggcccgacggcgccaacaucaacuucaugcccaucuga

SEQ ID NO: 176473 - RNA, 1410 nt, Artificial Sequence
  derived and/or modified CDS sequence (opt4) from neuraminidase__InfluenzaA__ACD85454
augaaccccaaccagaagaucaucaccaucggcagcgugagccugaccaucagcaccaucggcuucuucaugcagaccgccauccugaucaccaccgugacccugcacuucaagcaguacgaguucaacagcccccccaacaaccaggugaugcugugcgagcccaccaucaucgagagaaacaucaccgagaucguguaccugaccaacaccaccaucgagaaggagaucugccccaagcuggccgaguacagaaacuggagcaagccccagugcgacaucaccggcuucgcccccuucagcaaggacaacagcaucagacugagcgccggcggcgacaucugggugaccagagagcccuacgugagcugcgaccccgacaagugcuaccaguucgcccugggccagggcaccacccugaacaacgugcacagcaacgacaccgugagaaacagaacccccuacagaacccugcugaugaacgagcugggcgugcccuuccaccugggcaccaagcaggugugcaucgccuggagcagcagcagcugccacgacggcaaggccuggcugcacgugugcaucaccggcgacgacaagaacgccaccgccagcuucaucuacaacggcagacugguggacagcaucgugagcuggagcaaggagauccugagaacccaggagagcgagugcgugugcaucaacggcaccugcaccguggugaugaccgacggcagcgccagcggcaaggccgacaccaagauccuguucaucgaggagggcaagaucgugcacaccagcacccugagcggcagcgcccagcacguggaggagugcagcugcuaccccagauaccccggcgugagaugcgugugcagagacaacuggaagggcagcaacagacccaucguggacaucaacaucaaggaccacagcaucgugagcagcuacgugugcagcggccuggugggcgacacccccagaaagaacgacagcagcagcagcagccacugccuggaccccaacaacgaggagggcggccacggcgugaagggcugggccuucgacgacggcaacgacguguggaugggcagaaccaucagcgagaagagcagacugggcuacgagaccuucaaggugaucgagggcuggagcaaccccaagagcaagcugcagaucaacagacaggugaucguggacagaggcaacagaagcggcuacagcggcaucuucagcguggagggcaagagcugcaucaacagaugcuucuacguggagcugaucagaggcagaaaggaggagaccgaggugcuguggaccagcaacagcaucgugguguucugcggcaccagcggcaccuacggcaccggcagcuggcccgacggcgccgacaucaaccugaugcccaucuga

SEQ ID NO: 176474 - RNA, 1410 nt, Artificial Sequence
  derived and/or modified CDS sequence (opt4) from neuraminidase__InfluenzaA__ACD85465
augaaccccaaccagaagaucaucaccaucggcagcgugagccugaccaucagcaccaucggcuucuucaugcagaccgccauccugaucaccaccgugacccugcacuucaagcaguacgaguucaacagcccccccaacaaccaggugaugcugugcgagcccaccaucaucgagagaaacaucaccgagaucguguaccugaccaacaccaccaucgagaaggagaucugccccaagcuggccgaguacagaaacuggagcaagccccagugcgacaucaccggcuucgcccccuucagcaaggacaacagcaucagacugagcgccggcggcgacaucugggugaccagagagcccuacgugagcugcgaccccgacaagugcuaccaguucgcccugggccagggcaccacccugaacaacgugcacagcaacgacaccgugagagacagaacccccuacagaacccugcugaugaacgagcugggcgugcccuuccaccugggcaccaagcaggugugcaucgccuggagcagcagcagcugccacgacggcaaggccuggcugcacgugugcaucaccggcgacgacaagaacgccaccgccagcuucaucuacaacggcagacugguggacagcaucgugagcuggagcaaggagauccugagaacccaggagagcgagugcgugugcaucaacggcaccugcaccguggugaugaccgacggcagcgccagcggcaaggccgacaccaagauccuguucaucgaggagggcaagaucgugcacaccagcacccugagcggcagcgcccagcacguggaggagugcagcugcuaccccagauaccccggcgugagaugcgugugcagagacaacuggaagggcagcaacagacccaucguggacaucaacaucaaggaccacagcaucgugagcagcuacgugugcagcggccuggugggcgacacccccagaaagaacgacagcagcagcagcagccacugccuggaccccaacaacgaggagggcggccacggcgugaagggcugggccuucgacgacggcaacgacguguggaugggcagaaccaucagcgagaagagcagacugggcuacgagaccuucaaggugaucgagggcuggagcaaccccaagagcaagcugcagaucaacagacaggugaucguggacagaggcaacagaagcggcuacagcggcaucuucagcguggagggcaagagcugcaucaacagaugcuucuacguggagcugaucagaggcagaaaggaggagaccgaggugcuguggaccagcaacagcaucgugguguucugcggcaccagcggcaccuacggcaccggcagcuggcccgacggcgccgacaucaaccugaugcccaucuga

SEQ ID NO: 176475 - RNA, 1410 nt, Artificial Sequence
  derived and/or modified CDS sequence (opt4) from neuraminidase__InfluenzaA__ACD85487
augaaccccaaccagaagaucaucaccaucggcagcgugagccugaucaucagcaccaucugcuucuucaugcagaccgccauccugaucaccaccgugacccugcacuucaagcaguacgaguucaacagcccccccaacaaccaggugaugcugugcgagcccaccaucaucgagagaaacaucaccgagaucguguaccugaccaacaccaccaucgagaaggagaucugccccaagcuggccgaguacagaaacuggagcaagccccagugcgacaucaccggcuucgcccccuucagcaaggacaacagcaucagacugagcgccggcggcgacaucugggugaccagagagcccuacgugagcugcgaccccgacaagugcuaccaguucgcccugggccagggcaccacccugaacaacgugcacagcaacgacaccgugagaaacagaacccccuacagaacccugcugaugaacgagcugggcgugcccuuccaccugggcaccaagcaggugugcaucgccuggagcagcagcagcugccacgacggcaaggccuggcugcacgugugcaucaccggcgacgacaagaacgccaccgccagcuucaucuacaacggcagacugguggacagcaucgugagcuggagcaaggagauccugagaacccaggagagcgagugcgugugcaucaacggcaccugcaccguggugaugaccgacggcagcgccagcggcaaggccgacaccaagauccuguucaucgaggagggcaagaucgugcacaccagcacccugagcggcagcgcccagcacguggaggagugcagcugcuaccccagauaccccggcgugagaugcgugugcagagacaacuggaagggcagcaacagacccaucguggacaucaacaucaaggaccacagcaucgugagcagcuacgugugcagcggccuggugggcgacacccccagaaagaacgacagcagcagcagcagccacugccuggaccccaacaacgaggagggcggccacggcgugaagggcugggccuucgacgacggcaacgacguguggaugggcagaaccaucagcgagaagagcagacugggcuacgagaccuucaaggugaucgagggcuggagcaaccccaacagcaagcugcagaucaacagacaggugaucguggacagaggcaacagaagcggcuacagcggcaucuucagcguggagggcaagagcugcaucaacagaugcuucuacguggagcugaucagaggcagaaaggaggagaccgaggugcuguggaccagcaacagcaucgugguguucugcggcaccagcggcaccuacggcaccggcagcuggcccgacggcgccgacaucaaccugaugcccaucuga

SEQ ID NO: 176476 - RNA, 1410 nt, Artificial Sequence
  derived and/or modified CDS sequence (opt4) from neuraminidase__InfluenzaA__ACD85498
augaaccccaaccagaagaucaucaccaucggcagcgugagccugaucaucagcaccaucugcuucuucaugcagaccgccauccugaucaccaccgugacccugcacuucaagcaguacgaguucaacagcccccccaacaaccaggugaugcugugcgagcccaccaucaucgagagaaacaucaccgagaucguguaccugaccaacaccaccaucgagaaggagaucugccccaagcuggccgaguacagaaacuggagcaagccccagugcgacaucaccggcuucgcccccuucagcaaggacaacagcaucagacugagcgccggcggcgacaucugggugaccagagagcccuacgugagcugcgaccccgacaagugcuaccaguucgcccugggccagggcaccacccugaacaacgugcacagcaacgacaccgugagagacagaacccccuacagaacccugcugaugaacgagcugggcgugcccuuccaccugggcaccaagcaggugugcaucgccuggagcagcagcagcugccacgacggcaaggccuggcugcacgugugcaucaccggcgacgacaagaacgccaccgccagcuucaucuacaacggcagacugguggacagcaucgugagcuggagcaaggagauccugagaacccaggagagcgagugcgugugcaucaacggcaccugcaccguggugaugaccgacggcagcgccagcggcaaggccgacaccaagauccuguucaucgaggagggcaagaucgugcacaccagcacccugagcggcagcgcccagcacguggaggagugcagcugcuaccccagauaccccggcgugagaugcgugugcagagacaacuggaagggcagcaacagacccaucguggacaucaacaucaaggaccacagcaucgugagcagcuacgugugcagcggccuggugggcgacacccccagaaagaacgacagcagcagcagcagccacugccuggaccccaacaacgaggagggcggccacggcgugaagggcugggccuucgacgacggcaacgacguguggaugggcagaaccaucagcgagaagagcagacugggcuacgagaccuucaaggugaucgagggcuggagcaaccccaagagcaagcugcagaucaacagacaggugaucguggacagaggcaacagaagcggcuacagcggcaucuucagcguggagggcaagagcugcaucaacagaugcuucuacguggagcugaucagaggcagaaaggaggagaccgaggugcuguggaccagcaacagcaucgugguguucugcggcaccagcggcaccuacggcaccggcagcuggcccgacggcgccgacaucaaccugaugcccaucuga

SEQ ID NO: 176477 - RNA, 1410 nt, Artificial Sequence
  derived and/or modified CDS sequence (opt4) from neuraminidase__InfluenzaA__ACD85509
augaaccccaaccagaagaucaucaccaucggcagcgugagccugaccaucagcaccaucugcuucuucaugcagaccgccauccugaucaccaccgugacccugcacuucaagcaguacgaguucaacagcccccccaacaaccaggugaugcugugcgagcccaccaucaucgagagaaacaucaccgagaucguguaccugaccaacaccaccaucgagaaggagaucugccccaagcuggccgaguacagaaacuggagcaagccccagugcgacaucaccggcuucgcccccuucagcaaggacaacagcaucagacugagcgccggcggcgacaucugggugaccagagagcccuacgugagcugcgaccccgacaagugcuaccaguucgcccugggccagggcaccacccugaacaacgugcacagcaacgacaccgugagaaacagaacccccuacagaacccugcugaugaacgagcugggcgugcccuuccaccugggcaccaagcaggugugcaucgccuggagcagcagcagcugccacgacggcaaggccuggcugcacgugugcaucaccggcgacgacaagaacgccaccgccagcuucaucuacaacggcagacugguggacagcaucgugagcuggagcaaggagauccugagaacccaggagagcgagugcgugugcaucaacggcaccugcaccguggugaugaccgacggcagcgccagcggcaaggccgacaccaagauccuguucaucgaggagggcaagaucgugcacaccagcacccugagcggcagcgcccagcacguggaggagugcagcugcuaccccagauaccccggcgugagaugcgugugcagagacaacuggaagggcagcaacagacccaucguggacaucaacaucaaggaccacagcaucgugagcagcuacgugugcagcggccuggugggcgacacccccagaaagaacgacagcagcagcagcagccacugccuggaccccaacaacgaggagggcagcagaggcgugaagggcugggccuucgacgacggcaacgacguguggaugggcagaaccaucagcgagaagagcagacugggcuacgagaccuucaaggugaucgagggcuggagcaaccccaagagcaagcugcagaucaacagacaggugaucguggacagaggcaacagaagcggcuacagcggcaucuucagcguggagggcaagagcugcaucaacagaugcuucuacguggagcugaucagaggcagaaaggaggagaccgaggugcuguggaccagcaacagcaucgugguguucugcggcaccagcggcaccuacggcaccggcagcuggcccgacggcgccgacaucaaccugaugcccaucuga

SEQ ID NO: 176478 - RNA, 1410 nt, Artificial Sequence
  derived and/or modified CDS sequence (opt4) from neuraminidase__InfluenzaA__ACD85520
augaaccccaaccagaagaucaucaccaucggcagcgugagccugaucaucagcaccaucggcuucuucaugcagaccgccauccugaucaccaccgugacccugcacuucaagcaguacgaguucaacagcccccccaacaaccaggugaugcugugcgagcccaccaucaucgagagaaacaucaccgagaucguguaccugaccaacaccaccaucgagaaggagaucugccccaagcuggccgaguacagaaacuggagcaagccccagugcgacaucaccggcuucgcccccuucagcaaggacaacagcaucagacugagcgccggcggcgacaucugggugaccagagagcccuacgugagcugcgaccccgacaagugcuaccaguucgcccugggccagggcaccacccugaacaacgugcacagcaacgacaccgugagagacagaacccccuacagaacccugcugaugaacgagcugggcgugcccuuccaccugggcaccaagcaggugugcaucgccuggagcagcagcagcugccacgacggcaaggccuggcugcacgugugcaucaccggcgacgacaagaacgccaccgccagcuucaucuacaacggcagacugguggacagcaucgugagcuggagcaaggagauccugagaacccaggagagcgagugcgugugcaucaacggcaccugcaccguggugaugaccgacggcagcgccagcggcaaggccgacaccaagauccuguucaucgaggagggcaagaucgugcacaccagcacccugagcggcagcgcccagcacguggaggagugcagcugcuaccccagauaccccggcgugagaugcgugugcagagacaacuggaagggcagcaacagacccaucguggacaucaacaucaaggaccacagcaucgugagcagcuacgugugcagcggccuggugggcgacacccccagaaagaacgacagcagcagcagcagccacugccuggaccccaacaacgaggagggcggccacggcgugaagggcugggccuucgacgacggcaacgacguguggaugggcagaaccaucagcgagaagagcagacugggcuacgagaccuucaaggugaucgagggcuggagcaaccccaagagcaagcugcagaucaacagacaggugaucguggacagaggcaacagaagcggcuacagcggcaucuucagcguggagggcaagagcugcaucaacagaugcuucuacguggagcugaucagaggcagaaaggaggagaccgaggugcuguggaccagcaacagcaucgugguguucugcggcaccagcggcaccuacggcaccggcagcuggcccgacggcgccgacaucaaccugaugcccaucuga

SEQ ID NO: 176479 - RNA, 1410 nt, Artificial Sequence; identical to SEQ ID NO: 176474
  derived and/or modified CDS sequence (opt4) from neuraminidase__InfluenzaA__ACD85553

SEQ ID NO: 176480 - RNA, 1410 nt, Artificial Sequence
  derived and/or modified CDS sequence (opt4) from neuraminidase__InfluenzaA__ACD85564
augaaccccaaccagaagaucaucaccaucggcagcgugagccugaucaucagcaccaucugcuucuucaugcagaccgccauccugaucaccaccgugacccugcacuucaagcaguacgaguucaacagcccccccaacaaccaggugaugcugugcgagcccaccaucaucgagagaaacaucaccgagaccgcccaccugaccaacaccaccaucgagaaggagaucugccccaagcuggccgaguacagaaacuggagcaagccccagugcgacaucaccggcuucgcccccuucagcaaggacaacagcaucagacugagcgccggcggcgacaucugggugaccagagagcccuacgugagcugcgaccccgacaagugcuaccaguucgcccugggccagggcaccacccugaacaacgugcacagcaacgacaccgugagagacagaacccccuacagaacccugcugaugaacgagcugggcgugcccuuccaccugggcaccaagcaggugugcaucgccuggagcagcagcagcugccacgacggcaaggccuggcugcacgugugcaucaccggcgacgacaagaacgccaccgccagcuucaucuacaacggcagacugguggacagcaucgugagcuggagcaaggagauccugagaacccaggagagcgagugcgugugcaucaacggcaccugcaccguggugaugaccgacggcagcgccagcggcaaggccgacaccaagauccuguucaucgaggagggcaagaucgugcacaccagcacccugagcggcagcgcccagcacguggaggagugcagcugcuaccccagauaccccggcgugagaugcgugugcagagacaacuggaagggcagcaacagacccaucguggacaucaacaucaaggaccacagcaucgugagcagcuacgugugcagcggccuggugggcgacacccccagaaagaacgacagcagcagcagcagccacugccuggaccccaacaacgaggagggcggccacggcgugaagggcugggccuucgacgacggcaacgacguguggaugggcagaaccaucagcgagaagagcagacugggcuacgagaccuucaaggugaucgagggcuggagcaaccccaagagcaagcugcagaucaacagacaggugaucguggacagaggcaacagaagcggcuacagcggcaucuucagcguggagggcaagagcugcaucaacagaugcuucuacguggagcugaucagaggcagaaaggaggagaccgaggugcuguggaccagcaacagcaucgugguguucugcggcaccagcggcaccuacggcaccggcagcuggcccgacggcgccgacaucaaccugaugcccaucuga

SEQ ID NO: 176481 - RNA, 1410 nt, Artificial Sequence
  derived and/or modified CDS sequence (opt4) from neuraminidase__InfluenzaA__ACD85575
augaaccccaaccagaagaucaucaccaucggcagcgugagccugaucaucagcaccaucugcuucuucaugcagaccgccauccugaucaccaccgugacccugcacuucaagcaguacgaguucaacagcccccccaacaaccaggugaugcugugcgagcccaccaucaucgagagaaacaucaccgagaucguguaccugaccaacaccaccaucgagaaggagaucugccccaagcuggccgaguacagaaacuggagcaagccccagugcgacaucaccggcuucgcccccuucagcaaggacaacagcaucagacugagcgccggcggcgacaucugggugaccagagagcccuacgugagcugcgaccccgacaagugcuaccaguucgcccugggccagggcaccacccugaacaacgugcacagcaacgacaccgugagagacagaacccccuacagaacccugcugaugaacgagcugggcgugcccuuccaccugggcaccaagcaggugugcaucgccuggagcagcagcagcugccacgacggcaaggccuggcugcacgugugcaucaccggcgacgacaagaacgccaccgccagcuucaucuacaacggcagacugguggacagcaucgugagcuggagcaaggagauccugagaacccaggagagcgagugcgugugcaucaacggcaccugcaccguggugaugaccgacggcagcgccagcggcaaggccgacaccaagauccuguucaucgaggagggcaagaucgugcacaccagcacccugagcggcagcgcccagcacguggaggagugcagcugcuaccccagauaccccggcgugagaugcgugugcagagacaacuggaagggcagcaacagacccaucguggacaucaacaucaaggaccacagcaucgugagcagcuacgugugcagcggccuggugggcgacacccccagaaagaacgacagcagcagcagcagccacugccuggaccccaacaacgaggagggcggccacggcgugaagggcugggccuucgacgacggcaacgacguguggaugggcagaaccaucagcgagaagagcagacugggcuacgagaccuucaaggugaucgagggcuggagcaaccacaagagcaagcugcagaucaacagacaggugaucguggacagaggcaacagaagcggcuacagcggcaucuucagcguggagggcaagagcugcaucaacagaugcuucuacguggagcugaucagaggcagaaaggaggagaccgaggugcuguggaccagcaacagcaucgugguguucugcggcaccagcggcaccuacggcaccggcagcuggcccgacggcgccgacaucaaccugaugcccaucuga

SEQ ID NO: 176482 - RNA, 1410 nt, Artificial Sequence
  derived and/or modified CDS sequence (opt4) from neuraminidase__InfluenzaA__ACD85586
augaaccccaaccagaagaucaucaccaucggcagcgugagccugaccaucagcaccaucugcuucuucaugcagaccgccauccugaucaccaccgugacccugcacuucaagcaguacgaguucaacagcccccccaacaaccaggugaugcugugcgagcccaccaucaucgagagaaacaucaccgagaucguguaccugaccaacaccaccaucgagaaggagaucugccccaagcuggccgaguacagaaacuggagcaagccccagugcgacaucaccggcuucgcccccuucagcaaggacaacagcaucagacugagcgccggcggcgacaucugggugaccagagagcccuacgugagcugcgaccccgacaagugcuaccaguucgcccugggccagggcaccacccugaacaacgugcacagcaacgacaccgugagagacagaacccccuacagaacccugcugaugaacgagcugggcgugcccuuccaccugggcaccaagcaggugugcaucgccuggagcagcagcagcugccacgacggcaaggccuggcugcacgugugcaucaccggcgacgacaagaacgccaccgccagcuucaucuacaacggcagacugguggacagcaucgugagcuggagcaaggagauccugagaacccaggagagcgagugcgugugcaucaacggcaccugcaccguggugaugaccgacggcagcgccagcggcaaggccgacaccaagauccuguucaucgaggagggcaagaucgugcacaccagcacccugagcggcagcgcccagcacguggaggagugcagcugcuaccccagauaccccggcgugagaugcgugugcagagacaacuggaagggcagcaacagacccaucguggacaucaacaucaaggaccacagcaucgugagcagcuacgugugcagcggccuggugggcgacacccccagaaagaacgacagcagcagcagcagccacugccuggaccccaacaacgaggagggcggcagaggcgugaagggcugggccuucgacgacggcaacgacguguggaugggcagaaccaucagcgagaagagcagacugggcuacgagaccuucaaggugaucgagggcuggagcaaccccaagagcaagcugcagaccaacagacaggugaucguggacagaggcaacagaagcggcuacagcggcaucuucagcguggagggcaagagcugcaucaacagaugcuucuacguggagcugaucagaggcagaaaggaggagaccgaggugcuguggaccagcaacagcaucgugguguucugcggcaccagcggcaccuacggcaccggcagcuggcccgacggcgccgacaucaaccugaugcccaucuga

SEQ ID NO: 176483 - RNA, 1410 nt, Artificial Sequence
  derived and/or modified CDS sequence (opt4) from neuraminidase__InfluenzaA__ACD93582
augaaccccaaccagaagaucaucaccaucggcagcgugagccugaccaucagcaccaucugcuucuucaugcagaucgccauccuggccaccaccgugacccugcacuucaagcaguacgaguucaacagcccccccaacaaccaggugaugcugugcgagcccaccaucaucgagagaaacaucaccgagaucguguaccugaccaacaccaccaucgagaaggagaucugccccaagcuggccgaguacagaaacuggagcaagccccagugcgacaucaccggcuucgcccccuucagcaaggacaacagcaucagacugagcgccggcggcgacaucugggugaccagagagcccuacgugagcugcgaccccgacaagugcuaccaguucgcccugggccagggcaccacccugaacaacgugcacagcaacgacaccgugagaggcagaacccccuacagaacccugcugaugaacgagcugggcgugcccuuccaccugggcaccaagcaggugugcaucgccuggagcagcagcagcugccacgacggcaaggccuggcugcacgugugcaucaccggcgacgacaagaacgccaccgccagcuucaucuacaacggcagacugguggacagcaucgugagcuggagcaaggagauccugagaacccaggagagcgagugcgugugcaucaacggcaccugcaccguggugaugaccgacggcagcgccagcggcaaggccgacaccaagauccuguucaucgaggagggcaagaucgugcacaccagcacccugagcggcagcgcccagcacguggaggagugcagcugcuaccccagauaccccggcgugagaugcgugugcagagacaacuggaagggcagcaacagacccaucguggacaucaacaucaaggaccacagcaucgugagcagcuacgugugcagcggccuggugggcgacacccccagaaagaacgacagcagcagcagcagccacugccuggaccccaacaacgaggagggcggccacggcgugaagggcugggccuucgacgacggcaacgacguguggaugggcagaaccaucagcgagaagagcagacugggcuacgagaccuucaaggugaucgagggcuggagcaaccccaagagcaagcugcagaucaacagacaggugaucguggacaagggcaacagaagcggcuacagcggcaucuucagcguggagggcaagagcugcaucaacagaugcuucuacguggagcugaucagaggcagaaaggaggagaccgaggugcuguggaccagcaacagcaucgugguguucugcggcaccagcggcaccuacggcaccggcagcuggcccgacggcgccgacaucaaccugaugcccaucuga

SEQ ID NO: 176484 - RNA, 1410 nt, Artificial Sequence; identical to SEQ ID NO: 174772
  derived and/or modified CDS sequence (opt4) from neuraminidase__InfluenzaA__ACF09403

SEQ ID NO: 176485 - RNA, 1410 nt, Artificial Sequence; identical to SEQ ID NO: 175989
  derived and/or modified CDS sequence (opt4) from neuraminidase__InfluenzaA__ACF22151

SEQ ID NO: 176486 - RNA, 1410 nt, Artificial Sequence; identical to SEQ ID NO: 174155
  derived and/or modified CDS sequence (opt4) from neuraminidase__InfluenzaA__ACF22246

SEQ ID NO: 176487 - RNA, 1410 nt, Artificial Sequence; identical to SEQ ID NO: 174155
  derived and/or modified CDS sequence (opt4) from neuraminidase__InfluenzaA__ACF22257

SEQ ID NO: 176488 - RNA, 1410 nt, Artificial Sequence; identical to SEQ ID NO: 174155
  derived and/or modified CDS sequence (opt4) from neuraminidase__InfluenzaA__ACF22279

SEQ ID NO: 176489 - RNA, 1410 nt, Artificial Sequence; identical to SEQ ID NO: 174155
  derived and/or modified CDS sequence (opt4) from neuraminidase__InfluenzaA__ACF22290

SEQ ID NO: 176490 - RNA, 1410 nt, Artificial Sequence; identical to SEQ ID NO: 174155
  derived and/or modified CDS sequence (opt4) from neuraminidase__InfluenzaA__ACF22301

SEQ ID NO: 176491 - RNA, 1410 nt, Artificial Sequence; identical to SEQ ID NO: 174155
  derived and/or modified CDS sequence (opt4) from neuraminidase__InfluenzaA__ACF22312

SEQ ID NO: 176492 - RNA, 1410 nt, Artificial Sequence
  derived and/or modified CDS sequence (opt4) from neuraminidase__InfluenzaA__ACF22323
augaaccccaaccagaagaucaucaccaucggcagcgugagccugaccaucgccaccgugugcuuccugaugcagaucgccauccuggugaccaccgugacccugcacuucaagcaguacgagugcgacagccccgccagcaaccaggugaugcccuacgagcccaucaucaucgagagaaacaucaccgagaucguguaccugaacaacaccaccaucgagaaggagaucugccccaaggugguggaguacagaaacuggagcaagccccagugccagaucaccggcuucgcccccuucagcaaggacaacagcaucagacugagcgccggcggcgacaucugggugaccagagagcccuacgugagcugcgaccacggcaagugcuaccaguucgcccugggccagggcaccacccuggacaacaagcacagcaacgacaccauccacgacagaaucccccacagaacccugcugaugaacgagcugggcgugcccuuccaccugggcaccagacaggugugcaucgccuggagcagcagcagcugccacgacggcaaggccuggcugcacgugugcaucaccggcgacgacaagaacgccaccgccagcuucaucuacgacggcagacugguggacagcaucggcagcuggagccagaacauccugagaacccaggagagcgagugcgugugcaucaacggcaccugcaccguggugaugaccgacggcagcgccagcggcagagccgacaccagaauccuguucaucgaggagggcaagaucgugcacaucagcccccugagcggcagcgcccagcacguggaggagugcagcugcuaccccagauaccccggcgugagaugcaucugcagagacaacuggaagggcagcaacagacccgugguggacaucaacauggaggacuacagcaucgacagcagcuacgugugcagcggccuggugggcgacacccccagaaacgacgacagaagcagcaacagcaacugcagaaaccccaacaacgagagaggcaaccagggcgugaagggcugggccuucgacaacggcgacgacguguggaugggcagaaccaucagcaaggaccugagaagcggcuacgagaccuucaaggugaucggcggcuggagcacccccaacagcaagagccagaucaacagacaggugaucguggacagcgacaacagaagcggcuacagcggcaucuucagcguggagggcaagagcugcaucaacagaugcuucuacguggagcugaucagaggcagaaagcaggagaccagagugugguggaccagcaacagcaucgugguguucugcggcaccagcggcaccuacggcaccggcagcuggcccgacggcgccaacaucaacuucaugcccaucuga

SEQ ID NO: 176493 - RNA, 1410 nt, Artificial Sequence; identical to SEQ ID NO: 174155
  derived and/or modified CDS sequence (opt4) from neuraminidase__InfluenzaA__ACF22334

SEQ ID NO: 176494 - RNA, 1410 nt, Artificial Sequence; identical to SEQ ID NO: 174155
  derived and/or modified CDS sequence (opt4) from neuraminidase__InfluenzaA__ACF22367

SEQ ID NO: 176495 - RNA, 1410 nt, Artificial Sequence
  derived and/or modified CDS sequence (opt4) from neuraminidase__InfluenzaA__ACF22378
augaaccccaaccagaagaucaucaccaucggcagcgugagccugaccaucgccaccgugugcuuccugaugcagaucgccauccuggugaccaccgugacccugcacuucaagcaguacgagugcgacagccccgccagcaaccaggugaugcccugcgagcccaucaucaucgagagaaacaucaccgagaucguguaccugaacaacaccaccaucgagaaggagaucugccccaaggugguggaguacagaaacuggagcaagccccagugccagaucaccggcuucgcccccuucagcaaggacaacagcaucagacugagcgccggcggcgacaucugggugaccagagagcccuacgugagcugcgaccacggcaagugcuaccaguucgcccugggccagggcaccacccuggacaacaagcacagcaacgacaccauccacgacagaaucccccacagaacccugcugaugaacgagcugggcgugcccuuccaccugggcaccagacaggugugcaucgccuggagcagcagcagcugccacgacggcaaggccuggcugcacgugugcaucaccggcgacgacaagaacgccaccgccagcuucaucuacgacggcagacugguggacagcaucggcagcuggagccagaacauccugagaacccaggagagcgagugcgugugcaucaacggcaccugcaccguggugaugaccgacggcagcgccagcggcagagccgacaccagaauccuguucaucgaggagggcaagaucgugcacaucagcccccugagcggcagcgcccagcacguggaggagugcagcugcuaccccagauaccccggcgugagaugcaucugcagagacaacuggaagggcagcaacagacccgugguggacaucaacauggaggacuacagcaucgacagcagcuacgugugcagcggccuggugggcgacacccccagaaacgacgacagaagcagcaacagcaacugcaagaaccccaacaacgagagaggcaaccagggcgugaagggcugggccuucgacaacggcgacgacguguggaugggcagaaccaucagcaaggaccugagaagcggcuacgagaccuucaaggugaucggcggcuggagcacccccaacagcaagagccagaucaacagacaggugaucguggacagcgacaacagaagcggcuacagcggcaucuucagcguggagggcaagagcugcaucaacagaugcuucuacguggagcugaucagaggcagaaagcaggagaccagagugugguggaccagcaacagcaucgugguguucugcggcaccagcggcaccuacggcaccggcagcuggcccgacggcgccaacaucaacuucaugcccaucuga

SEQ ID NO: 176496 - RNA, 1410 nt, Artificial Sequence
  derived and/or modified CDS sequence (opt4) from neuraminidase__InfluenzaA__ACF22389
augaaccccaaccagaagaucaucaccaucggcagcgugagccugaccaucgccaccgugugcuuccugaugcagaucgccauccuggugaccaccgugacccugcacuucaagcaguacgagugcgacagccccgccagcaaccaggugaugcccugcgagcccaucaucaucgagagaaacaucaccgagaucguguaccugaacaacaccaccaucgagaaggagaucugccccaaggugguggaguacagaaacuggagcaagccccagugccagaucaccggcuucgugcccuucagcaaggacaacagcaucagacugagcgccggcggcgacaucugggugaccagagagcccuacgugagcugcgaccacggcaagugcuaccaguucgcccugggccagggcaccacccuggacaacaagcacagcaacgacaccauccacgacagaaucccccacagaacccugcugaugaacgagcugggcgugcccuuccaccugggcaccagacaggugugcaucgccuggagcagcagcagcugccacgacggcaaggccuggcugcacgugugcaucaccggcgacgacaagaacgccaccgccagcuucaucuacgacggcagacugguggacagcaucggcagcuggagccagaacauccugagaacccaggagagcgagugcgugugcaucaacggcaccugcaccguggugaugaccgacggcagcgccagcggcagagccgacaccagaauccuguucaucgaggagggcaagaucgugcacaucagcccccugagcggcagcgcccagcacguggaggagugcagcugcuaccccagauaccccggcgugagaugcaucugcagagacaacuggaagggcagcaacagacccgugguggacaucaacauggaggacuacagcaucgacagcagcuacgugugcagcggccuggugggcgacacccccagaaacgacgacagaagcagcaacagcaacugcagaaaccccaacaacgagagaggcaaccagggcgugaagggcugggccuucgacaacggcgacgacguguggaugggcagaaccaucagcaaggaccugagaagcggcuacgagaccuucaaggugaucggcggcuggagcacccccaacagcaagagccagaucaacagacaggugaucguggacagcgacaacagaagcggcuacagcggcaucuucagcguggagggcaagagcugcaucaacagaugcuucuacguggagcugaucagaggcagaaagcaggagaccagagugugguggaccagcaacagcaucgugguguucugcggcaccagcggcaccuacggcaccggcagcuggcccgacggcgccaacaucaacuucaugcccaucuga

SEQ ID NO: 176497 - RNA, 1410 nt, Artificial Sequence
  derived and/or modified CDS sequence (opt4) from neuraminidase__InfluenzaA__ACF22400
augaaccccaaccagaagaucaucaccaucggcagcgugagccugaccaucgccaccgugugcuuccugaugcagaucgccauccuggugaccaccgugacccugcacuucaagcaguacgagugcgacagccccgccagcaaccaggugaugcccugcgagcccaucaucaucgagagaaacaucaccgagaucguguaccugaacaacaccaccaucgagaaggagaucugccccaaggugguggaguacagaaacuggagcaagccccagugccagaucaccggcuucgcccccuucagcaaggacaacagcaucagacugagcgccggcggcgacaucugggugaccagagagcccuacgugagcugcgaccacggcaagugcuaccaguucgcccugggccagggcaccacccuggacaacaagcacagcaacgacaccauccacgacagaaucccccacagaacccugcugaugaacgagcugggcgugcccuuccaccugggcaccagacaggugugcaucgccuggagcagcagcagcugccacgacggcaaggccuggcugcacgugugcaucaccggcgacgacaagaacgccaccgccagcuucaucuacgacggcagacugauggacagcaucggcagcuggagccagaacauccugagaacccaggagagcgagugcgugugcaucaacggcaccugcaccguggugaugaccgacggcagcgccagcggcagagccgacaccagaauccuguucaucgaggagggcaagaucgugcacaucagcccccugagcggcagcgcccagcacguggaggagugcagcugcuaccccagauaccccggcgugagaugcaucugcagagacaacuggaagggcagcaacagacccgugguggacaucaacauggaggacuacagcaucgacagcagcuacgugugcagcggccuggugggcgacacccccagaaacgacgacagaagcagcaacagcaacugcagaaaccccaacaacgagagaggcaaccagggcgugaagggcugggccuucgacaacggcgacgacguguggaugggcagaaccaucagcaaggaccugagaagcggcuacgagaccuucaaggugaucggcggcuggagcacccccaacagcaagagccagaucaacagacaggugaucguggacagcgacaacagaagcggcuacagcggcaucuucagcguggagggcaagagcugcaucaacagaugcuucuacguggagcugaucagaggcagaaagcaggagaccagagugugguggaccagcaacagcaucgugguguucugcggcaccagcggcaccuacggcaccggcagcuggcccgacggcgccaacaucaacuucaugcccaucuga

SEQ ID NO: 176498 - RNA, 1410 nt, Artificial Sequence; identical to SEQ ID NO: 176126
  derived and/or modified CDS sequence (opt4) from neuraminidase__InfluenzaA__ACF22411

SEQ ID NO: 176499 - RNA, 1413 nt, Artificial Sequence
  derived and/or modified CDS sequence (opt4) from neuraminidase__InfluenzaA__ACF33772
augaaccccaaccagaagaucaucaccaucggcagcaucagcaucgccaucggcaucaucagccugaugcugcagaucggcaacaucaucagcaucugggccagccacagcauccagaccggcagccagaaccacaccggcaucugcaaccagagaaucaucaccuacgagaacagcaccugggugaaccacaccuacgugaacaucaacaacaccaacgugguggccggcaaggacaagacccccgugacccuggccggcaacagcagccugugcagcaucagcggcugggccaucuacaccaaggacaacagcaucagaaucggcagcaagggcgacguguucgugaucagagagcccuucaucagcugcagccaccuggagugcaagaccuucuuccugacccagggcgcccugcugaacgacaagcacagcaacggcaccgugaaggacagaagccccuacagagcccugaugagcugcccccugggcgaggcccccagccccuacaacagcaaguucgagagcguggccuggagcgccagcgccugccacgacggcaucggcuggcugaccaucggcaucagcggccccgacaacggcgccguggccgugcugaaguacaacggcaucaucaccggcaccaucaagagcuggaagaagcagauccugagaacccaggagagcgagugcgugugcaugaacggcagcugcuucaccaucaugaccgacggccccagcaacggcgccgccagcuacaagaucuucaagaucgagaagggcaaggugaccaagagcauggagcugaacgcccccaacuucuacuacgaggagugcagcugcuaccccgacaccggcaccgugaugugcgugugcagagacaacuggcacggcagcaacagacccugggugagcuucaaccagaaccuggacuaccagaucggcuacaucugcagcggcguguucggcgacaaccccagacccaaggacggcgagggcagcugcaaccccgugaccguggacggcgccaacggcgugaagggcuucagcuacaaguacggcaacggcguguggaucggcagaaccaagagcaacagaaucagaaagggcuucgagaugaucugggaccccaacggcuggaccaacaccgacagcgacuucagcgugaagcaggacaucguggccaucaccgacuggagcggcuacagcggcagcuucgugcagcaccccgagcugaccggccuggacugcaucagacccugcuucuggguggagcuggugagaggccugcccagagagaacaccaccaucuggaccagcggcagcagcaucagcuucugcggcgugaacagcgacaucgccaacuggagcuggcccgacggcgccgagcugcccuucaccaucgacaaguga

SEQ ID NO: 176500 - RNA, 1410 nt, Artificial Sequence
  derived and/or modified CDS sequence (opt4) from neuraminidase__InfluenzaA__ACF33778
augaaccccaaccagaagaucaucaccaucggcagcgugagccugaccaucagcaccaucugcuucuucaugcagaucgccauccugaucaccaccgugacccugcacuucaagcaguacgaguucagcagcccccccaacaaccaggugaugcugugcgagcccaccaucaucgagagaaacaucaccgagaucguguaccugaccaacaccaccaucgagaaggagaucugccccaagcuggccgaguacagaaacuggagcaagccccagugcgacaucaccggcuucgcccccuucagcaaggacaacagcaucagacugagcgccggcggcgacaucugggugaccagagagcccuacgugagcugcgaccccgacaagugcuaccaguucgcccugggccagggcaccacccugaacaacgugcacagcaacgacaccgugcacgacagaacccccuacagaacccugcugaugaacgagcugggcauccccuuccaccugggcaccaagcaggugugcaucgccuggagcagcagcagcugccacgacggcaaggccuggcugcacgugugcgugaccggcgacgacaagaacgccaccgccagcuucaucuacaacggcagacugguggacagcaucgugagcuggagcaaggagauccugagaacccaggagagcgagugcgugugcaucaacggcaccugcaccguggugaugaccgacggcagcgccagcggcaaggccgacaccaagauccuguucaucgaggagggcaagaucgugcacaccagcacccugagcggcagcgcccagaacguggaggagugcagcugcuaccccagauaccccggcgugagaugcgugugcagagacaacuggaagggcagcaacagacccaucguggacaucaacaucaaggacuacagcaucgugagcagauacgugugcagcggccuggugggcgacacccccagaaagaacgacagcagcagcagcagccacugccugaaccccaacaacgaggagggcggccacggcgugaagggcugggccuucgacgacggcaacgacguguggaugggcagaaccaucagcgagaagagcagaagcggcuacgagaccuucaaggugaucgagggcuggagcaaccccaacagcaagcugcagaucaacagacaggugaucguggacagaggcaacagaagcggcuacagcggcaucuucagcguggagggcaagagcugcaucaacagaugcuucuacguggagcugaucagaggcagaaaggaggagaccgaggugcuguggaccagcaacagcaucgugguguucugcggcaccagcggcaccuacggcaccggcagcuggcccgacggcgccgacaucaaccugaugcccaucuga

SEQ ID NO: 176501 - RNA, 1410 nt, Artificial Sequence
  derived and/or modified CDS sequence (opt4) from neuraminidase__InfluenzaA__ACF33785
augaaccccaaccagaagaucaucaccaucggcagcgugagccugaccaucagcaccaucugcuucuucaugcagaucgccauccugaucaccaccgugacccugcacuucaagcaguacgaguucaacagcccccccaacaaccaggugaugcugugcgagcccaccaucaucgagagaaacaucaccgagaucguguaccugaccaacaccaccaucgagaaggagaugugccccaagcuggccgaguacagaaacuggagcaagccccagugcgacaucaccggcuucgcccccuucagcaaggacaacagcaucagacugagcgccggcggcgacaucugggugaccagagagcccuacgugagcugcgaccccgacaagugcuaccaguucgcccugggccagggcaccacccugaacaacgugcacagcaacgacaccgugcacgugagaacccccuacagaacccugcugaugaacgagcugggcgugcccuuccaccugggcaccaagcaggugugcaucgccuggagcagcagcagcugccacgacggcaaggccuggcugcacgugugcgugaccggcgacgacaagaacgccaccgccagcuucaucuacaacggcagacugguggacagcaucgugagcuggagcaaggacauccugagaacccaggagagcgagugcgugugcaucaacggcaccugcaccguggugaugaccgacggcagcgccagcggcaaggccgacaccaagauccuguucaucgaggagggcaagaucgugcacaccagcacccugagcggcagcgcccagcacguggaggagugcagcugcuaccccagauaccccggcgugagaugcgugugcagagacaacuggaagggcagcaacagacccaucguggacaucaacaucaaggacuacagcaucgugagcagcuacgugugcagcggccuggugggcgacacccccagaaagaccgacagcagcagcagcagccacugccuggaccccaacaacgaggagggcggccacggcgugaagggcugggccuucgacgacggcaacgacguguggaugggcagaaccaucagcgagaagcugagacugggcuacgagaccuucaaggugaucgagggcuggagcaaccccaacagcaagcugcagaucaacagacaggugaucguggacagaggcaacagaagcggcuacagcggcaucuucagcguggagggcaagagcugcaucaacagaugcuucuacguggagcugaucagaggcagaaaggaggagaccgaggugcuguggaccagcaacagcaucgugguguucugcggcaccagcggcaccuacggcaccggcagcuggcccgacggcgccgacaucaaccugaugcccaucuga

SEQ ID NO: 176502 - RNA, 1413 nt, Artificial Sequence
  derived and/or modified CDS sequence (opt4) from neuraminidase__InfluenzaA__ACF33787
augaaccccaaccagaagaucaucaccaucggcagcaucagcaucgccaucggcaucaucagccugaugcugcagaucggcaacaucaucagcaucugggccagccacagcauccagaccggcagccagaaccacaccggcaucugcaaccagagaaucaucaccuacgagaacagcaccugggugaaccacaccuacgugaacaucaacaacaccaacgugguggccggcaaggacaagacccccgugacccuggccggcaacagcagccugugcagcaucagcggcugggccaucuacaccaaggacaacagcaucagaaucggcagcaagggcgacguguucgugaucagagagcccuucaucagcugcagccaccuggagugcaagaccuucuuccugacccagggcgcccugcugaacgacaagcacagcaacggcaccgugaaggacagaagccccuacagagcccugaugagcugcccccugggcgaggcccccagccccuacaacagcaaguucgagagcguggccuggagcgccagcgccugccacgacggcaucggcuggcugaccaucggcaucagcggccccgacaacggcgccguggccgugcugaaguacaacggcaucaucaccggcaccaucaagagcuggaagaagcagauccugagaacccaggagagcgagugcgugugcaugaacggcagcugcuucaccaucaugaccgacggccccggcaacggcgccgccagcuacaagaucuucaagaucgagaagggcaaggugaccaagagcauggagcugaacgcccccaacuuccacuacgaggagugcagcugcuaccccgacaccggcaccgugaugugcgugugcagagacaacuggcacggcagcaacagacccugggugagcuucaaccagaaccuggacuaccagaucggcuacaucugcagcggcguguucggcgacaaccccagacccaaggacggcgagggcagcugcaaccccgugaccguggacggcgccaacggcgugaagggcuucagcuacaaguacggcaacggcguguggaucggcagaaccaagagcaacagaaucagaaagggcuucgagaugaucugggaccccaacggcuggaccaacaccgacagcgacuucagcgugaagcaggacaucguggccaucaccgacuggagcggcuacagcggcagcuucgugcagcaccccgagcugaccggccuggacugcaucagacccugcuucuggguggagcuggugagaggccugcccaaggagaacaccaccaucuggaccagcggcagcagcaucagcuucugcggcgugaacagcggcaucgccaacuggagcuggcccgacggcgccgagcugcccuucaccaucgacaaguga

SEQ ID NO: 176503 - RNA, 1410 nt, Artificial Sequence; identical to SEQ ID NO: 175944
  derived and/or modified CDS sequence (opt4) from neuraminidase__InfluenzaA__ACF33798

SEQ ID NO: 176504 - RNA, 1410 nt, Artificial Sequence; identical to SEQ ID NO: 176117
  derived and/or modified CDS sequence (opt4) from neuraminidase__InfluenzaA__ACF41672

SEQ ID NO: 176505 - RNA, 1413 nt, Artificial Sequence; identical to SEQ ID NO: 176090
  derived and/or modified CDS sequence (opt4) from neuraminidase__InfluenzaA__ACF41683

SEQ ID NO: 176506 - RNA, 1410 nt, Artificial Sequence
  derived and/or modified CDS sequence (opt4) from neuraminidase__InfluenzaA__ACF41749
augaaccccaaccagaagaucaucaccaucggcagcgugagccugaccaucgccaccgugugcuuccugaugcagaucgccauccuggugaccaccgugacccugcacuucaagcaguacgagugcgacagccccgccagcaaccaggugaugcccugcgagcccaucaucaucgagagaaacaucaccggcaucguguaccugaacaacaccaccaucgagaaggagaucugccccaaggugguggaguacagaaacuggagcaagccccagugccagaucaccggcuucgcccccuucagcaaggacaacagcaucagacugagcgccggcggcgacaucugggugaccagagagcccuacgugagcugcgaccacggcaagugcuaccaguucgcccugggccagggcaccacccuggacaacaagcacagcaacgacaccauccacgacagaaucccccacagaacccugcugaugaacgagcugggcgugcccuuccaccugggcaccagacaggugugcaucgccuggagcagcagcagcugccacgacggcaaggccuggcugcacgugugcaucaccggcgacgacaagaacgccaccgccagcuucaucuacgacggcagacugguggacagcaucggcagcuggagccagaacauccugagaacccaggagagcgagugcgugugcaucaacggcaccugcaccguggugaugaccgacggcagcgccagcggcagagccgacaccagaauccuguucaucgaggagggcaagaucgugcacaucagcccccugagcggcagcgcccagcacguggaggagugcagcugcuaccccagauaccccggcgugagaugcaucugcagagacaacuggaagggcagcaacagacccgugguggacaucaacauggaggacuacagcaucgacagcagcuacgugugcagcggccuggugggcgacacccccagaaacgacgacagaagcagcaacagcaacugcagaaaccccaacaacgagagaggcaaccagggcgugaagggcugggccuucgacaacggcgacgacguguggaugggcagaaccaucagcaaggaccugagaagcggcuacgagaccuucaaggugaucggcggcuggagcacccccaacagcaagagccagaucaacagacaggugaucguggacagcgacaacagaagcggcuacagcggcaucuucagcguggagggcaagagcugcaucaacagaugcuucuacguggagcugaucagaggcagaaagcaggagaccagagugugguggaccagcaacagcaucgugguguucugcggcaccagcggcaccuacggcaccggcagcuggcccgacggcgccaacaucaacuucaugcccaucuga

SEQ ID NO: 176507 - RNA, 1410 nt, Artificial Sequence
  derived and/or modified CDS sequence (opt4) from neuraminidase__InfluenzaA__ACF41760
augaaccccaaccagaagaucaucaccaucggcagcgugagccugaccaucgccaccgugugcuuccugaugcagaucgccauccuggugaccaccgugacccugcacuucaagcaguacgagugcgacagccccgccagcaaccaggugaugcccugcgagcccaucaucaucgagagaaacaucaccgagaucguguaccugaacaacaccaccaucgagaaggagaucugccccaaggugguggaguacagaaacuggagcaagccccagugccagaucaccggcuucgcccccuucagcaaggacaacagcaucagacugagcgccggcggcgacaucugggugaccagagagcccuacgugagcugcgacagaggcaagugcuaccaguucgcccugggccagggcaccacccuggacaacaagcacagcaacgacaccauccacgacagaaucccccacagaacccugcugaugaacgagcugggcgugcccuuccaccugggcaccagacaggugugcaucgccuggagcagcagcagcugccacgacggcaaggccuggcugcacgugugcaucaccggcgacgacaagaacgccaccgccagcuucaucuacgacggcagacugguggacagcaucggcagcuggagccagaacauccugagaacccaggagagcgagugcgugugcaucaacggcaccugcaccguggugaugaccgacggcagcgccagcggcagagccgacaccagaauccuguucaucgaggagggcaagaucgugcacaucagcccccugagcggcagcgcccagcacguggaggagugcagcugcuaccccagauaccccggcgugagaugcaucugcagagacaacuggaagggcagcaacagacccgugguggacaucaacauggaggacuacagcaucgacagcagcuacgugugcagcggccuggugggcgacacccccagaaacgacgacagaagcagcaacagcaacugcagaaaccccaacaacgagagaggcaaccagggcgugaagggcugggccuucgacaacggcgacgacguguggaugggcagaaccaucagcaaggaccugagaagcggcuacgagaccuucaaggugaucggcggcuggagcacccccaacagcaagagccagaucaacagacaggugaucguggacagcgacaacagaagcggcuacagcggcaucuucagcguggagggcaagagcugcaucaacagaugcuucuacguggagcugaucagaggcagaaagcaggagaccagagugugguggaccagcaacagcaucgugguguucugcggcaccagcggcaccuacggcaccggcagcuggcccgacggcgccaacaucaacuucaugcccaucuga

SEQ ID NO: 176508 - RNA, 1410 nt, Artificial Sequence
  derived and/or modified CDS sequence (opt4) from neuraminidase__InfluenzaA__ACF41771
augaaccccaaccagaagaucaucaccaucggcagcgugagccugaccaucgccaccgugugcuuccugaugcagaucgccauccuggugaccaccgugacccugcacuucaagcaguacgagugcgacagccccgccagcaaccaggugaugcccugcgagcccaucaucaucgagagaaacaucaccgagaucguguaccugaacaacaccaccaucgagaaggagaucugccccaaggugguggaguacagaaacuggagcaagccccagugccagaucaccggcuucgcccccuucagcaaggacaacagcaucagacugagcgccggcggcgacaucugggugaccagagagcccuacgugagcugcgaccacggcaagugcuaccaguucgcccugggccagggcaccacccuggacaacaagcacagcaacgacaccauccacgacagaaucccccacagaacccugcugaugaacgagcugggcgugcccuuccaccugggcaccagacaggugugcaucgccuggagcagcagcagcugccacgacggcaaggccuggcugcacgugugcaucaccggcgacgacaagaacgccaccgccagcuucaucuacgacggcagacugguggacagcaucggcagcuggagccagaacauccugagaacccaggagagcgagugcgugugcaucaacggcaccugcaccguggugaucaccgacggcagcgccagcggcagagccgacaccagaauccuguucaucgaggagggcaagaucgugcacaucagcccccugagcggcagcgcccagcacguggaggagugcagcugcuaccccagauaccccggcgugagaugcaucugcagagacaacuggaagggcagcaacagacccgugguggacaucaacauggaggacuacagcaucgacagcagcuacgugugcagcggccuggugggcgacacccccagaaacgacgacagaagcagcaacagcaacugcagaaaccccaacaacgagagaggcaaccagggcgugaagggcugggccuucgacaacggcgacgacguguggaugggcagaaccaucagcaaggaccugagaagcggcuacgagaccuucaaggugaucggcggcuggagcacccccaacagcaagagccagaucaacagacaggugaucguggacagcgacaacagaagcggcuacagcggcaucuucagcguggagggcaagagcugcaucaacagaugcuucuacguggagcugaucagaggcagaaagcaggagaccagagugugguggaccagcaacagcaucgugguguucugcggcaccagcggcaccuacggcaccggcagcuggcccgacggcgccaacaucaacuucaugcccaucuga

SEQ ID NO: 176509 - RNA, 1410 nt, Artificial Sequence; identical to SEQ ID NO: 174155
  derived and/or modified CDS sequence (opt4) from neuraminidase__InfluenzaA__ACF41793

SEQ ID NO: 176510 - RNA, 1410 nt, Artificial Sequence; identical to SEQ ID NO: 174155
  derived and/or modified CDS sequence (opt4) from neuraminidase__InfluenzaA__ACF41804

SEQ ID NO: 176511 - RNA, 1410 nt, Artificial Sequence; identical to SEQ ID NO: 174155
  derived and/or modified CDS sequence (opt4) from neuraminidase__InfluenzaA__ACF41826

SEQ ID NO: 176512 - RNA, 1365 nt, Artificial Sequence; identical to SEQ ID NO: 175779
  derived and/or modified CDS sequence (opt4) from neuraminidase__InfluenzaA__ACF41837

SEQ ID NO: 176513 - RNA, 1413 nt, Artificial Sequence
  derived and/or modified CDS sequence (opt4) from neuraminidase__InfluenzaA__ACF41881
augaaccccaaccagaagaucaucaccaucggcagcaucagcaucgccaucggcaucaucagccugaugcugcagaucggcaacaucaucagcaucugggccagccacagcauccagaccggcagccagaaccacaccggcgugugcaaccagagaaucaucaccuacgagaacagcaccugggugaaccacaccuacgugaacaucaacaacaccaacgugguggccggcaaggacaagaccagcgugacccuggccggcaacagcagccugugcagcaucagcggcugggccaucuacaccaaggacaacagcaucagaaucggcagcaagggcgacguguucgugaucagagagcccuucaucagcugcagccaccuggagugcagaaccuucuuccugacccagggcgcccugcugaacgacaagcacagcaacggcaccgugaaggacagaagccccuacagagcccugaugagcugcccccugggcgaggcccccagccccuacaacagcaaguucgagagcguggccuggagcgccagcgccugccacgacggcaugggcuggcugaccaucggcaucagcggccccgacaacggcgccguggccgugcugaaguacaacggcaucaucaccgagaccaucaagagcuggaagaagagaauccugagaacccaggagagcgagugcgugugcgugaacggcagcugcuucaccaucaugaccgacggccccagcaacggcgccgccagcuacaagaucuucaagaucgagaagggcaaggugaccaagagcaucgagcugaacgcccccaacuuccacuacgaggagugcagcugcuaccccgacaccggcaccgugaugugcgugugcagagacaacuggcacggcagcaacagacccugggugagcuucaaccagaaccuggacuaccagaucggcuacaucugcagcggcguguucggcgacaaccccagacccaaggacggcgagggcagcugcaaccccgugaccguggacggcgccgacggcgugaagggcuucagcuacaaguacggcaacggcguguggaucggcagaaccaagagcaacagacugagaaagggcuucgagaugaucugggaccccaacggcuggaccgacaccgacagcgacuucagcgugaagcaggacgugguggccaucaccgacuggagcggcuacagcggcagcuucgugcagcaccccgagcugaccggccuggacugcaucagacccugcuucuggguggagcuggugagaggccugcccagagagaacaccaccaucuggaccagcggcagcagcaucagcuucugcggcgugaacagcgacaccgccaacuggagcuggcccgacggcgccgagcugcccuucaccaucgacaaguga

SEQ ID NO: 176514 - RNA, 1410 nt, Artificial Sequence; identical to SEQ ID NO: 175989
  derived and/or modified CDS sequence (opt4) from neuraminidase__InfluenzaA__ACF41892

SEQ ID NO: 176515 - RNA, 1410 nt, Artificial Sequence; identical to SEQ ID NO: 174387
  derived and/or modified CDS sequence (opt4) from neuraminidase__InfluenzaA__ACF41903

SEQ ID NO: 176516 - RNA, 1410 nt, Artificial Sequence
  derived and/or modified CDS sequence (opt4) from neuraminidase__InfluenzaA__ACF41914
augaaccccaaccagaagaucaucaccaucggcagcgugagccugaccaucagcaccaucugcuucuucaugcagaucgccauccugaucaccaccgugacccugcacuucaagcaguacgaguucaacagcccccccaacaaccaggugaugcugugcgagcccaccaucaucgagagaaacaucaccgagaucguguaccugaccaacaccaccaucgagaaggagaucugccccaagcuggccgaguacagaaacuggagcaagccccagugcaacaucaccggcuucgcccccuucagcaaggacaacagcaucagacugagcgccggcggcgacaucugggugaccagagagcccuacgugagcugcgaccccgacaagugcuaccaguucgcccugggccagggcaccacccugaacaacgugcacagcaacgacaccgugcacgacagaacccccuacagaacccugcugaugaacgagcugggcgugcccuuccaccugggcaccaagcaggugugcaucgccuggagcagcagcagcugccacgacggcaaggccuggcugcacgugugcgugaccggcgacgacaagaacgccaccgccagcuucaucuacaacggcagacugguggacagcaucgugagcuggagcaaggagauccugagaacccaggagagcgagugcgugugcaucaacggcaccugcaccguggugaugaccgacggcagcgccagcggcaaggccgacaccaagauccuguucaucgaggagggcaagaucgugcacaccagcacccugagcggcagcgcccagcacguggaggagugcagcugcuaccccagauaccugggcgugagaugcgugugcagagacaacuggaagggcagcaacagacccaucguggacaucaacaucaaggacuacagcaucgugagcagcuacgugugcagcggccuggugggcgacacccccagaaagaacgacagcagcagcagcagccacugccuggaccccaacaacgaggagggcggccacggcgugaagggcugggccuucgacgacggcaacgacguguggaugggcagaaccaucagcgagaagcugagaagcggcuacgagaccuucaaggugaucgagggcuggagcaaccccaacagcaagcugcagaucaacagacaggugaucguggacagaggcaacagaagcggcuacagcggcaucuucagcguggagggcaagagcugcaucaacagaugcuucuacguggagcugaucagaggcagaaaggaggagaccgaggugcuguggaccagcaacagcaucgugguguucugcggcaccagcggcaccuacggcaccggcagcuggcccgacggcgccgacaucaaccugaugcccaucuga

SEQ ID NO: 176517 - RNA, 1413 nt, Artificial Sequence
  derived and/or modified CDS sequence (opt4) from neuraminidase__InfluenzaA__ACF41925
augaaccccaaccagaagaucaucaccaucggcagcaucagcauggccaucggcaucaucagccugauccugcagaucggcaacaucaucagcaucugggccagccacagcauccagaccggcagccagaaccacaccggcaucugcaaccagagaaucaucaccuacgagaacagcaccugggugaaccagaccuacgugaacaucaacaacaccaacgugguggccggcaaggacaagaccagcgugacccuggccggcaacagcagccugugccccaucagaggcugggccaucuacaccaaggacaacagcaucagaaucggcagcaagggcgacguguucgugaucagagagcccuucaucagcugcagccaccuggagugcagaaccuucuuccugacccagggcgcccugcugaacgacaagcacagcaacggcaccgugaaggacagaagccccuacagagcccugaugagcugcccccugggcgaggcccccagccccuacaacagcagauucgagagcguggccuggagcgccagcgccugccacgacggcaugggcuggcugaccaucggcaucagcggccccgacaacggcgccguggccgugcugaaguacaacggcaucaucaccgagaccaucaagagcuggaagaagagaauccugagaacccaggagagcgagugcgugugcgugaacggcagcugcuucaccaucaugaccgacggccccagcaacggcgccgccagcuacagaaucuucaagaucgagaagggcaaggugaccaagagcaucgagcuggacgcccccaacuaccacuacgaggagugcagcugcuaccccgacaccggcaccgugaugugcgugugcagagacaacuggcacggcagcaacagacccugggugagcuucaaccagaaccuggacuaccagaucggcuacaucugcagcggcguguucggcgacaaccccagacccaaggacggcgagggcagcugcaaccccgugaccguggacggcgccgacggcgugaagggcuucagcuacagauacggcaacggcguguggaucggcagaaccaagagcaacagacugagaaagggcuucgagaugaucugggaccccaacggcuggaccgacaccgacagcgacuucagcgugaagcaggacgugguggccaugaccgacuggagcggcuacagcggcagcuucgugcagcaccccgagcugaccggccuggacugcaugagacccugcuucuggguggagcugaucagaggcagacccagagagaacaccaccaucuggaccagcggcagcagcaucagcuucugcggcgugaacagcgacaccgccaacuggagcuggcccgacggcgccgagcugcccuucaccaucgacaaguga

SEQ ID NO: 176518 - RNA, 1413 nt, Artificial Sequence; identical to SEQ ID NO: 176517
  derived and/or modified CDS sequence (opt4) from neuraminidase__InfluenzaA__ACF41936

SEQ ID NO: 176519 - RNA, 1410 nt, Artificial Sequence
  derived and/or modified CDS sequence (opt4) from neuraminidase__InfluenzaA__ACF54392
augaaccccaaccagaagaucaucaccaucggcagcgugagccugaccaccgccaccgccugcuuccugacccagaucgccauccuggugaccaccgugacccugcacuucaagcagcacgagugcgacagccccgccagcaaccaggugaugcccugcgagcccaucaucaucgagagaaacaucaccgagaucguguaccugaacaacaccaccaucgagaaggagaucugccccaaggugguggaguacagaaacuggagcaagccccagugccagaucaccggcuucgcccccuucagcaaggacaacagcaucagacugagcgccggcggcgacaucugggugaccagagagcccuacgugagcugcgacagcggcaagugcuaccaguucgcccugggccagggcaccacccuggacaacaagcacagcaacgacaccauccacgacagaaucccccacagaacccugcugaugaacgagcugggcgugcccuuccaccugggcaccagacaggugugcaucgccuggagcagcagcagcugccacgacggcaaggccuggcugcacgugugcaucaccggcgacgacaagaacgccaccgccagcuucaucuacgacggcagacugguggacagcaucggcagcuggagccagaacauccugagaacccaggagagcgagugcgugugcaucaacggcaccugcaccguggugaugaccgacggcagcgccagcggcagagccgacaccagaauccuguucaucgaggagggcaagaucgugcacaucagcccccugagcggcagcgcccagcacguggaggagugcagcugcuaccccagauaccccggcgugagaugcaucugcagagacaacuggaagggcagcaacagacccgugguggacaucaacauggaggacuacagcaucgacagcagcuacgugugcagcggccuggugggcgacacccccagaaacgacgacagauucagcaacagcaacugcagaaaccccaacaacgagagaggcaaccagggcgugaagggcugggccuucgacaacggcgacgacguguggaugggcagaaccaucagcaaggaccugagaagcggcuacgagaccuucaaggugaucggcggcuggagcacccccaacagcaagagccagaucaacagacaggugaucguggacagcgacaacagaagcggcuacagcggcaucuucagcguggagggcaagagcugcaucaacagaugcuucuacguggagcugaucagaggcagaaagcaggagaccagagugugguggaccagcaacagcaucgugguguucugcggcaccagcggcaccuacggcaccggcagcuggcccgacggcgccaacaucaacuucaugcccaucuga

SEQ ID NO: 176520 - RNA, 1410 nt, Artificial Sequence; identical to SEQ ID NO: 174155
  derived and/or modified CDS sequence (opt4) from neuraminidase__InfluenzaA__ACF54403

SEQ ID NO: 176521 - RNA, 1410 nt, Artificial Sequence; identical to SEQ ID NO: 174155
  derived and/or modified CDS sequence (opt4) from neuraminidase__InfluenzaA__ACF54414

SEQ ID NO: 176522 - RNA, 1410 nt, Artificial Sequence; identical to SEQ ID NO: 174155
  derived and/or modified CDS sequence (opt4) from neuraminidase__InfluenzaA__ACF54425

SEQ ID NO: 176523 - RNA, 1410 nt, Artificial Sequence; identical to SEQ ID NO: 174155
  derived and/or modified CDS sequence (opt4) from neuraminidase__InfluenzaA__ACF54436

SEQ ID NO: 176524 - RNA, 1410 nt, Artificial Sequence
  derived and/or modified CDS sequence (opt4) from neuraminidase__InfluenzaA__ACF54447
augaaccccaaccagaagaucaucaccaucggcagcgugagccugaccaucgccaccgugugcuuccugaugcagaucgccauccuggugaccaccgugacccugcacuucaagcaguacgagugcgacagccccgccagcaaccaggugaugcccugcgagcccaucaucaucgagagaaacaucaccgagaucguguaccugaacaacaccaccaucgagaaggagaucugccccaaggugguggaguacagaaacuggagcaagccccagugccagaucaccggcuucgcccccuucagcaaggacaacagcaucagacugagcgccggcggcgacaucugggugaccagagagcccuacgugagcugcgaccacggcaagugcuaccaguucgcccugggccagggcaccacccuggacaacaagcacagcaacgacaccauccacgacagaaucccccacagaacccugcugaugaacgagcugggcgugcccuuccaccugggcaccaagcaggugugcaucgccuggagcagcagcagcugccacgacggcaaggccuggcugcacgugugcaucaccggcgacgacaagaacgccaccgccagcuucaucuacgacggcagacugguggacagcaucggcagcuggagccagaacauccugagaacccaggagagcgagugcgugugcaucaacggcaccugcaccguggugaugaccgacggcagcgccagcggcagagccgacaccagaauccuguucaucgaggagggcaagaucgugcacaucagcccccugagcggcagcgcccagcacguggaggagugcagcugcuaccccagauaccccggcgugagaugcaucugcagagacaacuggaagggcagcaacagacccgugguggacaucaacauggaggacuacagcaucgacagcagcuacgugugcagcggccuggugggcgacacccccagaaacgacgacagaagcagcaacagcaacugcagaaaccccaacaacgagagaggcaaccagggcgugaagggcugggccuucgacaacggcgacgacguguggaugggcagaaccaucagcaaggaccugagaagcggcuacgagaccuucaaggugaucggcggcuggagcacccccaacagcaagagccagaucaacagacaggugaucguggacagcgacaacagaagcggcuacagcggcaucuucagcguggagggcaagagcugcaucaacagaugcuucuacguggagcugaucagaggcagaaagcaggagaccagagugugguggaccagcaacagcaucgugguguucugcggcaccagcggcaccuacggcaccggcagcuggcccgacggcgccaacaucaacuucaugcccaucuga

SEQ ID NO: 176525 - RNA, 1410 nt, Artificial Sequence
  derived and/or modified CDS sequence (opt4) from neuraminidase__InfluenzaA__ACF54469
augaaccccaaccagaagaucaucaccaucggcagcgugagccugaccaucgccaccgugugcuuccugaugcagaucgccauccuggugaccaccgugacccugcacuucaagcaguacgagugcgacagccccgccagcaaccaggugaugcccugcgagcccaucaucaucgagagaaacaucaccgagaucguguaccugaacaacaccaccaucgagaaggagaucugccccaaggugguggaguacagaaacuggagcaagccccagugccagaucaccggcuucgcccccuucagcaaggacaacagcaucagacugagcgccggcggcgacaucugggugaccagagagcccuacgugagcugcgaccacggcaagugcuaccaguucgcccugggccagggcaccacccuggacaacaagcacagcaacgacaccauccacgacagaaucccccacagaacccugcugaugaacgagcugggcgugcccuuccaccugggcaccagacaggugugcauggccuggagcagcagcagcugccacgacggcaaggccuggcugcacgugugcaucaccggcgacgacaagaacgccaccgccagcuucaucuacgacggcagacugguggacagcaucggcagcuggagccagaacauccugagaacccaggagagcgagugcgugugcaucaacggcaccugcaccguggugaugaccgacggcagcgccagcggcagagccgacaccagaauccuguucaucgaggagggcaagaucgugcacaucagcccccugagcggcagcgcccagcacguggaggagugcagcugcuaccccagauaccccggcgugagaugcaucugcagagacaacuggaagggcagcaacagacccgugguggacaucaacauggaggacuacagcaucgacagcagcuacgugugcagcggccuggugggcgacacccccagaaacgacgacagaagcagcaacagcaacugcagaaaccccaacaacgagagaggcaaccagggcgugaagggcugggccuucgacaacggcgacgacguguggaugggcagaaccaucagcaaggaccugagaagcggcuacgagaccuucaaggugaucggcggcuggagcacccccaacagcaagagccagaucaacagacaggugaucguggacagcgacaacagaagcggcuacagcggcaucuucagcguggagggcaagagcugcaucaacagaugcuucuacguggagcugaucagaggcagaaagcaggagaccagagugugguggaccagcaacagcaucgugguguucugcggcaccagcggcaccuacggcaccggcagcuggcccgacggcgccaacaucaacuucaugcccaucuga

SEQ ID NO: 176526 - RNA, 1410 nt, Artificial Sequence; identical to SEQ ID NO: 175820
  derived and/or modified CDS sequence (opt4) from neuraminidase__InfluenzaA__ACF54480

SEQ ID NO: 176527 - RNA, 1410 nt, Artificial Sequence
  derived and/or modified CDS sequence (opt4) from neuraminidase__InfluenzaA__ACF54502
augaaccccaaccagaagaucaucaccaucggcagcgugagccugaccaucgccaccgugugcuuccugaugcagaucgccauccuggccaccaccgugacccugcacuucaagcagcacgagugcgacagccccgccagcaaccaggugaugcccugcgagcccaucaucaucgagagaaacaucaccgagaucguguaccugaacaacaccaccaucgagaaggagaucugccccgaggugguggaguacagaaacuggagcaagccccagugccagaucaccggcuucgcccccuucagcaaggacaacagcaucagacugagcgccggcggcgacaucugggugaccagagagcccuacgugagcugcgaccccggcaagugcuaccaguucgcccugggccagggcaccacccuggacaacaagcacagcaacggcaccauccacgacagaaucccccacagaacccugcugaugaacgagcugggcgugagcuuccaccugggcaccaagcaggugugcguggccuggagcagcagcagcugccacgacggcaaggccuggcugcacgugugcgugaccggcgacgacagaaacgccaccgccagcuucaucuacgacggcagacugguggacagcaucggcagcuggagccagaacauccugagaacccaggagagcgagugcgugugcaucaacggcaccugcaccguggugaugaccgacggcagcgccagcggcagagccgacaccagaauccuguucaucaaggagggcaagaucgugcacaucagcccccugagcggcagcgcccagcacaucgaggagugcagcugcuaccccagauaccccgacgugagaugcaucugcagagacaacuggaagggcagcaacagacccgugaucgacaucaacauggaggacuacagcaucgacagcagcuacgugugcagcggccuggugggcgacacccccagaaacgacgacagcagcagcaacagcaacugcagagaccccaacaacgagagaggcaaccccggcgugaagggcugggccuucgacaacggcgacgacguguggaugggcagaaccaucaacaaggacagcagaagcggcuacgagaccuucaaggugaucggcggcuggagcacccccaacagcaagagccaggugaacagacaggugaucguggacaacaacaacuggagcggcuacagcggcaucuucagcguggagggcaagagcugcaucaacagaugcuucuacguggagcugaucagaggcagaccccaggagaccagagugugguggaccagcaacagcaucgugguguucugcggcaccagcggcaccuacggcaccggcagcuggcccgacggcgccaacaucaacuucaugcccaucuga

SEQ ID NO: 176528 - RNA, 1410 nt, Artificial Sequence; identical to SEQ ID NO: 176527
  derived and/or modified CDS sequence (opt4) from neuraminidase__InfluenzaA__ACF54513

SEQ ID NO: 176529 - RNA, 1410 nt, Artificial Sequence
  derived and/or modified CDS sequence (opt4) from neuraminidase__InfluenzaA__ACF54524
augaaccccaaccagaagaucaucaccaucggcagcgugagccugaccaucgccaccgugugcuucuucaugcagaucgccauccuggccaccaccgugacccugcacuucaagcagcacgagugcgacagccccgccagcaaccaggugaugcccugcgagcccaucaucaucgagagaaacaucaccgagaucguguaccugaacaacaccaccaucgagaaggagaucugccccgaggugguggaguacagaaacuggagcaagccccagugccagaucaccggcuucgcccccuucagcaaggacaacagcaucagacugagcgccggcggcgacaucugggugaccagagagcccuacgugagcugcgaccccggcaagugcuaccaguucgcccugggccagggcaccacccuggacaacaagcacagcaacggcaccauccacgacagaaucccccacagaacccugcugaugaacgagcugggcgugagcuuccaccugggcaccaagcaggugugcguggccuggagcagcagcagcugccacgacggcaaggccuggcugcacgugugcgugaccggcgacgacagaaacgccaccgccagcuucaucuacgacggcagacugguggacagcaucggcagcuggagccagaacauccugagaacccaggagagcgagugcgugugcaucaacggcaccugcaccguggugaugaccgacggcagcgccagcggcagagccgacaccagaauccuguucaucaaggagggcaagaucgugcacaucagcccccugagcggcagcgcccagcacaucgaggagugcagcugcuaccccagauaccccgacgugagaugcaucugcagagacaacuggaagggcagcaacagacccgugaucgacaucaacauggaggacuacagcaucgacagcagcuacgugugcagcggccuggugggcgacacccccagaaacgacgacagcagcagcaacagcaacugcagagaccccaacaacgagagaggcaaccccggcgugaagggcugggccuucgacaacggcgacgacguguggaugggcagaaccaucaacaaggacagcagaagcggcuacgagaccuucaaggugaucggcggcuggagcacccccaacagcaagagccaggugaacagacaggugaucguggacaacaacaacuggagcggcuacagcggcaucuucagcguggagggcaagagcugcaucaacagaugcuucuacguggagcugaucagaggcagaccccaggagaccagagugugguggaccagcaacagcaucgugguguucugcggcaccagcggcaccuacggcaccggcagcuggcccgacggcgccaacaucaacuucaugcccaucuga

SEQ ID NO: 176530 - RNA, 1410 nt, Artificial Sequence
  derived and/or modified CDS sequence (opt4) from neuraminidase__InfluenzaA__ACF54535
augaaccccaaccagaagaucaucaccaucggcagcgugagccugaucaucagcaccaucugcuucuucaugcagaccgccauccugaucaccaccgugacccugcacuucaagcaguacgaguucaacagcccccccaacaaccaggugaugcugugcgagcccaccaucaucgagagaaacaucaccaagaucguguaccugaccaacaccaccaucgagaaggagaucugccccaagcuggccgaguacagaaacuggagcaagccccagugcgacaucaccggcuucgcccccuucagcaaggacaacagcaucagacugagcgccggcggcgacaucugggugaccagagagcccuacgugagcugcgaccccgacaagugcuaccaguucgcccugggccagggcaccacccugaacaacgugcacagcaacgacaccgugagagacagaacccccuacagaacccugcugaugaacgagcugggcgugcccuuccaccugggcaccaagcaggugugcaucgccuggagcagcagcagcugccacgacggcaaggccuggcugcacgugugcaucaccggcgacgacaagaacgccaccgccagcuucaucuacaacggcagacugguggacagcaucgugagcuggagcaaggagauccugagaacccaggagagcgagugcgugugcaucaacggcaccugcaccguggugaugaccgacggcagcgccagcggcaaggccgacaccaagauccuguucaucgaggagggcaagaucgugcacaccagcacccugagcggcagcgcccagcacguggaggagugcagcugcuaccccagauaccccggcgugagaugcgugugcagagacaacuggaagggcagcaacagacccaucguggacaucaacaucaaggaccacagcaucgugagcagcuacgugugcagcggccuggugggcgacacccccagaaagaacgacagcagcagcagcagccacugccuggaccccaacaacgaggagggcggccacggcgugaagggcugggccuucgacgacggcaacgacguguggaugggcagaaccaucagcgagaagagcagacugggcuacgagaccuucaaggugaucgagggcuggagcaaccccaagagcaagcugcagaucaacagacaggugaucguggacagaggcaacagaagcggcuacagcggcaucuucagcguggagggcaagagcugcaucaacagaugcuucuacguggagcugaucagaggcagaaaggaggagaccgaggugcuguggaccagcaacagcaucgugguguucugcggcaccagcggcaccuacggcaccggcagcuggcccgacggcgccgacaucaaccugaugcccaucuga

SEQ ID NO: 176531 - RNA, 1410 nt, Artificial Sequence; identical to SEQ ID NO: 174344
  derived and/or modified CDS sequence (opt4) from neuraminidase__InfluenzaA__ACF54557

SEQ ID NO: 176532 - RNA, 1410 nt, Artificial Sequence; identical to SEQ ID NO: 175989
  derived and/or modified CDS sequence (opt4) from neuraminidase__InfluenzaA__ACF54568

SEQ ID NO: 176533 - RNA, 1410 nt, Artificial Sequence
  derived and/or modified CDS sequence (opt4) from neuraminidase__InfluenzaA__ACF54579
augaaccccaaccagaagaucaucaccaucggcagcgugagccugaccaucagcaccaucugcuucuucaugcagaucgccauccugaucaccaccgugacccugcacuucaagcaguacgaguucaacagcccccccaacaaccaggugaugcugugcgagcccaccaucaucgagagaaacaucaccgagaucguguaccugaccaacaccaccaucgagaaggagaucugccccaagcuggccgaguacagaaacuggagcaagccccagugcaacaucaccggcuucgcccccuucagcaaggacaacagcaucagacugagcgccggcggcgacaucugggugaccagagagcccuacgugagcugcgaccccgacaagugcuaccaguucgcccugggccagggcaccacccugaacaacgugcacagcaacgacaccgugcacgacagaacccccuacagaacccugcugaugaacgagcugggcgugcccuuccaccugggcaccaagcaggugugcaucgccuggagcagcagcagcugccacgacggcaaggccuggcugcacgugugcgugaccggcgacgacaagaacgccaccgccagcuucaucuacaacggcagacugguggacagcaucgugagcuggagcaaggagauccugagaacccaggagagcgagugcgugugcaucaacggcaccugcaccguggugaucaccgacggcagcgccagcggcaaggccgacaccaagauccuguucaucgaggagggcaagaucgugcacaccagcacccugagcggcagcgcccagcacguggaggagugcagcugcuaccccagauaccccggcgugagaugcgugugcagagacaacuggaagggcagcaacagacccaucguggacaucaacaucaaggacuacagcaucgugagcagcuacgugugcagcggccuggugggcgacacccccagaaagaacgacagcagcagcagcagccacugccuggaccccaacaacgaggagggcggccacggcgugaagggcugggccuucgacgacggcaacgacguguggaugggcagaaccaucagcgagaagcugagaagcggcuacgagaccuucaaggugaucgagggcuggagcaaccccaacagcaagcugcagaucaacagacaggugaucguggacagaggcaacagaagcggcuacagcggcaucuucagcguggagggcaagagcugcaucaacagaugcuucuacguggagcugaucagaggcagaaaggaggagaccgaggugcuguggaccagcaacagcaucgugguguucugcggcaccagcggcaccuacggcaccggcagcuggcccgacggcgccgacaucaaccugaugcccaucuga

SEQ ID NO: 176534 - RNA, 1362 nt, Artificial Sequence
  derived and/or modified CDS sequence (opt4) from neuraminidase__InfluenzaA__ACF54601
augaaccccaaccagaagaucaucaccaucggcagcaucugcaugguggugggcaucaucagccugauccugcagaucggcaacaucaucagcaucuggaucagccacagcauccagaccggcaaccagaaccacaccggcaucugcaaccagggcagcaucaccuacaaggugguggccggccaggacagcaccagcgugauccugaccggcaacagcagccugugccccaucagaggcugggccauccacagcaaggacaacggcaucagaaucggcagcaagggcgacguguucgugaucagagagcccuucaucagcugcagccaccuggagugcagaaccuucuuccugacccagggcgcccugcugaacgacaagcacagcagaggcaccuucaaggacagaagccccuacagagcccugaugagcugccccgugggcgaggcccccagccccuacaacagcagauucgagagcguggccuggagcgccagcgccugccacgacggcaugggcuggcugaccaucggcaucagcggccccgacgacggcgccguggccgugcugaaguacaacggcaucaucaccgagaccaucaagagcuggagaaagaacauccugagaacccaggagagcgagugcaccugcgugaacggcagcugcuucaccaucaugaccgacggccccagcgacggccuggccagcuacaagaucuucaagaucgagaagggcaaggugaccaagagcaucgagcugaacgcccccaacagccacuacgaggagugcagcugcuaccccgacaccggcaaggugaugugcgugugcagagacaacuggcacggcagcaacagacccugggugagcuucgaccagaaccuggacuacaagaucggcuacaucugcagcggcguguucggcgacaaccccagacccaaggacggcaccggcagcugcggccccgugagcgccgacggcgccaacggcgugaagggcuucagcuacaaguacggcaacggcguguggaucggcagaaccaagagcgacagcagcagacacggcuucgagaugaucugggaccccaacggcuggaccgagaccgacagcagauucagcaugagacaggacgugguggccaugaccgacagaagcggcuacagcggcagcuucgugcagcaccccgagcugaccggccuggacugcaugagacccugcuucuggguggagcugaucagaggccugcccgaggagaacgccaucuggaccagcggcagcaucaucagcuucugcggcgugaacagcgacaccguggacuggagcuggcccgacggcgccgagcugcccuucaccaucgacaaguga

SEQ ID NO: 176535 - RNA, 1350 nt, Artificial Sequence
  derived and/or modified CDS sequence (opt4) from neuraminidase__InfluenzaA__ACG50700
augaaccccaaccagaagaucaucaccaucggcagcaucugcauggugaucggcaucgugagccugaugcugcagaucggcaacaugaucagcaucugggugagccacagcauccagaccggcaaccagcaccaggccgagcccaucagcaacaccaacuuccugaccgagaaggccguggccagcgugacccuggccggcaacagcccccugugccccaucagcggcugggccgugcacagcaaggacaacagcaucagaaucggcagcaagggcgacguguucgugaucagagagcccuucaucagcugcagccaccuggagugcagaaccuucuuccugacccagggcgcccugcugaacgacaagcacagcaacggcaccgugaaggacagaagcccccacagaacccugaugagcugccccgugggcgaggcccccagccccuacaacagcagauucgagagcguggccuggagcgccagcgccugccacgacggcaccagcuggcugaccaucggcaucagcggccccgacaacggcgccguggccgugcugaaguacaacggcaucaucaccgacaccaucaagagcuggagaaacaacauccugagaacccaggagagcgagugcgccugcgugaacggcagcugcuucaccgugaugaccgacggccccagcaacggccaggccagcuacaagaucuucaagauggagaagggcaagguggugaagagcguggagcuggacgcccccaacuaccacuacgaggagugcagcugcuaccccgacgccagcgaggugaccugcgugugcagagacaacuggcacggcagcaacagacccugggugagcuucaaccagaaccuggaguaccagaucggcuacaucugcagcggcguguucggcgacaaccccagacccaacgacggcaccggcagcugcggccccgugagcaccaacggcgccuacggcgugaagggcuucagcuucaaguacggcaacggcguguggaucggcagaaccaagagcaccaacagcagaagcggcuucgagaugaucugggacagcaacggcuggaccggcaccgacagcagcuucagcgugaagcaggacaucguggccaucaccgacuggagcggcuacagcggcagcuucgugcagcaccccgagcugaccggccuggacugcaucagacccugcuucuggguggagcugaucagaggcagacccaaggagagcaccaucuggaccagcggcagcagcaucagcuucugcggcgugaacagcgacaccgugggcuggagcuggcccgacggcgccgagcugcccuucaccaucgacaaguga

SEQ ID NO: 176536 - RNA, 1410 nt, Artificial Sequence; identical to SEQ ID NO: 176117
  derived and/or modified CDS sequence (opt4) from neuraminidase__InfluenzaA__ACG70145

SEQ ID NO: 176537 - RNA, 1410 nt, Artificial Sequence; identical to SEQ ID NO: 175944
  derived and/or modified CDS sequence (opt4) from neuraminidase__InfluenzaA__ACG70156

SEQ ID NO: 176538 - RNA, 1410 nt, Artificial Sequence
  derived and/or modified CDS sequence (opt4) from neuraminidase__InfluenzaA__ACG80407
augaaccccaaccagaagaucaucaccaucggcagcgugagccugaccaucagcaccaucugcuucuucaugcagaucgccauccugaucaccaccgugacccugcacuucaagcaguacgaguucaacagcccccccaacaaccagaugaugcugugcgagcccaccaucaucgagagaaacaucaccgagaucguguaccugaccaacaccaccaucgagaaggagaucugccccaagcuggccaaguacagaaacuggagcaagccccagugcgacaucaccggcuucgcccccuucagcaaggacaacagcaucagacugagcgccggcggcgacaucugggugaccagagagcccuacgugagcugcgaccccgacaagugcuaccaguucgcccugggccagggcaccacccugaacaacgugcacagcaacgacaccgccagaggcagaacccccuacagaacccugcugaugaacgagcugggcgugcccuuccaccugggcaccaagcaggugugcaucgccuggagcagcagcagcugccacgacggcaaggccuggcugcacgugugcaucaccggcgacgacaagaacgccaccgccagcuucaucuacaacggcagacugguggacagcguggugagcuggagcaaggagauccugagaacccaggagagcgagugcgugugcaucaacggcaccugcaccguggugaugaccgacggcagcgccagcggcgaggccgacaccaagauccuguucaucgaggagggcaagaucgugcacaccagcacccugagcggcagcgcccagcacguggaggagugcagcugcuaccccagauaccccggcgugagaugcgugugcagagacaacuggaagggcagcaacagacccaucguggacaucaacaucaaggaccacagcaucgugagcagcuacgugugcagcggccuggugggcgacacccccagaaagaacgacagcagcagcagcagccacugccuggaccccaacaacgaggagggcggccacggcgugaagggcugggccuucgacgacggcaacgacguguggaugggcagaaccaucagcgagaagagcagacugggcuacgagaccuucaaggugaucgagggcuggagcaaccccaagagcaagcugcagaucaacagacaggugaucguggacagaggcaacagaagcggcuacagcggcaucuucagcguggagggcaagagcugcaucaacagaugcuucuacguggagcugaucagaggcagaaaggaggagaccgaggugcuguggaccagcaacagcaucgugguguucugcggcaccagcggcaccuacggcaccggcagcuggcccgacggcgccgacaucaaccugaugcccaucuga

SEQ ID NO: 176539 - RNA, 1410 nt, Artificial Sequence
  derived and/or modified CDS sequence (opt4) from neuraminidase__InfluenzaA__ACG80411
auggacagcaacagcaagaucaucaccaucggcagcgugagccugaccaucagcaccaucugcuucuucaugcagaucgccauccugaucaccaccgugacccugcacuucaagcaguacgaguucaacagcccccccaacaaccagaugaugcugugcgagcccaccaucaucgagagaaacaucaccgagaucguguaccugaccaacaccaccaucgagaaggagaucugccccaagcuggccgaguacagaaacuggagcaagccccagugcgacaucaccggcuucgcccccuucagcaaggacaacagcaucagacugagcgccggcggcgacaucugggugaccagagagcccuacgugagcugcgaccccgacaagugcuaccaguucgcccugggccagggcaccacccugaacaacgugcacagcaacgacaccgccggcggcagaacccccuacagaacccugcugaugaacgagcugggcgugcccuuccaccugggcaccaagcaggugugcaucgccuggagcagcagcagcugccacgacggcaaggccuggcugcacgugugcaucaccggcgacgacaagaacgccaccgccagcuucaucuacgacggcagacugguggacggcguggugagcuggagcaaggagauccugagaacccaggagagcgagugcgugugcaucaacggcaccugcaccguggugaugaccgacggcagcgccagcggcgaggccgacaccaagauccuguucaucgaggagggcaagaucgugcacaccagcacccugagcggcagcgcccagcacguggaggagugcagcugcuaccccagauaccccggcgugagaugcgugugcagagacaacuggaagggcagcaacagacccaucguggacaucaacaucaaggaccacagcaucgugagcagcuacgugugcagcggccuggugggcgacacccccagaaagaacgacagcagcagcagcagccacugccuggaccccaacaacgaggagggcggccacggcgugaagggcugggccuucgacgacggcaacgacguguggaugggcagaaccaucagcgagaagagcagacugggcuacgagaccuucaaggugaucgagggcuggagcaaccccaagagcaagcugcagaucaacagacaggugaucguggacagaggcaacagaagcggcuacagcggcaucuucagcguggagggcaagagcugcaucaacagaugcuucuacguggagcugaucagaggcagaaaggaggagaccgaggugcuguggaccagcaacagcaucgugguguucugcggcaccagcggcaccuacggcaccggcagcuggcccgacggcgccgacaucaaccugaugcccaucuga

SEQ ID NO: 176540 - RNA, 1407 nt, Artificial Sequence
  derived and/or modified CDS sequence (opt4) from neuraminidase__InfluenzaA__ACG80421
augaaccccauccagaagaucaucaccaucggcagcgugagccugaccaucagcaccaucugcuucuucaugcagaucgccauccugaucaccaccgugacccugcacuucaagcaguacgaguucaacagcccccccaacaaccagaugaugcugugcgagcccaccaucaucgagagaaacaucaccgagaucguguaccugaccaacaccaccaucgagaaggagaucugccccaagcuggccgaguacagaaacuggagcaagccccagugcgacaucaccggcuucgcccccuucagcaaggacaacagcaucagacugagcgccggcggcgacaucugggugaccagagagcccuacgugagcugcgaccccgacaagugcuaccaguucgcccugggccagggcaccacccugaacaacgugcacagcgacaccgccagagacagaacccccuacagaacccugcugaugaacgagcugggcgugcccuuccaccugggcaccaagcaggugugcaucgccuggagcagcagcagcugccacgacggcaaggccuggcugcacgugugcaucaccggcgacgacaagaacgccaccgccagcuucaucuacaacggcagacugguggacagcguggugagcuggagcaaggagauccugagaacccaggagagcgagugcgugugcaucaacggcaccugcaccguggugaugaccgacggcagcgccagcggcgaggccgacaccaagauccuguucaucgaggagggcaagaucgugcacaccagcacccugagcggcagcgcccagcacguggaggagugcagcugcuaccccagauaccccggcgugagaugcgugugcagagacaacuggaagggcagcaacagacccaucguggacaucaacaucaaggaccacagcaucgugagcagcuacgugugcagcggccuggugggcgacacccccagaaagaacgacagcagcagcagcagccacugccuggaccccaacaacgaggagggcggccacggcgugaagggcugggccuucgacgacggcaacgacguguggaugggcagaaccaucagcgagaagagcagacugggcuacgagaccuucaaggugaucgagggcuggagcaaccccaagagcaagcugcagaucaacagacaggugaucguggacagaggcaacagaagcggcuacagcggcaucuucagcguggagggcaagagcugcaucaacagaugcuucuacguggagcugaucagaggcagaaaggaggagaccgaggugcuguggaccagcaacagcaucgugguguucugcggcaccagcggcaccuacggcaccggcagcuggcccgacggcgccgacaucaaccugaugcccaucuga

SEQ ID NO: 176541 - RNA, 1407 nt, Artificial Sequence
  derived and/or modified CDS sequence (opt4) from neuraminidase__InfluenzaA__ACG80427
auggaccccaacagcaagaucaucaccaucggcagcgugagccugaccaucagcaccaucugcuucuucaugcagaucgccauccugaucaccaccgugacccugcacuucaagcaguacgaguucaacagcccccccaacaaccagaugaugcugugcgagcccaccaucaucgagagaaacaucaccgagaucguguaccugaccaacaccaccaucgagaaggagaucugccccaagcuggccgaguacagaaacuggagcaagccccagugcgacaucaccggcuucgcccccuucagcaaggacaacagcaucagacugagcgccggcggcgacaucugggugaccagagagcccuacgugagcugcgaccccgacaagugcuaccaguucgcccugggccagggcaccacccugaacaacgugcacagcgacaccgccagagacagaacccccuacagaacccugcugaugaacgagcugggcgugcccuuccaccugggcaccaagcaggugugcaucgccuggagcagcagcagcugccacgacggcaaggccuggcugcacgugugcaucaccggcgacgacaagaacgccaccgccagcuucaucuacaacggcagacugguggacagcguggugagcuggagcaaggagauccugagaacccaggagagcgagugcgugugcaucaacggcaccugcaccguggugaugaccgacggcagcgccagcggcgaggccgacaccaagauccuguucaucgaggagggcaagaucgugcacaccagcacccugagcggcagcgcccagcacguggaggagugcagcugcuaccccagauaccccggcgugagaugcgugugcagagacaacuggaagggcagcaacagacccaucguggacaucaacaucaaggaccacagcaucgugagcagcuacgugugcagcggccuggugggcgacacccccagaaagaacgacagcagcagcagcagccacugccuggaccccaacaacgaggagggcggccacggcgugaagggcugggccuucgacgacggcaacgacguguggaugggcagaaccaucagcgagaagagcagacugggcuacgagaccuucaaggugaucgagggcuggagcaaccccaagagcaagcugcagaucaacagacaggugaucguggacagaggcaacagaagcggcuacagcggcaucuucagcguggagggcaagagcugcaucaacagaugcuucuacguggagcugaucagaggcagaaaggaggagaccgaggugcuguggaccagcaacagcaucgugguguucugcggcaccagcggcaccuacggcaccggcagcuggcccgacggcgccgacaucaaccugaugcccaucuga

SEQ ID NO: 176542 - RNA, 1410 nt, Artificial Sequence
  derived and/or modified CDS sequence (opt4) from neuraminidase__InfluenzaA__ACG80437
augaaccccaaccagaagaucaucaccaucggcagcgugagccugaccaucagcaccaucugcuucuucaugcagaucgccauccugaucaccaccgugacccugcacuucaagcaguacgaguucaacagcagccccaacaaccaggugaugcugugcgagcccaccaucaucgagagaaacaucaccgagaucguguaccugaccaacaccaccaucgagaaggagaucugccccaagcuggccgaguacagaaacuggagcaagccccagugcgacaucaccggcuucgcccccuucagcaaggacaacagcaucagacugagcgccggcggcgacaucugggugaccagagagcccuacgugagcugcgaccccgacaagugcuaccaguucgcccugggccagggcaccacccugaacaacgugcacagcaacaacaccgugagagacagaacccccuacagaacccugcugaugaacgagcugggcgugcccuuccaccugggcaccaagcaggugugcaucgccuggagcagcagcagcugccacgacggcaaggccuggcugcacgugugcaucaccggcgacgacaagaacgccaccgccaacuucaucuacaacggcagacugguggacagcaucgugagcuggagcaaggagaucuucagaacccaggagagcgagugcgugugcaucaacggcaccugcaccguggugaugaccgacggcagcgccagcggcaaggccgacaccaagauccuguucaucgaggagggcaagaucgugcacaccagcacccugagcggcagcgcccagcacguggaggagugcagcugcuaccccagauaccccggcgugagaugcgugugcagagacaacuggaagggcagcaacagacccaucguggacaucaacaucaaggaccacagcaucgugagcagcuacgugugcagcggccuggugggcgacacccccagaaagaacgacagcagcagcagcagccacugccuggaccccaacaacgaggagggcggccacggcgugaagggcugggccuucgacgacggcaacgacguguggaugggcagaaccaucagcgagaagagcagaagcggcuacgagaccuucaaggugaucgagggcuggagcaaccccaagagcaagcugcagaucaacagacaggugaucguggacagaggcaacagaagcggcuacagcggcaucuucagcguggagggcaagagcugcaucaacagaugcuucuacguggagcugaucagaggcagaaaggaggagaccgaggugcuguggaccagcaacagcaucgugguguucugcggcaccagcggcaccuacggcaccggcagcuggcccgacggcgccgacaucaaccugaugcccaucuga

SEQ ID NO: 176543 - RNA, 1407 nt, Artificial Sequence
  derived and/or modified CDS sequence (opt4) from neuraminidase__InfluenzaA__ACG80446
augaaccccaaccagaagaucaucaccaucggcagcgugagccugaccaucagcaccaucugcuucuucaugcagaucgccauccugaucaccaccgugacccugcacuucaagcaguacgaguucaacagcccccccaacaaccagaugaugcugugcgagcccaccaucaucgagagaaacaucaccgagaucguguaccugaccaacaccaccaucgagaaggagaucugccccaagcuggccgaguacagaaacuggagcaagccccagugcgacaucaccggcuucgcccccuucagcaaggacaacagcaucagacugagcgccggcggcgacaucugggugaccagagagcccuacgugagcugcgaccccgacaagugcuaccaguucgcccugggccagggcaccacccugaacaacgugcacagcgacaccgccagagacagaacccccuacagaacccugcugaugaacgagcugggcgugcccuuccaccugggcaccaagcaggugugcaucgccuggagcagcagcagcugccacgacggcaaggccuggcugcacgugugcaucaccggcgacgacaagaacgccaccgccagcuucaucuacaacggcagacugguggacagcguggugagcuggagcaaggagauccugagaacccaggagagcgagugcgugugcaucaacggcaccugcaccguggugaugaccgacggcagcgccagcggcgaggccgacaccaagauccuguucaucgaggagggcaagaucgugcacaccagcacccugagcggcagcgcccagcacguggaggagugcagcugcuaccccagauaccccggcgugagaugcgugugcagagacaacuggaagggcagcaacagacccaucguggacaucaacaucaaggaccacagcaucgugagcagcuacgugugcagcggccuggugggcgacacccccagaaagaacgacagcagcagcagcagccacugccuggaccccaacaacgaggagggcggccacggcgugaagggcugggccuucgacgacggcaacgacguguggaugggcagaaccaucagcgagaagagcagacugggcuacgagaccuucaaggugaucgagggcuggagcaaccccaagagcaagcugcagaucaacagacaggugaucguggacagaggcaacagaagcggcuacagcggcaucuucagcguggagggcaagagcugcaucaacagaugcuucuacguggagcugaucagaggcagaaaggaggagaccgaggugcuguggaccagcaacagcaucgugguguucugcggcaccagcggcaccuacggcaccggcagcuggcccgacggcgccgacaucaaccugaugcccaucuga

SEQ ID NO: 176544 - RNA, 1410 nt, Artificial Sequence
  derived and/or modified CDS sequence (opt4) from neuraminidase__InfluenzaA__ACG80455
augaaccccaaccagaagaucaucaccaucggcagcgugagcuucaucaucagcagcaucugcuucuucaugcagaucgccauccugaucaccaccgugacccugcacuucaagcaguacgaguucaacagcccccccaacaaccagaugaugcugugcgagcccaccaucaucgagagaaacaucaccgagaucguguaccugaccaacaccaccaucgagaaggagaucugccccaagcuggccgaguacagaaacuggagcaagccccagugcgacaucaccggcuucgcccccuucagcaaggacaacagcaucagacugagcgccggcggcgacaucugggugaccagagagcccuacgugagcugcgaccccgacaagugcuaccaguucgcccugggccagggcaccacccugaacaacgugcacagcaacgacaccgccagaggcagaacccccuacagaacccugcugaugaacgagcugggcgugcccuuccaccugggcaccaagcaggugugcaucgccuggagcagcagcagcugccacgacggcaaggccuggcugcacgugugcaucaccggcgacgacaagaacgccaccgccagcuucaucuacgacggcagacugguggacagcguggugagcuggagcaaggagauccugagaacccaggagagcgagugcgugugcaucaacggcaccugcaccguggugaugaccgacggcagcgccagcggcgaggccgacaccaagauccuguucaucgaggagggcaagaucgugcacaccagcacccugagcggcagcgcccagcacguggaggagugcagcugcuaccccagauaccccggcgugagaugcgugugcagagacaacuggaagggcagcaacagacccaucguggacaucaacaucaaggaccacagcaucgugagcagcuacgugugcagcggccuggugggcgacacccccagaaagaacgacagcagcagcagcagccacugccuggaccccaacaacgaggagggcggccacggcgugaagggcugggccuucgacgacggcaacgacguguggaugggcagaaccaucagcgagaagagcagacugggcuacgagaccuucaaggugaucgagggcuggagcaaccccaagagcaagcugcagaucaacagacaggugaucguggacagaggcaacagaagcggcuacagcggcaucuucagcguggagggcaagagcugcaucaacagaugcuucuacguggagcugaucagaggcagaaaggaggagaccgaggugcuguggaccagcaacagcaucgugguguucugcggcaccagcggcaccuacggcaccggcagcuggcccgacggcgccgacaucaaccugaugcccaucuga

SEQ ID NO: 176545 - RNA, 1407 nt, Artificial Sequence; identical to SEQ ID NO: 176543
  derived and/or modified CDS sequence (opt4) from neuraminidase__InfluenzaA__ACG80464

SEQ ID NO: 176546 - RNA, 1410 nt, Artificial Sequence
  derived and/or modified CDS sequence (opt4) from neuraminidase__InfluenzaA__ACG80473
auggaccccauccagaagaucaucaccaucggcagcgugagccugaccaucagcaccaucugcuucuucaugcagaucgccauccugaucaccaccgugacccugcacuucaagcaguacgaguucaacagcccccccaacaaccagaugaugcugugcgagcccaccaucaucgagagaaacaucaccgagaucguguaccugaccaacaccaccaucgagaaggagaucugccccaagcuggccgaguacagaaacuggagcaagccccagugcgacaucaccggcuucgcccccuucagcaaggacaacagcaucagacugagcgccggcggcgacaucugggugaccagagagcccuacgugagcugcgaccccgacaagugcuaccaguucgcccugggccagggcaccacccugaacaacgugcacagcaacgacaccgccagaggcagaacccccuacagaacccugcugaugaacgagcugggcgugcccuuccaccugggcaccaagcaggugugcaucgccuggagcagcagcagcugccacgacggcaaggccuggcugcacgugugcaucaccggcgacgacaagaacgccaccgccagcuucaucuacgacggcagacugguggacagcguggugagcuggagcaaggagauccugagaacccaggagagcgagugcgugugcaucaacggcaccugcaccguggugaugaccgacggcagcgccagcggcgaggccgacaccaagauccuguucaucgaggagggcaagaucgugcacaccagcacccugagcggcagcgcccagcacguggaggagugcagcugcuaccccagauaccccggcgugagaugcgugugcagagacaacuggaagggcagcaacagacccaucguggacaucaacaucaaggaccacagcaucgugagcagcuacgugugcagcggccuggugggcgacacccccagaaagaacgacagcagcagcagcagccacugccuggaccccaacaacgaggagggcggccacggcgugaagggcugggccuucgacgacggcaacgacguguggaugggcagaaccaucagcgagaagagcagacugggcuacgagaccuucaaggugaucgagggcuggagcaaccccaagagcaagcugcagaucaacagacaggugaucguggacagaggcaacagaagcggcuacagcggcaucuucagcguggagggcaagagcugcaucaacagaugcuucuacguggagcugaucagaggcagaaaggaggagaccgaggugcuguggaccagcaacagcaucgugguguucugcggcaccagcggcaccuacggcaccggcagcuggcccgacggcgccgacaucaaccugaugcccaucuga

SEQ ID NO: 176547 - RNA, 1410 nt, Artificial Sequence; identical to SEQ ID NO: 174772
  derived and/or modified CDS sequence (opt4) from neuraminidase__InfluenzaA__ACH69559

SEQ ID NO: 176548 - RNA, 1410 nt, Artificial Sequence
  derived and/or modified CDS sequence (opt4) from neuraminidase__InfluenzaA__ACH69570
augaaccccaaccagaagaucaucaccaucggcagcgugagccugaccaucagcaccaucugcuucuucaugcagaucgccauccugaucaccaccgugacccugcacuucaagcaguacgaguucaacagcccccccaacaaccaggugaugcugugcgagcccaccaucaucgagagaaacaucaccgagaucguguaccugaccaacaccaccaucgagaaggagaucugccccaagcuggccgaguacagaaacuggagcaagccccagugcaacaucaccggcuucgcccccuucagcaaggacaacagcaucagacugagcgccggcggcgacaucugggugaccagagagcccuacgugagcugcgaccccgacaagugcuaccaguucgcccugggccagggcaccacccugaacaacgugcacagcaacgacaccgugcacgacagaacccccuacagaacccugcugaugaacgagcugggcgugcccuuccaccugggcaccaagcaggugugcaucgccuggagcagcagcagcugccacgacggcaaggccuggcugcacgugugcgugaccggcgacgacaagaacgccaccgccagcuucaucuacaacggcagacugguggacagcaucgugagcuggagcaaggagauccugagaacccaggagagcgagugcgugugcaucaacggcaccugcaccguggugaugaccgacggcagcgccagcggcaaggccgacaccaagauccuguucaucgaggagggcaagaucgugcacaccagcacccugagcggcagcgcccagcacguggaggagugcagcugcuaccccagauaccccggcgugagaugcgugugcagagacaacuggaagggcagcaacagacccaucguggacaucaacaucaaggacuacagcaucgugagcagcuacgugugcagcggccuggugggcgacacccccagaaacaacgacagcagcagcagcagccacugccuggaccccaacaacgaggagggcggccacggcgugaagggcugggccuucgacgacggcaacgacguguggaugggcagaaccaucagcgagaagcugagaagcggcuacgagaccuucaaggugaucgagggcuggagcaaccccaacagcaagcugcagaucaacagacaggugaucguggacagaggcaacagaagcggcuacagcggcaucuucagcguggagggcaagagcugcaucaacagaugcuucuacguggagcugaucagaggcagaaaggaggagaccgaggugcuguggaccagcaacagcaucgugguguucugcggcaccagcggcaccuacggcaccggcagcuggcccgacggcgccgacaucaaccugaugcccaucuga

SEQ ID NO: 176549 - RNA, 1410 nt, Artificial Sequence; identical to SEQ ID NO: 174772
  derived and/or modified CDS sequence (opt4) from neuraminidase__InfluenzaA__ACH69581

SEQ ID NO: 176550 - RNA, 1410 nt, Artificial Sequence
  derived and/or modified CDS sequence (opt4) from neuraminidase__InfluenzaA__ACH69592
augaaccccaaccagaagaucaucaccaucggcagcgugagccugaccaucgccaccaucugcuuccugaugcagaucgccauccuggugaccaccgugacccugcacuucaagcaguacgagugcaacagcccccccaacaaccaggugaugcugugcgagcccaccaucaucgagagaaacaucaccgagaucguguaccugaccaacaccaccaucgagaaggagaucugccccaagcuggccgaguacagaaacuggagcaagccccagugcaacaucaccggcuucgcccccuucagcaaggacaacagcaucagacugagcgccggcggcgacaucugggugaccagagagcccuacgugagcugcgaccccgacaagugcuaccaguucgcccugggccagggcaccacccugaacaacggccacagcaacgacaccgugcacgacagaacccccuacagaacccugcugaugaacgagcugggcgugcccuuccaccugggcaccaagcaggugugcaucgccuggagcagcagcagcugccacgacggcaaggccuggcugcacgugugcgugaccggcgacgacgagaacgccaccgccagcuucaucuacaacggcagacugguggacagcaucggcagcuggagcaagaagauccugagaacccaggagagcgagugcgugugcaucaacggcaccugcaccguggugaugaccgacggcagcgccagcggcaaggccgacaccaagauccuguucaucgaggagggcaagaucgugcacaccagcccccugagcggcagcgcccagcacguggaggagugcagcugcuaccccagauaccccggcgugagaugcgugugcagagacaacuggaagggcagcaacagacccaucguggacaucaacgugaaggacuacagcaucgugagcagcuacgugugcagcggccuggugggcgacacccccagaaagaacgacagcagcagcagcagccacugccuggaccccaacaacgaggagggcggccacggcgugaagggcugggccuucgacgacggcaacgacguguggaugggcagaaccaucagcgagaagagcagaagcggcuacgagaccuucaaggugaucgagggcuggagcaagcccaacagcaagcugcagaucaacagacaggugaucguggacagaggcaacagaagcggcuacagcggcaucuucagcguggagggcaagagcugcaucaaccagugcuucuacguggagcugaucagaggcagaaagcaggagaccgaggugcuguggaccagcaacagcaucgugguguucugcggcaccagcggcaccuacggcaccggcagcuggcccgacggcgccgaccugaaccugaugcccaucuga

SEQ ID NO: 176551 - RNA, 1410 nt, Artificial Sequence
  derived and/or modified CDS sequence (opt4) from neuraminidase__InfluenzaA__ACH69603
augaaccccaaccagaagaucaucaccaucggcagcgugagccugaccaucgccaccaucugcuuccugaugcagaucgugauccuggugaccaccgugacccugcacuucaagcaguacgagugcaacagcccccccaacaaccaggugaugcugugcgagcccaccaucaucgagagaaacaucaccgagaucguguaccugaccaacaccaccaucgagaaggagaucugccccaagcuggccgaguacagaaacuggagcaagccccagugcaacaucaccggcuucgcccccuucagcaaggacaacagcaucagacugagcgccggcggcgacaucugggugaccagagagcccuacgugagcugcgaccccgacaagugcuaccaguucgcccugggccagggcaccacccugaacaacggccacagcaacgacaccgugcacgacagaacccccuacagaacccugcugaugaacgagcugggcgugcccuuccaccugggcaccaagcaggugugcaucgccuggagcagcagcagcugccacgacggcaaggccuggcugcacgugugcgugaccggcgacgacgagaacgccaccgccagcuucaucuacaacggcagacugguggacagcaucggcagcuggagcaagaagauccugagaacccaggagagcgagugcgugugcaucaacggcaccugcaccguggugaugaccgacggcagcgccagcggcaaggccgacaccaagauccuguucaucgaggagggcaagaucgugcacaccagcccccugagcggcagcgcccagcacguggaggagugcagcugcuaccccagauaccccggcgugagaugcgugugcagagacaacuggaagggcagcaacagacccaucguggacaucaacgugaaggacuacagcaucgugagcagcuacgugugcagcggccuggugggcgacacccccagaaagaacgacagcagcagcagcagccacugccuggaccccaacaacgaggagggcggccacggcgugaagggcugggccuucgacgacggcaacgacguguggaugggcagaaccaucagcgagaagagcagaagcggcuacgagaccuucaaggugaucgagggcuggagcaagcccaacagcaagcugcagaucaacagacaggugaucguggacagaggcaacagaagcggcuacagcggcaucuucagcguggagggcaagagcugcaucaacagaugcuucuacguggagcugaucagaggcagaaagcaggagaccgaggugcuguggaccagcaacagcaucgugguguucugcggcaccagcggcaccuacggcaccggcagcuggcccgacggcgccgaccugaaccugaugcccaucuga

SEQ ID NO: 176552 - RNA, 1410 nt, Artificial Sequence
  derived and/or modified CDS sequence (opt4) from neuraminidase__InfluenzaA__ACH69614
augaaccccaaccagaagaucaucaccaucggcagcgugagccugaccaucgccaccaucugcuuccugaugcagaucgccauccuggugaccaccgugacccugcacuucaagcaguacgagugcaacagcccccccaacaaccaggugaugcugugcgagcccaccaucaucgagagaaacaucaccgagaucguguaccugaccaacaccaccaucgagaaggagaucugccccaagcuggccgaguacagaaacuggagcaagccccagugcaacaucaccggcuucgcccccuucagcaaggacaacagcaucagacugagcgccggcggcgacaucugggugaccagagagcccuacgugagcugcgaccccgacaagugcuaccaguucgcccugggccagggcaccacccugaacaacggccacagcaacgacaccgugcacgacagaacccccuacagaacccugcugaugaacgagcugggcgugcccuuccaccugggcaccaagcaggugugcaucgccuggagcagcagcagcugccacgacggcaaggccuggcugcacgugugcgugaccggcgacgacgagaacgccaccgccagcuucaucuacaacggcagacugguggacagcaucggcagcuggagcaagaagauccugagaacccaggagagcgagugcgugugcaucaacggcaccugcaccguggugaugaccgacggcagcgccagcggcaaggccgacaccaagauccuguucaucgaggagggcaagaucgugcacaccagcccccugagcggcagcgcccagcacguggaggagugcagcugcuaccccagauaccccggcgugagaugcgugugcagagacaacuggaagggcagcaacagacccaucguggacaucaacgugaaggacuacagcaucgugagcagcuacgugugcagcggccuggugggcgacacccccagaaagaacgacagcagcagcagcagccacugccuggaccccaacaacgaggagggcggccacggcgugaagggcugggccuucgacgacggcaacgacguguggaugggcagaaccaucagcgagaagagcagaagcggcuacgagaccuucaaggugaucgagggcuggagcaagcccaacagcaagcugcagaucaacagacaggugaucguggacagaggcaacagaagcggcuacagcggcaucuucagcguggagggcaagagcugcaucaacagaugcuucuacguggagcugaucagaggcagaaagcaggagaccgaggugcuguggaccagcaacagcaucgugguguucugcggcaccagcggcaccuacggcaccggcagcuggcccgacggcgccgaccugaaccugaugcccaucuga

SEQ ID NO: 176553 - RNA, 1413 nt, Artificial Sequence
  derived and/or modified CDS sequence (opt4) from neuraminidase__InfluenzaA__ACI22525
augaaccccaaccagaagaucaucaccaucggcagcaucagcaucgccaucggcaucaucagccugaugcugcagaucggcaacaucaucagcaucugggccagccacagcauccagaccggcagccagaaccacaccggcaucugcaaccagagaaucaucaccuacgagaacagcaccugggugaacaacaccuacgugaacaucaacaacaccaacgugguggccgagaaggacaagaccagcgugacccuggccggcaacagcagccugugcagcaucagcggcugggccaucuacaccaaggacaacagcaucagaaucggcagcaagggcgacguguucgugaucagagagcccuucaucagcugcagccaccuggagugcagaaccuucuuccugacccagggcgcccugcugaacgacaagcacagcaacggcaccgugaaggacagaagccccuacagagcccugaugagcugcccccugggcgaggcccccagccccuacaacagcaaguucgagagcguggccuggagcgccagcgccugccacgacggcaugggcuggcugaccaucggcaucagcggccccgacaacggcgccguggccgugcugaaguacaacggcaucaucaccgagaccaucaagagcuggaagaagagaauccugagaacccaggagagcgagugcgugugcaugaacggcagcugcuucaccaucaugaccgacggccccagcaacggcgccgccagcuacaagaucuucaagaucgagaagggcaaggugaccaagagcaucgagcugaacgcccccaacuuccacuacgaggagugcagcugcuaccccgacaccggcaccgugaugugcgugugcagagacaacuggcacggcagcaacagacccugggugagcuucaaccagaaccuggacuaccagaucggcuacaucugcagcggcguguucggcgacaaccccagacccaaggacggcgagggcagcugcaaccccgugaccguggacggcgccgacggcgugaagggcuucagcuacaaguacggcaacggcguguggaucggcagaaccaagagcaacagacugagaaagggcuucgagaugaucugggaccccaacggcuggaccaacaccgacagcgacuucagcgugaagcaggacgugguggccaucaccgacuggagcggcuacagcggcagcuucgugcagcaccccgagcugaccggccuggacugcaucagacccugcuucuggguggagcuggugagaggccugcccagagagaacaccaccaucuggaccagcggcagcagcaucagcuucugcggcgugaacagcgacaccgccaacuggagcuggcccgacggcgccgagcugcccuucaccaucgacaaguga

SEQ ID NO: 176554 - RNA, 1413 nt, Artificial Sequence; identical to SEQ ID NO: 176553
  derived and/or modified CDS sequence (opt4) from neuraminidase__InfluenzaA__ACI22526

SEQ ID NO: 176555 - RNA, 1413 nt, Artificial Sequence; identical to SEQ ID NO: 176553
  derived and/or modified CDS sequence (opt4) from neuraminidase__InfluenzaA__ACI22527

SEQ ID NO: 176556 - RNA, 1413 nt, Artificial Sequence; identical to SEQ ID NO: 176553
  derived and/or modified CDS sequence (opt4) from neuraminidase__InfluenzaA__ACI22528

SEQ ID NO: 176557 - RNA, 1413 nt, Artificial Sequence; identical to SEQ ID NO: 176553
  derived and/or modified CDS sequence (opt4) from neuraminidase__InfluenzaA__ACI22529

SEQ ID NO: 176558 - RNA, 1413 nt, Artificial Sequence; identical to SEQ ID NO: 176553
  derived and/or modified CDS sequence (opt4) from neuraminidase__InfluenzaA__ACI22530

SEQ ID NO: 176559 - RNA, 1413 nt, Artificial Sequence
  derived and/or modified CDS sequence (opt4) from neuraminidase__InfluenzaA__ACI22532
augaaccccaaccagaagaucaucaccaucggcagcaucagcaucgccaucggcaucaucagccugaugcugcagaucggcaacaucaucagcaucugggccagccacagcauccagaccggcagccagaaccacaccggcaucugcaaccagagaaucaucaccuacgagaacagcaccugggugaacaacaccuacgugaacaucaacaacaccaacgugguggccggcaaggacaagaccagcgugacccuggccggcaacagcagccugugcagcaucagcggcugggccaucuacaccaaggacaacagcaucagaaucggcagcaagggcgacguguucgugaucagagagcccuucaucagcugcagccaccuggagugcagaaccuucuuccugacccagggcgcccugcugaacgacaagcacagcaacggcaccgugaaggacagaagccccuacagagcccugaugagcugcccccugggcgaggcccccagccccuacaacagcaaguucgagagcguggccuggagcgccagcgccugccacgacggcaugggcuggcugaccaucggcaucagcggccccgacaacggcgccguggccgugcugaaguacaacggcaucaucaccgagaccaucaagagcuggaagaagagaauccugagaacccaggagagcgagugcgugugcaugaacggcagcugcuucaccaucaugaccgacggccccagcaacggcgccgccagcuacaagaucuucaagaucgagaagggcaaggugaccaagagcaucgagcugaacgcccccaacuuccacuacgaggagugcagcugcuaccccgacaccggcaccgugaugugcgugugcagagacaacuggcacggcagcaacagacccugggugagcuucaaccagaaccuggacuaccagaucggcuacaucugcagcggcguguucggcgacaaccccagacccaaggacggcgagggcagcugcaaccccgugaccguggacggcgccgacggcgugaagggcuucagcuacaaguacggcaacggcguguggaucggcagaaccaagagcaacagacugagaaagggcuucgagaugaucugggaccccaacggcuggaccaacaccgacagcgacuucagcgugaagcaggacgugguggccaucaccgacuggagcggcuacagcggcagcuucgugcagcaccccgagcugaccggccuggacugcaucagacccugcuucuggguggagcuggugagaggccugcccagagagaacaccaccaucuggaccagcggcagcagcaucagcuucugcggcgugaacagcgacaccgccaacuggagcuggcccgacggcgccgagcugcccuucaccaucgacaaguga

SEQ ID NO: 176560 - RNA, 1413 nt, Artificial Sequence; identical to SEQ ID NO: 176559
  derived and/or modified CDS sequence (opt4) from neuraminidase__InfluenzaA__ACI22533

SEQ ID NO: 176561 - RNA, 1413 nt, Artificial Sequence; identical to SEQ ID NO: 176553
  derived and/or modified CDS sequence (opt4) from neuraminidase__InfluenzaA__ACI22534

SEQ ID NO: 176562 - RNA, 1410 nt, Artificial Sequence
  derived and/or modified CDS sequence (opt4) from neuraminidase__InfluenzaA__ACI25727
augaaccccaaccagaagaucaucaccaucggcagcgugagccugaccaucgccaccgugugcuuccugaugcagaucgccauccuggugaccaccgugacccugcacuucaagcagcacgagugcaacagccccgccagcaaccaggugaugcccugcgagcccaucaucaucgagagaaacaucaccgagaucguguaccugaacaacaccaccaucgagaaggagaucugccccaaggugguggaguacagaaacuggagcaagccccagugccagaucaccggcuucgcccccuucagcaaggacaacagcaucagacugagcgccggcggcgacaucugggugaccagagagcccuacgugagcugcgaccccggcaagugcuaccaguucgcccugggccagggcaccacccuggacaacaagcacagcaacgacaccauccacgacagaaucccccacagaacccugcugaugaacgagcugggcgugcccuuccaccugggcaccagacaggugugcaucgccuggagcagcagcagcugccacgacggcaaggccuggcugcacgugugcaucaccggcgacgacaagaacgccaccgccagcuucaucuacgacggcagacugguggacagcaucggcagcuggagccagaacauccugagaacccaggagagcgagugcgugugcaucaacggcaccugcaccguggugaugaccgacggcagcgccagcggcagagccgacaccagaauccuguucaucaaggagggcaagaucgugcacaucagcccccugagcggcagcgcccagcacguggaggagugcagcugcuaccccagauaccccggcgugagaugcaucugcagagacaacuggaagggcagcaacagacccgugguggacaucaacauggaggacuacagcaucgacagcagcuacgugugcagcggccuggugggcgacacccccagaaacgacgacagaagcagcaacagcaacugcagaaaccccaacaacgagagaggcaaccagggcgugaagggcugggccuucgacaacggcgacgacguguggaugggcagaaccaucagcaaggaccugagaagcggcuacgagaccuucaaggugaucggcggcuggagcacccccaacagcaagagccagaucaacagacaggugaucguggacagcgacaacagaagcggcuacagcggcaucuucagcguggagggcaagagcugcaucaacagaugcuucuacguggagcugaucagaggcagaaagcaggagaccagagugugguggaccagcaacagcaucgugguguucugcggcaccagcggcaccuacggcaccggcagcuggcccgacggcgccaacaucaacuucaugcccaucuga

SEQ ID NO: 176563 - RNA, 1410 nt, Artificial Sequence
  derived and/or modified CDS sequence (opt4) from neuraminidase__InfluenzaA__ACI25749
augaaccccaaccagaagaucaucaccaucggcagcgugagccugaccaucgccaccgugugcuuccugaugcagaucgccauccuggugaccaccgugacccugcacuucaagcaguacgagugcgacagccccgccagcaaccaggugaugcccugcgagcccaucaucaucgagagaaacaucaccgagaucguguaccugaacaacaccaccaucgagaaggagaucugccccaaggugguggaguacagaaacuggagcaagccccagugccagaucaccggcuucgcccccuucagcaaggacaacagcaucagacugagcgccggcggcgacaucugggugaccagagagcccuacgugagcugcgaccacggcaagugcuaccaguucgcccugggccagggcaccacccuggacaacaagcacagcaacgacaccauccacgacagaaucccccacagaacccugcugaugaacgagcugggcgugcccuuccaccugggcaccagacaggugugcaucgccuggagcagcagcagcugccacgacggcaaggccuggcugcacgugugcaucaccggcgacgacaagaacgccaccgccagcuucaucuacgacggcagacugguggacagcaucggcagcuggagccagaacauccugagaacccaggagagcgagugcgugugcaucaacggcaccugcaccguggugaugaccgacggcagcgccagcggcagagccgacaccagaauccuguucaucgaggagggcaagaucgugcacaucagcccccugagcggcagcgcccagcacguggaggagugcagcugcuaccccagauaccccggcgugagaugcaucugcagagacaacuggaagggcagcaacagacccgugguggacaucaacauggaggacuacagcaucgacagcagcuacgugugcagcggccuggugggcgacacccccagaaacgacgacagaagcagcaacagcaacugcagaaaccccaacaacgagagaggcaaccagggcgugaagggcugggccuucgacaacggcgacgacguguggaugggcagaaccaucagcaaggaccugagaagcggcuacgagaccuucaaggugaucggcggcuggagcacccccaacagcaagagccagaucaacagacaggugaucguggacagcgacaacagaagcggcuacagcggcaucuucagcguggagggcaagagcugcaucaacagaugcuucuacguggagcugaucagaggcagaaagcaggagaccagagugugguggaccagcaacagcaucgugguguucugcggcaccagcggcaccuacggcaccggcagcuggcccgacggcgccaacaucaacuucaugcacaucuga

SEQ ID NO: 176564 - RNA, 1410 nt, Artificial Sequence; identical to SEQ ID NO: 176563
  derived and/or modified CDS sequence (opt4) from neuraminidase__InfluenzaA__ACI25760

SEQ ID NO: 176565 - RNA, 1410 nt, Artificial Sequence; identical to SEQ ID NO: 176563
  derived and/or modified CDS sequence (opt4) from neuraminidase__InfluenzaA__ACI25771

SEQ ID NO: 176566 - RNA, 1410 nt, Artificial Sequence; identical to SEQ ID NO: 174155
  derived and/or modified CDS sequence (opt4) from neuraminidase__InfluenzaA__ACI25782

SEQ ID NO: 176567 - RNA, 1410 nt, Artificial Sequence
  derived and/or modified CDS sequence (opt4) from neuraminidase__InfluenzaA__ACI25793
augaaccccaaccagaagaucaucaccaucggcagcgugagccugaccaucgccaccgugugcuuccugaugcagaucgccauccuggugaccaccgugacccugcacuucaagcaguacgagugcgacagccccgccagcaaccaggugaugcccugcgagcccaucaucaucgagagaaacaucaccgagaucguguaccugaacaacaccaccaucgagaaggagaucugccccaaggugguggaguacagaaacuggagcaagccccagugccagaucaccggcuucgcccccuucagcaaggacaacagcaucagacugagcgugggcggcgacaucugggugaccagagagcccuacgugagcugcgaccacggcaagugcuaccaguucgcccugggccagggcaccacccuggacaacaagcacagcaacgacaccauccacgacagaaucccccacagaacccugcugaugaacgagcugggcgugcccuuccaccugggcaccagacaggugugcaucgccuggagcagcagcagcugccacgacggcaaggccuggcugcacgugugcaucaccggcgacgacaagaacgccaccgccagcuucaucuacgacggcagacugguggacagcaucggcagcuggagccagaacauccugagaacccaggagagcgagugcgugugcaucaacggcaccugcaccguggugaugaccgacggcagcgccagcggcagagccgacaccagaauccuguucaucgaggagggcaagaucgugcacaucagcccccugagcggcagcgcccagcacguggaggagugcagcugcuaccccagauaccccggcgugagaugcaucugcagagacaacuggaagggcagcaacagacccgugguggacaucaacauggaggacuacagcaucgacagcagcuacgugugcagcggccuggugggcgacacccccagaaacgacgacagaagcagcaacagcaacugcagaaaccccaacaacgagagaggcaaccagggcgugaagggcugggccuucgacaacggcgacgacguguggaugggcagaaccaucagcaaggaccugagaagcggcuacgagaccuucaaggugaucggcggcuggagcacccccaacagcaagagccagaucaacagacaggugaucguggacagcgacaacagaagcggcuacagcggcaucuucagcguggagggcaagagcugcaucaacagaugcuucuacguggagcugaucagaggcagaaagcaggagaccagagugugguggaccagcaacagcaucgugguguucugcggcaccagcggcaccuacggcaccggcagcuggcccgacggcgccaacaucaacuucaugcccaucuga

SEQ ID NO: 176568 - RNA, 1410 nt, Artificial Sequence
  derived and/or modified CDS sequence (opt4) from neuraminidase__InfluenzaA__ACI25804
augaaccccaaccagaagaucaucaccaucggcagcgugagccugaccaucgccaccgugugcuuccugaugcagaucgccauccuggugaccaccgugacccugcacuucaagcaguacgagugcgacagccccgccagcaaccaggugaugcccugcgagcccaucaucaucgagagaaacaucaccgagaucguguaccugaacaacaccaccaucgagaaggagaucugccccaaggugguggaguacagaaacuggagcaagccccagugccagaucaccggcuucgcccccuucagcaaggacaacagcaucagacugagcgccggcggcgacaucugggugaccagagagcccuacgugagcugcgaccacggcaagugcuaccaguucgcccugggccagggcaccacccuggacaacaagcacagcaacgacaccauccacgacagaaucccccacagaacccugcugaugaacgagcugggcgugcccuuccaccugggcaccagacaggugugcaucgccuggagcagcagcagcugccacgacggcaaggccuggcugcacgugugcaucaccggcgacgacaagaacgccaccgccagcuucaucuacgacggcagacugguggacagcaucggcagcuggagccagaacauccugagaacccaggagagcgagugcgugugcaucaacggcaccugcaccguggugaugaccgacggcagcgccagcggcagagccgacaccagaauccuguucaucgaggagggcaagaucgugcacaucagcccccugagcggcagcgcccagcacguggaggagugcagcugcuaccccagauaccccggcgugagaugcaucugcagagacaacuggaagggcagcaacagacccgugguggacaucaacauggaggacuacagcaucgacagcagcuacgugugcagcggccuggugggcgacacccccagaaacgacgacagaagcagcaacagcaacugcagaaaccccaacaacgagagaggcaaccagggcgugaagggcugggccuucgacaacggcgacgacguguggaugggcagaaccaucagcaaggaccugagaagcggcuacgagaccuucaaggugaucggcggcuggagcacccccaacagcaagagccagaucaacagacaggugaucguggacagcgaccacagaagcggcuacagcggcaucuucagcguggagggcaagagcugcaucaacagaugcuucuacguggagcugaucagaggcagaaagcaggagaccagagugugguggaccagcaacagcaucgugguguucugcggcaccagcggcaccuacggcaccggcagcuggcccgacggcgccaacaucaacuucaugcccaucuga

SEQ ID NO: 176569 - RNA, 1410 nt, Artificial Sequence; identical to SEQ ID NO: 176527
  derived and/or modified CDS sequence (opt4) from neuraminidase__InfluenzaA__ACI26277

SEQ ID NO: 176570 - RNA, 1410 nt, Artificial Sequence; identical to SEQ ID NO: 174387
  derived and/or modified CDS sequence (opt4) from neuraminidase__InfluenzaA__ACI26299

SEQ ID NO: 176571 - RNA, 1410 nt, Artificial Sequence
  derived and/or modified CDS sequence (opt4) from neuraminidase__InfluenzaA__ACI26321
augaaccccaaccagaagaucaucaccaucggcagcgugagccugaccaucagcaccaucugcuucuucaugcagaucgccauccugaucaccaccgugacccugcacuucaagcaguacgaguucaacagcccccccaacaaccaggugaugcugugcgagcccaccaucaucgagagaaacaucaccgagaucguguaccugaccaacaccaccaucgagaaggagaucugccccaagcuggccgaguacagaaacuggagcaagccccagugcgacaucaccggcuucgcccccuucagcaaggacaacagcaucagacugagcgccggcggcgacaucugggugaccagagagcccuacgugagcugcgaccccgacaagugcuaccaguucgcccugggccagggcaccacccugaacaacgugcacagcaacgacaccgugagagacagaacccccuacagaacccugcugaugaacgagcugggcgugcccuuccaccugggcaccaagcaggugugcaucgccuggagcagcagcagcugccacgacggcaaggccuggcugcacgugugcaucaccggcgacgacaagaacgccaccgccagcuucaucuacaacggcagacugguggacagcaucgugagcuggagcaaggagauccugagaacccaggagagcgagugcgugugcaucaacggcaccugcaccguggugaugaccgacggcagcgccagcggcaaggccgacaccaagauccuguucaucgaggagggcaagaucgugcacaccagcacccugagcggcagcgcccagcacguggaggagugcagcugcuaccccagauaccccggcgugagaugcgugugcagagacaacuggaagggcagcaacagacccaucguggacaucaacaucaaggaccacagcaccgugagcagcuacgugugcagcggccuggugggcgacacccccagaaagaacgacagcagcagcagcagccacugccuggaccccaacaacgaggagggcggccacggcgugaagggcugggccuucgacgacggcaacgacguguggaugggcagaaccaucagcgagaagagcagacugggcuacgagaccuucaaggugaucgagggcuggagcaaccccaagagcaagcugcagaucaacagacaggugaucguggacagaggcaacagaagcggcuacagcggcaucuucagcguggagggcaagagcugcaucaacagaugcuucuacguggagcugaucagaggcagaaaggaggagaccgaggugcuguggaccagcaacagcaucgugguguucugcggcaccagcggcaccuacggcaccggcagcuggcccgacggcgccgacaucaaccugaugcccaucuga

SEQ ID NO: 176572 - RNA, 1410 nt, Artificial Sequence
  derived and/or modified CDS sequence (opt4) from neuraminidase__InfluenzaA__ACI26354
augaaccccaaccagaagaucaucaccaucggcagcgugagccugaccaucagcaccaucugcuucuucaugcagaucgccauccugaucaccaccgugacccugcacuucaagcaguacgaguucaacagcccccccaacaaccaggugaugcugugcgagcccaccaucaucgagagaaacaucaccgagaucguguaccugaccaacaccaccaucgagaaggagaucugccccaagcuggccgaguacagaaacuggagcaagccccagugcgacaucaccggcuucgcccccuucagcaaggacaacagcaucagacugagcgccggcggcgacaucugggugaccagagagcccuacgugagcugcgaccccgacaagugcuaccaguucgcccugggccagggcaccacccugaacaacgugcacagcaacgacaccgugagagacagaacccccuacagaacccugcugaugaacgagcugggcgugcccuuccaccugggcaccaagcaggugugcaucgccuggagcagcagcagcugccacgacggcaaggccuggcugcacgugugcaucaccggcgacgacaagaacgccaccgccagcuucaucuacaacggcagacugguggacagcguggugagcuggagcaaggagauccugagaacccaggagagcgagugcgugugcaucaacggcaccugcaccguggugaugaccgacggcagcgccagcggcaaggccgacaccaagauccuguucaucgaggagggcaagaucgugcacaccagcacccugagcggcagcgcccagcacguggaggagugcagcugcuaccccagauaccccggcgugagaugcgugugcagagacaacuggaagggcagcaacagacccaucguggacaucaacaucaaggaccacagcaucgugagcagcuacgugugcagcggccuggugggcgacacccccagaaagaacgacagcagcagcagcagccacugccuggaccccaacaacgaggagggcggccacggcgugaagggcugggccuucgacgacggcaacgacguguggaugggcagaaccaucagcgagaagagcagacugggcuacgagaccuucaaggugaucgagggcuggagcaaccccaagagcaagcugcagaucaacagacaggugaucguggacagaggcaacagaagcggcuacagcggcaucuucagcguggagggcaagagcugcaucaacagaugcuucuacguggagcugaucagaggcagaaaggaggagaccgaggugcuguggaccagcaacagcaucgugguguucugcggcaccagcggcaccuacggcaccggcagcuggcccgacggcgccgacaucaaccugaugcccaucuga

SEQ ID NO: 176573 - RNA, 1410 nt, Artificial Sequence
  derived and/or modified CDS sequence (opt4) from neuraminidase__InfluenzaA__ACI26365
augaaccccaaccagaagaucaucaccaucggcagcgugagccugaccaucagcaccaucugcuucuucaugcagaucgccauccugaucaccaccgugacccugcacuucaagcaguacgaguucaacagcccccccaacaaccaggugaugcugugcgagcccaccaucaucgagagaaacaucaccgagaucguguaccugaccaacaccaccaucgagaaggagaucugccccaagcuggccgaguacagaaacuggagcaagccccagugcgacaucaccggcuucgcccccuucagcaaggacaacagcaucagacugagcgccggcggcgacaucugggugaccagagagcccuacgugagcugcgaccccgacaagugcuaccaguucgcccugggccagggcaccacccugaacaacgugcacagcaacgacaccgugagagacagaacccccuacagaacccugcugaugaacgagcugggcgugcccuuccaccugggcaccaagcaggugugcaucgccuggagcagcagcagcugccacgacggcaaggccuggcugcacgugugcaucaccggcgacgacaagaacgccaccgccagcuucaucuacaacggcagacugguggacagcguggugagcuggagcaaggagauccugagaacccaggagagcgagugcgugugcaucaacggcaccugcaccguggugaugaccgacggcagcgccagcggcaaggccgacaccaagauccuguucaucgaggagggcaagaucgugcacaccagcacccugaccggcagcgcccagcacguggaggagugcagcugcuaccccagauaccccggcgugagaugcgugugcagagacaacuggaagggcagcaacagacccaucguggacaucaacaucaaggaccacagcaucgugagcagcuacgugugcagcggccuggugggcgacacccccagaaagaacgacagcagcagcagcagccacugccuggaccccaacaacgaggagggcgugcacggcgugaagggcugggccuucgacgacggcaacgacguguggaugggcagaaccaucagcgagaagagcagacugggcuacgagaccuucaaggugaucgagggcuggagcaaccccaagagcaagcugcagaucaacagacaggugaucguggacagaggcaacagaagcggcuacagcggcaucuucagcguggagggcaagagcugcaucaacagaugcuucuacguggagcugaucagaggcagaaaggaggagaccgaggugcuguggaccagcaacagcaucgugguguucugcggcaccagcggcaccuacggcaccggcagcuggcccgacggcgccgacaucaaccugaugcccaucuga

SEQ ID NO: 176574 - RNA, 1410 nt, Artificial Sequence; identical to SEQ ID NO: 176572
  derived and/or modified CDS sequence (opt4) from neuraminidase__InfluenzaA__ACI26376

SEQ ID NO: 176575 - RNA, 1410 nt, Artificial Sequence; identical to SEQ ID NO: 176464
  derived and/or modified CDS sequence (opt4) from neuraminidase__InfluenzaA__ACI26387

SEQ ID NO: 176576 - RNA, 1410 nt, Artificial Sequence; identical to SEQ ID NO: 176476
  derived and/or modified CDS sequence (opt4) from neuraminidase__InfluenzaA__ACI26420

SEQ ID NO: 176577 - RNA, 1410 nt, Artificial Sequence; identical to SEQ ID NO: 174387
  derived and/or modified CDS sequence (opt4) from neuraminidase__InfluenzaA__ACI26431

SEQ ID NO: 176578 - RNA, 1413 nt, Artificial Sequence
  derived and/or modified CDS sequence (opt4) from neuraminidase__InfluenzaA__ACI26442
augaaccccaaccagaagaucaucaccaucggcagcaucagcaucgccaucggcaucaucagccugaugcugcagaucggcaacaucaucagcaucugggccagccacagcauccagaccggcagccagaaccacaccggcaucugcaaccagagaaucaucaccuacgagaacagcaccugggugaaccacaccuacgugaacaucaacaacaccaacgugguggccggcaaggacaagaccagcgugacccuggccggcaacagcagccugugcagcaucagcggcugggccaucuacaccaaggacaacagcaucagaaucggcagcaagggcgacguguucgugaucagagagcccuucaucagcugcagccaccuggagugcaagaccuucuuccugacccagggcgcccugcugaacgacaagcacagcaacggcaccgugaaggacagaagccccuacagagcccugaugagcugcccccugggcgaggcccccagccccuacaacagcaaguucgagagcguggccuggagcgccagcgccugccacgacggcaugggcuggcugaccaucggcaucagcggccccgacaacggcgccguggccgugcugaaguacaacggcaucaucaccggcaccaucaagagcuggaagaagcagauccugagaacccaggagagcgagugcgugugcaugaacggcagcugcuucaccaucaugaccgacggccccagcaacggcgccgccagcuacaagaucuucaagaucgagaagggcaaggugaccaagagcaucgagcugaacgcccccaacuuccacuacgaggagugcagcugcuaccccgacaccggcaccgugaugugcgugugcagagacaacuggcacggcagcaacagacccugggugagcuucaaccagaaccuggacuaccagaucggcuacaucugcagcggcguguucggcgacaaccccagacccaaggacagagagggcagcugcaaccccgugaccaucgacggcgccgacggcgugaagggcuucagcuacaaguacggcaacggcguguggaucggcagaaccaagagcaacagacugagaaagggcuucgagaugaucugggaccccaacggcuggaccaacaccgacagcgacuucagcgugaagcaggacgugguggccaucaccgacuggagcggcuacagcggcagcuucgugcagcaccccgagcugaccggccuggacugcaucagacccugcuucuggguggagcuggugagaggccugcccagagagaacaccaccaucuggaccagcggcagcagcaucagcuucugcggcgugaacagcgacaccgccaacuggagcuggcccgacggcgccgagcugcccuucaccaucgacaaguga

SEQ ID NO: 176579 - RNA, 1413 nt, Artificial Sequence; identical to SEQ ID NO: 176578
  derived and/or modified CDS sequence (opt4) from neuraminidase__InfluenzaA__ACI26453

SEQ ID NO: 176580 - RNA, 1410 nt, Artificial Sequence
  derived and/or modified CDS sequence (opt4) from neuraminidase__InfluenzaA__ACI26464
augaaccccaaccagaagaucaucaccaucggcagcgugagccugaccaucagcaccaucugcuucuucaugcagaucgccauccugaucgccaccgugacccugcacuucaagcaguacgaguucaacagcccccccaacaaccaggugaugcugugcgagcccaccaucaucgagagaaacaucaccgagaucguguaccugaccaacaccaccaucgagaaggagaucugccccaagcuggccgaguacagaaacuggagcaagccccagugcgacaucaccggcuucgcccccuucagcaaggacaacagcaucagacugagcgccggcggcgacaucugggugaccagagagcccuacgugagcugcgaccccgacaagugcuaccaguucgcccugggccagggcaccacccugaacaacgugcacagcaacgacaccgugagagacagaacccccuacagaacccugcugaugaacgagcugggcgugcccuuccaccugggcaccaagcaggugugcaucgccuggagcagcagcagcugccacgacggcaaggccuggcugcacgugugcaucaccggcgacgacaagaacgccaccgccagcuucaucuacaacggcagacugguggacagcaucgugagcuggagcaaggagauccugagaacccaggagagcgagugcgugugcaucaacggcaccugcaccguggugaugaccgacggcagcgccagcggcaaggccgacaccaagauccuguucaucgaggagggcaagaucgugcacaccagcacccugagcggcagcgcccagcacguggaggagugcagcugcuaccccagauaccccggcgugagaugcgugugcagagacaacuggaagggcagcaacagacccaucguggacaucaacaucaaggaccacagcaccgugagcagcuacgugugcagcggccuggugggcgacacccccagaaagaacgacagcagcagcagcagccacugccuggaccccaacaacgaggagggcggccacggcgugaagggcugggccuucgacgacggcaacgacguguggaugggcagaaccaucagcgagaagagcagacugggcuacgagaccuucaaggugaucgagggcuggagcaaccccaagagcaagcugcagaucaacagacaggugaucguggacagaggcaacagaagcggcuacagcggcaucuucagcguggagggcaagagcugcaucaacagaugcuucuacguggagcugaucagaggcagaaaggaggagaccgaggugcuguggaccagcaacagcaucgugguguucugcggcaccagcggcaccuacggcaccggcagcuggcccgacggcgccgacaucaaccugaugcccaucuga

SEQ ID NO: 176581 - RNA, 1410 nt, Artificial Sequence; identical to SEQ ID NO: 176571
  derived and/or modified CDS sequence (opt4) from neuraminidase__InfluenzaA__ACI26475

SEQ ID NO: 176582 - RNA, 1410 nt, Artificial Sequence; identical to SEQ ID NO: 176572
  derived and/or modified CDS sequence (opt4) from neuraminidase__InfluenzaA__ACI26486

SEQ ID NO: 176583 - RNA, 1410 nt, Artificial Sequence; identical to SEQ ID NO: 176572
  derived and/or modified CDS sequence (opt4) from neuraminidase__InfluenzaA__ACI26497

SEQ ID NO: 176584 - RNA, 1410 nt, Artificial Sequence; identical to SEQ ID NO: 176572
  derived and/or modified CDS sequence (opt4) from neuraminidase__InfluenzaA__ACI26508

SEQ ID NO: 176585 - RNA, 1410 nt, Artificial Sequence
  derived and/or modified CDS sequence (opt4) from neuraminidase__InfluenzaA__ACI26519
augaaccccaaccagaagaucaucaccaucggcagcgugagccugaccaucagcaccaucugcuucuucaugcagaucgccauccugaucaccaccgugacccugcacuucaagcaguacgaguucaacagcccccccaacaaccaggugaugcugugcgagcccaccaucaucgagagaaacaucaccgagaucguguaccugaccaacaccaccaucgagaaggagaucugccccaagcuggccgaguacagaaacuggagcaagccccagugcgacaucaccggcuucgcccccuucagcaaggacaacagcaucagacugagcgccggcggcgacaucugggugaccagagagcccuacgugagcugcgaccccgacaagugcuaccaguucgcccugggccagggcaccacccugaacaacgugcacagcaacgacaccgugagagacagaacccccuacagaacccugcugaugaacgagcugggcgugcccuuccaccugggcaccaagcaggugugcaucgccuggagcagcagcagcugccacgacggcaaggccuggcugcacgugugcaucaccggcgacgacaagaacgccaccgccagcuucaucuacaacggcagacugguggacagcguggugagcuggagcaaggagauccugagaacccaggagagcgagugcgugugcaucaacggcaccugcaccguggugaugaccgacggcagcgccagcggcaaggccgacaccaagauccuguucaucgaggagggcaagaucgugcacaccagcacccugagcggcagcgcccagcacguggaggagugcagcugcuaccccagauaccccggcgugagaugcgugugcagagacaacuggaagggcagcaacagacccaucguggacaucaacaucaaggaccacagcaucgugagcagcuacgugugcagcggccuggugggcgacacccccagaaagaacgacagcagcagcagcagccacugccuggaccccaacaacgaggagggcggccacggcgugaagggcugggccuucgacgacggcaacgacguguggaugggcagaaccaucagcgagaagagcagacugggcuacgagaccuucaaggugaucgagggcuggagcaaccccaagagcaagcugcagaucaacagacaggugaucguggacagaggcaacagaagcggcuacagcggcaucuucagcguggagggcaagagcugcaucaacagaugcuucuacguggagcugaucagaggcagaaaggaggagaccgaggugcuguggaccagcaacagcaucgugguguucugcggcaccagcggcaccuacggcaccggcagcuggcccgacggcgccaacaucaaccugaugcccaucuga

SEQ ID NO: 176586 - RNA, 1410 nt, Artificial Sequence; identical to SEQ ID NO: 176572
  derived and/or modified CDS sequence (opt4) from neuraminidase__InfluenzaA__ACI26530

SEQ ID NO: 176587 - RNA, 1410 nt, Artificial Sequence; identical to SEQ ID NO: 176572
  derived and/or modified CDS sequence (opt4) from neuraminidase__InfluenzaA__ACI26541

SEQ ID NO: 176588 - RNA, 1410 nt, Artificial Sequence
  derived and/or modified CDS sequence (opt4) from neuraminidase__InfluenzaA__ACI26552
augaaccccaaccagaagaucaucaccaucggcagcgugagccugaccaucgccaccaugugcuuccugaugcagaucgccauccuggugaccaccgugacccugcacuucaagcaguacgagugcagcagcccccccaacaaccaggugaugcccugcgagcccaccaucaucgagagaaacaucaccgagaucguguaccugaccaacaccaccaucgagaaggagaucugccccaagcugguggaguacagaaacuggagcaagccccagugcaagaucaccggcuucgcccccuucagcaaggacaacagcaucagacugagcgccggcggcgacaucugggugaccagagagcccuacgugagcugcgaccccggcaagugcuaccaguucgcccugggccagggcaccacccugaacaacagacacagcaacgacaccgugcacgacagaacccccuacagaacccugcugaugaacgagcugggcgugcccuuccaccugggcaccaagcaggugugcaucgccuggagcagcagcagcugccacgacggcaaggccuggcugcacgugugcgugaccggccacgacaagaacgccaccgccagcuucaucuacgacggcagacugguggacagcaucggcagcuggagcaagaacauccugagaacccaggagagcgagugcgugugcaucaacggcaccugcaccguggugaugaccgacggcagcgccagcgagagagccgacaccaagauccuguucaucgaggagggcaagaucgugcacaucagcccccugagcggcagcgcccagcacguggaggagugcagcugcuaccccagauaccccggcgugagaugcgugugcagagacaacuggaagggcagcaacagacccaucguggacaucaacgugaaggacuacagcaucgugagcagcuacgugugcagcggccuggugggcgacacccccagaaagaacgacagaagcagcagcagcuacugcagaaaccccaacaacgagaagggcagccacggcgugaagggcugggccuucgacgacggcaacgacguguggaugggcagaaccaucagcgaggagcugagaagcggcuacgagaccuucaaggugaucggcggcuggagcacccccaacagcaagcugcagaucaacagacaggugaucguggacagcggcaacagaagcggcuacagcggcaucuucagcguggagggcaagagcugcaucaacagaugcuucuacguggagcugaucagaggcagagagcaggagaccagagugugguggaccagcaacagcaucgugguguucugcggcaccagcggcaccuacggcaccggcagcuggcccgacggcgccgacaucaaccugaugcccaucuga

SEQ ID NO: 176589 - RNA, 1410 nt, Artificial Sequence
  derived and/or modified CDS sequence (opt4) from neuraminidase__InfluenzaA__ACI26574
augaaccccaaccagaagaucaucaccaucggcagcgugagccugacccuggccaccaucugcuuccugaugcagaucgccauccuggugaccaccgugacccugcacuucaagcaguacgagugcagcagcccccccaacaaccaggugaugcccugcgagcccaccaucaucgagagaaacaucaccgagaucguguaccugaccaacaucaccaucgagaaggagaucugccccaagcugguggaguacagaaacuggagcaagccccagugcaagaucaccggcuucgcccccuucagcaaggacaacagcaucagacugagcgccggcggcgacaucugggugaccagagagcccuacgugagcugcgaccccagcaagugcuaccaguucgcccugggccagggcaccacccugaacaacagacacagcaacgacaccgugcacgacagaacccccuacagaacccugcugaugaacgagcugggcgugcccuuccaccugggcaccagacaggugugcauggccuggagcagcagcagcugccacgacggcaaggccuggcugcacgugugcgugaccggccacgacgagaacgccaccgccagcuucaucuacgacggcagacugguggacagcaucggcagcuggagcaagaacauccugagaacccaggagagcgagugcgugugcaucaacggcaccugcaccguggugaugaccgacggcagcgccagcgagagagccgacaccaagauccuguucaucgaggagggcaagaucgugcacaucagcccccugagcggcagcgcccagcacguggaggagugcagcugcuaccccagauaccccggcgugagaugcgugugcagagacaacuggaagggcagcaacagacccaucguggacaucaacgugaaggacuacagcaucgugagcagcuacgugugcagcggccuggugggcgacacccccagaaagaacgacagaagcagcagcagcuacugcagaaaccccaacaacgagaagggcagccacggcgugaagggcugggccuucgacgacggcaacgacguguggaugggcagaaccaucggcgaggagcugagaagcggcuacgagaccuucaaggugaucggcggcuggagcacccccaacagcaagcugcagaucaacagacaggugaucguggacagcggcaacagaagcggcuacagcggcaucuucagcguggagggcaagagcugcaucaacagaugcuucuacguggagcugaucagaggcagaaagcaggagaccagagugugguggaccagcaacagcaucgugguguucugcggcaccagcggcaccuacggcaccggcagcuggcccgacggcgccgacaucaaccugaugcccaucuga

SEQ ID NO: 176590 - RNA, 1410 nt, Artificial Sequence
  derived and/or modified CDS sequence (opt4) from neuraminidase__InfluenzaA__ACI26585
augaaccccaaccagaagaucaucaccaucggcagcgugagccugaccaucgccaccaucugcuuccugaugcagaucgccauccuggugaccaccgugacccugcacuucaagcagcacgagugcaacagcccccccaacaaccaggugaugcccugcgagcccaccaucaucgagagaaacaucaccgagaucguguaccugaccaacaccaccaucgagaaggagaucugccccaagcugguggaguacagaaacuggagcaagccccagugcaagaucaccggcuucgcccccuucagcaaggacaacagcaucagacugagcgccggcggcgacaucugggugaccagagagcccuacgugagcugcgaccccggcaagugcuaccaguucgcccugggccagggcaccacccugaacaacagacacagcaacgacaccgugcacgacagaacccccuacagaacccugcugaugaacgagcugggcgugcccuuccaccugggcaccaagcaggugugcaucgccuggagcagcagcagcugccacgacggcaaggccuggcugcacgugugcgugaccggccacgacgagaacgccaccgccagcuucaucuacgacggcagacugguggacagcaucgugagcuggagcaagaacgugcugagaacccaggagagcgagugcgugugcaucaacggcaccugcaccguggugaugaccgacggcagcgccagcgagagagccgacaccaagauccuguucaucgaggagggcaagaucgugcacaucagcccccugagcggcagcgcccagcacguggaggagugcagcugcuaccccagauaccccggcgugagaugcgugugcagagacaacuggaagggcagcaacagacccaucguggacaucaacgugaaggacuacagcaucgugagcagcuacgugugcagcggccuggugggcgacacccccagaaagaacgacagcagcagcagcagcuacugcagaaaccccaacaacgagaagggcagccacggcgugaagggcugggccuucgacgacggcaacgacguguggaugggcagaaccaucggcgaggagcugagaagcggcuacgagaccuucaaggugaucggcggcuggagcacccccaacagcaagcugcagaccaacagacaggugaucguggacagaggcaacagaagcggcuacagcggcaucuucagcguggagggcaagagcugcaucaacagaugcuucuacguggagcugaucagaggcagaaagcaggagaccaaggugugguggaccagcaacagcaucgugguguucugcggcaccagcggcaccuacggcaccggcagcuggcccgacggcgccgacaucaaccugaugcccaucuga

SEQ ID NO: 176591 - RNA, 1413 nt, Artificial Sequence
  derived and/or modified CDS sequence (opt4) from neuraminidase__InfluenzaA__ACI32764
augaaccccaaccagaagaucaucaccaucggcagcaucagcauggccaucggcaucaucagccugaugcugcagaucggcaacaucaucagcaucugggccagccacagcauccagaccggcagccagaaccacaccggcaucugcaaccagagaaucaucaccuacgagaacagcaccugggugaaccacaccuacgugaacaucaacaacaccaacgugguggccggcaaggacaagaccagcgugacccuggccggcaacagcagccugugcagcaucagcggcugggccaucuacaccaaggacaacagcaucagaaucggcagcaagggcgacguguucgugaucagagagcccuucaucagcugcagccaccuggagugcagaaccuucuuccugacccagggcgcccugcugaacgacaagcacagcaacggcaccgugaaggacagaagccccuacagagcccugaugagcugcccccugggcgaggcccccagccccuacaacagcaaguucgagagcguggccuggagcgccagcgccugccacgacggcaugggcuggcugaccaucggcaucagcggccccgacaacggcgccguggccgugcugaaguacaacggcaucaucaccgagaccaucaagagcuggaagaagagaauccugagaacccaggagagcgagugcgugugcgugaacggcagcugcuucaccaucaugaccgacggccccagcaacggcgccgccagcuacaagaucuucaagaucgagaagggcaaggugaccaagagcaucgagcugaacgcccccaacuuccacuacgaggagugcagcugcuaccccgacaccggcaccgugaugugcgugugcagagacaacuggcacggcagcaacagacccugggugagcuucaaccagaaccuggacuaccagaucggcuacaucugcagcggcguguucggcgacaaccccagacccaaggacggcaagggcagcugcaaccccgugaccguggacggcgccgacggcgugaagggcuucagcuacaaguacggcaacggcguguggaucggcagaaccaagagcaacagacugagaaagggcuucgagaugaucugggaccccaacggcuggaccgacaccgacagcgacuucagcgugaagcaggacgugguggccaucaccgacuggagcggcuacagcggcagcuucgugcagcaccccgagcugaccggccuggacugcaucagacccugcuucuggguggagcuggugagaggccugcccagagagaacaccaccaucuggaccagcggcagcagcaucagcuucugcggcguggacagcgacaccgccaacuggagcuggcccgacggcgccgagcugcccuucaccaucgacaaguga

SEQ ID NO: 176592 - RNA, 1413 nt, Artificial Sequence
  derived and/or modified CDS sequence (opt4) from neuraminidase__InfluenzaA__ACI32765
augaaccccaaccagaagaucaucaccaucggcagcaucagcaucgccaucggcaucaucagccugaugcugcagaucggcaacaucaucagcaucugggccagccacagcauccagaccggcagccagaaccacaccggcaucugcaaccagagaaucaucaccuacgagaacaacaccugggugaaccacaccuacgugaacaucaacaacaccaacgugguggccagaaaggacaagaccagcgugacccuggccggcaacagcagccugugcagcaucagcggcugggccaucuacaccaaggacaacagcaucagaaucggcagcaagggcgacguguucgugaucagagagcccuucaucagcugcagccaccuggagugcagaaccuucuucaugacccagggcgcccugcugaacgacaagcacagcaacggcaccgugaaggacagaagccccuacagagcccugaugagcugcccccugggcgaggcccccagccccuacaacagcaaguucgagagcguggccuggagcgccagcgccugccacgacggcaugggcuggcugaccaucggcaucagcggccccgacaacggcgccguggccgugcugaaguacaacggcaucaucaccgagaccaucaagagcuggaagaagagaauccugagaacccaggagagcgagugcgugugcgugaacggcagcugcuucaccaucaugaccgacggccccagcaacggcgccgccagcuacaagaucuucaagaucgagaagggcaaggugaccaagagcguggagcugaacgcccccaacuuccacuacgaggagugcagcugcuaccccgacaccggcaccgugaugugcgugugcagagacaacuggcacggcagcaacagacccugggugagcuucaaccagaaccuggacuaccagaucggcuacaucugcagcggcguguucggcgacaaccccagacccaaggacggcaagggcagcugcaaccccgugaccguggacggcgccgacggcgugaagggcuucagcuacaaguacggcaacggcguguggaucggcagaaccaagagcaacagacugagaaagggcuucgagaugaucugggaccccaacggcuggaccgacaccgacagcgacuucagcgugaagcaggacgugguggccaucaccgacuggagcggcuacagcggcagcuucgugcagcaccccgagcugaccggccuggacugcaucagacccugcuucuggguggagcuggugagaggccugcccagagagaacaccaccaucuggaccagcggcagcagcaucagcuucugcggcguggacagcgacaccgccaacuggagcuggcccgacggcgccgagcugcccuucaccaucgacaaguga

SEQ ID NO: 176593 - RNA, 1413 nt, Artificial Sequence; identical to SEQ ID NO: 174446
  derived and/or modified CDS sequence (opt4) from neuraminidase__InfluenzaA__ACI32766

SEQ ID NO: 176594 - RNA, 1413 nt, Artificial Sequence
  derived and/or modified CDS sequence (opt4) from neuraminidase__InfluenzaA__ACI32767
augaaccccaaccagaagaucaucaccaucggcagcaucagcaucgccaucggcaucaucagccugaugcugcagaucggcaacaucaucagcaucugggccagccacagcacccagaccggcagccagaaccacaccggcaucugcaaccagagaaucaucaccuacgagaacagcaccugggugaaccacaccuacgugaacaucaacaacaccaacgugguggccggcaaggacaagaccagcgugacccuggccggcaacagcagccugugcagcaucagcggcugggccaucuacaccaaggacaacagcgugagaaucggcagcaagggcgacguguucgugaucagagagcccuucaucagcugcagccaccuggagugcagaaccuucuuccugacccagggcgcccugcugaacgacaagcacagcaacggcaccgugaaggacagaagccccuacagagcccugaugagcugcccccugggcgaggcccccagccccuacaacagcaaguucgagagcguggccuggagcgccagcgccugccacgacggcaugggcuggcugaccaucggcaucagcggccccgacaacggcgccguggccgugcugaaguacaacggcaucaucaccgagaccaucaagagcuggaagaagagaauccugagaacccaggagagcgagugcgugugcgugaacggcagcugcuucaccaucaugaccgacggccccagcaacggcgccgccagcuacaagaucuucaagaucgagaagggcaaggugaccaagagcaucgagcugaacgcccccaacuuccacuacgaggagugcagcugcuaccccgacaccggcaccgugaugugcgugugcagagacaacuggcacggcagcaacagacccugggugagcuucaaccagaaccuggacuaccagaucggcuacaucugcagcggcguguucggcgacaaccccagacccaaggacggcaagggcagcugcaaccccgugaccguggacggcgccgacggcgugaagggcuucagcuacaaguacggcaacggcguguggaucggcagaaccaagagcaacagacugagaaagggcuucgagaugaucugggaccccaacggcuggaccgacaccgacagcgacuucagcgugaagcaggacgugguggccaucaccgacuggagcggcuacagcggcagcuucgugcagcaccccgagcugaccggccuggacugcaucagacccugcuucuggguggagcuggugagaggccugcccagagagaacaccaccaucuggaccagcggcagcagcaucagcuucugcggcguggacagcgacaccgccaacuggagcuggcccgacggcgccgagcugcccuucaccaucgacaaguga

SEQ ID NO: 176595 - RNA, 1413 nt, Artificial Sequence
  derived and/or modified CDS sequence (opt4) from neuraminidase__InfluenzaA__ACI32768
augaaccccaaccagaagaucaucaccaucggcagcaucagcaucgccaucggcaucaucagccugaugagccagaucggcaacaucaucagcaucugggccagccacagcauccagaccggcagccagaaccacaccggcaucugcaaccagagaaucaucaccuacgagaacagcaccugggugaaccacaccuacgugaacaucaacaacaccaacgugguggccggcaaggacaagaccagcgugacccuggccggcaacagcagccugugcagcaucagcggcugggccaucuacaccaaggacaacagcaucagaaucggcagcaagggcgacguguucgugaucagagagcccuucaucagcugcagccaccuggagugcagaaccuucuuccugacccagggcgcccugcugaacgacaagcacagcaacggcaccgugaaggacagaagccccuacagagcccugaugagcugcccccugggcgaggcccccagccccuacaacagcaaguucgagagcguggccuggagcgccagcgccugccacgacggcaugggcuggcugaccaucggcaucagcggccccgacaacggcgccguggccgugcugaaguacaacggcaucaucaccgagaccaucaagagcuggaagaagagaauccugagaacccaggagagcgagugcgugugcgugaacggcagcugcuucaccaucaugaccgacggccccagcaacggcgccgccagcuacaagaucuucaagaucgagaagggcaaggugaccaagagcaucgagcugaacgcccccaacuuccacuacgaggagugcagcugcuaccccgacaccggcaccgugaugugcgugugcagagacaacuggcacggcagcaacagacccugggugagcuucaaccagaaccuggacuaccagaucggcuacaucugcagcggcguguucggcgacaaccccagacccaaggacggcaagggcagcugcaaccccgugaccguggacggcgccgacggcgugaagggcuucagcuacaaguacggcaacggcguguggaucggcagaaccaagagcaacagacugagaaagggcuucgagaugaucugggaccccaacggcuggaccgacaccgacagcgacuucagcgugaagcaggacgugguggccaucaccgacuggagcggcuacagcggcagcuucgugcagcaccccgagcugaccggccuggacugcaucagacccugcuucuggguggagcuggugagaggccugcccagagagaacaccaccaucuggaccagcggcagcagcaucagcuucugcggcguggacagcgacaccgccaacuggagcuggcccgacggcgccgagcugcccuucaccaucgacaaguga

SEQ ID NO: 176596 - RNA, 1413 nt, Artificial Sequence
  derived and/or modified CDS sequence (opt4) from neuraminidase__InfluenzaA__ACI32769
augaaccccaaccagaagaucaucaccaucggcagcaucagcaucgccaucggcaucaucagccugaugcugcagaucggcaacaucaucagcaucugggccagccacagcauccagaccggcagccagaaccacaccggcaucugcaaccagagaaucaucaccuacgagaacagcaccugggugaaccacaccuacgugaacaucaacaacaccaacgugguggccggcaaggacaagaucagcgugacccuggccggcaacagcagccugugcagcaucagcggcugggccaucuacaccaaggacaacagcaucagaaucggcagcaagggcgacguguucgugaucagagagcccuucaucagcugcagccaccuggagugcagaaccuucuuccugacccagggcgcccugcugaacgacaagcacagcaacggcaccgugaaggacagaagccccuacagagcccugaugagcugcccccugggcgaggcccccagccccuacaacagcaaguucgagagcguggccuggagcgccagcgccugccacgacggcaugggcuggcugaccaucggcaucagcggccccgacaacggcgccguggccgugcugaaguacaacggcaucaucaccgagaccaucaagagcuggaagaagagaauccugagaacccaggagagcgagugcgugugcgugaacggcagcugcuucaccaucaugaccgacggccccagcaacggcgccgccagcuacaagaucuucaagaucgagaagggcaaggugaccaagagcaucgagcugaacgcccccaacuuccacuacgaggagugcagcugcuaccccgacaccggcaccgugaugugcgugugcagagacaacuggcacggcagcaacagacccugggugagcuucaaccagaaccuggacuaccagaucggcuacaucugcagcggcguguucggcgacaaccccagacccaaggacggcaagggcagcugcaaccccgugaccguggacggcgccgacggcgugaagggcuucagcuacaaguacggcaacggcguguggaucggcagaaccaagagcaacagacugagaaagggcuucgagaugaucugggaccccaacggcuggaccgacaccgacagcgacuucagcgugaagcaggacgugguggccaucaccgacuggagcggcuacagcggcagcuucgugcagcaccccgagcugaccggccuggacugcaucagacccugcuucuggguggagcuggugagaggccugcccagagagaacaccaccaucuggaccagcggcagcagcaucagcuucugcggcguggacagcgacaccgccaacuggagcuggcccgacggcgccgagcugcccuucaccaucgacaaguga

SEQ ID NO: 176597 - RNA, 1413 nt, Artificial Sequence; identical to SEQ ID NO: 174446
  derived and/or modified CDS sequence (opt4) from neuraminidase__InfluenzaA__ACI32770

SEQ ID NO: 176598 - RNA, 1413 nt, Artificial Sequence
  derived and/or modified CDS sequence (opt4) from neuraminidase__InfluenzaA__ACI32771
augaaccccaaccagaagaucaucaccaucggcagcaucagcaucgccaucggcaucaucagccugaugcugcagaucggcaacaucaucagcaucugggccagccacagcauccagaccggcagccagaaccacaccggcaucugcaaccagagaaucaucaccuacaagaacagcaccugggugaaccacaccuacgugaacaucaacaacaccaacgugguggccggcaagggcaagaccagcgugacccuggccggcaacagcagccugugcagcaucagcggcugggccaucuacaccaaggacaacagcaucagaaucggcagcaagggcgacguguucgugaucagagagcccuucaucagcugcagccaccuggagugcagaaccuucuuccugacccagggcgcccugcugaacgacaagcacagcaacggcaccgugaaggacagaagccccuacagagcccugaugagcugcccccugggcgaggcccccagccccuacaacagcaaguucgagagcguggccuggagcgccagcgccugccacgacggcaugggcuggcugaccaucggcaucagcggccccgacaacggcgccguggccgugcugaaguacaacggcaucaucaccgagaccaucaagagcuggaagaagagaauccugagaacccaggagagcgagugcgugugcgugaacggcagcugcuucaccaucaugaccgacggccccagcaacggcgccgccagcuacaagaucuucaagaucgagaagggcaaggugaccaagagcaucgagcugaacgcccccaacuuccacuacgaggagugcagcugcuaccccgacaccggcaccgugaugugcgugugcagagacaacuggcacggcagcaacagacccugggugagcuucaaccagaaccuggacuaccagaucggcuacaucugcagcggcguguucggcgacaaccccagacccaaggacggcaagggcagcugcaaccccgugaccguggacggcgccgacggcgugaagggcuucagcuacaaguacggcaacggcguguggaucggcagaaccaagagcaacagacugagaaagggcuucgagaugaucugggaccccaacggcuggaccgacaccgacagcgacuucagcgugaagcaggacgugguggccaucaccgacuggagcggcuacagcggcagcuucgugcagcaccccgagcugaccggccuggacugcaucagacccugcuucuggguggagcuggugagaggccugcccagagagaacaccaccaucuggaccagcggcagcagcaucagcuucugcggcguggacagcgacaccgccaacuggagcuggcccgacggcgccgagcugcccuucaccaucgacaaguga

SEQ ID NO: 176599 - RNA, 1413 nt, Artificial Sequence; identical to SEQ ID NO: 174446
  derived and/or modified CDS sequence (opt4) from neuraminidase__InfluenzaA__ACI32772

SEQ ID NO: 176600 - RNA, 1413 nt, Artificial Sequence; identical to SEQ ID NO: 174446
  derived and/or modified CDS sequence (opt4) from neuraminidase__InfluenzaA__ACI32773

SEQ ID NO: 176601 - RNA, 1413 nt, Artificial Sequence; identical to SEQ ID NO: 174446
  derived and/or modified CDS sequence (opt4) from neuraminidase__InfluenzaA__ACI32774

SEQ ID NO: 176602 - RNA, 1413 nt, Artificial Sequence; identical to SEQ ID NO: 174446
  derived and/or modified CDS sequence (opt4) from neuraminidase__InfluenzaA__ACI32775

SEQ ID NO: 176603 - RNA, 1413 nt, Artificial Sequence
  derived and/or modified CDS sequence (opt4) from neuraminidase__InfluenzaA__ACI32776
augaaccccaaccagaagaucaucaccaucggcagcaucagcaucgccaucggcaucaucagccugaugcugcagaucggcaacaucaucagcaucugggccagccacagcauccagaccggcagccagaaccacaccggcaucugcaaccagagaaucaucaccuacaagaacagcaccugggugaaccacaccuacgugaacaucaacaacaccaacgugguggccggcaaggacaagaccagcgugacccuggccggcaacagcagccugugcagcaucagcggcugggccaucuacaccaaggacaacagcaucagaaucggcagcaagggcgacguguucgugaucagagagcccuucaucagcugcagccaccuggagugcagaaccuucuuccugacccagggcgcccugcugaacgacaagcacagcaacggcaccgugaaggacagaagccccuacagagcccugaugagcugcccccugggcgaggcccccagccccuacaacagcaaguucgagagcguggccuggagcgccagcgccugccacgacggcaugggcuggcugaccaucggcaucagcggccccgacaacggcgccguggccgugcugaaguacaacggcaucaucaccgagaccaucaagagcuggaagaagagaauccugagaacccaggagagcgagugcgugugcgugaacggcagcugcuucaccaucaugaccgacggccccagcaacggcgccgccagcuacaagaucuucaagaucgagaagggcaaggugaccaagagcaucgagcugaacgcccccaacuuccacuacgaggagugcagcugcuaccccgacaccggcaccgugaugugcgugugcagagacaacuggcacggcagcaacagacccugggugagcuucaaccagaaccuggacuaccagaucggcuacaucugcagcggcguguucggcgacaaccccagacccaaggacggcaagggcagcugcaaccccgugaccguggacggcgccgacggcgugaagggcuucagcuacaaguacggcaacggcguguggaucggcagaaccaagagcaacagacugagaaagggcuucgagaugaucugggaccccaacggcuggaccgacaccgacagcgacuucagcgugaagcaggacgugguggccaucaccgacuggagcggcuacagcggcagcuucgugcagcaccccgagcugaccggccuggacugcaucagacccugcuucuggguggagcuggugagaggccugcccagagagaacaccaccaucuggaccagcggcagcagcaucagcuucugcggcguggacagcgacaccgccaacuggagcuggcccgacggcgccgagcugcccuucaccaucgacaaguga

SEQ ID NO: 176604 - RNA, 1413 nt, Artificial Sequence
  derived and/or modified CDS sequence (opt4) from neuraminidase__InfluenzaA__ACI32777
augaaccccaaccagaagaucaucaccaucggcagcaucagcaucgccaucggcaucaucagccugaugcugcagaucggcaacaucaucagcaucugggccagccacagcauccagaccggcagccagaaccacaccggcaucugcaaccagagaaucaucaccuacaagaacagcaccugggugaaccacaccuacgugaacaucaacaacaccaacgugguggccggcaaggacaagaccagcgugacccuggccggcaacagcagccugugcagcaucagcggcugggccaucuacaccaaggacaacagcaucagaaucggcagcaagggcgacguguucgugaucagagagcccuucaucagcugcagccaccuggagugcagaaccuucuuccugacccagggcgcccugcugaacgacaagcacagcaacggcaccgugaaggacagaagccccuacagagcccugaugagcugcccccugggcgaggcccccagccccuacaacagcaaguucgagagcguggccuggagcgccagcgccugccacgacggcaugggcuggcugaccaucggcaucagcggccccgacaacggcgccguggccgugcugaaguacaacggcaucaucaccgagaccaucaagagcuggaagaagagaauccugagaacccaggagagcgagugcgugugcgugaacggcagcugcuucaccaucaugaccgacggccccagcaacggcgccgccagcuacaagaucuucaagaucgagaagggcaaggugaccaagagcaucgagcugaacgcccccaacuuccacuacgaggagugcagcugcuaccccgacaccggcaccgugaugugcgugugcagagacaacuggcacggcagcaacagacccugggugagcuucaaccagaaccuggacuaccagaucggcuacaucugcagcggcguguucggcgacaaccccagacccaaggacggcaagggcagcugcaaccccgugaccguggacggcgccgacggcgugaagggcuucagcuacaaguacggcaacggcguguggaucggcagaaccaagagcaacagacugagaaagggcuucgagaugaucugggaccccaacggcuggaccgacaccgacagcgacuucagcgugaagcaggacgugguggccaucaccgacuggagcggcuacagcggcagcuucgugcagcaccccgagcugaccggccuggacugcaucagacccugcuucuggguggagcuggugagaggccugcccagagagaacaccaccaucuggaccagcggcagcagcaucagcuucugcggcguggacagcgacaccgccaacuggagcuggcccgacggcgccgagcugcccuucgccaucgacaaguga

SEQ ID NO: 176605 - RNA, 1413 nt, Artificial Sequence; identical to SEQ ID NO: 174446
  derived and/or modified CDS sequence (opt4) from neuraminidase__InfluenzaA__ACI32778

SEQ ID NO: 176606 - RNA, 1413 nt, Artificial Sequence; identical to SEQ ID NO: 174446
  derived and/or modified CDS sequence (opt4) from neuraminidase__InfluenzaA__ACI32779

SEQ ID NO: 176607 - RNA, 1413 nt, Artificial Sequence; identical to SEQ ID NO: 174446
  derived and/or modified CDS sequence (opt4) from neuraminidase__InfluenzaA__ACI32780

SEQ ID NO: 176608 - RNA, 1413 nt, Artificial Sequence; identical to SEQ ID NO: 174446
  derived and/or modified CDS sequence (opt4) from neuraminidase__InfluenzaA__ACI32781

SEQ ID NO: 176609 - RNA, 1413 nt, Artificial Sequence
  derived and/or modified CDS sequence (opt4) from neuraminidase__InfluenzaA__ACI32782
augaaccccaaccagaagaucaucaccaucggcagcaucagcaucgccaucggcaucaucagccugaugcugcagaucggcaacaucaucagcaucugggccagccacagcauccagaccggcagccagaaccacaccggcaucugcaaccagagaaucaucaccuacgagaacagcaccugggugaaccacaccuacgugaacaucaacaacaccaacgugguggccggcaaggacaagaccagcgugacccuggccggcaacagcagccugugcagcaucagcggcugggccaucuacaccaaggacaacagcaucagaaucggcagcaagggcgacguguucgugaucagagagcccuucaucagcugcagccaccuggagugcagaaccuucuuccugacccagggcgcccugcugaacgacaagcacagcaacggcaccgugaaggacagaagccccuacagagcccugaugagcugcccccugggcgaggcccccagccccuacaacagcaaguucgagagcguggccuggagcgccagcgccugccacgacggcaugggcuggcugaccaucggcaucagcggccccgacaacggcgccguggccgugcugaaguacaacggcaucaucaccggcaccaucaagagcuggaagaagcagauccugagaacccaggagagcgagugcgugugcaugaacggcagcugcuucaccaucaugaccgacggccccagcaacggcgccgccagcuacaagaucuucaagaucgagaagggcaaggccaccaagagcaucgagcugaacgcccccaacuuccacuacgaggagugcagcugcuaccccgacaccggcaccgugaugugcgugugcagagacaacuggcacggcagcaacagacccugggugagcuucaaccagaaccuggacuaccagaucggcuacaucugcagcggcguguucggcgacaaccccagacccaaggacagaaagggcagcugcaaccccgugaccguggacggcgccgacggcgugaagggcuucagcuacaaguacggcaacggcguguggaucggcagaaccaagagcaacagacugagaaagggcuucgagaugaucugggaccccaacggcuggaccaacaccgacagcgacuucagcgugaagcaggacgugguggccaucaccgacuggagcggcuacagcggcagcuucgugcagcaccccgagcugaccggccuggacugcaucagacccugcuucuggguggagcuggugagaggccugcccagagagaacaccaccaucuggaccagcggcagcagcaucagcuucugcggcgugaacagcgacaccgccaacuggagcuggcccgacggcgccgagcugcccuucaccaucgacaaguga

SEQ ID NO: 176610 - RNA, 1413 nt, Artificial Sequence
  derived and/or modified CDS sequence (opt4) from neuraminidase__InfluenzaA__ACI32783
augaaccccaaccagaagaucaucaccaucggcagcaucagcaucgccaucggcaucaucagccugaugcugcagaucggcaacaucaucagcaucugggccagccacagcauccagaccggcagccagaaccacaccggcaucugcaaccagagaaucaucaccuacgagaacagcaccugggugaaccacaccuacgugaacaucaacaacaccaacgugguggccggcaaggacaagaccagcgugacccuggccggcaacagcagccugugcagcaucagcggcugggccaucuacaccaaggacaacagcaucagaaucggcagcaagggcgacguguucgugaucagagagcccuucaucagcugcagccaccuggagugcagaaccuucuuccugacccagggcgcccugcugaacgacaagcacagcaacggcaccgugaaggacagaagccccuacagagcccugaugagcugcccccugggcgaggcccccagccccuacaacagcaaguucgagagcguggccuggagcgccagcgccugccacgacggcaugggcuggcugaccaucggcaucagcggccccgacaacggcgccguggccgugcugaaguacaacggcaucaucaccgagaccaucaagagcuggaagaagcagauccugagaacccaggagagcgagugcgugugcgugaacggcagcugcuucaccaucaugaccgacggccccagcaacggcgccgccagcuacaagaucuucaagaucgagaagggcaaggugaccaagagcaucgagcugaacgcccccaacuuccacuacgaggagugcagcugcuaccccgacaccggcaccgugaugugcgugugcagagacaacuggcacggcagcaacagacccuggcugagcuucaaccagaaccuggacuaccagaucggcuacaucugcagcggcgugaucggcgacaaccccagacccaaggacggcaagggcagcugcaaccccgugaccguggacggcgccgacggcgugaagggcuucagcuacaaguacggcaacggcguguggaucggcagaaccaagagcaacagacugagaaagggcuucgagaugaucugggaccccaacggcuggaccgacaccgacagcgacuucagcgugaagcaggacgugguggccaucaccgacuggagcggcuacagcggcagcuucgugcagcaccccgagcugaccggccuggacugcaucagacccugcuucuggguggagcuggugagaggccugcccagagagaacaccaccaucuggaccagcggcagcagcaucagcuucugcggcguggacggcgacaccgccaacuggagcuggcccgacggcgccgagcugcccuucaccaucgacaaguga

SEQ ID NO: 176611 - RNA, 1413 nt, Artificial Sequence
  derived and/or modified CDS sequence (opt4) from neuraminidase__InfluenzaA__ACI32784
augaaccccaaccagaagaucaucaccaucggcagcaucagcaucgccaucggcaucaucagccugaugcugcagaucggcaacaucaucagcaucugggccagccacagcauccagaccggcagccagaaccacaccggcaucugcaaccagagaaucaucaccuacgagaacagcaccugggugaaccacaccuacgugaacaucaacaacaccaacgugguggccggcaaggacaagaccagcgugacccuggccggcaacagcagccugugcagcaucagcggcugggccaucuacaccaaggacaacagcaucagaaucggcagcaagggcgacguguucgugaucagagagcccuucaucagcugcagccaccuggagugcagaaccuucuuccugacccagggcgcccugcugaacgacaagcacagcaacggcaccgugaaggacagaagccccuacagagcccugaugagcugcccccugggcgaggcccccagccccuacaacagcaaguucgagagcguggccuggagcgccagcgccugccacgacggcaugggcuggcugaccaucggcaucagcggccccgacaacggcgccguggccgugcugaaguacaacggcaucaucaccggcaccaucaagagcuggaagaagcagauccugagaacccaggagagcgagugcgugugcaugaacggcagcugcuucaccaucaugaccgacggccccagcaacggcgccgccagcuacaagaucuucaagaucgagaagggcaaggccaccaagagcaucgagcugaacgcccccaacuuccacuacgaggagugcagcugcuaccccgacaccggcaccgugaugugcgugugcagagacaacuggcacggcagcaacagacccugggugagcuucaaccagaaccuggacuaccagaucggcuacaucugcagcggcguguucggcgacaaccccagacccaaggacagagagggcagcugcaaccccgugaccguggacggcgccgacggcgugaagggcuucagcuacaaguacggcaacggcguguggaucggcagaaccaagagcaacagacugagaaagggcuucgagaugaucugggaccccaacggcuggaccaacaccgacagcgacuucagcgugaagcaggacgugguggccaucaccgacuggagcggcuacagcggcagcuucgugcagcaccccgagcugaccggccuggacugcaucagacccugcuucuggguggagcuggugagaggccugcccagagagaacaccaccaucuggaccagcggcagcagcaucagcuucugcggcgugaacagcgacaccgccaacuggagcuggcccgacggcgccgagcugcccuucaccaucgacaaguga

SEQ ID NO: 176612 - RNA, 1413 nt, Artificial Sequence
  derived and/or modified CDS sequence (opt4) from neuraminidase__InfluenzaA__ACI32785
augaaccccaaccagaagaucaucaccaucggcagcaucagcaucgccaucggcaucaucagccugaugcugcagaucggcaacaucaucagcaucugggccagccacagcauccagaccggcagccagaaccacaccggcaugugcaaccagagaaucaucaccuacgagaacagcaccugggugaaccacaccuacgugaacaucaacaacaccaacgugguggccgagaaggacaagaccagcgugacccuggccggcaacagcagccugugcagcaucagcggcugggccaucuacaccaaggacaacagcaucagaaucggcagcaagggcgacguguucgugaucagagagcccuucaucagcugcagccaccuggagugcagaaccuucuuccugacccagggcgcccugcugaacgacaagcacagcaacggcaccgugaaggacagaagccccuacagagcccugaugagcugcccccugggcgaggcccccagccccuacaacagcaaguucgagagcguggccuggagcgccagcgccugccacgacggcaugggcuggcugaccaucggcaucagcggccccgacaacggcgccguggccgugcugaaguacaacggcaucaucaccgagaccaucaagagcuggaagaagagaauccugagaacccaggagagcgagugcgugugcgugaacggcagcugcuucaccaucaugaccgacggccccagcaacggcgccgccagcuacaagaucuucaagaucgagaagggcaaggugaccaagagcaucgagcugaacgcccccaacuuccacuacgaggagugcagcugcuaccccgacaccggcaccgugaugugcgugugcagagacaacuggcacggcagcaacagacccugggugagcuucaaccagaaccuggacuaccagaucggcuacaucugcagcggcguguucggcgacaaccccagacccaaggacggcaagggcagcugcaaccccgugaccguggacggcgccgacggcgugaagggcuucagcuacaaguacggcaacggcguguggaucggcagaaccaagagcaacagacugagaaagggcuucgagaugaucugggaccccaacggcugggccgacaccgacagcgacuucagcgugaagcaggacgugguggccaucaccgacuggagcggcuacagcggcagcuucgugcagcaccccgagcugaccggccugaacugcaucagacccugcuucuggguggagcuggugagaggccugcccagagagaacaccaccaucuggaccagcggcagcagcaucagcuucugcggcguggacagcgacaccgccaacuggagcuggcccgacggcgccgagcugcccuucaccaucgacaaguga

SEQ ID NO: 176613 - RNA, 1413 nt, Artificial Sequence
  derived and/or modified CDS sequence (opt4) from neuraminidase__InfluenzaA__ACI32787
augaaccccaaccagaagaucaucaccaucggcagcaucagcaucgccaucggcaucaucagccugauccugcagaucggcaacaucaucagcaucugggccagccacagcauccagaccggcagccagaaccacaccggcaucugcaaccagagaaucaucaccuacgagaacagcaccugggugaacaacaccuacgugaacaucaacaacaccaacgugguggccgagaaggacaagaccagcgugacccuggccggcaacagcagccugugcagcaucagcggcugggccaucuacaccaaggacaacagcaucagaaucggcagcaagggcgacguguucgugaucagagagcccuucaucagcugcagccaccuggagugcagaaccuucuuccugacccagggcgcccugcugaacgacaagcacagcaacggcaccgugaaggacagaagccccuacagagcccugaugagcugcccccugggcgaggcccccagccccuacaacagcagauucgagagcguggccuggagcgccagcgccugccacgacggcaugggcuggcugaccaucggcaucagcggccccgacaacggcgccguggccgugcugaaguacaacggcaucaucaccgagaccaucaagagcuggaagaagagaauccugagaacccaggagagcgagugcgugugcaugaacggcagcugcuucaccaucaugaccgacggccccagcaacggcgccgccagcuacaagaucuucaagaucgagaagggcaaggugaccaagaccaucgagcugaacgcccccaacuuccacuacgaggagugcagcugcuaccccgacaccggcaccgugaugugcgugugcagagacaacuggcacggcagcaacagacccugggugagcuucaaccagaaccuggacuaccagaucggcuacaucugcagcggcguguucggcgacaaccccagacccaaggacggcgagggcagcugcaaccccgugaccguggacggcgccgacggcgugaagggcuucagcuacaaguacggcaacggcguguggaucggcagaaccaagagcaacagacugagaaagggcuucgagaugaucugggaccccaacggcuggaccaacaccgacagcgacuucagcgugaagcaggacgugguggccaucaccgacuggagcggcuacagcggcagcuucgugcagcaccccgagcugaccggccuggacugcaucagacccugcuucuggguggagcuggugagaggccugcccagagagaacaccaccaucuggaccagcggcagcagcaucagcuucugcggcgugaacggcggcaccgccgacuggagcuggcccgacggcgccgagcugcccuucaccaucgacaaguga

SEQ ID NO: 176614 - RNA, 1413 nt, Artificial Sequence
  derived and/or modified CDS sequence (opt4) from neuraminidase__InfluenzaA__ACI32788
augaaccccaaccagaagaucaucaccaucggcagcaucagcaucgccaucggcaucaucagccugaugcugcagaucggcaacaucaucagcaucugggccagccacagcauccagaccggcagccagaaccacaccggcaccugcaaccagagaaucaucaccuacgagaacaacaccugggugaaccacaccugcgugaacaucaacaacaccaacgugguggccggcaaggacaagaccagcgugacccuggugggcaacagcagccugugcagcaucagcggcugggccaucuacaccaaggacaacagcaucagaaucggcagcaagggcgacguguucgugaucagagagcccuucaucagcugcagccaccuggagugcagaaccuucuuccugacccagggcgcccugcugaacgacaagcacagcaacggcaccgugaaggacagaagccccuacagagcccugaugagcugcccccugggcgaggcccccagccccuacaacagcaaguucgagagcguggccuggagcgccagcgccugccacgacggcaagggcuggcugaccaucggcaucagcggccccgacaacggcgccguggccgugcugaaguacaacggcaucaucaccgagaccaucaagagcuggaagaagagaauccugagaacccaggagagcgagugcgugugcgugaacggcagcugcuucaccaucaugaccgacggccccagcaacggcgccgccagcuacaagaucuucaagaucgagaagggcaaggugaccaagagcaucgagcugaacgcccccaacuuccacuacgaggagugcagcugcuaccccgacaccggcaccgugaugugcgugugcagagacaacuggcacggcagcaacagacccugggugagcuucaaccagaaccuggacuaccagaucggcuacaucugcagcggcguguucggcgacaaccccagacccaaggacggcaagggcagcugcaaccccaugaccguggacggcgccgacggcgugaagggcuucagcuacaaguacggcaacggcguguggaucggcagaaccaagagcaacagacugagaaagggcuucgagaugaucugggaccccaacggcuggaccgacaccgacagcgacuucagcgugaagcaggacgugguggccaucaccgacuggagcggcuacagcggcagcuucgugcagcaccccgagcugaccggccuggacugcaucagacccugcuucuggguggagcuggugagaggccugcccagagagaacaccaccaucuggaccagcggcagcagcaucagcuucugcggcguggacagcgacaccgccaacuggagcuggcccgacggcgccgagcugcccuucaccaucgacaaguga

SEQ ID NO: 176615 - RNA, 1410 nt, Artificial Sequence
  derived and/or modified CDS sequence (opt4) from neuraminidase__InfluenzaA__ACI32790
augaaccccaaccagaagaucaucaccaucggcagcgugagccugaccaucgccaccaucugcuuccugacccagaucgccauccuggugaccaccgugacccugcacuucaagcaguacgagugcaacagcccccccaacaaccaggugaugcugugcgagcccaccaucaucgagagaaacaucaccgagaucguguaccugaccaacaccaccaucgagaaggagaucugccccaagcuggccgaguacagaaacuggagcaagccccagugcaacaucaccggcuucgcccccuucagcaaggacaacagcaucagacugagcgccggcggcgacaucugggugaccagagagcccuacgugagcugcgaccccgacaagugcuaccaguucgcccugggccagggcaccacccugaacaacggccacagcaacgacaccgugcacgacagaacccccuacagaacccugcugaugaacgagcugggcgugcccuuccaccugggcaccaagcaggugugcaucgccuggagcagcagcagcugccacgacggcaaggccuggcugcacgugugcgugaccggcgacgacaagaacgccaccgccagcuucaucuacaacggcagacugguggacagcaucggcagcuggagcaagaagauccugagaacccaggagagcgagugcgugugcaucaacggcaccugcaccguggugaugaccgacggcagcgccagcggcaaggccgacaccaagauccuguucaucgaggagggcaagaucgugcacaccagccugcugagcggcagcgcccagcacguggaggagugcagcugcuaccccagauaccccggcgugagaugcgugugcagagacaacuggaagggcagcaacagacccaucguggacaucaacgugaaggacuacagcaucgugagcagcuacgugugcagcggccuggugggcgacacccccagaaagaacgacagcagcagcagcagccacugccuggaccccaacaacgaggagggcggccacggcgugaagggcugggccuucgacgacggcaacgacguguggaugggcagaaccaucagcgagaagcugagaagcggcuacgagaccuucaaggugaucgagggcuggagcaagcccaacagcaagcugcagaucaacagacaggugaucguggacagaggcaacagaagcggcuacagcggcaucuucagcguggagggcaagagcugcaucaacagaugcuucuacguggagcugaucagaggcagaaaccaggagaccgaggugcuguggaccagcaacagcaucgugguguucugcggcaccagcggcaccuacggcaccggcagcuggcccgacggcgccgacaucaaccugaugcccaucuga

SEQ ID NO: 176616 - RNA, 1410 nt, Artificial Sequence; identical to SEQ ID NO: 174442
  derived and/or modified CDS sequence (opt4) from neuraminidase__InfluenzaA__ACI32791

SEQ ID NO: 176617 - RNA, 1410 nt, Artificial Sequence; identical to SEQ ID NO: 174442
  derived and/or modified CDS sequence (opt4) from neuraminidase__InfluenzaA__ACI32793

SEQ ID NO: 176618 - RNA, 1410 nt, Artificial Sequence; identical to SEQ ID NO: 174442
  derived and/or modified CDS sequence (opt4) from neuraminidase__InfluenzaA__ACI32794

SEQ ID NO: 176619 - RNA, 1410 nt, Artificial Sequence; identical to SEQ ID NO: 174772
  derived and/or modified CDS sequence (opt4) from neuraminidase__InfluenzaA__ACI32795

SEQ ID NO: 176620 - RNA, 1410 nt, Artificial Sequence
  derived and/or modified CDS sequence (opt4) from neuraminidase__InfluenzaA__ACI32796
augaaccccaaccagaagaucaucaccaucggcagcgugagccugaccaucagcaccaucugcuucuucaugcagaucgccauccugaucaccaccgugacccugcacuucaagcaguacgaguucaacagcccccccaacaaccaggugaugcugugcgagcccaccaucaucgagagaaacaucaccgagaucguguaccugaccaacaccaccaucgagaaggagaucugccccaagcuggccgaguacagaaacuggagcaagccccagugcagcaucaccggcuucgcccccuucagcaaggacaacagcaucagacugagcgccggcggcgacaucugggugaccagagagcccuacgugagcugcgaccccgacaagugcuaccaguucgcccugggccagggcaccacccugaacaacgugcacagcaacgacaccgugcacgacagaacccccuacagaacccugcugaugaacgagcugggcgugcccuuccaccugggcaccaagcaggugugcaucgccuggagcagcagcagcugccacgacggcaaggccuggcugcacgugugcgugaccggcgacgacaagaacgccaccgccagcuucaucuacaacggcagacugguggacagcaucgugagcuggagcaaggagauccugagaacccaggagagcgagugcgugugcaucaacggcaccugcaccguggugaugaccgacggcagcgccagcggcaaggccgacaccaagauccuguucaucgaggagggcaagaucgugcacaccagcacccugagcggcagcgcccagcacguggaggagugcagcugcuaccccagauaccccggcgugagaugcgugugcagagacaacuggaagggcagcaacagacccaucguggacaucaacaucaaggacuacagcaucgugagcagcuacgugugcagcggccuggugggcgacacccccagaaagaacgacagcagcagcagcagccacugccuggaccccaacaacgaggagggcggccacggcgugaagggcugggccuucgacgacggcaacgacguguggaugggcagaaccaucagcgagaagagcagaagcggcuacgagaccuucaaggugaucgagggcuggagcaaccccaacagcaagcugcagaucaacagacaggugaucguggacagaggcaacagaagcggcuacagcggcaucuucagcguggagggcaagagcugcaucaacagaugcuucuacguggagcugaucagaggcagaaaggaggagaccgaggugcuguggaccagcaacagcaucgugguguucugcggcaccagcggcaccuacggcaccggcagcuggcccgacggcgccgacaucaaccugaugcccaucuga

SEQ ID NO: 176621 - RNA, 1410 nt, Artificial Sequence
  derived and/or modified CDS sequence (opt4) from neuraminidase__InfluenzaA__ACI32797
augaaccccaaccagaugaucaucaccaucggcagcgugagccugaccaucagcaccaucugcuucuucaugcagaucgccauccugaucaccaccgugacccugcacuucaagcaguacgaguucaacagcccccccaacaaccaggugaugcugugcgagcccaccaucaucgagagaaacaucaccgagaucguguaccugaccaacaccaccaucgagaaggagaucugccccaagcuggccgaguacagaaacuggagcaagccccagugcagcaucaccggcuucgcccccuucagcaaggacaacagcaucagacugagcgccggcggcgacaucugggugaccagagagcccuacgugagcugcgaccccgacaagugcuaccaguucgcccugggccagggcaccacccugaacaacgugcacagcaacgacaccgugcacgacagaacccccuacagaacccugcugaugaacgagcugggcgugcccuuccaccugggcaccaagcaggugugcaucgccuggagcagcagcagcugccacgacggcaaggccuggcugcacgugugcgugaccggcgacgacaagaacgccaccgccagcuucaucuacaacggcagacugguggacagcaucgugagcuggagcaaggagauccugagaacccaggagagcgagugcgugugcaucaacggcaccugcaccguggugaugaccgacggcagcgccagcggcaaggccgacaccaagauccuguucaucgaggagggcaagaucgugcacaccagcacccugagcggcagcgcccagcacguggaggagugcagcugcuaccccagauaccccggcgugagaugcgugugcagagacaacuggaagggcagcaacagacccaucguggacaucaacaucaaggacuacagcaucgugagcagcuacgugugcagcggccuggugggcgacacccccagaaagaacgacagcagcagcagcagccacugccuggaccccaacaacgaggagggcggccacggcgugaagggcugggccuucgacgacggcaacgacguguggaugggcagaaccaucagcgagaagagcagaagcggcuacgagaccuucaaggugaucgagggcuggagcaaccccaacagcaagcugcagaucaacagacaggugaucguggacagaggcaacagaagcggcuacagcggcaucuucagcguggagggcaagagcugcaucaacagaugcuucuacguggagcugaucagaggcagaaaggaggagaccgaggugcuguggaccagcaacagcaucgugguguucugcggcaccagcggcaccuacggcaccggcagcuggcccgacggcgccgacaucaaccugaugcccaucuga

SEQ ID NO: 176622 - RNA, 1410 nt, Artificial Sequence
  derived and/or modified CDS sequence (opt4) from neuraminidase__InfluenzaA__ACI32798
augaaccccaaccagaagaucaucaccaucggcagcgugagccugaccaucagcaccaucugcuucuucaugcagaucgccauccugaucaccaccgugacccugcacuucaagcaguacgaguucaacagcccccccaacaaccaggugaugcugugcgagcccaccaucaucgagagaaacaucaccgagaucguguaccugaccaacaccaccaucgagaaggagaucugccccaagcuggccgaguacagaaacuggagcaagccccagugcaacaucaccggcuucgcccccuucagcaaggacaacagcaucagacugagcgccggcggcgacaucugggugaccagagagcccuacgugagcugcgaccccgacaagugcuaccaguucgcccugggccagggcaccacccugaacaacgugcacagcaacgacaccgugcacgacagaacccccuacagaacccugcugaugaacgagcugggcgugcccuuccaccugggcaccaagcaggugugcaucgccuggagcagcagcagcugccacgacggcaaggccuggcugcacgugugcgugaccggcgacgacaagaacgccaccgccagcuucaucuacaacggcagacugguggacagcaucgugagcuggagcaacgagauccugagaacccaggagagcgagugcgugugcaucaacggcaccugcaccguggugaugaccgacggcagcgccagcggcaaggccgacaccaagauccuguucaucgaggagggcaagaucgugcacaccagcacccugagcggcagcgcccagcacguggaggagugcagcugcuaccccagauaccccggcgugagaugcgugugcagagacaacuggaagggcagcaacagacccaucguggacaucaacaucaaggacuacagcaucgugagcagcuacgugugcagcggccuggugggcgacacccccagaaagaacgacagcagcagcagcagccacugccuggaccccaacaacgaggagggcggccacggcgugaagggcugggccuucgacgacggcaacgacguguggaugggcagaaccaucagcgagaagcugagaagcggcuacgagaccuucaaggugaucgagggcuggagcaaccccaacagcaagcugcagaucaacagacaggugaucguggacagaggcaacagaagcggcuacagcggcaucuucagcguggagggcaagagcugcaucaacagaugcuucuacguggagcugaucagaggcagaaaggaggagaccgaggugcuguggaccagcaacagcaucgugguguucugcggcaccagcggcaccuacggcaccggcagcuggcccgacggcgccgacaucaaccugaugcccaucuga

SEQ ID NO: 176623 - RNA, 1410 nt, Artificial Sequence
  derived and/or modified CDS sequence (opt4) from neuraminidase__InfluenzaA__ACI32799
augaaccccaaccagagaaucaucaccaucggcagcgugagccugaccaucagcaccaucugcuucuucaugcagaucgccauccugaucaccaccgugacccugcacuucaagcaguacgaguucaacagcccccccaacaaccaggugaugcugugcgagcccaccaucaucgagagaaacaucaccgagaucguguaccugaccaacaccaccaucgagaaggagaucugccccaagcuggccgaguacagaaacuggagcaagccccagugcgacaucaccggcuucgcccccuucagcaaggacaacagcaucagacugagcgccggcggcgacaucugggugaccagagagcccuacgugagcugcgaccccgacaagugcuaccaguucgcccugggccagggcaccacccugaacaacgugcacagcaacgacaccgugcacgacagaacccccuacagaacccugcugaugaacgagcugggcgugcccuuccaccugggcaccaagcaggugugcaucgccuggagcagcagcagcugccacgacggcaaggccuggcugcacgugugcgugaccggcgacgacaagaacgccaccgccagcuucaucuacaacggcagacugguggacagcguggugagcuggagcaaggacauccugagaacccaggagagcgagugcgugugcaucaacggcaccugcaccguggugaugaccgacggcagcgccagcggcaaggccaacaccaagauccuguucaucgaggagggcaagaucgugcacaccagcacccugagcggcagcgcccagcacguggaggagugcagcugcuaccccagauaccccggcgugagaugcgugugcagagacaacuggaagggcagcaacagacccaucguggacaucaacaucaagaacuacagcaucgugagcagcuacgugugcagcggccuggugggcgacacccccagaaagaccgacagcagcagcagcagccacugccuggaccccaacaacgaggagggcggccacggcgugaagggcugggccuucgacgacggcaacgacguguggaugggcagaaccaucagcgagaagcugagacugggcuacgagaccuucaaggugaucgagggcuggagcaaccccaacagcaagcugcagaucaacagacaggugaucguggacagaggcaacagaagcggcuacagcggcaucuucagcguggagggcaagagcugcaucaacagaugcuucuacguggagcugaucagaggcagaaaggaggagaccgaggugcuguggaccagcaacagcaucgugguguucugcggcaccagcggcaccuacggcaccggcagcuggcccgacggcgccgacaucaaccugaugcccaucuga

SEQ ID NO: 176624 - RNA, 1410 nt, Artificial Sequence
  derived and/or modified CDS sequence (opt4) from neuraminidase__InfluenzaA__ACI32800
augaaccccaaccagaagaucaucaccaucggcagcgugagccugaccaucagcaccaucugcuucuucaugcagaucgccauccugaucaccaccgugacccugcacuucaagcaguacgaguucaacagcccccccaacaaccaggugaugcugugcgagcccaccaucaucgagagaaacaucaccgagaucguguaccugaccaacaccaccaucgagaaggagaucugccccaagcuggccgaguacagaaacuggagcaagccccagugcaacaucaccggcuucgcccccuucagcaaggacaacagcaucagacugagcgccggcggcgacaucugggugaccagagagcccuacgugagcugcgaccccgacaagugcuaccaguucgcccugggccagggcaccacccugaacaacgugcacagcaacgacaccgugcacgacagaacccccuacagaacccugcugaugaacgagcugggcgugcccuuccaccugggcaccaagcaggugugcaucgccuggagcagcagcagcugccacgacggcaaggccuggcugcacgugugcgugaccggcgacgacaagaacgccaccgccagcuucaucuacaacggcagacugguggacagcaucgugagcuggagcaaggagauccugagaacccaggagagcgagugcgugugcaucaacggcaccugcaccguggugaugaccgacggcagcgccagcggcaaggccgacaccaagauccuguucaucgaggagggcaagaucgugcacaccagcacccugagcggcagcgcccagcacguggaggagugcagcugcuaccccagauaccccggcgugagaugcgugugcagagacaacuggaagggcagcaacagacccaucguggacaucaacaucaaggacuacagcaucgugagcagcuacgugugcagcggccuggugggcgacacccccagaaagaacgacagcagcagcagcagccacugccuggaccccaacaacgaggagggcggccacggcgugaagggcugggccuucgacgacggcaacgacguguggaugggcagaaccaucagcgagaagcugagaagcggcuacgagaccuucaaggugaucgagggcuggagcaaccccaacagcaagcugcagaccaacagacaggugaucguggacagaggcaacagaagcggcuacagcggcaucuucagcguggagggcaagagcugcaucaacagaugcuucuacguggagcugaucagaggcagaaaggaggagaccgaggugcuguggaccagcaacagcaucgugguguucugcggcaccagcggcaccuacggcaccggcagcuggcccgacggcgccgacaucaaccugaugcccaucuga

SEQ ID NO: 176625 - RNA, 1410 nt, Artificial Sequence; identical to SEQ ID NO: 176624
  derived and/or modified CDS sequence (opt4) from neuraminidase__InfluenzaA__ACI32802

SEQ ID NO: 176626 - RNA, 1410 nt, Artificial Sequence; identical to SEQ ID NO: 176624
  derived and/or modified CDS sequence (opt4) from neuraminidase__InfluenzaA__ACI32803

SEQ ID NO: 176627 - RNA, 1410 nt, Artificial Sequence; identical to SEQ ID NO: 175767
  derived and/or modified CDS sequence (opt4) from neuraminidase__InfluenzaA__ACI32804

SEQ ID NO: 176628 - RNA, 1410 nt, Artificial Sequence
  derived and/or modified CDS sequence (opt4) from neuraminidase__InfluenzaA__ACI32805
augaaccccaaccagaagaucaucaccaucggcagcgugagccugaccaucagcaccaucugcuucuucaugcagaucgccauccugaucaccaccgugacccugcacuucaagcaguacgaguucaacagcccccccaacaaccaggugaugcugugcgagcccaccaucaucgagagaaacaucaccgagaucguguaccugaccaacaccaccaucgagaaggagaucugccccaagcuggccgaguacagaaacuggagcaagccccagugcaacaucaccggcuucgcccccuucagcaaggacaacagcaucagacugagcgccggcggcgacaucugggugaccagagagcccuacgugagcugcgaccccgacaagugcuaccaguucgcccugggccagggcaccacccugaacaacgugcacagcaacgacaccgugcacgacagaacccccuacagaacccugcugaugaacgagcugggcgugcccuuccaccugggcaccaagcaggugugcaucgccuggagcagcagcagcugccacgacggcaaggccuggcugcacgugugcgugaccggcgacgacaagaacgccaccgccagcuucaucuacaacggcagacugguggacagcaucgugagcuggagcaaggagauccugagaacccaggagagcgagugcgugugcaucaacggcaccugcaccguggugaugaccgacggcagcgccagcggcaaggccgugaccaagauccuguucaucgaggagggcaagaucgugcacaccagcacccugagcggcagcgcccagcacguggaggagugcagcugcuaccccagauaccccggcgugagaugcgugugcagagacaacuggaagggcagcaacagacccaucguggacaucaacaucaaggacuacagcaucgugagcagcuacgugugcagcggccuggugggcgacacccccagaaagaacgacagaagcagcagcagccacugccuggaccccaacaacgaggagggcggccacggcgugaagggcugggccuucgacgacggcaacgacguguggaugggcagaaccaucagcgagaagagcagaagcggcuacgagaccuucaaggugaucgagggcuggagcaaccccaacagcaagcugcagaccaacagacaggugaucguggacagaggcaacagaagcggcuacagcggcaucuucagcguggagggcaagagcugcaucaacagaugcuucuacguggagcugaucagaggcagaaaggaggagaccgaggugcuguggaccagcaacagcaucgugguguucugcggcaccagcggcaccuacggcaccggcagcuggcccgacggcgccgacaucaaccugaugcccaucuga

SEQ ID NO: 176629 - RNA, 1410 nt, Artificial Sequence; identical to SEQ ID NO: 174772
  derived and/or modified CDS sequence (opt4) from neuraminidase__InfluenzaA__ACI32806

SEQ ID NO: 176630 - RNA, 1410 nt, Artificial Sequence
  derived and/or modified CDS sequence (opt4) from neuraminidase__InfluenzaA__ACI32807
augaaccccaaccagaagaucaucaccaucggcagcgugagccugaccaucagcaccaucugcuucuucaugcagaucgccauccugaucaccaccgugacccugcacuucaagcaguacgaguucaacagcccccccaacaaccaggugaugcugugcgagcccaccaucaucgagagaaacaucaccgagaucguguaccugaccaacaccaccaucgagaaggaggugugccccaagcuggccgaguacagaaacuggagcaagccccagugcgacaucaccggcuucgcccccuucagcaaggacaacagcaucagacugagcgccggcggcgacaucugggugaccagagagcccuacgugagcugcgaccccgacaagugcuaccaguucgcccugggccagggcaccacccugaacaacgugcacagcaacgacaccgugagagacagaacccccuacagaacccugcugaugaacgagcugggcgugcccuuccaccugggcaccaagcaggugugcaucgccuggagcagcagcagcugccacgacggcaaggccuggcugcacgugugcaucaccggcgacgacaagaacgccaccgccagcuucaucuacaacggcagacugguggacagcaucgugagcuggagcaaggagauccugagaacccaggagagcgagugcgugugcaucaacggcaccugcaccguggugaugaccgacggcagcgccagcggcaaggccgacaccaagauccuguucaucgaggagggcaagaucgugcacaccagcacccugagcggcagcgcccagcacguggaggagugcagcugcuaccccagauaccccggcgugagaugcgugugcagagacaacuggaagggcagcaacagacccaucguggacaucaacaucaaggaccacagcaucgugagcagcuacgugugcagcggccuggugggcgacacccccagaaagaacgacagcagcagcagcagccacugccuggaccccaacaacgaggagggcggccacggcgugaagggcugggccuucgacgacggcaacgacguguggaugggcagaaccaucagcgagaagagcagacugggcuacgagaccuucaaggugaucgagggcuggagcaaccccaacagcaagcugcagaucaacagacaggugaucguggacagaggcaacagaagcggcuacagcggcaucuucagcguggagggcaagagcugcaucaacagaugcuucuacguggagcugaucagaggcagaaaggaggagaccgaggugcuguggaccagcaacagcaucgugguguucugcggcaccagcggcaccuacggcaccggcagcuggcccgacggcgccgacaucaaccugaugcccaucuga

SEQ ID NO: 176631 - RNA, 1410 nt, Artificial Sequence
  derived and/or modified CDS sequence (opt4) from neuraminidase__InfluenzaA__ACI32808
augaaccccaaccagaagaucaucaccaucggcagcgugagccugaccaucagcaccaucugcuucuucaugcagaucgccauccugaucaccaccgugacccugcacuucaagcaguacgaguucaacagcccccccaacaaccaggugaugcugugcgagcccaccaucaucgagagaaacaucaccgagaucguguaccugaccaacaccaccaucgagaaggagaucugccccaagcuggccgaguacagaaacuggagcaagccccagugcgacaucaccggcuucgcccccuucagcaaggacaacagcaucagacugagcgccggcggcgacaucugggugaccagagagcccuacgugagcugcgaccccgacaagugcuaccaguucgcccugggccagggcaccacccugaacaacgugcacagcaacgacaccgugcacgacagaacccccuacagaacccugcugaugaacgagcugggcgugcccuuccaccugggcaccaagcaggugugcaucgccuggagcagcagcagcugccacgacggcaaggccuggcugcacgugugcgugaccggcgacgacaagaacgccaccgccagcuucaucuacaacggcagacugguggacagcguggugagcuggagcaaggacauccugagaacccaggagagcgagugcgugugcaucaacggcaccugcaccguggugaugaccgacggcagcgccagcggcaaggccgacaccaagauccuguucaucgaggagggcaagaucgugcacaccagcacccugagcggcagcgcccagcacguggaggagugcagcugcuaccccagauaccccggcgugagaugcgugugcagagacaacuggaagggcagcaacagacccaucguggacaucaacaucaagaacuacagcaucgugagcagcuacgugugcagcggccuggugggcgacacccccagaaagaccgacagcagcagcagcagccacugccuggaccccaacaacgaggagggcggccacggcgugaagggcugggccuucgacgacggcaacgacguguggaugggcagaaccaucagcgagaagcugagacugggcuacgagaccuucaaggugaucgagggcuggagcaaccccaacagcaagcugcagaucaacagacaggugaucguggacagaggcaacagaagcggcuacagcggcaucuucagcguggagggcaagagcugcaucaacagaugcuucuacguggagcugaucagaggcagaaaggagaagaccgaggugcuguggaccagcaacagcaucgugguguucugcggcaccagcggcaccuacggcaccggcagcuggcccgacggcgccgacaucaaccugaugcccaucuga

SEQ ID NO: 176632 - RNA, 1410 nt, Artificial Sequence; identical to SEQ ID NO: 175767
  derived and/or modified CDS sequence (opt4) from neuraminidase__InfluenzaA__ACI32809

SEQ ID NO: 176633 - RNA, 1410 nt, Artificial Sequence
  derived and/or modified CDS sequence (opt4) from neuraminidase__InfluenzaA__ACI32810
augaaccccaaccagaagaucaucaccaucggcagcgugagccugaccaucagcaccaucugcuucuucaugcagaucgccauccugaucaccaccgugacccugcacuucaagcaguacgaguucaacagcccccccaacaaccaggugaugcugugcgagcccaccaucaucgagagaaacaucaccgagaucguguaccugaccaacaccaccaucgagaaggagaucugccccaagcuggccgaguacagaaacuggagcaagccccagugcgacaucaccggcuucgcccccuucagcaaggacaacagcaucagacugagcgccggcggcgacaucugggugaccagagagcccuacgugagcugcgaccccgacaagugcuaccaguucgcccugggccagggcaccacccugaacaacgugcacagcaacgacaccgugcacgacagaaccccccacagaacccugcugaugaacgagcugggcgugcccuuccaccugggcaccaagcaggugugcaucgccuggagcagcagcagcugccacgacggcaaggccuggcugcacgugugcgugaccggcgacgacaagaacgccaccgccagcuucaucuacaacggcagacugguggacagcguggugagcuggagcaaggacauccugagaacccaggagagcgagugcgugugcaucaacggcaccugcaccguggugaugaccgacggcagcgccagcggcaaggccgacaccaagauccuguucaucgaggagggcaagaucgugcacaccagcacccugagcggcagcgcccagcacguggaggagugcagcugcuaccccagauaccccggcgugagaugcgugugcagagacaacuggaagggcagcaacagacccaucguggacaucaacaucaagaacuacagcaucgugagcagcuacgugugcagcggccuggugggcgacacccccagaaagaccgacagcagcagcagcagccacugccuggaccccaacaacgaggagggcggccacggcgugaagggcugggccuucgacgacggcaacgacguguggaugggcagaaccaucagcgagaagcugagacugggcuacgagaccuucaaggugaucgagggcuggagcaaccccaacagcaagcugcagaucaacagacaggugaucguggacagaggcaacagaagcggcuacagcggcaucuucagcguggagggcaagagcugcaucaacagaugcuucuacguggagcugaucagaggcagaaaggaggagaccgaggugcuguggaccagcaacagcaucgugguguucugcggcaccagcggcaccuacggcaccggcagcuggcccgacggcgccgacaucaaccugaugcccaucuga

SEQ ID NO: 176634 - RNA, 1410 nt, Artificial Sequence
  derived and/or modified CDS sequence (opt4) from neuraminidase__InfluenzaA__ACI32811
augaaccccaaccagaagaucaucaccaucggcagcgugagccugaccaucagcaccaucugcuucuucaugcagaucgccauccugaucaccaccgugacccugcacuucaagcaguacgaguucaacagcccccccaacaaccaggugaugcugugcgagcccaccaucaucgagagaaacaucaccgagaucguguaccugaccaacaccaccaucgagaaggagaucugccccaagcuggccgaguacagaaacuggagcaagccccagugcaacaucaccggcuucgcccccuucagcaaggacaacagcaucagacugagcgccggcggcgacaucugggugaccagagagcccuacgugagcugcgaccccgacaagugcuaccaguucgcccugggccagggcaccacccugaacaacgugcacagcaacgacaccgugcacgacagaacccccuacagaacccugcugaugaacgagcugggcgugcccuuccaccugggcaccaagcaggugugcaucgccuggagcagcagcagcugccacgacggcaaggccuggcugcacgugugcgugaccggcgacgacaagaacgccaccgccagcuucaucuacaacggcagacugguggacagcaucgugagcuggagcaaggagauccugagaacccaggagagcgagugcgugugcaucaacggcaccugcaccguggugaugaccgacggcagcgccagcggcaaggccgacaccaagauccuguucaucgaggagggcaagaucgugcacaccagcacccugagcggcagcgcccagcacguggaggagugcagcugcuaccccagauaccccggcgugagaugcgugugcagagacaacuggaagggcagcaacagacccaucguggacaucaacaucaaggacuacagcaucgugagcagcuacgugugcagcggccuggugggcgacacccccagaaagaacgacagcagcagcagcagccacugccuggaccccaacaacgaggagggcggccacggcgugaagggcugggccuucgacgacggcaacgacguguggaugggcagaaccaucagcgagaagcugagaagcggcuacgagaccuucaaggugaucgagggcuggagcaaccccaagagcaagcugcagaucaacagacaggugaucguggacagaggcaacagaagcggcuacagcggcaucuucagcguggagggcaagagcugcaucaacagaugcuucuacguggagcugaucagaggcagaaaggaggagaccgaggugcuguggaccagcaacagcaucgugguguucugcggcaccagcggcaccuacggcaccggcagcuggcccgacggcgccgacaucaaccugaugcccaucuga

SEQ ID NO: 176635 - RNA, 1410 nt, Artificial Sequence
  derived and/or modified CDS sequence (opt4) from neuraminidase__InfluenzaA__ACI32812
augaaccccaaccagaagaucaucaccaucggcagcgugagccugaccaucagcaccaucugcuucuucaugcagaucgccauccugaucaccaccgugacccugcacuucaagcaguacgaguucaacagcccccccaacaaccaggugaugcugugcgagcccaccaucaucgagagaaacaucaccgagaucguguaccugaccaacaccaccaucgagaaggagaucugccccaagcuggccgaguacagaaacuggagcaagccccagugcgacaucaccggcuucgcccccuucagcaaggacaacagcaucagacugagcgccggcggcgacaucugggugaccagagagcccuacgugagcugcgaccccgacaagugcuaccaguucgcccugggccagggcaccacccugaacaacgugcacagcaacgacaccgugcacgacagaacccccuacagaacccugcugaugaacgagcugggcgugcccuuccaccugggcaccaagcaggugugcaucgccuggagcagcagcagcugccacgacggcaaggccuggcugcacgugugcgugaccggcgacgacaagaacgccaccgccagcuucaucuacaacggcagacugguggacagcguggugagcuggagcaaggacauccugagaacccaggagagcgagugcgugugcaucaacggcaccugcaccguggugaugaccgacggcagcgccagcggcaaggccaacaccaagauccuguucaucgaggagggcaagaucgugcacaccagcacccugagcggcagcgcccagcacguggaggagugcagcugcuaccccagauaccccggcgugagaugcgugugcagagacaacuggaagggcagcaacagacccaucguggacaucaacaucaagaacuacagcaucgugagcagcuacgugugcagcggccuggugggcgacacccccagaaagaccgacagcagcagcagcagccacugccuggaccccaacaacgaggagggcggccacggcgugaagggcugggccuucgacgacggcaacgacguguggaugggcagaaccaucagcgagaagcugagacugggcuacgagaccuucaaggugaucgagggcuggagcaaccccaacagcaagcugcagaucaacagacaggugaucguggacagaggcaacagaagcggcuacagcggcaucuucagcguggagggcaagagcugcaucaacagaugcuucuacguggagcugaucagaggcagaaaggaggagaccgaggugcuguggaccagcaacagcaucgugguguucugcggcaccagcggcaccuacggcaccggcagcuggcccgacggcgccgacaucaaccugaugcccaucuga

SEQ ID NO: 176636 - RNA, 1410 nt, Artificial Sequence; identical to SEQ ID NO: 174859
  derived and/or modified CDS sequence (opt4) from neuraminidase__InfluenzaA__ACI32814

SEQ ID NO: 176637 - RNA, 1350 nt, Artificial Sequence
  derived and/or modified CDS sequence (opt4) from neuraminidase__InfluenzaA__ACJ53848
augaaccccaaccagaagaucaucaccaucggcagcaucugcauggugaucggcaucgugagccugaugcugcagaucggcaacaugaucagcaucugggugagccacagcauccagaccggcaaccagugccaggccgagcccaucagcaacaccaaguuccugaccgagaaggccguggccagcgugacccuggccggcaacagcagccugugccccaucagcggcugggccguguacagcaaggacaacagcaucagaaucggcagcagaggcgacguguucgugaucagagagcccuucaucagcugcagccaccuggagugcagaaccuucuuccugacccagggcgcccugcugaacgacaagcacagcaacggcaccgugaaggacagaagcccccacagaacccugaugagcugccccgugggcgaggcccccagccccuacaacagcagauucgagagcguggccuggagcgccagcgccugccacgacggcaccagcuggcugaccaucggcaucagcggccccgacaacggcgccguggccgugcugaaguacaacggcaucaucaccgacaccaucaagagcuggagaaacaacauccugagaacccaggagagcgagugcgccugcgugaacggcagcugcuucaccgugaugaccgacggccccagcagcggccaggccagcuacaagaucuucaagauggagaagggcaagguggugaagagcguggagcuggacgcccccaacuaccacuacgaggagugcagcugcuaccccgacgccggcgagaucaccugcgugugcagagacaacuggcacggcagcaacagacccugggugagcuucaaccagaaccuggaguaccagaucggcuacaucugcagcggcguguucggcgacaaccccagacccaacgacggcaccggcagcugcggccccgugagccccaacggcgccuacggcgugaagggcuucagcuucaaguacggcaacggcguguggaucggcagaaccaagagcaccaacagcagaagcggcuucgagaugaucugggaccccaacggcuggaccggcaccgacagcagcuucagcgugaagcaggacaucguggccaucaccgacuggagcggcuacagcggcagcuucgugcagcaccccgagcugaccggccuggacugcaucagacccugcuucuggguggagcugaucagaggcagacccaaggagagcaccaucuggaccagcggcagcagcaucagcuucugcggcgugaacagcgacaccgugagcuggagcuggcccgacggcgccgagcugcccuucaccaucgacaaguga

SEQ ID NO: 176638 - RNA, 1350 nt, Artificial Sequence
  derived and/or modified CDS sequence (opt4) from neuraminidase__InfluenzaA__ACJ53849
augaaccccaaccagaagaucaucaccaucggcagcaucugcauggugaucggcaucgugagccugaugcugcagaucggcaacaugaucagcaucugggugagccacagcauccagaccggcaaccagugccaggccgagcccaucagcaacaccaaguuccugaccgagaaggccguggccagcgugacccuggccggcaacagcagccugugccccaucagcggcugggccguguacagcaaggacaacagcaucagaaucggcagcagaggcgacguguucgugaucagagagcccuucaucagcugcagccaccuggagugcagaaccuucuuccugacccagggcgcccugcugaacgacaagcacagcaacggcaccgugaaggacagaagcccccacagaacccugaugagcugccccgugggcgaggcccccagccccuacaacagcagauucgagagcguggccuggagcgccagcgccugccacgacggcaccagcuggcugaccaucggcaucagcggccccgacaacggcgccguggccgugcugaaguacaacggcaucaucaccgacaccaucaagagcuggagaaacaacauccugagaacccaggagagcgagugcgccugcgugaacggcagcugcuucaccgugaugaccgacggccccagcagcggccaggccagcuacaagaucuucaagauggagaagggcaagguggugaagagcguggagcuggacgcccccaacuaccacuacgaggagugcagcugcuaccccgacgccggcgagaucaccugcgugugcagagacaacuggcacggcagcaacagacccugggugagcuucaaccagaaccuggaguaccagaucggcuacaucugcagcggcguguucggcgacaaccccagacccaacgacggcaccggcagcugcagccccgugagccccaacggcgccuacggcgugaagggcuucagcuucaaguacggcaacggcguguggaucggcagaaccaagagcaccaacagcagaagcggcuucgagaugaucugggaccccaacggcuggaccggcaccgacagcagcuucagcgugaagcaggacaucguggccaucaccgacuggagcggcuacagcggcagcuucgugcagcaccccgagcugaccggccuggacugcaucagacccugcuucuggguggagcugaucagaggcagacccaaggagagcaccaucuggaccagcggcagcagcaucagcuucugcggcgugaacagcgacaccgugagcuggagcuggcccgacggcgccgagcugcccuucaccaucgacaaguga

SEQ ID NO: 176639 - RNA, 1350 nt, Artificial Sequence
  derived and/or modified CDS sequence (opt4) from neuraminidase__InfluenzaA__ACJ53853
augaaccccaaccagaagaucaucaccaucggcagcaucugcauggugaucggcaucgugagccugaugcugcagaucggcaacaugaucagcaucugggugagccacagcauccagaccggcaaccagugccaggacgagcccaucagcaacaccaaguuccugaccgagaaggccguggccagcgugacccuggccggcaacagcagccugugccccaucagcggcugggccguguacagcaaggacaacagcaucagaaucggcagcagaggcgacguguucgugaucagagagcccuucaucagcugcagccaccuggagugcagaaccuucuuccugacccagggcgcccugcugaacgacaagcacagcaacggcaccgugaaggacagaagcccccacagaacccugaugagcugccccgugggcgaggcccccagccccuacaacagcagauucgagagcguggccuggagcgccagcgccugccacgacggcaccagcuggcugaccaucggcaucagcggccccgacaacggcgccguggccgugcugaaguacaacggcaucaucaccgacaccaucaagagcuggagaaacaacauccugagaacccaggagagcgagugcgccugcgugaacggcagcugcuucaccgugaugaccgacggccccagcagcggccaggccagcuacaagaucuucaagauggagaagggcaagguggugaagagcguggagcuggacgcccccaacuaccacuacgaggagugcagcugcuaccccgacgccggcgagaucaccugcgugugcagagacaacuggcacggcagcaacagacccugggugagcuucaaccagaaccuggaguaccagaucggcuacaucugcagcggcguguucggcgacaaccccagacccaacgacggcaccggcagcugcggccccguguuccccaacggcgccuacggcgugaagggcuucagcuucaaguacggcaacggcguguggaucggcagaaccaagagcaccaacagcagaagcggcuucgagaugaucugggaccccaacggcuggaccggcaccgacagcagcuucagcgugaagcaggacaucguggccaucaccgacuggagcggcuacagcggcagcuucgugcagcaccccgagcugaccggccuggacugcaucagacccugcuucuggguggagcugaucagaggcagacccaaggagagcaccaucuggaccagcggcagcagcaucagcuucugcggcgugaacagcgacaccgugagcuggagcuggcccgacggcgccgagcugcccuucaccaucgacaaguga

SEQ ID NO: 176640 - RNA, 1350 nt, Artificial Sequence; identical to SEQ ID NO: 176639
  derived and/or modified CDS sequence (opt4) from neuraminidase__InfluenzaA__ACJ53866

SEQ ID NO: 176641 - RNA, 1350 nt, Artificial Sequence
  derived and/or modified CDS sequence (opt4) from neuraminidase__InfluenzaA__ACJ53867
augaaccccaaccagaagaucaucaccaucggcagcaucugcauggccaucggcaucgugagccugaugcugcagaucggcaacaugaucagccugugggugagccacagcauccagaccggcaaccagugccaggccgagcccaucagcaacaccaaguuccugaccgagaaggccguggccagcgugacccuggccggcaacagcagccugugccccaucagcggcugggccguguacagcaaggacaacagcaucagaaucggcagcagaggcgacguguucgugaucagagagcccuucaucagcugcagccaccuggagugcagaaccuucuuccugacccagggcgcccugcugaacgacaagcacagcaacggcaccgugaaggacagaagcccccacagaacccugaugagcugccccgugggcgaggcccccagccccuacaacagcagauucgagagcguggccuggagcgccagcgccugccacgacggcaccagcuggcugaccaucggcaucagcggccccgacaacggcgccguggccgugcugaaguacaacggcaucaucaccgacaccaucaagagcuggagaaacaacauccugagaacccaggagagcgagugcgccugcgugaacggcagcugcuucaccgugaugaccgacggccccagcagcggccaggccagcuacaagaucuucaagauggagaagggcaagguggugaagagcguggagcuggacgcccccaacuaccacuacgaggagugcagcugcuaccccgacgccggcgagaucaccugcgugugcagagacaacuggcacggcagcaacagacccugggugagcuucaaccagaaccuggaguaccagaucggcuacaucugcagcggcguguucggcgacaaccccagacccaacgacggcaccggcagcugcggccccgugagccccaacggcgccuacggcgugaagggcuucagcuucaaguacggcaacggcguguggaucggcagaaccaagagcaccaacagcagaagcggcuucgagaugaucugggaccccaacggcuggaccggcaccgacagcagcuucagcgugaagcaggacaucguggccaucaccgacuggagcggcuacagcggcagcuucgugcagcaccccgagcugaccggccuggacugcaucagacccugcuucuggguggagcugaucagaggcagacccaaggagagcaccaucuggaccagcggcagcagcaucagcuucugcggcgugaacagcgacaccgugagcuggagcuggcccgacggcgccgagcugcccuucaccaucgacaaguga

SEQ ID NO: 176642 - RNA, 1350 nt, Artificial Sequence
  derived and/or modified CDS sequence (opt4) from neuraminidase__InfluenzaA__ACJ53875
augaaccccaaccagaagaucaucaccaucggcagcaucugcauggugaucggcaucgugagccugaugcugcagaucggcaacaugaucagcaucugggugagccacagcauccagaccggcaaccagugccaggccgagcccaucagcaacaccaaguuccugaccgagaaggccguggccagcgugacccuggccggcaacagcagccugugccccaucagcggcugggccguguacagcaaggacaacagcaucagaaucggcagcagaggcgacguguucgugaucagagagcccuucaucagcugcagccaccuggagugcagaaccuucuuccugacccagggcgcccugcugaacgacaagcacagcaacggcaccgugaaggacagaagcccccacagaacccugaugagcugccccgugggcgaggcccccagccccuacaacagcagauucgagagcguggccuggagcgccagcgccugccacgacggcaucagcuggcugaccaucggcaucagcggccccgacaacggcgccguggccgugcugaaguacaacggcaucaucaccgacaccaucaagagcuggagaaacaacauccugagaacccaggagagcgagugcgccugcgugaacggcagcugcuucaccgugaugaccgacggccccagcagcggccaggccagcuacaagaucuucaagauggagaagggcaagguggugaagagcguggagcuggaggcccccaacuaccacuacgaggagugcagcugcuaccccgacgccggcgagaucaccugcgugugcagagacaacuggcacggcagcaacagacccugggugagcuucaaccagaaccuggaguaccagaucggcuacaucugcagcggcguguucggcgacaaccccagacccaacgacggcaccggcagcugcggccccgugagccccaacggcgccuacggcgugaagggcuucagcuucaaguacggcaacggcguguggaucggcagaaccaagagcaccaacagcagaagcggcuucgagaugaucugggaccccaacggcuggaccggcaccgacagcagcuucagcgugaagcaggacaucguggccaucaccgacuggagcggcuacagcggcagcuucgugcagcaccccgagcugaccggccuggacugcaucagacccugcuucuggguggagcugaucagaggcagacccaaggagagcaccaucuggaccagcggcagcagcaucagcuucugcggcgugaacagcgacaccgugagcuggagcuggcccgacggcgccgagcugcccuucaccaucgacaaguga

SEQ ID NO: 176643 - RNA, 1350 nt, Artificial Sequence
  derived and/or modified CDS sequence (opt4) from neuraminidase__InfluenzaA__ACJ53876
augaaccccaaccagaagaucaucaccaucggcagcaucugcauggugaucggcaucgugagccugaugcugcagaucggcaacaucaucagcaucugggugagccacagcauccagaccggcaaccagugccaggccgagcccaucagcaacaccaaguuccugaccgagaaggccguggccagcgugacccuggccggcaacagcagccugugccccaucagcggcugggccguguacagcaaggacaacagcaucagaaucggcagcagaggcgacguguucgugaucagagagcccuucaucagcugcagccaccuggagugcagaaccuucuuccugacccagggcgcccugcugaacgacaagcacagcaacggcaccgugaaggacagaagcccccacagaacccugaugagcugccccgugggcgaggcccccagccccuacaacagcagauucgagagcguggccuggagcgccagcgccugccacgacggcaccagcuggcugaccaucggcaucagcggccccgacaacggcgccguggccgugcugaaguacaacggcaucaucaccgacaccaucaagagcuggagaaacaacauccugagaacccaggagagcgagugcgccugcgugaacggcagcugcuucaccgugaugaccgacggccccagcagcggccaggccagcuacaagaucuucaagauggagaagggcaagguggugaagagcguggagcuggacgcccccaacuaccacuacgaggagugcagcugcuaccccgacgccggcgagaucaccugcgugugcagagacaacuggcacggcagcaacagacccugggugagcuucaaccagaaccuggaguaccagaucggcuacaucugcagcggcguguucggcgacaaccccagacccaacgacggcaccggcagcugcggccccgugagccccaacggcgccuacggcgugaagggcuucagcuucaaguacggcaacggcguguggaucggcagaaccaagagcaccaacagcagaagcggcuucgagaugaucugggaccccaacggcuggaccggcaccgacagcagcuucagcgugaagcaggacaucguggccaucaccgacuggagcggcuacagcggcagcuucgugcagcaccccgagcugaccggccuggacugcaucagacccugcuucuggguggagcugaucagaggcagacccaaggagagcaccaucuggaccagcggcagcagcaucagcuucugcggcgugaacagcgacaccgugggcuggagcuggcccgacggcgccgagcugcccuucaccaucgacaaguga

SEQ ID NO: 176644 - RNA, 1404 nt, Artificial Sequence
  derived and/or modified CDS sequence (opt4) from neuraminidase__InfluenzaA__ACJ67535
augaaccccaaccagaagaucaucgcccugggcagcgugagcaucaccaucgccaccaucugccugaucaugcagaucgccgugcuggccaccaccaugacccugcacuucaacgagugcaccaaccccagcaacaaccaggccaugcccugcgagcccaucaucaucgagagaaacaugaccgagaucgugcaccugaacaacaccaccaucgagaaggagagcugccccaagguggccgaguacaagaacuggagcaagccccagugccagaucaccggcuucgcccccuucagcaaggacaacagcaucagacugagcgccggcggcgacaucugggugaccagagagcccuacgugagcugcggccugggcaacugcuaccaguucgcccugggccagggcaccacccugaacaacaagcacagcaacgacaccauccacgacagaagcccccacagaacccugcugaugaacgagcugggcgugcccuuccaccugggcaccaagcaggugugcaucgccuggagcagcagcagcugccacgacggcaaggccuggcugcacgugugcgugaccggcgacgacagaaacgccaccgccagcaucaucuacgacggcaugcugaccgacagcaucggcagcuggagcaagaacauccugagaacccaggagagcgagugcgugugcaucaacggcaccugcaccguggugaugaccgacggcagcgccagcggcagagccgacaccaagauccuguucaucagagagggcaagaucgugcacaucagcccccugagcggcagcgcccagcacguggaggagugcagcugcuaccccagauaccccgaggugagaugcgugugcagagacaacuggaagggcagcaacagacccgugcuguacaucaacguggccgacuacagcguggacagcagcuacgugugcagcggccuggugggcgacacccccagaaacgacgacagcagcagcagcagcaacugcagagaccccaacaacgagagaggcggccccggcgugaagggcugggccuucgacaacggcaacgacguguggaugggcagaaccaucaagaaggacagcagaagcggcuacgagaccuucagaguggugggcggcuggaccaccgccaacagcaagagccagaucaacagacaggugaucguggacagcgacaacuggagcggcuacagcggcaucuucagcguggagggcaagaccugcaucaacagaugcuucuacguggagcugaucagaggcagaccccaggagaccagagugugguggaccagcaacagcaucaucguguucugcggcaccagcggcaccuacggcaccggcagcuggcccgacggcgccaacaucaacuucaugagcaucuga

SEQ ID NO: 176645 - RNA, 1410 nt, Artificial Sequence
  derived and/or modified CDS sequence (opt4) from neuraminidase__InfluenzaA__ACK99424
augaaccccaaccagaagaucaucaccaucggcagcgugagccugaccaucgccaccaucugcuuccugaugcagaucgccauccuggugaccaccgugacccugcacuucaagcaguacgagugcagcagcccccccaacaaccaggugauccccugccagcccaccaucaucgagagaaacaucaccgagaucguguaccugaccaacaccaccaucgagaaggagaucugccccaagcugguggaguacagaaacuggagcaagccccagugcaagaucaccggcuucgcccccuucagcaaggacaacagcaucagacugagcgccggcggcgacaucugggugaccagagagcccuacgugagcugcgaccccagcaagugcuaccaguucgcccugggccagggcaccacccugaacaacagacacagcaacgacaccgugcacgacagaacccccuacagaacccugcugaugaacgagcugggcgugcccuuccaccugggcaccaagcaggugugcaucgccuggagcagcagcagcugccacgacggcaaggccuggcugcacgugugcgugaccggccacgacgagaacgccaccgccagcuucaucuacgacggcagacugguggacagcaucggcagcuggagcaagaacauccugagaacccaggagagcgagugcgugugcaucaacggcaccugcaccguggugaugaccgacggcagcgccagcgagagagccgacaccaagauccuguucaucgaggagggcaagguggugcacaucagcccccugagcggcagcgcccagcacguggaggagugcagcugcuaccccagauaccccggcgugagaugcgugugcagagacaacuggaagggcagcaacagacccaucguggacaucaacgugaaggacuacagcaucgugagcagcuacgugugcagcggccuggugggcgacacccccagaaagaacgacagcagcagcagcagcuacugcagaaaccccaacaacgagaagggcagccacggcgugaagggcugggccuucgacgacggcaacgacguguggaugggcagaaccaucagcgaggagcugagaagcggcuacgagaccuucaaggugaucggcggcuggagcacccccaacagcaagcugcagaucaacagacaggugaucguggacagcggcaacagaagcggcuacagcggcaucuucagcguggagggcaagagcugcaucaacagaugcuucuacguggagcugaucagaggcagaaagcaggagaccaaggugugguggaccagcaacagcaucgugguguucugcggcaccagcggcaccuacggcaccggcagcuggcccgacggcgccgacaucaaccugaugcccaucuga

SEQ ID NO: 176646 - RNA, 1410 nt, Artificial Sequence; identical to SEQ ID NO: 176465
  derived and/or modified CDS sequence (opt4) from neuraminidase__InfluenzaA__ACK99435

SEQ ID NO: 176647 - RNA, 1413 nt, Artificial Sequence
  derived and/or modified CDS sequence (opt4) from neuraminidase__InfluenzaA__ACK99446
augaaccccaaccagaagaucaucaccaucggcagcaucagcauggccaucggcaucaucagccugacccugcagaucggcaacaucaucagcaucugggugagccacagcauccagaccggcagccagaaccacaccggcaucugcaaccagagaaucaucaccuacgagaacagcaccugggugaaccagaccuacgugaacaucaacaacaccaacgugguggccggcaaggacaagaccagcgugacccuggccggcaacagcagccugugccccaucagaggcugggccaucuacaccaaggacaacagcaucagaaucggcagcaagggcgacguguucgugaucagagagcccuucaucagcugcagccaccuggagugcagaaccuucuuccugacccagggcgcccugcugaacgacaagcacagcaacggcaccgugaaggacagaagcccccacagagcccugaugagcugcccccugggcgaggcccccagccccuacaacagcagauucgagagcguggccuggagcgccagcgccugccacgacggcaugggcuggcugaccaucggcaucagcggccccgacgacggcgccguggccgugcugaaguacaacggcaucaucaccgagaccaucaagagcuggaagaagagaauccugagaacccaggagagcgagugcgugugcgugaacggcagcugcuucaccaucaugaccgacggccccagcaacggcgccgccagcuacagaaucuucaagaucgagaagggcaaggugaccaagagcaucgagcuggacgcccccaacagccacuacgaggagugcagcugcuaccccgacaccggcaccgugaugugcgugugcagagacaacuggcacggcagcaacagacccugggugagcuucaaccagaaccuggacuaccagaucggcuacaucugcagcggcguguucggcgacaaccccagacccaaggacggcaagggcagcugcaaccccgugaccguggacggcgccgacggcgugaagggcuucagcuacagauacggcaacggcguguggaucggcagaaccaagagcaacagauucagaaagggcuucgagaugaucugggaccccaacggcuggaccgacaccgacagcgacuucagcgugaagcaggacgugguggccaugaccgacuggagcggcuacagcggcagcuucgugcagcaccccgagcugaccggccuggacugcaugagacccugcuucuggguggagcuggugagaggcagacccagagagaacaccaccaucuggaccagcggcagcagcaucagcuucugcggcgugaacagcgacaccgccaacuggagcuggcccgacggcgccgagcugcccuucaccaucgacaaguga

SEQ ID NO: 176648 - RNA, 1410 nt, Artificial Sequence
  derived and/or modified CDS sequence (opt4) from neuraminidase__InfluenzaA__ACK99457
augaaccccaaccagaagaucaucaccaucggcagcgugagccugaccaucgccaccaucugcuuccugaugcagaucgccauccuggugaccaccgugacccugcacuucaagcagcacgagugcaacagcccccccaacaaccaggugaugcccugcgagcccaccaucaucgagagaaacaucaccgagaucguguaccugaccaacaccaccaucgagaaggagaucugccccaagcugguggaguacagaaacuggagcaagccccagugcaagaucaccggcuucgcccccuucagcaaggacaacagcaucagacugagcgccggcggcgacaucugggugaccagagagcccuacgugagcugcgaccccggcaagugcuaccaguucgcccugggccagggcaccacccugaacaacagacacagcaacgacaccgugcacgacagaacccccuacagaacccugcugaugaacgagcugggcgugcccuuccaccugggcaccaagcaggugugcaucgccuggagcagcagcagcugccacgacggcaaggccuggcugcacgugugcgugaccggccacgacgagaacgccaccgccagcuucaucuacgacggcagacugguggacagcaucgugagcuggagcaagaacauccugagaacccaggagagcgagugcgugugcaucaacggcaccugcaccguggugaugaccgacggcagcgccagcgagagagccgacaccaagauccuguucaucgaggagggcaagaucgugcacaucagcccccugagcggcagcgcccagcacguggaggagugcagcugcuaccccagauaccccggcgugagaugcgugugcagagacaacuggaagggcagcaacagacccaucguggacaucaacgugaaggacuacagcaucgugagcagcuacgugugcagcggccuggugggcgacacccccagaaagaacgacagcagcagcagcagcuacugcagaaaccccaacaacgagaagggcagccacggcgugaagggcugggccuucgacgacggcaacgacguguggaugggcagaaccaucggcgaggagcugagaagcggcuacgagaccuucaaggugaucggcggcuggagcacccccaacagcaagcugcagaccaacagacaggugaucguggacagaggcaacagaagcggcuacagcggcaucuucagcguggagggcaagagcugcaucaacagaugcuucuacguggagcugaucagaggcagaaagcaggagaccaaggugugguggaccagcaacagcaucgugguguucugcggcaccagcggcaccuacggcaccggcagcuggcccgacggcgccgacaucaaccugaugcccaucuga

SEQ ID NO: 176649 - RNA, 1413 nt, Artificial Sequence
  derived and/or modified CDS sequence (opt4) from neuraminidase__InfluenzaA__ACK99468
augaaccccaaccagaagaucaucaccaucggcagcaucagcaucgccaucggcaucaucagccugauccugcagaucggcaacaucaucagcaucugggccagccacagcauccagaccggcagccagaaccacaccggcaucugcaaccagagaaucaucaccuacgagaacagcaccugggugaaccagaccuacgugaacaucaacaacaccaacgugguggccggcaaggacaagaccagcaugacccuggccggcaacagcagccugugccccaucagaggcugggccaucuacaccaaggacaacagcaucagaaucggcagcaagggcgacguguucgugaucagagagcccuucaucagcugcagccaccuggagugcagaaccuucuuccugacccagggcgcccugcugaacgacaagcacagcaacggcaccgugaaggacagaagccccuacagagcccugaugagcugcccccugggcgaggcccccagccccuacaacagcagauucgagagcguggccuggagcgccagcgccugccacgacggccugggcuggcugaccaucggcaucagcggccccgacaacggcgccguggccgugcugaaguacaacggcaucaucaccgagaccaucaagagcuggaagaagagaauccugagaacccaggagagcgagugcgugugcaugaacagcagcugcuucaccaucaugaccgacggccccagcaacggcgccgccagcuacagaaucuucaagaucgagaagggcagagugaccaagagcaucgagcuggacgcccccaacuaccacuacgaggagugcagcugcuaccccgacaccggcaccgugaugugcgugugcagagacaacuggcacggcagcaacagacccugggugagcuucaaccagaaccuggacuaccagaucggcuacaucugcagcggcguguucggcgacaaccccagacccaaggacggcgagggcagcugcaaccccgugaccguggacggcgccgacggcgugaagggcuucagcuacagauacggcaacggcguguggaucggcagaaccaagagcaacagacugagaaagggcuucgagaugaucugggaccccaacggcuggaccgacaccgacagcgacuucagcaugaagcaggacaucguggccaugaccgacuggagcggcuacagcggcagcuucgugcagcaccccgagcugaccggccuggacugcaugagacccugcuucuggguggagcuggugagaggccugcccagagagaacaccaccaucuggaccagcggcagcagcaucagcuucugcggcgugaacagcgacaccgccaacuggagcuggcccgacggcgccgagcugcccuucaccaucgacaaguga

SEQ ID NO: 176650 - RNA, 1410 nt, Artificial Sequence
  derived and/or modified CDS sequence (opt4) from neuraminidase__InfluenzaA__ACK99479
augaaccccaaccagaagaucaucaccaucggcagcgugagccugaccaucgccaccaucugcuuccugaugcagaucgccauccuggugaccaccgugacccugcacuucaagcaguacgagugcaacagcccccccaacaaccaggugaugcugugcgagcccaccaucaucgagagaaacaucaccgagaucguguaccugaccaacaccaccaucgagaaggagaucugccccaagcuggccgaguacagaaacuggagcaagccccagugcaagaucaccggcuucgcccccuucagcaaggacaacagcaucagacugagcgccggcggcgacaucugggugaccagagagcccuacgugagcugcgaccccgacaagugcuaccaguucgcccugggccagggcaccacccugaacaacagacacagcaacgacaccgugcacgacagaacccccuacagaacccugcugaugaacgagcugggcgugcccuuccaccugggcaccaagcaggugugcaucgccuggagcagcagcagcugccacgacggcaaggccuggcugcacgugugcgugaccggccacgacgagaacgccaccgccagcuucaucuacgacggcagacugguggacagcaucggcagcuggagcaagaagauccugagaacccaggagagcgagugcgugugcaucaacggcaccugcaccguggugaugaccgacggcagcgccagcggcagagccgacaccaagauccuguucaucgaggagggcaagaucgugcacaucagcccccugcugggcagcgcccagcacguggaggagugcagcugcuaccccagauaccccggcgugagaugcgugugcagagacaacuggaagggcagcaacagacccaucguggacaucaacgugaaggacuacagcaucgugagcagcuacgugugcagcggccuggugggcgacacccccagaaagaacgacagcagcagcagcagccacugccugaaccccaacaacgaggagggcggccacggcgugaagggcugggccuucgacgacggcaacgacguguggaugggcagaaccaucagcgagaagcugagaagcggcuacgagaccuucaaggugaucgagggcuggagcaagcccaacagcaagcugcagaucaacagacaggugaucguggacagaggcaacagaagcggcuacagcggcaucuucagcguggagggcaagagcugcaucaacagaugcuucuacguggagcugaucagaggcagaaagcaggagaccgaggugugguggaccagcaacagcaucgugguguucugcggcaccagcggcaccuacggcaccggcagcuggcccgacggcgccaacaucaaccugaugcccaucuga

SEQ ID NO: 176651 - RNA, 1413 nt, Artificial Sequence; identical to SEQ ID NO: 176344
  derived and/or modified CDS sequence (opt4) from neuraminidase__InfluenzaA__ACL12066

SEQ ID NO: 176652 - RNA, 1410 nt, Artificial Sequence; identical to SEQ ID NO: 175245
  derived and/or modified CDS sequence (opt4) from neuraminidase__InfluenzaA__ACL12132

SEQ ID NO: 176653 - RNA, 1413 nt, Artificial Sequence; identical to SEQ ID NO: 176578
  derived and/or modified CDS sequence (opt4) from neuraminidase__InfluenzaA__ACL12154

SEQ ID NO: 176654 - RNA, 1410 nt, Artificial Sequence; identical to SEQ ID NO: 176572
  derived and/or modified CDS sequence (opt4) from neuraminidase__InfluenzaA__ACL12165

SEQ ID NO: 176655 - RNA, 1410 nt, Artificial Sequence; identical to SEQ ID NO: 176572
  derived and/or modified CDS sequence (opt4) from neuraminidase__InfluenzaA__ACL12176

SEQ ID NO: 176656 - RNA, 1410 nt, Artificial Sequence
  derived and/or modified CDS sequence (opt4) from neuraminidase__InfluenzaA__ACL12198
augaaccccaaccagaagaucaucaccaucggcagcgugagccugaccaucagcaccaucugcuucuucaugcagaucgccauccugaucaccaccgugacccugcacuucaagcaguacgaguucaacagcacccccaacaaccaggugaugcugugcgagcccaccaucaucgagagaaacaucaccgagaucguguaccugaccaacaccaccaucgagaaggagaucugccccaagcuggccgaguacagaaacuggagcaagccccagugcgacaucaccggcuucgcccccuucagcaaggacaacagcaucagacugagcgccggcggcgacaucugggugaccagagagcccuacgugagcugcgaccccgacaagugcuaccaguucgcccugggccagggcaccacccugaacaacgugcacagcaacgacaccgugagagacagaacccccuacagaacccugcugaugaacgagcugggcgugcccuuccaccugggcaccaagcaggugugcaucgccuggagcagcagcagcugccacgacggcaaggccuggcugcacgugugcaucaccggcgacgacaagaacgccaccgccagcuucaucuacaacggcagacugguggacagcguggugagcuggagcaaggagauccugagaacccaggagagcgagugcgugugcaucaacggcaccugcaccguggugaugaccgacggcagcgccagcggcaaggccgacaccaagauccuguucaucgaggagggcaagaucgugcacaccagcacccugagcggcagcgcccagcacguggaggagugcagcugcuaccccagauaccccggcgugagaugcgugugcagagacaacuggaagggcagcaacagacccaucguggacaucaacaucaaggaccacagcaucgugagcagcuacgugugcagcggccuggugggcgacacccccagaaagaacgacagcagcagcagcagccacugccuggaccccaacaacgaggagggcggccacggcgugaagggcugggccuucgacgacggcaacgacguguggaugggcagaaccaucagcgagaagagcagacugggcuacgagaccuucaaggugaucgagggcuggagcaaccccaagagcaagcugcagaucaacagacaggugaucguggacagaggcaacagaagcggcuacagcggcaucuucagcguggagggcaagagcugcaucaacagaugcuucuacguggagcugaucagaggcagaaaggaggagaccgaggugcuguggaccagcaacagcaucgugguguucugcggcaccagcggcaccuacggcaccggcagcuggcccgacggcgccgacaucaaccugaugcccaucuga

SEQ ID NO: 176657 - RNA, 1410 nt, Artificial Sequence; identical to SEQ ID NO: 176150
  derived and/or modified CDS sequence (opt4) from neuraminidase__InfluenzaA__ACL12209

SEQ ID NO: 176658 - RNA, 1410 nt, Artificial Sequence; identical to SEQ ID NO: 176572
  derived and/or modified CDS sequence (opt4) from neuraminidase__InfluenzaA__ACL12220

SEQ ID NO: 176659 - RNA, 1410 nt, Artificial Sequence
  derived and/or modified CDS sequence (opt4) from neuraminidase__InfluenzaA__ACL12242
augaaccccaaccagaagaucaucaccaucggcagcgugagccugaccaucagcaccaucugcuucuucaugcagaucgccauccugaucaccaccgugacccugcacuucaagcaguacgaguucaacagcccccccaacaaccaggugaugcugugcgagcccaccaucaucgagagaaacaucaccgagaucguguaccugaccaacaccaccaucgagaaggagaucugccccaagcuggccgaguacagaaacuggagcaagccccagugcgacaucaccggcuucgcccccuucagcaaggacaacagcaucagacugagcgccggcggcgacaucugggugaccagagagcccuacgugagcugcgaccccgacaagugcuaccaguucgcccugggccagggcaccacccugaacaacgugcacagcaacaacaccgugagagacagaacccccuacagaacccugcugaugaacgagcugggcgugcccuuccaccugggcaccaagcaggugugcaucgccuggagcagcagcagcugccacgacggcaaggccuggcugcacgugugcaucaccggcgacgacaagaacgccaccgccagcuucaucuacaacggcagacugguggacagcguggugagcuggagcaaggagauccugagaacccaggagagcgagugcgugugcaucaacggcaccugcaccguggugaugaccgacggcagcgccagcggcaaggccgacaccaagauccuguucaucgaggagggcaagaucgugcacaccagcacccugagcggcagcgcccagcacguggaggagugcagcugcuaccccagauaccccggcgugagaugcgugugcagagacaacuggaagggcagcaacagacccaucguggacaucaacaucaaggaccacagcaucgugagcagcuacgugugcagcggccuggugggcgacacccccagaaagaacgacagcagcagcagcagccacugccuggaccccaacaacgaggagggcggccacggcgugaagggcugggccuucgacgacggcaacgacguguggaugggcagaaccaucagcgagaagagcagacugggcuacgagaccuucaaggugaucgagggcuggagcaaccccaagagcaagcugcagaucaacagacaggugaucguggacagaggcaacagaagcggcuacagcggcaucuucagcguggagggcaagagcugcaucaacagaugcuucuacguggagcugaucagaggcagaaaggaggagaccgaggugcuguggaccagcaacagcaucgugguguucugcggcaccagcggcaccuacggcaccggcagcuggcccgacggcgccgacaucaaccugaugcccaucuga

SEQ ID NO: 176660 - RNA, 1413 nt, Artificial Sequence
  derived and/or modified CDS sequence (opt4) from neuraminidase__InfluenzaA__ACL12264
augaaccccaaccagaagaucaucaccaucggcagcaucagcauggccaucggcaucaucagccugauccugcagaucgugaacaucaucagcaucugggugagccacagcauccagaccggcagccagaaccacaccggcaucugcaaccagagaaucaucaccuacgagaacagcaccugggugaaccagaccuacgugaacaucaacaacaccaacgugguggccggcaaggacaagaccagcgugacccuggccggcaacagcagccugugccccaucagaggcugggccaucuacaccaaggacaacagcaucagaaucggcagcaagggcgacguguucgugaucagagagcccuucaucagcugcagccaccuggagugcagaaccuucuuccugacccagggcgcccugcugaacgacaagcacagcaacggcaccgugaaggacagaagccccuacagagcccugaugagcugcccccugggcgaggcccccagccccuacaacagcagauucgagagcguggccuggagcgccagcgccugccacgacggcaugggcuggcugaccaucggcaucagcggccccgacgacggcgccguggccgugcugaaguacaacggcaucaucaccgagaccaucaagagcuggaagaagagaauccugagaacccaggagagcgagugcgugugcgugaacggcagcugcuucaccaucaugaccgacggccccagcaacggcgccgccagcuacagaaucuucaagaucgagaagggcaaggugaccaagagcaucgagcuggacgcccccaacagccacuacgaggagugcagcugcuaccccgacaccggcaccgugaugugcgugugcagagacaacuggcacggcagcaacagacccugggugagcuucaaccagaaccuggacuaccagaucggcuacaucugcagcggcguguucggcgacaaccccagacccaaggacggcaagggcagcugcgaccccgugaccguggacggcgccgacggcgugaagggcuucagcuacagauacggcaacggcguguggaucggcagaaccaagagcaacagauucagaaagggcuucgagaugaucugggaccccaacggcuggaccgacaccgacagcgacuucagcgugaagcaggacgugguggccaugaccgacuggagcggcuacagcggcagcuucgugcagcaccccgagcugaccggccuggacugcaugagacccugcuucuggguggagcuggugagaggcagacccagagagaacaccaccaucuggaccagcggcagcagcaucagcuucugcggcgugaacagcgacaccgccaacuggagcuggcccgacggcgccgagcugcccuucaccaucgacaaguga

SEQ ID NO: 176661 - RNA, 1410 nt, Artificial Sequence; identical to SEQ ID NO: 176465
  derived and/or modified CDS sequence (opt4) from neuraminidase__InfluenzaA__ACN32275

SEQ ID NO: 176662 - RNA, 1410 nt, Artificial Sequence
  derived and/or modified CDS sequence (opt4) from neuraminidase__InfluenzaA__ACN32286
augaaccccaacaagaagaucaucaccaucggcagcgugagccugaccaucagcaccaucugcuucuucaugcagaucgccauccugaucaccaccgugacccugcacuucaagcaguacgaguucaacagcccccccaacaaccaggugaugcugugcgagcccaccaucaucgagagaaacaucaccgagaucguguaccugaccaacaccaccaucgagaaggagaucugccccaagcuggccgaguacagaaacuggagcaagccccagugcgacaucaccggcuucgcccccuucagcaaggacaacagcaucagacugagcgccggcggcgacaucugggugaccagagagcccuacgugagcugcgaccccgacaagugcuaccaguucgcccugggccagggcaccacccugaacaacgugcacagcaacgacaccgugagagacagaacccccuacagaacccugcugaugaacgagcugggcgugcccuuccaccugggcaccaagcaggugugcaucgccuggagcagcagcagcugccacgacggcaaggccuggcugcacgugugcaucaccggcgacgacaagaacgccaccgccagcuucaucuacaacggcagacugguggacagcaucgugagcuggagcaaggagauccugagaacccaggagagcgagugcgugugcaucaacggcaccugcaccguggugaugaccgacggcagcgccagcggcaaggccgacaccaagauccuguucaucgaggagggcaagaucgugcacaccagcacccugcugggcagcgcccagcacguggaggagugcagcugcuaccccagauaccccggcgugagaugcgugugcagagacaacuggaagggcagcaacagacccaucguggacaucaacaucaaggaccacagcaucgugagcagcuacgugugcagcggccuggugggcgacacccccagaaagaacgacagcagcagcagcggccacugccuggaccccaacaacgaggagggcggccacggcgugaagggcugggccuucgacgacggcaacgacguguggaugggcagaaccaucagcgagaagagcagacugggcuacgagaccuucaaggugaucgagggcuggagcaaccccaagagcaagcugcagaucaacagacaggugaucguggacagaggcaacagaagcggcuacagcggcaucuucagcguggagggcaagagcugcaucaacagaugcuucuacguggagcugaucagaggcagaaaggaggagaccgaggugcuguggaccagcaacagcaucgugguguucugcggcaccagcggcaccuacggcaccggcagcuggcccgacggcgccgacaucaaccugaugcccaucuga

SEQ ID NO: 176663 - RNA, 1410 nt, Artificial Sequence
  derived and/or modified CDS sequence (opt4) from neuraminidase__InfluenzaA__ACN32493
augaaccccaaccagaagaucaucaccaucggcagcgugagccugaccaucagcaccaucugcuucuucaugcagaucgccauccugaucaccaccgugacccugcacuucaagcaguacgaguucaacagcagccccaacaaccaggugaugcugugcgagcccaccaucaucgagagaaacaucaccgagaucguguaccugaccaacaccaccaucgagaaggagaucugccccaagcuggccgaguacagaaacuggagcaagccccagugcgacaucaccggcuucgcccccuucagcaaggacaacagcaucagacugagcgccggcggcgacaucugggugaccagagagcccuacgugagcugcgaccccgacaagugcuaccaguucgcccugggccagggcaccacccugaacaacgugcacagcaacaacaccgugagagacagaacccccuacagaacccugcugaugaacgagcugggcgugcccuuccaccugggcaccaagcaggugugcaucgccuggagcagcagcagcugccacgacggcaaggccuggcugcacgugugcaucaccggcgacgacaagaacgccaccgccagcuucaucuacaacggcagacugguggacagcaucgugagcuggagcaaggagauccugagaacccaggagagcgagugcgugugcaucaacggcaccugcaccguggugaugaccgacggcagcgccagcggcaaggccgacaccaagauccuguucaucgaggagggcaagaucgugcacaccagcacccugagcggcagcgcccagcacguggaggagugcagcugcuaccccagauaccccggcgugagaugcgugugcagagacaacuggaagggcagcaacagacccaucguggacaucaacaucaaggaccacagcaucgugagcagcuacgugugcagcggccuggugggcgacacccccagaaagaacgacagcagcagcagcagccacugccuggaccccaacaacgaggagggcggccacggcgugaagggcugggccuucgacgacggcaacgacguguggaugggcagaaccaucagcgagaagagcagacugggcuacgagaccuucaaggugaucgagggcuggagcaaccccaagagcaagcugcagaucaacagacaggugaucguggacagaggcaacagaagcggcuacagcggcaucuucagcguggagggcaagagcugcaucaacagaugcuucuacguggagcugaucagaggcagaaaggaggagaccgaggugcuguggaccagcaacagcaucgugguguucugcggcaccagcggcaccuacggcaccggcagcuggcccgacggcgccgacaucaaccugaugcccaucuga

SEQ ID NO: 176664 - RNA, 1410 nt, Artificial Sequence; identical to SEQ ID NO: 174214
  derived and/or modified CDS sequence (opt4) from neuraminidase__InfluenzaA__ACN32526

SEQ ID NO: 176665 - RNA, 1410 nt, Artificial Sequence
  derived and/or modified CDS sequence (opt4) from neuraminidase__InfluenzaA__ACN32537
augaaccccaaccagaagaucaucaccaucggcagcgugagccugaccaucgccaccaucugcuuccugaugcagaucgccauccuggugaccaccgugacccugcacuucaagcaguacgagugcaacagcccccccaacaaccaggugaugcugugcgagcccaccaucaucgagagaaacaucaccgagaucguguaccugaccaacaccaccaucgagaaggagaucugccccaagcuggccgaguacagaaacuggagcaagccccagugcaacaucaccggcuucgcccccuucagcaaggacaacagcaucagacugagcgccggcggcgacaucugggugaccagagagcccuacgugagcugcgaccccgacaagugcuaccaguucgcccugggccagggcaccacccugaacaacggccacagcaacgacaccgugcacgacagaacccccuacagaacccugcugaugaacgagcugggcgugcccuuccaccugggcaccagacaggugugcaucgccuggagcagcagcagcugccacgacggcaaggccuggcugcacgugugcgugaccggcgacgacgagaacgccaccgccagcuucaucuacaacggcagacugguggacagcaucggcagcuggagcaagaagauccugagaacccaggagagcgagugcgugugcaucaacggcaccugcaccguggugaugaccgacggcagcgccagcggcaaggccgacaccaagauccuguucaucgaggagggcaagaucgugcacaucagcacccugagcggcagcgcccagcacguggaggagugcagcugcuaccccagauaccccgacgugagaugcgugugcagagacaacuggaagggcagcaacagacccaucguggacaucaacgugaaggacuacagcaucgugagcagcuacgugugcagcggccuggugggcgacacccccagaaagaacgacagcuucagcagcagccacugccuggaccccaacaacgaggagggcggccacggcgugaagggcugggccuucgacgacggcaacgacguguggaugggcagaaccaucagcgagaagcugagaagcggcuacgagaccuucaaggugaucgacggcuggagcaagcccaacagcaagcugcagaucaacagacaggugaucguggagagaggcaacagaagcggcuacagcggcaucuucagcguggagggcaagagcugcaucaacagaugcuucuacguggagcugaucagaggcagaaaggaggagaccgaggugugguggaccagcaacagcaucgugguguucugcggcaccagcggcaccuacggcaccggcagcuggcccgacggcgccgacaucaaccugaugcccaucuga

SEQ ID NO: 176666 - RNA, 1413 nt, Artificial Sequence; identical to SEQ ID NO: 176142
  derived and/or modified CDS sequence (opt4) from neuraminidase__InfluenzaA__ACN32807

SEQ ID NO: 176667 - RNA, 1413 nt, Artificial Sequence; identical to SEQ ID NO: 176090
  derived and/or modified CDS sequence (opt4) from neuraminidase__InfluenzaA__ACN32818

SEQ ID NO: 176668 - RNA, 1413 nt, Artificial Sequence; identical to SEQ ID NO: 176090
  derived and/or modified CDS sequence (opt4) from neuraminidase__InfluenzaA__ACN32829

SEQ ID NO: 176669 - RNA, 1413 nt, Artificial Sequence
  derived and/or modified CDS sequence (opt4) from neuraminidase__InfluenzaA__ACN32840
augaaccccaaccagaagaucaucaccaucggcagcaucagcaucgccaucggcaucaucagccugaugcugcagaucggcaacaucaucagcaucugggccagccacagcauccagaccggcagccagaaccacaccggcaucugcaaccagagaaucaucaccuacgagaacagcaccugggugaaccacaccuacgugagcaucaacaacaccaacgugguggccggcaaggacaagaccagcgugacccuggccggcaacagcagccugugcagcaucagcggcugggccaucuacaccaaggacaacagcaucagaaucggcagcaagggcgacguguucgugaucagagagcccuucaucagcugcagccaccuggagugcagaaccuucuuccugacccagggcgcccugcugaacgacaagcacagcaacggcaccgugaaggacagaagccccuacagagcccugaugagcugcccccugggcgaggcccccagccccuacaacagcaaguucgagagcguggccuggagcgccagcgccugccacgacggcaugggcuggcugaccaucggcaucagcggccccgacaacggcgccguggccgugcugaaguacaacggcaucaucaccgagaccaucaagagcuggaagaagagaauccugagaacccaggagagcgagugcgugugcgugaacggcagcugcuucaccaucaugaccgacggccccagcaacggcgccgccagcuacaagaucuucaagaucgagaagggcaaggugaccaagagcaucgagcugaacgcccccaacuuccacuacgaggagugcagcugcuaccccgacaccggcaccgugaugugcgugugcagagacaacuggcacggcagcaacagacccugggugagcuucaaccagaaccuggacuaccagaucggcuacaucugcagcggcguguucggcgacaaccccagacccaaggacggcaagggcagcugcaaccccgugaccguggacggcgccgacggcgugaagggcuucagcuacaaguacggcaacggcguguggaucggcagaaccaagagcaacagacugagaaagggcuucgagaugaucugggaccccaacggcuggaccgacaccgacagcgacuucagcgugaagcaggacgugguggccaucaccgacuggagcggcuacagcggcagcuucgugcagcaccccgagcugaccggccuggacugcaucagacccugcuucuggguggagcuggugagaggccugcccagagagaacaccaccaucuggaccagcggcagcagcaucagcuucugcggcguggacagcgacaccgugaacuggagcuggcccgacggcgccgagcugcccuucaccaucgacaaguga

SEQ ID NO: 176670 - RNA, 1410 nt, Artificial Sequence; identical to SEQ ID NO: 176572
  derived and/or modified CDS sequence (opt4) from neuraminidase__InfluenzaA__ACN32851

SEQ ID NO: 176671 - RNA, 1410 nt, Artificial Sequence; identical to SEQ ID NO: 176659
  derived and/or modified CDS sequence (opt4) from neuraminidase__InfluenzaA__ACN32862

SEQ ID NO: 176672 - RNA, 1410 nt, Artificial Sequence; identical to SEQ ID NO: 176663
  derived and/or modified CDS sequence (opt4) from neuraminidase__InfluenzaA__ACN32873

SEQ ID NO: 176673 - RNA, 1410 nt, Artificial Sequence; identical to SEQ ID NO: 176659
  derived and/or modified CDS sequence (opt4) from neuraminidase__InfluenzaA__ACN32884

SEQ ID NO: 176674 - RNA, 1410 nt, Artificial Sequence; identical to SEQ ID NO: 176663
  derived and/or modified CDS sequence (opt4) from neuraminidase__InfluenzaA__ACN32895

SEQ ID NO: 176675 - RNA, 1410 nt, Artificial Sequence; identical to SEQ ID NO: 176572
  derived and/or modified CDS sequence (opt4) from neuraminidase__InfluenzaA__ACN32906

SEQ ID NO: 176676 - RNA, 1410 nt, Artificial Sequence
  derived and/or modified CDS sequence (opt4) from neuraminidase__InfluenzaA__ACN32917
augaaccccaaccagaagaucaucaccaucggcagcgugagccugaccaucagcaccaucugcuucuucaugcagaucgccauccugaucaccaccgugacccugcacuucaagcaguacgaguucaacagcccccccaacaaccaggugaugcugugcaagcccaccaucaucgagagaaacaucaccgagaucguguaccugaccaacaccaccaucgagaaggagaucugccccaagcuggccgaguacagaaacuggagcaagccccagugcgacaucaccggcuucgcccccuucagcaaggacaacagcaucagacugagcgccggcggcgacaucugggugaccagagagcccuacgugagcugcgaccccgacaagugcuaccaguucgcccugggccagggcaccacccugaacaacgugcacagcaacaacaccgugagagacagaacccccuacagaacccugcugaugaacgagcugggcgugcccuuccaccugggcaccaagcaggugugcaucgccuggagcagcagcagcugccacgacggcaaggccuggcugcacgugugcaucaccggcgacgacaagaacgccaccgccagcuucaucuacaacggcagacugguggacagcguggugagcuggagcaaggagauccugagaacccaggagagcgagugcgugugcaucaacggcaccugcaccguggugaugaccgacggcagcgccagcggcaaggccgacaccaagauccuguucaucgaggagggcaagaucgugcacaccagcacccugagcggcagcgcccagcacguggaggagugcagcugcuaccccagauaccccggcgugagaugcgugugcagagacaacuggaagggcagcaacagacccaucguggacaucaacaucaccgaccacagcaucgugagcagcuacgugugcagcggccuggugggcgacacccccagaaagaacgacagcagcagcagcagccacugccuggaccccaacaacgaggagggcggccacggcgugaagggcugggccuucgacgacggcaacgacguguggaugggcagaaccaucagcgagaagagcagacugggcuacgagaccuucaaggugaucgagggcuggagcaaccccaagagcaagcugcagaucaacagacaggugaucguggacagaggcaacagaagcggcuacagcggcaucuucagcguggagggcaagagcugcaucaacagaugcuucuacguggagcugaucagaggcagaaaggaggagaccgaggugcuguggaccagcaacagcaucgugguguucugcggcaccagcggcaccuacggcaccggcagcuggcccgacggcgccgacaucaaccugaugcccaucuga

SEQ ID NO: 176677 - RNA, 1410 nt, Artificial Sequence
  derived and/or modified CDS sequence (opt4) from neuraminidase__InfluenzaA__ACN32928
augaaccccaaccagaagaucaucaccaucggcagcgugagccugaccaucagcaccaucugcuucuucaugcagaucgccauccugaucaccaccgugacccugcacuucaagcaguacgaguucaacagcccccccaacaaccaggugaugcugugcgagcccaccaucaucgagagaaacaucaccgagaucguguaccugaccaacaccaccaucgagaaggagaucugccccaagcuggccgaguacagaaacuggagcaagccccagugcgacaucaccggcuucgcccccuucagcaaggacaacagcaucagacugagcgccggcggcgacaucugggugaccagagagcccuacgugagcugcgaccccgacaagugcuaccaguucgcccugggccagggcaccacccugaacaacgugcacagcaacaacaccgugagagacagaacccccuacagaacccugcugaugaacgagcugggcgugcccuuccaccugggcaccaagcaggugugcaucgccuggagcagcagcagcugccacgacggcaaggccuggcugcacgugugcaucaccggcgacgacaagaacgccaccgccagcuucaucuacaacggcagacugguggacagcguggugagcuggagcaaggagauccugagaacccaggagagcgagugcgugugcaucaacggcaccugcaccguggugaugaccgacggcagcgccagcggcaaggccgacaccaagauccuguucaucgaggagggcaagaucgugcacaccagcacccugagcggcagcgcccagcacguggaggagugcagcugcuaccccagauaccccggcgugagaugcgugugcagagacaacuggaagggcagcaacagacccaucguggacaucaacaucaccgaccacagcaucgugagcagcuacgugugcagcggccuggugggcgacacccccagaaagaacgacagcagcagcagcagccacugccuggaccccaacaacgaggagggcggccacggcgugaagggcugggccuucgacgacggcaacgacguguggaugggcagaaccaucagcgagaagagcagacugggcuacgagaccuucaaggugaucgagggcuggagcaaccccaagagcaagcugcagaucaacagacaggugaucguggacagaggcaacagaagcggcuacagcggcaucuucagcguggagggcaagagcugcaucaacagaugcuucuacguggagcugaucagaggcagaaaggaggagaccgaggugcuguggaccagcaacagcaucgugguguucugcggcaccagcggcaccuacggcaccggcagcuggcccgacggcgccgacaucaaccugaugcccaucuga

SEQ ID NO: 176678 - RNA, 1410 nt, Artificial Sequence; identical to SEQ ID NO: 176663
  derived and/or modified CDS sequence (opt4) from neuraminidase__InfluenzaA__ACN32939

SEQ ID NO: 176679 - RNA, 1410 nt, Artificial Sequence; identical to SEQ ID NO: 176572
  derived and/or modified CDS sequence (opt4) from neuraminidase__InfluenzaA__ACN32950

SEQ ID NO: 176680 - RNA, 1410 nt, Artificial Sequence
  derived and/or modified CDS sequence (opt4) from neuraminidase__InfluenzaA__ACN32961
augaaccccaaccagaagaucaucaccaucggcagcgugagccugaccaucagcaccaucugcuucuucaugcagaucgccauccugaucaccaccgugacccugcacuucaagcaguacgaguucaacagcccccccaacaaccaggugaugcugugcgagcccaccaucaucgagagaaacaucaccgagaucguguaccugaccaacaccaccaucgagaaggagaucugccccaagcuggccgaguacagaaacuggagcaagccccagugcgacaucaccggcuucgcccccuucagcaaggacaacagcaucagacugagcgccggcggcgacaucugggugaccagagagcccuacgugagcugcgaccccgacaagugcuaccaguucgcccugggccagggcaccacccugaacaacgugcacagcaacaacaccgugagagacagaacccccuacagaacccugcugaugaacgagcugggcgugcccuuccaccugggcaccaagcaggugugcaucgccuggagcagcagcagcugccacgacggcaaggccuggcugcacgugugcaucaccggcgacgacaagaacgccaccgccagcuucaucuacaacggcagacugguggacagcguggugagcuggagcaaggagauccugagaacccaggagagcgagugcgugugcaucaacggcaccugcaccguggugaugaccgacggcagcgccagcggcaaggccgacaccaagauccuguucaucgaggagggcaagaucgugcacaccagcacccugagcggcagcgcccagcacguggaggagugcagcugcuaccccagauaccccggcgugagaugcgugugcagagacaacuggaagggcagcaacagacccaucguggacaucaacaucaccgaccacagcaucgugagcagcuacgugugcagcggccuggugggcgacacccccagaaagaacgacagcagcagcagcagccacugccuggaccccaacaacgaggagggcggccacggcgugaagggcugggccuucgacgacggcaacgacguguggaugggcagaaccaucagcgagaagagcagacugggcuacgagaccuucaaggugaucgagggcuggagcaaccccaagagcaagcugcagaucaacagacaggugaucguggacagaggcaacagaagcggcuacagcggcaucuucagcguggagggcaagagcugcaucaacagaugcuucuacguggagcugaucagaggcagaaaggaggagaccgaggugcuguggaccagcaacagcaucgugguguucugcggcaccagcggcaccuacggcaccggcagcuggcccgacggcgccgacaucaacaucaugcccaucuga

SEQ ID NO: 176681 - RNA, 1410 nt, Artificial Sequence; identical to SEQ ID NO: 176659
  derived and/or modified CDS sequence (opt4) from neuraminidase__InfluenzaA__ACN32972

SEQ ID NO: 176682 - RNA, 1410 nt, Artificial Sequence; identical to SEQ ID NO: 176659
  derived and/or modified CDS sequence (opt4) from neuraminidase__InfluenzaA__ACN32994

SEQ ID NO: 176683 - RNA, 1410 nt, Artificial Sequence
  derived and/or modified CDS sequence (opt4) from neuraminidase__InfluenzaA__ACN33005
augaaccccaaccagaagaucaucaccaucggcagcgugagccugaccaucagcaccaucugcuucuucaugcagaucgccauccugaucaccaccgugacccugcacuucaagcaguacgaguucaacagcccccccaacaaccaggugaugcugugcgagcccaccaucaucgagagaaacaucaccgagaucguguaccugaccaacaccaccaucgagaaggagaucugccccaagcuggccgaguacagaaacuggagcaagccccagugcgacaucaccggcuucgcccccuucagcaaggacaacagcaucagacugagcgccggcggcgacaucugggugaccagagagcccuacgugagcugcgaccccgacaagugcuaccaguucgcccugggccagggcaccacccugaacaacgugcacagcaacgacaccgugagagacagaacccccuacagaacccugcugaugaacgagcugggcgugcccuuccaccugggcaccaagcaggugugcaucgccuggagcagcagcagcugccacgacggcaaggccuggcugcacgugugcaucaccggcgacgacaagaacgccaccgccagcuucaucuacaacggcagacugguggacagcguggugagcuggagcaaggagauccugagaacccaggagagcgagugcgugugcaucaacggcaccugcaccguggugaugaccgacggcagcgccagcggcaaggccgacaccaagauccuguucaucgaggagggcaagaucgugcacaccagcacccugagcggcagcgcccagcacguggaggagugcagcugcuaccccagauaccccggcgugagaugcgugugcagagacaacuggaagggcagcaacagacccaucguggacaucaacaucaaggaccacagcaucgugagcagcuacgugugcagcggccuggugggcgacacccccagaaagaacgacagcagcagcagcagccacugccuggaccccaacaacgaggagggcggccacggcgugaagggcugggccuucgacgacggcaacgacguguggaugggcagaaccaucagcgagaagagcagacugggcuacgagaccuucaaggugaucgagggcuggagcaaccccaagagcaagcugcagaucaacagacaggugaucguggacagaggcaacagaagcggcuacagcggcaucuucagcguggagggcgagagcugcaucaacagaugcuucuacguggagcugaucagaggcagaaaggaggagaccgaggugcuguggaccagcaacagcaucgugguguucugcggcaccagcggcaccuacggcaccggcagcuggcccgacggcgccgacaucaaccugaugcccaucuga

SEQ ID NO: 176684 - RNA, 1410 nt, Artificial Sequence; identical to SEQ ID NO: 176659
  derived and/or modified CDS sequence (opt4) from neuraminidase__InfluenzaA__ACN33016

SEQ ID NO: 176685 - RNA, 1410 nt, Artificial Sequence; identical to SEQ ID NO: 176659
  derived and/or modified CDS sequence (opt4) from neuraminidase__InfluenzaA__ACN33049

SEQ ID NO: 176686 - RNA, 1410 nt, Artificial Sequence; identical to SEQ ID NO: 176659
  derived and/or modified CDS sequence (opt4) from neuraminidase__InfluenzaA__ACN33060

SEQ ID NO: 176687 - RNA, 1410 nt, Artificial Sequence; identical to SEQ ID NO: 176663
  derived and/or modified CDS sequence (opt4) from neuraminidase__InfluenzaA__ACN33082

SEQ ID NO: 176688 - RNA, 1413 nt, Artificial Sequence; identical to SEQ ID NO: 176129
  derived and/or modified CDS sequence (opt4) from neuraminidase__InfluenzaA__ACN33093

SEQ ID NO: 176689 - RNA, 1413 nt, Artificial Sequence; identical to SEQ ID NO: 176090
  derived and/or modified CDS sequence (opt4) from neuraminidase__InfluenzaA__ACN33104

SEQ ID NO: 176690 - RNA, 1410 nt, Artificial Sequence; identical to SEQ ID NO: 176663
  derived and/or modified CDS sequence (opt4) from neuraminidase__InfluenzaA__ACN33115

SEQ ID NO: 176691 - RNA, 1413 nt, Artificial Sequence
  derived and/or modified CDS sequence (opt4) from neuraminidase__InfluenzaA__ACN33126
augaaccccaaccagaagaucaucaccaucggcagcaucagcaucgccaucggcaucaucagccugaugcugcagaucggcaacaucaucagcaucugggccagccacagcauccagaccggcagccagaacaacaccggcaucugcaaccagagaaucaucaccuacgagaacagcaccugggugaaccacaccuacgugaacaucaacaacaccaacgugguggccggcgaggacaagaccagcgugacccuggccggcagcagcagccugugcagcaucagcggcugggccaucuacaccaaggacaacagcaucagaaucggcagcaagggcgacguguucgugaucagagagcccuucaucagcugcagccaccuggagugcagaaccuucuuccugacccagggcgcccugcugaacgacaagcacagcaacggcaccgugaaggacagaagccccuacagagcccugaugagcugcccccugggcgaggcccccagccccuacaacagcaaguucgagagcguggccuggagcgccagcgccugccacgacggcaugggcuggcugaccaucggcaucagcggccccgacaacggcgccguggccgugcugaaguacaacggcaucaucaccggcaccaucaagagcuggaagaagcagauccugagaacccaggagagcgagugcgugugcaugaacggcagcugcuucaccaucaugaccgacggccccagcaacaaggccgccagcuacaagaucuucaagaucgagaagggcaaggugaccaagagcaucgagcugaacgcccccaacuuccacuacgaggagugcagcugcuaccccgacaccggcaucgugaugugcgugugcagagacaacuggcacggcagcaacagacccugggugagcuucaaccagaaccuggacuaccagaucggcuacaucugcagcggcguguucggcgacaaccccagacccgaggacggcgagggcagcugcaaccccgugaccguggacggcgccaacggcgugaagggcuucagcuacaaguacgacaacggcguguggaucggcagaaccaagagcaacagacugagaaagggcuucgagaugaucugggaccccaacggcuggaccaacaccgacagcgacuucagcgugaagcaggacgugguggccaucaccgacuggagcggcuacagcggcagcuucgugcagcaccccgagcugaccggccuggacugcaucagacccugcuucuggguggagcuggugagaggccugcccagagagaacaccaccaucuggaccagcggcagcagcaucagcuucugcggcgugaacagcgacaccgccaacuggagcuggcccgacggcgccgagcugcccuucaccaucgacaaguga

SEQ ID NO: 176692 - RNA, 1413 nt, Artificial Sequence
  derived and/or modified CDS sequence (opt4) from neuraminidase__InfluenzaA__ACN33148
augaaccccaaccagaagaucaucaccaucggcagcaucagcaucgccaucggcaucaucagccugaugcugcagaucggcaacaucaucagcaucugggccagccacagcauccagaccggcagccagaacaacaccggcaucugcaaccagagaaucaucaccuacgagaacagcaccugggugaaccacaccuacgugaacaucaacaacaccaacgugguggccggcgaggacaagaccagcgugacccuggccggcaacagcagccugugcagcaucagcggcugggccaucuacaccaaggacaacagcaucagaaucggcagcaagggcgacguguucgugaucagagagcccuucaucagcugcagccaccuggagugcagaaccuucuuccugacccagggcgcccugcugaacgacaagcacagcaacggcaccgugaaggacagaagccccuacagagcccugaugagcugcccccugggcgaggcccccagccccuacaacagcaaguucgagagcguggccuggagcgccagcgccugccacgacggcaugggcuggcugaccaucggcaucagcggccccgacaacggcgccguggccgugcugaaguacaacggcaucaucaccggcaccaucaagagcuggaagaagcagauccugagaacccaggagagcgagugcgugugcaugaacggcagcugcuucaccaucaugaccgacggccccagcaacaaggccgccagcuacaagaucuucaagaucgagaagggcaaggugaccaagagcaucgagcugaacgcccccaacuuccacuacgaggagugcagcugcuaccccgacaccggcaucgugaugugcgugugcagagacaacuggcacggcagcaacagacccugggugagcuucaaccagaaccuggacuaccagaucggcuacaucugcagcggcguguucggcgacaaccccagacccgaggacggcgagggcagcugcaaccccgugaccguggacggcgccaacggcgugaagggcuucagcuacaaguacgacaacggcguguggaucggcagaaccaagagcaacagacugagaaagggcuucgagaugaucugggaccccaacggcuggaccaacaccgacagcgacuucagcgugaagcaggacgugguggccaucaccgacuggagcggcuacagcggcagcuucgugcagcaccccgagcugaccggccuggacugcaucagacccugcuucuggguggagcuggugagaggccugcccagagagaacaccaccaucuggaccagcggcagcagcaucagcuucugcggcgugaacagcgacaccgccaacuggagcuggcccgacggcgccgagcugcccuucaccaucgacaaguga

SEQ ID NO: 176693 - RNA, 1410 nt, Artificial Sequence
  derived and/or modified CDS sequence (opt4) from neuraminidase__InfluenzaA__ACN33159
augaaccccaaccagaagaucaucaccaucggcagcgugagccugaccaucagcaccaucugcuucuucaugcagaucgccauccugaucaccaccgugacccugcacuucaagcaguacgaguucaacagcccccccaacaaccaggugaugcugugcgagcccaccaucaucgagagaaacaucaccgagaucguguaccugaccaacaccaccaucgagaaggagaagugccccaagcuggccgaguacagaaacuggagcaagccccagugcgacaucaccggcuucgcccccuucagcaaggacaacagcaucagacugagcgccggcggcgacaucugggugaccagagagcccuacgugagcugcgaccccgacaagugcuaccaguucgcccugggccagggcaccacccugaacaacgugcacagcaacaacaccgugagagacagaacccccuacagaacccugcugaugaacgagcugggcgugcccuuccaccugggcaccaagcaggugugcaucgccuggagcagcagcagcugccacgacggcaaggccuggcugcacgugugcaucaccggcgacgacaagaacgccaccgccagcuucaucuacaacggcagacugguggacagcguggugagcuggagcaaggagauccugagaacccaggagagcgagugcgugugcaucaacggcaccugcaccguggugaugaccgacggcagcgccagcggcaaggccgacaccaagauccuguucaucgaggagggcaagaucgugcacaccagcacccugagcggcagcgcccagcacguggaggagugcagcugcuaccccagauaccccggcgugagaugcgugugcagagacaacuggaagggcagcaacagacccaucguggacaucaacaucaaggaccacagcaucgugagcagcuacgugugcagcggccuggugggcgacacccccagaaagaacgacagcagcagcagcagccacugccuggaccccaacaacgaggagggcggccacggcgugaagggcugggccuucgacgacggcaacgacguguggaugggcagaaccaucagcgagaagagcagacugggcuacgagaccuucaaggugaucgagggcuggagcaaccccaagagcaagcugcagaucaacagacaggugaucguggacagaggcaacagaagcggcuacagcggcaucuucagcguggagggcaagagcugcaucaacagaugcuucuacguggagcugaucagaggcagaaaggaggagaccgaggugcuguggaccagcaacagcaucgugguguucugcggcaccagcggcaccuacggcaccggcagcuggcccgacggcgccgacaucaaccugaugcccaucuga

SEQ ID NO: 176694 - RNA, 1410 nt, Artificial Sequence; identical to SEQ ID NO: 176572
  derived and/or modified CDS sequence (opt4) from neuraminidase__InfluenzaA__ACN33170

SEQ ID NO: 176695 - RNA, 1410 nt, Artificial Sequence; identical to SEQ ID NO: 176663
  derived and/or modified CDS sequence (opt4) from neuraminidase__InfluenzaA__ACN33181

SEQ ID NO: 176696 - RNA, 1410 nt, Artificial Sequence; identical to SEQ ID NO: 176663
  derived and/or modified CDS sequence (opt4) from neuraminidase__InfluenzaA__ACN33203

SEQ ID NO: 176697 - RNA, 1410 nt, Artificial Sequence
  derived and/or modified CDS sequence (opt4) from neuraminidase__InfluenzaA__ACN33214
augaaccccaaccagaagaucaucaccaucggcagcgugagccugaccaucagcaccaucugcuucuucaugcagaucgccauccugaucaccaccgugacccugcacuucaagcaguacgaguucaacagcccccccaacaaccaggugaugcugugcgagcccaccaucaucgagagaaacaucaccgagaccguguaccugaccaacaccaccaucgagaaggagaucugccccaagcuggccgaguacagaaacuggagcaagccccagugcgacaucaccggcuucgcccccuucagcaaggacaacagcaucagacugagcgccggcggcgacaucugggugaccagagagcccuacgugagcugcgaccccgacaagugcuaccaguucgcccugggccagggcaccacccugaacaacgugcacagcaacaacaccgugagagacagaacccccuacagaacccugcugaugaacgagcugggcgugcccuuccaccugggcaccaagcaggugugcaucgccuggagcagcagcagcugccacgacggcaaggccuggcugcacgugugcaucaccggcgacgacaagaacgccaccgccagcuucaucuacaacggcagacugguggacagcguggugagcuggagcaaggagauccugagaacccaggagagcgagugcgugugcaucaacggcaccugcaccguggugaugaccgacggcagcgccagcggcaaggccgacaccaagauccuguucaucgaggagggcaagaucgugcacaccagcacccugagcggcagcgcccagcacguggaggagugcagcugcuaccccagauaccccggcgugagaugcgugugcagagacaacuggaagggcagcaacagacccaucguggacaucaacaucaaggaccacagcaucgugagcagcuacgugugcagcggccuggugggcgacacccccagaaagaacgacagcagcagcagcagccacugccuggaccccaacaacgaggagggcggccacggcgugaagggcugggccuucgacgacggcaacgacguguggaugggcagaaccaucagcgagaagagcagacugggcuacgagaccuucaaggugaucgagggcuggagcaaccccaagagcaagcugcagaucaacagacaggugaucguggacagaggcaacagaagcggcuacagcggcaucuucagcguggagggcaagagcugcaucaacagaugcuucuacguggagcugaucagaggcagaaaggaggagaccgaggugcuguggaccagcaacagcaucgugguguucugcggcaccagcggcaccuacggcaccggcagcuggcccgacggcgccgacaucaaccugaugcccaucuga

SEQ ID NO: 176698 - RNA, 1413 nt, Artificial Sequence; identical to SEQ ID NO: 176131
  derived and/or modified CDS sequence (opt4) from neuraminidase__InfluenzaA__ACN42984

SEQ ID NO: 176699 - RNA, 1413 nt, Artificial Sequence; identical to SEQ ID NO: 176131
  derived and/or modified CDS sequence (opt4) from neuraminidase__InfluenzaA__ACN42995

SEQ ID NO: 176700 - RNA, 1410 nt, Artificial Sequence
  derived and/or modified CDS sequence (opt4) from neuraminidase__InfluenzaA__ACN43006
augaaccccaaccagaagaucaucaccaucggcagcgugagccugaccaucagcaccaucugcuucuucaugcagaucgccauccugaucaccaccgugacccugcacuucaagcaguacgaguucaacagcccccccaacaacagagugaugcugugcgagcccaccaucaucgagagaaacaucaccgagaucguguaccugaccaacaccaccaucgagaaggagaucugccccaagcuggccgaguacagaaacuggagcaagccccagugcgacaucaccggcuucgcccccuucagcaaggacaacagcaucagacugagcgccggcggcgacaucugggugaccagagagcccuacgugagcugcgaccccgacaagugcuaccaguucgcccugggccagggcaccacccugaacaacgugcacagcaacaacaccgugagagacagaacccccuacagaacccugcugaugaacgagcugggcgugcccuuccaccugggcaccaagcaggugugcaucgccuggagcagcagcagcugccacgacggcaaggccuggcugcacgugugcaucaccggcgacgacaagaacgccaccgccagcuucaucuacaacggcagacugguggacagcguggugagcuggagcaaggagauccugagaacccaggagagcgagugcgugugcaucaacggcaccugcaccguggugaugaccgacggcagcgccagcggcaaggccgacaccaagauccuguucaucgaggagggcaagaucgugcacaccagcacccugagcggcagcgcccagcacguggaggagugcagcugcuaccccagauaccccggcgugagaugcgugugcagagacaacuggaagggcagcaacagacccaucguggacaucaacaucaaggaccacagcaucgugagcagcuacgugugcagcggccuggugggcgacacccccagaaagaacgacagcagcagcagcagccacugccuggaccccaacaacgaggagggcggccacggcgugaagggcugggccuucgacgacggcaacgacguguggaugggcagaaccaucagcgagaagagcagacugggcuacgagaccuucaaggugaucgagggcuggagcaaccccaagagcaagcugcagaucaacagacaggugaucguggacagaggcaacagaagcggcuacagcggcaucuucagcguggagggcaagagcugcaucaacagaugcuucuacguggagcugaucagaggcagaaaggaggagaccgaggugcuguggaccagcaacagcaucgugguguucugcggcaccagcggcaccuacggcaccggcagcuggcccgacggcgccgacaucaaccugaugcccaucuga

SEQ ID NO: 176701 - RNA, 1410 nt, Artificial Sequence; identical to SEQ ID NO: 176663
  derived and/or modified CDS sequence (opt4) from neuraminidase__InfluenzaA__ACN43017

SEQ ID NO: 176702 - RNA, 1410 nt, Artificial Sequence; identical to SEQ ID NO: 176659
  derived and/or modified CDS sequence (opt4) from neuraminidase__InfluenzaA__ACN43028

SEQ ID NO: 176703 - RNA, 1410 nt, Artificial Sequence
  derived and/or modified CDS sequence (opt4) from neuraminidase__InfluenzaA__ACN43039
augaaccccaaccagaagaucaucaccaucggcagcgugagccugaccaucagcaccaucugcuucuucaugcagaucgccauccugaucaccaccgugacccugcacuucaagcaguacgaguucaacagcccccccaacaaccaggugaugcugugcgagcccaccaucaucgagagaaacaucaccgagaucguguaccugaccaacaccaccaucgagaaggagaucugccccaagcuggccgaguacagaaacuggagcaagccccagugcgacaucaccggcuucgcccccuucagcaaggacaacagcaucagacugagcgccggcggcgacaucugggugaccagagagcccuacgugagcugcgaccccgacaagugcuaccaguucgcccugggccagggcaccacccugaacaacgugcacagcaacgacaccgugagagacagaacccccuacagaacccugcugaugaacgagcugggcgugcccuuccaccuggagaccaagcaggugugcaucgccuggagcagcagcagcugccacgacggcaaggccuggcugcacgugugcaucaccggcgacgacaagaacgccaccgccagcuucaucuacaacggcagacugguggacagcguggugagcuggagcaaggagauccugagaacccaggagagcgagugcgugugcaucaacggcaccugcaccguggugaugaccgacggcagcgccagcggcaaggccgacaccaagauccuguucaucgaggagggcaagaucgugcacaccagcacccugagcggcagcgcccagcacguggaggagugcagcugcuaccccagauaccccggcgugagaugcgugugcagagacaacuggaagggcagcaacagacccaucguggacaucaacaucaaggaccacagcaucgugagcagcuacgugugcagcggccuggugggcgacacccccagaaagaacgacagcagcagcagcagccacugccuggaccccaacaacgaggagggcggccacggcgugaagggcugggccuucgacgacggcaacgacguguggaugggcagaaccaucagcgagaagagcagacugggcuacgagaccuucaaggugaucgagggcuggagcaaccccaagagcaagcugcagaucaacagacaggugaucguggacagaggcaacagaagcggcuacagcggcaucuucagcguggagggcaagagcugcaucaacagaugcuucuacguggagcugaucagaggcagaaaggaggagaccgaggugcuguggaccagcaacagcaucgugguguucugcggcaccagcggcaccuacggcaccggcagcuggcccgacggcgccgacaucaaccugaugcccaucuga

SEQ ID NO: 176704 - RNA, 1410 nt, Artificial Sequence; identical to SEQ ID NO: 176572
  derived and/or modified CDS sequence (opt4) from neuraminidase__InfluenzaA__ACN43050

SEQ ID NO: 176705 - RNA, 1410 nt, Artificial Sequence; identical to SEQ ID NO: 176659
  derived and/or modified CDS sequence (opt4) from neuraminidase__InfluenzaA__ACN43061

SEQ ID NO: 176706 - RNA, 1410 nt, Artificial Sequence
  derived and/or modified CDS sequence (opt4) from neuraminidase__InfluenzaA__ACN43072
augaaccccaaccagaagaucaucaccaucggcagcgugagccugaccaucagcaccaucugcuucuucaugcagaucgccauccugaucaccaccgugacccugcacuucaagcaguacgaguucaacagcccccccaacaaccaggugaugcugugcgagcccaccaucaucgagagaaacaucaccgagaucguguaccugaccaacaccaccaucgagaaggagaucugccccaagcuggccgaguacagaaacuggagcaagccccagugcgacaucaccggcuucgcccccuucagcaaggacaacagcaucagacugagcgccggcggcgacaucugggugaccagagagcccuacgugagcugcgaccccgacaagugcuaccaguucgcccugggccagggcaccacccugaacaacgugcacagcaacaacaccgugagagacagaacccccuacagaacccugcugaugaacgagcugggcgugcccuuccaccugggcaccaagcaggugugcaucgccuggagcagcagcagcugccacgacggcaaggccuggcugcacgugugcaucaccggcgacgacaagaacgccaccgccagcuucaucuacaacggcagacugguggacagcguggugagcuggagcaaggagauccugagaacccaggagagcgagugcgugugcaucaacggcaccugcaccguggugaugaccgacggcagcgccagcggcaaggccgacaccaagauccuguucaucgaggagggcaagaucgugcacaccagcacccugagcggcagcgcccagcacguggaggagugcagcugcuaccccagauaccccggcgugagaugcgugugcagagacaacuggaagggcagcaacagacccaucguggacaucaacaucaaggaccacagcaucgugagcagcuacgugugcagcggccuggugggcgacacccccagaaagaacgacagcagcagcagcagccacugccuggaccccaacaacgaggagggcggccacggcgugaagggcugggccuucgacgacggcaacgacguguggaugggcagaaccaucagcgagaagagcagacugggcuacgagaccuucaaggugaucgagggcuggagcaaccccaagagcaagcugcagaucaacagacaggugaucguggacagaggcaacagaagcggcuacagcggcaucuucagcguggagggcaagagcugcaucaacagaugcuucuacguggagcugaucagaggcagaaaggaggagaccgaggugcuguggaccagcaacagcguggugguguucugcggcaccagcggcaccuacggcaccggcagcuggcccgacggcgccgacaucaaccugaugcccaucuga

SEQ ID NO: 176707 - RNA, 1410 nt, Artificial Sequence
  derived and/or modified CDS sequence (opt4) from neuraminidase__InfluenzaA__ACN43083
augaaccccaaccagaagaucaucaccaucggcagcgugagccugaccaucagcaccaucugcuucuucaugcagaucgccauccugaucaccaccgugacccugcacuucaagcaguacgaguucaacagcagccccaacaaccaggugaugcugugcgagcccaccaucaucgagagaaacaucaccgagaucguguaccugaccaacaccaccaucgagaaggagaucugccccaagcuggccgaguacagaaacuggagcaagccccagugcgacaucaccggcuucgcccccuucagcaaggacaacagcaucagacugagcgccggcggcgacaucugggugaccagagagcccuacgugagcugcgaccccgacaagugcuaccaguucgcccugggccagggcaccacccugaacaacgugcacagcaacaacaccgugagagacagaacccccuacagaacccugcugaugaacgagcugggcgugcccuuccaccugggcaccaagcaggugugcaucgccuggagcagcagcagcugccacgacggcaaggccuggcugcacgugugcaucaccggcgacgacaagaacgccaccgccagcuucaucuacaacggcagacugguggacagcaucgugagcuggagcaacgagauccugagaacccaggagagcgagugcgugugcaucaacggcaccugcaccguggugaugaccgacggcagcgccagcggcaaggccgacaccaagauccuguucaucgaggagggcaagaucgugcacaccagcacccugagcggcagcgcccagcacguggaggagugcagcugcuaccccagauaccccggcgugagaugcgugugcagagacaacuggaagggcagcaacagacccaucguggacaucaacaucaaggaccacagcaucgugagcagcuacgugugcagcggccuggugggcgacacccccagaaagaacgacagcagcagcagcagccacugccuggaccccaacaacgaggagggcggccacggcgugaagggcugggccuucgacgacggcaacgacguguggaugggcagaaccaucagcgagaagagcagacugggcuacgagaccuucaaggugaucgagggcuggagcaaccccaagagcaagcugcagaucaacagacaggugaucguggacagaggcaacagaagcggcuacagcggcaucuucagcguggagggcaagagcugcaucaacagaugcuucuacguggagcugaucagaggcagaaaggaggagaccgaggugcuguggaccagcaacagcaucgugguguucugcggcaccagcggcaccuacggcaccggcagcuggcccgacggcgccgacaucaaccugaugcccaucuga

SEQ ID NO: 176708 - RNA, 1410 nt, Artificial Sequence; identical to SEQ ID NO: 174387
  derived and/or modified CDS sequence (opt4) from neuraminidase__InfluenzaA__ACN50231

SEQ ID NO: 176709 - RNA, 1410 nt, Artificial Sequence
  derived and/or modified CDS sequence (opt4) from neuraminidase__InfluenzaA__ACN50233
augaaccccaaccagaagaucaucaccaucggcagcgugagccugaccaucagcaccaucugcuucuucaugcagaucgccauccugaucaccaccgugacccugcacuucaagcaguacgaguucaacagcccccccaacaaccaggugaugcugugcgagcccaccaucaucgagagaaacaucaccgagaucguguaccugaccaacaccaccaucgagaaggagaucugccccaagcuggccgaguacagaaacuggagcaagccccagugcgacaucaccggcuucgcccccuucagcaaggacaacagcaucagacugagcgccggcggcgacaucugggugaccagagagcccuacgugagcugcgaccccgacaagugcuaccaguucgcccugggccagggcaccacccugaacaacgugcacagcaacgacaccgugcacgacagaacccccuacagaacccugcugaugaacgagcugggcgugcccuuccaccugggcaccaagcaggugugcaucgccuggagcagcagcagcugccacgacggcaaggccuggcugcacgugugcgugaccggcgacgacaagaacgccaccgccagcuucaucuacaacggcagacugguggacagcaucgugagcuggagcaaggagauccugagaacccaggagagcgagugcgugugcaucaacggcaccugcaccguggugcugaccgacggcagcgccagcggcaaggccgacaccaagauccuguucaucgaggagggcaagaucgugcacaccagcaagcugagcggcagcgcccagcacguggaggagugcagcugcuaccccagauaccccggcgugagaugcgugugcagagacaacuggaagggcagcaacagacccaucguggacaucaacaucaaggacuacagcaucgugagcagcuacgugugcagcggccuggugggcgacacccccagaaagaacgacagcagcagcagcggccacugccuggaccccaacaacgaggagggcggccacggcgugaagggcugggccuucgacgacggcaacgacguguggaugggcagaaccaucagcgagaagcugagaagcggcuacgagaccuucaaggugaucgagggcuggagcaaccccaacagcaagcugcagaucaacagacaggugaucguggacagaggcaacagaagcggcuacagcggcaucuucagcguggagggcaagagcugcaucaacagaugcuucuacguggagcugaucagaggcagaaaggaggagaccgaggugcuguggaccagcaacagcaucgugguguucugcggcaccagcggcaccuacggcaccggcagcuggcccgacggcgccgacaucaaccugaugcccaucuga

SEQ ID NO: 176710 - RNA, 1410 nt, Artificial Sequence
  derived and/or modified CDS sequence (opt4) from neuraminidase__InfluenzaA__ACN50245
augaaccccaaccagaagaucaucaccaucggcagcgugagccugaccaucagcaccaucugcuucuucaugcagaucgccauccugaucaccaccgugacccugcacuucaagcaguacgaguucaacagcccccccaacaaccagguggugcugugcgagcccaccaucaucgagagaaacaucaccgagaucguguaccugaccaacaccaccaucgagaaggagaucugccccaagcuggccgaguacagaaacuggagcaagccccagugcgacaucaccggcuucgcccccuucagcaaggacaacagcaucagacugagcgccggcggcgacaucugggugaccagagagcccuacgugagcugcgaccccgacaagugcuaccaguucgcccugggccagggcaccacccugaacaacgugcacagcaacgacaccgugagagacagaacccccuacagaacccugcugaugaacgagcugggcgugcccuuccaccugggcaccaagcaggugugcaucgccuggagcagcagcagcugccacgacggcaaggccuggcugcacgugugcaucaccggcgacgacaagaacgccaccgccagcuucaucuacaacggcagacugguggacagcaucgugagcuggagcaaggagauccugagaacccaggagagcgagugcgugugcaucaacggcaccugcaccguggugaugaccgacggcagcgccagcggcaaggccgacaccaagauccuguucaucgaggagggcaagaucgugcacaccagcacccugagcggcagcgcccagcacguggaggagugcagcugcuaccccagauaccccggcgugagaugcgugugcagagacaacuggaagggcagcaacagacccaucguggacaucaacaucaaggaccacagcaucgugagcagcuacgugugcagcggccuggugggcgacacccccagaaagaacgacagcagcagcagcagccacugccuggaccccaacaacgaggagggcggccacggcgugaagggcugggccuucgacgacggcaacgacguguggaugggcagaaccaucagcgagaagagcagacugggcuacgagaccuucaaggugaucgagggcuggagcaaccccaagagcaagcugcagaucaacagacaggugaucguggacagaggcgacagaagcggcuacagcggcaucuucagcguggagggcaagagcugcaucaacagaugcuucuacguggagcugaucagaggcagaaaggaggagaccgaggugcuguggaccagcaacagcaucgugguguucugcggcaccagcggcaccuacggcaccggcagcuggcccgacggcgccgacaucaaccugaugcccaucuga

SEQ ID NO: 176711 - RNA, 1413 nt, Artificial Sequence
  derived and/or modified CDS sequence (opt4) from neuraminidase__InfluenzaA__ACN72609
augaaccccaaccagaagaucaucaccaucggcagcaucagcaucgccaucggcaucaucagccugaugcugcagaucggcaacaucaucagcaucugggccagccacagcauccagaccggcagccagaacaacaccggcaucugcaaccagagaaucaucaccuacgagaacagcaccugggugaaccacaccuacgugaacaucaacaacaccaacgugguggccggcgaggacaagaccagcgugacccuggccggcaacagcagccugugcagcaucagcggcugggccaucuacaccaaggacaacagcaucagaaucggcagcaagggcgacguguucgugaucagagagcccuucaucagcugcagccaccuggagugcagaaccuucuuccugacccagggcgcccugcugaacgacaagcacagcaacggcaccgugaaggacagaagccccuacagagcccugaugagcugcccccugggcgaggcccccagccccuacaacagcaaguucgagagcguggccuggagcgccagcgccugccacgacggcaugggcuggcugaccaucggcaucagcggccccgacaacggcgccguggccgugcugaaguacaacggcaucaucaccggcaccaucaagagcuggaagaagcagauccugagaacccaggagagcgagugcgugugcaugaacggcagcugcuucaccaucaugaccgacggccccagcaacaaggccgccagcuacaagaucuucaagaucgagaagggcaaggugaccaagagcaucgagcugaacgcccccaacuuccacuacgaggagugcagcugcuaccccgacaccggcaucgugaugugcgugugcagagacaacuggcacggcagcaacagacccugggugagcuucaaccagaaccuggacuacaagaucggcuacaucugcagcggcguguucggcgacaaccccagacccgaggacggcgagggcagcugcaaccccgugaccguggacggcgccaacggcgugaagggcuucagcuacaaguacgacaacggcguguggaucggcagaaccaagagcaacagacugagaaagggcuucgagaugaucugggaccccaacggcuggaccaacaccgacagcgacuucagcgugaagcaggacgugguggccaucaccgacuggagcggcuacagcggcagcuucgugcagcaccccgagcugaccggccuggacugcaucagacccugcuucuggguggagcuggugagaggccugcccagagagaacaccaccaucuggaccagcggcagcagcaucagcuucugcggcgugaacagcgacaccgccaacuggagcuggcccgacggcgccgagcugcccuucaccaucgacaaguga

SEQ ID NO: 176712 - RNA, 1410 nt, Artificial Sequence
  derived and/or modified CDS sequence (opt4) from neuraminidase__InfluenzaA__ACN72621
augaaccccaaccagaagaucaucaucaucagcagcaucugcaugaccaacggcaucgccagccugauccugcagaucggcaacaucaucagcaucuggaucagccacagcauccagaccggcaaccagaaccagaccgagaccugcaaccagagcgugaucaucuacgagaacaacaccugggugaaccagaccuacgugaacaucagcaacaacaacuucguggccgagcagaccguggugcccgugaagcuggugggcagcagcccccugugccccgugagcggcugggccaucuacagcaaggacaacagcgugagaaucggcagcaagggcgacguguucgugaucagagagcccuucaucagcugcagccaccuggagugcagaaccuucuuccugacccagggcgcccugcugaacgacaagcacagcaacggcaccgugaaggacagaagccccuacagaacccugaugagcugccccaucggcgaggugcccagccccuacaacagcagauucgagagcguggccuggagcgccagcgccugccacgacggcagcagcuggcugaccaucggcaucagcggccccgacaacggcgccguggccgugcugaaguacaacgacaucaucaccgacaccaucaagagcuggaagaacaacauccugagaacccaggagagcgagugcgccugccugaacggcagcugcuucaccgugaugaccgacggccccagcaacggccaggccagcuacaagaucuucaagaucgagaagggcaagguggugaagagcguggagcugaacgcccccaacuaccacuacgaggagugcagcugcuaccccgacagcggcgagaucaucugcgugugcagagacaacuggcacggcagcaacagacccugggugagcuucaaccagaaccuggaguaccagaucggcuacaucugcagcggcgugcugggcgacaaccccagacccaacgacagaaccggcaacugcggccccgugagcagccacggcgccaacggcgugaagggcuucagcuucaaguacggcgacggcaucuggaucggcagaaccaagagcaccagcagcagaagcggcuucgagaugaucugggaccccaacggcuggaccggcaccgacaacaacuucagcgugaagcaggacaucgugggcaucaccgacuggaccggcuacagcggcagcuucgugcagcaccccgagcugaccggccuggacugcaucagacccugcuucuggguggagcugaucagaggcagacccaaggagaacaccaucuggaccagcggcagcagcaucagcuucugcggcgugaacagcgacaccgugggcuggagcuggcccgacggcgccgagcugcccuucaccaucgacaaguga

SEQ ID NO: 176713 - RNA, 1410 nt, Artificial Sequence; identical to SEQ ID NO: 176572
  derived and/or modified CDS sequence (opt4) from neuraminidase__InfluenzaA__ACN76503

SEQ ID NO: 176714 - RNA, 1410 nt, Artificial Sequence
  derived and/or modified CDS sequence (opt4) from neuraminidase__InfluenzaA__ACO36345
augaaccccaaccagaagaucaucaccaucggcagcgugagccugaccaucagcaccaucugcuucuucaugcagaucgccauccugaucaccaccgugacccugcacuucaagcaguacgaguucaacagcagccccaacaaccaggugaugcagugcgagcccaccaucaucgagagaaacaucaccgagaucguguaccugaccaacaccaccaucgagaaggagaucugccccaagcuggccgaguacagaaacuggagcaagccccagugcgacaucaccggcuucgcccccuucagcaaggacaacagcaucagacugagcgccggcggcgacaucugggugaccagagagcccuacgugagcugcgaccccgacaagugcuaccaguucgcccugggccagggcaccacccugaacaacgugcacagcaacaacaccgugagagacagaacccccuacagaacccugcugaugaacgagcugggcgugcccuuccaccugggcaccaagcaggugugcaucgccuggagcagcagcagcugccacgacggcaaggccuggcugcacgugugcaucaccggcgacgacaagaacgccaccgccagcuucaucuacaacggcagacugguggacagcaucgugagcuggagcaaggagauccugagaacccaggagagcgagugcgugugcaucaacggcaccugcaccguggugaugaccgacggcagcgccagcggcaaggccgacaccaagauccuguucaucgaggagggcaagaucgugcacaccagcacccugagcggcagcgcccagcacguggaggagugcagcugcuaccccagauaccccggcgugagaugcgugugcagagacaacuggaagggcagcaacagacccaucguggacaucaacaucaaggaccacagcaucgugagcagcuacgugugcagcggccuggugggcgacacccccagaaagaacgacagcagcagcagcagccacugccuggaccccaacaacgaggagggcggccacggcgugaagggcugggccuucgacgacggcaacgacguguggaugggcagaaccaucagcgagaagagcagacugggcuacgagaccuucaaggugaucgagggcuggagcaaccccaagagcaagcugcagaucaacagacaggugaucguggacagaggcaacagaagcggcuacagcggcaucuucagcguggagggcaagagcugcaucaacagaugcuucuacguggagcugaucagaggcagaaaggaggagaccgaggugcuguggaccagcaacagcaucgugguguucugcggcaccagcggcaccuacggcaccggcagcuggcccgacggcgccgacaucaaccugaugcccaucuga

SEQ ID NO: 176715 - RNA, 1410 nt, Artificial Sequence; identical to SEQ ID NO: 175040
  derived and/or modified CDS sequence (opt4) from neuraminidase__InfluenzaA__ACO36356

SEQ ID NO: 176716 - RNA, 1410 nt, Artificial Sequence
  derived and/or modified CDS sequence (opt4) from neuraminidase__InfluenzaA__ACO36367
augaaccccaaccagaagaucaucaccaucggcagcgugagccugaucaucagcaccaucugcuucuucaugcagaccgccauccugaucaccaccgugacccugcacuucaagcaguacgaguucaacagcccccccaacaaccaggugaugcugugcgagcccaccaucaucgagagaaacaucaccgagaucguguaccugaccaacaccaccaucgagaaggagaucugccccaagcuggccgaguacagaaacuggagcaagccccagugcgacaucaccggcuucgcccccuucagcaaggacaacagcaucagacugagcgccggcggcgacaucugggugaccagagagcccuacgugagcugcgaccccgacaagugcuaccaguucgcccugggccagggcaccacccugaacaacgugcacagcaacgacaccgugagaaacagaacccccuacagaacccugcugaugaacgagcugggcgugcccuuccaccugggcaccaagcaggugugcaucgccuggagcagcagcagcugccacgacggcaaggccuggcugcacgugugcaucaccggcgacgacaagaacgccaccgccagcuucaucuacaacggcagacugguggacagcaucgugagcuggagcaaggagauccugagaacccaggagagcgagugcgugugcaucaacggcaccugcaccguggugaugaccgacggcagcgccagcggcaaggccgacaccaagauccuguucaucgaggagggcaagaucgugcacaccagcacccugagcggcagcgcccagcacguggaggagugcagcugcuaccccagauaccccggcgugagaugcgugugcagagacaacuggaagggcagcaacagacccaucguggacaucaacaucaaggaccacagcaucgugagcagcuacgugugcagcggccuggugggcgacacccccagaaagaacgacagcagcagcagcagccacugccuggaccccaacaacgaggagggcggccacggcgugaagggcugggccuucgacgacggcaacgacguguggaugggcagaaccaucagcgagaagagcagacugggcuacgagaccuucaaggugaucgagggcuggagcaaccccaagagcaagcugcagaucaacagacaggugaucguggacagaggcaacagaagcggcuacagcggcaucuucagcguggagggcaagagcugcaucaacagaugcuucuacguggagcugaucagaggcagaaaggaggagaccgaggugcuguggaccagcaacagcaucgugguguucugcggcaccagcggcaccuucggcaccggcagcuggcccgacggcgccgacaucaaccugaugcccaucuga

SEQ ID NO: 176717 - RNA, 1413 nt, Artificial Sequence; identical to SEQ ID NO: 176692
  derived and/or modified CDS sequence (opt4) from neuraminidase__InfluenzaA__ACO36400

SEQ ID NO: 176718 - RNA, 1410 nt, Artificial Sequence
  derived and/or modified CDS sequence (opt4) from neuraminidase__InfluenzaA__ACO36411
augaaccccaaccagaagaucaucaccaucggcagcgugagccugaccaucagcaccaucggcuucuucaugcagaccgccauccugaucaccaccgugacccugcacuucaagcaguacgaguucaacagcccccccaacaaccaggugaugcugugcgagcccaccaucaucgagagaaacaucaccgagaucguguaccugaccaacaccaccaucgagaaggagaucugccccaagcuggccgaguacagaaacuggagcaagccccagugcgacaucaccggcuucgcccccuucagcaaggacaacagcaucagacugagcgccggcggcgacaucugggugaccagagagcccuacgugagcugcgaccccgacaagugcuaccaguucgcccugggccagggcaccacccugaacaacgugcacagcaacgacaccgugagaggcagaacccccuacagaacccugcugaugaacgagcugggcgugcccuuccaccugggcaccaagcaggugugcaucgccuggagcagcagcagcugccacgacggcaaggccuggcugcacgugugcaucaccggcgacgacaagaacgccaccgccagcuucaucuacaacggcagacugguggacagcaucgugagcuggagcaaggagauccugagaacccaggagagcgagugcgugugcaucaacggcaccugcaccguggugaugaccgacggcagcgccagcggcaaggccgacaccaagauccuguucaucgaggagggcaagaucgugcacaccagcacccugagcggcagcgcccagcacguggaggagugcagcugcuaccccagauaccccggcgugagaugcgugugcagagacaacuggaagggcagcaacagacccaucguggacaucaacaucaaggaccacagcaucgugagcagcuacgugugcagcggccuggugggcgacacccccagaaagaacgacagcagcagcagcagccacugccuggaccccaacaacgaggagggcggccacggcgugaagggcugggccuucgacgacggcaacgacguguggaugggcagaaccaucagcgagaagagcagacugggcuacgagaccuucaaggugaucgagggcuggagcaaccccaagagcaagcugcagaucaacagacaggugaucguggacagaggcaacagaagcggcuacagcggcaucuucagcguggagggcaagagcugcaucaacagaugcuucuacguggagcugaucagaggcagaaaggaggagaccgaggugcuguggaccagcaacagcaucgugguguucugcggcaccagcggcaccuacggcaccggcagcuggcccgacggcgccgacaucaaccugaugcccaucuga

SEQ ID NO: 176719 - RNA, 1410 nt, Artificial Sequence
  derived and/or modified CDS sequence (opt4) from neuraminidase__InfluenzaA__ACO36422
augaaccccaaccagaagaucaucaccaucggcagcgugagccugaucaucagcaccaucugcuucuucaugcagaccgccauccugaucaccaccgugacccugcacuucaagcaguacgaguucaacagcccccccaacaaccaggugaugcugugcgagcccaccaucaucgagagaaacaucaccgagaucguguaccugaccaacaccaccaucgagaaggagaucugccccaagcuggccgaguacagaaacuggagcaagccccagugcgacaucaccggcuucgcccccuucagcaaggacaacagcaucagacugagcgccggcggcgacaucugggugaccagagagcccuacgugagcugcgaccccgacaagugcuaccaguucgcccugggccagggcaccacccugaacaacgugcacagcaacgacaccgugagaggcagaacccccuacagaacccugcugaugaacgagcugggcgugcccuuccaccugggcaccaagcaggugugcaucgccuggagcagcagcagcugccacgacggcaaggccuggcugcacgugugcaucaccggcgacgacaagaacgccaccgccagcuucaucuacaacggcagacugguggacagcaucgugagcuggagcaaggagauccugagaacccaggagagcgagugcgugugcaucaacggcaccugcaccguggugaugaccgacggcagcgccagcggcaaggccgacaccaagauccuguucaucgaggagggcaagaucgugcacaccagcacccugagcggcagcgcccagcacguggaggagugcagcugcuaccccagauaccccggcgugagaugcgugugcagagacaacuggaagggcagcaacagacccaucguggacaucaacaucaaggaccacagcaucgugagcagcuacgugugcagcggccuggugggcgacacccccagaaagaacgacagcagcagcagcagccacugccuggaccccaacaacgaggagggcggccacggcgugaagggcugggccuucgacgacggcaacgacguguggaugggcagaaccaucagcgagaagagcagacugggcuacgagaccuucaaggugaucgagggcuggagcaaccccaagagcaagcugcagaucaacagacaggugaucguggacagaggcaacagaagcggcuacagcggcaucuucagcguggagggcaagagcugcaucaacagaugcuucuacguggagcugaucagaggcagaaaggaggagaccgaggugcuguggaccagcaacagcaucgugguguucugcggcaccagcggcaccuacggcaccggcagcuggcccgacggcgccgacaucaaccugaugcccaucuga

SEQ ID NO: 176720 - RNA, 1410 nt, Artificial Sequence; identical to SEQ ID NO: 176476
  derived and/or modified CDS sequence (opt4) from neuraminidase__InfluenzaA__ACO36433

SEQ ID NO: 176721 - RNA, 1410 nt, Artificial Sequence
  derived and/or modified CDS sequence (opt4) from neuraminidase__InfluenzaA__ACO36444
augaaccccaaccagaagaucaucaccaucggcagcgugagccugaccaucgccaccaucugcuuccugaugcagaucgccauccuggugaccaccgugacccugcacuucaagcagcacgagugcaacagcccccccaacaaccaggugaugcugugcgagcccaccaucaucgagagaaacaucaccgagaucguguaccugaccaacaccaccaucgagaaggagaagugccccaagcuggccgaguacagaaacuggagcaagccccagugcaacaucaccggcuucgcccccuucagcaaggacaacagcaucagacugagcgccggcggcgacaucugggugaccagagagcccuacgugagcugcgaccccgacaagugcuaccaguucgcccugggccagggcaccacccugaacaacggccacagcaacaacaccgugcacgacagaacccccuacagaacccugcugaugaacgagcugggcgugcccuuccaccugggcaccagacaggugugcaucgccuggagcagcagcagcugccacgacggcaaggccuggcugcacgugugcgugaccggcgacgacaagaacgccaccgccagcuucaucuacaacggcagacugguggacagcaucggcagcuggagcaagaagauccugagaacccaggagagcgagugcgugugcaucaacggcaccugcaccguggugaugaccgacggcagcgccagcgagaaggccgacaccaagauccuguucaucgaggagggcaagaucgugcacaucagcacccugagcggcagcgcccagcacguggaggagugcagcugcuaccccagauaccccggcgugagaugcgugugcagagacaacuggaagggcagcaacagacccaucguggacaucaacgugaaggacuacagcaucgugagcagcuacgugugcagcggccuggugggcgacacccccagaaagaacgacagcuucagcagcagccacugccuggaccccaacaacgaggagggcggccacggcgugaagggcugggccuucgacgacggcaacgacguguggaugggcagaaccaucagcgagaagcugagaagcggcuacgagaccuucaaggugaucgagggcuggagcaagcccaacagcaagcugcagaucaacagacaggugaucguggagagaggcaacagaagcggcuacagcggcaucuucagcguggagggcaagagcugcaucaacagaugcuucuacguggagcugaucagaggcagaaaggaggagaccgaggugugguggaccagcaacagcaucgugguguucugcggcaccagcggcaccuacggcaccggcagcuggcccgacggcgccgacaucaaccugaugcccaucuga

SEQ ID NO: 176722 - RNA, 1410 nt, Artificial Sequence
  derived and/or modified CDS sequence (opt4) from neuraminidase__InfluenzaA__ACO36466
augaaccccaaccagaagaucaucaccaucggcagcgugagccugaccaucagcaccaucugcuucuucaugcagaucgccauccugaucaccaccgugacccugcacuucaagcaguacgaguucaacagcccccccaacaaccaggugaugcugugcgagcccaccaucaucgagagaaacaucaccgagaucgccuaccugaccaacaccaccaucgagaaggagaucugccccaagcuggccgaguacagaaacuggagcaagccccagugcaacaucaccggcuucgcccccuucagcaaggacaacagcaucagacugagcgccggcggcgacaucugggugaccagagagcccuacgugagcugcgaccccgacaagugcuaccaguucgcccugggccagggcaccacccugaacaacgugcacagcaacgacaccgugcacgacagaacccccuacagaacccugcugaugaacgagcugggcgugcccuuccaccugggcaccaagcaggugugcaucgccuggagcagcagcagcugccacgacggcaaggccuggcugcacgugugcgugaccggcgacgacgagaacgccaccgccagcuucaucuacaacggcagacugguggacagcguggugagcuggagcaagaagauccugagaacccaggagagcgagugcgugugcaucaacggcaccugcaccguggugaugaccgacggcagcgccagcggcaaggccgacaccaagauccuguucaucgaggagggcaagaucgugcacaccagcacccugagcggcagcgcccagcacguggaggagugcagcugcuaccccagauaccccggcgugagaugcgugugcagagacaacuggaagggcagcaacagacccaucguggacaucaacaucaaggacuacagcaucgugagcagcuacgugugcagcggccuggugggcgacacccccagaaagaacgacagcagcagcagcagccacugccuggaccccaacaacgaggagggcggccacggcgugaagggcugggccuucgacgacggcaacgacguguggaugggcagaaccaucagcgagaagcugagaagcggcuacgagaccuucaaggugaucgagggcuggagcaaccccaacagcaagcugcagaucaacagacaggugaucguggacagaggcaacagaagcggcuacagcggcaucuucagcguggagggcaagagcugcaucaacagaugcuucuacguggagcugaucagaggcagaaaccaggagaccgaggugcuguggaccagcaacagcaucgugguguucugcggcaccagcggcaccuacggcaccggcagcuggcccgacggcgccgacaucaaccugaugcccaucuga

SEQ ID NO: 176723 - RNA, 1410 nt, Artificial Sequence
  derived and/or modified CDS sequence (opt4) from neuraminidase__InfluenzaA__ACO36477
augaaccccaaccagaagaucaucaccaucggcagcgugagccugaccaucgccaccaucugcuuccugaugcagaucgccauccuggugaccaccgugacccugcacuucaagcagcacgagugcaacagcccccccaacaaccaggugaugcugugcgagcccaccaucaucgagagaaacaucaccgagaucguguaccugaccaacaccaccaucgagaaggagaucugccccaagcuggccgaguacagaaacuggagcaagccccagugcaacaucaccggcuucgcccccuucagcaaggacaacagcaucagacugagcgccggcggcgacaucugggugaccagagagcccuacgugagcugcgaccccgacaagugcuaccaguucgcccugggccagggcaccacccugaacaacggccacagcaacgacaccgugcacgacagaacccccuacagaacccugcugaugaacgagcugggcgugcccuuccaccugggcaccagacaggugugcaucgccuggagcagcagcagcugccacgacggcaaggccuggcugcacgugugcgugaccggcgacgacaagaacgccaccgccagcuucaucuacaacggcagacugguggacagcaucggcagcuggagcaagaacauccugagaacccaggagagcgagugcgugugcaucaacggcaccugcaccguggugaugaccgacggcagcgccagcggcaaggccgacaccaagauccuguucaucgaggagggcaagaucgugcacaucagcacccugagcggcagcgcccagcacguggaggagugcagcugcuaccccagauaccccggcgugagaugcgugugcagagacaacuggaagggcagcaacagacccaucguggacaucaacgugaaggacuacagcaucgugagcagcuacgugugcagcggccuggugggcgacacccccagaaagaacgacagcuucagcagcagccacugccuggaccccaacaacgaggagggcggccacggcgugaagggcugggccuucgacgacggcaacgacguguggaugggcagaaccaucagcgagaagcugagaagcggcuacgagaccuucaaggugaucgagggcuggagcaagcccaacagcaagcugcagaucaacagacaggugaucguggagagaggcaacagaagcggcuacagcggcaucuucagcguggagggcaagagcugcaucaacagaugcuucuacguggagcugaucagaggcagaaaggaggagaccgaggugugguggaccagcaacagcaucgugguguucugcggcaccagcggcaccuacggcaccggcagcuggcccgacggcgccgacaucaaccugaugcccaucuga

SEQ ID NO: 176724 - RNA, 1410 nt, Artificial Sequence
  derived and/or modified CDS sequence (opt4) from neuraminidase__InfluenzaA__ACO36499
augaaccccaaccagaagaucaucaccaucggcagcgugagccugaccaucagcaccaucugcuucuucaugcagaucgccauccugaucaccaccgugacccugcacuucaagcaguacgaguucaacagcccccccaacaaccaggugaugcugugcgagcccaccaucaucgagagaaacaucaccgagaucguguaccugaccaacaccaccaucgagaaggagaucugccccaagcuggccgaguacagaaacuggagcaagccccagugcaacaucaccggcuucgcccccuucagcaaggacaacagcaucagacugagcgccggcggcgacaucugggugaccagagagcccuacgugagcugcgaccccgacaagugcuaccaguucgcccugggccagggcaccacccugaacaacgugcacagcaacgacaccgugcacgacagaacccccuacagaacccugcugaugaacgagcugggcgugcccuuccaccugggcaccaagcaggugugcaucgccuggagcagcagcagcugccacgacggcaaggccuggcugcacgugugcgugaccggcgacgacaagaacgccaccgccagcuucaucuacaacggcagacugguggacagcguggugagcuggagcaagaagauccugagaacccaggagagcgagugcgugugcaucaacggcaccugcaccguggugaugaccgacggcagcgccagcggcaaggccgacaccaagauccuguucaucgaggagggcaagaucgugcacaccagcacccugagcggcagcgcccagcacguggaggagugcagcugcuaccccagauaccccggcgugagaugcgugugcagagacaacuggaagggcagcaacagacccaucguggacaucaacaucaaggacuacagcaucgugagcagcuacgugugcagcggccuggugggcgacacccccagaaagaacgacagcagcagcagcagccacugccuggaccccaacaacgaggagggcggccacggcgugaagggcugggccuucgacgacggcaacgacguguggaugggcagaaccaucagcgagaagcugagaagcggcuacgagaccuucaaggugaucgagggcuggagcaaccccaacagcaagcugcagaucaacagacaggugaucguggacagaggcaacagaagcggcuacagcggcaucuucagcguggagggcaagagcugcaucaacagaugcuucuacguggagcugaucagaggcagaaaccaggagaccgaggugcuguggaccagcaacagcaucgugguguucugcggcaccagcggcaccuacggcaccggcagcuggcccgacggcgccgacaucaaccugaugcccaucuga

SEQ ID NO: 176725 - RNA, 1410 nt, Artificial Sequence; identical to SEQ ID NO: 174387
  derived and/or modified CDS sequence (opt4) from neuraminidase__InfluenzaA__ACO36510

SEQ ID NO: 176726 - RNA, 1410 nt, Artificial Sequence; identical to SEQ ID NO: 174387
  derived and/or modified CDS sequence (opt4) from neuraminidase__InfluenzaA__ACO36543

SEQ ID NO: 176727 - RNA, 1410 nt, Artificial Sequence; identical to SEQ ID NO: 174387
  derived and/or modified CDS sequence (opt4) from neuraminidase__InfluenzaA__ACO36554

SEQ ID NO: 176728 - RNA, 1410 nt, Artificial Sequence; identical to SEQ ID NO: 174387
  derived and/or modified CDS sequence (opt4) from neuraminidase__InfluenzaA__ACO36565

SEQ ID NO: 176729 - RNA, 1410 nt, Artificial Sequence
  derived and/or modified CDS sequence (opt4) from neuraminidase__InfluenzaA__ACO36576
augaaccccaaccagaagaucaucaccaucggcagcgugagccugaccaucagcaccaucugcuucuucaugcagaucgccauccugaucaccaccgugacccugcacuucaagcaguacgaguucaacagcccccccaacaaccaggugaugcugugcgagcccaccaucaucgagagaaacaucaccgagaucguguaccugaccaacaccaccaucgagaaggagaucugccccaagcuggccgaguacagaaacuggagcaagccccagugcgacaucaccggcuucgcccccuucagcaaggacaacagcaucagacugagcgccggcggcgacaucugggugaccagagagcccuacgugagcugcgaccccgacaagugcuaccaguucgcccugggccagggcaccacccugaacaacgugcacagcaacgacaccgugcacgacagaacccccuacagaacccugcugaugaacgagcugggcgugcccuuccaccugggcaccaagcaggugugcaucgccuggagcagcagcagcugccacgacggcaaggccuggcugcacgugugcgugaccggcgacgacaagaacgccaccgccagcuucaucuacaacggcagacugguggacagcaucgugagcuggagcaaggagauccugagaacccaggagagcgagugcgugugcaucaacggcaccugcaccguggugaugaccgacggcagcgccagcggcaaggccgacaccaagauccuguucaucgaggagggcaagaucgugcacaccagcacccugagcggcagcgcccagcacguggaggagugcagcugcuaccccagauaccccggcgugagaugcgugugcagagacaacuggaagggcagcaacagacccaucguggacaucaacaucaaggacuacagcaucgugagcagcuacgugugcagcggccuggugggcgacacccccagaaagaacgacagcagcagcagcagccacugccuggaccccaacaacgaggagggcggccacggcgugaagggcugggccuucgacgacggcaacgacguguggaugggcagaaccaucagcgagaagcugagaagcggcuacgagaccuucaaggugaucgagggcuggagcaaccccaacagcaagcugcagaucaacagacaggugaucgugggcagaggcaacagaagcggcuacagcggcaucuucagcguggagggcaagagcugcaucaacagaugcuucuacguggagcugaucagaggcagaaaggaggagaccgaggugcuguggaccagcaacagcaucgugguguucugcggcaccagcggcaccuacggcaccggcagcuggcccgacggcgccgacaucaaccugaugcccaucuga

SEQ ID NO: 176730 - RNA, 1410 nt, Artificial Sequence; identical to SEQ ID NO: 174387
  derived and/or modified CDS sequence (opt4) from neuraminidase__InfluenzaA__ACO36587

SEQ ID NO: 176731 - RNA, 1410 nt, Artificial Sequence; identical to SEQ ID NO: 174772
  derived and/or modified CDS sequence (opt4) from neuraminidase__InfluenzaA__ACO36609

SEQ ID NO: 176732 - RNA, 1410 nt, Artificial Sequence
  derived and/or modified CDS sequence (opt4) from neuraminidase__InfluenzaA__ACO36620
augaaccccaaccagaagaucaucaccaucggcagcgugagccugaccaucagcaccaucugcuucuucaugcagaucgccauccugaucaccaccgugacccugcacuucaagcaguacgaguucaacagcccccccaacaaccaggugaugcugugcgagcccaccaucaucgagagaaacaucaccgagaucguguaccugaccaacaccaccaucgagaaggagaucugccccaagcuggccgaguacagaaacuggagcaagccccagugcaacaucaccggcuucgcccccuucagcaaggacaacagcaucagacugagcgccggcggcgacaucugggugaccagagagcccuacgugagcugcgaccccgacaagugcuaccaguucgcccugggccagggcaccacccugaacaacgugcacagcaacgacaccgugcacgacagaacccccuacagaacccugcugaugaacgagcugggcgugcccuuccaccugggcaccaagcaggugugcaucgccuggagcagcagcagcugccacgacggcaaggccuggcugcacgugugcgugaccggcgacgacaagaacgccaccgccagcuucaucuacaacggcagacugguggacagcaucgugagcuggagcaaggagauccugagaacccaggagagcgagugcgugugcaucaacggcaccugcaccguggugaugaccgacggcagcgccagcggcaaggccgacaccaagauccuguucaucgaggagggcaagaucgugcacaccagcacccugagcggcagcgcccagcacguggaggagugcagcugcuaccccagauaccccggcgugagaugcgugugcagagacaacuggaagggcagcaacagacccaucguggacaucaacaucaaggacuacagcaucgugagcagcuacgugugcagcggccuggugggcgacacccccagaaagaacgacagcagcagcagcagccacugccuggaccccaacaacgaggagggcggccacggcgugaagggcugggccuucgacgacggcaacgacguguggaugggcagaaccaucagcgagaagcugagaagcggcuacgagaccuucaaggugaucgagggcuggagcaaccccaacagcaagcugcaggugaacagacaggugaucguggacagaggcaacagaagcggcuacagcggcaucuucagcguggagggcaagagcugcaucaacagaugcuucuacguggagcugaucagaggcagaaaggaggagaccgaggugcuguggaccagcaacagcaucgugguguucugcggcaccagcggcaccuacggcaccggcagcuggcccgacggcgccgacaucaaccugaugcccaucuga

SEQ ID NO: 176733 - RNA, 1410 nt, Artificial Sequence; identical to SEQ ID NO: 174772
  derived and/or modified CDS sequence (opt4) from neuraminidase__InfluenzaA__ACO36631

SEQ ID NO: 176734 - RNA, 1410 nt, Artificial Sequence; identical to SEQ ID NO: 174772
  derived and/or modified CDS sequence (opt4) from neuraminidase__InfluenzaA__ACO36653

SEQ ID NO: 176735 - RNA, 1410 nt, Artificial Sequence
  derived and/or modified CDS sequence (opt4) from neuraminidase__InfluenzaA__ACO36675
augaaccccaaccagaagaucaucaccaucggcagcgugagccugaccaucagcaccaucugccuguucaugcagaucgccauccugaucaccaccgugacccugcacuucaagcaguacgaguucaacagcccccccaacaaccaggugaugcugugcgagcccaccaucaucgagagaaacaucaccgagaucguguaccugaccaacaccaccaucgagaaggagaucugccccaagcuggccgaguacagaaacuggagcaagccccagugcaacaucaccggcuucgcccccuucagcaaggacaacagcaucagacugagcgccggcggcgacaucugggugaccagagagcccuacgugagcugcgaccccgacaagugcuaccaguucgcccugggccagggcaccacccugaacaacgugcacagcaacgacaccgugcacgacagaacccccuacagaacccugcugaugaacgagcugggcgugcccuuccaccugggcaccaagcaggugugcaucgccuggagcagcagcagcugccacgacggcaaggccuggcugcacgugugcgugaccggcgacgacaagaacgccaccgccagcuucaucuacaacggcagacugguggacagcaucgugagcuggagcaaggagauccugagaacccaggagagcgagugcgugugcaucaacggcaccugcaccguggugaugaccgacggcagcgccagcggcaaggccgacaccaagauccuguucaucgaggagggcaagaucgugcacaccagcacccugagcggcagcgcccagcacguggaggagugcagcugcuaccccagauaccccggcgugagaugcgugugcagagacaacuggaagggcagcaacagacccaucguggacaucaacaucaaggacuacagcaucgugagcagcuacgugugcagcggccuggugggcgacacccccagaaagaacgacagcagcagcagcagccacugccuggaccccaacaacgaggagggcggccacggcgugaagggcugggccuucgacgacggcaacgacguguggaugggcagaaccaucagcgagaagcugagaagcggcuacgagaccuucaaggugaucgagggcuggagcaaccccaacagcaagcugcagaucaacagacaggugaucguggacagaggcaacagaagcggcuacagcggcaucuucagcguggagggcaagagcugcaucaacagaugcuucuacguggagcugaucagaggcagaaaggaggagaccgaggugcuguggaccagcaacagcaucgugguguucugcggcaccagcggcaccuacggcaccggcagcuggcccgacggcgccgacaucaaccugaugcccaucuga

SEQ ID NO: 176736 - RNA, 1410 nt, Artificial Sequence
  derived and/or modified CDS sequence (opt4) from neuraminidase__InfluenzaA__ACO36686
augaaccccaaccagaagaucaucaccaucggcagcgugagccugaccaucagcaccaucugcuucuucaugcagaucgccauccugaucaccaccgugacccugcacuucaagcaguacgaguucaacagcccccccaacaaccaggugaugcugugcgagcccaccaucaucgagagaaacaucaccgagaucguguaccugaccaacaccaccaucgagaaggagaucugccccaagcuggccgaguacagaaacuggagcaagccccagugcaacaucaccggcuucgcccccuucagcaaggacaacagcaucagacugagcgccggcggcgacaucugggugaccagagagcccuacgugagcugcgaccacgacaagugcuaccaguucgcccugggccagggcaccacccugaacaacgugcacagcaacgacaccgugcacgacagaacccccuacagaacccugcugaugaacgagcugggcgugcccuuccaccugggcaccaagcaggugugcaucgccuggagcagcagcagcugccacgacggcaaggccuggcugcacgugugcgugaccggcgacgacaagaacgccaccgccagcuucaucuacaacggcagacugguggacagcaucgugagcuggagcaaggagauccugagaacccaggagagcgagugcgugugcaucaacggcaccugcaccguggugaugaccgacggcagcgccagcggcaaggccgacaccaagauccuguucaucgaggagggcaagaucgugcacaccagcacccugagcggcagcgcccagcacguggaggagugcagcugcuaccccagauaccccggcgugagaugcgugugcagagacaacuggaagggcagcaacagacccaucguggacaucaacaucaaggacuacagcaucgugagcagcuacgugugcagcggccuggugggcgacacccccagaaagaacgacagcagcagcagcagccacugccuggaccccaacaacgaggagggcggccacggcgugaagggcugggccuucgacgacggcaacgacguguggaugggcagaaccaucagcgagaagcugagaagcggcuacgagaccuucaaggugaucgagggcuggagcaaccccaacagcaagcugcagaucaacagacaggugaucguggacagaggcaacagaagcggcuacagcggcaucuucagcguggagggcaagagcugcaucaacagaugcuucuacguggagcugaucagaggcagaaaggaggagaccgaggugcuguggaccagcaacagcaucgugguguucugcggcaccagcggcaccuacggcaccggcagcuggcccgacggcgccgacaucaaccugaugcccaucuga

SEQ ID NO: 176737 - RNA, 1410 nt, Artificial Sequence
  derived and/or modified CDS sequence (opt4) from neuraminidase__InfluenzaA__ACO37125
augaaccccaaccagaagaucaucaccaucggcagcgugagccugaccaucagcaccaucugcuucuucaugcagaucgccauccugaucaccaccgugacccugcacuucaagcaguacgaguucaacagcccccccaacaaccaggugaugcugugcgagcccaccaucaucgagagaaacaucaccgagaucguguaccugaccaacaccaccaucgagaaggagaucugccccaagcuggccgaguacagaaacuggagcaagccccagugcgacaucaccggcuucgcccccuucagcaaggacaacagcaucagacugagcgccggcggcgacaucugggugaccagagagcccuacgugagcugcgaccccgacaagugcuaccaguucgcccugggccagggcaccacccugaacaacgugcacagcaacgacaccgugcacgacagaacccccuacagaacccugcugaugaacgagcugggcgugcccuuccaccugggcaccaagcaggugugcaucgccuggagcagcagcagcugccacgacggcaaggccuggcugcacgugugcgugaccggcgacgacaagaacgccaccgccagcuucaucuacaacggcaugcugguggacagcaucgugagcuggagcaaggagauccugagaacccaggagagcgagugcgugugcaucaacggcaccugcaccguggugaugaccgacggcagcgccagcggcaaggccgacaccaagauccuguucaucgaggagggcaagaucgugcacaccagcacccugagcggcagcgcccagcacguggaggagugcagcugcuaccccagauaccccggcgugagaugcgugugcagagacaacuggaagggcagcaacagacccaucguggacaucaacaucaaggacuacagcaucgugagcagcuacgugugcagcggccuggugggcgacacccccagaaagaacgacagcagcagcagcagccacugccuggaccccaacaacgaggagggcggccacggcgugaagggcugggccuucgacgacggcaacgacguguggaugggcagaaccaucagcgagaagcugagaagcggcuacgagaccuucaaggugaucgagggcuggagcaaccccaacagcaagcugcagaucaacagacaggugaucguggacagaggcaacagaagcggcuacagcggcaucuucagcguggagggcaagagcugcaucaacagaugcuucuacguggagcugaucagaggcagaaaggaggagaccgaggugcuguggaccagcaacagcaucgugguguucugcggcaccagcggcaccuacggcaccggcagcuggcccgacggcgccgacaucaaccugaugcccaucuga

SEQ ID NO: 176738 - RNA, 1410 nt, Artificial Sequence
  derived and/or modified CDS sequence (opt4) from neuraminidase__InfluenzaA__ACO94511
augaaccccaaccagaagaucaucaccaucggcagcgugagccugaccaucagcaccaucugcuucuucaugcagaucgccauccugaucaccaccgugacccugcacuucaagcaguacgaguucaacagcccccccaacaaccaggugaugcugugcgagcccaccaucaucgagagaaacaucaccgagaucguguaccugaccaacaccaccaucgagaaggagaucugccccaagcuggccgaguacagaaacuggagcaagccccagugcgacaucaccggcuucgcccccuucagcaaggacaacagcaucagacugagcgccggcggcgacaucugggugaccagagagcccuacgugagcugcgaccccgacaagugcuaccaguucgcccugggccagggcaccacccugaacaacgugcacagcaacgacaccgugagagacagaacccccuacagaacccugcugaugaacgagcugggcgugcccuuccaccugggcaccaagcaggugugcaucgccuggagcagcagcagcugccacgacggcaaggccuggcugcacgugugcaucaccggcgacgacaagaacgccaccgccagcuucaucuacaacggcagacugguggacagcguggugagcuggagcaaggagauccugagaacccaggagagcgagugcgugugcaucaacggcaccugcaccguggugaugaccgacggcagcgccagcggcaaggccgacaccaagauccuguucaucgaggagggcaagaucgugcacaccagcacccugagcggcagcgcccagcacguggaggagugcagcugcuaccccagauaccccggcgugagaugcgugugcagagacaacuggaagggcagcaacagacccaucguggacaucaacaucaaggaccacagcaucgugagcagcuacgugugcagcggccuggugggcgacacccccagaaagaacgacagcagcagcagcagcaacugccuggaccccaacaacgaggagggcggccacggcgugaagggcugggccuucgacgacggcaacgacguguggaugggcagaaccaucagcgagaagagcagacugggcuacgagaccuucaaggugaucgagggcuggagcaaccccaagagcaagcugcagaucaacagacaggugaucguggacagaggcaacagaagcggcuacagcggcaucuucagcguggagggcaagagcugcaucaacagaugcuucuacguggagcugaucagaggcagaaaggaggagaccgaggugcuguggaccagcaacagcaucgugguguucugcggcaccagcggcaccuacggcaccggcagcuggcccgacggcgccgacaucaaccugaugcccaucuga

SEQ ID NO: 176739 - RNA, 1410 nt, Artificial Sequence; identical to SEQ ID NO: 176572
  derived and/or modified CDS sequence (opt4) from neuraminidase__InfluenzaA__ACO94512

SEQ ID NO: 176740 - RNA, 1410 nt, Artificial Sequence; identical to SEQ ID NO: 176659
  derived and/or modified CDS sequence (opt4) from neuraminidase__InfluenzaA__ACO94513

SEQ ID NO: 176741 - RNA, 1410 nt, Artificial Sequence
  derived and/or modified CDS sequence (opt4) from neuraminidase__InfluenzaA__ACO94675
augaaccccaaccagaagaucaucaccaucggcagcgugagccugaccaucagcaccaucugcuucuucaugcagaucgccauccugaucaccaccgugacccugcacuucaagcaguacgaguucaacagcccccccaacaaccaggugaugcugugcgagcccaccaucaucgagagaaacaucaccgagaucguguaccugaccaacaccaccaucgagaaggagaucugccccaagcuggccgaguacagaaacuggagcaagccccagugcgacaucaccggcuucgcccccuucagcaaggacaacagcaucagacugagcgccggcggcgacaucugggugaccagagagcccuacgugagcugcgaccccgacaagugcuaccaguucgcccugggccagggcaccacccugaacaacgugcacagcaacgacaccgugagagacagaacccccuacagaacccugcugaugaacgagcugggcgugcccuuccaccugggcaccaagcaggugugcaucgccuggagcagcagcagcugccacgacggcaaggccuggcugcacgugugcaucaccggcgacgacaagaacgccaccgccagcuucaucuacaacggcagacugguggacagcguggugagcuggagcaaggagauccugagaacccaggagagcgagugcgugugcaucaacggcaccugcaccguggugaugaccgacggcagcgccagcggcaaggccgacaccaagauccuguucaucgaggagggcaagaucgugcacaccagcacccugagcggcagcgcccagcacguggaggagugcagcugcuaccccagauaccccggcgugagaugcgugugcagagacaacuggaagggcagcaacagacccaucguggacaucaacaucaagaaccacagcaucgugagcagcuacgugugcagcggccuggugggcgacacccccagaaagaacgacagcagcagcagcagccacugccuggaccccaacaacgaggagggcggccacggcgugaagggcugggccuucgacgacggcaacgacguguggaugggcagaaccaucagcgagaagagcagacugggcuacgagaccuucaaggugaucgagggcuggagcaaccccaagagcaagcugcagaucaacagacaggugaucguggacagaggcaacagaagcggcuacagcggcaucuucagcguggagggcaagagcugcaucaacagaugcuucuacguggagcugaucagaggcagaaaggaggagaccgaggugcuguggaccagcaacagcaucgugguguucugcggcaccagcggcaccuacggcaccggcagcuggcccgacggcgccgacaucaaccugaugcccaucuga

SEQ ID NO: 176742 - RNA, 1410 nt, Artificial Sequence
  derived and/or modified CDS sequence (opt4) from neuraminidase__InfluenzaA__ACO94686
augaaccccaaccagaagaucaucaccaucggcagcgugagccugaccaucagcaccaucugcuucuucaugcagaucgccauccugaucaccaccgugacccugcacuucaagcaguacgaguucaacagcccccccaacaaccaggugaugcugugcgagcccaccaccaucgagagaaacaucaccgagaucguguaccugaccaacaccaccaucgagaaggagaucugccccaagcuggccgaguacagaaacuggagcaagccccagugcgacaucaccggcuucgcccccuucagcaaggacaacagcaucagacugagcgccggcggcgacaucugggugaccagagagcccuacgugagcugcgaccccgacaagugcuaccaguucgcccugggccagggcaccacccugaacaacgugcacagcaacgacaccgugagagacagaacccccuacagaacccugcugaugaacgagcugggcgugcccuuccaccugggcaccaagcaggugugcaucgccuggagcagcagcagcugccacgacggcaaggccuggcugcacgugugcaucaccggcgacgacaagaacgccaccgccagcuucaucuacaacggcagacugguggacagcaucgugagcuggagcaaggacauccugagaacccaggagagcgagugcgugugcaucaacggcaccugcaccguggugaugaccgacggcagcgccagcggcaaggccgacaccaagauccuguucaucgaggagggcaagaucgugcacaccagcacccugagcggcagcgcccagcacguggaggagugcagcugcuaccccagauaccccggcgugagaugcgugugcagagacaacuggaagggcagcaacagacccaucguggacaucaacaucaaggaccacagcaucgugagcagcuacgugugcagcggccuggugggcgacacccccagaaagaacgacagcagcagcagcggccacugccuggaccccaacaacgaggagggcggccacggcgugaagggcugggccuucgacgacggcaacgacguguggaugggcagaaccaucagcgagaagagcagacugggcuacgagaccuucaaggugaucgagggcuggagcaaccccaagagcaagcugcagaucaacagacaggugaucguggacagaggcaacagaagcggcuacagcggcaucuucagcguggagggcaagagcugcaucaacagaugcuucuacguggagcugaucagaggcagaaaggaggagaccgaggugcuguggaccagcaacagcaucgugguguucugcggcaccagcggcaccuacggcaccggcagcuggcccgacggcgccgagaucaaccugaugcccaucuga

SEQ ID NO: 176743 - RNA, 1410 nt, Artificial Sequence; identical to SEQ ID NO: 176659
  derived and/or modified CDS sequence (opt4) from neuraminidase__InfluenzaA__ACO94697

SEQ ID NO: 176744 - RNA, 1413 nt, Artificial Sequence; identical to SEQ ID NO: 176692
  derived and/or modified CDS sequence (opt4) from neuraminidase__InfluenzaA__ACO94708

SEQ ID NO: 176745 - RNA, 1410 nt, Artificial Sequence
  derived and/or modified CDS sequence (opt4) from neuraminidase__InfluenzaA__ACO94719
augaaccccaaccagaagaucaucaccaucggcagcgugagccugaccaucagcaccaucugcuucuucaugcagaucgccauccugaucaccaccgugacccugcacuucaagcaguacgaguucaacagcccccccaacaaccaggugaugcugugcgagcccaccaucaucgagagaaacaucaccgagaucguguaccugaccaacaccaccaucgagaaggagaucugccccaagcuggccgaguacagaaacuggagcaagccccagugcgacaucaccggcuucgcccccuucagcaaggacaacagcaucagacugagcgccggcggcgacaucugggugaccagagagcccuacgugagcugcgaccccgacaagugcuaccaguucgcccugggccagggcaccacccugaacaacgugcacagcaacgacaccgugagagacagaacccccuacagaacccugcugaugaacgagcugggcgugcccuuccaccugggcaccaagcaggugugcaucgccuggagcagcagcagcugccacgacggcaaggccuggcugcacgugugcaucaccggcgacgacaagaacgccaccgccagcuucaucuacaacggcagacugguggacagcaucgugagcuggagcaaggacauccugagaacccaggagagcgagugcgugugcaucaacggcaccugcaccguggugaugaccgacggcagcgccagcggcaaggccgacaccaagauccuguucaucgaggagggcaagaucgugcacaccagcacccugagcggcagcgcccagcacguggaggagugcagcugcuaccccagauaccccggcgugagaugcgugugcagagacaacuggaagggcagcaacagacccaucguggacaucaacaucaaggaccacagcaucgugagcagcuacgugugcagcggccuggugggcgacacccccagaaagaacgacagcagcagcagcggccacugccuggaccccaacaacgaggagggcggccacggcgugaagggcugggccuucgacgacggcaacgacguguggaugggcagaaccaucagcgagaagagcagacugggcuacgagaccuucaaggugaucgagggcuggagcaaccccaagagcaagcugcagaucaacagacaggugaucguggacagaggcaacagaagcggcuacagcggcaucuucagcguggagggcaagagcugcaucaacagaugcuucuacguggagcugaucagaggcagaaaggaggagaccgaggugcuguggaccagcaacagcaucgugguguucugcggcaccagcggcaccuacggcaccggcagcuggcccgacggcgccgagaucaaccugaugcccaucuga

SEQ ID NO: 176746 - RNA, 1410 nt, Artificial Sequence
  derived and/or modified CDS sequence (opt4) from neuraminidase__InfluenzaA__ACO94741
augaaccccaaccagaagaucaucaccaucggcagcgugagccugaccaucagcaccaucugcuucuucaugcagaucgccauccugaucaccaccgugacccugcacuucaagcaguacgaguucaacagcagccccaacaaccaggugaugcugugcgagcccaccaucaucgagagaaacaucaccgagaucguguaccugaccaacaccaccaucgagaaggagaucugccccaagcuggccgaguacagaaacuggagcaagccccagugcgacaucaccggcuucgcccccuucagcaaggacaacagcaucagacugagcgccggcggcgacaucugggugaccagagagcccuacgugagcugcgaccccgacaagugcuaccaguucgcccugggccagggcaccacccugaacaacgugcacagcaacaacaccgugagagacagaacccccuacagaacccugcugaugaacgagcugggcgugcccuuccaccugggcaccaagcaggugugcaucgccuggagcagcagcagcugccacgacggcaaggccuggcugcacgugugcaucaccggcgacgacaagaacgccaccgccagcuucaucuacaacggcagacugguggacagcaucgugagcuggagcaaggagauccugagaacccaggagagcgagugcgugugcaucaacggcaccugcaccguggugaugaccgacggcagcgccagcggcaaggccgacaccaagauccuguucaucgaggagggcaagaucgugcacaccagcacccugagcggcagcgcccagcacguggaggagugcagcugcuaccccagauaccccggcgugagaugcgugugcagagacaacuggaagggcagcaacagacccaucguggacaucaacaucaaggaccacagcaucgugagcagcuacgugugcagcggccuggugggcgacacccccagaaagaacgacagcagcagcagcagccacugccuggaccccaacaacgaggagggcggccacggcgugaagggcugggccuucgacgacggcaacgacguguggaugggcagaaccaucagcgagaagagcagacugggcuacgagaccuucaaggugaucgagggcuggagcaaccccaagagcaagcugcagaucaacagacaggugaucguggacagaggcaacagaagcggcuacagcggcaucuucagcguggagagcaagagcugcaucaacagaugcuucuacguggagcugaucagaggcagaaaggaggagaccgaggugcuguggaccagcaacagcaucgugguguucugcggcaccagcggcaccuacggcaccggcagcuggcccgacggcgccgacaucaaccugaugcccaucuga

SEQ ID NO: 176747 - RNA, 1410 nt, Artificial Sequence; identical to SEQ ID NO: 176663
  derived and/or modified CDS sequence (opt4) from neuraminidase__InfluenzaA__ACO94763

SEQ ID NO: 176748 - RNA, 1410 nt, Artificial Sequence
  derived and/or modified CDS sequence (opt4) from neuraminidase__InfluenzaA__ACO94774
augaaccccaaccagaagaucaucaccaucggcagcgugagccugaccaucagcaccaucugcuucuucaugcagaucgccauccugaucaccaccgugacccugcacuucaagcaguacgaguucaacagcccccccaacaaccaggugaugcugugcgagcccaccaucaucgagagaaacaucaccgagaucguguaccugaccaacaccaccaucgagaaggagaucugccccaagcuggccgaguacagaaacuggagcaagccccagugcgacaucaccggcuucgcccccuucagcaaggacaacagcaucagacugagcgccggcggcgacaucugggugaccagagagcccuacgugagcugcgaccccgacaagugcuaccaguucgcccugggccagggcaccacccugaacaacgugcacagcaacaacaccgugagagacagaacccccuacagaacccugcugaugaacgagcugggcgugcccuuccaccugggcaccaagcaggugugcauggccuggagcagcagcagcugccacgacggcagagccuggcugcacgugugcaucaccggcgacgacaagaacgccaccgccagcuucaucuacaacggcagacugguggacagcguggugagcuggagcaaggagauccugagaacccaggagagcgagugcgugugcaucaacggcaccugcaccguggugaugaccgacggcagcgccagcggcaaggccgacaccaagauccuguucaucgaggagggcaagaucgugcacaccagcacccugagcggcagcgcccagcacguggaggagugcagcugcuaccccagauaccccggcgugagaugcgugugcagagacaacuggaagggcagcaacagacccaucguggacaucaacaucaaggaccacagcaucgugagcagcuacgugugcagcggccuggugggcgacacccccagaaagaacgacagcagcagcagcagccacugccuggaccccaacaacgaggagggcggccacggcgugaagggcugggccuucgacgacggcaacgacguguggaugggcagaaccaucagcgagaagagcagacugggcuacgagaccuucaaggugaucgagggcuggagcaaccccaagagcaagcugcagaucaacagacaggugaucguggacagaggcaacagaagcggcuacagcggcaucuucagcguggagggcaagagcugcaucaacagaugcuucuacguggagcugaucagaggcagaaaggaggagaccgaggugcuguggaccagcaacagcaucgugguguucugcggcaccagcggcaccuacggcaccggcagcuggcccgacggcgccgacaucaaccugaugcccaucuga

SEQ ID NO: 176749 - RNA, 1410 nt, Artificial Sequence
  derived and/or modified CDS sequence (opt4) from neuraminidase__InfluenzaA__ACO94785
augaaccccaaccagaagaucaucaccaucggcagcgugagccugaccaucagcaccaucugcuucuucaugcagaucgccauccugaucaccaccgugacccugcacuucaagcaguacgaguucaacagcccccccaacaaccaggugaugcugugcaagcccaccaucaucgagagaaacaucaccgagaucguguaccugaccaacaccaccaucgagaaggagaucugccccaagcuggccgaguacagaaacuggagcaagccccagugcgacaucaccggcuucgcccccuucagcaaggacaacagcaucagacugagcgccggcggcgacaucugggugaccagagagcccuacgugagcugcgaccccgacaagugcuaccaguucgcccugggccagggcaccacccugaacaacgugcacagcaacaacaccgugagagacagaacccccuacagaacccugcugaugaacgagcugggcgugcccuuccaccugggcaccaagcaggugugcaucgccuggagcagcagcagcugccacgacggcaaggccuggcugcacgugugcaucaccggcgacgacaagaacgccaccgccagcuucaucuacaacggcagacugguggacagcguggugagcuggagcaaggagauccugagaacccaggagagcgagugcgugugcaucaacggcaccugcaccguggugaugaccgacggcagcgccagcggcaaggccgacaccaagauccuguucaucgaggagggcaagaucgugcacaccagcacccugagcggcagcgcccagcacguggaggagugcagcugcuaccccagauaccccggcgugagaugcgugugcagagacaacuggaagggcagcaacagacccaucguggacaucaacaucaaggaccacagcaucgugagcagcuacgugugcagcggccuggugggcgacacccccagaaagaacgacagcagcagcagcagccacugccuggaccccaacaacgaggagggcggccacggcgugaagggcugggccuucgacgacggcaacgacguguggaugggcagaaccaucagcgagaagagcagacugggcuacgagaccuucaaggugaucgagggcuggagcaaccccaagagcaagcugcagaucaacagacaggugaucguggacagaggcaacagaagcggcuacagcggcaucuucagcguggagggcaagagcugcaucaacagaugcuucuacguggagcugaucagaggcagaaaggaggagaccgaggugcuguggaccagcaacagcaucgugguguucugcggcaccagcggcaccuacggcaccggcagcuggcccgacggcgccgacaucaaccugaugcccaucuga

SEQ ID NO: 176750 - RNA, 1410 nt, Artificial Sequence; identical to SEQ ID NO: 176659
  derived and/or modified CDS sequence (opt4) from neuraminidase__InfluenzaA__ACO94796

SEQ ID NO: 176751 - RNA, 1413 nt, Artificial Sequence
  derived and/or modified CDS sequence (opt4) from neuraminidase__InfluenzaA__ACO94807
augaaccccaaccagaagaucaucaccaucggcagcaucagcaucgccaucggcaucaucagccugauccugcagaucggcaacaucaucagcaucugggccagccacagcauccagaccggcagccagaaccacaccggcaucugcaaccagagaaucaucaccuacgagaacagcaccugggugaacaacaccuacgugaacaucaacaacaccaacgugguggccgagaaggacaagaccagcgugacccuggccggcaacagcagccugugcagcaucagcggcugggccaucuacaccaaggacaacagcaucagaaucggcagcaagggcgacguguucgugaucagagagcccuucaucagcugcagccaccuggagugcagaaccuucuuccugacccagggcgcccugcugaacgacaagcacagcaacggcaccgugaaggacagaagccccuacagagcccugaugagcugcccccugggcgaggcccccagccccuacaacagcagauucgagagcguggccuggagcgccagcgccugccacgacggcaugggcuggcugaccaucggcaucagcggccccgacaacggcgccguggccgugcugaaguacaacggcaucaucaccgagaccaucaagagcuggaagaagagaauccugagaacccaggagagcgagugcgugugcaugaacggcagcugcuucaccaucaugaccgacggccccagcaacggcaccgccagcuacaagaucuucaagaucgagaagggcaaggugaccaagaccaucgagcugaacgcccccaacuuccacuacgaggagugcagcugcuaccccgacaccggcaccgugaugugcgugugcagagacaacuggcacggcagcaacagacccugggugagcuucaaccagaaccuggacuaccagaucggcuacaucugcagcggcguguucggcgacaaccccagacccaaggacggcgagggcagcugcaaccccgugaccguggacggcgccgacggcgugaagggcuucagcuacaaguacggcaacggcguguggaucggcagaaccaagagcaacagacugagaaagggcuucgagaugaucugggaccccaacggcuggaccaacaccgacagcgacuucagcgugaagcaggacgugguggccaucaccgacuggagcggcuacagcggcagcuucgugcagcaccccgagcugaccggccuggacugcaucagacccugcuucuggguggagcuggugagaggccugcccagagagaacaccaccaucuggaccagcggcagcagcaucagcuucugcggcgugaacagcggcaccgccaacuggagcuggcccgacggcgccgagcugcccuucaccaucgacaaguga

SEQ ID NO: 176752 - RNA, 1410 nt, Artificial Sequence; identical to SEQ ID NO: 176474
  derived and/or modified CDS sequence (opt4) from neuraminidase__InfluenzaA__ACO94818

SEQ ID NO: 176753 - RNA, 1365 nt, Artificial Sequence; identical to SEQ ID NO: 175779
  derived and/or modified CDS sequence (opt4) from neuraminidase__InfluenzaA__ACO94829

SEQ ID NO: 176754 - RNA, 1365 nt, Artificial Sequence; identical to SEQ ID NO: 175779
  derived and/or modified CDS sequence (opt4) from neuraminidase__InfluenzaA__ACO94840

SEQ ID NO: 176755 - RNA, 1410 nt, Artificial Sequence
  derived and/or modified CDS sequence (opt4) from neuraminidase__InfluenzaA__ACO94851
augaaccccaaccagaagaucaucaccaucggcagcgugagccugaccaucagcaccaucugcuucuucaugcagaccgccauccugaucaccaccgugacccugcacuucaagcaguacgaguucaacagcccccccaacaaccaggugaugcugugcgagcccaccaucaucgagagaaacaucaccgagaucguguaccugaccaacaccaccaucgagaaggagaucugccccaagcuggccgaguacagaaacuggagcaagccccagugcgacaucaccggcuucgcccccuucagcaaggacaacagcaucagacugagcgccggcggcgacaucugggugaccagagagcccuacgugagcugcgaccccgacaagugcuaccaguucgcccugggccagggcaccacccugaacaacgugcacagcaacgacaucgugagagacagaacccccuacagaacccugcugaugaacgagcugggcgugcccuuccaccugggcaccaagcaggugugcaucgccuggagcagcagcagcugccacgacggcaaggccuggcugcacgugugcaucaccggcgacgacaagaacgccaccgccagcuucaucuacaacggcagacugguggacagcaucgugagcuggagcaaggagauccugagaacccaggagagcgagugcgugugcaucaacggcaccugcaccguggugaugaccgacggcagcgccagcggcaaggccgacaccaagauccuguucaucgaggagggcaagaucgugcacaccagcacccugagcggcagcgcccagcacguggaggagugcagcugcuaccccagauaccccggcgugagaugcgugugcagagacaacuggaagggcagcaacagacccaucguggacaucaacaucaaggaccacagcaucgugagcagcuacgugugcagcggccuggugggcgacacccccagaaagaacgacagcagcagcagcagccacugccuggaccccaacaacgaggagggcggccacggcgugaagggcugggccuucgacgacggcaacgacguguggaugggcagaaccaucagcgagaagagcagacugggcuacgagaccuucaaggugaucgagggcuggagcaaccccaagagcaagcugcagaucaacagacaggugaucguggacagaggcaacagaagcggcuacagcggcaucuucagcguggagggcaagagcugcaucaacagaugcuucuacguggagcugaucagaggcagaaaggaggagaccgaggugcuguggaccagcaacagcaucgugguguucugcggcaccagcggcaccuacggcaccggcagcuggcccgacggcgccgacaucaaccugaugcccaucuga

SEQ ID NO: 176756 - RNA, 1413 nt, Artificial Sequence; identical to SEQ ID NO: 176692
  derived and/or modified CDS sequence (opt4) from neuraminidase__InfluenzaA__ACO94873

SEQ ID NO: 176757 - RNA, 1410 nt, Artificial Sequence
  derived and/or modified CDS sequence (opt4) from neuraminidase__InfluenzaA__ACO94884
augaaccccaaccagaagaucaucaccaucggcagcgugagccugaccaucgccaccaucugcuuccugaugcagaucgccauccuggugaccaccgugacccugcacuucaagcagcacgagugcaacagcccccccaacaaccaggugaugcugugcgagcccaccaucaucgagagaaacaucaccgagaucguguaccugaccaacaccaccaucgagaaggagaugugccccaagcuggccgaguacagaaacuggagcaagccccagugcaacaucaccggcuucgcccccuucagcaaggacaacagcaucagacugagcgccggcggcgacaucugggugaccagagagcccuacgugagcugcgaccccgacaagugcuaccaguucgcccugggccagggcaccacccugaacaacggccacagcaacgacaccgugcacgacagaacccccuacagaacccugcugaugaacgagcugggcgugcccuuccaccugggcaccagacaggugugcaucgccuggagcagcagcagcugccacgacggcaaggccuggcugcacgugugcgugaccggcgacgacaagaacgccaccgccagcuucaucuacaacggcagacugguggacagcaucggcagcuggagcaagaagauccugagaacccaggagagcgagugcgugugcaucaacggcaccugcaccguggugaugaccgacggcagcgccagcggcaaggccgacaccaagauccuguucaucgaggagggcaagaucgugcacaucagcacccugagcggcagcgcccagcacguggaggagugcagcugcuaccccagauaccccggcgugagaugcgugugcagagacaacuggaagggcagcaacagacccaucguggacaucaacgugaaggacuacagcaucgugagcagcuacgugugcagcggccuggugggcgacacccccagaaagaacgacagcuucagcagcagccacugccuggaccccaacaacgaggagggcggccacggcgugaagggcugggccuucgacgacggcaacgacguguggaugggcagaaccaucagcgagaagcugagaagcggcuacgagaccuucaaggugaucgagggcuggagcaagcccaacagcaagcugcagaucaacagacaggugaucguggagagaggcaacagaagcggcuacagcggcaucuucagcguggagggcaagagcugcaucaacagaugcuucuacguggagcugaucagaggcagaaaggaggagaccgaggugugguggaccagcaacagcaucgugguguucugcggcaccagcggcaccuacggcaccggcagcuggcccgacggcgccgacaucaaccugaugcccaucuga

SEQ ID NO: 176758 - RNA, 1410 nt, Artificial Sequence; identical to SEQ ID NO: 174774
  derived and/or modified CDS sequence (opt4) from neuraminidase__InfluenzaA__ACO94906

SEQ ID NO: 176759 - RNA, 1410 nt, Artificial Sequence; identical to SEQ ID NO: 174205
  derived and/or modified CDS sequence (opt4) from neuraminidase__InfluenzaA__ACO94917

SEQ ID NO: 176760 - RNA, 1410 nt, Artificial Sequence; identical to SEQ ID NO: 174774
  derived and/or modified CDS sequence (opt4) from neuraminidase__InfluenzaA__ACO94928

SEQ ID NO: 176761 - RNA, 1410 nt, Artificial Sequence; identical to SEQ ID NO: 174205
  derived and/or modified CDS sequence (opt4) from neuraminidase__InfluenzaA__ACO94939

SEQ ID NO: 176762 - RNA, 1410 nt, Artificial Sequence
  derived and/or modified CDS sequence (opt4) from neuraminidase__InfluenzaA__ACO94950
augaaccccaaccagaagaucaucaccaucggcagcgugagccugaccaucagcaccaucugcuuccugaugcagaucgccauccugaucaccaccgugacccugcacuucaagcaguacgaguucaacagcccccccaacaaccaggugaugcugugcgagcccaccaucaucgagagaaacaucaccgagaucguguaccugaccaacaccaccaucgagaaggagaucugccccaagcuggccgaguacagaaacuggagcaagccccagugcgacaucaccggcuucgcccccuucagcaaggacaacagcaucagacugagcgccggcggcgacaucugggugaccagagagcccuacgugagcugcgaccccgacaagugcuaccaguucgcccugggccagggcaccacccugaacaacgugcacagcaacgacaccgugcacgacagaacccccuacagaacccugcugaugaacgagcugggcgugcccuuccaccugggcaccaagcaggugugcaucgccuggagcagcagcagcugccacgacggcaaggccuggcugcacgugugcgugaccggcgacgacaagaacgccaccgccagcuucaucuacaacggcagacugguggacagcaucgugagcuggagcaagaagauccugagaacccaggagagcgagugcgugugcaucaacggcaccugcaccguggugaugaccgacggcagcgccagcggcaaggccgacaccaagauccuguucaucgaggagggcaagaucgugcacaccagcacccugagcggcagcgcccagcacguggaggagugcagcugcuaccccagauaccccggcgugagaugcgugugcagagacaacuggaagggcagcaacagacccaucguggacaucaacaucaaggacuacagcaucgugagcagcuacgugugcagcggccuggugggcgacacccccagaaagaacgacagcagcagcagcagccacugccuggaccccaacaacgaggagggcggccacggcgugaagggcugggccuucgacgacggcaacgacguguggaugggcagaaccaucagcgagaagcugagaagcggcuacgagaccuucaaggugaucgagggcuggagcaaccccaacagcaagcugcagaucaacagacaggugaucguggacagaggcaacagaagcggcuacagcggcaucuucagcguggagggcaagagcugcaucaacagaugcuucuacguggagcugaucagaggcagaaaggaggagaccgaggugcuguggaccagcaacagcaucgugguguucugcggcaccagcggcaccuacggcaccggcagcuggcccgacggcgccgacaucaaccugaugcccaucuga

SEQ ID NO: 176763 - RNA, 1410 nt, Artificial Sequence
  derived and/or modified CDS sequence (opt4) from neuraminidase__InfluenzaA__ACO94961
augaaccccaaccagaagaucaucaccaucggcagcgugagccugaccaucagcaccaucugcuucuucaugcagaucgccauccugaucaccaccgugacccugcacuucaagcaguacgaguucaacagcccccccaacaaccaggugaugcugugcgagcccaccaucaucgagagaaacaucaccgagaucguguaccugaccaacaccaccaucgagaaggagcugugccccaagcuggccgaguacagaaacuggagcaagccccagugcgacaucaccggcuucgcccccuucagcaaggacaacagcaucagacugagcgccggcggcgacaucugggugaccagagagcccuacgugagcugcgaccccgacaagugcuaccaguucgcccugggccagggcaccacccugaacaacgugcacagcaacgacaccgugcacgacagaacccccuacagaacccugcugaugaacgagcugggcgugcccuuccaccugggcaccaagcaggugugcaucgccuggagcagcagcagcugccacgacggcaaggccuggcugcacgugugcgugaccggcgacgacaagaacgccaccgccagcuucaucuacaacggcagacugguggacagcaucgugagcuggagcaagaagauccugagaacccaggagagcgagugcgugugcaucaacggcaccugcaccguggugaugaccgacggcagcgccagcggcaaggccgacaccaagauccuguucaucgaggagggcaagaucgugcacaccagcacccugagcggcagcgcccagcacguggaggagugcagcugcuaccccagauaccccggcgugagaugcgugugcagagacaacuggaagggcagcaacagacccaucguggacaucaacaucaaggacuacagcaucgugagcagcuacgugugcagcggccuggugggcgacacccccagaaagaacgacagcagcagcagcagccacugccuggaccccaacaacgaggagggcggccacggcgugaagggcugggccuucgacgacggcaacgacguguggaugggcagaaccaucagcgagaagcugagaagcggcuacgagaccuucaaggugaucgagggcuggagcaaccccaacagcaagcugcagaucaacagacaggugaucguggacagaggcaacagaagcggcuacagcggcaucuucagcguggagggcaagagcugcaucaacagaugcuucuacguggagcugaucagaggcagaaaggaggagaccgaggugcuguggaccagcaacagcaucgugguguucugcggcaccagcggcaccuacggcaccggcagcuggcccgacggcgccgacaucaaccugaugcccaucuga

SEQ ID NO: 176764 - RNA, 1410 nt, Artificial Sequence
  derived and/or modified CDS sequence (opt4) from neuraminidase__InfluenzaA__ACO94972
augaaccccaaccagaagaucaucaccaucggcagcgugagccugaccaucagcaccaucugcuucuucaugcagaucgccauccugaucaccaccgugacccugcacuucaagcaguacgaguucaacagcccccccaacaaccaggugaugcugugcgagcccaccaucaucgagagaaacaucaccgagaucguguaccugaccaacaccaccaucgagaaggagaucugccccaagcuggccgaguacagaaacuggagcaagccccagugcaacaucaccggcuucgcccccuucagcaaggacaacagcaucagacugagcgccggcggcgacaucugggugaccagagagcccuacgugagcugcgaccccgacaagugcuaccaguucgcccugggccagggcaccacccugaacaacgugcacagcaacgacaccgugcacgacagaacccccuacagaacccugcugaugaacgagcugggcgugcccuuccaccugggcaccaagcaggugugcaucgccuggagcagcagcagcugccacgacggcaaggccuggcugcacgugugcgugaccggcgacgacgagaacgccaccgccagcuucaucuacaacggcagacugguggacagcguggugagcuggagcaagaagauccugagaacccaggagagcgagugcgugugcaucaacggcaccugcaccguggugaugaccgacggcagcgccagcggcaaggccgacaccaagauccuguucaucgaggagggcaagaucgugcacaccagcacccugagcggcagcgcccagcacguggaggagugcagcugcuaccccagauaccccggcgugagaugcgugugcagagacaacuggaagggcagcaacagacccaucguggacaucaacaucaaggacuacagcaucgugagcagcuacgugugcagcggccuggugggcgacacccccagaaagaacgacagcagcagcagcagccacugccuggaccccaacaacgaggagggcggccacggcgugaagggcugggccuucgacgacggcaacgacguguggaugggcagaaccaucagcgagaagcugagaagcggcuacgagaccuucaaggugaucgagggcuggagcaaccccaacagcaagcugcagaucaacagacaggugaucguggacagaggcaacagaagcggcuacagcggcaucuucagcguggagggcaagagcugcaucaacagaugcuucuacguggagcugaucagaggcagaaaccaggagaccgaggugcuguggaccagcaacagcaucgugguguucugcggcaccagcggcaccuacggcaccggcagcuggcccgacggcgccgacaucaaccugaugcccaucuga

SEQ ID NO: 176765 - RNA, 1410 nt, Artificial Sequence
  derived and/or modified CDS sequence (opt4) from neuraminidase__InfluenzaA__ACO95156
augaaccccaaccagaagaucaucaccaucggcagcgugagccugaccaucagcaccaucugcuucuucaugcagaucgccauccugaucaccaccgugacccugcacuucaagcaguacgaguucaacagcccccccaacaaccaggugaugcugugcgagcccaccaucaucgagagaaacaucaccgagaucguguaccugaccaacaccaccaucgagaaggagaccugccccaagcuggccgaguacagaaacuggagcaagccccagugcaacaucaccggcuucgcccccuucagcaaggacaacagcaucagacugagcgccggcggcgacaucugggugaccagagagcccuacgugagcugcgaccccgacaagugcuaccaguucgcccugggccagggcaccacccugaacaacgugcacagcaacgacaccgugcacgacagaacccccuacagaacccugcugaugaacgagcugggcgugcccuuccaccugggcaccaagcaggugugcaucgccuggagcagcagcagcugccacgacggcaaggccuggcugcacgugugcaucaccggcgacgacaagaacgccaccgccagcuucaucuacaacggcagacugguggacagcguggugagcuggagcaagaagauccugagaacccaggagagcgagugcgugugcaucaacggcaccugcaccguggugaugaccgacggcagcgccagcggcaaggccgacaccaagauccuguucaucgaggagggcaagaucgugcacaccagcacccugagcggcagcgcccagcacguggaggagugcagcugcuaccccagauaccccggcgugagaugcgugugcagagacaacuggaagggcagcaacagacccaucguggacaucaacaucaaggacuacagcaucgugagcagcuacgugugcagcggccuggugggcgacacccccagaaagaacgacagcagcagcagcagccacugccuggaccccaacaacgaggagggcggccacggcgugaagggcugggccuucgacgacggcaacgacguguggaugggcagaaccaucagcgagaagcugagaagcggcuacgagaccuucaaggugaucgagggcuggagcaaccccaacagcaagcugcagaucaacagacaggugaucguggacagaggcaacagaagcggcuacagcggcaucuucagcguggagggcaagagcugcaucaacagaugcuucuacguggagcugaucagaggcagaaaccaggagaccgaggugcuguggaccagcaacagcaucgugguguucugcggcaccagcggcaccuacggcaccggcagcuggcccgacggcgccgacaucaaccugaugcccaucuga

SEQ ID NO: 176766 - RNA, 1410 nt, Artificial Sequence; identical to SEQ ID NO: 174387
  derived and/or modified CDS sequence (opt4) from neuraminidase__InfluenzaA__ACO95174

SEQ ID NO: 176767 - RNA, 1410 nt, Artificial Sequence; identical to SEQ ID NO: 174387
  derived and/or modified CDS sequence (opt4) from neuraminidase__InfluenzaA__ACO95185

SEQ ID NO: 176768 - RNA, 1410 nt, Artificial Sequence
  derived and/or modified CDS sequence (opt4) from neuraminidase__InfluenzaA__ACO95196
augaaccccaaccagaagaucaucaccaucggcagcgugagccugaccaucagcaccaucugcuucuucaugcagaucgccauccugaucaccaccgugacccugcacuucaagcaguacgaguucaacagcccccccaacaaccaggugaugcugugcgagcccaccaucaucgagagaaacaucaccgagaucguguaccugaccaacaccaccaucgagaaggagaucugccccaagcuggccgaguacagaaacuggagcaagccccagugcaacaucaccggcuucgcccccuucagcaaggacaacagcaucagacugagcgccggcggcgacaucugggugaccagagagcccuacgugagcugcgaccccgacaagugcuaccaguucgcccugggccagggcaccacccugaacaacgugcacagcaacgacaccauccacgacagaacccccuacagaacccugcugaugaacgagcugggcgugcccuuccaccugggcaccaagcaggugugcaucgccuggagcagcagcagcugccacgacggcaaggccuggcugcacgugugcgugaccggcgacgacaagaacgccaccgccagcuucaucuacaacggcagacugguggacagcguggugagcuggagcaagaagauccugagaacccaggagagcgagugcgugugcaucaacggcaccugcaccguggugaugaccgacggcagcgccagcggcaaggccgacaccaagauccuguucaucgaggagggcaagaucgugcacaccagcacccugagcggcagcgcccagcacguggaggagugcagcugcuaccccagauaccccggcgugagaugcgugugcagagacaacuggaagggcagcaacagacccaucguggacaucaacaucaaggacuacagcaucgugagcagcuacgugugcagcggccuggugggcgacacccccagaaagaacgacagcagcagcagcagccacugccuggaccccaacaacgaggagggcggccacggcgugaagggcugggccuucgacgacggcaacgacguguggaugggcagaaccaucagcgagaagcugagaagcggcuacgagaccuucaaggugaucgagggcuggagcaaccccaacagcaagcugcagaucaacagacaggugaucguggacagaggcaacagaagcggcuacagcggcaucuucagcguggagggcaagagcugcaucaacagaugcuucuacguggagcugaucagaggcagaaaccaggagaccgaggugcuguggaccagcaacagcaucgugguguucugcggcaccagcggcaccuacggcaccggcagcuggcccgacggcgccgacaucaaccugaugcccaucuga

SEQ ID NO: 176769 - RNA, 1410 nt, Artificial Sequence; identical to SEQ ID NO: 174387
  derived and/or modified CDS sequence (opt4) from neuraminidase__InfluenzaA__ACO95207

SEQ ID NO: 176770 - RNA, 1410 nt, Artificial Sequence; identical to SEQ ID NO: 174387
  derived and/or modified CDS sequence (opt4) from neuraminidase__InfluenzaA__ACO95218

SEQ ID NO: 176771 - RNA, 1410 nt, Artificial Sequence; identical to SEQ ID NO: 174390
  derived and/or modified CDS sequence (opt4) from neuraminidase__InfluenzaA__ACO95229

SEQ ID NO: 176772 - RNA, 1410 nt, Artificial Sequence; identical to SEQ ID NO: 174772
  derived and/or modified CDS sequence (opt4) from neuraminidase__InfluenzaA__ACO95240

SEQ ID NO: 176773 - RNA, 1410 nt, Artificial Sequence; identical to SEQ ID NO: 174633
  derived and/or modified CDS sequence (opt4) from neuraminidase__InfluenzaA__ACO95262

SEQ ID NO: 176774 - RNA, 1410 nt, Artificial Sequence; identical to SEQ ID NO: 176571
  derived and/or modified CDS sequence (opt4) from neuraminidase__InfluenzaA__ACO95273

SEQ ID NO: 176775 - RNA, 1410 nt, Artificial Sequence; identical to SEQ ID NO: 176663
  derived and/or modified CDS sequence (opt4) from neuraminidase__InfluenzaA__ACO95306

SEQ ID NO: 176776 - RNA, 1413 nt, Artificial Sequence
  derived and/or modified CDS sequence (opt4) from neuraminidase__InfluenzaA__ACO95385
augaaccccaaccagaagaucaucaccaucggcagcaucagcaucgccaucggcaucaucagccugaugcugcagaucggcaacaucaucagcaucugggccagccacagcauccagaccggcagccagaacaacaccggcaucugcaaccagagaaucaucaccuacgagaacagcaccugggugaaccacaccuacgugaacaucaacaacaccaacgugguggccggcgaggacaagaccagcgugacccuggccggcaacagcagccugugcagcaucagcggcugggccaucuacaccaaggacaacagcaucagaaucggcagcaagggcgacguguucgugaucagagagcccuucaucagcugcagccaccuggagugcagaaccuucuuccugacccagggcgcccugcugaacgacaagcacagcaacggcaccgugaaggacagaagccccuacagagcccugaugagcugcccccugggcgaggcccccagccccuacaacagcaaguucgagagcguggccuggagcgccagcgccugccacgacggcaugggcuggcugaccaucggcaucagcggccccgacaacggcgccguggccgugcugaaguacaacggcaucaucaccggcaccaucaagagcuggaagaagcagauccugagaacccaggagagcgagugcgugugcaugaacggcagcugcuucaccaucaugaccgacggccccagcgacaaggccgccagcuacaagaucuucaagaucgagaagggcaaggugaccaagagcaucgagcugaacgcccccaacuuccacuacgaggagugcagcugcuaccccgacaccggcaucgugaugugcgugugcagagacaacuggcacggcagcaacagacccugggugagcuucaaccagaaccuggacuaccagaucggcuacaucugcagcggcguguucggcgacaaccccagacccgaggacggcgagggcagcugcaaccccgugaccguggacggcgccaacggcgugaagggcuucagcuacaaguacgacaacggcguguggaucggcagaaccaagagcaacagacugagaaagggcuucgagaugaucugggaccccaacggcuggaccaacaccgacagcgacuucagcgugaagcaggacgugguggccaucaccgacuggagcggcuacagcggcagcuucgugcagcaccccgagcugaccggccuggacugcaucagacccugcuucuggguggagcuggugagaggccugcccagagagaacaccaccaucuggaccagcggcagcagcaucagcuucugcggcgugaacagcgacaccgccaacuggagcuggcccgacggcgccgagcugcccuucaccaucgacaaguga

SEQ ID NO: 176777 - RNA, 1413 nt, Artificial Sequence; identical to SEQ ID NO: 176692
  derived and/or modified CDS sequence (opt4) from neuraminidase__InfluenzaA__ACO95407

SEQ ID NO: 176778 - RNA, 1413 nt, Artificial Sequence; identical to SEQ ID NO: 176692
  derived and/or modified CDS sequence (opt4) from neuraminidase__InfluenzaA__ACO95418

SEQ ID NO: 176779 - RNA, 1410 nt, Artificial Sequence; identical to SEQ ID NO: 174205
  derived and/or modified CDS sequence (opt4) from neuraminidase__InfluenzaA__ACO95429

SEQ ID NO: 176780 - RNA, 1410 nt, Artificial Sequence; identical to SEQ ID NO: 174774
  derived and/or modified CDS sequence (opt4) from neuraminidase__InfluenzaA__ACO95440

SEQ ID NO: 176781 - RNA, 1410 nt, Artificial Sequence
  derived and/or modified CDS sequence (opt4) from neuraminidase__InfluenzaA__ACO95462
augaaccccaaccagaagaucaucaccaucggcagcgugagccugaccaucagcaccaucugcuucuucaugcagaucgccauccugaucaccaccgugacccugcacuucaagcaguacgaguucaacagcccccccaacaaccaggugaugcugugcgagcccaccaucaucgagagaaacaucaccgagaucguguaccugaccaacaccaccaucgagaaggagaucugccccaagcuggccgaguacagaaacuggagcaagccccagugcaacaucaccggcuucgcccccuucagcaaggacaacagcaucagacugagcgccggcggcgacaucugggugaccagagagcccuacgugagcugcgaccccgacaagugcuaccaguucgcccugggccagggcaccacccugaacaacgugcacagcaacgacaccgugcacgacagaacccccuacagaacccugcugaugaacgagcugggcgugcccuuccaccugggcaccaagcaggugugcaucgccuggagcagcagcagcugccacgacggcaaggccuggcugcacgugugcgugaccggcgacgacaagaacgccaccgccagcuucaucuacaacggcagacugguggacagcaucgugagcuggagcaaggagauccugagaacccaggagagcgagugcgugugcaucaacggcaccugcaccguggugaugaccgacggcagcgccagcggcaaggccgacaccaagauccuguucaucgaggagggcaagaucgugcacaccagcacccugagcggcagcgcccagcacguggaggagugcagcugcuaccccagauaccccggcgugagaugcgugugcagagacaacuggaagggcagcaacagacccaucguggacaucaacaucaaggacuacagcaucgugagcagcuacgugugcagcggccuggugggcgacacccccagaaagaacgacagcagcagcagcagccacugccuggaccccaacaacgaggagggcggccacggcgugaagggcugggccuucgacgacggcaacgacguguggaugggcagaaccaucagcgagaagcugagaagcggcuacgagaccuucaaggugaucgagggcuggagcaaccccaacagcaagcugcagaucaacagacaggugaucguggacagaggcaacagaagcggcuacagcggcaucuucagcguggagggcaagagcugcaucaacagaugcuucuacguggagcugaucagaggcagaaaggaggagaccgaggugcuguggaccagcaacagcaucgugguguucugcggcaccagcggcaccuacggcaccggcagcuggcccgacggcgccgacaucaaccugaugcugaucuga

SEQ ID NO: 176782 - RNA, 1410 nt, Artificial Sequence; identical to SEQ ID NO: 174772
  derived and/or modified CDS sequence (opt4) from neuraminidase__InfluenzaA__ACO95484

SEQ ID NO: 176783 - RNA, 1410 nt, Artificial Sequence; identical to SEQ ID NO: 174772
  derived and/or modified CDS sequence (opt4) from neuraminidase__InfluenzaA__ACO95495

SEQ ID NO: 176784 - RNA, 1410 nt, Artificial Sequence; identical to SEQ ID NO: 174772
  derived and/or modified CDS sequence (opt4) from neuraminidase__InfluenzaA__ACO95506

SEQ ID NO: 176785 - RNA, 1410 nt, Artificial Sequence
  derived and/or modified CDS sequence (opt4) from neuraminidase__InfluenzaA__ACO95517
augaaccccaaccagaagaucaucaccaucggcagcgugagccugaccaucagcaccaucugcuucuucaugcagaucgccauccugaucaccaccgugacccugcacuucaagcaguacgaguucaacagcccccccaacaaccaggugaugcugugcgagcccaccaucaucgagagaaacaucaccgagaucguguaccugaccaacaccaccaucgagaaggagaucugccccaagcuggccgaguacagaaacuggagcaagccccagugcaacaucaccggcuucgcccccuucagcaaggacaacagcaucagacugagcgccggcggcgacaucugggugaccagagagcccuacgugagcugcgaccccgacaagugcuaccaguucgcccugggccagggcaccacccugaacaacgugcacagcaacgacaccgugcacgacagaacccccuacagaacccugcugaugaacgagcugggcgugcccuuccaccugggcaccaagcaggugugcaucgccuggagcagcagcagcugccacgacggcaaggccuggcugcacgugugcgugaccggcgacgacaagaacgccaccgccagcuucaucuacaacggcagacugguggacagcaucgugagcuggagcaaggagauccugagaacccaggagagcgagugcgugugcaucaacggcaccugcaccguggugaugaccgacggcagcgccagcggcaaggccgacaccaagauccuguucaucgaggagggcaagaucgugcacaccagcacccugagcggcagcgcccagcacguggaggagugcagcugcuaccccagauaccccggcgugagaugcgugugcagagacaacuggaagggcagcaacagacccaucguggacaucaacaucaaggacuacagcaucgugagcagcuacgugugcagcggccuggugggcgacacccccagaaagaacgacagcagcagcagcagccacugccuggaccccaacaacgaggagggcggccacggcgugaagggcugggccuucgacgacggcaacgacguguggaugggcagaaccaucagcgagaagcugagacugggcuacgagaccuucaaggugaucgagggcuggagcaaccccaacagcaagcugcagaucaacagacaggugaucguggacagaggcaacagaagcggcuacagcggcaucuucagcguggagggcaagagcugcaucaacagaugcuucuacguggagcugaucagaggcagaaaggaggagaccgaggugcuguggaccagcaacagcaucgugguguucugcggcaccagcggcaccuacggcaccggcagcuggcccgacggcgccgacaucaaccugaugcccaucuga

SEQ ID NO: 176786 - RNA, 1410 nt, Artificial Sequence
  derived and/or modified CDS sequence (opt4) from neuraminidase__InfluenzaA__ACO95539
augaaccccaaccagaagaucaucaccaucggcagcgugagccugaccaucagcaccaucugcuucuucaugcagaucgccauccugaucaccaccgugacccugcacuucaagcaguacgaguucaacagcccccccaacaaccaggugaugcugugcgagcccaccaucaucgagagaaacaucaccgagaucguguaccugaccaacaccaccaucgagaaggagaucugccccaagcuggccgaguacagaaacuggagcaagccccagugcaacaucaccggcuucgcccccuucagcaaggacaacagcaucagacugagcgccggcggcgacaucugggugaccagagagcccuacgugagcugcgaccccgacaagugcuaccaguucgcccugggccagggcaccacccugaacaacgugcacagcaacgacaccgugcacgacagaacccccuacagaacccugcugaugaacgagcugggcgugcccuuccaccugggcaccaagcaggugugcaucgccuggagcagcagcagcugccacgacggcaaggccuggcugcacgugugcgugaccggcgacgacaagaacgccaccgccagcuucaucuacaacggcagacugguggacagcaucgugagcuggagcaaggagauccugagaacccaggagagcgagugcgugugcaucaacggcaccugcaccguggugaugaccgacggcagcgccagcggcaaggccaacaccaagauccuguucaucgaggagggcaagaucgugcacaccagcacccugagcggcagcgcccagcacguggaggagugcagcugcuaccccagauaccccggcgugagaugcgugugcagagacaacuggaagggcagcaacagacccaucguggacaucaacaucaaggacuacagcaucgugagcagcuacgugugcagcggccuggugggcgacacccccagaaagaacgacagcagcagcagcagccacugccuggaccccaacaacgaggagggcggccacggcgugaagggcugggccuucgacgacggcaacgacguguggaugggcagaaccaucagcgagaagcugagaagcggcuacgagaccuucaaggugaucgagggcuggagcaaccccaacagcaagcugcagaucaacagacaggugaucguggacagaggcaacagaagcggcuacagcggcaucuucagcguggagggcaagagcugcaucaacagaugcuucuacguggagcugaucagaggcagaaaggaggagaccgaggugcuguggaccagcaacagcaucgugguguucugcggcaccagcggcaccuacggcaccggcagcuggcccgacggcgccgacaucaaccugaugcccaucuga

SEQ ID NO: 176787 - RNA, 1413 nt, Artificial Sequence
  derived and/or modified CDS sequence (opt4) from neuraminidase__InfluenzaA__ACP20223
augaaccccaaccagaagaucaucaccaucggcagcaucagcaucgccaucggcaucaucagccugaugcugcagaucggcaacaucaucagcaucugggccagccacagcauccagaccggcagccagaacaacaccggcaucugcaaccagagaaucaucaccuacgagaacagcaccugggugaaccacaccuacgugaacaucaacaacaccaacgugguggccggcgaggacaagaccagcgugacccuggccggcaacagcagccugugcagcaucagcggcugggccaucuacaccaaggacaacagcaucagaaucggcagcaagggcgacguguucgugaucagagagcccuucaucagcugcagccaccuggagugcagaaccuucuuccugacccagggcgcccugcugaacgacaagcacagcaacggcaccgugaaggacagaagccccuacagagcccugaugagcugcccccugggcgaggcccccagccccuacaacagcaaguucgagagcguggccuggagcgccagcgccugccacgacggcaugggcuggcugaccaucggcaucagcggccccgacaacggcgccguggccgugcugaaguacaacggcaucaucaccggcaccaucaagagcuggaagaagcagauccugagaacccaggagagcgagugcgugugcaugaacggcagcugcuucaccaucaugaccgacggccccagcaacaaggccgccagcuacaagaucuucaagaucgagaagggcaaggugaccaagagcaucgagcugaacgcccccaacuuccacuacgaggagugcagcugcuaccccgacaccggcaucgugaugugcgugugcagagacaacuggcacggcagcaacagacccugggugagcuucaaccagaaccuggacuaccagaucggcuacaucugcagcggcguguucggcgacaaccccagacccgaggacggcgagggcagcugcaaccccgugaccguggacggcgccaacggcgugaagggcuucagcuacaaguacgacaacggcguguggaucggcagaaccaagagcaacagacugagaaagggcuucgagaugaucugggaccccaacggcuggaccaacaccgacagcgacuucagcgugaagcaggacgugguggccgugaccgacuggagcggcuacagcggcagcuucgugcagcaccccgagcugaccggccuggacugcaucagacccugcuucuggguggagcuggugagaggccugcccagagagaacaccaccaucuggaccagcggcagcagcaucagcuucugcggcgugaacagcgacaccgccaacuggagcuggcccgacggcgccgagcugcccuucaccaucgacaaguga

SEQ ID NO: 176788 - RNA, 1410 nt, Artificial Sequence
  derived and/or modified CDS sequence (opt4) from neuraminidase__InfluenzaA__ACP41952
augaaccccaaccagaagaucaucaccaucggcagcgugugcaugaccaucggcauggccaaccugauccugcagaucggcaacaucaucagcaucuggaucagccacagcauccagcugggcaaccagaaccagaucgagaccugcaaccagagcgugaucaccuacgagaacaacaccugggugaaccagaccuacgugaacaucagcaacaccaacuucgccgccggccagagcguggugagcgugaagcuggccggcaacagcagccugugccccgugagcggcugggccaucuacagcaaggacaacagcgugagaaucggcagcaagggcgacguguucgugaucagagagcccuucaucagcugcagcccccuggagugcagaaccuucuuccugacccagggcgcccugcugaacgacaagcacagcaacggcaccaucaaggacagaagccccuacagaacccugaugagcugccccaucggcgaggugcccagccccuacaacagcagauucgagagcguggccuggagcgccagcgccugccacgacggcaucaacuggcugaccaucggcaucagcggccccgacaacggcgccguggccgugcugaaguacaacggcaucaucaccgacaccaucaagagcuggagaaacaacauccugagaacccaggagagcgagugcgccugcgugaacggcagcugcuucaccgugaugaccgacggccccagcaacggccaggccagcuacaagaucuucagaaucgagaagggcaagaucgugaagagcguggagaugaacgcccccaacuaccacuacgaggagugcagcugcuaccccgacagcagcgagaucaccugcgugugcagagacaacuggcacggcagcaacagacccugggugagcuucaaccagaaccuggaguaccagaucggcuacaucugcagcggcaucuucggcgacaaccccagacccaacgacaagaccggcagcugcggccccgugagcagcaacggcgccaacggcgugaagggcuucagcuucaaguacggcaacggcguguggaucggcagaaccaagagcaucagcagcagaaacggcuucgagaugaucugggaccccaacggcuggaccggcaccgacaacaacuucagcaucaagcaggacaucgugggcaucaacgaguggagcggcuacagcggcagcuucgugcagcaccccgagcugaccggccuggacugcaucagacccugcuucuggguggagcugaucagaggcagacccaaggagaacaccaucuggaccagcggcagcagcaucagcuucugcggcgugaacagcgacaccgugggcuggagcuggcccgacggcgccgagcugcccuucaccaucgacaaguga

SEQ ID NO: 176789 - RNA, 1410 nt, Artificial Sequence; identical to SEQ ID NO: 176788
  derived and/or modified CDS sequence (opt4) from neuraminidase__InfluenzaA__ACP44158

SEQ ID NO: 176790 - RNA, 1413 nt, Artificial Sequence
  derived and/or modified CDS sequence (opt4) from neuraminidase__InfluenzaA__ACP44195
augaaccccaaccagaagaucaucaccaucggcagcaucagcaucgccaucggcaucaucagccugaugcugcagaucggcaacaucaucagcaucugggccagccacagcauccagaccggcagccagaacaacaccggcaucugcaaccagagaaucaucaccuacgagaacagcaccugggugaaccacaccuacgugaacaucaacaacaccaacgugguggccggcgaggacaagaccagcgugacccuggccggcaacagcagccugugcagcaucagcggcugggccaucuacaccaaggacaacagcaucagaaucggcagcaagggcgacguguucgugaucagagagcccuucaucagcugcagccaccuggagugcagaaccuucuuccugacccagggcgcccugcugaacgacaagcacagcaacggcaccgugaaggacagaagccccuacagagcccugaugagcugcccccugggcgaggcccccagccccuacaacagcaaguucgagagcguggccuggagcgccagcgccugccacgacggcaugggcuggcugaccaucggcaucagcggccccgacaacggcgccguggccgugcugaaguacaacggcaucaucaccggcaccaucaagagcuggaagaagcagauccugagaacccaggagagcgagugcgugugcaugaacggcagcugcuucaccaucaugaccgacggccccagcgacaaggccgccagcuacaagaucuucaagaucgagaagggcaaggugaccaagagcaucgagcugaacgcccccaacuuccacuacgaggagugcagcugcuaccccgacaccggcaucgugaugugcgugugcagagacaacuggcacggcagcaacagacccugggugagcuucaaccagaaccuggacuaccagaucggcuacaucugcagcggcguguucggcgacaaccccagacccgaggacggcgagggcagcugcaaccccgugaccguggacggcgccaacggcgugaagggcuucagcuacaaguacgacaacggcguguggaucggcagaaccaagagcaacagacugagaaagggcuucgagaugaucugggaccccaacggcuggaccaacaccgacagcgacuucagcgugaagcaggacgugguggccaucaccgacuggagcggcuacagcggcagcuucgugcagcaccccgagcugaccggccugaacugcaucagacccugcuucuggguggagcuggugagaggccugcccagagagaacaccaccaucuggaccagcggcagcagcaucagcuucugcggcgugaacagcgacaccgccaacuggagcuggcccgacggcgccgagcugcccuucaccaucgacaaguga

SEQ ID NO: 176791 - RNA, 1413 nt, Artificial Sequence; identical to SEQ ID NO: 176692
  derived and/or modified CDS sequence (opt4) from neuraminidase__InfluenzaA__ACP44217

SEQ ID NO: 176792 - RNA, 1413 nt, Artificial Sequence; identical to SEQ ID NO: 176692
  derived and/or modified CDS sequence (opt4) from neuraminidase__InfluenzaA__ACP44228

SEQ ID NO: 176793 - RNA, 1410 nt, Artificial Sequence; identical to SEQ ID NO: 174774
  derived and/or modified CDS sequence (opt4) from neuraminidase__InfluenzaA__ACP44239

SEQ ID NO: 176794 - RNA, 1410 nt, Artificial Sequence
  derived and/or modified CDS sequence (opt4) from neuraminidase__InfluenzaA__ACP44250
augaaccccaaccagaagaucaucaccaucggcagcgugagccugaccaucagcaccaucugcuucuucaugcagaucgccauccugaugaccaccgugacccugcacuucaagcaguacgaguucaacagcccccccaacaaccaggugaugcugugcgagcccaccaucaucgagagaaacaucaccgagaucguguaccugaccaacaccaccaucgagaaggagaucugccccaagcuggccgaguacagaaacuggagcaagccccagugcgacaucaccggcuucgcccccuucagcaaggacaacagcaucagacugagcgccggcggcgacaucugggugaccagagagcccuacgugagcugcgaccccgacaagugcuaccaguucgcccugggccagggcaccacccugaacaacgugcacagcaacgacaccgugcacgacagaacccccuacagaacccugcugaugaacgagcugggcgugcccuuccaccugggcaccaagcaggugugcaucgccuggagcagcagcagcugccacgacggcaaggccuggcugcacgugugcgugaccggcgacgacaagaacgccaccgccagcuucaucuacaacggcagacugguggacagcaucgugagcuggagcaaggagauccugagaacccaggagagcgagugcgugugcaucaacggcaccugcaccguggugaugaccgacggcagcgccagcggcaaggccgacaccaagauccuguucaucgaggagggcaagaucgugcacaccagcacccugagcggcagcgcccagcacguggaggagugcagcugcuaccccagauaccccggcgugagaugcgugugcagagacaacuggaagggcagcaacagacccaucguggacaucaacaucaaggacuacagcaucgugagcagcuacgugugcagcggccuggugggcgacacccccagaaagaacgacagcagcagcagcagccacugccuggaccccaacaacgaggagggcggccacggcgugaagggcugggccuucgacgacggcaacgacguguggaugggcagaaccaucagcgagaagcugagaagcggcuacgagaccuucaaggugaucgagggcuggagcaaccccaacagcaagcugcagaucaacagacaggugaucguggacagaggcaacagaagcggcuacagcggcaucuucagcguggagggcaagagcugcaucaacagaugcuucuacguggagcugaucagaggcagaaaggaggagaccgaggugcuguggaccagcaacagcaucgugguguucugcggcaccagcggcaccuacggcaccggcagcuggcccgacggcgccgacaucaaccugaugcccaucuga

SEQ ID NO: 176795 - RNA, 1410 nt, Artificial Sequence
  derived and/or modified CDS sequence (opt4) from neuraminidase__InfluenzaA__ACP44261
augaaccccaaccagaagaucaucaccaucggcagcgugagccugaccaucagcaccaucugcuucuucaugcagaucgccauccugaucaccaccgugacccugcacuucaagcaguacgaguucaacagcccccccaacaaccaggugaugcugugcgagcccaccaucaucgagagaaacaucaccgagaucguguaccugaccaacaccaccaucgagaaggagaucugccccaagcuggccgaguacagaaacuggagcaagccccagugcaacaucaccggcuucgcccccuucagcaaggacaacagcaucagacugagcgccggcggcgacaucugggugaccagagagcccuacgugagcugcgaccccgacaagugcuaccaguucgcccugggccagggcaccacccugaacaacaugcacagcaacgacaccgugcacgacagaacccccuacagaacccugcugaugaacgagcugggcgugcccuuccaccugggcaccaagcaggugugcaucgccuggagcagcagcagcugccacgacggcaaggccuggcugcacgugugcgugaccggcgacgacaagaacgccaccgccagcuucaucuacaacggcagacugguggacagcaucgugagcuggagcaaggagauccugagaacccaggagagcgagugcgugugcaucaacggcaccugcaccguggugaugaccgacggcagcgccagcggcaaggccgacaccaagauccuguucaucgaggagggcaagaucgugcacaccagcacccugagcggcagcgcccagcacguggaggagugcagcugcuaccccagauaccccggcgugagaugcgugugcagagacaacuggaagggcagcaacagacccaucguggacaucaacaucaaggacuacagcaucgugagcagcuacgugugcagcggccuggugggcgacacccccagaaagaacgacagcagcagcagcagccacugccuggaccccaacaacgaggagggcggccacggcgugaagggcugggccuucgacgacggcaacgacguguggaugggcagaaccaucagcgagaagcugagaagcggcuacgagaccuucaaggugaucgagggcuggagcaaccccaacagcaagcugcagaucaacagacaggugaucguggacagaggcaacagaagcggcuacagcggcaucuucagcguggagggcaagagcugcaucaacagaugcuucuacguggagcugaucagaggcagaaaggaggagaccgaggugcuguggaccagcaacagcaucgugguguucugcggcaccagcggcaccuacggcaccggcagcuggcccgacggcgccgacaucaaccugaugcccaucuga

SEQ ID NO: 176796 - RNA, 1410 nt, Artificial Sequence
  derived and/or modified CDS sequence (opt4) from neuraminidase__InfluenzaA__ACP44272
augaaccccaaccagaagaucaucaccaucggcagcgugagccugaccaucagcaccaucugcuucuucaugcagaucgccauccugaucaccaccgugacccugcacuucaagcaguacgaguucaacagcccccccaacaaccaggugaugcugugcgagcccaccaucaucgagagaaacaucaccgagaucguguaccugaccaacaccaccaucgagaaggagaucugccccaagcuggccgaguacagaaacuggagcaagccccagugcaacaucaccggcuucgcccccuucagcaaggacaacagcaucagacugagcgccggcggcgacaucugggugaccagagagcccuacgugagcugcgaccccgacaagugcuaccaguucgcccugggccagggcaccacccugaacaacgugcacagcaacgacaccgugcacgacagaacccccuacagaacccugcugaugaacgagcugggcgugcccuuccaccugggcaccaagcaggugugcaucgccuggagcagcagcagcugccacgacggcaaggccuggcugcacgugugcgugaccggcgacgacaagaacgccaccgccagcuucaucuacaacggcagacugguggacagcaucgugagcuggagcaaggagauccugagaacccaggagagcgagugcgugugcaucaacggcaccugcaccgugaucaugaccgacggcagcgccagcggcaaggccgacaccaagauccuguucaucgaggagggcaagaucgugcacaccagcacccugagcggcagcgcccagcacguggaggagugcagcugcuaccccagauaccccggcgugagaugcgugugcagagacaacuggaagggcagcaacagacccaucguggacaucaacaucaaggacuacagcaucgugagcagcuacgugugcagcggccuggugggcgacacccccagaaagaacgacagcagcagcagcagccacugccuggaccccaacaacgaggagggcggccacggcgugaagggcugggccuucgacgacggcaacgacguguggaugggcagaaccaucagcgagaagcugagaagcggcuacgagaccuucaaggugaucgagggcuggagcaaccccaacagcaagcugcagaucaacagacaggugaucguggacagaggcaacagaagcggcuacagcggcaucuucagcguggagggcaagagcugcaucaacagaugcuucuacguggagcugaucagaggcagaaaggaggagaccgaggugcuguggaccagcaacagcaucgugguguucugcggcaccagcggcaccuacggcaccggcagcuggcccgacggcgccgacaucaaccugaugcccaucuga

SEQ ID NO: 176797 - RNA, 1410 nt, Artificial Sequence; identical to SEQ ID NO: 176788
  derived and/or modified CDS sequence (opt4) from neuraminidase__InfluenzaA__ACQ55360

SEQ ID NO: 176798 - RNA, 1410 nt, Artificial Sequence
  derived and/or modified CDS sequence (opt4) from neuraminidase__InfluenzaA__ACQ63236
augaaccccaaccagaagaucaucaccaucggcagcgugugcaugaccaucggcauggccaaccugauccugcagaucggcaacaucaucagcaucuggaucagccacagcauccagcugggcaaccagaaccagaucgagaccugcaaccagagcgugaucaccuacgagaacaacaccugggugaaccagaccuacgugaacaucagcaacaccaacuucgccgccggccagagcguggugagcgugaagcuggccggcaacagcagccugugccccgugagcggcugggccaucuacagcaaggacaacagcaucagaaucggcagcaagggcgacguguucgugaucagagagcccuucaucagcugcagcccccuggagugcagaaccuucuuccugacccagggcgcccugcugaacgacaagcacagcaacggcaccaucaaggacagaagccccuacagaacccugaugagcugccccaucggcgaggugcccagccccuacaacagcagauucgagagcguggccuggagcgccagcgccugccacgacggcaucaacuggcugaccaucggcaucagcggccccgacaacggcgccguggccgugcugaaguacaacggcaucaucaccgacaccaucaagagcuggagaaacaacauccugagaacccaggagagcgagugcgccugcgugaacggcagcugcuucaccgugaugaccgacggccccagcgacggccaggccagcuacaagaucuucagaaucgagaagggcaagaucgugaagagcguggagaugaacgcccccaacuaccacuacgaggagugcagcugcuaccccgacagcagcgagaucaccugcgugugcagagacaacuggcacggcagcaacagacccugggugagcuucaaccagaaccuggaguaccagaucggcuacaucugcagcggcaucuucggcgacaaccccagacccaacgacaagaccggcagcugcggccccgugagcagcaacggcgccaacggcgugaagggcuucagcuucaaguacggcaacggcguguggaucggcagaaccaagagcaucagcagcagaaacggcuucgagaugaucugggaccccaacggcuggaccggcaccgacaacaacuucagcaucaagcaggacaucgugggcaucaacgaguggagcggcuacagcggcagcuucgugcagcaccccgagcugaccggccuggacugcaucagacccugcuucuggguggagcugaucagaggcagacccaaggagaacaccaucuggaccagcggcagcagcaucagcuucugcggcgugaacagcgacaccgugggcuggagcuggcccgacggcgccgagcugcccuucaccaucgacaaguga

SEQ ID NO: 176799 - RNA, 1410 nt, Artificial Sequence; identical to SEQ ID NO: 176798
  derived and/or modified CDS sequence (opt4) from neuraminidase__InfluenzaA__ACQ63242

SEQ ID NO: 176800 - RNA, 1410 nt, Artificial Sequence; identical to SEQ ID NO: 176798
  derived and/or modified CDS sequence (opt4) from neuraminidase__InfluenzaA__ACQ63253

SEQ ID NO: 176801 - RNA, 1410 nt, Artificial Sequence; identical to SEQ ID NO: 176798
  derived and/or modified CDS sequence (opt4) from neuraminidase__InfluenzaA__ACQ63262

SEQ ID NO: 176802 - RNA, 1410 nt, Artificial Sequence
  derived and/or modified CDS sequence (opt4) from neuraminidase__InfluenzaA__ACQ65694
augaaccccaaccagaagaucaucaccaucggcagcgugagccugaccaucagcaccaucugcuucuucaugcagaucgccauccugaucaccaccgugacccugcacuucaagcaguacgaguucaacagcccccccaacaaccaggugaugcugugcgagcccaccaucaucgagagaaacaucaccgagaucguguaccugaccaacaccaccaucgagaaggagaucugccccaagcuggccgaguacagaaaguggagcaagccccagugcaacaucaccggcuucgcccccuucagcaaggacaacagcaucagacugagcgccggcggcgacaucugggugaccagagagcccuacgugagcugcgaccccgacaagugcuaccaguucgcccugggccagggcaccacccugaacaacgugcacagcaacgacaccgugagagacagaacccccuacagaacccugcugaugaacgagcugggcgugcccuuccaccugggcaccaagcaggugugcaucgccuggagcagcagcagcugccacgacggcaaggccuggcugcacgugugcgugaccggcgacgacaagaacgccaccgccagcuucaucuacaacggcagacugguggacagcaucgugagcuggagcaaggacauccugagaacccaggagagcgagugcgugugcaucaacggcaccugcaccguggugaugaccgacggcagcgccagcggcaaggccgacaccaagauccuguucaucgaggagggcaagaucgugcacaccagcacccugagcggcagcgcccagcacguggaggagugcagcugcuaccccagauaccccggcgugagaugcgugugcagagacaacuggagaggcagcaacagacccaucguggacaucaacaugaaggacuacagcaucgugagcagcuacgugugcagcggccuggugggcgacacccccagaaagaacgacagcagcagcagcggccacugccuggaccccaacaacgaggagggcggccacggcgugaagggcugggccuucgacgacggcaacgacguguggaugggcagaaccaucagcgagaagcugagaagcggcuacgagaccuucaaggugaucgagggcuggagcaaccccaacagcaagcugcagaucaacagacaggugaucguggacagaggcaacagaagcggcuacagcggcaucuucagcguggagggcaagagcugcaucaacagaugcuucuacguggagcugaucagaggcagaaaggaggagaccgaggugcuguggaccagcaacagcaucgugguguucugcggcaccagcggcaccuacggcaccggcagcuggcccgacggcgccgacaucaaccugaugcccaucuga

SEQ ID NO: 176803 - RNA, 1410 nt, Artificial Sequence
  derived and/or modified CDS sequence (opt4) from neuraminidase__InfluenzaA__ACQ65705
augaaccccaaccagaagaucaucaccaucggcagcgugagccugaccaucagcaccaucugcuucuucaugcagaucgccauccugaucaccaccgugacccugcacuucaagcaguacgaguucaacagcccccccaacaaccaggugaugcugugcgagcccaccaucaucgagagaaacaucaccgagaucguguaccugaccaacaccaccaucgagaaggagaucugccccaagcuggccgaguacagaaaguggagcaagccccagugcaacaucaccggcuucgcccccuucagcaaggacaacagcaucagacugagcgccggcggcgacaucugggugaccagagagcccuacgugagcugcgaccccgacaagugcuaccaguucgcccugggccagggcaccacccugaacaacgugcacagcaacgacaccgugagagacagaacccccuacagaacccugcugaugaacgagcugggcgugcccuuccaccugggcaccaagcaggugugcaucgccuggagcagcagcagcugccacgacggcaaggccuggcugcacgugugcgugaccggcgacgacaagaacgccaccgccagcuucaucuacaacggcagacugguggacagcaucgugagcuggagcaaggagauccugagaacccaggagagcgagugcgugugcaucaacggcaccugcaccguggugaugaccgacggcagcgccagcggcaaggccgacaccaagauccuguucaucgaggagggcaagaucgugcacaccagcacccugagcggcagcgcccagcacguggaggagugcagcugcuaccccagauaccccggcgugagaugcgugugcagagacaacuggagaggcagcaacagacccaucguggacaucaacaugaaggacuacagcaucgugagcagcuacgugugcagcggccuggugggcgacacccccagaaagaacgacagcagcagcagcggccacugccuggaccccaacaacgaggagggcggccacggcgugaagggcugggccuucgacgacggcaacgacguguggaugggcagaaccaucagcgagaagcugagaagcggcuacgagaccuucaaggugaucgagggcuggagcaaccccaacagcaagcugcagaucaacagacaggugaucguggacagaggcaacagaagcggcuacagcggcaucuucagcguggagggcaagagcugcaucaacagaugcuucuacguggagcugaucagaggcagaaaggaggagaccgaggugcuguggaccagcaacagcaucgugguguucugcggcaccagcggcaccuacggcaccggcagcuggcccgacggcgccgacaucaaccugaugcccaucuga

SEQ ID NO: 176804 - RNA, 1410 nt, Artificial Sequence; identical to SEQ ID NO: 176572
  derived and/or modified CDS sequence (opt4) from neuraminidase__InfluenzaA__ACQ65716

SEQ ID NO: 176805 - RNA, 1410 nt, Artificial Sequence; identical to SEQ ID NO: 176572
  derived and/or modified CDS sequence (opt4) from neuraminidase__InfluenzaA__ACQ65727

SEQ ID NO: 176806 - RNA, 1410 nt, Artificial Sequence; identical to SEQ ID NO: 176659
  derived and/or modified CDS sequence (opt4) from neuraminidase__InfluenzaA__ACQ65739

SEQ ID NO: 176807 - RNA, 1410 nt, Artificial Sequence
  derived and/or modified CDS sequence (opt4) from neuraminidase__InfluenzaA__ACQ65750
augaaccccaaccagaagaucaucaccaucggcagcgugagccugaccaucagcaccaucugcuucuucaugcagaccgccauccugaucaccaccgugacccugcacuucaagcaguacgaguucaacagcccccccaacaaccaggugaugcugugcgagcccaccaucaucgagagaaacaucaccgagaucguguaccugaccaacaccaccaucgagaaggagaucugccccaagcuggccgaguacagaaacuggagcaagccccagugcgacaucaccggcuucgcccccuucagcaaggacaacagcaucagacugagcgccggcggcgacaucugggugaccagagagcccuacgugagcugcgaccccgacaagugcuaccaguucgcccugggccagggcaccacccugaacaacgugcacagcaacgacaccgugagaaacagaacccccuacagaacccugcugaugaacgagcugggcgugcccuuccaccugggcaccaagcaggugugcaucgccuggagcagcagcagcugccacgacggcaaggccuggcugcacgugugcaucaccggcgacgacaagaacgccaccgccagcuucaucuacaacggcagacugguggacagcaucgugagcuggagcaaggagauccugagaacccaggagagcgagugcgugugcaucaacggcaccugcaccguggugaugaccgacggcagcgccagcggcaaggccgacaccaagauccuguucaucgaggagggcaagaucgugcacaccagcacccugagcggcagcgcccagcacguggaggagugcagcugcuaccccagauaccccggcgugagaugcgugugcagagacaacuggaagggcagcaacagacccaucguggacaucaacaucaaggaccacagcaucgugagcagcuacgugugcagcggccuggugggcgacacccccagaaagaacgacagcagcagcagcagccacugccuggaccccaacaacgaggagggcggccacggcgugaagggcugggccuucgacgacggcaacgacguguggaugggcagaaccaucagcgagaagagcagacugggcuacgagaccuucaaggugaucgagggcuggagcaaccccaagagcaagcugcagaucaacagacaggugaucguggacagaggcaacagaagcggcuacagcggcaucuucagcguggagggcaagagcugcaucaacagaugcuucuacguggagcugaucagaggcagaaaggaggagaccgaggugcuguggaccagcaacagcaucgugguguucugcggcaccagcggcaccuacggcaccggcagcuggcccgacggcgccgacaucaaccugaugcccaucuga

SEQ ID NO: 176808 - RNA, 1413 nt, Artificial Sequence; identical to SEQ ID NO: 176692
  derived and/or modified CDS sequence (opt4) from neuraminidase__InfluenzaA__ACQ65761

SEQ ID NO: 176809 - RNA, 1410 nt, Artificial Sequence; identical to SEQ ID NO: 176788
  derived and/or modified CDS sequence (opt4) from neuraminidase__InfluenzaA__ACQ73394

SEQ ID NO: 176810 - RNA, 1410 nt, Artificial Sequence; identical to SEQ ID NO: 176788
  derived and/or modified CDS sequence (opt4) from neuraminidase__InfluenzaA__ACQ73395

SEQ ID NO: 176811 - RNA, 1410 nt, Artificial Sequence; identical to SEQ ID NO: 176798
  derived and/or modified CDS sequence (opt4) from neuraminidase__InfluenzaA__ACQ73396

SEQ ID NO: 176812 - RNA, 1410 nt, Artificial Sequence; identical to SEQ ID NO: 176798
  derived and/or modified CDS sequence (opt4) from neuraminidase__InfluenzaA__ACQ76291

SEQ ID NO: 176813 - RNA, 1410 nt, Artificial Sequence
  derived and/or modified CDS sequence (opt4) from neuraminidase__InfluenzaA__ACQ76298
augaaccccaaccagaagaucaucaccaucggcagcgugugcaugaccaucggcauggccaaccugauccugcagaucggcaacaucaucagcaucuggaucagccacagcauccagcugggcaaccagaaccagaucgagaccugcaaccagagcgugaucaccuacgagaacaacaccugggugaaccagaccuacgugaacaucagcaacaccaacuucgccgccggccagagcguggugagcgugaagcuggccggcaacagcagccugugccccgugagcggcugggccaucuacagcaaggacaacagcgugagaaucggcagcaagggcgacguguucgugaucagagagcccuucaucagcugcagcccccuggagugcagaaccuucuuccugacccagggcgcccugcugaacgacaagcacagcaacggcaccaucaaggacagaagccccuacagaacccugaugagcugccccaucggcgaggugcccagccccuacaacagcagauucgagagcguggccuggagcgccagcgccugccacgacggcaucaacuggcugaccaucggcaucagcggccccgacaacggcgccguggccgugcugaaguacaacggcaucaucaccgacaccaucaagagcuggagaaacaacauccugagaacccaggagagcgagugcgccugcgugaacggcagcugcuucaccaucaugaccgacggccccagcaacggccaggccagcuacaagaucuucagaaucgagaagggcaagaucgugaagagcguggagaugaacgcccccaacuaccacuacgaggagugcagcugcuaccccgacagcagcgagaucaccugcgugugcagagacaacuggcacggcagcaacagacccugggugagcuucaaccagaaccuggaguaccagaucggcuacaucugcagcggcaucuucggcgacaaccccagacccaacgacaagaccggcagcugcggccccgugagcagcaacggcgccaacggcgugaagggcuucagcuucaaguacggcaacggcguguggaucggcagaaccaagagcaucagcagcagaaacggcuucgagaugaucugggaccccaacggcuggaccggcaccgacaacaacuucagcaucaagcaggacaucgugggcaucaacgaguggagcggcuacagcggcagcuucgugcagcaccccgagcugaccggccuggacugcaucagacccugcuucuggguggagcugaucagaggcagacccaaggagaacaccaucuggaccagcggcagcagcaucagcuucugcggcgugaacagcgacaccgugggcuggagcuggcccgacggcgccgagcugcccuucaccaucgacaaguga

SEQ ID NO: 176814 - RNA, 1410 nt, Artificial Sequence; identical to SEQ ID NO: 176798
  derived and/or modified CDS sequence (opt4) from neuraminidase__InfluenzaA__ACQ76308

SEQ ID NO: 176815 - RNA, 1410 nt, Artificial Sequence; identical to SEQ ID NO: 176798
  derived and/or modified CDS sequence (opt4) from neuraminidase__InfluenzaA__ACQ76316

SEQ ID NO: 176816 - RNA, 1410 nt, Artificial Sequence; identical to SEQ ID NO: 176788
  derived and/or modified CDS sequence (opt4) from neuraminidase__InfluenzaA__ACQ76322

SEQ ID NO: 176817 - RNA, 1410 nt, Artificial Sequence; identical to SEQ ID NO: 176788
  derived and/or modified CDS sequence (opt4) from neuraminidase__InfluenzaA__ACQ76328

SEQ ID NO: 176818 - RNA, 1410 nt, Artificial Sequence; identical to SEQ ID NO: 176788
  derived and/or modified CDS sequence (opt4) from neuraminidase__InfluenzaA__ACQ76335

SEQ ID NO: 176819 - RNA, 1410 nt, Artificial Sequence; identical to SEQ ID NO: 176788
  derived and/or modified CDS sequence (opt4) from neuraminidase__InfluenzaA__ACQ76342

SEQ ID NO: 176820 - RNA, 1410 nt, Artificial Sequence; identical to SEQ ID NO: 176788
  derived and/or modified CDS sequence (opt4) from neuraminidase__InfluenzaA__ACQ76351

SEQ ID NO: 176821 - RNA, 1410 nt, Artificial Sequence; identical to SEQ ID NO: 176788
  derived and/or modified CDS sequence (opt4) from neuraminidase__InfluenzaA__ACQ76359

SEQ ID NO: 176822 - RNA, 1410 nt, Artificial Sequence; identical to SEQ ID NO: 176798
  derived and/or modified CDS sequence (opt4) from neuraminidase__InfluenzaA__ACQ76364

SEQ ID NO: 176823 - RNA, 1410 nt, Artificial Sequence; identical to SEQ ID NO: 176798
  derived and/or modified CDS sequence (opt4) from neuraminidase__InfluenzaA__ACQ76367

SEQ ID NO: 176824 - RNA, 1410 nt, Artificial Sequence
  derived and/or modified CDS sequence (opt4) from neuraminidase__InfluenzaA__ACQ76379
augaaccccaaccagaagaucaucaccaucggcagcgugugcaugaccaucggcauggccaaccugauccugcagaucggcaacaucaucagcaucuggaucagccacagcauccagcugggcaaccagaaccagaucgagaccugcaaccagagcgugaucaccuacaagaacaacaccugggugaaccagaccuacgugaacaucagcaacaccaacuucgccgccggccagagcguggugagcgugaagcuggccggcaacagcagccugugccccgugagcggcugggccaucuacagcaaggacaacagcgugagaaucggcagcaagggcgacguguucgugaucagagagcccuucaucagcugcagcccccuggagugcagaaccuucuuccugacccagggcgcccugcugaacgacaagcacagcaacggcaccaucaaggacagaagccccuacagaacccugaugagcugccccaucggcgaggugcccagccccuacaacagcagauucgagagcguggccuggagcgccagcgccugccacgacggcaucaacuggcugaccaucggcaucagcggccccgacaacggcgccguggccgugcugaaguacaacggcaucaucaccgacaccaucaagagcuggagaaacaacauccugagaacccaggagagcgagugcgccugcgugaacggcagcugcuucaccgugaugaccgacggccccagcaacggccaggccagcuacaagaucuucagaaucgagaagggcaagaucgugaagagcguggagaugaacgcccccaacuaccacuacgaggagugcagcugcuaccccgacagcagcgagaucaccugcgugugcagagacaacuggcacggcagcaacagacccugggugagcuucaaccagaaccuggaguaccagaucggcuacaucugcagcggcaucuucggcgacaaccccagacccaacgacaagaccggcagcugcggccccgugagcagcaacggcgccaacggcgugaagggcuucagcuucaaguacggcaacggcguguggaucggcagaaccaagagcaucagcagcagaaacggcuucgagaugaucugggaccccaacggcuggaccggcaccgacaacaacuucagcaucaagcaggacaucgugggcaucaacgaguggagcggcuacagcggcagcuucgugcagcaccccgagcugaccggccuggacugcaucagacccugcuucuggguggagcugaucagaggcagacccaaggagaacaccaucuggaccagcggcagcagcaucagcuucugcggcgugaacagcgacaccgugggcuggagcuggcccgacggcgccgagcugcccuucaccaucgacaaguga

SEQ ID NO: 176825 - RNA, 1410 nt, Artificial Sequence; identical to SEQ ID NO: 176798
  derived and/or modified CDS sequence (opt4) from neuraminidase__InfluenzaA__ACQ76385

SEQ ID NO: 176826 - RNA, 1410 nt, Artificial Sequence; identical to SEQ ID NO: 176798
  derived and/or modified CDS sequence (opt4) from neuraminidase__InfluenzaA__ACQ76388

SEQ ID NO: 176827 - RNA, 1410 nt, Artificial Sequence; identical to SEQ ID NO: 176798
  derived and/or modified CDS sequence (opt4) from neuraminidase__InfluenzaA__ACQ76403

SEQ ID NO: 176828 - RNA, 1410 nt, Artificial Sequence
  derived and/or modified CDS sequence (opt4) from neuraminidase__InfluenzaA__ACQ76407
augaaccccaaccagaagaucaucaccaucggcagcgugugcaugaccaucggcauggccaaccugauccugcagaucggcaacaucaucagcaucuggaucagccacagcauccagcugggcaaccagaaccagaucgagaccugcaaccagagcgugaucaccuacgagaacaacaccugggugaaccagaccuacgugaacaucagcaacaccaacuucgccgccggccagagcguggugagcgugaagcuggccggcaacagcagccugugccccgugggcggcugggccaucuacagcaaggacaacagcgugagaaucggcagcaagggcgacguguucgugaucagagagcccuucaucagcugcagcccccuggagugcagaaccuucuuccugacccagggcgcccugcugaacgacaagcacagcaacggcaccaucaaggacagaagccccuacagaacccugaugagcugccccaucggcgaggugcccagccccuacaacagcagauucgagagcguggccuggagcgccagcgccugccacgacggcaucaacuggcugaccaucggcaucagcggccccgacaacggcgccguggccgugcugaaguacaacggcaucaucaccgacaccaucaagagcuggagaaacaacauccugagaacccaggagagcgagugcgccugcgugaacggcagcugcuucaccgugaugaccgacggccccagcaacggccaggccagcuacaagaucuucagaaucgagaagggcaagaucgugaagagcguggagaugaacgcccccaacuaccacuacgaggagugcagcugcuaccccgacagcagcgagaucaccugcgugugcagagacaacuggcacggcagcaacagacccugggugagcuucaaccagaaccuggaguaccagaucggcuacaucugcagcggcaucuucggcgacaaccccagacccaacgacaagaccggcagcugcggccccgugagcagcaacggcgccaacggcgugaagggcuucagcuucaaguacggcaacggcguguggaucggcagaaccaagagcaucagcagcagaaacggcuucgagaugaucugggaccccaacggcuggaccggcaccgacaacaacuucagcaucaagcaggacaucgugggcaucaacgaguggagcggcuacagcggcagcuucgugcagcaccccgagcugaccggccuggacugcaucagacccugcuucuggguggagcugaucagaggcagacccaaggagaacaccaucuggaccagcggcagcagcaucagcuucugcggcgugaacagcgacaccgugggcuggagcuggcccgacggcgccgagcugcccuucaccaucgacaaguga

SEQ ID NO: 176829 - RNA, 1410 nt, Artificial Sequence
  derived and/or modified CDS sequence (opt4) from neuraminidase__InfluenzaA__ACQ77603
augaaccccaaccagaagaucaucaccaucggcagcgugagccugaccaucgccaccaucugcuuccugaugcagaucgccauccuggugaccaccgugacccugcacuucaagcaguacgagugcaacagcccccccaacaaccaggugaugcugugcgagcccaccaucaucgagagaaacaucaccgagaucguguaccugaccaacaccaccaucgagaaggagaucugccccaagcuggccgaguacagaaacuggagcaagccccagugcaacaucaccggcuucgcccccuucagcaaggacaacagcaucagacugagcgccggcggcgacaucugggugaccagagagcccuacgugagcugcgaccccgacaagugcuaccaguucgcccugggccagggcaccacccugaacaacggccacagcaacgacaccgugcacgacagaacccccuacagaacccugcugaugaacgagcugggcgugcccuuccaccugggcaccaagcaggugugcaucgccuggagcagcagcagcugccacgacggcaaggccuggcugcacgugugcgugaccggcgacgacgagaacgccaccgccagcuucaucuacaacggcagacugguggacagcaucggcagcuggagcaagaagauccugagaacccaggagagcgagugcgugugcaucaacggcaccugcaccguggugaugaccgacggcagcgccagcggcaaggccgacaccaagauccuguucaucgaggagggcaagaucgugcacaccagcccccugagcggcagcgcccagcacguggaggagugcagcugcuaccccagauaccccggcgugagaugcgugugcagagacaacuggaagggcagcaacagacccaucguggacaucaacgugaaggacuacagcaucgugagcagcuacgugugcagcggccuggugggcgacacccccagaaagaacgacagcagcagcagcagccacugccuggaccccaacaacgaggagggcggccacggcgugaagggcugggccuucgacgacggcaacgacguguggaugggcagaaccaucagcgagaagagcagaagcggcuacgagaccuucaaggugaucgagggcuggagcaagcccaacagcaagcugcagaucaacagacaggugaucguggacagaggcaacagaagcggcuacagcggcaucuucagcguggagggcaagagcugcaucaacagaugcuucuacguggagcugaucagaggcagaaagcaggagaccgaggugcuguggaccagcaacagcaucgugguguucugcggcaccagcggcaccuacggcaccggcagcuggcccgacggcgccgacaucaaccugaugcccaucuga

SEQ ID NO: 176830 - RNA, 1410 nt, Artificial Sequence; identical to SEQ ID NO: 176788
  derived and/or modified CDS sequence (opt4) from neuraminidase__InfluenzaA__ACQ83309

SEQ ID NO: 176831 - RNA, 1410 nt, Artificial Sequence; identical to SEQ ID NO: 176788
  derived and/or modified CDS sequence (opt4) from neuraminidase__InfluenzaA__ACQ84460

SEQ ID NO: 176832 - RNA, 1410 nt, Artificial Sequence; identical to SEQ ID NO: 176788
  derived and/or modified CDS sequence (opt4) from neuraminidase__InfluenzaA__ACQ84470

SEQ ID NO: 176833 - RNA, 1410 nt, Artificial Sequence
  derived and/or modified CDS sequence (opt4) from neuraminidase__InfluenzaA__ACQ84480
augaacaccaaccagagaaucaucaccaucggcaccgugugccugaucgugggcaucgugagccugcugcugcagaucggcaacaucgugagccuguggaucagccacagcaucaagaccggcgagaagaaccacagcgagaucugcaaccagaacaucaucaccuacgagaacaagaccugggugaaccagaccuacgugaacaucagcaacaccaacaucgccgacggccagggcgugaccagcaucauccuggccggcaacagcagccugugccccaucagcggcugggccaucuacagcaaggacaacagcaucagaaucggcagcaagggcgacaucuucgugaucagagagcccuucaucagcugcagccaccuggagugcagaaccuucuuccugacccagggcgcccugcugaacgacagacacagcaacggcaccgugaaggacagaagccccuacagaacccugaugagcugccccaccggcgaggcccccagccccuacaacagcagauucgagagcguggccuggagcgccagcgccugccacgacggcaugggcuggcugaccaucggcaucagcggccccgacaacggcgccguggccgugcugaaguacaacggcaucaucaccgacaccaucaagagcuggagaaacaagauccugagaacccaggagagcgagugcgugugcaucaacggcagcugcuucaccaucaugaccgacggccccagcaacggccaggccagcuacaagaucuucaagauggagaagggcaagaucaucaagagcguggagcuggacgcccccaacuaccacuacgaggagugcagcugcuaccccgacaccggcaagguggugugcgugugcagagacaacuggcacgccagcaacagacccugggugagcuucgaccagaaccuggacuaccagaucggcuacaucugcagcggcguguucggcgacaaccccagaagcaacgacggcaagggcaacugcggccccgugcugagcaacggcgccaacggcgugaagggcuucagcuucagauacggcaacggcguguggaucggcagaaccaagagcaucagcagcagaagcggcuucgagaugaucugggaccccaacggcuggaccgagaccgacagcagcuucagcaucaagcaggacaucaucgcccugaccgacuggagcggcuacagcggcagcuucgugcagcaccccgagcugaccggcaugaacugcaucagacccugcuucuggguggagcugaucagaggccagcccaaggagagcaccaucuggaccagcggcagcagcaucagcuucugcggcguggacagcgagaccgccagcuggagcuggcccgacggcgccgaccugcccuucaccaucgacaaguga

SEQ ID NO: 176834 - RNA, 1410 nt, Artificial Sequence
  derived and/or modified CDS sequence (opt4) from neuraminidase__InfluenzaA__ACQ89891
augaaccccaaccagaagaucaucaccaucggcagcgugugcaugaccaucggcauggccaaccugauccugcagaucggcaacaucaucagcaucuggaucagccacagcauccagcugggcaaccagaaccagaucgagaccugcaaccagagcgugaucaccuacgagaacaacaccugggugaaccagaccuacgugaacaucagcaacaccaacuucgccgccggccagagcguggugagcgugaagcuggccggcaacagcagccugugccccgugagcggcugggccaucuacagcaaggacaacagcaucagaaucggcagcaagggcgacguguucgugaucagagagcccuucaucagcugcagcccccuggagugcagaaccuucuuccugacccagggcgcccugcugaacgacaagcacagcaacggcaccaucaaggacagaagccccuacagaacccugaugagcugccccaucggcgaggugcccagccccuacaacagcagauucgagagcguggccuggagcgccagcgccugccacgacggcaucaacuggcugaccaucggcaucagcggccccgacaacggcgccguggccgugcugaaguacaacggcaucaucaccgacaccaucaagagcuggagaaacaacauccugagaacccaggagagcgagugcgccugcgugaacggcagcugcuucaccgugaugaccgacggccccagcaacggccaggccagcuacaagaucuucagaaucgagaagggcaagaucgugaagagcguggagaugaacgcccccaacuaccacuacgaggagugcagcugcuaccccgacagcagcgagaucaccugcgugugcagagacaacuggcacggcagcaacagacccugggugagcuucaaccagaaccuggaguaccagaucggcuacaucugcagaggcaucuucggcgacaaccccagacccaacgacaagaccggcagcugcggccccgugagcagcaacggcgccaacggcgugaagggcuucagcuucaaguacggcaacggcguguggaucggcagaaccaagagcaucagcagcagaaacggcuucgagaugaucugggaccccaacggcuggaccggcaccgacaacaacuucagcaucaagcaggacaucgugggcaucaacgaguggagcggcuacagcggcagcuucgugcagcaccccgagcugaccggccuggacugcaucagacccugcuucuggguggagcugaucagaggcagacccaaggagaacaccaucuggaccagcggcagcagcaucagcuucugcggcgugaacagcgacaccgugggcuggagcuggcccgacggcgccgagcugcccuucaccaucgacaaguga

SEQ ID NO: 176835 - RNA, 1410 nt, Artificial Sequence; identical to SEQ ID NO: 176788
  derived and/or modified CDS sequence (opt4) from neuraminidase__InfluenzaA__ACQ89918

SEQ ID NO: 176836 - RNA, 1410 nt, Artificial Sequence
  derived and/or modified CDS sequence (opt4) from neuraminidase__InfluenzaA__ACQ89919
augaaccccaaccagaagaucaucaccaucggcagcgugugcaugaccaucggcauggccaaccugauccugcagaucggcaacaucaucagcaucuggaucagcagaagcauccagcugggcaaccagaaccagaucgagaccugcaaccagagcgugaucaccuacgagaacaacaccugggugaaccagaccuacgugaacaucagcaacaccaacuucgccgccggccagagcguggugagcgugaagcuggccggcaacagcagccugugccccgugagcggcugggccaucuacagcaaggacaacagcgugagaaucggcagcaagggcgacguguucgugaucagagagcccuucaucagcugcagcccccuggagugcagaaccuucuuccugacccagggcgcccugcugaacgacaagcacagcaacggcaccaucaaggacagaagccccuacagaacccugaugagcugccccaucggcgaggugcccagccccuacaacagcagauucgagagcguggccuggagcgccagcgccugccacgacggcaucaacuggcugaccaucggcaucagcggccccgacaacggcgccguggccgugcugaaguacaacggcaucaucaccgacaccaucaagagcuggagaaacaacauccugagaacccaggagagcgagugcgccugcgugaacggcagcugcuucaccgugaugaccgacggccccagcaacggccaggccagcuacaagaucuucagaaucgagaagggcaagaucgugaagagcguggagaugaacgcccccaacuaccacuacgaggagugcagcugcuaccccgacagcagcgagaucaccugcgugugcagagacaacuggcacggcagcaacagacccugggugagcuucaaccagaaccuggaguaccagaucggcuacaucugcagcggcaucuucggcgacaaccccagacccaacgacaagaccggcagcugcggccccgugagcagcaacggcgccaacggcgugaagggcuucagcuucaaguacggcaacggcguguggaucggcagaaccaagagcaucagcagcagaaacggcuucgagaugaucugggaccccaacggcuggaccggcaccgacaacaacuucagcaucaagcaggacaucgugggcaucaacgaguggagcggcuacagcggcagcuucgugcagcaccccgagcugaccggccuggacugcaucagacccugcuucuggguggagcugaucagaggcagacccaaggagaacaccaucuggaccagcggcagcagcaucagcuucugcggcgugaacagcgacaccgugggcuggagcuggcccgacggcgccgagcugcccuucaccaucgacaaguga

SEQ ID NO: 176837 - RNA, 1410 nt, Artificial Sequence; identical to SEQ ID NO: 176798
  derived and/or modified CDS sequence (opt4) from neuraminidase__InfluenzaA__ACQ89920

SEQ ID NO: 176838 - RNA, 1410 nt, Artificial Sequence; identical to SEQ ID NO: 176798
  derived and/or modified CDS sequence (opt4) from neuraminidase__InfluenzaA__ACQ89921

SEQ ID NO: 176839 - RNA, 1410 nt, Artificial Sequence; identical to SEQ ID NO: 176788
  derived and/or modified CDS sequence (opt4) from neuraminidase__InfluenzaA__ACQ89922

SEQ ID NO: 176840 - RNA, 1410 nt, Artificial Sequence; identical to SEQ ID NO: 176798
  derived and/or modified CDS sequence (opt4) from neuraminidase__InfluenzaA__ACQ89923

SEQ ID NO: 176841 - RNA, 1410 nt, Artificial Sequence; identical to SEQ ID NO: 176788
  derived and/or modified CDS sequence (opt4) from neuraminidase__InfluenzaA__ACQ99623

SEQ ID NO: 176842 - RNA, 1410 nt, Artificial Sequence; identical to SEQ ID NO: 176798
  derived and/or modified CDS sequence (opt4) from neuraminidase__InfluenzaA__ACQ99624

SEQ ID NO: 176843 - RNA, 1410 nt, Artificial Sequence; identical to SEQ ID NO: 176788
  derived and/or modified CDS sequence (opt4) from neuraminidase__InfluenzaA__ACQ99626

SEQ ID NO: 176844 - RNA, 1410 nt, Artificial Sequence; identical to SEQ ID NO: 176788
  derived and/or modified CDS sequence (opt4) from neuraminidase__InfluenzaA__ACQ99627

SEQ ID NO: 176845 - RNA, 1410 nt, Artificial Sequence; identical to SEQ ID NO: 176788
  derived and/or modified CDS sequence (opt4) from neuraminidase__InfluenzaA__ACQ99628

SEQ ID NO: 176846 - RNA, 1410 nt, Artificial Sequence; identical to SEQ ID NO: 176788
  derived and/or modified CDS sequence (opt4) from neuraminidase__InfluenzaA__ACQ99629

SEQ ID NO: 176847 - RNA, 1410 nt, Artificial Sequence; identical to SEQ ID NO: 176788
  derived and/or modified CDS sequence (opt4) from neuraminidase__InfluenzaA__ACQ99630

SEQ ID NO: 176848 - RNA, 1410 nt, Artificial Sequence; identical to SEQ ID NO: 176798
  derived and/or modified CDS sequence (opt4) from neuraminidase__InfluenzaA__ACQ99632

SEQ ID NO: 176849 - RNA, 1410 nt, Artificial Sequence; identical to SEQ ID NO: 176798
  derived and/or modified CDS sequence (opt4) from neuraminidase__InfluenzaA__ACQ99633

SEQ ID NO: 176850 - RNA, 1410 nt, Artificial Sequence; identical to SEQ ID NO: 176788
  derived and/or modified CDS sequence (opt4) from neuraminidase__InfluenzaA__ACQ99635

SEQ ID NO: 176851 - RNA, 1410 nt, Artificial Sequence; identical to SEQ ID NO: 176788
  derived and/or modified CDS sequence (opt4) from neuraminidase__InfluenzaA__ACQ99636

SEQ ID NO: 176852 - RNA, 1410 nt, Artificial Sequence
  derived and/or modified CDS sequence (opt4) from neuraminidase__InfluenzaA__ACQ99684
augaaccccaaccagaagaucaucaccaucggcagcgugugcaugaccaucggcauggccaaccugauccugcagaucggcaacaucaucagcaucuggaucagccacagcauccagcugggcaaccagaaccagaucgagaccugcaaccagagcgugaucaccuacgagaacaacaccugggugaaccagaccuacgugaacaucagcaacaccaacuucgccgccggccagagcguggugagcgugaagcuggccggcaacagcagccugugccccgugagcggcugggccaucuacagcaaggacaacagcaucagaaucggcagcaagggcgacguguucgugaucagagagcccuucaucagcugcagcccccuggagugcagaaccuucuuccugacccagggcgcccugcugaacgacaagcacagcaacggcaccaucaaggacagaagccccuacagaacccugaugagcugccccaucggcgaggugcccagccccuacaacagcagauucgagagcguggccuggagcgccagcgccugccacgacggcaucaacuggcugaccaucggcaucagcggccccgacaacggcgccguggccgugcugaaguacaacggcaucaucaccgacaccaucaagagcuggagaaacaacauccugagaacccaggagagcgagugcgccugcgugaacggcagcugcuucaccgugaugaccgacggccccagcgacgagcaggccagcuacaagaucuucagaaucgagaagggcaagaucgugaagagcguggagaugaacgcccccaacuaccacuacgaggagugcagcugcuaccccgacagcagcgagaucaccugcgugugcagagacaacuggcacggcagcaacagacccugggugagcuucaaccagaaccuggaguaccagaucggcuacaucugcagcggcaucuucggcgacaaccccagacccaacgacaagaccggcagcugcggccccgugagcagcaacggcgccaacggcgugaagggcuucagcuucaaguacggcaacggcguguggaucggcagaaccaagagcaucagcagcagaaacggcuucgagaugaucugggaccccaacggcuggaccggcaccgacaacaacuucagcaucaagcaggacaucgugggcaucaacgaguggagcggcuacagcggcagcuucgugcagcaccccgagcugaccggccuggacugcaucagacccugcuucuggguggagcugaucagaggcagacccaaggagaacaccaucuggaccagcggcagcagcaucagcuucugcggcgugaacagcgacaccgugggcuggagcuggcccgacggcgccgagcugcccuucaccaucgacaaguga

SEQ ID NO: 176853 - RNA, 1410 nt, Artificial Sequence
  derived and/or modified CDS sequence (opt4) from neuraminidase__InfluenzaA__ACQ99824
augaacaccaaccagagaaucaucaccaucggcaccaucugccugaucgugggcaucaucagccugcugcugcagaucggcaacaucauccugcuguggaugagccacagcauccagaccggcgagaagagccaccccaaggugugcaaccagagcgugaucaccuacgagaacaacaccugggugaaccagaccuacgugaacaucagcaacaccaacaucgccgccggccagggcgugacccccaucauccuggccggcaacagcagccugugccccaucagcggcugggccaucuacagcaaggacaacagcaucagaaucggcagcaagggcgacaucuucgugaugagagagcccuucaucagcugcagccaccuggagugcagaaccuucuuccugacccagggcgcccugcugaacgacagacacagcaacggcaccgugaaggacagaagccccuacagaacccugaugagcugccccaucggcgaggcccccagccccuacaacagcagauucgagagcguggccuggagcgccagcgccugccacgacggcaugggcuggcugaccaucggcaucagcggccccgacaacggcgccguggccgugcugaaguacaacggcaucaucaccgacaccaucaagagcuggagaaacaagauccugagaacccaggagagcgagugcgugugcaucaacggcagcugcuucaccaucaugaccgacggccccagcaacggccaggccagcuacaagcuguucaagauggagaagggcaagaucaucaagagcaucgagcuggacgcccccaacuaccacuacgaggagugcagcugcuaccccgacaccggcaagguggugugcgugugcagagacaacuggcacgccagcaacagacccugggugagcuucgaccagaaccuggacuaccagaucggcuacaucugcagcggcguguucggcgacaaccccagaagcaacgacggcaagggcaacugcggccccgugcugagcaacggcgccaacggcgugaagggcuucagcuucagauacggcaacggcguguggaucggcagaaccaagagcaucagcagcagaagcggcuucgagaugaucugggaccccaacggcuggaccgagaccgacagcagcuucagcaugaagcaggacaucaucgcccugaccgacuggagcggcuacagcggcagcuucgugcagcaccccgagcugaccggcaugaacugcaucagacccugcuucuggguggagcugaucagaggccagcccaaggagagcaccaucuggaccagcggcagcagcaucagcuucugcggcgugaacagcggcaccgccagcuggagcuggcccgacggcgccgaccugcccuucaccaucgacaaguga

SEQ ID NO: 176854 - RNA, 1410 nt, Artificial Sequence; identical to SEQ ID NO: 176798
  derived and/or modified CDS sequence (opt4) from neuraminidase__InfluenzaA__ACR01015

SEQ ID NO: 176855 - RNA, 1410 nt, Artificial Sequence; identical to SEQ ID NO: 176798
  derived and/or modified CDS sequence (opt4) from neuraminidase__InfluenzaA__ACR08422

SEQ ID NO: 176856 - RNA, 1410 nt, Artificial Sequence; identical to SEQ ID NO: 176798
  derived and/or modified CDS sequence (opt4) from neuraminidase__InfluenzaA__ACR08432

SEQ ID NO: 176857 - RNA, 1410 nt, Artificial Sequence; identical to SEQ ID NO: 176798
  derived and/or modified CDS sequence (opt4) from neuraminidase__InfluenzaA__ACR08442

SEQ ID NO: 176858 - RNA, 1410 nt, Artificial Sequence; identical to SEQ ID NO: 176798
  derived and/or modified CDS sequence (opt4) from neuraminidase__InfluenzaA__ACR08452

SEQ ID NO: 176859 - RNA, 1410 nt, Artificial Sequence
  derived and/or modified CDS sequence (opt4) from neuraminidase__InfluenzaA__ACR08462
augagccccaaccagaagaucaucaccaucggcagcgugugcaugaccaucggcauggccaaccugauccugcagaucggcaacaucaucagcaucuggaucagccacagcauccagcugggcaaccagaaccagaucgagaccugcaaccagagcgugaucaccuacgagaacaacaccugggugaaccagaccuacgugaacaucagcaacaccaacuucgccgccggccagagcguggugagcgugaagcuggccggcaacagcagccugugccccgugagcggcugggccaucuacagcaaggacaacagcgugagaaucggcagcaagggcgacguguucgugaucagagagcccuucaucagcugcagcccccuggagugcagaaccuucuuccugacccagggcgcccugcugaacgacaagcacagcaacggcaccaucaaggacagaagccccuacagaacccugaugagcugccccaucggcgaggugcccagccccuacaacagcagauucgagagcguggccuggagcgccagcgccugccacgacggcaucaacuggcugaccaucggcaucagcggccccgacaacggcgccguggccgugcugaaguacaacggcaucaucaccgacaccaucaagagcuggagaaacaacauccugagaacccaggagagcgagugcgccugcgugaacggcagcugcuucaccgugaugaccgacggccccagcaacggccaggccagcuacaagaucuucagaaucgagaagggcaagaucgugaagagcguggagaugaacgcccccaacuaccacuacgaggagugcagcugcuaccccgacagcagcgagaucaccugcgugugcagagacaacuggcacggcagcaacagacccugggugagcuucaaccagaaccuggaguaccagaucggcuacaucugcagcggcaucuucggcgacaaccccagacccaacgacaagaccggcagcugcggccccgugagcagcaacggcgccaacggcgugaagggcuucagcuucaaguacggcaacggcguguggaucggcagaaccaagagcaucagcagcagaaacggcuucgagaugaucugggaccccaacggcuggaccggcaccgacaacaacuucagcaucaagcaggacaucgugggcaucaacgaguggagcggcuacagcggcagcuucgugcagcaccccgagcugaccggccuggacugcaucagacccugcuucuggguggagcugaucagaggcagacccaaggagaacaccaucuggaccagcggcagcagcaucagcuucugcggcgugaacagcgacaccgugggcuggagcuggcccgacggcgccgagcugcccuucaccaucgacaaguga

SEQ ID NO: 176860 - RNA, 1410 nt, Artificial Sequence
  derived and/or modified CDS sequence (opt4) from neuraminidase__InfluenzaA__ACR08565
augaaccccaaccagaagaucaucaccaucggcagcgugugcaugaccaucggcauggccaaccugauccugcagaucggcaacaucaucagcaucuggaucagccacagcauccagcugggcaaccagaaccagaucgagaccugcaaccagagcgugaucaccuacgagaacaacaccugggugaaccagaccuacgugaacaucagcaacaccaacuucgccgccggccagagcguggugcccgugaagcuggccggcaacagcagccugugccccgugagcggcugggccaucuacagcaaggacaacagcgugagaaucggcagcaagggcgacguguucgugaucagagagcccuucaucagcugcagcccccuggagugcagaaccuucuuccugacccagggcgcccugcugaacgacaagcacagcaacggcaccaucaaggacagaagccccuacagaacccugaugagcugccccaucggcgaggugcccagccccuacaacagcagauucgagagcguggccuggagcgccagcgccugccacgacggcaucaacuggcugaccaucggcaucagcggccccgacaacggcgccguggccgugcugaaguacaacggcaucaucaccgacaccaucaagagcuggagaaacaacauccugagaacccaggagagcgagugcgccugcgugaacggcagcugcuucaccgugaugaccgacggccccagcaacggccaggccagcuacaagaucuucagaaucgagaagggcaagaucgugaagagcguggagaugaacgcccccaacuaccacuacgaggagugcagcugcuaccccgacagcagcgagaucaccugcgugugcagagacaacuggcacggcagcaacagacccugggugagcuucaaccagaaccuggaguaccagaucggcuacaucugcagcggcaucuucggcgacaaccccagacccaacgacaagaccggcagcugcggccccgugagcagcaacggcgccaacggcgugaagggcuucagcuucaaguacggcaacggcguguggaucggcagaaccaagagcaucagcagcagaaacggcuucgagaugaucugggaccccaacggcuggaccggcaccgacaacaacuucagcaucaagcaggacaucgugggcaucaacgaguggagcggcuacagcggcagcuucgugcagcaccccgagcugaccggccuggacugcaucagacccugcuucuggguggagcugaucagaggcagacccaaggagaacaccaucuggaccagcggcagcagcaucagcuucugcggcgugaacagcgacaccgugggcuggagcuggcccgacggcgccgagcugcccuucaccaucgacaaguga

SEQ ID NO: 176861 - RNA, 1410 nt, Artificial Sequence; identical to SEQ ID NO: 176788
  derived and/or modified CDS sequence (opt4) from neuraminidase__InfluenzaA__ACR08566

SEQ ID NO: 176862 - RNA, 1410 nt, Artificial Sequence; identical to SEQ ID NO: 176798
  derived and/or modified CDS sequence (opt4) from neuraminidase__InfluenzaA__ACR08567

SEQ ID NO: 176863 - RNA, 1410 nt, Artificial Sequence; identical to SEQ ID NO: 176788
  derived and/or modified CDS sequence (opt4) from neuraminidase__InfluenzaA__ACR08568

SEQ ID NO: 176864 - RNA, 1410 nt, Artificial Sequence; identical to SEQ ID NO: 176788
  derived and/or modified CDS sequence (opt4) from neuraminidase__InfluenzaA__ACR08569

SEQ ID NO: 176865 - RNA, 1410 nt, Artificial Sequence; identical to SEQ ID NO: 176798
  derived and/or modified CDS sequence (opt4) from neuraminidase__InfluenzaA__ACR08570

SEQ ID NO: 176866 - RNA, 1410 nt, Artificial Sequence; identical to SEQ ID NO: 176788
  derived and/or modified CDS sequence (opt4) from neuraminidase__InfluenzaA__ACR08571

SEQ ID NO: 176867 - RNA, 1410 nt, Artificial Sequence; identical to SEQ ID NO: 176788
  derived and/or modified CDS sequence (opt4) from neuraminidase__InfluenzaA__ACR08572

SEQ ID NO: 176868 - RNA, 1410 nt, Artificial Sequence; identical to SEQ ID NO: 176788
  derived and/or modified CDS sequence (opt4) from neuraminidase__InfluenzaA__ACR08573

SEQ ID NO: 176869 - RNA, 1410 nt, Artificial Sequence; identical to SEQ ID NO: 176788
  derived and/or modified CDS sequence (opt4) from neuraminidase__InfluenzaA__ACR08574

SEQ ID NO: 176870 - RNA, 1410 nt, Artificial Sequence; identical to SEQ ID NO: 176798
  derived and/or modified CDS sequence (opt4) from neuraminidase__InfluenzaA__ACR08576

SEQ ID NO: 176871 - RNA, 1410 nt, Artificial Sequence; identical to SEQ ID NO: 176788
  derived and/or modified CDS sequence (opt4) from neuraminidase__InfluenzaA__ACR08577

SEQ ID NO: 176872 - RNA, 1410 nt, Artificial Sequence; identical to SEQ ID NO: 176788
  derived and/or modified CDS sequence (opt4) from neuraminidase__InfluenzaA__ACR09378

SEQ ID NO: 176873 - RNA, 1410 nt, Artificial Sequence; identical to SEQ ID NO: 176788
  derived and/or modified CDS sequence (opt4) from neuraminidase__InfluenzaA__ACR09379

SEQ ID NO: 176874 - RNA, 1410 nt, Artificial Sequence; identical to SEQ ID NO: 176798
  derived and/or modified CDS sequence (opt4) from neuraminidase__InfluenzaA__ACR09380

SEQ ID NO: 176875 - RNA, 1410 nt, Artificial Sequence; identical to SEQ ID NO: 176788
  derived and/or modified CDS sequence (opt4) from neuraminidase__InfluenzaA__ACR09381

SEQ ID NO: 176876 - RNA, 1410 nt, Artificial Sequence; identical to SEQ ID NO: 176788
  derived and/or modified CDS sequence (opt4) from neuraminidase__InfluenzaA__ACR09382

SEQ ID NO: 176877 - RNA, 1410 nt, Artificial Sequence; identical to SEQ ID NO: 176798
  derived and/or modified CDS sequence (opt4) from neuraminidase__InfluenzaA__ACR09383

SEQ ID NO: 176878 - RNA, 1410 nt, Artificial Sequence; identical to SEQ ID NO: 176788
  derived and/or modified CDS sequence (opt4) from neuraminidase__InfluenzaA__ACR09384

SEQ ID NO: 176879 - RNA, 1410 nt, Artificial Sequence; identical to SEQ ID NO: 176798
  derived and/or modified CDS sequence (opt4) from neuraminidase__InfluenzaA__ACR09385

SEQ ID NO: 176880 - RNA, 1410 nt, Artificial Sequence; identical to SEQ ID NO: 176788
  derived and/or modified CDS sequence (opt4) from neuraminidase__InfluenzaA__ACR09386

SEQ ID NO: 176881 - RNA, 1410 nt, Artificial Sequence; identical to SEQ ID NO: 176798
  derived and/or modified CDS sequence (opt4) from neuraminidase__InfluenzaA__ACR10189

SEQ ID NO: 176882 - RNA, 1410 nt, Artificial Sequence; identical to SEQ ID NO: 176798
  derived and/or modified CDS sequence (opt4) from neuraminidase__InfluenzaA__ACR10226

SEQ ID NO: 176883 - RNA, 1410 nt, Artificial Sequence; identical to SEQ ID NO: 176788
  derived and/or modified CDS sequence (opt4) from neuraminidase__InfluenzaA__ACR10236

SEQ ID NO: 176884 - RNA, 1410 nt, Artificial Sequence; identical to SEQ ID NO: 176788
  derived and/or modified CDS sequence (opt4) from neuraminidase__InfluenzaA__ACR10237

SEQ ID NO: 176885 - RNA, 1410 nt, Artificial Sequence
  derived and/or modified CDS sequence (opt4) from neuraminidase__InfluenzaA__ACR15186
augaaccccaaccagaagaucaucaccaucggcagcgugagccugaccaucagcaccaucugcuucuucaugcagaucgccauccugaucaccaccgugacccugcacuucaagcaguacgaguucaacagcccccccaacaaccaggugaugcugugcgagcccaccaucaucgagagaaacaucaccgagaucguguaccugaccaacaccaccaucgagaaggagaucugccccaagcuggccgaguacagaaaguggagcaagccccagugcaacaucaccggcuucgcccccuucagcaaggacaacagcaucagacugagcgccggcggcgacaucugggugaccagagagcccuacgugagcugcgaccccgacaagugcuaccaguucgcccugggccagggcaccacccugaacaacgugcacagcaacgacaccgugagagacagaacccccuacagaacccugcugaugaacgagcugggcgugcccuuccaccugggcaccaagcaggugugcaucgccuggagcagcagcagcugccacgacggcaaggccuggcugcacgugugcgugaccggcgacgacaagaacgccaccgccagcuucaucuacaacggcagacugguggacagcaucgugagcuggagcaaggagauccugagaacccaggagagcgagugcgugugcaucaacggcaccugcaccguggugaugaccgacggcagcgccagcggcaaggccgacaccaagauccuguucaucgaggagggcaagaucgugcacaccagcacccugagcggcagcgcccagcacguggaggagugcagcugcuaccccagacaccccggcgugagaugcgugugcagagacaacuggagaggcagcaacagacccaucguggacaucaacaugaaggacuacagcaucgugagcagcuacgugugcagcggccuggugggcgacacccccagaaagaacgacagcagcagcagcggccacugccuggaccccaacaacgaggagggcggccacggcgugaagggcugggccuucgacgacggcaacgacguguggaugggcagaaccaucagcgagaagcugagaagcggcuacgagaccuucaaggugaucgagggcuggagcaaccccaacagcaagcugcagaucaacagacaggugaucguggacagaggcaacagaagcggcuacagcggcaucuucagcguggagggcaagagcugcaucaacagaugcuucuacguggagcugaucagaggcagaaaggaggagaccgaggugcuguggaccagcaacagcaucgugguguucugcggcaccagcggcaccuacggcaccggcagcuggcccgacggcgccgacaucaaccugaugcccaucuga

SEQ ID NO: 176886 - RNA, 1413 nt, Artificial Sequence; identical to SEQ ID NO: 176692
  derived and/or modified CDS sequence (opt4) from neuraminidase__InfluenzaA__ACR15197

SEQ ID NO: 176887 - RNA, 1410 nt, Artificial Sequence
  derived and/or modified CDS sequence (opt4) from neuraminidase__InfluenzaA__ACR15208
augaaccccaaccagaagaucaucaccaucggcagcgugagccugaccaucagcaccaucugcuucuucaugcagaucgccauccugaucaccaccgugacccugcacuucaagcaguacgaguucaacagcccccccaacaaccaggugaugcugugcgagcccaccaucaucgagagaaacaucaccgagaucguguaccugaccaacaccaccaucgagaaggagaucugccccaagcuggccgaguacagaaacuggagcaagccccagugcgacaucaccggcuucgcccccuucagcaaggacaacagcaucagacugagcgccggcggcgacaucugggugaccagagagcccuacgugagcugcgaccccgacaagugcuaccaguucgcccugggccagggcaccacccugaacaacgugcacagcaacgacaccgugagagacagaacccccuacagaacccugcugaugaacgagcugggcgugcccuuccaccugggcaccaagcaggugugcaucgccuggagcagcagcagcugccacgacggcaaggccuggcugcacgugugcaucaccggcgacgacaagaacgccaccgccagcuucaucuacaacggcagacugguggacagcaucgugagcuggagcaaggagauccugagaacccaggagagcgagugcgugugcaucaacggcaccugcaccguggugaugaccgacggcagcgccagcggcaaggccgacaccaagauccuguucaucgaggagggcaagaucgugcacaccagcacccugagcggcagcgcccagcacguggaggagugcagcugcuaccccagauaccccggcgugagaugcgugugcagagacaacuggaagggcagcaacagacccaucguggacaucaacaucaaggaccacagcaucgugagcagcuacgugugcagcggccuggugggcgacacccccagaaagaacgacagcagcagcagcagccacugccuggaccccaacaacgaggagggcggccacggcgugaagggcugggccuucgacgacggcaacgacguguggaugggcagaaccaucagcgagaagagcagacugggcuacgagaccuucaaggugaucgagggcuggagcaaccccaagagcaagcugcagaucaacagacaggugaucguggacaagggcaacagaagcggcuacagcggcaucuucagcguggagggcaagagcugcaucaacagaugcuucuacguggagcugaucagaggcagaaaggaggagaccgaggugcuguggaccagcaacagcaucgugguguucugcggcaccagcggcaccuacggcaccggcagcuggcccgacggcgccgacaucaaccugaugcccaucuga

SEQ ID NO: 176888 - RNA, 1410 nt, Artificial Sequence
  derived and/or modified CDS sequence (opt4) from neuraminidase__InfluenzaA__ACR15230
auggaccccaaccagaagaucaucaccaucggcagcgugagccugaccaucagcgccaucugcuucuucaugcagaucgccauccugaucaccaccgugacccugcacuucaagcaguacgaguucaacagcccccccaacaaccaggugaugcugugcgagcccaccaucaucgagagaaacaucaccgagaucguguaccugaccaacaccaccaucgagaaggagaucugccccaagcuggccgaguacagaaacuggagcaagccccagugcaacaucaccggcuucgcccccuucagcaaggacaacagcaucagacugagcgccggcggcgacaucugggugaccagagagcccuacgugagcugcgaccccgacaagugcuaccaguucgcccugggccagggcaccacccugaacaacgugcacagcaacgacaccgugcacgacagaacccccuacagaacccugcugaugaacgagcugggcgugcccuuccaccugggcaccaagcaggugugcaucgccuggagcagcagcagcugccacgacggcaaggccuggcugcacgugugcgugaccggcgacgacgagaacgccaccgccagcuucaucuacaacggcagacugguggacagcguggugagcuggagcaagaagauccugagaacccaggagagcgagugcgugugcaucaacggcaccugcaccguggugaugaccgacggcagcgccagcggcaaggccgacaccaagauccuguucaucgaggagggcaagaucgugcacaccagcacccugagcggcagcgcccagcacguggaggagugcagcugcuaccccagauaccccggcgugagaugcgugugcagagacaacuggaagggcagcaacagacccaucguggacaucaacaucaaggacuacagcaucgugagcagcuacgugugcagcggccuggugggcgacacccccagaaagaacgacagcagcagcaacagccacugccuggaccccaacaacgaggagggcggccacggcgugaagggcugggccuucgacgacggcaacgacguguggaugggcagaaccaucagcgagaagcugagaagcggcuacgagaccuucaaggugaucgagggcuggagcaaccccaacagcaagcugcagaucaacagacaggugaucguggacagaggcaacagaagcggcuacagcggcaucuucagcguggagggcaagagcugcaucaacagaugcuucuacguggagcugaucagaggcagaaaccaggagaccgaggugcuguggaccagcaacagcaucgugguguucugcggcaccagcggcaccuacggcaccggcagcuggcccgacggcgccgacaucaaccugaugcccaucuga

SEQ ID NO: 176889 - RNA, 1413 nt, Artificial Sequence; identical to SEQ ID NO: 176692
  derived and/or modified CDS sequence (opt4) from neuraminidase__InfluenzaA__ACR15241

SEQ ID NO: 176890 - RNA, 1410 nt, Artificial Sequence; identical to SEQ ID NO: 175944
  derived and/or modified CDS sequence (opt4) from neuraminidase__InfluenzaA__ACR15252

SEQ ID NO: 176891 - RNA, 1413 nt, Artificial Sequence
  derived and/or modified CDS sequence (opt4) from neuraminidase__InfluenzaA__ACR15263
augaaccccaaccagaagaucaucaccaucggcagcaucagcaucgccaucggcaucaucagccugaugcugcagaucggcaacaucaucagcaucugggccagccacagcauccagaccggcagccagaacaacaccggcaucugcaaccagagaaucaucaccuacgagaacagcaccugggugaaccacaccuacgugaacaucaacaacaccaacgugguggccggcgaggacaagaccagcgugacccuggccggcaacagcagccugugcagcaucagcggcugggccaucuacaccaaggacaacagcaucagaaucggcagcaagggcgacguguucgugaucagagagcccuucaucagcugcagccaccuggagugcagaaccuucuuccugacccagggcgcccugcugaacgacaagcacagcaacggcaccgugaaggacagaagccccuacagagcccugaugagcugcccccugggcgaggcccccagccccuacaacagcaaguucgagagcguggccuggagcgccagcgccugccacgacggcaugggcuggcugaccaucggcaucagcggccccgacaacggcgccguggccgugcugaaguacaacggcaucaucaccggcaccaucaagagcuggaagaagcagauccugagaacccaggagagcgagugcgugugcaugaacggcagcugcuucaccaucaugaccgacggccccagcaacaaggccgccagcuacaagaucuucaagaucgagaagggcaaggugaccaagagcaucgagcugaacgcccccaacuuccacuacgaggagugcagcugcuaccccgacaccggcaucgugaugugcgugugcagagacaacuggcacggcagcaacagacccugggugagcuucaaccagaaccuggacuaccagaucggcuacaucugcagcggcguguucggcgacaaccccagacccgaggacggcgagggcagcugcaaccccgugaccguggacggcgccaacggcgugaagggcuucagcuacaaguacgacaacggcguguggaucggcagaaccaagagcaacagacugagaaagggcuucgagaugaucugggaccccaacggcuggaccaacaccgacagcgacuucagcgugaagcaggacgugguggccaucaccgacuggagcggcuacagcggcagcuucgugcagcaccccgagcugaccggccuggacugcaucagacccugcuucuggguggagcuggugagaggccugcccagagagaacaccaccaucuggagcagcggcagcagcaucagcuucugcggcgugaacagcgacaccgccaacuggagcuggcccgacggcgccgagcugcccuucaccaucgacaaguga

SEQ ID NO: 176892 - RNA, 1413 nt, Artificial Sequence; identical to SEQ ID NO: 176692
  derived and/or modified CDS sequence (opt4) from neuraminidase__InfluenzaA__ACR15274

SEQ ID NO: 176893 - RNA, 1413 nt, Artificial Sequence
  derived and/or modified CDS sequence (opt4) from neuraminidase__InfluenzaA__ACR15307
augaaccccaaccagaagaucaucaccaucggcagcaucagcaucaccaucggcaucaucagccugaugcugcagaucggcaacaucaucagcaucugggccagccacagcauccagaccggcagccagaaccacaccggcaucugcaaccagagaaucaucaccuacgagaacaacaccugggugaaccacaccuacgugaacaucaacaacaccaacgugguggccggcaaggacaagaccagcgugacccuggccggcaacagcagccugugcagcaucagcggcugggccaucuacaccaaggacaacagcaucagaaucggcagcaagggcgacguguucgugaucagagagcccuucaucagcugcagccaccuggagugcagaaccuucuuccugacccagggcgcccugcugaacgacaagcacagcaacggcaccgugaaggacagaagccccuacagagcccugaugagcugcccccugggcgaggcccccagccccuacaacagcaaguucgagagcguggccuggagcgccagcgccugccacgacggcaugggcuggcugaccaucggcaucagcggccccgacaacggcgccguggccgugcugaaguacaacggcaucaucaccgagaccaucaagagcuggaagaagagaauccugagaacccaggagagcgagugcgugugcgugaacggcagcugcuucaccaucaugaccgacggccccagcaacggcgccgccagcuacaagaucuucaagaucgagaagggcaaggugaccaagagcaucgagcugaacgcccccaacuuccacuacgaggagugcagcugcuaccccgacaccggcaccgugaugugcgugugcagagacaacuggcacggcagcaacagacccugggugagcuucaaccagaaccuggacuaccagaucggcuacaucugcagcggcguguucggcgacaaccccagacccaaggacggcgagggcagcugcaaccccgugaccguggacggcgccgacggcgugaagggcuucagcuacaaguacggcaacggcguguggaucggcagaaccaagagcaacagacugagaaagggcuucgagaugaucugggaccccaacggcuggaccgacaccgacagcgacuucagcgugaagcaggacgugguggccaucaccgacuggagcggcuacagcggcagcuucgugcagcaccccgagcugaccggccuggacugcaucagacccugcuucuggguggagcuggugagaggccugcccagagagaacaccaccaucuggaccagcggcagcagcaucagcuucugcggcgugaacagcgacaccgccaacuggagcuggcccgacggcgccgagcugcccuucaccaucgacaaguga

SEQ ID NO: 176894 - RNA, 1413 nt, Artificial Sequence
  derived and/or modified CDS sequence (opt4) from neuraminidase__InfluenzaA__ACR15318
augaaccccaaccagaagaucaucaccaucggcagcaucagcaucgccaucggcaucaucagccugaugcugcagaucggcaacaucaucagcaucugggccagccacagcauccagaccggcagccagaaccacaccggcgugugcaaccagagaaucaucaccuacgagaacagcaccugggugaaccacaccuacgugaacaucaacaacaccaacgugaucgccggcaaggacaagaccagcgugacccuggccggcaacagcagccugugcagcaucagcggcugggccaucuacaccaaggacaacagcaucagaaucggcagcaagggcgacguguucgugaucagagagcccuucaucagcugcagccaccuggagugcagaaccuucuuccugacccagggcgcccugcugaacgacaagcacagcaacggcaccgugaaggacagaagccccuacagagcccugaugagcugcccccugggcgaggcccccagccccuacaacagcaaguucgagagcguggccuggagcgccagcgccugccacgacggcaugggcuggcugaccaucggcaucagcggccccgacaacggcgccguggccgugcugaaguacaacggcaucaucaccgagaccaucaagagcuggaagagacagauccugagaacccaggagagcgagugcgugugcgugaacggcagcugcuucaccaucaugaccgacggccccagcaacggcgccgccagcuacaagaucuucaagaucgagaagggcaaggugaccaagagcaucgagcugaacgcccccaacuuccacuacgaggagugcagcugcuaccccgacaccggcaccgugaugugcgugugcagagacaacuggcacggcagcaacagacccugggugagcuucaaccagaaccuggacuaccagaucggcuacaucugcagcggcguguucggcgacaaccccagacccaaggacggcgagggcagcugcaaccccgugaccguggacggcgccaacggcgugaagggcuucagcuacaaguacggcaacggcguguggaucggcagaaccaagagcaacagacugagaaagggcuucgagaugaucugggaccccaacggcuggaccgacaccgacagcgacuucagcgugaagcaggacgugguggccaucaccgacuggagcggcuacagcggcagcuucgugcagcaccccgagcugaccggccuggacugcaucagacccugcuucuggguggagcuggugagaggccugcccaaggagaacaccaccaucuggaccagcggcagcagcaucagcuucugcggcgugaacagcgacaccgccaacuggagcuggcccgacggcgccgagcugcccuucaccaucgacaaguga

SEQ ID NO: 176895 - RNA, 1413 nt, Artificial Sequence
  derived and/or modified CDS sequence (opt4) from neuraminidase__InfluenzaA__ACR15329
augaaccccaaccagaagaucaucaccaucggcagcaucagcaucgccaucggcaucaucagccugaugcugcagaucggcaacaucaucagcaucugggccagccacagcauccagaccagaagccagaaccacaccggcgugugcaaccagagaaucaucaccuacgagaacagcaccugggugaaccacaccuacgugaacaucaacaacaccaacgugaucgccggcaaggacaagaccagcgugacccuggccggcaacagcagccugugcagcaucagcggcugggccaucuacaccaaggacaacagcaucagaaucggcagcaagggcgacguguucgugaucagagagcccuucaucagcugcagccaccuggagugcagaaccuucuuccugacccagggcgcccugcugaacgacaagcacagcaacggcaccgugaaggacagaagccccuacagagcccugaugagcugcccccugggcgaggcccccagccccuacaacagcaaguucgagagcguggccuggagcgccagcgccugccacgacggcaugggcuggcugaccaucggcaucagcggccccgacaacggcgccguggccgugcugaaguacaacggcaucaucaccgagaccaucaagagcuggaagaagcagauccugagaacccaggagagcgagugcgugugcgugaacggcagcugcuucaccaucaugaccgacggccccagcaacggcgccgccagcuacaagaucuucaagaucgagaagggcaaggugaccaagagcaucgagcugaacgcccccaacuuccacuacgaggagugcagcugcuaccccgacaccggcaccgugaugugcgugugcagagacaacuggcacggcagcaacagacccugggugagcuucaaccagaaccuggacuaccagaucggcuacaucugcagcggcguguucggcgacaaccccagacccaaggacggcgagggcagcugcaaccccgugaccguggacggcgccaacggcgugaagggcuucagcuacaaguacggcaacggcguguggaucggcagaaccaagagcaacagacugagaaagggcuucgagaugaucugggaccccaacggcuggaccgacaccgacagcgacuucagcgugaagcaggacgugguggccaucaccgacuggagcggcuacagcggcagcuucgugcagcaccccgagcugaccggccuggacugcaucagacccugcuucuggguggagcuggugagaggccugcccaaggagaacaccaccaucuggaccagcggcagcagcaucagcuucugcggcgugaacagcgacaccgccaacuggagcuggcccgacggcgccgagcugcccuucaccaucgacaaguga

SEQ ID NO: 176896 - RNA, 1413 nt, Artificial Sequence; identical to SEQ ID NO: 176692
  derived and/or modified CDS sequence (opt4) from neuraminidase__InfluenzaA__ACR15340

SEQ ID NO: 176897 - RNA, 1413 nt, Artificial Sequence; identical to SEQ ID NO: 176692
  derived and/or modified CDS sequence (opt4) from neuraminidase__InfluenzaA__ACR15362

SEQ ID NO: 176898 - RNA, 1413 nt, Artificial Sequence; identical to SEQ ID NO: 176692
  derived and/or modified CDS sequence (opt4) from neuraminidase__InfluenzaA__ACR15373

SEQ ID NO: 176899 - RNA, 1413 nt, Artificial Sequence
  derived and/or modified CDS sequence (opt4) from neuraminidase__InfluenzaA__ACR15428
augaaccccaaccagaagaucaucaccaucggcagcaucagcaucgccaucggcaucaucagccugaugcugcagaucggcaacaucaucagcaucugggccagccacagcauccagaccggcagccagaacaacaccggcaucugcaaccagagaaucaucaccuacgagaacagcaccugggugaaccacaccuacgugaacaucaacaacaccaacgugguggccggcgaggacaagaccagcgugacccuggccggcaacagcagccugugcagcgugagcggcugggccaucuacaccaaggacaacagcaucagaaucggcagcaagggcgacguguucgugaucagagagcccuucaucagcugcagccaccuggagugcagaaccuucuuccugaccaagggcgcccugcugaacgacaagcacagcaacggcaccgugaaggacagaagccccuacagagcccugaugagcugcccccugggcgaggcccccagccccuacaacagcaaguucgagagcguggccuggagcgccagcgccugccacgacggcaugggcuggcugaccaucggcaucagcggccccgacaacggcgccguggccgugcugaaguacaacggcaucaucaccggcaccaucaagagcuggaagaagcagauccugagaacccaggagagcgagugcgugugcaugaacggcagcugcuucaccaucaugaccgacggccccagcaacaaggccgccagcuacaagaucuucaagaucgagaagggcaaggugaccaagagcaucgagcugaacgcccccaacuuccacuacgaggagugcagcugcuaccccgacaccggcaucgugaugugcgugugcagagacaacuggcacggcagcaacagacccugggugagcuucaaccagaaccuggacuaccagaucggcuacaucugcagcggcguguucggcgacaaccccagacccgaggacggcgagggcagcugcaaccccgugaccguggacggcgccaacggcgugaagggcuucagcuacaaguacgacaacggcguguggaucggcagaaccaagagcaacagacugagaaagggcuucgagaugaucugggaccccaacggcuggaccaacaccgacagcgacuucagcgugaagcaggacgugguggccaucaccgacuggagcggcuacagcggcagcuucgugcagcaccccgagcugaccggccuggacugcaucagacccugcuucuggguggagcuggugagaggccugcccagagagaacaccaccaucuggaccagcggcagcagcaucagcuucugcggcgugaacagcgacaccgccaacuggagcuggcccgacggcgccgagcugcccuucaccaucgacaaguga

SEQ ID NO: 176900 - RNA, 1413 nt, Artificial Sequence
  derived and/or modified CDS sequence (opt4) from neuraminidase__InfluenzaA__ACR15472
augaaccccaaccagaagaucaucaccaucggcagcaucagcaucgccaucggcaucaucagccugaugcugcagaucggcaacaucaucagcaucugggccagccacagcauccagaccggcagccagaacaacaccggcaucugcaaccagagaaucaucaccuacgagaacagcaccugggugaaccacaccuacgugaacaucaacaacaccaacgugguggccggcgaggacaagacccccgugacccuggccggcaacagcagccugugcagcaucagcggcugggccaucuacaccaaggacaacagcaucagaaucggcagcaagggcgacguguucgugaucagagagcccuucaucgccugcagccaccuggagugcagaaccuucuuccugacccagggcgcccugcugaacgacaagcacagcaacggcaccgugaaggacagaagccccuacagagcccugaugagcugcccccugggcgaggcccccagccccuacaacagcaaguucgagagcguggccuggagcgccagcgccugccacgacggcaugggcuggcugaccaucggcaucagcggccccgacaacggcgccguggccgugcugaaguacaacggcaucaucaccggcaccaucaagagcuggaagaagcagauccugagaacccaggagagcgagugcgugugcaugaacggcagcugcuucaccaucaugaccgacggccccagcaacaaggccgccagcuacaagaucuucaagaucgagaagggcaaggugaccaagagcaucgagcugaacgcccccaacuuccacuacgaggagugcagcugcuaccccgacaccggcaucgugaugugcgugugcagagacaacuggcacggcagcaacagacccugggugagcuucaaccagaaccuggacuaccagaucggcuacaucugcagcggcguguucggcgacaaccccagacccgaggacggcgagggcagcugcaaccccgugaccguggacggcgccaacggcgugaagggcuucagcuacaaguacgacaacggcguguggaucggcagaaccaagagcaacagacugagaaagggcuucgaggugaucugggaccccaacggcuggaccaacaccgacagcgacuucagcgugaagcaggacgugguggccaucaccgacuggagcggcuacagcggcagcuucgugcagcaccccgagcugaccggccuggacugcaucagacccugcuucuggguggagcuggugagaggccugcccagagagaacaccaccaucuggaccagcggcagcagcaucagcuucugcggcgugaacagcgacaccgccaacuggagcuggcccgacggcgccgagcugcccuucaccaucgacaaguga

SEQ ID NO: 176901 - RNA, 1413 nt, Artificial Sequence; identical to SEQ ID NO: 176692
  derived and/or modified CDS sequence (opt4) from neuraminidase__InfluenzaA__ACR15483

SEQ ID NO: 176902 - RNA, 1413 nt, Artificial Sequence; identical to SEQ ID NO: 176692
  derived and/or modified CDS sequence (opt4) from neuraminidase__InfluenzaA__ACR15505

SEQ ID NO: 176903 - RNA, 1413 nt, Artificial Sequence; identical to SEQ ID NO: 176776
  derived and/or modified CDS sequence (opt4) from neuraminidase__InfluenzaA__ACR15516

SEQ ID NO: 176904 - RNA, 1410 nt, Artificial Sequence; identical to SEQ ID NO: 174774
  derived and/or modified CDS sequence (opt4) from neuraminidase__InfluenzaA__ACR15527

SEQ ID NO: 176905 - RNA, 1410 nt, Artificial Sequence
  derived and/or modified CDS sequence (opt4) from neuraminidase__InfluenzaA__ACR15538
augauccccauccagaagaucaucaccaucggcagcgugagccugaccaucagcaccaucugcuucuucaugcagaucgccauccugaucaccaccgugacccugcacuucaagcaguacgaguucaacagcccccccaacaaccaggugaugcugugcgagcccaccaucaucgagagaaacaucaccgagaucguguaccugaccaacaccaccaucgagaaggagaucugccccaagcuggccgaguacagaaacuggagcaagccccagugcgacaucaccggcuucgcccccuucagcaaggacaacagcaucagacugagcgccggcggcgacaucugggugaccagagagcccuacgugagcugcgaccccgacaagugcuaccaguucgcccugggccagggcaccacccugaacaacgugcacagcaacgacaccgugcacgacagaacccccuacagaacccugcugaugaacgagcugggcgugcccuuccaccugggcaccaagcaggugugcaucgccuggagcagcagcagcugccacgacggcaaggccuggcugcacgugugcgugaccggcgacgacaagaacgccaccgccagcuucaucuacaacggcagacugguggacagcaucgugagcuggagcaaggagauccugagaacccaggagagcgagugcgugugcaucaacggcaccugcaccguggugaugaccgacggcagcgccagcggcaaggccgacaccaagauccuguucaucgaggagggcaagaucgugcacaccagcacccugagcggcagcgcccagcacguggaggagugcagcugcuaccccagauaccccggcgugagaugcgugugcagagacaacuggaagggcagcaacagacccaucguggacaucaacaucaaggacuacagcaucgugagcagcuacgugugcagcggccuggugggcgacacccccagaaagaacgacagcagcagcagcagccacugccuggaccccaacaacgaggagggcggccacggcgugaagggcugggccuucgacgacggcaacgacguguggaugggcagaaccaucagcgagaagcugagaagcggcuacgagaccuucaaggugaucgagggcuggagcaaccccaacagcaagcugcagaucaacagacaggugaucguggacagaggcaacagaagcggcuacagcggcaucuucagcguggagggcaagagcugcaucaacagaugcuucuacguggagcugaucagaggcagaaaggaggagaccgaggugcuguggaccagcaacagcaucgugguguucugcggcaccagcggcaccuacggcaccggcagcuggcccgacggcgccgacaucaaccugaugcccaucuga

SEQ ID NO: 176906 - RNA, 1410 nt, Artificial Sequence; identical to SEQ ID NO: 174387
  derived and/or modified CDS sequence (opt4) from neuraminidase__InfluenzaA__ACR15549

SEQ ID NO: 176907 - RNA, 1410 nt, Artificial Sequence; identical to SEQ ID NO: 174772
  derived and/or modified CDS sequence (opt4) from neuraminidase__InfluenzaA__ACR15560

SEQ ID NO: 176908 - RNA, 1410 nt, Artificial Sequence; identical to SEQ ID NO: 174772
  derived and/or modified CDS sequence (opt4) from neuraminidase__InfluenzaA__ACR15582

SEQ ID NO: 176909 - RNA, 1410 nt, Artificial Sequence
  derived and/or modified CDS sequence (opt4) from neuraminidase__InfluenzaA__ACR15593
augaaccccaaccagaagaucaucaccaucggcagcgugagccugaccaucagcaccaucugcuucuucaugcagaucgccauccugaucaccaccgugacccugcacuucaagcaguacgaguucaacagcccccccaacaaccaggugaugcugugcgagcccaccaucaucgagagaaacaucaccgagaucguguaccugaccaacaccaccaucgagaaggagaucugccccaagcaggccgaguacagaaacuggagcaagccccagugcaacaucaccggcuucgcccccuucagcaaggacaacagcaucagacugagcgccggcggcgacaucugggugaccagagagcccuacgugagcugcgaccccgacaagugcuaccaguucgcccugggccagggcaccacccugaacaacgugcacagcaacgacaccgugcacgacagaacccccuacagaacccugcugaugaacgagcugggcgugcccuuccaccugggcaccaagcaggugugcaucgccuggagcagcagcagcugccacgacggcaaggccuggcugcacgugugcgugaccggcgacgacaagaacgccaccgccagcuucaucuacaacggcagacugguggacagcaucgugagcuggagcaaggagauccugagaacccaggagagcgagugcgugugcaucaacggcaccugcaccguggugaugaccgacggcagcgccagcggcaaggccgacaccaagauccuguucaucgaggagggcaagaucgugcacaccagcacccugagcggcagcgcccagcacguggaggagugcagcugcuaccccagauaccccggcgugagaugcgugugcagagacaacuggaagggcagcaacagacccaucguggacaucaacaucaaggacuacagcaucgugagcagcuacgugugcagcggccuggugggcgacacccccagaaagaacgacagcagcagcagcagccacugccuggaccccaacaacgaggagggcggccacggcgugaagggcugggccuucgacgacggcaacgacguguggaugggcagaaccaucagcgagaagcugagaagcggcuacgagaccuucaaggugaucgagggcuggagcaaccccaacagcaagcugcagaucaacagacaggugaucguggacagaggcaacagaagcggcuacagcggcaucuucagcguggagggcaagagcugcaucaacagaugcuucuacguggagcugaucagaggcagaaaggaggagaccgaggugcuguggaccagcaacagcaucgugguguucugcggcaccagcggcaccuacggcaccggcagcuggcccgacggcgccgacaucaaccugaugcccaucuga

SEQ ID NO: 176910 - RNA, 1410 nt, Artificial Sequence
  derived and/or modified CDS sequence (opt4) from neuraminidase__InfluenzaA__ACR15604
augaaccccaaccagaagaucaucaccaucggcagcgugagccugaccaucagcaccaucugcuucuucaugcagaucgccauccugaucaccaccgugacccugcacuucaagcaguacgaguucaacagcccccccaacaaccaggugaugcugugcgagcccaccaucaucgagagaaacaucaccgagaucguguaccugaccaacaccaccaucgagaaggagaucugccccaagcuggccgaguacagaaacuggagcaagccccagugcaacaucaccggcuucgcccccuucagcaaggacaacagcaucagacugagcgccggcggcgacaucugggugaccagagagcccuacgugagcugcgaccccgacaagugcuaccaguucgcccugggccagggcaccacccugaacaacgugcacagcaacgacaccgugcacgacagaacccccuacagaacccugcugaugaacgagcugggcgugcccuuccaccugggcaccaagcaggugugcaucgccuggagcagcagcagcugccacgacggcaaggccuggcugcacgugugcgugaccggcgacgacaagaacgccaccgccagcuucaucuacaacggcagacugguggacagcaucgugagcuggagcaaggagauccugagaacccaggagagcgagugcgugugcaucaacggcaccugcaccguggugaugaccgacggcagcgccagcggcaaggccgacaccaagauccuguucaucgaggagggcaagaucgugcacaccagcacccugagcggcagcgcccagcacguggaggagugcagcugcuaccccagauaccccggcgugagaugcgugugcagagacaacuggaagggcagcaacagacccaucguggacaucaacaucaaggacuacagcaucgugagcagcuacgugugcagcggccuggugggcgacacccccagaaagaacgacagcagcagcagcagccacugccuggaccccaacaacgaggagggcggccacggcgugaagggcugggccuucgacgacggcaacgacguguggaugggcagaaccaucagcgagaagcugagaagcggcuacgagaccuucaaggugaucgagggcuggagcaaccccaacagcaagcugcagaucaacagacaggugaucguggacagaggcgacagaagcggcuacagcggcaucuucagcguggagggcaagagcugcaucaacagaugcuucuacguggagcugaucagaggcagaaaggaggagaccgaggugcuguggaccagcaacagcaucgugguguucugcggcaccagcggcaccuacggcaccggcagcuggcccgacggcgccgacaucaaccugaugcccaucuga

SEQ ID NO: 176911 - RNA, 1410 nt, Artificial Sequence; identical to SEQ ID NO: 176788
  derived and/or modified CDS sequence (opt4) from neuraminidase__InfluenzaA__ACR15618

SEQ ID NO: 176912 - RNA, 1410 nt, Artificial Sequence; identical to SEQ ID NO: 176788
  derived and/or modified CDS sequence (opt4) from neuraminidase__InfluenzaA__ACR18924

SEQ ID NO: 176913 - RNA, 1410 nt, Artificial Sequence; identical to SEQ ID NO: 176788
  derived and/or modified CDS sequence (opt4) from neuraminidase__InfluenzaA__ACR18925

SEQ ID NO: 176914 - RNA, 1410 nt, Artificial Sequence; identical to SEQ ID NO: 176798
  derived and/or modified CDS sequence (opt4) from neuraminidase__InfluenzaA__ACR18926

SEQ ID NO: 176915 - RNA, 1410 nt, Artificial Sequence; identical to SEQ ID NO: 176798
  derived and/or modified CDS sequence (opt4) from neuraminidase__InfluenzaA__ACR18927

SEQ ID NO: 176916 - RNA, 1410 nt, Artificial Sequence; identical to SEQ ID NO: 176798
  derived and/or modified CDS sequence (opt4) from neuraminidase__InfluenzaA__ACR18928

SEQ ID NO: 176917 - RNA, 1410 nt, Artificial Sequence; identical to SEQ ID NO: 176798
  derived and/or modified CDS sequence (opt4) from neuraminidase__InfluenzaA__ACR18929

SEQ ID NO: 176918 - RNA, 1410 nt, Artificial Sequence; identical to SEQ ID NO: 176798
  derived and/or modified CDS sequence (opt4) from neuraminidase__InfluenzaA__ACR18930

SEQ ID NO: 176919 - RNA, 1410 nt, Artificial Sequence; identical to SEQ ID NO: 176798
  derived and/or modified CDS sequence (opt4) from neuraminidase__InfluenzaA__ACR18931

SEQ ID NO: 176920 - RNA, 1410 nt, Artificial Sequence; identical to SEQ ID NO: 176798
  derived and/or modified CDS sequence (opt4) from neuraminidase__InfluenzaA__ACR18933

SEQ ID NO: 176921 - RNA, 1410 nt, Artificial Sequence; identical to SEQ ID NO: 176788
  derived and/or modified CDS sequence (opt4) from neuraminidase__InfluenzaA__ACR18934

SEQ ID NO: 176922 - RNA, 1410 nt, Artificial Sequence; identical to SEQ ID NO: 176798
  derived and/or modified CDS sequence (opt4) from neuraminidase__InfluenzaA__ACR18935

SEQ ID NO: 176923 - RNA, 1410 nt, Artificial Sequence; identical to SEQ ID NO: 176798
  derived and/or modified CDS sequence (opt4) from neuraminidase__InfluenzaA__ACR23301

SEQ ID NO: 176924 - RNA, 1410 nt, Artificial Sequence; identical to SEQ ID NO: 176798
  derived and/or modified CDS sequence (opt4) from neuraminidase__InfluenzaA__ACR32997

SEQ ID NO: 176925 - RNA, 1410 nt, Artificial Sequence
  derived and/or modified CDS sequence (opt4) from neuraminidase__InfluenzaA__ACR33740
augaaccccaaccagaagaucaucaccaucggcagcgugugcaugaccaucggcauggccaaccugauccugcagaucggcaacaucaucagcaucuggaucagccacagcauccagcugggcaaccagaaccagaucgagaccugcaaccagagcgugaucaccuacgagaacaacaccugggugaaccagaccuacgugaacaucagcaacaccaacuucgccgccggccagagcguggugagcgugaagcuggccggcaacagcagccugugccccgugagcggcugggccaucuacagcaaggacaacagcaucagaaucggcagcaagggcgacguguucgugaucagagagcccuucaucagcugcagcccccuggagugcagaaccuucuuccugacccagggcgcccugcugaacgacaagcacagcaacggcaccaucaaggacagaagccccuacagaacccugaugagcugccccaucggcgaggugcccagccccuacaacagcagauucgagagcguggccuggagcgccagcgccugccacgacggcaucaacuggcugaccaucggcaucagcggccccgacaacggcgccguggccgugcugaaguacaacggcaucaucaccgacaccaucaagagcuggagaaacaacauccugagaacccaggagagcgagugcgccugcgugaacggcagcugcuucaccgugaugaccgacggccccagcgacggccaggccagcuacaagaucuucagaaucgagaagggcaagaucgugaagagcguggagaugaacgcccccaacuaccacuacgaggagugcagcugcuaccccgacagcagcgagaucaccugcgugugcagagacaacuggcacggcagcaacagacccugggugagcuucaaccagaaccuggaguaccagaucggcuacaucugcagcggcaucuucggcgacaaccccagacccaacgacaagaccggcagcugcggccccgugagcagcaacggcgccaacggcgugaagggcuucagcuucaaguacggcaacggcguguggaucggcagaaccaagagcaucagcagcagaaacggcuucgagaugaucugggaccccaacggcuggaccggcaccgacaacaacuucagcaucaagcaggacaucgugggcaucaacgaguggagcggcuacagcggcagcuucgugcagcaccccgagcugaccggccuggacugcaucagacccugcuucuggguggagcugaucagaggcagacccaaggagaacaccaucuggaccagcggcagcagcaucagcuucugcggcgugaacagcggcaccgugggcuggagcuggcccgacggcgccgagcugcccuucaccaucgacaaguga

SEQ ID NO: 176926 - RNA, 1410 nt, Artificial Sequence; identical to SEQ ID NO: 176788
  derived and/or modified CDS sequence (opt4) from neuraminidase__InfluenzaA__ACR38792

SEQ ID NO: 176927 - RNA, 1410 nt, Artificial Sequence; identical to SEQ ID NO: 176798
  derived and/or modified CDS sequence (opt4) from neuraminidase__InfluenzaA__ACR38793

SEQ ID NO: 176928 - RNA, 1410 nt, Artificial Sequence; identical to SEQ ID NO: 176798
  derived and/or modified CDS sequence (opt4) from neuraminidase__InfluenzaA__ACR38794

SEQ ID NO: 176929 - RNA, 1410 nt, Artificial Sequence; identical to SEQ ID NO: 176798
  derived and/or modified CDS sequence (opt4) from neuraminidase__InfluenzaA__ACR38878

SEQ ID NO: 176930 - RNA, 1410 nt, Artificial Sequence; identical to SEQ ID NO: 176798
  derived and/or modified CDS sequence (opt4) from neuraminidase__InfluenzaA__ACR39357

SEQ ID NO: 176931 - RNA, 1410 nt, Artificial Sequence; identical to SEQ ID NO: 176798
  derived and/or modified CDS sequence (opt4) from neuraminidase__InfluenzaA__ACR39396

SEQ ID NO: 176932 - RNA, 1410 nt, Artificial Sequence; identical to SEQ ID NO: 176798
  derived and/or modified CDS sequence (opt4) from neuraminidase__InfluenzaA__ACR39406

SEQ ID NO: 176933 - RNA, 1410 nt, Artificial Sequence; identical to SEQ ID NO: 176798
  derived and/or modified CDS sequence (opt4) from neuraminidase__InfluenzaA__ACR39416

SEQ ID NO: 176934 - RNA, 1410 nt, Artificial Sequence; identical to SEQ ID NO: 176798
  derived and/or modified CDS sequence (opt4) from neuraminidase__InfluenzaA__ACR39426

SEQ ID NO: 176935 - RNA, 1410 nt, Artificial Sequence; identical to SEQ ID NO: 176798
  derived and/or modified CDS sequence (opt4) from neuraminidase__InfluenzaA__ACR39436

SEQ ID NO: 176936 - RNA, 1410 nt, Artificial Sequence; identical to SEQ ID NO: 176798
  derived and/or modified CDS sequence (opt4) from neuraminidase__InfluenzaA__ACR39446

SEQ ID NO: 176937 - RNA, 1410 nt, Artificial Sequence; identical to SEQ ID NO: 176798
  derived and/or modified CDS sequence (opt4) from neuraminidase__InfluenzaA__ACR39456

SEQ ID NO: 176938 - RNA, 1410 nt, Artificial Sequence; identical to SEQ ID NO: 176798
  derived and/or modified CDS sequence (opt4) from neuraminidase__InfluenzaA__ACR39466

SEQ ID NO: 176939 - RNA, 1410 nt, Artificial Sequence; identical to SEQ ID NO: 176798
  derived and/or modified CDS sequence (opt4) from neuraminidase__InfluenzaA__ACR39476

SEQ ID NO: 176940 - RNA, 1410 nt, Artificial Sequence; identical to SEQ ID NO: 176798
  derived and/or modified CDS sequence (opt4) from neuraminidase__InfluenzaA__ACR39486

SEQ ID NO: 176941 - RNA, 1410 nt, Artificial Sequence; identical to SEQ ID NO: 176798
  derived and/or modified CDS sequence (opt4) from neuraminidase__InfluenzaA__ACR39496

SEQ ID NO: 176942 - RNA, 1410 nt, Artificial Sequence; identical to SEQ ID NO: 176798
  derived and/or modified CDS sequence (opt4) from neuraminidase__InfluenzaA__ACR40291

SEQ ID NO: 176943 - RNA, 1410 nt, Artificial Sequence; identical to SEQ ID NO: 176798
  derived and/or modified CDS sequence (opt4) from neuraminidase__InfluenzaA__ACR40301

SEQ ID NO: 176944 - RNA, 1410 nt, Artificial Sequence
  derived and/or modified CDS sequence (opt4) from neuraminidase__InfluenzaA__ACR40311
augaaccccaaccagaagaucaucaccaucggcagcgugugcaugaccaucggcauggccaaccugauccugcagaucggcaacaucaucagcaucuggaucagccacagcauccagcugggcaaccagaaccagaccgagaccugcaaccagagcgugaucaccuacgagaacaacaccugggugaaccagaccuacgugaacaucagcaacaccaacuucgccgccggccagagcguggugagcgugaagcuggccggcaacagcagccugugccccgugagcggcugggccaucuacagcaaggacaacagcgugagaaucggcagcaagggcgacguguucgugaucagagagcccuucaucagcugcagcccccuggagugcagaaccuucuuccugacccagggcgcccugcugaacgacaagcacagcaacggcaccaucaaggacagaagccccuacagaacccugaugagcugccccaucggcgaggugcccagccccuacaacagcagauucgagagcguggccuggagcgccagcgccugccacgacggcaucaacuggcugaccaucggcaucagcggccccgacaacggcgccguggccgugcugaaguacaacggcaucaucaccgacaccaucaagagcuggagaaacaacauccugagaacccaggagagcgagugcgccugcgugaacggcagcugcuucaccgugaugaccgacggccccagcaacggccaggccagcuacaagaucuucagaaucgagaagggcaagaucgugaagagcguggagaugaacgcccccaacuaccacuacgaggagugcagcugcuaccccgacagcagcgagaucaccugcgugugcagagacaacuggcacggcagcaacagacccugggugagcuucaaccagaaccuggaguaccagaucggcuacaucugcagcggcaucuucggcgacaaccccagacccaacgacaagaccggcagcugcggccccgugagcagcaacggcgccaacggcgugaagggcuucagcuucaaguacggcaacggcguguggaucggcagaaccaagagcaucagcagcagaaacggcuucgagaugaucugggaccccaacggcuggaccggcaccgacaacaacuucagcaucaagcaggacaucgugggcaucaacgaguggagcggcuacagcggcagcuucgugcagcaccccgagcugaccggccuggacugcaucagacccugcuucuggguggagcugaucagaggcagacccaaggagaacaccaucuggaccagcggcagcagcaucagcuucugcggcgugaacagcgacaccgugggcuggagcuggcccgacggcgccgagcugcccuucaccaucgacaaguga

SEQ ID NO: 176945 - RNA, 1410 nt, Artificial Sequence
  derived and/or modified CDS sequence (opt4) from neuraminidase__InfluenzaA__ACR40321
augaaccccaaccagaagaucaucaccaucggcagcgugugcaugaccaucggcauggccaaccugauccugcagaucggcaacaucaucagcaucuggaucagccacagcauccagcugggcaaccagaaccagaucgagaccugcaaccagagcgugaucaccuacgagaacaacaccugggugaaccagaccuacgugaacaucagcaacaccaacuucgccgccggccagagcguggugagcgugaagcuggccggcaacagcagccugugccccgugagcggcugggccaucuacagcaaggacaacagcaucagaaucggcagcaagggcgacguguucgugaucagagagcccuucaucagcugcagcccccuggagugcagaaccuucuuccugacccagggcgcccugcugaacgacaagcacagcaacggcaccaucaaggacagaagccccuacagaacccugaugagcugccccaucggcgaggugcccagccccuacaacagcagauucgagagcguggccuggagcgccagcgccugccacgacggcaucaacuggcugaccaucggcaucagcggccccgacaacggcgccguggccgugcugaaguacaacggcaucaucaccgacaccaucaagagcuggagaaacaacauccugagaacccaggagagcgagugcgccugcgugaacggcagcugcuucaccgugaugaccgacggccccagcgacggccaggccagcuacaagaucuucagaaucgagaagggcaagaucgugaagagcguggagaugaacgcccccaacuaccacuacgaggagugcagcugcuaccccgacagcagcgagaucaccugcgugugcagagacaacuggcacggcagcaacagacccugggugagcuucaaccagaaccuggaguaccagaucggcuacaucugcagcggcaucuucggcgacaaccccagacccaacgacaagaccggcagcugcggccccgugagcagcaacggcgccaacggcgugaagggcuucagcuucaaguacggcaacggcguguggaucggcagaaccaagagcaucagcagcagaaacggcuucgagaugaucugggaccccaacggcuggaacggcaccgacaacaacuucagcaucaagcaggacaucgugggcaucaacgaguggagcggcuacagcggcagcuucgugcagcaccccgagcugaccggccuggacugcaucagacccugcuucuggguggagcugaucagaggcagacccaaggagaacaccaucuggaccagcggcagcagcaucagcuucugcggcgugaacagcgacaccgugggcuggagcuggcccgacggcgccgagcugcccuucaccaucgacaaguga

SEQ ID NO: 176946 - RNA, 1410 nt, Artificial Sequence; identical to SEQ ID NO: 176798
  derived and/or modified CDS sequence (opt4) from neuraminidase__InfluenzaA__ACR40341

SEQ ID NO: 176947 - RNA, 1410 nt, Artificial Sequence; identical to SEQ ID NO: 176798
  derived and/or modified CDS sequence (opt4) from neuraminidase__InfluenzaA__ACR40351

SEQ ID NO: 176948 - RNA, 1410 nt, Artificial Sequence; identical to SEQ ID NO: 176798
  derived and/or modified CDS sequence (opt4) from neuraminidase__InfluenzaA__ACR40361

SEQ ID NO: 176949 - RNA, 1410 nt, Artificial Sequence; identical to SEQ ID NO: 176798
  derived and/or modified CDS sequence (opt4) from neuraminidase__InfluenzaA__ACR40371

SEQ ID NO: 176950 - RNA, 1410 nt, Artificial Sequence; identical to SEQ ID NO: 176798
  derived and/or modified CDS sequence (opt4) from neuraminidase__InfluenzaA__ACR40391

SEQ ID NO: 176951 - RNA, 1410 nt, Artificial Sequence; identical to SEQ ID NO: 176788
  derived and/or modified CDS sequence (opt4) from neuraminidase__InfluenzaA__ACR46663

SEQ ID NO: 176952 - RNA, 1410 nt, Artificial Sequence; identical to SEQ ID NO: 176788
  derived and/or modified CDS sequence (opt4) from neuraminidase__InfluenzaA__ACR46673

SEQ ID NO: 176953 - RNA, 1410 nt, Artificial Sequence
  derived and/or modified CDS sequence (opt4) from neuraminidase__InfluenzaA__ACR46996
augaaccccaaccagaagaucaucaccaucggcagcgugugcaugaccaucggcauggccaaccugauccugcagaucggcaacaucaucagcaucuggaucagccacagcauccagcugggcaaccagaaccagaucgagaccugcaaccagagcgugaucaccuacgagaacaacaccugggugaaccagaccuacgugaacaucagcaacaccaacuucgccgccggccagagcguggugagcgugaagcuggccggcaacagcagccugugccccgugagcggcugggccaucuacagcaaggacaacagcaucagaaucggcagcaagggcgacguguucgugaucagagagcccuucaucagcugcagcccccuggagugcagaaccuucuuccugacccagggcgcccugcugaacgacaagcacagcaacggcaccaucaaggacagaagccccuacagaacccugaugagcugccccaucggcgaggugcccagccccuacaacagcagauucgagagcguggccuggagcgccagcgccugccacgacggcaucaacuggcugaccaucggcaucagcggccccgacaacggcgccguggccgugcugaaguacaacggcaucaucaccgacaccaucaagagcuggagaaacaacauccugagaacccaggagagcgagugcgccugcgugaacggcagcugcuucaccgugaugaccgacggccccagcaacggccaggccagcuacaagaucuucagaaucgagaagggcaagaucgugaagagcguggagaugaacgcccccaacuaccacuacgaggagugcagcugcuaccccgacagcagcgagaucaccugcgugugcagagacaacuggcacggcagcaacagacccugggugagcuucaaccagaaccuggaguaccagaucggcuacaucugcagcggcaucuucggcgacaaccccagacccaacgacaagaccggcagcugcggccccgugagcagcaacggcgccaacggcgugaagggcuucagcuucaaguacggcaacggcguguggaucggcagaaccaagagcaucagcagcagaaacggcuucgagaugaucugggaccccaacggcuggaccggcaccgacaacaacuucagcaucaagcaggacaucgugggcaucaacgaguggagcggcuacagcggcagcuucgugcagcaccccgagcugaccggccuggacugcaucagacccugcuucuggguggagcugaucagaggcagacccaaggagaacaccaucuggaccagcggcagcagcaucagcuucugcggcgugaacagcgacaccgugggcuggagcuggcccgacggcgccgagcugcccuucaccaucgacaaguga

SEQ ID NO: 176954 - RNA, 1410 nt, Artificial Sequence; identical to SEQ ID NO: 176953
  derived and/or modified CDS sequence (opt4) from neuraminidase__InfluenzaA__ACR46997

SEQ ID NO: 176955 - RNA, 1410 nt, Artificial Sequence; identical to SEQ ID NO: 176953
  derived and/or modified CDS sequence (opt4) from neuraminidase__InfluenzaA__ACR46998

SEQ ID NO: 176956 - RNA, 1410 nt, Artificial Sequence; identical to SEQ ID NO: 176953
  derived and/or modified CDS sequence (opt4) from neuraminidase__InfluenzaA__ACR46999

SEQ ID NO: 176957 - RNA, 1410 nt, Artificial Sequence; identical to SEQ ID NO: 176953
  derived and/or modified CDS sequence (opt4) from neuraminidase__InfluenzaA__ACR47000

SEQ ID NO: 176958 - RNA, 1410 nt, Artificial Sequence; identical to SEQ ID NO: 176953
  derived and/or modified CDS sequence (opt4) from neuraminidase__InfluenzaA__ACR47001

SEQ ID NO: 176959 - RNA, 1410 nt, Artificial Sequence; identical to SEQ ID NO: 176953
  derived and/or modified CDS sequence (opt4) from neuraminidase__InfluenzaA__ACR47002

SEQ ID NO: 176960 - RNA, 1410 nt, Artificial Sequence; identical to SEQ ID NO: 176953
  derived and/or modified CDS sequence (opt4) from neuraminidase__InfluenzaA__ACR47003

SEQ ID NO: 176961 - RNA, 1410 nt, Artificial Sequence
  derived and/or modified CDS sequence (opt4) from neuraminidase__InfluenzaA__ACR47008
augaaccccaaccagaagaucaucaccaucggcagcgugugcaugaccaucggcauggccaaccugauccugcagaucggcaacaucaucagcaucuggcccgugcacagcauccagcugggcaaccagaaccagaucgagaccugcaaccagagcgugaucaccuacgagaacaacaccugggugaaccagaccuacgugaacaucagcaacaccaacuucgccgccggccagagcguggugagcaugaagcuggccggcaacagcagccugugccccgugggcggcugggccaucuacagcaaggacaacagcgugagaaucggcagcaagggcgacguguucgugaucagagagcccuucaucagcugcagcccccuggagugcagaaccuucuuccugacccagggcgcccugcugaacgacaagcacagcaacggcaccaucaaggacagaagccccuacagaacccugaugagcugccccaucggcgaggugcccagccccuacaacagcagauucgagagcguggccuggagcgccagcgccugccacgacggcaucaacuggcugaccaucggcaucagcggccccgacaacggcgccguggccgugcugaaguacaacggcaucaucaccgacaccaucaagagcuggagaaacaacauccugagaacccaggagagcgagugcgccugcgugaacggcagcugcuucaccgugaugaccgacggccccagcaacggccaggccagcuacaagaucuucagaaucgagaagggcaagaucgugaagagcguggagaugaacgcccccaacuaccacuacgaggagugcagcugcuaccccgacagcagcgagaucaccugcgugugcagagacaacuggcacggcagcaacagacccugggugagcuucaaccagaaccuggaguaccagaucggcuacaucugcagcggcaucuucggcgacaaccccagacccaacgacaagaccggcagcugcggccccgugagcagcaacggcgccaacggcgugaagggcuucagcuucaaguacggcaacggcguguggaucggcagaaccaagagcaucagcagcagaaacggcuucgagaugaucugggaccccaacggcuggaccggcaccgacaacaacuucagcaucaagcaggacaucgugggcaucaacgaguggagcggcuacagcggcagcuucgugcagcaccccgagcugaccggccuggacugcaucagacccugcuucuggguggagcugaucagaggcagacccaaggagaacaccaucuggaccagcggcagcagcaucagcuucugcggcgugaacagcgacaccgugggcuggagcuggcccgacggcgccgagcugcccuucaccaucgacaaguga

SEQ ID NO: 176962 - RNA, 1410 nt, Artificial Sequence; identical to SEQ ID NO: 176798
  derived and/or modified CDS sequence (opt4) from neuraminidase__InfluenzaA__ACR49267

SEQ ID NO: 176963 - RNA, 1410 nt, Artificial Sequence; identical to SEQ ID NO: 176788
  derived and/or modified CDS sequence (opt4) from neuraminidase__InfluenzaA__ACR49268

SEQ ID NO: 176964 - RNA, 1410 nt, Artificial Sequence; identical to SEQ ID NO: 176788
  derived and/or modified CDS sequence (opt4) from neuraminidase__InfluenzaA__ACR49269

SEQ ID NO: 176965 - RNA, 1410 nt, Artificial Sequence; identical to SEQ ID NO: 176788
  derived and/or modified CDS sequence (opt4) from neuraminidase__InfluenzaA__ACR49270

SEQ ID NO: 176966 - RNA, 1410 nt, Artificial Sequence; identical to SEQ ID NO: 176828
  derived and/or modified CDS sequence (opt4) from neuraminidase__InfluenzaA__ACR49271

SEQ ID NO: 176967 - RNA, 1410 nt, Artificial Sequence; identical to SEQ ID NO: 176798
  derived and/or modified CDS sequence (opt4) from neuraminidase__InfluenzaA__ACR49272

SEQ ID NO: 176968 - RNA, 1410 nt, Artificial Sequence; identical to SEQ ID NO: 176788
  derived and/or modified CDS sequence (opt4) from neuraminidase__InfluenzaA__ACR49273

SEQ ID NO: 176969 - RNA, 1410 nt, Artificial Sequence; identical to SEQ ID NO: 176788
  derived and/or modified CDS sequence (opt4) from neuraminidase__InfluenzaA__ACR49274

SEQ ID NO: 176970 - RNA, 1410 nt, Artificial Sequence; identical to SEQ ID NO: 176828
  derived and/or modified CDS sequence (opt4) from neuraminidase__InfluenzaA__ACR49275

SEQ ID NO: 176971 - RNA, 1410 nt, Artificial Sequence; identical to SEQ ID NO: 176828
  derived and/or modified CDS sequence (opt4) from neuraminidase__InfluenzaA__ACR49277

SEQ ID NO: 176972 - RNA, 1410 nt, Artificial Sequence; identical to SEQ ID NO: 176828
  derived and/or modified CDS sequence (opt4) from neuraminidase__InfluenzaA__ACR49278

SEQ ID NO: 176973 - RNA, 1410 nt, Artificial Sequence; identical to SEQ ID NO: 176788
  derived and/or modified CDS sequence (opt4) from neuraminidase__InfluenzaA__ACR49279

SEQ ID NO: 176974 - RNA, 1410 nt, Artificial Sequence; identical to SEQ ID NO: 176788
  derived and/or modified CDS sequence (opt4) from neuraminidase__InfluenzaA__ACR50994

SEQ ID NO: 176975 - RNA, 1410 nt, Artificial Sequence; identical to SEQ ID NO: 176798
  derived and/or modified CDS sequence (opt4) from neuraminidase__InfluenzaA__ACR50998

SEQ ID NO: 176976 - RNA, 1410 nt, Artificial Sequence; identical to SEQ ID NO: 176798
  derived and/or modified CDS sequence (opt4) from neuraminidase__InfluenzaA__ACR51008

SEQ ID NO: 176977 - RNA, 1410 nt, Artificial Sequence; identical to SEQ ID NO: 176798
  derived and/or modified CDS sequence (opt4) from neuraminidase__InfluenzaA__ACR51018

SEQ ID NO: 176978 - RNA, 1410 nt, Artificial Sequence; identical to SEQ ID NO: 176798
  derived and/or modified CDS sequence (opt4) from neuraminidase__InfluenzaA__ACR51028

SEQ ID NO: 176979 - RNA, 1410 nt, Artificial Sequence
  derived and/or modified CDS sequence (opt4) from neuraminidase__InfluenzaA__ACR51038
augaaccccaaccagaagaucaucaccaucggcagcgugugcaugagcaucggcauggccaaccugauccugcagaucggcaacaucaucagcaucuggaucagccacagcauccagcugggcaaccagaaccagaucgagaccugcaaccagagcgugaucaccuacgagaacaacaccugggugaaccagaccuacgugaacaucagcaacaccaacuucgccgccggccagagcguggugagcgugaagcuggccggcaacagcagccugugccccgugagcggcugggccaucuacagcaaggacaacagcaucagaaucggcagcaagggcgacguguucgugaucagagagcccuucaucagcugcagcccccuggagugcagaaccuucuuccugacccagggcgcccugcugaacgacaagcacagcaacggcaccaucaaggacagaagccccuacagaacccugaugagcugccccaucggcgaggugcccagccccuacaacagcagauucgagagcguggccuggagcgccagcgccugccacgacggcaucaacuggcugaccaucggcaucagcggccccgacaacggcgccguggccgugcugaaguacaacggcaucaucaccgacaccaucaagagcuggagaaacaacauccugagaacccaggagagcgagugcgccugcgugaacggcagcugcuucaccgugaugaccgacggccccagcgacggccaggccagcuacaagaucuucagaaucgagaagggcaagaucgugaagagcguggagaugaacgcccccaacuaccacuacgaggagugcagcugcuaccccgacagcagcgagaucaccugcgugugcagagacaacuggcacggcagcaacagacccugggugagcuucaaccagaaccuggaguaccagaucggcuacaucugcagcggcaucuucggcgacaaccccagacccaacgacaagaccggcagcugcggccccgugagcagcaacggcgccaacggcgugaagggcuucagcuucaaguacggcaacggcguguggaucggcagaaccaagagcaucagcagcagaaacggcuucgagaugaucugggaccccaacggcuggaccggcaccgacaacaacuucagcaucaagcaggacaucgugggcaucaacgaguggagcggcuacagcggcagcuucgugcagcaccccgagcugaccggccuggacugcaucagacccugcuucuggguggagcugaucagaggcagacccaaggagaacaccaucuggaccagcggcagcagcaucagcuucugcggcgugaacagcgacaccgugggcuggagcuggcccgacggcgccgagcugcccuucaccaucgacaaguga

SEQ ID NO: 176980 - RNA, 1410 nt, Artificial Sequence; identical to SEQ ID NO: 176798
  derived and/or modified CDS sequence (opt4) from neuraminidase__InfluenzaA__ACR51048

SEQ ID NO: 176981 - RNA, 1410 nt, Artificial Sequence; identical to SEQ ID NO: 176798
  derived and/or modified CDS sequence (opt4) from neuraminidase__InfluenzaA__ACR51058

SEQ ID NO: 176982 - RNA, 1410 nt, Artificial Sequence; identical to SEQ ID NO: 176788
  derived and/or modified CDS sequence (opt4) from neuraminidase__InfluenzaA__ACR51068

SEQ ID NO: 176983 - RNA, 1410 nt, Artificial Sequence; identical to SEQ ID NO: 176798
  derived and/or modified CDS sequence (opt4) from neuraminidase__InfluenzaA__ACR52371

SEQ ID NO: 176984 - RNA, 1410 nt, Artificial Sequence; identical to SEQ ID NO: 176798
  derived and/or modified CDS sequence (opt4) from neuraminidase__InfluenzaA__ACR52381

SEQ ID NO: 176985 - RNA, 1410 nt, Artificial Sequence; identical to SEQ ID NO: 176798
  derived and/or modified CDS sequence (opt4) from neuraminidase__InfluenzaA__ACR52391

SEQ ID NO: 176986 - RNA, 1410 nt, Artificial Sequence; identical to SEQ ID NO: 176798
  derived and/or modified CDS sequence (opt4) from neuraminidase__InfluenzaA__ACR52401

SEQ ID NO: 176987 - RNA, 1410 nt, Artificial Sequence; identical to SEQ ID NO: 176798
  derived and/or modified CDS sequence (opt4) from neuraminidase__InfluenzaA__ACR52411

SEQ ID NO: 176988 - RNA, 1410 nt, Artificial Sequence; identical to SEQ ID NO: 176798
  derived and/or modified CDS sequence (opt4) from neuraminidase__InfluenzaA__ACR52421

SEQ ID NO: 176989 - RNA, 1410 nt, Artificial Sequence; identical to SEQ ID NO: 176798
  derived and/or modified CDS sequence (opt4) from neuraminidase__InfluenzaA__ACR52431

SEQ ID NO: 176990 - RNA, 1410 nt, Artificial Sequence; identical to SEQ ID NO: 176798
  derived and/or modified CDS sequence (opt4) from neuraminidase__InfluenzaA__ACR52441

SEQ ID NO: 176991 - RNA, 1410 nt, Artificial Sequence; identical to SEQ ID NO: 176798
  derived and/or modified CDS sequence (opt4) from neuraminidase__InfluenzaA__ACR52451

SEQ ID NO: 176992 - RNA, 1410 nt, Artificial Sequence; identical to SEQ ID NO: 176798
  derived and/or modified CDS sequence (opt4) from neuraminidase__InfluenzaA__ACR52471

SEQ ID NO: 176993 - RNA, 1410 nt, Artificial Sequence; identical to SEQ ID NO: 176798
  derived and/or modified CDS sequence (opt4) from neuraminidase__InfluenzaA__ACR52481

SEQ ID NO: 176994 - RNA, 1410 nt, Artificial Sequence; identical to SEQ ID NO: 176798
  derived and/or modified CDS sequence (opt4) from neuraminidase__InfluenzaA__ACR52491

SEQ ID NO: 176995 - RNA, 1410 nt, Artificial Sequence; identical to SEQ ID NO: 176798
  derived and/or modified CDS sequence (opt4) from neuraminidase__InfluenzaA__ACR54046

SEQ ID NO: 176996 - RNA, 1410 nt, Artificial Sequence; identical to SEQ ID NO: 176788
  derived and/or modified CDS sequence (opt4) from neuraminidase__InfluenzaA__ACR54052

SEQ ID NO: 176997 - RNA, 1410 nt, Artificial Sequence; identical to SEQ ID NO: 176798
  derived and/or modified CDS sequence (opt4) from neuraminidase__InfluenzaA__ACR54966

SEQ ID NO: 176998 - RNA, 1410 nt, Artificial Sequence; identical to SEQ ID NO: 176798
  derived and/or modified CDS sequence (opt4) from neuraminidase__InfluenzaA__ACR54976

SEQ ID NO: 176999 - RNA, 1410 nt, Artificial Sequence; identical to SEQ ID NO: 176798
  derived and/or modified CDS sequence (opt4) from neuraminidase__InfluenzaA__ACR54986

SEQ ID NO: 177000 - RNA, 1410 nt, Artificial Sequence; identical to SEQ ID NO: 176788
  derived and/or modified CDS sequence (opt4) from neuraminidase__InfluenzaA__ACR54996

SEQ ID NO: 177001 - RNA, 1410 nt, Artificial Sequence; identical to SEQ ID NO: 176798
  derived and/or modified CDS sequence (opt4) from neuraminidase__InfluenzaA__ACR55006

SEQ ID NO: 177002 - RNA, 1410 nt, Artificial Sequence; identical to SEQ ID NO: 176788
  derived and/or modified CDS sequence (opt4) from neuraminidase__InfluenzaA__ACR56383

SEQ ID NO: 177003 - RNA, 1410 nt, Artificial Sequence; identical to SEQ ID NO: 176788
  derived and/or modified CDS sequence (opt4) from neuraminidase__InfluenzaA__ACR56393

SEQ ID NO: 177004 - RNA, 1410 nt, Artificial Sequence; identical to SEQ ID NO: 176798
  derived and/or modified CDS sequence (opt4) from neuraminidase__InfluenzaA__ACR56403

SEQ ID NO: 177005 - RNA, 1410 nt, Artificial Sequence; identical to SEQ ID NO: 176798
  derived and/or modified CDS sequence (opt4) from neuraminidase__InfluenzaA__ACR56413

SEQ ID NO: 177006 - RNA, 1410 nt, Artificial Sequence; identical to SEQ ID NO: 176798
  derived and/or modified CDS sequence (opt4) from neuraminidase__InfluenzaA__ACR56423

SEQ ID NO: 177007 - RNA, 1410 nt, Artificial Sequence; identical to SEQ ID NO: 176798
  derived and/or modified CDS sequence (opt4) from neuraminidase__InfluenzaA__ACR56433

SEQ ID NO: 177008 - RNA, 1410 nt, Artificial Sequence; identical to SEQ ID NO: 176798
  derived and/or modified CDS sequence (opt4) from neuraminidase__InfluenzaA__ACR56443

SEQ ID NO: 177009 - RNA, 1410 nt, Artificial Sequence; identical to SEQ ID NO: 176798
  derived and/or modified CDS sequence (opt4) from neuraminidase__InfluenzaA__ACR56453

SEQ ID NO: 177010 - RNA, 1413 nt, Artificial Sequence; identical to SEQ ID NO: 176776
  derived and/or modified CDS sequence (opt4) from neuraminidase__InfluenzaA__ACR58555

SEQ ID NO: 177011 - RNA, 1413 nt, Artificial Sequence
  derived and/or modified CDS sequence (opt4) from neuraminidase__InfluenzaA__ACR61658
augaaccccaaccagaagaucaucaccaucggcagcaucagcaucgccaucggcaucaucagccugaugcugcagaucggcaacaucaucagcaucugggccagccacagcauccagaccggcagccagaaccacaccggcaucugcaaccagagaaucaucaccuacgagaacagcaccugggugaaccacaccuacgugagcaucaacaacaccaacguggugaccggcaaggacaagaccagcgugacccuggccggcaacagcagccugugcagcaucagcggcugggccaucuacaccaaggacaacagcaucagaaucggcagcaagggcgacguguucgugaucagagagcccuucaucagcugcagccaccuggagugcagaaccuucuuccugacccagggcgcccugcugaacgacaagcacagcaacggcaccgugaaggacagaagccccuacagagcccugaugagcugcccccugggcgaggcccccagccccuacaacagcaaguucgagagcguggccuggagcgccagcgccugccacgacggcaugggcuggcugaccaucggcaucagcggccccgacaacggcgccguggccgugcugaaguacaacggcaucaucaccgagaccaucaagagcuggaagaagagaauccugagaacccaggagagcgagugcgugugcgugaacggcagcugcuucaccaucaugaccgacggccccagcaacggcgccgccagcuacaagaucuucaagaucgagaagggcaaggugaccaagagcaucgagcugaacgcccccaacuuccacuacgaggagugcagcugcuaccccgacaccggcaccgugaugugcgugugcagagacaacuggcacggcagcaacagacccugggugagcuucaaccagaaccuggacuaccagaucggcuacaucugcagcggcguguucggcgacaaccccagacccaaggacggcaagggcagcugcaaccccgugaccguggacggcgccgacggcgugaagggcuucagcuacaaguacggcaacggcguguggaucggcagaaccaagagcaacagacugagaaagggcuucgagaugaucugggaccccaacggcuggaccgacaccgacagcgacuucagcgugaagcaggacgugguggccaucaccgacuggagcggcuacagcggcagcuucgugcagcaccccgagcugaccggccuggacugcaucagacccugcuucuggguggagcuggugagaggccugcccagagagaacaccaccaucuggaccagcggcagcagcaucagcuucugcggcguggacagcgacaccgccaacuggagcuggcccgacggcgccgagcugcccuucaccaucgacaaguga

SEQ ID NO: 177012 - RNA, 1410 nt, Artificial Sequence
  derived and/or modified CDS sequence (opt4) from neuraminidase__InfluenzaA__ACR61680
augaaccccaaccagaagaucaucaccaucggcagcgugagccugaccaucagcaccaucugcuucuucaugcagaucgccauccugaucaccaccgugacccugcacuucaagcaguacgaguucaacagcccccccaacaaccaggugaugcugugcgagcccaccaucaucgagagaaacaucaccgagaucguguaccugaccaacaccaccaucgagaaggagaucugccccaagcuggccgaguacagaaacuggagcaagccccagugcgacaucaccggcuucgcccccuucagcaaggacaacagcaucagacugagcgccggcggcgacaucugggugaccagagagcccuacgugagcugcgaccccgacaagugcuaccaguucgcccugggccagggcaccacccugaacaacgugcacagcaacgacaccgugagagacagaacccccuacagaacccugcugaugaacgagcugggcgugcccuuccaccugggcaccaagcaggugugcaucgccuggagcagcagcagcugccacgacggcaaggccuggcugcacgugugcaucaccggcgacgacaagaacgccaccgccagcuucaucuacaacggcagacugguggacagcguggugagcuggagcaaggagauccugagaacccaggagagcgagugcgugugcaucaacggcaccugcaucguggugaugaccgacggcagcgccagcggcaaggccgacaccaagauccuguucaucgaggagggcaagaucgugcacaccagcacccugagcggcagcgcccagcacguggaggagugcagcugcuaccccagauaccccggcgugagaugcgugugcagagacaacuggaagggcagcaacagacccaucguggacaucaacaucaaggaccacagcaucgugagcagcuacgugugcagcggccuggugggcgacacccccagaaagaacgacagcagcagcagcagccacugccuggaccccaacaacgaggagggcggccacggcgugaagggcugggccuucgacgacggcaacgacguguggaugggcagaaccaucagcgagaagagcagacugggcuacgagaccuucaaggugaucgagggcuggagcaaccccaagagcaagcugcagaucaacagacaggugaucguggacagaggcaacagaagcggcuacagcggcaucuucagcguggagggcaagagcugcaucaacagaugcuucuacguggagcugaucagaggcagaaaggaggagaccgaggugcuguggaccagcaacagcaucgugguguucugcggcaccagcggcaccuacggcaccggcagcuggcccgacggcgccgacaucaaccugaugcccaucuga

SEQ ID NO: 177013 - RNA, 1410 nt, Artificial Sequence
  derived and/or modified CDS sequence (opt4) from neuraminidase__InfluenzaA__ACR61691
augaaccccaaccagaagaucaucaccaucggcagcgugagccugaccaucagcaccaucugcuucuucaugcagaucgccauccugaucaccaccgugacccugcacuucaagcaguacgaguucaacagcccccccaacaaccaggugaugcugugcgagcccaccaucaucgagagaaacaucaccgagaucguguaccugaccaacaccaccaucgagaaggagaucugccacaagcuggccgaguacagaaacuggagcaagccccagugcgacaucaccggcuucgcccccuucagcaaggacaacagcaucagacugagcgccggcggcgacaucugggugaccagagagcccuacgugagcugcgaccccgacaagugcuaccaguucgcccugggccagggcaccacccugaacaacgugcacagcaacaacaccgugagagacagaacccccuacagaacccugcugaugaacgagcugggcgugcccuuccaccugggcaccaagcaggugugcaucgccuggagcagcagcagcugccacgacggcaaggccuggcugcacgugugcaucaccggcgacgacaagaacgccaccgccagcuucaucuacaacggcagacugguggacagcguggugagcuggagcaaggagauccugagaacccaggagagcgagugcgugugcaucaacggcaccugcaccguggugaugaccgacggcagcgccagcggcaaggccgacaccaagauccuguucaucgaggagggcaagaucgugcacaccagcacccugagcggcagcgcccagcacguggaggagugcagcugcuaccccagauaccccggcgugagaugcgugugcagagacaacuggaagggcagcaacagacccaucguggacaucaacaucaaggaccacagcaucgugagcagcuacgugugcagcggccuggugggcgacacccccagaaagaacgacagcagcagcagcagccacugccuggaccccaacaacgaggagggcggccacggcgugaagggcugggccuucgacgacggcaacgacguguggaugggcagaaccaucagcgagaagagcagacugggcuacgagaccuucaaggugaucgagggcuggagcaaccccaagagcaagcugcagaucaacagacaggugaucguggacagaggcaacagaagcggcuacagcggcaucuucagcguggagggcaagagcugcaucaacagaugcuucuacguggagcugaucagaggcagaaaggaggagaccgaggugcuguggaccagcaacagcaucgugguguucugcggcaccagcggcaccuacggcaccggcagcuggcccgacggcgccgacaucaaccugaugcccaucuga

SEQ ID NO: 177014 - RNA, 1410 nt, Artificial Sequence
  derived and/or modified CDS sequence (opt4) from neuraminidase__InfluenzaA__ACR61702
augaaccccaaccagaagaucaucaccaucggcagcgugagccugaccaucagcaccaucugcuucuucaugcagaucgccauccugaucaccaccgugacccugcacuucaagcaguacgaguucaacagcccccccaacaaccaggugaugcugugcgagcccaccaucaucgagagaaacaucaccgagaucguguaccugaccaacaccaccaucgagaaggagaucugccccaagcuggccgaguacagaaacuggagcaagccccagugcgacaucaccggcuucgcccccuucagcaaggacaacagcaucagacugagcgccggcggcgacaucugggugaccagagagcccuacgugagcugcgaccccgacaagugcuaccaguucgcccugggccagggcaccacccugaacaacgugcacagcaacaacaccgugagagacagaacccccuacagaacccugcugaugaacgagcugggcgugcccuuccaccugggcaccaagcaggugugcaucgccuggagcagcagcagcugccacgacggcaaggccuggcugcacgugugcaucaccggcgacgacaagaacgccaccgccagcuucaucuacaacggcagacugguggacagcguggugagcuggagcaaggagauccugagaacccaggagagcgagugcgugugcaucaacggcaccugcaccguggugaugaccgacggcagcgccagcggcaaggccgacaccaagauccuguucaucgaggagggcaagaucgugcacaccagcacccugagcggcagcgcccagcacguggaggagugcagcugcuaccccagauaccccggcgugagaugcgugugcagagacaacuggaagggcagcaacagacccaucguggacaucaacaucaaggaccacagcaucgugagcagcuacgugugcagcggccuggugggcgacacccccagaaagaacgacagcagcagcagcagcaacugccuggaccccaacaacgaggagggcggccacggcgugaagggcugggccuucgacgacggcaacgacguguggaugggcagaaccaucagcgagaagagcagacugggcuacgagaccuucaaggugaucgagggcuggagcaaccccaagagcaagcugcagaucaacagacaggugaucguggacagaggcaacagaagcggcuacagcggcaucuucagcguggagggcaagagcugcaucaacagaugcuucuacguggagcugaucagaggcagaaaggaggagaccgaggugcuguggaccagcaacagcaucgugguguucugcggcaccagcggcaccuacggcaccggcagcuggcccgacggcgccgacaucaaccugaugcccaucuga

SEQ ID NO: 177015 - RNA, 1410 nt, Artificial Sequence; identical to SEQ ID NO: 176788
  derived and/or modified CDS sequence (opt4) from neuraminidase__InfluenzaA__ACR67201

SEQ ID NO: 177016 - RNA, 1410 nt, Artificial Sequence; identical to SEQ ID NO: 176798
  derived and/or modified CDS sequence (opt4) from neuraminidase__InfluenzaA__ACR67202

SEQ ID NO: 177017 - RNA, 1410 nt, Artificial Sequence; identical to SEQ ID NO: 176788
  derived and/or modified CDS sequence (opt4) from neuraminidase__InfluenzaA__ACR67203

SEQ ID NO: 177018 - RNA, 1410 nt, Artificial Sequence; identical to SEQ ID NO: 176798
  derived and/or modified CDS sequence (opt4) from neuraminidase__InfluenzaA__ACR67204

SEQ ID NO: 177019 - RNA, 1410 nt, Artificial Sequence; identical to SEQ ID NO: 176798
  derived and/or modified CDS sequence (opt4) from neuraminidase__InfluenzaA__ACR67246

SEQ ID NO: 177020 - RNA, 1410 nt, Artificial Sequence; identical to SEQ ID NO: 176788
  derived and/or modified CDS sequence (opt4) from neuraminidase__InfluenzaA__ACR67256

SEQ ID NO: 177021 - RNA, 1410 nt, Artificial Sequence; identical to SEQ ID NO: 176798
  derived and/or modified CDS sequence (opt4) from neuraminidase__InfluenzaA__ACR77451

SEQ ID NO: 177022 - RNA, 1410 nt, Artificial Sequence; identical to SEQ ID NO: 176798
  derived and/or modified CDS sequence (opt4) from neuraminidase__InfluenzaA__ACR77461

SEQ ID NO: 177023 - RNA, 1410 nt, Artificial Sequence; identical to SEQ ID NO: 176798
  derived and/or modified CDS sequence (opt4) from neuraminidase__InfluenzaA__ACR77471

SEQ ID NO: 177024 - RNA, 1410 nt, Artificial Sequence; identical to SEQ ID NO: 176798
  derived and/or modified CDS sequence (opt4) from neuraminidase__InfluenzaA__ACR77481

SEQ ID NO: 177025 - RNA, 1410 nt, Artificial Sequence; identical to SEQ ID NO: 176798
  derived and/or modified CDS sequence (opt4) from neuraminidase__InfluenzaA__ACR77491

SEQ ID NO: 177026 - RNA, 1410 nt, Artificial Sequence; identical to SEQ ID NO: 176798
  derived and/or modified CDS sequence (opt4) from neuraminidase__InfluenzaA__ACR77501

SEQ ID NO: 177027 - RNA, 1410 nt, Artificial Sequence; identical to SEQ ID NO: 176798
  derived and/or modified CDS sequence (opt4) from neuraminidase__InfluenzaA__ACR83527

SEQ ID NO: 177028 - RNA, 1410 nt, Artificial Sequence; identical to SEQ ID NO: 176798
  derived and/or modified CDS sequence (opt4) from neuraminidase__InfluenzaA__ACR83539

SEQ ID NO: 177029 - RNA, 1410 nt, Artificial Sequence; identical to SEQ ID NO: 176798
  derived and/or modified CDS sequence (opt4) from neuraminidase__InfluenzaA__ACS14669

SEQ ID NO: 177030 - RNA, 1410 nt, Artificial Sequence; identical to SEQ ID NO: 176798
  derived and/or modified CDS sequence (opt4) from neuraminidase__InfluenzaA__ACS14679

SEQ ID NO: 177031 - RNA, 1410 nt, Artificial Sequence; identical to SEQ ID NO: 176798
  derived and/or modified CDS sequence (opt4) from neuraminidase__InfluenzaA__ACS14689

SEQ ID NO: 177032 - RNA, 1410 nt, Artificial Sequence; identical to SEQ ID NO: 176798
  derived and/or modified CDS sequence (opt4) from neuraminidase__InfluenzaA__ACS14699

SEQ ID NO: 177033 - RNA, 1410 nt, Artificial Sequence; identical to SEQ ID NO: 176798
  derived and/or modified CDS sequence (opt4) from neuraminidase__InfluenzaA__ACS14709

SEQ ID NO: 177034 - RNA, 1410 nt, Artificial Sequence; identical to SEQ ID NO: 176798
  derived and/or modified CDS sequence (opt4) from neuraminidase__InfluenzaA__ACS14719

SEQ ID NO: 177035 - RNA, 1410 nt, Artificial Sequence; identical to SEQ ID NO: 176798
  derived and/or modified CDS sequence (opt4) from neuraminidase__InfluenzaA__ACS14729

SEQ ID NO: 177036 - RNA, 1410 nt, Artificial Sequence; identical to SEQ ID NO: 176798
  derived and/or modified CDS sequence (opt4) from neuraminidase__InfluenzaA__ACS14739

SEQ ID NO: 177037 - RNA, 1410 nt, Artificial Sequence; identical to SEQ ID NO: 176788
  derived and/or modified CDS sequence (opt4) from neuraminidase__InfluenzaA__ACS27192

SEQ ID NO: 177038 - RNA, 1410 nt, Artificial Sequence; identical to SEQ ID NO: 176798
  derived and/or modified CDS sequence (opt4) from neuraminidase__InfluenzaA__ACS27202

SEQ ID NO: 177039 - RNA, 1410 nt, Artificial Sequence; identical to SEQ ID NO: 176798
  derived and/or modified CDS sequence (opt4) from neuraminidase__InfluenzaA__ACS27212

SEQ ID NO: 177040 - RNA, 1410 nt, Artificial Sequence; identical to SEQ ID NO: 176788
  derived and/or modified CDS sequence (opt4) from neuraminidase__InfluenzaA__ACS27222

SEQ ID NO: 177041 - RNA, 1410 nt, Artificial Sequence; identical to SEQ ID NO: 176798
  derived and/or modified CDS sequence (opt4) from neuraminidase__InfluenzaA__ACS27232

SEQ ID NO: 177042 - RNA, 1410 nt, Artificial Sequence; identical to SEQ ID NO: 176788
  derived and/or modified CDS sequence (opt4) from neuraminidase__InfluenzaA__ACS27242

SEQ ID NO: 177043 - RNA, 1410 nt, Artificial Sequence; identical to SEQ ID NO: 176798
  derived and/or modified CDS sequence (opt4) from neuraminidase__InfluenzaA__ACS27252

SEQ ID NO: 177044 - RNA, 1410 nt, Artificial Sequence; identical to SEQ ID NO: 176788
  derived and/or modified CDS sequence (opt4) from neuraminidase__InfluenzaA__ACS27771

SEQ ID NO: 177045 - RNA, 1410 nt, Artificial Sequence; identical to SEQ ID NO: 176953
  derived and/or modified CDS sequence (opt4) from neuraminidase__InfluenzaA__ACS34969

SEQ ID NO: 177046 - RNA, 1410 nt, Artificial Sequence; identical to SEQ ID NO: 176953
  derived and/or modified CDS sequence (opt4) from neuraminidase__InfluenzaA__ACS34970

SEQ ID NO: 177047 - RNA, 1410 nt, Artificial Sequence; identical to SEQ ID NO: 176953
  derived and/or modified CDS sequence (opt4) from neuraminidase__InfluenzaA__ACS34971

SEQ ID NO: 177048 - RNA, 1410 nt, Artificial Sequence; identical to SEQ ID NO: 176798
  derived and/or modified CDS sequence (opt4) from neuraminidase__InfluenzaA__ACS34972

SEQ ID NO: 177049 - RNA, 1410 nt, Artificial Sequence; identical to SEQ ID NO: 176798
  derived and/or modified CDS sequence (opt4) from neuraminidase__InfluenzaA__ACS50081

SEQ ID NO: 177050 - RNA, 1410 nt, Artificial Sequence; identical to SEQ ID NO: 176798
  derived and/or modified CDS sequence (opt4) from neuraminidase__InfluenzaA__ACS50087

SEQ ID NO: 177051 - RNA, 1410 nt, Artificial Sequence; identical to SEQ ID NO: 176798
  derived and/or modified CDS sequence (opt4) from neuraminidase__InfluenzaA__ACS50094

SEQ ID NO: 177052 - RNA, 1410 nt, Artificial Sequence; identical to SEQ ID NO: 176788
  derived and/or modified CDS sequence (opt4) from neuraminidase__InfluenzaA__ACS54264

SEQ ID NO: 177053 - RNA, 1410 nt, Artificial Sequence; identical to SEQ ID NO: 176953
  derived and/or modified CDS sequence (opt4) from neuraminidase__InfluenzaA__ACS54265

SEQ ID NO: 177054 - RNA, 1410 nt, Artificial Sequence; identical to SEQ ID NO: 176798
  derived and/or modified CDS sequence (opt4) from neuraminidase__InfluenzaA__ACS54266

SEQ ID NO: 177055 - RNA, 1410 nt, Artificial Sequence; identical to SEQ ID NO: 176798
  derived and/or modified CDS sequence (opt4) from neuraminidase__InfluenzaA__ACS54267

SEQ ID NO: 177056 - RNA, 1410 nt, Artificial Sequence; identical to SEQ ID NO: 176798
  derived and/or modified CDS sequence (opt4) from neuraminidase__InfluenzaA__ACS54268

SEQ ID NO: 177057 - RNA, 1410 nt, Artificial Sequence; identical to SEQ ID NO: 176798
  derived and/or modified CDS sequence (opt4) from neuraminidase__InfluenzaA__ACS54303

SEQ ID NO: 177058 - RNA, 1410 nt, Artificial Sequence; identical to SEQ ID NO: 176798
  derived and/or modified CDS sequence (opt4) from neuraminidase__InfluenzaA__ACS68823

SEQ ID NO: 177059 - RNA, 1410 nt, Artificial Sequence; identical to SEQ ID NO: 176798
  derived and/or modified CDS sequence (opt4) from neuraminidase__InfluenzaA__ACS75824

SEQ ID NO: 177060 - RNA, 1410 nt, Artificial Sequence; identical to SEQ ID NO: 176798
  derived and/or modified CDS sequence (opt4) from neuraminidase__InfluenzaA__ACS77929

SEQ ID NO: 177061 - RNA, 1410 nt, Artificial Sequence; identical to SEQ ID NO: 176798
  derived and/or modified CDS sequence (opt4) from neuraminidase__InfluenzaA__ACS77939

SEQ ID NO: 177062 - RNA, 1410 nt, Artificial Sequence; identical to SEQ ID NO: 176788
  derived and/or modified CDS sequence (opt4) from neuraminidase__InfluenzaA__ACS77949

SEQ ID NO: 177063 - RNA, 1410 nt, Artificial Sequence; identical to SEQ ID NO: 176798
  derived and/or modified CDS sequence (opt4) from neuraminidase__InfluenzaA__ACS77959

SEQ ID NO: 177064 - RNA, 1410 nt, Artificial Sequence; identical to SEQ ID NO: 176798
  derived and/or modified CDS sequence (opt4) from neuraminidase__InfluenzaA__ACS77969

SEQ ID NO: 177065 - RNA, 1410 nt, Artificial Sequence; identical to SEQ ID NO: 176798
  derived and/or modified CDS sequence (opt4) from neuraminidase__InfluenzaA__ACS77979

SEQ ID NO: 177066 - RNA, 1410 nt, Artificial Sequence; identical to SEQ ID NO: 176798
  derived and/or modified CDS sequence (opt4) from neuraminidase__InfluenzaA__ACS77989

SEQ ID NO: 177067 - RNA, 1410 nt, Artificial Sequence; identical to SEQ ID NO: 176798
  derived and/or modified CDS sequence (opt4) from neuraminidase__InfluenzaA__ACS77999

SEQ ID NO: 177068 - RNA, 1410 nt, Artificial Sequence; identical to SEQ ID NO: 176798
  derived and/or modified CDS sequence (opt4) from neuraminidase__InfluenzaA__ACS78009

SEQ ID NO: 177069 - RNA, 1410 nt, Artificial Sequence; identical to SEQ ID NO: 176798
  derived and/or modified CDS sequence (opt4) from neuraminidase__InfluenzaA__ACS78019

SEQ ID NO: 177070 - RNA, 1410 nt, Artificial Sequence; identical to SEQ ID NO: 176798
  derived and/or modified CDS sequence (opt4) from neuraminidase__InfluenzaA__ACS78039

SEQ ID NO: 177071 - RNA, 1410 nt, Artificial Sequence; identical to SEQ ID NO: 176798
  derived and/or modified CDS sequence (opt4) from neuraminidase__InfluenzaA__ACS78049

SEQ ID NO: 177072 - RNA, 1410 nt, Artificial Sequence; identical to SEQ ID NO: 176798
  derived and/or modified CDS sequence (opt4) from neuraminidase__InfluenzaA__ACS88274

SEQ ID NO: 177073 - RNA, 1410 nt, Artificial Sequence; identical to SEQ ID NO: 176798
  derived and/or modified CDS sequence (opt4) from neuraminidase__InfluenzaA__ACS88275

SEQ ID NO: 177074 - RNA, 1410 nt, Artificial Sequence; identical to SEQ ID NO: 176788
  derived and/or modified CDS sequence (opt4) from neuraminidase__InfluenzaA__ACS92572

SEQ ID NO: 177075 - RNA, 1410 nt, Artificial Sequence; identical to SEQ ID NO: 176788
  derived and/or modified CDS sequence (opt4) from neuraminidase__InfluenzaA__ACS92582

SEQ ID NO: 177076 - RNA, 1410 nt, Artificial Sequence; identical to SEQ ID NO: 176798
  derived and/or modified CDS sequence (opt4) from neuraminidase__InfluenzaA__ACS92592

SEQ ID NO: 177077 - RNA, 1410 nt, Artificial Sequence; identical to SEQ ID NO: 176798
  derived and/or modified CDS sequence (opt4) from neuraminidase__InfluenzaA__ACS92603

SEQ ID NO: 177078 - RNA, 1410 nt, Artificial Sequence; identical to SEQ ID NO: 176788
  derived and/or modified CDS sequence (opt4) from neuraminidase__InfluenzaA__ACS92614

SEQ ID NO: 177079 - RNA, 1410 nt, Artificial Sequence; identical to SEQ ID NO: 176798
  derived and/or modified CDS sequence (opt4) from neuraminidase__InfluenzaA__ACT09115

SEQ ID NO: 177080 - RNA, 1410 nt, Artificial Sequence; identical to SEQ ID NO: 176798
  derived and/or modified CDS sequence (opt4) from neuraminidase__InfluenzaA__ACT10309

SEQ ID NO: 177081 - RNA, 1410 nt, Artificial Sequence; identical to SEQ ID NO: 176798
  derived and/or modified CDS sequence (opt4) from neuraminidase__InfluenzaA__ACT10315

SEQ ID NO: 177082 - RNA, 1410 nt, Artificial Sequence; identical to SEQ ID NO: 176788
  derived and/or modified CDS sequence (opt4) from neuraminidase__InfluenzaA__ACT11059

SEQ ID NO: 177083 - RNA, 1350 nt, Artificial Sequence
  derived and/or modified CDS sequence (opt4) from neuraminidase__InfluenzaA__ACT15313
augaaccccaaccagaagaucaucaccaucggcagcaucugcauggugaucggcaucgugagccugaugcugcagaucggcaacaugaucagcaucugggugagccacagcauccagaccggcaaccagugccaggacgagcccaucagcaacaccaaguuccugaccgagaaggccguggccagcgugacccuggccggcaacagcagccugugccccaucagcggcugggccguguacagcaaggacaacagcaucagaaucggcagcagaggcgacguguucgugaucagagagcccuucaucagcugcagccaccuggagugcagaaccuucuuccugacccagggcgcccugcugaacgacaagcacagcaacggcaccgugaaggacagaagcccccacagaacccugaugagcugccccgugggcgaggcccccagccccuacaacagcagauucgagagcguggccuggagcgccagcgccugccacgacggcaccagcuggcugaccaucggcaucagcggccccgacaacggcgccguggccgugcugaaguacaacggcaucaucaccgacaccaucaagagcuggagaaacaacaucaugagaacccaggagagcgagugcgccugcgugaacggcagcugcuucaccgugaugaccgacggccccagcagcggccaggccagcuacaagaucuucaagauggagaagggcaagguggugaagagcguggagcuggacgcccccaacuaccacuacgaggagugcagcugcuaccccgacgccggcgagaucaccugcgugugcagagacaacuggcacggcagcaacagacccugggugagcuucaaccagaaccuggaguaccagaucggcuacaucugcagcggcguguucggcgacaaccccagacccaacgacggcaccggcagcugcggccccguguuccccaacggcgccuacggcgugaagggcuucagcuucaaguacggcaacggcguguggaucggcagaaccaagagcaccaacagcagaagcggcuucgagaugaucugggaccccaacggcuggaccggcaccgacagcagcuucagcgugaagcaggacaucguggccaucaccgacuggagcggcuacagcggcagcuucgugcagcaccccgagcugaccggccuggacugcaucagacccugcuucuggguggagcugaucagaggcagacccaaggagagcaccaucuggaccagcggcagcagcaucagcuucugcggcgugaacggcgacaccgugagcuggagcuggcccgacggcgccgagcugcccuucaccaucgacaaguga

SEQ ID NO: 177084 - RNA, 1350 nt, Artificial Sequence
  derived and/or modified CDS sequence (opt4) from neuraminidase__InfluenzaA__ACT15315
augaaccccaaccagaagaucaucaccaucggcagcaucugcauggugaucggcaucgugagccugaugcugcagaucggcaacaugaucagcaucugggugagccacagcauccagaccggcaaccagugccaggacgagcccaucagcaacaccaaguuccugaccgagaaggccguggccagcgugacccuggccggcaacagcagccugugccccaucagcggcugggccguguacagcaaggacaacagcaucagaaucggcagcagaggcgacguguucgugaugagagagcccuucaucagcugcagccaccuggagugcagaaccuucuuccugacccagggcgcccugcugaacgacaagcacagcaacggcaccgugaaggacagaagcccccacagaacccugaugagcugccccgugggcgaggcccccagccccuacaacagcagauucgagagcguggccuggagcgccagcgccugccacgacggcaccagcuggcugaccaucggcaucagcggccccgacaacggcgccguggccgugcugaaguacaacggcaucaucaccgacaccaucaagagcuggagaaacaacaucaugagaacccaggagagcgagugcgccugcgugaacggcagcugcuucaccgugaugaccgacggccccagcagcggccaggccagcuacaagaucuucaagauggagaagggcaagguggugaagagcguggagcuggacgcccccaacuaccacuacgaggagugcagcugcuaccccgacgccggcgagaucaccugcgugugcagagacaacuggcacggcagcaacagacccugggugagcuucaaccagaaccuggaguaccagaucggcuacaucugcagcggcguguucggcgacaaccccagacccaacgacggcaccggcagcugcggccccguguuccccaacggcgccuacggcgugaagggcuucagcuucaaguacggcaacggcguguggaucggcagaaccaagagcaccaacagcagaagcggcuucgagaugaucugggaccccaacggcuggaccggcaccgacagcagcuucagcgugaagcaggacaucguggccaucaccgacuggagcggcuacagcggcagcuucgugcagcaccccgagcugaccggccuggacugcaucagacccugcuucuggguggagcugaucagaggcagacccaaggagagcaccaucuggaccagcggcagcagcaucagcuucugcggcgugaacggcgacaccgugagcuggagcuggcccgacggcgccgagcugcccuucaccaucgacaaguga

SEQ ID NO: 177085 - RNA, 1350 nt, Artificial Sequence; identical to SEQ ID NO: 177083
  derived and/or modified CDS sequence (opt4) from neuraminidase__InfluenzaA__ACT15319

SEQ ID NO: 177086 - RNA, 1350 nt, Artificial Sequence
  derived and/or modified CDS sequence (opt4) from neuraminidase__InfluenzaA__ACT15321
augaaccccaaccagaagaucaucaccaucggcagcaucugcauggugaucggcaucgugagccugaugcugcagaucggcaacaugaucagcaucugggugagccacagcauccagaccggcaaccagugccaggacgagcccaucagcaacaccaaguuccugaccgagagagccguggccagcgugacccuggccggcaacagcagccugugccccaucagcggcugggccguguacagcaaggacaacagcaucagaaucggcagcagaggcgacguguucgugaucagagagcccuucaucagcugcagccaccuggagugcagaaccuucuuccugacccagggcgcccugcugaacgacaagcacagcaacggcaccgugaaggacagaagcccccacagaacccugaugagcugccccgugggcgaggcccccagccccuacaacagcagauucgagagcguggccuggagcgccagcgccugccacgacggcaccagcuggcugaccaucggcaucagcggccccgacaacggcgccguggccgugcugaaguacaacggcaucaucaccgacaccaucaagagcuggagaaacaacaucaugagaacccaggagagcgagugcgccugcgugaacggcagcugcuucaccgugaugaccgacggccccagcagcggccaggccagcuacaagaucuucaagauggagaagggcaagguggugaagagcguggagcuggacgcccccaacuaccacuacgaggagugcagcugcuaccccgacgccggcgagaucaccugcgugugcagagacaacuggcacggcagcaacagacccugggugagcuucaaccagaaccuggaguaccagaucggcuacaucugcagcggcguguucggcgacaaccccagacccaacgacggcaccggcagcugcggccccguguuccccaacggcgccuacggcgugaagggcuucagcuucaaguacggcaacggcguguggaucggcagaaccaagagcaccaacagcagaagcggcuucgagaugaucugggaccccaacggcuggaccggcaccgacagcagcuucagcgugaagcaggacaucguggccaucaccgacuggagcggcuacagcggcagcuucgugcagcaccccgagcugaccggccuggacugcaucagacccugcuucuggguggagcugaucagaggcagacccaaggagagcaccaucuggaccagcggcagcagcaucagcuucugcggcgugaacggcgacaccgugagcuggagcuggcccgacggcgccgagcugcccuucaccaucgacaaguga

SEQ ID NO: 177087 - RNA, 1350 nt, Artificial Sequence; identical to SEQ ID NO: 177083
  derived and/or modified CDS sequence (opt4) from neuraminidase__InfluenzaA__ACT15323

SEQ ID NO: 177088 - RNA, 1350 nt, Artificial Sequence; identical to SEQ ID NO: 177083
  derived and/or modified CDS sequence (opt4) from neuraminidase__InfluenzaA__ACT15325

SEQ ID NO: 177089 - RNA, 1350 nt, Artificial Sequence
  derived and/or modified CDS sequence (opt4) from neuraminidase__InfluenzaA__ACT15327
augaaccccaaccagaagaucaucaccaucggcagcaucugcauggugaucggcaucgugagccugaugcugcagaucggcaacaugaucagcaucugggugagccacagcauccagaccggcaacagaugccaggacgagcccaucagcaacaccaaguuccugaccgagaaggccguggccagcgugacccuggccggcaacagcagccugugccccaucagcggcugggccguguacagcaaggacaacagcaucagaaucggcagcagaggcgacguguucgugaucagagagcccuucaucagcugcagccaccuggagugcagaaccuucuuccugacccagggcgcccugcugaacgacaagcacagcaacggcaccgugaaggacagaagcccccacagaacccugaugagcugccccgugggcgaggcccccagccccuacaacagcagauucgagagcguggccuggagcgccagcgccugccacgacggcaccagcuggcugaccaucggcaucagcggccccgacaacggcgccguggccgugcugaaguacaacggcaucaucaccgacaccaucaagagcuggagaaacaacaucaugagaacccaggagagcgagugcgccugcgugaacggcagcugcuucaccgugaugaccgacggccccagcagcggccaggccagcuacaagaucuucaagauggagaagggcaagguggugaagagcguggagcuggacgcccccaacuaccacuacgaggagugcagcugcuaccccgacgccggcgagaucaccugcgugugcagagacaacuggcacggcagcaacagacccugggugagcuucaaccagaaccuggaguacaagaucggcuacaucugcagcggcaucuucggcgacaaccccagacccaacgacggcaccggcagcugcggccccguguuccccaacggcgccuacggcgugaagggcuucagcuucaaguacggcaacggcguguggaucggcagaaccaagagcaccaacagcagaagcggcuucgagaugaucugggaccccaacggcuggaccggcaccgacagcagcuucagcgugaagcaggacaucguggccaucaccgacuggagcggcuacagcggcagcuucgugcagcaccccgagcugaccggccuggacugcaucagacccugcuucuggguggagcugaucagaggcagacccaaggagagcaccaucuggaccagcggcagcagcaucagcuucugcggcgugaacggcgacaccgugagcuggagcuggcccgacggcgccgagcugcccuucaccaucgacaaguga

SEQ ID NO: 177090 - RNA, 1350 nt, Artificial Sequence
  derived and/or modified CDS sequence (opt4) from neuraminidase__InfluenzaA__ACT15331
augaaccccaaccagaagaucaucaccaucggcagcaucugcauggugaucggcaucgugagccugaugcugcagaucggcaacaugaucagcaucugggugagccacagcauccagaccggcaaccagugccaggacgagcccaucagcaacaccaaguuccugaccgagaaggccguggccagcgugacccuggccggcaacagcagccugugccccaucagcggcugggccguguacagcaaggacaacagcaucagaaucggcagcagaggcgacguguucgugaucagagagcccuucaucagcugcagccaccuggagugcagaaccuucuuccugacccagggcgcccugcugaacgacaagcacagcaacggcaccgugaaggacagaagcccccacagaacccugaugagcugccccgugggcgaggcccccagccccuacaacagcagauucgagagcguggccuggagcgccagcgccugccacgacggcaccagcuggcugaccaucggcaucagcggccccgacaacggcgccguggccgugcugaaguacaacggcaucaucaccgacaccaucaagagcuggagaaacaacaucaugagaacccaggagagcgagugcgccugcgugaacggcagcugcuucaccgugaugaccgacggccccagcagcggccaggccagcuacaagaucuucaagauggagaagggcaagguggugaagagcguggagcuggacgcccccaacuaccacuacgaggagugcagcugcuaccccgacgccggcgagaucaccugcgugugcagagacaacuggcacggcagcaacagacccugggugagcuucaaccagaaccuggaguaccagaucggcuacaucugcagcggcguguucggcgacaaccccagacccaacgacggcaccggcagcugcggccccguguuccccaacggcgccuacggcgugaagggcuucagcuucaaguacggcaacggcguguggaucggcagaaccaagagcaccaacagcagaagcggcuucgagaugaucugggaccccaacggcuggaccggcaccgacagcagcuucagcgugaagcaggacaucguggccaucaccgacuggagcggcuacagcggcagcuucgugcagcaccccgagcugaccggccuggacugcaucagacccugcuucuggguggagcugaucagaggcagacccaaggagagcaccaucuggaccagcggcagcagcaucagcuucugcggcgugaacagcgacaccgugagcuggagcuggcccgacggcgccgagcugcccuucaccaucgacaaguga

SEQ ID NO: 177091 - RNA, 1350 nt, Artificial Sequence
  derived and/or modified CDS sequence (opt4) from neuraminidase__InfluenzaA__ACT15333
augaaccccaaccagaagaucaucaccaucggcagcaucugcauggugaucggcaucgugagccugaugcugcagaucggcaacaugaucagcaucugggugagccacagcauccagaccggcaaccagugccagggcgagcccaucagcaacaccaaguuccugaccgagaaggccguggccagcgugacccuggccggcaacagcagccugugccccaucagcggcugggccguguacagcaaggacaacagcaucagaaucggcagcagaggcgacguguucgugaucagagagcccuucaucagcugcagccaccuggagugcagaaccuucuuccugacccagggcgcccugcugaacgacaagcacagcaacggcaccgugaaggacagaagcccccacagaacccugaugagcugccccgugggcgaggcccccagccccuacaacagcagauucgagagcguggccuggagcgccagcgccugccacgacggcaccagcuggcugaccaucggcaucagcggccccgacaacggcgccguggccgugcugaaguacaacggcaucaucaccgacaccaucaagagcuggagaaacaacauccugagaacccaggagagcgagugcgccugcgugaacggcagcugcuucaccgugaugaccgacggccccagcagcggccaggccagcuacaagaucuucaagauggagaagggcaagguggugaagagcguggagcuggacgcccccaacuaccacuacgaggagugcagcugcuaccccgacgccggcgagaucaccugcgugugcagagacaacuggcacggcagcaacagacccugggugagcuucaaccagaaccuggaguaccagaucggcuacaucugcagcggcguguucggcgacaaccccagacccaacgacggcaccggcagcugcggccccguggugagcaacggcgccuacggcgugaagggcuucagcuucaaguacggcaacggcguguggaucggcagaaccaagagcaccaacagcagaagcggcuucgagaugaucugggaccccaacggcuggaccggcaccgacagcagcuucagcggcaagcaggacaucguggccaucaccgacuggagcggcuacagcggcagcuucgugcagcaccccgagcugaccggccuggacugcaucagacccugcuucuggguggagcugaucagaggcagacccaaggagagcaccaucuggaccagcggcagcagcaucagcuucugcggcgugaacagcgacaccgugagcuggagcuggcccgacggcgccgagcugcccuucaccaucgacaaguga

SEQ ID NO: 177092 - RNA, 1350 nt, Artificial Sequence
  derived and/or modified CDS sequence (opt4) from neuraminidase__InfluenzaA__ACT15335
augaaccccaaccagaagaucaucaccaucggcagcaucugcauggugaucggcaucgugagccugaugcugcagaucggcaacaugaucagcaucugggugagccacagcauccagaccggcaacagaugccaggacgagcccaucagcaacaccaaguuccugaccgagaaggccguggccagcgugacccuggccggcaacagcagccugugccccaucagcggcugggccguguacagcaaggacaacagcaucagaaucggcagcagaggcgacguguucgugaucagagagcccuucaucagcugcagccaccuggagugcagaaccuucuuccugacccagggcgcccugcugaacgacaagcacagcaacggcaccgugaaggacagaagcccccacagaacccugaugagcugccccgugggcgaggcccccagccccuacaacagcagauucgagagcguggccuggagcgccagcgccugccacgacggcaccagcuggcugaccaucggcaucagcggccccgacaacggcgccguggccgugcugaaguacaacggcaucaucaccgacaccaucaagagcuggagaaacaacaucaugagaacccaggagagcgagugcgccugcgugaacggcagcugcuucaccgugaugaccgacggccccagcagcggccaggccagcuacaagaucuucaagauggagaagggcaagguggugaagagcguggagcuggacgcccccaacuaccacuacgaggagugcagcugcuaccccgacgccggcgagaucaccugcgugugcagagacaacuggcacggcagcaacagacccugggugagcuucaaccagaaccuggaguacaagaucggcuacaucugcagcggcaucuucggcgacaaccccagacccaacgacggcaccggcagcugcggccccgugcugcccaacggcgccuacggcgugaagggcuucagcuucaaguacggcaacggcguguggaucggcagaaccaagagcaccaacagcagaagcggcuucgagaugaucugggaccccaacggcuggaccggcaccgacagcagcuucagcgugaagcaggacaucguggccaucaccgacuggagcggcuacagcggcagcuucgugcagcaccccgagcugaccggccuggacugcaucagacccugcuucuggguggagcugaucagaggcagacccaaggagagcaccaucuggaccagcggcagcagcaucagcuucugcggcgugaacggcgacaccgugagcuggagcuggcccgacggcgccgagcugcccuucaccaucgacaaguga

SEQ ID NO: 177093 - RNA, 1350 nt, Artificial Sequence
  derived and/or modified CDS sequence (opt4) from neuraminidase__InfluenzaA__ACT15337
augaaccccaaccagaagaucaucaccaucggcagcaucugcauggugaucggcaucgugagccugaugcugcagaucggcaacaugaucagcaucugggugagccacagcauccagaccggcaaccagugccaggacgagcccaucagcaacaccaaguuccugaccgagaaggccguggccagcgugacccuggccggcaacagcagccugugccccaucagcggcugggccguguacagcaaggacaacagcaucagaaucggcagcagaggcgacguguucgugaucagagagcccuucaucagcugcagccaccuggagugcagaaccuucuuccugacccagggcgcccugcugaacgacaagcacagcaacggcaccgugaaggacagaagcccccacagaacccugaugagcugccccgugggcgaggcccccagccccuacaacagcagauucgagagcguggccuggagcgccagcgccugccacgacggcaccagcuggcugaccaucggcaucagcggccccgacaacggcgccguggccgugcugaaguacaacggcaucaucaccgacaccaucaagagcuggagaaacaacaucaugagaacccaggagagcgagugcgccugcgugaacggcagcugcuucaccgugaugaccgacggccccagcagcggccaggccagcuacaagaucuucaagauggagaagggcaagguggugaagagcguggagcuggacgcccccaacuaccacuacgaggagugcagcugcuaccccgacgccggcgagaucaccugcgugugcagagacaacuggcacggcagcaacagacccugggugagcuucaaccagaaccuggaguaccagaucggcuacaucugcagcggcguguucggcgacaaccccagacccaacgacggcaccggcagcugcggccccguguuccccaacggcgccuacggcgugaagggcuucagcuucaaguacggcaacggcguguggaucggcagaaccaagagcaccaacagcagaagcggcuucgagaugaucugggaccccaacggcuggaccggcaccgacagcagcuucagcgugaagcaggacaucguggccgugaccgacuggagcggcuacagcggcagcuucgugcagcaccccgagcugaccggccuggacugcaucagacccugcuucuggguggagcugaucagaggcagacccaaggagagcaccaucuggaccagcggcagcagcaucagcuucugcggcgugaacggcgacaccgugagcuggagcuggcccgacggcgccgagcugcccuucaccaucgacaaguga

SEQ ID NO: 177094 - RNA, 1350 nt, Artificial Sequence; identical to SEQ ID NO: 177083
  derived and/or modified CDS sequence (opt4) from neuraminidase__InfluenzaA__ACT15341

SEQ ID NO: 177095 - RNA, 1350 nt, Artificial Sequence
  derived and/or modified CDS sequence (opt4) from neuraminidase__InfluenzaA__ACT15344
augaaccccaaccagaagaucaucaccaucggcagcaucugcauggugaucggcaucgugagccugaugcugcagaucggcaacaugaucagcaucugggugagccacagcauccagaccggcaaccagugccaggacgagcccaucagcaacaccaaguuccugaccgagaaggccguggccagcgugacccuggccggcaacagcagccugugccccaucagcggcugggccguguacagcaaggacaacagcaucagaaucggcagcagaggcgacguguucgugaucagagagcccuucaucagcugcagccaccuggagugcagaaccuucuuccugacccagggcgcccugcugaacgacaagcacagcaacggcaccgugaaggacagaagcccccacagaacccugaugagcugccccgugggcgaggcccccagccccuacaacagcagauucgagagcguggccuggagcgccagcgccugccacgacggcaccagcuggcugaccaucggcaucagcggccccgacaacggcgccguggccgugcugaaguacaacggcaucaucaccgacaccaucaagagcuggagaagcaacaucaugagaacccaggagagcgagugcgccugcgugaacggcagcugcuucaccgugaugaccgacggccccagcagcggccaggccagcuacaagaucuucaagauggagaagggcaagguggugaagagcguggagcuggacgcccccaacuaccacuacgaggagugcagcugcuaccccgacgccggcgagaucaccugcgugugcagagacaacuggcacggcagcaacagacccugggugagcuucaaccagaaccuggaguaccagaucggcuacaucugcagcggcguguucggcgacaaccccagacccaacgacggcaccggcagcugcggccccguguuccccaacggcgccuacggcgugaagggcuucagcuucaaguacggcaacggcguguggaucggcagaaccaagagcaccaacagcagaagcggcuucgagaugaucugggaccccaacggcuggaccggcaccgacagcagcuucagcgugaagcaggacaucguggccaucaccgacuggagcggcuacagcggcagcuucgugcagcaccccgagcugaccggccuggacugcaucagacccugcuucuggguggagcugaucagaggcagacccaaggagagcaccaucuggaccagcggcagcagcaucagcuucugcggcgugaacggcgacaccgugagcuggagcuggcccgacggcgccgagcugcccuucaccaucgacaaguga

SEQ ID NO: 177096 - RNA, 1350 nt, Artificial Sequence
  derived and/or modified CDS sequence (opt4) from neuraminidase__InfluenzaA__ACT15346
augaaccccaaccagaagaucaucaccaucggcagcaucugcauggugaucggcaucgugagccugaugcugcagaucggcaacaugaucagcaucugggugagccacagcauccagaccggcaaccagugccaggacgagcccaucagcaacaccaaguuccugaccgagaaggccguggccagcgugacccuggccggcaacagcagccugugccccaucagcggcugggccguguacagcaaggacaacaacaucagaaucggcagcagaggcgacguguucgugaucagagagcccuucaucagcugcagccaccuggagugcagaaccuucuuccugacccagggcgcccugcugaacgacaagcacagcaacggcaccgugaaggacagaagcccccacagaacccugaugagcugccccgugggcgaggcccccagccccuacaacagcagauucgagagcguggccuggagcgccagcgccugccacgacggcaccagcuggcugaccaucggcaucagcggccccgacaacggcgccguggccgugcugaaguacaacggcaucaucaccgacaccaucaagagcuggagaaacaacaucaugagaacccaggagagcgagugcgccugcgugaacggcagcugcuucaccgugaugaccgacggccccagcagcggccaggccagcuacaagaucuucaagauggagaagggcaagguggugaagagcguggagcuggacgcccccaacuaccacuacgaggagugcagcugcuaccccgacgccggcgagaucaccugcgugugcagagacaacuggcacggcagcaacagacccugggugagcuucaaccagaaccuggaguaccagaucggcuacaucugcagcggcguguucggcgacaaccccagacccaacgacggcaccggcagcugcggccccguguuccccaacggcgccuacggcgugaagggcuucagcuucaaguacggcaacggcguguggaucggcagaaccaagagcaccaacagcagaagcggcuucgagaugaucugggaccccaacggcuggaccggcaccgacagcagcuucagcgugaagcaggacaucguggccaucaccgacuggagcggcuacagcggcagcuucgugcagcaccccgagcugaccggccuggacugcaucagacccugcuucuggguggagcugaucagaggcagacccaaggagagcaccaucuggaccagcggcagcagcaucagcuucugcggcgugaacggcgacaccgugagcuggagcuggcccgacggcgccgagcugcccuucaccaucgacaaguga

SEQ ID NO: 177097 - RNA, 1350 nt, Artificial Sequence
  derived and/or modified CDS sequence (opt4) from neuraminidase__InfluenzaA__ACT15348
augaaccccaaccagaagaucaucaccaucggcagcaucugcauggugaucggcaccgugagccugaugcugcagaucggcaacaugaucagcaucugggugagccacagcauccagaccggcaaccagugccagggcgagcccaucagcaacaccaaguuccugaccgagaaggccguggccagcgugacccuggccggcaacagcagccugugccccaucagcggcugggccguguacagcaaggacaacagcaucagaaucggcagcagaggcgacguguucgugaucagagagcccuucaucagcugcagccaccuggagugcagaaccuucuuccugacccagggcgcccugcugaacgacaagcacagcaacggcaccgugaaggacagaagcccccacagaacccugaugagcugccccgugggcgaggcccccagccccuacaacagcagauucgagagcguggccuggagcgccagcgccugccacgacggcaccagcuggcugaccaucggcaucagcggccccgacaacggcgccguggccgugcugaaguacaacggcaucaucaccgacaccaucaagagcuggagaaacaacauccugagaacccaggagagcgagugcgccugcgugaacggcagcugcuucaccgugaugaccgacggccccagcagcggccaggccagcuacaagaucuucaagauggagaagggcaagguggugaagagcguggagcuggacgcccccaacuaccacuacgaggagugcagcugcuaccccgacgccggcgagaucaccugcgugugcagagacaacuggcacggcagcaacagacccugggugagcuucaaccagaaccuggaguaccagaucggcuacaucugcagcggcguguucggcgacaaccccagacccaacgacggcaccggcagcugcggccccguggugagcaacggcgccuacggcgugaagggcuucagcuucaaguacggcaacggcguguggaucggcagaaccaagagcaccaacagcagaagcggcuucgagaugaucugggaccccaacggcuggaccggcaccgacagcagcuucagcggcaagcaggacaucguggccaucaccgacuggagcggcuacagcggcagcuucgugcagcaccccgagcugaccggccuggacugcaucagacccugcuucuggguggagcugaucagaggcagacccaaggagagcaccaucuggaccagcggcagcagcaucagcuucugcggcgugaacagcgacaccgugagcuggagcuggcccgacggcgccgagcugcccuucaccaucgacaaguga

SEQ ID NO: 177098 - RNA, 1350 nt, Artificial Sequence
  derived and/or modified CDS sequence (opt4) from neuraminidase__InfluenzaA__ACT15350
augaaccccaaccagaagaucaucaccaucggcagcaucugcauggugaucggcaucgugagccugaugcugcagaucggcaacaugaucagcaucugggugagccacagcauccagaccggcaacagaugccaggacgagcccaucagcaacaccaaguuccugaccgagaaggccguggccagcgugacccuggccggcaacagcagccugugccccaucagcggcugggccguguacagcaaggacaacagcaucagaaucggcagcagaggcgacguguucgugaucagagagcccuucaucagcugcagccaccuggagugcagaaccuucuuccugacccagggcgcccugcugaacgacaagcacagcaacggcaccgugaaggacagaagcccccacagaacccugaugagcugccccgugggcgaggcccccagccccuacaacagcagauucgagagcguggccuggagcgccagcgccugccacgacggcaccagcuggcugaccaucggcaucagcggccccgacaacggcgccguggccgugcugaaguacaacggcaucaucaccgacaccaucaagagcuggagaaacaacaucaugagaacccaggagagcgagugcgccugcgugaacggcagcugcuucaccgugaugaccgacggccccagcagcggccaggccagcuacaagaucuucaagauggagaagggcaagguggugaagagcguggagcuggacgcccccaacuaccacuacgaggagugcagcugcuaccccgacgccggcgagaucaccugcgugugcagagacaacuggcacggcagcaacagacccugggugagcuucaaccagaaccuggaguacaagaucggcuacaucugcagcggcaucuucggcgacaaccccagacccaacgacggcaccggcagcugcggccccguguuccccaacggcgccuacggcgugaagggcuucagcuucaaguacggcaacggcguguggaucggcagaaccaagagcaccaacagcagaagcggcuucgagaugaucugggaccccaacggcuggaccggcaccgacagcagcuucagcgugaagcaggacaucguggccaucaccgacuggagcggcuacagcggcagcuucgugcagcaccccgagcugaccggccuggacugcaucagacccugcuucuggguggagcugaucagaggcagacccaaggagagaaccaucuggaccagcggcagcagcaucagcuucugcggcgugaacggcgacaccgugagcuggagcuggcccgacggcgccgagcugcccuucaccaucgacaaguga

SEQ ID NO: 177099 - RNA, 1350 nt, Artificial Sequence
  derived and/or modified CDS sequence (opt4) from neuraminidase__InfluenzaA__ACT15352
augaaccccaaccagaagaucaucaccaucggcagcaucugcauggugaucggcaucgugagccugaugcugcagaucggcaacaugaucagcaucugggugagccacagcauccagaccggcaaccagugccaggacgagcccaucagcaacaccaaguuccugaccgagaaggccguggccagcgugacccuggccggcaacagcagccugugccccaucagcggcugggccguguacagcaaggacaacagcaucagaaucggcagcagaggcgacguguucgugaucagagagcccuucaucagcugcagccaccuggagugcagaaccuucuuccugacccagggcgcccugcugaacgacaagcacagcaacggcaccgugaaggacagaagcccccacagaacccugaugagcugccccgugggcgaggcccccagccccuacaacagcagauucgagagcguggccuggagcgccagcgccugccacgacggcaccagcuggcugaccaucggcaucagcggccccgacaacggcgccguggccgugcugaaguacaacggcaucaucaccgacaccaucaagagcuggagaaacaacauccugagaacccaggagagcgagugcgccugcgugaacggcagcugcuucaccgugaugaccgacggccccagcagcggccaggccagcuacaagaucuucaagauggagaagggcaagguggugaagagcguggagcuggacgcccccaacuaccacuacgaggagugcagcugcuaccccgacgccggcgagaucaccugcgugugcagagacaacuggcacggcagcaacagacccugggugagcuucaaccagaaccuggaguaccagaucggcuacaucugcagcggcguguucggcgacaaccccagacccaacgacggcaccggcagcugcggccccguggugagcaacggcgccuacggcgugaagggcuucagcuucaaguacggcaacggcguguggaucggcagaaccaagagcaccaacagcagaagcggcuucgagaugaucugggaccccaacggcuggaccggcaccgacagcagcuucagcggcaagcaggacaucguggccaucaccgacuggagcggcuacagcggcagcuucgugcagcaccccgagcugaccggccuggacugcaucagacccugcuucuggguggagcugaucagaggcagacccaaggagagcaccaucuggaccagcggcagcagcaucagcuucugcggcgugaacagcgacaccgugagcuggagcuggcccgacggcgccgagcugcccuucaccaucgacaaguga

SEQ ID NO: 177100 - RNA, 1350 nt, Artificial Sequence
  derived and/or modified CDS sequence (opt4) from neuraminidase__InfluenzaA__ACT15354
augaaccccagccagaagaucaucaccaucggcagcaucugcauggugaucggcaucgugagccugaugcugcagaucggcaacaugaucagcaucuggaucagccacagcauccagaccggcaaccagugccaggacgagcccaucagcaacaccaaguuccugaccgagaaggccguggccagcgugacccuggccggcaacagcagccugugccccaucagcggcugggccguguacagcaaggacaacagcaucagaaucggcagcagaggcgacguguucgugaucagagagcccuucaucagcugcagccaccuggagugcagaaccuucuuccugacccagggcgcccugcugaacgacaagcacagcaacggcaccgugaaggacagaagcccccacagaacccugaugagcugccccgugggcgaggcccccagccccuacaacagcagauucgagagcguggccuggagcgccagcgccugccacgacggcaccagcuggcugaccaucggcaucagcggccccgacaacggcgccguggccgugcugaaguacaacggcaucaucaccgacaccaucaagagcuggagaaacaacaucaugagaacccaggagagcgagugcgccugcgugaacggcagcugcuucaccgugaugaccgacggccccagcagcggccaggccagcuacaagaucuucaagauggagaagggcaagguggugaagagcguggagcuggacgcccccaacuaccacuacgaggagugcagcugcuaccccgacgccggcgagaucaccugcgugugcagagacaacuggcacggcagcaacagacccugggugagcuucaaccagaaccuggaguaccagaucggcuacaucugcagcggcguguucggcgacaaccccagacccaacgacggcaccggcagcugcggccccguguuccccaacggcgccuacggcgugaagggcuucagcuucaaguacggcaacggcguguggaucggcagaaccaagagcaccaacagcagaagcggcuucgagaugaucugggaccccaacggcuggaccggcaccgacagcagcuucagcgugaagcaggacaucguggccaucaccgacuggagcggcuacagcggcagcuucgugcagcaccccgagcugaccggccuggacugcaucagacccugcuucuggguggagcugaucagaggcagacccaaggagagcaccaucuggaccagcggcagcagcaucagcuucugcggcgugaacggcgacaccgugagcuggagcuggcccgacggcgccgagcugcccuucaccaucgacaaguga

SEQ ID NO: 177101 - RNA, 1350 nt, Artificial Sequence
  derived and/or modified CDS sequence (opt4) from neuraminidase__InfluenzaA__ACT15356
augaaccccaaccagaagaucaucaccaucggcagcaucugcauggugaucggcaucgugagccugaugcugcagaucggcaacaugaucagcaucugggugagccacagcauccagaccggcaaccagugccaggacgagcccaucagcaacaccaaguuccugaccgagaaggccguggccagcgugacccuggccggcaacagcagccugugccccaucagcggcugggccguguacagcaaggacaacagcaucagaaucggcagcagaggcgacguguucgugaucagagagcccuucaucagcugcagccaccuggagugcagaaccuucuuccugacccagggcgcccugcugaacgacaagcacagcaacggcaccgugaaggacagaagcccccacagaacccugaugagcugccccgugggcgaggcccccagccccuacaacagcagauucgagagcguggccuggagcgccagcgccugccacgacggcaccagcuggcugaccaucggcaucagcggccccgacaacggcgccguggccgugcugaaguacaacggcaucaucaccgacaccaucaagagcuggagaaacaacauccugagaacccaggagagcgagugcgccugcgugaacggcagcugcuucaccgugaugaccgacggccccagcagcggccaggccagcuacaagaucuucaagauggagaagggcaagguggugaagagcguggagcuggacgcccccaacuaccacuacgaggagugcagcugcuaccccgacgccggcgagaucaccugcgugugcagagacaacuggcacggcagcaacagacccugggugagcuucaaccagaaccuggaguaccagaucggcuacaucugcagcggcguguucggcgacaaccccagacccaacgacggcaccggcagcugcggccccguguucagcaacggcgccuacggcgugaagggcuucagcuucaaguacggcaacggcguguggaucggcagaaccaagagcaccaacagcagaagcggcuucgagaugaucugggaccccaacggcuggaccggcaccgacagcagcuucagcggcaagcaggacaucguggccaucaccgacuggagcggcuacagcggcagcuucgugcagcaccccgagcugaccggccuggacugcaucagacccugcuucuggguggagcugaucagaggcagacccaaggagagcaccaucuggaccagcggcagcagcaucagcuucugcggcgugaacagcgacaccgugagcuggagcuggcccgacggcgccgagcugcccuucaccaucgacaaguga

SEQ ID NO: 177102 - RNA, 1350 nt, Artificial Sequence
  derived and/or modified CDS sequence (opt4) from neuraminidase__InfluenzaA__ACT15358
augaaccccaaccagaagaucaucaccaucggcagcaucugcauggugaucggcaucgugagccugaugcugcagaucggcaacaugaucagcaucugggugagccacagcauccagaccggcaacagaugccaggacgagcccaucagcaacaccaaguuccugaccgagaaggccguggccagcgugacccuggccggcaacagcagccugugccccaucagcggcugggccguguacagcaaggacaacagcaucagaaucggcagcagaggcgacguguucgugaucagagagcccuucaucagcugcagccaccuggagugcagaaccuucuuccugacccacggcgcccugcugaacgacaagcacagcaacggcaccgugaaggacagaagcccccacagaacccugaugagcugccccgugggcgaggcccccagccccuacaacagcagauucgagagcguggccuggagcgccagcgccugccacgacggcaccagcuggcugaccaucggcaucagcggccccgacaacggcgccguggccgugcugaaguacaacggcaucaucaccgacaccaucaagagcuggagaaacaacaucaugagaacccaggagagcgagugcgccugcgugaacggcagcugcuucaccgugaugaccgacggccccagcagcggccaggccagcuacaagaucuucaagauggagaagggcaagguggugaagagcguggagcuggacgcccccaacuaccacuacgaggagugcagcugcuaccccgacgccggcgagaucaccugcgugugcagagacaacuggcacggcagcaacagacccuggaucagcuucaaccagaaccuggaguacaagaucggcuacaucugcagcggcaucuucggcgacaaccccagacccaacgacggcaccggcagcugcggccccgugcugcccaacggcgccuacggcgugaagggcuucagcuucaaguacggcaacggcguguggaucggcagaaccaagagcaccaacagcagaagcggcuucgagaugaucugggaccccaacggcuggaccggcaccgacagcagcuucagcgugaagcaggacaucguggccaucaccgacuggagcggcuacagcggcagcuucgugcagcaccccgagcugaccggccuggacugcaucagacccugcuucuggguggagcugaucagaggcagacccaaggagagcaccaucuggaccagcggcagcagcaucagcuucugcggcgugaacggcgacaccgugagcuggagcuggcccgacggcgccgagcugcccuucaccaucgacaaguga

SEQ ID NO: 177103 - RNA, 1410 nt, Artificial Sequence; identical to SEQ ID NO: 174387
  derived and/or modified CDS sequence (opt4) from neuraminidase__InfluenzaA__ACT21515

SEQ ID NO: 177104 - RNA, 1410 nt, Artificial Sequence
  derived and/or modified CDS sequence (opt4) from neuraminidase__InfluenzaA__ACT21516
augaaccccaaccagaagaucaucaccaucggcagcgugagccugaccaucagcaccaucugcuucuucaugcagaucgccauccugaucaccaccgugacccugcacuucaagcaguacgaguucaacagcccccccaacaaccaggugaugcugugcgagcccaccaucaucgagagaaacaucaccgagaucgccuaccugaccaacaccaccaucgagaaggagaucugccccaagcuggccgaguacagaaacuggagcaagccccagugcgacaucaccggcuucgcccccuucagcaaggacaacagcaucagacugagcgccggcggcgacaucugggugaccagagagcccuacgugagcugcgaccccgacaagugcuaccaguucgcccugggccagggcaccacccugaacaacgugcacagcaacgacaccgugcacgacagaacccccuacagaacccugcugaugaacgagcugggcgugcccuuccaccugggcaccaagcaggugugcguggccuggagcagcagcagcugccacgacggcaaggccuggcugcacgugugcgugaccggcgacgagaagaacgccaccgccagcuucaucuacaacggcagacugguggacagcaucgugagcuggagcaaggagauccugagaacccaggagagcgagugcgugugcaucaacggcaccugcaccguggugaugaccgacggcagcgccagcggcaaggccgacaccaagauccuguucaucgaggagggcaagaucgugcacaccagcacccugagcggcagcgcccagcacguggaggagugcagcugcuaccccagauaccccggcgugagaugcgugugcagagacaacuggaagggcagcaacagacccaucguggacaucaacaucaaggacuacagcaucgugagcagcuacgugugcagcggccuggugggcgacacccccagaaagaacgacagcagcagcagcagccacugccuggaccccaacaacgaggagggcggccacggcgugaagggcugggccuucgacgacggcaacgacguguggaugggcagaaccaucagcgagaagcugagaagcggcuacgagaccuucaaggugaucgagggcuggagcaaccccaacagcaagcugcagaucaacagacaggugaucguggacagaggcaacagaagcggcuacagcggcaucuucagcguggagggcaagagcugcaucaacagaugcuucuacguggagcugaucagaggcagaaaggaggagaacgaggugcuguggaccagcaacagcaucgugguguucugcggcaccagcggcaccuacggcaccggcagcuggcccgacggcgccgacaucaaccugaugcccaucuga

SEQ ID NO: 177105 - RNA, 1410 nt, Artificial Sequence
  derived and/or modified CDS sequence (opt4) from neuraminidase__InfluenzaA__ACT21517
augaaccccaaccagaagaucaucaccaucggcagcgugagccugaccaucagcaccaucugcuucuucaugcagaucgccauccugaucaccaccgugacccugcacuucaagcaguacgaguucaacagcccccccaacaaccaggugaugcugugcgagcccaccaucaucgagagaaacaucaccgagaucguguaccugaccaacaccaccaucgagaaggagaucugccccaagcuggccgaguacagaaacuggagcgagccccagugcgacaucaccggcuucgcccccuucagcaaggacaacagcaucagacugagcgccggcggcgacaucugggugaccagagagcccuacgugagcugcgaccccgacaagugcuaccaguucgcccugggccagggcaccacccugaacaacgugcacagcaacgacaccgugcacgacagaacccccuacagaacccuggugaugaacgagcugggcgugcccuuccaccugggcaccaagcaggugugcaucgccuggagcagcagcagcugccacgacggcaaggccuggcugcacgugugcgugaccggcgacgacaagaacgccaccgccagcuucaucuacaacggcagacugguggacagcaucgugagcuggagcaaggagauccugagaacccaggagagcgagugcgugugcaucaacggcaccugcaccguggugaugaccgacggcagcgccagcggcaaggccgacaccaagauccuguucaucgaggagggcaagaucgugcacaccagcacccugagcggcagcgcccagcacguggaggagugcagcugcuaccccagauaccccggcgugagaugcgugugcagagacaacuggaagggcagcaacagacccaucguggacaucaacaucaaggacuacagcaucgugagcagcuacgugugcagcggccuggccggcgacacccccagaaagaacgacagcagcagcagcagccacugccuggaccccaacaacgaggagggcggccacggcgugaagggcugggccuucgacgacggcaacgacguguggaugggcagaaccaucagcgagaagcugagaagcggcuacgagaccuucaaggugaucgagggcuggagcaaccccaacagcaagcugcagaucaacagacaggugaucguggacagaggcaacagaagcggcuacagcggcaucuucagcguggagggcaagagcugcaucaacagaugcuucuacguggagcugaucagaggcagaaaggaggagaccgaggugcuguggaccagcaacagcaucgugguguucugcggcaccagcggcaccuacggcaccggcagcuggcccgacggcgccgacaucaaccugaugcccaucuga

SEQ ID NO: 177106 - RNA, 1410 nt, Artificial Sequence; identical to SEQ ID NO: 176798
  derived and/or modified CDS sequence (opt4) from neuraminidase__InfluenzaA__ACT21574

SEQ ID NO: 177107 - RNA, 1410 nt, Artificial Sequence; identical to SEQ ID NO: 176798
  derived and/or modified CDS sequence (opt4) from neuraminidase__InfluenzaA__ACT21585

SEQ ID NO: 177108 - RNA, 1410 nt, Artificial Sequence; identical to SEQ ID NO: 176798
  derived and/or modified CDS sequence (opt4) from neuraminidase__InfluenzaA__ACT22011

SEQ ID NO: 177109 - RNA, 1410 nt, Artificial Sequence; identical to SEQ ID NO: 176798
  derived and/or modified CDS sequence (opt4) from neuraminidase__InfluenzaA__ACT22012

SEQ ID NO: 177110 - RNA, 1410 nt, Artificial Sequence; identical to SEQ ID NO: 176798
  derived and/or modified CDS sequence (opt4) from neuraminidase__InfluenzaA__ACT22013

SEQ ID NO: 177111 - RNA, 1410 nt, Artificial Sequence; identical to SEQ ID NO: 176798
  derived and/or modified CDS sequence (opt4) from neuraminidase__InfluenzaA__ACT22014

SEQ ID NO: 177112 - RNA, 1410 nt, Artificial Sequence; identical to SEQ ID NO: 176788
  derived and/or modified CDS sequence (opt4) from neuraminidase__InfluenzaA__ACT22015

SEQ ID NO: 177113 - RNA, 1410 nt, Artificial Sequence
  derived and/or modified CDS sequence (opt4) from neuraminidase__InfluenzaA__ACT22016
augaaccccaaccagaagaucaucaccaucggcagcgugugcaugaccaucggcauggccaaccugauccugcagaucggcaacaucaucagcaucuggaucagccacagcauccagcugggcaaccagaaccagaucgagaccugcaaccagagcgugaucaccuacgagaacaacaccugggugaaccagaccuacgugaacaucagcaacaccaacuucgccgccggccagagcguggugagcgugaagcuggccggcaacagcagccugugccccgugagcggcugggccaucuacagcaaggacaacagcaucagaaucggcagcaagggcgacguguucgugaucagagagcccuucaucagcugcagcccccuggagugcagaaccuucuuccugacccagggcgcccugcugaacgacaagcacagcaacggcaccaucaaggacagaagccccuacagaacccugaugagcugccccaucggcgaggugcccagccccuacaacagcagauucgagagcguggccuggagcgccagcgccugccacgacggcaucaacuggcugaccaucggcaucagcggccccgacaacggcgccguggccgugcugaaguacaacggcaucaucaccgacaccaucaagagcuggagaaacaacauccugagaacccaggagagcgagugcgccugcgugaacggcagcugcuucaccgugaugaccgacggccccagcaacggccaggccagcuacaagaucuucagaaucgagaagggcaagaucgugaagagcguggagaugaacgcccccaacuacuacuacgaggagugcagcugcuaccccgacagcagcgagaucaccugcgugugcagagacaacuggcacggcagcaacagacccugggugagcuucaaccagaaccuggaguaccagaucggcuacaucugcagcggcaucuucggcgacaaccccagacccaacgacaagaccggcagcugcggccccgugagcagcaacggcgccaacggcgugaagggcuucagcuucaaguacggcaacggcguguggaucggcagaaccaagagcaucagcagcagaaacggcuucgagaugaucugggaccccaacggcuggaccggcaccgacaacaacuucagcaucaagcaggacaucgugggcaucaacgaguggagcggcuacagcggcagcuucgugcagcaccccgagcugaccggccuggacugcaucagacccugcuucuggguggagcugaucagaggcagacccaaggagaacaccaucuggaccagcggcagcagcaucagcuucugcggcgugaacagcgacaccgugggcuggagcuggcccgacggcgccgagcugcccuucaccaucgacaaguga

SEQ ID NO: 177114 - RNA, 1410 nt, Artificial Sequence; identical to SEQ ID NO: 176798
  derived and/or modified CDS sequence (opt4) from neuraminidase__InfluenzaA__ACT22017

SEQ ID NO: 177115 - RNA, 1410 nt, Artificial Sequence; identical to SEQ ID NO: 176798
  derived and/or modified CDS sequence (opt4) from neuraminidase__InfluenzaA__ACT22018

SEQ ID NO: 177116 - RNA, 1410 nt, Artificial Sequence; identical to SEQ ID NO: 176788
  derived and/or modified CDS sequence (opt4) from neuraminidase__InfluenzaA__ACT22506

SEQ ID NO: 177117 - RNA, 1410 nt, Artificial Sequence; identical to SEQ ID NO: 176798
  derived and/or modified CDS sequence (opt4) from neuraminidase__InfluenzaA__ACT22511

SEQ ID NO: 177118 - RNA, 1410 nt, Artificial Sequence; identical to SEQ ID NO: 176798
  derived and/or modified CDS sequence (opt4) from neuraminidase__InfluenzaA__ACT33121

SEQ ID NO: 177119 - RNA, 1410 nt, Artificial Sequence; identical to SEQ ID NO: 176798
  derived and/or modified CDS sequence (opt4) from neuraminidase__InfluenzaA__ACT33124

SEQ ID NO: 177120 - RNA, 1410 nt, Artificial Sequence; identical to SEQ ID NO: 176798
  derived and/or modified CDS sequence (opt4) from neuraminidase__InfluenzaA__ACT33126

SEQ ID NO: 177121 - RNA, 1410 nt, Artificial Sequence; identical to SEQ ID NO: 176788
  derived and/or modified CDS sequence (opt4) from neuraminidase__InfluenzaA__ACT35526

SEQ ID NO: 177122 - RNA, 1410 nt, Artificial Sequence; identical to SEQ ID NO: 176798
  derived and/or modified CDS sequence (opt4) from neuraminidase__InfluenzaA__ACT36507

SEQ ID NO: 177123 - RNA, 1410 nt, Artificial Sequence; identical to SEQ ID NO: 176798
  derived and/or modified CDS sequence (opt4) from neuraminidase__InfluenzaA__ACT36672

SEQ ID NO: 177124 - RNA, 1410 nt, Artificial Sequence; identical to SEQ ID NO: 176798
  derived and/or modified CDS sequence (opt4) from neuraminidase__InfluenzaA__ACT36673

SEQ ID NO: 177125 - RNA, 1410 nt, Artificial Sequence; identical to SEQ ID NO: 176798
  derived and/or modified CDS sequence (opt4) from neuraminidase__InfluenzaA__ACT36674

SEQ ID NO: 177126 - RNA, 1410 nt, Artificial Sequence; identical to SEQ ID NO: 176798
  derived and/or modified CDS sequence (opt4) from neuraminidase__InfluenzaA__ACT36675

SEQ ID NO: 177127 - RNA, 1410 nt, Artificial Sequence; identical to SEQ ID NO: 176798
  derived and/or modified CDS sequence (opt4) from neuraminidase__InfluenzaA__ACT36677

SEQ ID NO: 177128 - RNA, 1410 nt, Artificial Sequence
  derived and/or modified CDS sequence (opt4) from neuraminidase__InfluenzaA__ACT36678
augaaccccaaccagaagaucaucaccaucggcagcgugugcaugaccaucggcauggccaaccugauccugcagaucggcaacaucaucagcaucuggaucagccacagcauccagcugggcaaccagaaccagaucgagaccugcaaccagagcgugaucaccuacgagaacaacaccugggugaaccagaccuacgugaacaucagcaacaccaacuucgccgccagacagagcguggugagcgugaagcuggccggcaacagcagccugugccccgugagcggcugggccaucuacagcaaggacaacagcgugagaaucggcagcaagggcgacguguucgugaucagagagcccuucaucagcugcagcccccuggagugcagaaccuucuuccugacccagggcgcccugcugaacgacaagcacagcaacggcaccaucaaggacagaagccccuacagaacccugaugagcugccccaucggcgaggugcccagccccuacaacagcagauucgagagcguggccuggagcgccagcgccugccacgacggcaucaacuggcugaccaucggcaucagcggccccgacaacggcgccguggccgugcugaaguacaacggcaucaucaccgacaccaucaagagcuggagaaacaacauccugagaacccaggagagcgagugcgccugcgugaacggcagcugcuucaccgugaugaccgacggccccagcaacggccaggccagcuacaagaucuucagaaucgagaagggcaagaucgugaagagcguggagaugaacgcccccaacuaccacuacgaggagugcagcugcuaccccgacagcagcgagaucaccugcgugugcagagacaacuggcacggcagcaacagacccugggugagcuucaaccagaaccuggaguaccagaucggcuacaucugcagcggcaucuucggcgacaaccccagacccaacgacaagaccggcagcugcggccccgugagcagcaacggcgccaacggcgugaagggcuucagcuucaaguacggcaacggcguguggaucggcagaaccaagagcaucagcagcagaaacggcuucgagaugaucugggaccccaacggcuggaccggcaccgacaacaacuucagcaucaagcaggacaucgugggcaucaacgaguggagcggcuacagcggcagcuucgugcagcaccccgagcugaccggccuggacugcaucagacccugcuucuggguggagcugaucagaggcagacccaaggagaacaccaucuggaccagcggcagcagcaucagcuucugcggcgugaacagcgacaccgugggcuggagcuggcccgacggcgccgagcugcccuucaccaucgacaaguga

SEQ ID NO: 177129 - RNA, 1410 nt, Artificial Sequence; identical to SEQ ID NO: 176788
  derived and/or modified CDS sequence (opt4) from neuraminidase__InfluenzaA__ACT36679

SEQ ID NO: 177130 - RNA, 1410 nt, Artificial Sequence; identical to SEQ ID NO: 176798
  derived and/or modified CDS sequence (opt4) from neuraminidase__InfluenzaA__ACT36680

SEQ ID NO: 177131 - RNA, 1410 nt, Artificial Sequence; identical to SEQ ID NO: 176788
  derived and/or modified CDS sequence (opt4) from neuraminidase__InfluenzaA__ACT36682

SEQ ID NO: 177132 - RNA, 1410 nt, Artificial Sequence; identical to SEQ ID NO: 176788
  derived and/or modified CDS sequence (opt4) from neuraminidase__InfluenzaA__ACT36683

SEQ ID NO: 177133 - RNA, 1410 nt, Artificial Sequence; identical to SEQ ID NO: 176798
  derived and/or modified CDS sequence (opt4) from neuraminidase__InfluenzaA__ACT36684

SEQ ID NO: 177134 - RNA, 1410 nt, Artificial Sequence; identical to SEQ ID NO: 176788
  derived and/or modified CDS sequence (opt4) from neuraminidase__InfluenzaA__ACT36685

SEQ ID NO: 177135 - RNA, 1410 nt, Artificial Sequence; identical to SEQ ID NO: 176788
  derived and/or modified CDS sequence (opt4) from neuraminidase__InfluenzaA__ACT36686

SEQ ID NO: 177136 - RNA, 1410 nt, Artificial Sequence; identical to SEQ ID NO: 176788
  derived and/or modified CDS sequence (opt4) from neuraminidase__InfluenzaA__ACT36687

SEQ ID NO: 177137 - RNA, 1410 nt, Artificial Sequence
  derived and/or modified CDS sequence (opt4) from neuraminidase__InfluenzaA__ACT36688
augaaccccaaccagaagaucaucaccaucggcagcgugugcaugaccaucggcauggccaaccugauccugcagaucggcaacaucaucagcaucuggaucagccacagcauccagcugggcaaccagaaccagaucgagaccugcaaccagagcgugaucaccuacgagaacaacaccugggugaaccagaccuacgugaacaucagcaacaccaacuucgccgccggccagagcguggugagcgugaagcuggccggcaacagcagccugugccccgugagcggcugggccaucuacagcaaggacaacagcgugagaaucggcagcaagggcgacguguucgugaucagagagcccuucaucagcugcagcccccuggagugcagaaccuucuuccugacccagggcgcccugcugaacgacaagcacagcaacggcaccaucaaggacagaagccccuacagaacccugaugagcugccccaucggcgaggugcccagccccuacaacagcagauucgagagcguggccuggagcgccagcgccugccacgacggcaucaacuggcugaccaucggcaucagcggccccgacaacggcgccguggccgugcugaaguacaacggcaucaucaccgacaccaucaagagcuggagaaacaacauccugagaacccaggagagcgagugcgccugcgugaacggcagcugcuucaccgugaugaccgacggccccagcaacggccaggccagcuacaagaucuucagaaucgagaagggcaagaucgugaagagcguggagaugaacgcccccaacuaccacuacgaggagugcagcugcuaccccgacagcagcgagaucaccugcgugugcagagacaacuggcacggcagcaacagacccugggugagcuucaaccagaaccuggaguaccagaucggcuacaucugcagcggcaucuucggcgacaaccccagacccaacgacaagaccggcagcugcggccccgugagcagcaacggcgccaacggcgugaagggcuucagcuacaaguacggcaacggcguguggaucggcagaaccaagagcaucagcagcagaaacggcuucgagaugaucugggaccccaacggcuggaccggcaccgacaacaacuucagcaucaagcaggacaucgugggcaucaacgaguggagcggcuacagcggcagcuucgugcagcaccccgagcugaccggccuggacugcaucagacccugcuucuggguggagcugaucagaggcagacccaaggagaacaccaucuggaccagcggcagcagcaucagcuucugcggcgugaacagcgacaccgugggcuggagcuggcccgacggcgccgagcugcccuucaccaucgacaaguga

SEQ ID NO: 177138 - RNA, 1410 nt, Artificial Sequence; identical to SEQ ID NO: 176788
  derived and/or modified CDS sequence (opt4) from neuraminidase__InfluenzaA__ACT36689

SEQ ID NO: 177139 - RNA, 1410 nt, Artificial Sequence; identical to SEQ ID NO: 176828
  derived and/or modified CDS sequence (opt4) from neuraminidase__InfluenzaA__ACT36690

SEQ ID NO: 177140 - RNA, 1410 nt, Artificial Sequence; identical to SEQ ID NO: 176788
  derived and/or modified CDS sequence (opt4) from neuraminidase__InfluenzaA__ACT36691

SEQ ID NO: 177141 - RNA, 1410 nt, Artificial Sequence; identical to SEQ ID NO: 176828
  derived and/or modified CDS sequence (opt4) from neuraminidase__InfluenzaA__ACT36693

SEQ ID NO: 177142 - RNA, 1410 nt, Artificial Sequence; identical to SEQ ID NO: 176798
  derived and/or modified CDS sequence (opt4) from neuraminidase__InfluenzaA__ACT36694

SEQ ID NO: 177143 - RNA, 1410 nt, Artificial Sequence; identical to SEQ ID NO: 176798
  derived and/or modified CDS sequence (opt4) from neuraminidase__InfluenzaA__ACT36695

SEQ ID NO: 177144 - RNA, 1410 nt, Artificial Sequence; identical to SEQ ID NO: 176798
  derived and/or modified CDS sequence (opt4) from neuraminidase__InfluenzaA__ACT52684

SEQ ID NO: 177145 - RNA, 1410 nt, Artificial Sequence; identical to SEQ ID NO: 176788
  derived and/or modified CDS sequence (opt4) from neuraminidase__InfluenzaA__ACT54608

SEQ ID NO: 177146 - RNA, 1410 nt, Artificial Sequence
  derived and/or modified CDS sequence (opt4) from neuraminidase__InfluenzaA__ACT66157
augaaccccaaccagaagaucaucaccaucggcagcgugugcaugaccaucggcauggccaaccugauccugcagaucggcaacaucaucagcaucuggaucagccacagcauccagcugggcaaccagaaccagaucgagaccugcaaccagagcgugaucaccuacgagaacaacaccugggugaaccagaccuacgugaacaucagcaacaccaacuucgccgccggccagagcguggugagcgugaagcuggccggcaacagcagccugugccccgugagcggcugggccaucuacagcaaggacaacagcaucagaaucggcagcaagggcgacguguucgugaucagagagcccuucaucagcugcagcccccuggagugcagaaccuucuuccugacccagggcgcccugcugaacgacaagcacagcaacggcaccaucaaggacagaagccccuacagaacccugaugagcugccccaucggcgaggugcccagccccuacaacagcagauucgagagcguggccuggagcgccagcgccugccacgacggcaucaacuggcugaccaucggcaucagcggccccgacaacggcgccguggccgugcugaaguacaacggcaucaucaccgacaccaucaagagcuggagaaacaacauccugagaacccaggagagcgagugcgccugcgugaacggcagcugcuucaccgugaugaccgacggccccagcaacggccaggccagcuacaagauccugagaaucgagaagggcaagaucgugaagagcguggagaugaacgcccccaacuaccacuacgaggagugcagcugcuaccccgacagcagcgagaucaccugcgugugcagagacaacuggcacggcagcaacagacccugggugagcuucaaccagaaccuggaguaccagaucggcuacaucugcagcggcaucuucggcgacaaccccagacccaacgacaagaccggcagcugcggccccgugagcagcaacggcgccaacggcgugaagggcuucagcuucaaguacggcaacggcguguggaucggcagaaccaagagcaucagcagcagaaacggcuucgagaugaucugggaccccaacggcuggaccggcaccgacaacaacuucagcaucaagcaggacaucgugggcaucaacgaguggagcggcuacagcggcagcuucgugcagcaccccgagcugaccggccuggacugcaucagacccugcuucuggguggagcugaucagaggcagacccaaggagaacaccaucuggaccagcggcagcagcaucagcuucugcggcgugaacagcgacaccgugggcuggagcuggcccgacggcgccgagcugcccuucaccaucgacaaguga

SEQ ID NO: 177147 - RNA, 1410 nt, Artificial Sequence; identical to SEQ ID NO: 176798
  derived and/or modified CDS sequence (opt4) from neuraminidase__InfluenzaA__ACT67117

SEQ ID NO: 177148 - RNA, 1410 nt, Artificial Sequence; identical to SEQ ID NO: 176788
  derived and/or modified CDS sequence (opt4) from neuraminidase__InfluenzaA__ACT67121

SEQ ID NO: 177149 - RNA, 1410 nt, Artificial Sequence; identical to SEQ ID NO: 176798
  derived and/or modified CDS sequence (opt4) from neuraminidase__InfluenzaA__ACT67240

SEQ ID NO: 177150 - RNA, 1410 nt, Artificial Sequence; identical to SEQ ID NO: 176798
  derived and/or modified CDS sequence (opt4) from neuraminidase__InfluenzaA__ACT67241

SEQ ID NO: 177151 - RNA, 1410 nt, Artificial Sequence; identical to SEQ ID NO: 176798
  derived and/or modified CDS sequence (opt4) from neuraminidase__InfluenzaA__ACT67243

SEQ ID NO: 177152 - RNA, 1410 nt, Artificial Sequence
  derived and/or modified CDS sequence (opt4) from neuraminidase__InfluenzaA__ACT67256
augaaccccaaccagaagaucaucaccaucggcagcgugugcaugaccaucggcauggccaaccugauccugcagaucggcaacaucaucagcaucuggaucagccacagcauccagcugggcaaccagaaccagaucgagaccugcaaccagagcgugaucaccuacgagaacaacaccugggugaaccagaccuacgugaacaucagcaacaccaacuucgccgccggccagagcguggugagcgugaagcuggccggcaacagcagccugugccccgugagcggcugggccaucuacagcaaggacaacagcaucagaaucggcagcaagggcgacguguucgugaucagagagcccuucaucagcugcagcccccuggagugcagaaccuucuuccugacccagggcgcccugcugaacgacaagcacagcaacggcaccaucaaggacagaagccccuacagaacccugaugagcugccccaucggcgaggugcccagccccuacaacagcagauucgagagcguggccuggagcgccagcgccugccacgacggcaucaacuggcugaccaucggcaucagcggccccgacaacggcgccguggccgugcugaaguacaacggcaucaucaccgacaccaucaagagcuggagaaacaacauccugagaacccaggagagcgagugcgccugcgugaacggcagcugcuucaccgugaugaccgacggccccagcgacggccaggccagcuacaagaucuucagaaucgagaagggcaagaucgugaagagcguggagaugaacgcccccaacuacuacuacgaggagugcagcugcuaccccgacagcagcgagaucaccugcgugugcagagacaacuggcacggcagcaacagacccugggugagcuucaaccagaaccuggaguaccagaucggcuacaucugcagcggcaucuucggcgacaaccccagacccaacgacaagaccggcagcugcggccccgugagcagcaacggcgccaacggcgugaagggcuucagcuucaaguacggcaacggcguguggaucggcagaaccaagagcaucagcagcagaaacggcuucgagaugaucugggaccccaacggcuggaccggcaccgacaacaacuucagcaucaagcaggacaucgugggcaucaacgaguggagcggcuacagcggcagcuucgugcagcaccccgagcugaccggccuggacugcaucagacccugcuucuggguggagcugaucagaggcagacccaaggagaacaccaucuggaccagcggcagcagcaucagcuucugcggcgugaacagcgacaccgugggcuggagcuggcccgacggcgccgagcugcccuucaccaucgacaaguga

SEQ ID NO: 177153 - RNA, 1410 nt, Artificial Sequence
  derived and/or modified CDS sequence (opt4) from neuraminidase__InfluenzaA__ACT68161
augaaccccaaccagaagaucaucaccaucggcagcgugugcaugaccaucggcauggccaaccugauccugcagaucggcaacaucaucagcaucuggaucagccacagcauccagcugggcaaccagaaccagaucgagaccugcaaccagagcgugaucaccuacgagaacaacaccugggugaaccagaccuacgugaacaucagcaacaccaacuucgccgccggccagagcguggugagcgugaagcuggccggcaacagcagccugugccccgugagcggcugggccaucuacagcaaggacaacagcaucagaaucggcagcaagggcgacguguucgugaucagagagcccuucaucagcugcagcccccuggagugcagaaccuucuuccugacccagggcgcccugcugaacgacaagcacagcaacggcaccaucaaggacagaagccccuacagaacccugaugagcugccccaucggcgaggugcccagccccuacaacagcagauucgagagcguggccuggagcgccagcgccugccacgacggcaucaacuggcugaccaucggcaucagcggccccgacaacggcgccguggccgugcugaaguacaacggcaucaucaccgacaccaucaagagcuggagaaacaacauccugagaacccaggagagcgagugcgccugcgugaacggcagcugcuucaccgugaugaccgacggccccagcgacggccaggccagcuacaagaucuucagaaucgagaagggcaagaucgugaagagcguggagaugaacgcccccaacuaccacuacgaggagugcagcugcuaccccgacagcagcgagaucaccugcgugugcagagacaacuggcacggcagcaacagacccugggugagcuucaaccagaaccuggaguaccagaucggcuacaucugcagcggcaucuucggcgacaaccccagacccaacgacaaggccggcagcugcggccccgugagcagcaacggcgccaacggcgugaagggcuucagcuucaaguacggcaacggcguguggaucggcagaaccaagagcaucagcagcagaaacggcuucgagaugaucugggaccccaacggcuggaccggcaccgacaacaacuucagcaucaagcaggacaucgugggcaucaacgaguggagcggcuacagcggcagcuucgugcagcaccccgagcugaccggccuggacugcaucagacccugcuucuggguggagcugaucagaggcagacccaaggagaacaccaucuggaccagcggcagcagcaucagcuucugcggcgugaacagcgacaccgugggcuggagcuggcccgacggcgccgagcugcccuucaccaucgacaaguga

SEQ ID NO: 177154 - RNA, 1410 nt, Artificial Sequence; identical to SEQ ID NO: 176788
  derived and/or modified CDS sequence (opt4) from neuraminidase__InfluenzaA__ACT68162

SEQ ID NO: 177155 - RNA, 1410 nt, Artificial Sequence; identical to SEQ ID NO: 176788
  derived and/or modified CDS sequence (opt4) from neuraminidase__InfluenzaA__ACT68163

SEQ ID NO: 177156 - RNA, 1410 nt, Artificial Sequence; identical to SEQ ID NO: 176788
  derived and/or modified CDS sequence (opt4) from neuraminidase__InfluenzaA__ACT68164

SEQ ID NO: 177157 - RNA, 1410 nt, Artificial Sequence; identical to SEQ ID NO: 176798
  derived and/or modified CDS sequence (opt4) from neuraminidase__InfluenzaA__ACT68166

SEQ ID NO: 177158 - RNA, 1410 nt, Artificial Sequence; identical to SEQ ID NO: 176798
  derived and/or modified CDS sequence (opt4) from neuraminidase__InfluenzaA__ACT68167

SEQ ID NO: 177159 - RNA, 1410 nt, Artificial Sequence; identical to SEQ ID NO: 176828
  derived and/or modified CDS sequence (opt4) from neuraminidase__InfluenzaA__ACT68168

SEQ ID NO: 177160 - RNA, 1410 nt, Artificial Sequence
  derived and/or modified CDS sequence (opt4) from neuraminidase__InfluenzaA__ACT68169
augaaccccaaccagaagaucaucaccaucggcagcgugugcaugaccaucggcauggccaaccugauccugcagaucggcaacaucaucagcaucuggaucagccacagcauccagcugggcgaccagaaccagaucgagaccugcaaccagagcgugaucaccuacgagaacaacaccugggugaaccagaccuacgugaacaucagcaacaccaacuucgccgccggccagagcguggugagcgugaagcuggccggcaacagcagccugugccccgugagcggcugggccaucuacagcaaggacaacagcaucagaaucggcagcaagggcgacguguucgugaucagagagcccuucaucagcugcagcccccuggagugcagaaccuucuuccugacccagggcgcccugcugaacgacaagcacagcaacgagaccaucaaggacagaagccccuacagaacccugaugagcugccccaucggcgaggugcccagccccuacaacagcagauucgagagcguggccuggagcgccagcgccugccacgacggcaucaacuggcugaccaucggcaucagcggccccgacaacggcgccguggccgugcugaaguacaacggcaucaucaccgacaccaucaagagcuggagaaacaacauccugagaacccaggagagcgagugcgccugcgugaacggcagcugcuucaccgugaugaccgacggccccagcgacggccaggccagcuacaagaucuucagaaucgagaagggcaagaucgugaagagcguggagaugaacgcccccaacuaccacuacgaggagugcagcugcuaccccgacagcagcgagaucaccugcgugugcagagacaacuggcacggcagcaacagacccugggugagcuucaaccagaaccuggaguaccagaucggcuacaucugcagcggcaucuucggcgacaaccccagacccaacgacaagaccggcagcugcggccccgugagcagcaacggcgccaacggcgugaagggcuucagcuucaaguacggcaacggcguguggaucggcagaaccaagagcaucagcagcagaaacggcuucgagaugaucugggaccccaacggcuggaccggcaccgacaacaacuucagcaucaagcaggacaucgugggcaucagcgaguggagcggcuacagcggcagcuucgugcagcaccccgagcugaccggccuggacugcaucagacccugcuucuggguggagcugaucagaggcagacccaaggagaacaccaucuggaccagcggcagcagcaucagcuucugcggcgugaacagcgacaccgugggcuggagcuggcccgacggcgccgagcugcccuucaccaucgacaaguga

SEQ ID NO: 177161 - RNA, 1410 nt, Artificial Sequence; identical to SEQ ID NO: 176788
  derived and/or modified CDS sequence (opt4) from neuraminidase__InfluenzaA__ACT68171

SEQ ID NO: 177162 - RNA, 1410 nt, Artificial Sequence; identical to SEQ ID NO: 176788
  derived and/or modified CDS sequence (opt4) from neuraminidase__InfluenzaA__ACT68172

SEQ ID NO: 177163 - RNA, 1410 nt, Artificial Sequence; identical to SEQ ID NO: 176798
  derived and/or modified CDS sequence (opt4) from neuraminidase__InfluenzaA__ACT68173

SEQ ID NO: 177164 - RNA, 1410 nt, Artificial Sequence; identical to SEQ ID NO: 176798
  derived and/or modified CDS sequence (opt4) from neuraminidase__InfluenzaA__ACT68174

SEQ ID NO: 177165 - RNA, 1410 nt, Artificial Sequence
  derived and/or modified CDS sequence (opt4) from neuraminidase__InfluenzaA__ACT68175
augaaccccaaccagaagaucaucaccaucggcagcgugugcaugaccaucggcauggccaaccugauccugcagaucggcaacaucaucagcaucuggaucagccacagcauccagcugggcaaccagaaccagaucgagaccugcaaccagagcgugaucaccuacgagaacaacaccugggugaaccagaccuacgugaacaucagcaacaccaacuucgccgccggccagagcguggugagcgugaagcuggccggcaacagcagccugugccccgugagcggcugggccaucuacagcaaggacaacagcgugagaaucggcagcaagggcgacguguucgugaucagagagcccuucaucagcugcagcccccuggagugcagaaccuucuuccugacccagggcgcccugcugaacgacaagcacagcaacggcaccaucaaggacagaagccccuacagaacccugaugagcugccccaucggcgaggugcccagccccuacaacagcagauucgagagcguggccuggagcgccagcgccugccacgacggcaucaacuggcugaccaucggcaucagcggccccgacaacggcgccguggccgugcugaaguacaacggcaucaucaccgacaccaucaagagcuggagaaacaacauccugagaacccaggagagcgagugcgccugcgugaacggcagcugcuucaccgugaugaccgacggccccagcaacggccaggccagcuacaagaucuucagaaucgagaagggcaagaucgugaagagcguggagaugaacgcccccaacuaccacuacgaggagugcagcugcuaccccgacagcggcgagaucaccugcgugugcagagacaacuggcacggcagcaacagacccugggugagcuucaaccagaaccuggaguaccagaucggcuacaucugcagcggcaucuucggcgacaaccccagacccaacgacaagaccggcagcugcggccccgugagcagcaacggcgccaacggcgugaagggcuucagcuucaaguacggcaacggcguguggaucggcagaaccaagagcaucagcagcagaaacggcuucgagaugaucugggaccccaacggcuggaccggcaccgacaacaacuucagcaucaagcaggacaucgugggcaucaacgaguggagcggcuacagcggcagcuucgugcagcaccccgagcugaccggccuggacugcaucagacccugcuucuggguggagcugaucagaggcagacccaaggagaacaccaucuggaccagcggcagcagcaucagcuucugcggcgugaacagcgacaccgugggcuggagcuggcccgacggcgccgagcugcccuucaccaucgacaaguga

SEQ ID NO: 177166 - RNA, 1410 nt, Artificial Sequence; identical to SEQ ID NO: 176798
  derived and/or modified CDS sequence (opt4) from neuraminidase__InfluenzaA__ACT68176

SEQ ID NO: 177167 - RNA, 1410 nt, Artificial Sequence; identical to SEQ ID NO: 176798
  derived and/or modified CDS sequence (opt4) from neuraminidase__InfluenzaA__ACT68177

SEQ ID NO: 177168 - RNA, 1410 nt, Artificial Sequence; identical to SEQ ID NO: 176798
  derived and/or modified CDS sequence (opt4) from neuraminidase__InfluenzaA__ACT68178

SEQ ID NO: 177169 - RNA, 1410 nt, Artificial Sequence; identical to SEQ ID NO: 177165
  derived and/or modified CDS sequence (opt4) from neuraminidase__InfluenzaA__ACT68179

SEQ ID NO: 177170 - RNA, 1410 nt, Artificial Sequence; identical to SEQ ID NO: 176798
  derived and/or modified CDS sequence (opt4) from neuraminidase__InfluenzaA__ACT68180

SEQ ID NO: 177171 - RNA, 1410 nt, Artificial Sequence; identical to SEQ ID NO: 176828
  derived and/or modified CDS sequence (opt4) from neuraminidase__InfluenzaA__ACT79145

SEQ ID NO: 177172 - RNA, 1410 nt, Artificial Sequence
  derived and/or modified CDS sequence (opt4) from neuraminidase__InfluenzaA__ACT79155
augaaccccaaccagaagaucaucaccaucggcagcgugugcaugaccaucggcauggccaaccugauccugcagaucggcaacaucaucagcaucuggaucagccacagcauccagcugggcaaccagaaccagaucgagaccugcaaccagagcgugaucaccuacgagaacaacaccugggugaaccagaccuacgugaacaucagcaacaccaacuucgccgccggccagagcguggugagcgugaagcuggccggcaacagcagccugugccccgugggcggcugggccaucuacagcaaggacaacagcgugagaaucggcagcaagggcgacguguucgugaucagagagcccuucaucagcugcagccugcuggagugcagaaccuucuuccugacccagggcgcccugcugaacgacaagcacagcaacggcaccaucaaggacagaagccccuacagaacccugaugagcugccccaucggcgaggugcccagccccuacaacagcagauucgagagcguggccuggagcgccagcgccugccacgacggcaucaacuggcugaccaucggcaucagcggccccgacaacggcgccguggccgugcugaaguacaacggcaucaucaccgacaccaucaagagcuggagaaacaacauccugagaacccaggagagcgagugcgccugcgugaacggcagcugcuucaccgugaugaccgacggccccagcaacggccaggccagcuacaagaucuucagaaucgagaagggcaagaucgugaagagcguggagaugaacgcccccaacuaccacuacgaggagugcagcugcuaccccgacagcagcgagaucaccugcgugugcagagacaacuggcacggcagcaacagacccugggugagcuucaaccagaaccuggaguaccagaucggcuacaucugcagcggcaucuucggcgacaaccccagacccaacgacaagaccggcagcugcggccccgugagcagcaacggcgccaacggcgugaagggcuucagcuucaaguacggcaacggcguguggaucggcagaaccaagagcaucagcagcagaaacggcuucgagaugaucugggaccccaacggcuggaccggcaccgacaacaacuucagcaucaagcaggacaucgugggcaucaacgaguggagcggcuacagcggcagcuucgugcagcaccccgagcugaccggccuggacugcaucagacccugcuucuggguggagcugaucagaggcagacccaaggagaacaccaucuggaccagcggcagcagcaucagcuucugcggcgugaacagcgacaccgugggcuggagcuggcccgacggcgccgagcugcccuucaccaucgacaaguga

SEQ ID NO: 177173 - RNA, 1410 nt, Artificial Sequence; identical to SEQ ID NO: 176788
  derived and/or modified CDS sequence (opt4) from neuraminidase__InfluenzaA__ACT79165

SEQ ID NO: 177174 - RNA, 1410 nt, Artificial Sequence; identical to SEQ ID NO: 176788
  derived and/or modified CDS sequence (opt4) from neuraminidase__InfluenzaA__ACT79175

SEQ ID NO: 177175 - RNA, 1410 nt, Artificial Sequence; identical to SEQ ID NO: 176798
  derived and/or modified CDS sequence (opt4) from neuraminidase__InfluenzaA__ACT79185

SEQ ID NO: 177176 - RNA, 1410 nt, Artificial Sequence; identical to SEQ ID NO: 176798
  derived and/or modified CDS sequence (opt4) from neuraminidase__InfluenzaA__ACT79622

SEQ ID NO: 177177 - RNA, 1410 nt, Artificial Sequence; identical to SEQ ID NO: 177165
  derived and/or modified CDS sequence (opt4) from neuraminidase__InfluenzaA__ACT79630

SEQ ID NO: 177178 - RNA, 1410 nt, Artificial Sequence; identical to SEQ ID NO: 176798
  derived and/or modified CDS sequence (opt4) from neuraminidase__InfluenzaA__ACT83798

SEQ ID NO: 177179 - RNA, 1410 nt, Artificial Sequence; identical to SEQ ID NO: 176798
  derived and/or modified CDS sequence (opt4) from neuraminidase__InfluenzaA__ACT83808

SEQ ID NO: 177180 - RNA, 1410 nt, Artificial Sequence; identical to SEQ ID NO: 176798
  derived and/or modified CDS sequence (opt4) from neuraminidase__InfluenzaA__ACT83818

SEQ ID NO: 177181 - RNA, 1410 nt, Artificial Sequence; identical to SEQ ID NO: 176798
  derived and/or modified CDS sequence (opt4) from neuraminidase__InfluenzaA__ACT83828

SEQ ID NO: 177182 - RNA, 1410 nt, Artificial Sequence; identical to SEQ ID NO: 176798
  derived and/or modified CDS sequence (opt4) from neuraminidase__InfluenzaA__ACT83838

SEQ ID NO: 177183 - RNA, 1410 nt, Artificial Sequence; identical to SEQ ID NO: 176788
  derived and/or modified CDS sequence (opt4) from neuraminidase__InfluenzaA__ACT83848

SEQ ID NO: 177184 - RNA, 1410 nt, Artificial Sequence; identical to SEQ ID NO: 176788
  derived and/or modified CDS sequence (opt4) from neuraminidase__InfluenzaA__ACT83858

SEQ ID NO: 177185 - RNA, 1410 nt, Artificial Sequence; identical to SEQ ID NO: 176798
  derived and/or modified CDS sequence (opt4) from neuraminidase__InfluenzaA__ACT83868

SEQ ID NO: 177186 - RNA, 1410 nt, Artificial Sequence; identical to SEQ ID NO: 176798
  derived and/or modified CDS sequence (opt4) from neuraminidase__InfluenzaA__ACT83878

SEQ ID NO: 177187 - RNA, 1410 nt, Artificial Sequence; identical to SEQ ID NO: 176798
  derived and/or modified CDS sequence (opt4) from neuraminidase__InfluenzaA__ACT86002

SEQ ID NO: 177188 - RNA, 1410 nt, Artificial Sequence; identical to SEQ ID NO: 176798
  derived and/or modified CDS sequence (opt4) from neuraminidase__InfluenzaA__ACT86012

SEQ ID NO: 177189 - RNA, 1410 nt, Artificial Sequence; identical to SEQ ID NO: 176798
  derived and/or modified CDS sequence (opt4) from neuraminidase__InfluenzaA__ACT86022

SEQ ID NO: 177190 - RNA, 1410 nt, Artificial Sequence; identical to SEQ ID NO: 176788
  derived and/or modified CDS sequence (opt4) from neuraminidase__InfluenzaA__ACT86032

SEQ ID NO: 177191 - RNA, 1410 nt, Artificial Sequence; identical to SEQ ID NO: 176798
  derived and/or modified CDS sequence (opt4) from neuraminidase__InfluenzaA__ACT86042

SEQ ID NO: 177192 - RNA, 1410 nt, Artificial Sequence; identical to SEQ ID NO: 176798
  derived and/or modified CDS sequence (opt4) from neuraminidase__InfluenzaA__ACT86052

SEQ ID NO: 177193 - RNA, 1410 nt, Artificial Sequence; identical to SEQ ID NO: 176798
  derived and/or modified CDS sequence (opt4) from neuraminidase__InfluenzaA__ACT86062

SEQ ID NO: 177194 - RNA, 1410 nt, Artificial Sequence; identical to SEQ ID NO: 176798
  derived and/or modified CDS sequence (opt4) from neuraminidase__InfluenzaA__ACT86072

SEQ ID NO: 177195 - RNA, 1410 nt, Artificial Sequence; identical to SEQ ID NO: 176798
  derived and/or modified CDS sequence (opt4) from neuraminidase__InfluenzaA__ACT86082

SEQ ID NO: 177196 - RNA, 1410 nt, Artificial Sequence; identical to SEQ ID NO: 176798
  derived and/or modified CDS sequence (opt4) from neuraminidase__InfluenzaA__ACT86092

SEQ ID NO: 177197 - RNA, 1410 nt, Artificial Sequence; identical to SEQ ID NO: 176798
  derived and/or modified CDS sequence (opt4) from neuraminidase__InfluenzaA__ACT86102

SEQ ID NO: 177198 - RNA, 1410 nt, Artificial Sequence; identical to SEQ ID NO: 176798
  derived and/or modified CDS sequence (opt4) from neuraminidase__InfluenzaA__ACT86112

SEQ ID NO: 177199 - RNA, 1410 nt, Artificial Sequence; identical to SEQ ID NO: 176798
  derived and/or modified CDS sequence (opt4) from neuraminidase__InfluenzaA__ACT86122

SEQ ID NO: 177200 - RNA, 1410 nt, Artificial Sequence; identical to SEQ ID NO: 176798
  derived and/or modified CDS sequence (opt4) from neuraminidase__InfluenzaA__ACT86132

SEQ ID NO: 177201 - RNA, 1410 nt, Artificial Sequence; identical to SEQ ID NO: 176798
  derived and/or modified CDS sequence (opt4) from neuraminidase__InfluenzaA__ACT86142

SEQ ID NO: 177202 - RNA, 1410 nt, Artificial Sequence; identical to SEQ ID NO: 176788
  derived and/or modified CDS sequence (opt4) from neuraminidase__InfluenzaA__ACT97323

SEQ ID NO: 177203 - RNA, 1410 nt, Artificial Sequence; identical to SEQ ID NO: 176798
  derived and/or modified CDS sequence (opt4) from neuraminidase__InfluenzaA__ACU00934

SEQ ID NO: 177204 - RNA, 1410 nt, Artificial Sequence; identical to SEQ ID NO: 176798
  derived and/or modified CDS sequence (opt4) from neuraminidase__InfluenzaA__ACU00944

SEQ ID NO: 177205 - RNA, 1410 nt, Artificial Sequence; identical to SEQ ID NO: 177152
  derived and/or modified CDS sequence (opt4) from neuraminidase__InfluenzaA__ACU00954

SEQ ID NO: 177206 - RNA, 1410 nt, Artificial Sequence
  derived and/or modified CDS sequence (opt4) from neuraminidase__InfluenzaA__ACU12497
augaaccccaaccagaagaucaucaccaucggcagcgugagccugaccaucgccaccaucugcuuccugaugcagaucgccauccuggugaccaccgugacccugcacuucaagcaguacgagugcaacagcccccccaacaaccaggugaugcccugcgagcccaccaucaucgagagaaacaucaccgagaucguguaccugaccaacaccaccaucgagagagagaucugccccaagcugguggaguacagaaacuggagcaagccccagugcagagugaccggcuucgcccccuucagcaaggacaacagcaucagacugagcgccggcggcgacaucugggugaccagagagcccuacgugagcugcgaccccggcaagugcuaccaguucgcccugggccagggcaccacccugaacaacagacacagcaacgacaccgugcacgacagaacccccuacagaacccugcugaugaacgagcugggcgugcccuuccaccugggcaccaagcaggugugcaucgccuggagcagcagcagcugccacgacggcaaggccuggcugcacgugugcgugaccggccacgacgagaacgccaccgccagcuucaucuacgacggcagacugguggacagcaucgugagcuggagcaagaacauccugagaacccaggagagcgagugcgugugcaucaacggcaccugcaccguggugaugaccgacggcagcgccagcgagagagccgacaccaagauccuguucaucgaggagggcaagaucgugcacaucagcccccugagcggcagcgcccagcacguggaggagugcagcugcuaccccagauaccccggcgugagaugcgugugcagagacaacuggaagggcagcaacagacccaucguggacaucaacgugaaggacuacagcaucgugagcagcuacgugugcagcggccuggugggcgacacccccagaaagaacgacagcagcagcagcagcuacugcagaaaccccaacaacgagaagggcagccacggcgugaagggcugggccuucgacgacggcaacgacguguggaugggcagaaccaucggcgaggagcugagaagcggcuacgagaccuucaaggugaucggcggcuggagcacccccaacagcaagcugcagaccaacagacaggugaucguggacagaggcaacagaagcggcuacagcggcaucuucagcguggagggcaagagcugcaucaacagaugcuucuacguggagcugaucagaggcagaaagcaggagaccaaggugugguggaccagcaacagcaucgugguguucugcggcaccagcggcaccuacggcaccggcagcuggcccgacggcgccgacaucaaccugaugcccaucuga

SEQ ID NO: 177207 - RNA, 1413 nt, Artificial Sequence; identical to SEQ ID NO: 176692
  derived and/or modified CDS sequence (opt4) from neuraminidase__InfluenzaA__ACU12508

SEQ ID NO: 177208 - RNA, 1410 nt, Artificial Sequence
  derived and/or modified CDS sequence (opt4) from neuraminidase__InfluenzaA__ACU12519
augaaccccaaccagaagaucaucaccaucggcagcgugagccugaccaucagcaccaucugcuucuucaugcagaucgccauccugaucaccaccgugacccugcacuucaagcaguacgaguucaacagcccccccaacaaccaggugaugcugugcgagcccaccaucaucgagagaaacaucaccgagaucguguaccugaccaacaccaccaucgagaaggagaucugccccaagcuggccgaguacagaaacuggagcaagccccagugcaacaucaccggcuucgcccccuucagcaaggacaacagcaucagacugagcgccggcggcgacaucugggugaccagagagcccuacgugagcugcgaccccgacaagugcuaccaguucgcccugggccagggcaccacccugaacaacgugcacagcaacgacaccgugcacgacagaacccccuacagaacccugcugaugaacgagcugggcgugcccuuccaccugggcaccaagcaggugugcaucgccuggagcagcagcagcugccacgacggcaaggccuggcugcacgugugcaucaccggcgacgacgagaacgccaccgccagcuucaucuacaacggcagacugguggacagcguggugagcuggagcaagaagauccugagaacccaggagagcgagugcgugugcaucaacggcaccugcaccguggugaugaccgacggcagcgccagcggcaaggccgacaccaagauccuguucaucgaggagggcaagaucgugcacaccagcacccugagcggcagcgcccagcacguggaggagugcagcugcuaccccagauaccccggcgugagaugcgugugcagagacaacuggaagggcagcaacagacccaucguggacaucaacaucaaggacuacagcaucgugagcagcuacgugugcagcggccuggugggcgacacccccagaaagaacgacagcagcagcagcggccacugccuggaccccaacaacgaggagggcggccacggcgugaagggcugggccuucgacgacggcaacgacguguggaugggcagaaccaucagcgagaagcugagaagcggcuacgagaccuucaaggugaucgagggcuggagcaaccccaacagcaagcugcagaucaacagacaggugaucguggacagaggcaacagaagcggcuacagcggcaucuucagcguggagggcaagagcugcaucaacagaugcuucuacguggagcugaucagaggcagaaaccaggagaccgaggugcuguggaccagcaacagcaucgugguguucugcggcaccagcggcaccuacggcaccggcagcuggcccgacggcgccgacaucaaccugaugcccaucuga

SEQ ID NO: 177209 - RNA, 1410 nt, Artificial Sequence
  derived and/or modified CDS sequence (opt4) from neuraminidase__InfluenzaA__ACU12530
augaaccccaaccagaagaucaucaccaucggcagcgugagccugaccaucagcaccaucugcuucuucaugcagaucgccauccugaucaccaccgugacccugcacuucaagcaguacgaguucaacagcccccccaacaaccaggugaugcugugcgagcccaccaucaucgagagaaacaucaccgagaucguguaccugaccaacaccaccaucgagaaggagaucugccccaagcuggccgaguacagaaacuggagcaagccccagugcaacaucaccggcuucgcccccuucagcaaggacaacagcaucagacugagcgccggcggcgacaucugggugaccagagagcccuacgugagcugcgaccccgacaagugcuaccaguucgcccugggccagggcaccacccugaacaacgugcacagcaacgacaccgugcacgacagaacccccuacagaacccugcugaugaacgagcugggcgugcccuuccaccugggcaccaagcaggugugcaucgccuggagcagcagcagcugccacgacggcaaggccuggcugcacgugugcgugaccggcaacgacaagaacgccaccgccagcuucaucuacaacggcagacugguggacagcaucgugagcuggagcaaggagauccugagaacccaggagagcgagugcgugugcaucaacggcaccugcaccguggugaugaccgacggcagcgccagcggcaaggccgacaccaagauccuguucaucgaggagggcaagaucgugcacaccagcacccugagcggcagcgcccagcacguggaggagugcagcugcuaccccagauaccccggcgugagaugcgugugcagagacaacuggaagggcagcaacagacccaucguggacaucaacaucaaggacuacagcaucgugagcagcuacgugugcagcggccuggugggcgacacccccagaaagaacgacagcagcagcagcagccacugccuggaccccaacaacgaggagggcggccacggcgugaagggcugggccuucgacgacggcaacgacguguggaugggcagaaccaucagcgagaagcugagaagcggcuacgagaccuucaaggugaucgagggcuggagcaaccccaacagcaagcugcagaucaacagacaggugaucguggacagaggcaacagaagcggcuacagcggcaucuucagcguggagggcaagagcugcaucaacagaugcuucuacguggagcugaucagaggcagaaaggaggagaccgaggugcuguggaccagcaacagcaucgugguguucugcggcaccagcggcaccuacggcaccggcagcuggcccgacggcgccgacaucaaccugaugcccaucuga

SEQ ID NO: 177210 - RNA, 1410 nt, Artificial Sequence
  derived and/or modified CDS sequence (opt4) from neuraminidase__InfluenzaA__ACU12541
augaaccccaaccagaagaucaucaccaucggcagcgugagccugaccaucagcaccaucugcuucuucaugcagaucgccauccugaucaccaccgugacccugcacuucaagcaguacgaguucaacagcccccccaacaaccaggugaugcugugcgagcccaccaucaucgagagaaacaucaccgagaucguguaccugaccaacaccaccaucgagaaggagaucugccccaagcuggccgaguacagaaacuggagcaagccccagugcaacaucaccggcuucgcccccuucagcaaggacaacagcaucagacugagcgccggcggcgacaucugggugaccagagagcccuacgugagcugcgaccccgacaagugcuaccaguucgcccugggccagggcaccacccugaacaacgugcacagcaacgacaccgugcacgacagaacccccuacagaacccugcugaugaacgagcugggcgugcccuuccaccugggcaccaagcaggugugcaucgccuggagcagcagcagcugccacgacggcaaggccuggcugcacgugugcgugaccggcgacgacaagaacgccaccgccagcuucaucuacaacggcagacugguggacagcaucgugagcuggagcaaggagauccugagaacccaggagagcgagugcgugugcaucaacggcaccugcaccguggugaugaccgacggcagcgccagcggcaaggccgacaccaagauccuguucaucgaggagggcaagaucgugcacaccagcacccugagcggcagcgcccagcacguggaggagugcagcugcuaccccagauaccccggcgugagaugcgugugcagagacaacuggaagggcagcaacagacccaucguggacaucaacaucaaggacuacagcaucgugagcagcuacgugugcagcggccuggugggcgacacccccagaaagaacgacagcagcagcagcagccacugccuggaccccaacaacgaggagggcggccacggcgugaagggcugggccuucgacgacggcaacgacguguggaugggcagaaccaucagcgagaagcugagaagcggcuacgagaccuucaaggugaucgagggcuggagcaaccccaacagcaaguggcagaucaacagacaggugaucguggacagaggcaacagaagcggcuacagcggcaucuucagcguggagggcaagagcugcaucaacagaugcuucuacguggagcugaucagaggcagaaaggaggagaccgaggugcuguggaccagcaacagcaucgugguguucugcggcaccagcggcaccuacggcaccggcagcuggcccgacggcgccgacaucaaccugaugcccaucuga

SEQ ID NO: 177211 - RNA, 1410 nt, Artificial Sequence
  derived and/or modified CDS sequence (opt4) from neuraminidase__InfluenzaA__ACU12552
augaaccccaaccagaagaucaucaccaucggcagcgugagccugaccaucagcaccaucugcuucuucaugcagaucgccauccugaucaccaccgugacccugcacuucaagcaguacgaguucaacagcccccccaacaaccaggugaugcugugcgagcccaccaucaucgagagaaacaucaccgagaucguguaccugaccaacaccaccaucgagaaggagaucugccccaagcuggccgaguacagaaacuggagcaagccccagugcaacaucaccggcuucgcccccuucagcaaggacaacagcaucagacugagcgccggcggcgacaucugggugaccagagagcccuacgugagcugcgaccccgacaagugcuaccaguucgcccugggccagggcaccacccugaacaacgugcacagcaacgacaccgugcacgacagaacccccuacagaacccugcugaugaacgagcugggcgugcccuuccaccugggcaccaagcaggugugcaucgccuggagcagcagcagcugccacgacggcaaggccuggcugcacgugugcgugaccggcgacgacaagaacgccaccgccagcuucaucuacaacggcagacugguggacagcaucgugagcuggagcaaggagauccugagaacccaggagagcgagugcgugugcaucaacggcaccugcaccguggugaugaccgacggcagcgccagcggcaaggccgacaccaagauccuguucaucgaggagggcaagaucgugcacaccagcacccugagcggcagcgcccagcacguggaggagugcagcugcuaccccagauaccccggcgugagaugcgugugcagagacaacuggaagggcagcaacagacccaucguggacaucaacaucaaggacuacagcaucgugagcggcuacgugugcagcggccuggugggcgacacccccagaaagaacgacagcagcagcagcagccacugcagcgaccccaacaacgaggagggcggccacggcgugaagggcugggccuucgacgacggcaacgacguguggaugggcagaaccaucagcgagaagcugagaagcggcuacgagaccuucaaggugaucgagggcuggagcaaccccaacagcaagcugcagaucaacagacaggugaucguggacagaggcaacagaagcggcuacagcggcaucuucagcguggagggcaagagcugcaucaacagaugcuucuacguggagcugaucagaggcagaaaggaggagaccgaggugcuguggaccagcaacagcaucgugguguucugcggcaccagcggcaccuacggcaccggcagcuggcccgacggcgccgacaucaaccugaugcccaucuga

SEQ ID NO: 177212 - RNA, 1413 nt, Artificial Sequence
  derived and/or modified CDS sequence (opt4) from neuraminidase__InfluenzaA__ACU12574
augaaccccaaccagaagaucaucaccaucggcagcaucagcaucgccaucggcaucaucaaccugaugcugcagaucggcaacaucaucagcaucugggccagccacagcauccagaccggcagccagaacaacaccggcaucugcaaccagagaaucaucaccuacgagaacagcaccugggugaaccacaccuacgugaacaucaacaacaccaacgugguggccggcgaggacaagaccagcgugacccuggccggcaacagcagccugugcagcaucagcggcugggccaucuacaccaaggacaacagcaucagaaucggcagcaagggcgacguguucgugaucagagagcccuucaucagcugcagccaccuggagugcagaaccuucuuccugacccagggcgcccugcugaacgacaagcacagcaacggcaccgugaaggacagaagccccuacagagcccugaugagcugcccccugggcgaggcccccagccccuacaacagcaaguucgagagcguggccuggagcgccagcgccugccacgacggcaugggcuggcugaccaucggcaucagcggccccgacaacggcgccguggccgugcugaaguacaacggcaucaucaccggcaccaucaagagcuggaagaagcagauccugagaacccaggagagcgagugcgugugcaugaacggcagcugcuucaccaucaugaccgacggccccagcaacaaggccgccagcuacaagaucuucaagaucgagaagggcaaggugaccaagagcaucgagcugaacgcccccaacuucuacuacgaggagugcagcugcuaccccgacaccggcaucgugaugugcgugugcagagacaacuggcacggcagcaacagacccugggugagcuucaaccagaaccuggacuaccagaucggcuacaucugcagcggcguguucggcgacaaccccagacccgaggacggcgagggcagcugcaaccccgugaccguggacggcgccaacggcgugaagggcuucagcuacaaguacgacaacggcguguggaucggcagaaccaagagcaacagacugagaaagggcuucgagaugaucugggaccccaacggcuggaccaacaccgacagcgacuucagcgugaagcaggacgugguggccaucaccgacuggagcggcuacagcggcagcuucgugcagcaccccgagcugaccggccuggacugcaucagacccugcuucuggguggagcuggugagaggccugcccagagagaacaccaccaucuggaccagcggcagcagcaucagcuucugcggcgugaacagcgacaccgccaacuggagcuggcccgacggcgccgagcugcccuucaccaucgacaaguga

SEQ ID NO: 177213 - RNA, 1413 nt, Artificial Sequence; identical to SEQ ID NO: 176692
  derived and/or modified CDS sequence (opt4) from neuraminidase__InfluenzaA__ACU12585

SEQ ID NO: 177214 - RNA, 1413 nt, Artificial Sequence
  derived and/or modified CDS sequence (opt4) from neuraminidase__InfluenzaA__ACU12596
augaaccccaaccagaagaucaucaccaucggcagcaucagcaucgccaucggcaucaucagccugaugcugcagaucggcagcaucaucagcaucugggccagccacagcaucagaaccggcagccagaacaacaccggcaucugcaaccagagaaucaucaccuacgagaacagcaccugggugaaccacaccuacgugaacaucaacaacaccaacgugguggccggcgaggacaagaagagcgugacccuggccggcaacagcagccugugcagcaucagcggcugggccaucuacaccaaggacaacagcaucagaaucggcagcaagggcgacguguucgugaucagagagcccuucaucagcugcagccaccuggagugcagaaccuucuuccugacccagggcgcccugcugaacgacaagcacagcaacggcaccgugaaggacagaagccccuacagagcccugaugagcugcccccugggcgaggcccccagccccuacaacagcaaguucgagagcguggccuggagcgccagcgccugccacgacggcaugggcuggcugaccaucggcaucagcggccccgacaacggcgccguggccgugcugaaguacaacggcaucaucaccggcaccaucaagagcuggaagaagcagauccugagaacccaggagagcgagugcgugugcaugaacggcagcugcuucaccaucaugaccgacggccccagcaacaaggccgccagcuacaagaucuucaagaucgagaagggcaaggugaccaagagcaucgagcugaacgcccccaacuucuacuacgaggagugcagcugcuaccccgacaccggcaucgugaugugcgugugcagagacaacuggcacggcagcaacagacccugggugagcuucaaccagaaccuggacuaccagaucggcuacaucugcagcggcguguucggcgacaaccccagacccgaggacggcgagggcagcugcaaccccgugaccguggacggcgccaacggcgugaagggcuucagcuacaaguacggcaacggcguguggaucggcagaaccaagagcaacagacugagaaagggcuucgagaugaucugggaccccaacggcuggaccaacaccgacagcgacuucagcgugaagcaggacgugguggccaucaccgacuggagcggcuacagcggcagcuucgugcagcaccccgagcugaccggccuggacugcaucagacccugcuucuggguggagcuggugagaggccugcccagagagaacaccaccaucuggaccagcggcagcagcaucagcuucugcggcgugaacagcgacaccgccaacuggagcuggcccgacggcgccgagcugcccuucaccaucgacaaguga

SEQ ID NO: 177215 - RNA, 1410 nt, Artificial Sequence; identical to SEQ ID NO: 176798
  derived and/or modified CDS sequence (opt4) from neuraminidase__InfluenzaA__ACU13077

SEQ ID NO: 177216 - RNA, 1410 nt, Artificial Sequence; identical to SEQ ID NO: 176798
  derived and/or modified CDS sequence (opt4) from neuraminidase__InfluenzaA__ACU13078

SEQ ID NO: 177217 - RNA, 1410 nt, Artificial Sequence; identical to SEQ ID NO: 176798
  derived and/or modified CDS sequence (opt4) from neuraminidase__InfluenzaA__ACU13079

SEQ ID NO: 177218 - RNA, 1410 nt, Artificial Sequence; identical to SEQ ID NO: 176798
  derived and/or modified CDS sequence (opt4) from neuraminidase__InfluenzaA__ACU13080

SEQ ID NO: 177219 - RNA, 1410 nt, Artificial Sequence; identical to SEQ ID NO: 176788
  derived and/or modified CDS sequence (opt4) from neuraminidase__InfluenzaA__ACU13081

SEQ ID NO: 177220 - RNA, 1410 nt, Artificial Sequence; identical to SEQ ID NO: 176798
  derived and/or modified CDS sequence (opt4) from neuraminidase__InfluenzaA__ACU13082

SEQ ID NO: 177221 - RNA, 1410 nt, Artificial Sequence; identical to SEQ ID NO: 176798
  derived and/or modified CDS sequence (opt4) from neuraminidase__InfluenzaA__ACU13083

SEQ ID NO: 177222 - RNA, 1410 nt, Artificial Sequence
  derived and/or modified CDS sequence (opt4) from neuraminidase__InfluenzaA__ACU13084
augaaccccaaccagaagaucaucaccaucggcagcgugugcaugaccaucggcauggccaaccugauccugcagaucggcaacaucaucagcaucuggaucagccacagcauccagcugggcaaccagaaccagaucgagaccugcaaccagagcgugaucaccuacgagaacaacaccugggugaaccagaccuacgugaacaucagcaacaccaacuucgccgccggccagagcguggugagcaugaagcuggccggcaacagcagccugugccccgugggcggcugggccaucuacagcaaggacaacagcgugagaaucggcagcaagggcgacguguucgugaucagagagcccuucaucagcugcagcccccuggagugcagaaccuucuuccugacccagggcgcccugcugaacgacaagcacagcaacggcaccaucaaggacagaagccccuacagaacccugaugagcugccccaucggcgaggugcccagccccuacaacagcagauucgagagcguggccuggagcgccagcgccugccacgacggcaucaacuggcugaccaucggcaucagcggccccgacaacggcgccguggccgugcugaaguacaacggcaucaucaccgacaccaucaagagcuggagaaacaacauccugagaacccaggagagcgagugcgccugcgugaacggcagcugcuucaccgugaugaccgacggccccagcaacggccaggccagcuacaagaucuucagaaucgagaagggcaagaucgugaagagcguggagaugaacgcccccaacuaccacuacgaggagugcagcugcuaccccgacagcagcgagaucaccugcgugugcagagacaacuggcacggcagcaacagacccugggugagcuucaaccagaaccuggaguaccagaucggcuacaucugcagcggcaucuucggcgacaaccccagacccaacgacaagaccggcagcugcggccccgugagcagcaacggcgccaacggcgugaagggcuucagcuucaaguacggcaacggcguguggaucggcagaaccaagagcaucagcagcagaaacggcuucgagaugaucugggaccccaacggcuggaccggcaccgacaacaacuucagcaucaagcaggacaucgugggcaucaacgaguggagcggcuacagcggcagcuucgugcagcaccccgagcugaccggccuggacugcaucagacccugcuucuggguggagcugaucagaggcagacccaaggagaacaccaucuggaccagcggcagcagcaucagcuucugcggcgugaacagcgacaccgugggcuggagcuggcccgacggcgccgagcugcccuucaccaucgacaaguga

SEQ ID NO: 177223 - RNA, 1410 nt, Artificial Sequence; identical to SEQ ID NO: 176798
  derived and/or modified CDS sequence (opt4) from neuraminidase__InfluenzaA__ACU16799

SEQ ID NO: 177224 - RNA, 1410 nt, Artificial Sequence; identical to SEQ ID NO: 176798
  derived and/or modified CDS sequence (opt4) from neuraminidase__InfluenzaA__ACU16861

SEQ ID NO: 177225 - RNA, 1410 nt, Artificial Sequence; identical to SEQ ID NO: 176798
  derived and/or modified CDS sequence (opt4) from neuraminidase__InfluenzaA__ACU16934

SEQ ID NO: 177226 - RNA, 1410 nt, Artificial Sequence; identical to SEQ ID NO: 176798
  derived and/or modified CDS sequence (opt4) from neuraminidase__InfluenzaA__ACU16997

SEQ ID NO: 177227 - RNA, 1410 nt, Artificial Sequence; identical to SEQ ID NO: 176798
  derived and/or modified CDS sequence (opt4) from neuraminidase__InfluenzaA__ACU17130

SEQ ID NO: 177228 - RNA, 1410 nt, Artificial Sequence; identical to SEQ ID NO: 176798
  derived and/or modified CDS sequence (opt4) from neuraminidase__InfluenzaA__ACU17191

SEQ ID NO: 177229 - RNA, 1410 nt, Artificial Sequence
  derived and/or modified CDS sequence (opt4) from neuraminidase__InfluenzaA__ACU17262
augaaccccaaccagaagaucaucaccaucggcagcgugugcaugaccaucggcauggccaaccugauccugcagaucggcaacaucaucagcaucuggaucagccacagcauccagcugggcaaccagagccagaucgagaccugcaaccagagcgugaucaccuacgagaacaacaccugggugaaccagaccuacgugaacaucagcaacaccaacuucgccgccggccagagcguggugagcgugaagcuggccggcaacagcagccugugccccgugagcggcugggccaucuacagcaaggacaacagcaucagaaucggcagcaagggcgacguguucgugaucagagagcccuucaucagcugcagcccccuggagugcagaaccuucuuccugacccagggcgcccugcugaacgacaagcacagcaacggcaccaucaaggacagaagccccuacagaacccugaugagcugccccaucggcgaggugcccagccccuacaacagcagauucgagagcguggccuggagcgccagcgccugccacgacggcaucaacuggcugaccaucggcaucagcggccccgacaacggcgccguggccgugcugaaguacaacggcaucaucaccgacaccaucaagagcuggagaaacaacauccugagaacccaggagagcgagugcgccugcgugaacggcagcugcuucaccgugaugaccgacggccccagcgacggccaggccagcuacaagaucuucagaaucgagaagggcaagaucgugaagagcguggagaugaacgcccccaacuaccacuacgaggagugcagcugcuaccccgacagcagcgagaucaccugcgugugcagagacaacuggcacggcagcaacagacccugggugagcuucaaccagaaccuggaguaccagaucggcuacaucugcagcggcaucuucggcgacaaccccagacccaacgacaagaccggcagcugcggccccgugagcagcaacggcgccaacggcgugaagggcuucagcuucaaguacggcaacggcguguggaucggcagaaccaagagcaucagcagcagaaacggcuucgagaugaucugggaccccaacggcuggaccggcaccgacaacaacuucagcaucaagcaggacaucgugggcaucaacgaguggagcggcuacagcggcagcuucgugcagcaccccgagcugaccggccuggacugcaucagacccugcuucuggguggagcugaucagaggcagacccaaggagaacaccaucuggaccagcggcagcagcaucagcuucugcggcgugaacagcgacaccgugggcuggagcuggcccgacggcgccgagcugcccuucaccaucgacaaguga

SEQ ID NO: 177230 - RNA, 1410 nt, Artificial Sequence; identical to SEQ ID NO: 176798
  derived and/or modified CDS sequence (opt4) from neuraminidase__InfluenzaA__ACU17325

SEQ ID NO: 177231 - RNA, 1410 nt, Artificial Sequence; identical to SEQ ID NO: 176798
  derived and/or modified CDS sequence (opt4) from neuraminidase__InfluenzaA__ACU17393

SEQ ID NO: 177232 - RNA, 1410 nt, Artificial Sequence; identical to SEQ ID NO: 176798
  derived and/or modified CDS sequence (opt4) from neuraminidase__InfluenzaA__ACU17454

SEQ ID NO: 177233 - RNA, 1410 nt, Artificial Sequence; identical to SEQ ID NO: 176798
  derived and/or modified CDS sequence (opt4) from neuraminidase__InfluenzaA__ACU17524

SEQ ID NO: 177234 - RNA, 1410 nt, Artificial Sequence; identical to SEQ ID NO: 177152
  derived and/or modified CDS sequence (opt4) from neuraminidase__InfluenzaA__ACU27043

SEQ ID NO: 177235 - RNA, 1413 nt, Artificial Sequence
  derived and/or modified CDS sequence (opt4) from neuraminidase__InfluenzaA__ACU27415
augaaccccaaccagaagaucaucaccaucggcagcaucagcaucgccaucggcaucaucagccugaugcugcagaucggcaacaucaucagcaucugggccagccacagcauccagaccggcagccagaacaacaccggcaucugcaaccagagaaucaucaccuacgagaacagcaccugggugaaccacaccuacgugaacaucaacaacaccaacgugguggccggcgaggacaagaccagcgugaccuucgccggcaacagcagccugugcagcaucagcggcugggccaucuacaccaaggacaacagcaucagaaucggcagcaagggcgacguguucgugaucagagagcccuucaucagcugcagccaccuggagugcagaaccuucuuccugacccagggcgcccugcugaacgacaagcacagcaacggcaccgugaaggacagaagccccuacagagcccugaugagcugcccccugggcgaggcccccagccccuacaacagcaaguucgagagcguggccuggagcgccagcgccugccacgacggcaugggcuggcugaccaucggcaucagcggccccgacaacggcgccguggccgugcugaaguacaacggcaucaucaccggcaccaucaagagcuggaagaagcagauccugagaacccaggagagcgagugcgugugcaugaacggcagcugcuucaccaucaugaccgacggccccagcaacaaggccgccagcuacaagaucuucaagaucgagaagggcaaggugaccaagagcaucgagcugaacgcccccaacuucuacuacgaggagugcagcugcuaccccgacaccggcaucgugaugugcgugugcagagacaacuggcacggcagcaacagacccugggugagcuucaaccagaaccuggacuaccagaucggcuacaucugcagcggcguguucggcgacaaccccagacccgaggacggcgagggcagcugcaaccccgugaccguggacggcgccaacggcgugaagggcuucagcuacaaguacggcaacggcguguggaucggcagaaccaagagcaacagacugagaaagggcuucgagaugaucugggaccccaacggcuggaccaacaccgacagcgacuucagcgugaagcaggacgugguggccaucaccgacuggagcggcuacagcggcagcuucgugcagcaccccgagcugaccggccuggacugcaucagacccugcuucuggguggagcuggugagaggccugcccagagagaacaccaccaucuggaccagcggcagcagcaucagcuucugcggcgugaacagcgacaccgccaacuggagcuggcccgacggcgccgagcugcccuucaccaucgacaaguga

SEQ ID NO: 177236 - RNA, 1413 nt, Artificial Sequence; identical to SEQ ID NO: 177235
  derived and/or modified CDS sequence (opt4) from neuraminidase__InfluenzaA__ACU27416

SEQ ID NO: 177237 - RNA, 1410 nt, Artificial Sequence; identical to SEQ ID NO: 176788
  derived and/or modified CDS sequence (opt4) from neuraminidase__InfluenzaA__ACU29961

SEQ ID NO: 177238 - RNA, 1410 nt, Artificial Sequence
  derived and/or modified CDS sequence (opt4) from neuraminidase__InfluenzaA__ACU29971
augaaccccaaccagaagaucaucaccaucggcagcgugugcaugaccaucggcauggccaaccugauccugcagaucggcaacaucaucagcaucuggaucagccacagcauccagcugggcaaccagaaccagaucgagaccugcaaccagagcgugaucaccuacgagaacaacaccugggugaaccagaccuacgugaacaucagcaacaccaacuucgccgccggccagagcguggugagcgugaagcuggccggcaacagcagccugugccccgugagcggcugggccaucuacagcaaggacaacagcgugagaaucggcagcaagggcgacguguucgugaucagagagcccuucaucagcugcagcccccuggagugcagaaccuucuuccugacccagggcgcccugcugaacgacaagcacagcaacggcaccaucaaggacagaagccccuacagaacccugaugagcugccccaucggcgaggugcccagccccuacaacagcagauucgagagcguggccuggagcgccagcgccugccacgacggcaucaacuggcugaccaucggcaucagcggccccgacaacggcgccguggccgugcugaaguacaacggcaucaucaccgacaccaucaagagcuggagaaacaacauccugagaacccaggagagcgagugcgccugcgugaacggcagcugcuucaccgugaugaccgacggccccagcaacggccaggccagcuacaagaucuucagaaucgagaagggcaagaucgugaagagcguggagaugaacgcccccaacuaccacuacgaggagugcagcugcuaccccgacagcagcgagaucaccugcgugugcagagacaacuggcacggcagcaacagacccugggugagcuucaaccagaaccuggaguaccagaucggcuacaucugcagcggcaucuucggcgacaaccccagacccaacgacaagaccggcagcugcggccccgugagcagcaacggcgccaacggcgugaagggcuucagcuucaaguacggcaacggcguguggaucggcagaaccaagagcaucagcagcagaaacggcuucgagaugaucugggaccccaacggcuggaccggcaccgacaacaacuucagcaucaagcaggacaucgugggcaucaacgaguggagcggcuacagcggcagcuucgugcagcaccccgagcugaccggccuggacugcaucagacccugcuucuggguggagcugaucagaggcagacccaaggagaacaccaucuggaccagcggcagcagcaucagcuucugcggcgugaacagcgacaccgugggcuggagcuggagcgacggcgccgagcugcccuucaccaucgacaaguga

SEQ ID NO: 177239 - RNA, 1410 nt, Artificial Sequence; identical to SEQ ID NO: 176798
  derived and/or modified CDS sequence (opt4) from neuraminidase__InfluenzaA__ACU29981

SEQ ID NO: 177240 - RNA, 1410 nt, Artificial Sequence; identical to SEQ ID NO: 176798
  derived and/or modified CDS sequence (opt4) from neuraminidase__InfluenzaA__ACU29991

SEQ ID NO: 177241 - RNA, 1410 nt, Artificial Sequence; identical to SEQ ID NO: 176798
  derived and/or modified CDS sequence (opt4) from neuraminidase__InfluenzaA__ACU30001

SEQ ID NO: 177242 - RNA, 1410 nt, Artificial Sequence; identical to SEQ ID NO: 176798
  derived and/or modified CDS sequence (opt4) from neuraminidase__InfluenzaA__ACU30021

SEQ ID NO: 177243 - RNA, 1410 nt, Artificial Sequence
  derived and/or modified CDS sequence (opt4) from neuraminidase__InfluenzaA__ACU30085
augaaccccaaccagaagaucaucaccaucggcagcgugugcaugaccaucggcauggccaaccugauccugcagaucggcaacaucaucagcaucuggaucagccacagcauccagcugggcaaccagaaccagaucgagaccugcaaccagagcgugaucaccuacgagaacaacaccugggugaaccagaccuacgugaacaucagcaacaccaacuucgccgccggccagagcguggugagcgugaagcugaugggcaacagcagccugugccccgugagcggcugggccaucuacagcaaggacaacagcgugagaaucggcagcaagggcgacguguucgugaucagagagcccuucaucagcugcagcccccuggagugcagaaccuucuuccugacccagggcgcccugcugaacgacaagcacagcaacggcaccaucaaggacagaagccccuacagaacccugaugagcugccccaucggcgaggugcccagccccuacaacagcagauucgagagcguggccuggagcgccagcgccugccacgacggcaucaacuggcugaccaucggcaucagcggccccgacaacggcgccguggccgugcugaaguacaacggcaucaucaccgacaccaucaagagcuggagaaacaacauccugagaacccaggagagcgagugcgccugcgugaacggcagcugcuucaccgugaugaccgacggccccagcaacggccaggccagcuacaagaucuucagaaucgagaagggcaagaucgugaagagcguggagaugaacgcccccaacuaccacuacgaggagugcagcugcuaccccgacagcagcgagaucaccugcgugugcagagacaacuggcacggcagcaacagacccugggugagcuucaaccagaaccuggaguaccagaucggcuacaucugcagcggcaucuucggcgacaaccccagacccaacgacaagaccggcagcugcggccccgugagcagcaacggcgccaacggcgugaagggcuucagcuucaaguacggcaacggcguguggaucggcagaaccaagagcaucagcagcagaaacggcuucgagaugaucugggaccccaacggcuggaccggcaccgacaacaacuucagcaucaagcaggacaucgugggcaucaacgaguggagcggcuacagcggcagcuucgugcagcaccccgagcugaccggccuggacugcaucagacccugcuucuggguggagcugaucagaggcagacccaaggagaacaccaucuggaccagcggcagcagcaucagcuucugcggcgugaacagcgacaccgugggcuggagcuggcccgacggcgccgagcugcccuucaccaucgacaaguga

SEQ ID NO: 177244 - RNA, 1410 nt, Artificial Sequence; identical to SEQ ID NO: 177222
  derived and/or modified CDS sequence (opt4) from neuraminidase__InfluenzaA__ACU30095

SEQ ID NO: 177245 - RNA, 1410 nt, Artificial Sequence; identical to SEQ ID NO: 176798
  derived and/or modified CDS sequence (opt4) from neuraminidase__InfluenzaA__ACU30105

SEQ ID NO: 177246 - RNA, 1410 nt, Artificial Sequence; identical to SEQ ID NO: 176798
  derived and/or modified CDS sequence (opt4) from neuraminidase__InfluenzaA__ACU30114

SEQ ID NO: 177247 - RNA, 1410 nt, Artificial Sequence; identical to SEQ ID NO: 176798
  derived and/or modified CDS sequence (opt4) from neuraminidase__InfluenzaA__ACU30123

SEQ ID NO: 177248 - RNA, 1410 nt, Artificial Sequence
  derived and/or modified CDS sequence (opt4) from neuraminidase__InfluenzaA__ACU31177
augaaccccaaccagaagaucaucaccaucggcagcgugugcaugaccaucggcauggccaaccugauccugcagaucggcaacaucaucagcaucuggaucagccaccugauccagcugggcaaccagaaccagaucgagaccugcaaccagagcgugaucaccuacgagaacaacaccugggugaaccagaccuacgugaacaucagcaacaccaacuucgccgccggccagagcguggugagcgugaagcuggccggcaacagcagccugugccccgugagcggcugggccaucuacagcaaggacaacagcaucagaaucggcagcaagggcgacguguucgugaucagagagcccuucaucagcugcagcccccuggagugcagaaccuucuuccugacccagggcgcccugcugaacgacaagcacagcaacggcaccaucaaggacagaagccccuacagaacccugaugagcugccccaucggcgaggugcccagccccuacaacagcagauucgagagcguggccuggagcgccagcgccugccacgacggcaucagcuggcugaccaucggcaucagcggccccgacaacggcgccguggccgugcugaaguacaacggcaucaucaccgacaccaucaagagcuggagaaacaacauccugagaacccaggagagcgagugcgccugcgugaacggcagcugcuucaccgugaugaccgacggccccagcgacggccaggccagcuacaagaucuucagaaucgagaagggcaagaucgugaagagcguggagaugaacgcccccaacuaccacuacgaggagugcagcugcuaccccgacagcagcgagaucaccugcgugugcagagacaacuggcacggcagcaacagacccugggugagcuucaaccagaaccuggaguaccagaucggcuacaucugcagcggcaucuucggcgacaaccccagacccaacgacaagaccggcagcugcggccccgugagcagcaacggcgccaacggcgugaagggcuucagcuucaaguacggcaacggcguguggaucggcagaaccaagagcaucagcagcagaaacggcuucgagaugaucugggaccccaacggcuggaccggcaccgacaacaacuucagcaucaagcaggacaucgugggcaucaacgaguggagcggcuacagcggcagcuucgugcagcaccccgagcugaccggccuggacugcaucagacccugcuucuggguggagcugaucagaggcagacccaaggagaacaccaucuggaccagcggcagcagcaucagcuucugcggcgugaacagcgacaccgugggcuggagcuggcccgacggcgccgagcugcccuucaccaucgacaaguga

SEQ ID NO: 177249 - RNA, 1410 nt, Artificial Sequence; identical to SEQ ID NO: 176798
  derived and/or modified CDS sequence (opt4) from neuraminidase__InfluenzaA__ACU31178

SEQ ID NO: 177250 - RNA, 1410 nt, Artificial Sequence; identical to SEQ ID NO: 176788
  derived and/or modified CDS sequence (opt4) from neuraminidase__InfluenzaA__ACU31179

SEQ ID NO: 177251 - RNA, 1410 nt, Artificial Sequence; identical to SEQ ID NO: 176788
  derived and/or modified CDS sequence (opt4) from neuraminidase__InfluenzaA__ACU31180

SEQ ID NO: 177252 - RNA, 1410 nt, Artificial Sequence; identical to SEQ ID NO: 176788
  derived and/or modified CDS sequence (opt4) from neuraminidase__InfluenzaA__ACU31181

SEQ ID NO: 177253 - RNA, 1410 nt, Artificial Sequence; identical to SEQ ID NO: 176798
  derived and/or modified CDS sequence (opt4) from neuraminidase__InfluenzaA__ACU31182

SEQ ID NO: 177254 - RNA, 1410 nt, Artificial Sequence; identical to SEQ ID NO: 176828
  derived and/or modified CDS sequence (opt4) from neuraminidase__InfluenzaA__ACU31183

SEQ ID NO: 177255 - RNA, 1410 nt, Artificial Sequence; identical to SEQ ID NO: 176798
  derived and/or modified CDS sequence (opt4) from neuraminidase__InfluenzaA__ACU31184

SEQ ID NO: 177256 - RNA, 1410 nt, Artificial Sequence; identical to SEQ ID NO: 176788
  derived and/or modified CDS sequence (opt4) from neuraminidase__InfluenzaA__ACU31185

SEQ ID NO: 177257 - RNA, 1410 nt, Artificial Sequence; identical to SEQ ID NO: 176788
  derived and/or modified CDS sequence (opt4) from neuraminidase__InfluenzaA__ACU31186

SEQ ID NO: 177258 - RNA, 1410 nt, Artificial Sequence; identical to SEQ ID NO: 176788
  derived and/or modified CDS sequence (opt4) from neuraminidase__InfluenzaA__ACU31187

SEQ ID NO: 177259 - RNA, 1410 nt, Artificial Sequence; identical to SEQ ID NO: 176788
  derived and/or modified CDS sequence (opt4) from neuraminidase__InfluenzaA__ACU31188

SEQ ID NO: 177260 - RNA, 1350 nt, Artificial Sequence
  derived and/or modified CDS sequence (opt4) from neuraminidase__InfluenzaA__ACU46645
augaaccccaacaagaagaucaucaccaucggcagcaucugcauggugaccggcauggugagccugaugcugcagaucggcaaccugaucagcaucugggugagccacagcauccacaccggcaaccagcacaaggccgagcccaucagcaacaccaaccugcugaccgagaagaccguggccagcgugaagcuggccggcaacagcagccugugccccaucaacggcugggccguguacagcaaggacaacagcaucagaaucggcagcaagggcgacguguucgugaucagagagcccuucaucagcugcagccaccuggagugcagaaccuucuuccugacccagggcgcccugcugaacgacaagcacagcaacggcaccgugaaggacagaagcccccacagaacccugaugagcggccccgugggcgaggcccccagccccuacaacagcagauucgaguacguggccuggagcgccagcgccugccacgacagaaccagcagacugaccaucggcaucagcggccccgacaacggcgccguggccgugcugaaguacaacggcaucaucaccgacaccaucaagagcuggagaaacaacauccugagaacccaggagagcgagugcgccugcgugaacggcagcugcuucaccgugaugaccgacggccccagcaacggccaggccagccacaagaucuucaagauggagaagggcaagguggugaagagcguggagcuggacgcccccaacuaccacuacgaggagugcagcugcuaccccgacgccggcgagaucaccugcgugugcagagacaacuggcacggcagcaacagacccugggugagcuucaaccagaaccuggaguaccagaucggcuacaucugcagcggcguguucggcgacaaccccagacccaacgacggcgccggcagcugcggccccgugagcagcaacggcgccuacggcgugaagggcuucagcuucaaguacggcaacggcguguggaucggcagaaccaagagcaccaacagcagaagcggcuucgagaugaucugggaccccaacggcuggaccgagaccgacagcagcuucagcgugaagcaggacaucguggccaucaccgacuggagcggcuacagcggcagcuucgugcagcaccccgagcugaccggccuggacugcaucagacccugcuucuggguggagcugaucagaggcagacccaaggagagcaccaucuggaccagcggcagcagcaucagcuucugcggcgugaacagcgacaccgugggcuggagcuggcccgacggcgccgagcugcccuucaccaucgacaaguga

SEQ ID NO: 177261 - RNA, 1410 nt, Artificial Sequence
  derived and/or modified CDS sequence (opt4) from neuraminidase__InfluenzaA__ACU56927
augaaccccaaccagaagaucaucaccaucggcagcgugugcaugaccaucggcauggccaaccugauccugcagaucggcaacaucaucagcaucuggaucagccacagcauccagcugggcaaccagaaccagaucgagaccugcaaccagagcgugaucaccuacgagaacaacaccugggugaaccagaccuacgugaacaucagcaacaccaacuucgccgccggccagagcguggugagcgugaagcuggccggcaacagcagccugugccccgugagcggcugggccaucuacagcaaggacaacagcaucagaaucggcagcaagggcgacguguucgugaucagagagcccuucaucagcugcagcccccuggagugcagaaccuucuuccugacccagggcgcccugcugaacgacaagcacagcaacggcaccaucaaggacagaagccccuacagaacccugaugagcugccccaucggcgaggugcccagccccuacaacagcagauucgagagcguggccuggagcgccagcgccugccacgacggcaucaacuggcugaccaucggcaucagcggccccgacaacggcgccguggccgugcugaaguacaacggcaucaucaccgacaccaucaagagcuggagaaacaacauccugagaacccaggagagcgagugcgccugcgugaacggcagcugcuucaccgugaugaccgacggccccagcaacggccaggccagcuacaagaucuucagaaucgacaagggcaagaucgugaagagcguggagaugaacgcccccaacuaccacuacgaggagugcagcugcuaccccgacagcagcgagaucaccugcgugugcagagacaacuggcacggcagcaacagacccugggugagcuucaaccagaaccuggaguaccagaucggcuacaucugcagcggcaucuucggcgacaaccccagacccaacgacaagaccggcagcugcggccccgugagcagcaacggcgccaacggcgugaagggcuucagcuucaaguacggcaacggcguguggaucggcagaaccaagagcaucagcagcagaaacggcuucgagaugaucugggaccccaacggcuggaccggcaccgacaacaacuucagcaucaagcaggacaucgugggcaucaacgaguggagcggcuacagcggcagcuucgugcagcaccccgagcugaccggccuggacugcaucagacccugcuucuggguggagcugaucagaggcagacccaaggagaacaccaucuggaccagcggcagcagcaucagcuucugcggcgugaacagcgacaccgugggcuggagcuggcccgacggcgccgagcugcccuucaccaucgacaaguga

SEQ ID NO: 177262 - RNA, 1410 nt, Artificial Sequence; identical to SEQ ID NO: 176953
  derived and/or modified CDS sequence (opt4) from neuraminidase__InfluenzaA__ACU56934

SEQ ID NO: 177263 - RNA, 1410 nt, Artificial Sequence; identical to SEQ ID NO: 176798
  derived and/or modified CDS sequence (opt4) from neuraminidase__InfluenzaA__ACU64791

SEQ ID NO: 177264 - RNA, 1410 nt, Artificial Sequence
  derived and/or modified CDS sequence (opt4) from neuraminidase__InfluenzaA__ACU64811
augaaccccaaccagaagaucaucaccaucggcagcgugugcaugaccaucggcauggccaaccugauccugcagaucggcaacaucaucagcaucuggaucagccacagcauccagcugggcaaccagaaccagaucgagaccugcaaccagagcgugaucaccuacgagaacaacaccugggugaaccagaccuacgugaacaucagcaacaccaacuucgccgccggccagagcauggugagcgugaagcuggccggcaacagcagccugugccccgugagcggcugggccaucuacagcaaggacaacagcgugagaaucggcagcaagggcgacguguucaucaucagagagcccuucaucagcugcagcccccuggagugcagaaccuucuuccugacccagggcgcccugcugaacgacaagcacagcaacggcaccaucaaggacagaagccccuacagaacccugaugagcugccccaucggcgaggugcccagccccuacaacagcagauucgagagcguggccuggagcgccagcgccugccacgacggcaucaacuggcugaccaucggcaucagcggccccgacaacggcgccguggccgugcugaaguacaacggcaucaucaccgacaccaucaagagcuggagaaacaacauccugagaacccaggagagcgagugcgccugcgugaacggcagcugcuucaccgugaugaccgacggccccagcaacggccaggccagcuacaagaucuucagaaucgagaagggcaagaucgugaagagcguggagaugaacgcccccaacuaccacuacgaggagugcagcugcuaccccgacagcagcgagaucaccugcgugugcagagacaacuggcacggcagcaacagacccugggugagcuucaaccagaaccuggaguaccagaucggcuacaucugcagcggcaucuucggcgacaaccccagacccaacgacaagaccggcagcugcggccccgugagcagcaacggcgccaacggcgugaagggcuucagcuucaaguacggcaacggcguguggaucggcagaaccaagagcaucagcagcagaaacggcuucgagaugaucugggaccccaacggcuggaccggcaccgacaacaacuucagcaucaagcaggacaucgugggcaucaacgaguggagcggcuacagcggcagcuucgugcagcaccccgagcugaccggccuggacugcaucagacccugcuucuggguggagcugaucagaggcagacccaaggagaacaccaucuggaccagcggcagcagcaucagcuucugcggcgugaacagcgacaccgugggcuggagcuggcccgacggcgccgagcugcccuucaccaucgacaaguga

SEQ ID NO: 177265 - RNA, 1410 nt, Artificial Sequence; identical to SEQ ID NO: 176563
  derived and/or modified CDS sequence (opt4) from neuraminidase__InfluenzaA__ACU79885

SEQ ID NO: 177266 - RNA, 1410 nt, Artificial Sequence; identical to SEQ ID NO: 174155
  derived and/or modified CDS sequence (opt4) from neuraminidase__InfluenzaA__ACU79896

SEQ ID NO: 177267 - RNA, 1410 nt, Artificial Sequence; identical to SEQ ID NO: 174155
  derived and/or modified CDS sequence (opt4) from neuraminidase__InfluenzaA__ACU79918

SEQ ID NO: 177268 - RNA, 1410 nt, Artificial Sequence; identical to SEQ ID NO: 174155
  derived and/or modified CDS sequence (opt4) from neuraminidase__InfluenzaA__ACU79929

SEQ ID NO: 177269 - RNA, 1413 nt, Artificial Sequence
  derived and/or modified CDS sequence (opt4) from neuraminidase__InfluenzaA__ACU79940
augaaccccaaccagaagaucaucaccaucggcagcaucagcaucgugaucggcaucaucagccugaugcugcagaucggcaacaucaucagcaucugggccagccacagcauccagaccggcagccagaaccacaccggcaucugcaaccagagaaucaucaccuacgagaacagcaccugggugaaccacaccuacgugaacaucaacaacaccaacgugguggccggcaaggacaagaccagcgugacccuggccggcaacagcagccugugcagcaucagcggcugggccaucuacaccaaggacaacagcaucagaaucggcagcaagggcgacguguucgugaucagagagcccuucaucagcugcagccaccuggagugcagaaccuucuuccugacccagggcgcccugcugaacgacaagcacagcaacggcaccgugaaggacagaagccccuacagagcccugaugagcugcccccugggcgaggcccccagccccuacaacagcaaguucgagagcguggccuggagcgccagcgccugccacgacggcaugggcuggcugaccaucggcaucagcggccccgacaacggcgccguggccgugcugaaguacaacggcaucaucaccgagaccaucaagagcuggaagaagagaauccugagaacccaggagagcgagugcgugugcgugaacggcagcugcuucaccaucaugaccgacggccccagcaacggcgccgccagcuacaagaucuucaagaucgagaagggcaaggugaccaagagcaucgagcugaacgcccccaacagccacuacgaggagugcagcugcuaccccgacaccggcaccgugaugugcgugugcagagacaacuggcacggcagcaacagacccugggugagcuucaaccagaaccuggacuaccagaucggcuacaucugcagcggcguguucggcgacaaccccagacccaaggacggcgagggcagcugcaaccccgugaccguggacggcgccgacggcgugaagggcuucagcuacagauacggcaacggcguguggaucggcagaaccaagagcaacagacugagaaagggcuucgagaugaucugggaccccaacggcuggaccgacaccgacagcgacuucagcgugaagcaggacgugguggccaugaccgacuggagcggcuacagcggcagcuucgugcagcaccccgagcugaccggccuggacugcaucagacccugcuucuggguggagcuggugagaggcagacccagagagaacaccaccaucuggaccagcggcagcagcaucagcuucugcggcgugaacagcgacaccgccaacuggagcuggcccgacggcgccgagcugcccuucaccaucgacaaguga

SEQ ID NO: 177270 - RNA, 1410 nt, Artificial Sequence
  derived and/or modified CDS sequence (opt4) from neuraminidase__InfluenzaA__ACU79951
augaaccccaaccagaagaucaucaccaucggcagcgugagccugaccaucgagaccgugugcuuccugaugcagaucgccauccuggccaccaccgugacccugcacuucaagcagcacgagugcgacagccccgccagcaaccaggugaugcccugcgagcccaucaucaucgagagaaacaucaccgagaucguguaccugaacaacaccaccaucgagaaggagaucugccccgaggugguggaguacagaaacuggagcaagccccagugccagaucaccggcuucgcccccuucagcaaggacaacagcaucagacugagcgccggcggcgacaucugggugaccagagagcccuacgugagcugcgaccccggcaagugcuaccaguucgcccugggccagggcaccacccuggacaacaagcacagcaacggcaccauccacgacagaaucccccacagaacccugcugaugaacgagcugggcgugcccuuccaccugggcaccaagcaggugugcguggccuggagcagcagcagcugccacgacggcaaggccuggcugcacgugugcgugaccggcgacgacagaaacgccaccgccagcuucaucuacgacggcagacugguggacagcaucggcagcuggagccagaacauccugagaacccaggagagcgagugcgugugcaucaacggcaccugcaccguggugaugaccgacggcagcgccagcggcagagccgacaccagaauccuguucaucaaggagggcaagaucgugcacaucagcccccugagcggcagcgcccagcacaucgaggagugcagcugcuaccccagauaccccgacgugagaugcaucugcagagacaacuggaagggcagcaacagacccgugaucgacaucaacauggaggacuacagcaucgacagcagcuacgugugcagcggccuggugggcgacacccccagaaacgacgacagcagcagcaacagcaacugcagagaccccaacaacgagagaggcaaccccggcgugaagggcugggccuucgacaacggcgacgacguguggaugggcagaaccaucagcaaggacagcagaagcggcuacgagaccuucaaggugaucggcggcuggagcacccccaacagcaagagccaggugaacagacaggugaucgugggcaacaacaacuggagcggcuacagcggcaucuucagcguggagggcaagagcugcaucaacagaugcuucuacguggagcugaucagaggcagaccccaggagaccagagugugguggaccagcaacagcaucgugguguucugcggcaccagcggcaccuacggcaccggcagcuggcccgacggcgccaacaucaacuucaugcccaucuga

SEQ ID NO: 177271 - RNA, 1410 nt, Artificial Sequence; identical to SEQ ID NO: 176663
  derived and/or modified CDS sequence (opt4) from neuraminidase__InfluenzaA__ACU79973

SEQ ID NO: 177272 - RNA, 1413 nt, Artificial Sequence; identical to SEQ ID NO: 176692
  derived and/or modified CDS sequence (opt4) from neuraminidase__InfluenzaA__ACU79984

SEQ ID NO: 177273 - RNA, 1410 nt, Artificial Sequence; identical to SEQ ID NO: 176659
  derived and/or modified CDS sequence (opt4) from neuraminidase__InfluenzaA__ACU80006

SEQ ID NO: 177274 - RNA, 1410 nt, Artificial Sequence
  derived and/or modified CDS sequence (opt4) from neuraminidase__InfluenzaA__ACU80017
augaacaccaaccagagaaucaucaccaucggcaccaucugccugaucgugggcaucaucagccugcugcugcagaucggcaacaucauccugcuguggaugagccacagcauccagaccggcgagaagagccaccccaaggugugcaaccagagcgugaucaccuacgagaacaacaccugggugaaccagaccuacgugaacaucagcaacaccaacaucgccgccggccagggcgugacccccaucauccuggccggcaacagcagccugugccccaucagcggcugggccaucuacagcaaggacaacagcaucagaaucggcagcaagggcgacaucuucgugaugagagagcccuucaucagcugcagccaccuggagugcagaaccuucuuccugacccagggcgcccugcugaacgacagacacagcaacggcaccgugaaggacagaagccccuacagaacccugaugagcugccccaucggcgaggcccccagccccuacaacagcagauucgagagcguggccuggagcgccagcgccugccacgacggcaugggcuggcugaccaucggcaucagcggccccgacaacggcgccguggccgugcugaaguacaacggcaucaucaccgacaccaucaagagcuggagaaacaagauccugagaacccaggagagcgagugcgugugcaucaacggcagcugcuucaccaucaugaccgacggccccagcaacggccaggccagcuacaagcuguucaagauggagaagggcaagaucaucagaagcaucgagcuggacgcccccaacuaccacuacgaggagugcagcugcuaccccgacaccggcaagguggugugcgugugcagagacaacuggcacgccagcaacagacccugggugagcuucgaccagaaccuggacuaccagaucggcuacaucugcagcggcguguucggcgacaaccccagaagcaacgacggcaagggcaacugcggccccgugcugagcaacggcgccaacggcgugaagggcuucagcuucagauacggcaacggcguguggaucggcagaaccaagagcaucagcagcagaagcggcuucgagaugaucugggaccccaacggcuggaccgagaccgacagcagcuucagcaugaagcaggacaucaucgcccugaccgacuggagcggcuacagcggcagcuucgugcagcaccccgagcugaccggcaugaacugcaucagacccugcuucuggguggagcugaucagaggccagcccaaggagagcaccaucuggaccagcggcagcagcaucagcuucugcggcgugaacagcggcaccgccagcuggagcuggcccgacggcgccgaccugcccuucaccaucgacaaguga

SEQ ID NO: 177275 - RNA, 1413 nt, Artificial Sequence; identical to SEQ ID NO: 176692
  derived and/or modified CDS sequence (opt4) from neuraminidase__InfluenzaA__ACU80028

SEQ ID NO: 177276 - RNA, 1410 nt, Artificial Sequence; identical to SEQ ID NO: 176659
  derived and/or modified CDS sequence (opt4) from neuraminidase__InfluenzaA__ACU80039

SEQ ID NO: 177277 - RNA, 1413 nt, Artificial Sequence; identical to SEQ ID NO: 176776
  derived and/or modified CDS sequence (opt4) from neuraminidase__InfluenzaA__ACU80050

SEQ ID NO: 177278 - RNA, 1410 nt, Artificial Sequence; identical to SEQ ID NO: 177209
  derived and/or modified CDS sequence (opt4) from neuraminidase__InfluenzaA__ACU80061

SEQ ID NO: 177279 - RNA, 1413 nt, Artificial Sequence; identical to SEQ ID NO: 176692
  derived and/or modified CDS sequence (opt4) from neuraminidase__InfluenzaA__ACU80072

SEQ ID NO: 177280 - RNA, 1413 nt, Artificial Sequence; identical to SEQ ID NO: 176692
  derived and/or modified CDS sequence (opt4) from neuraminidase__InfluenzaA__ACU80094

SEQ ID NO: 177281 - RNA, 1410 nt, Artificial Sequence; identical to SEQ ID NO: 176663
  derived and/or modified CDS sequence (opt4) from neuraminidase__InfluenzaA__ACU80105

SEQ ID NO: 177282 - RNA, 1410 nt, Artificial Sequence; identical to SEQ ID NO: 176663
  derived and/or modified CDS sequence (opt4) from neuraminidase__InfluenzaA__ACU80127

SEQ ID NO: 177283 - RNA, 1410 nt, Artificial Sequence; identical to SEQ ID NO: 176663
  derived and/or modified CDS sequence (opt4) from neuraminidase__InfluenzaA__ACU80138

SEQ ID NO: 177284 - RNA, 1410 nt, Artificial Sequence; identical to SEQ ID NO: 176659
  derived and/or modified CDS sequence (opt4) from neuraminidase__InfluenzaA__ACU80160

SEQ ID NO: 177285 - RNA, 1413 nt, Artificial Sequence; identical to SEQ ID NO: 176692
  derived and/or modified CDS sequence (opt4) from neuraminidase__InfluenzaA__ACU80171

SEQ ID NO: 177286 - RNA, 1410 nt, Artificial Sequence; identical to SEQ ID NO: 176572
  derived and/or modified CDS sequence (opt4) from neuraminidase__InfluenzaA__ACU80182

SEQ ID NO: 177287 - RNA, 1410 nt, Artificial Sequence
  derived and/or modified CDS sequence (opt4) from neuraminidase__InfluenzaA__ACU80193
augaaccccaaccagaagaucaucaccaucggcagcgugagccugaccaucagcaccaucugcuucuucaugcagaccgccauccugaucaccaccgugacccugcacuucaagcaguacgaguucaacagcccccccaacaaccaggugaugcugugcgagcccaccaucaucgagagaaacaucaccgagaucguguaccugaccaacaccaccaucgagaaggagaucugccccaagcuggccgaguacagaaacuggagcaagccccagugcgacaucaccggcuucgcccccuucagcaaggacaacagcaucagacugagcgccggcggcgacaucugggugaccagagagcccuacgugagcugcgaccccgacaagugcuaccaguucgcccugggccagggcaccacccugaacaacgugcacagcaacgacaccgugagagacagaacccccuacagaacccugcugaugaacgagcugggcgugcccuuccaccugggcaccaagcaggugugcaucgccuggagcagcagcagcugccacgacggcaaggccuggcugcacgugugcaucaccggcgacgacaagaacgccaccgccagcuucaucuacaacggcagacugguggacagcaucgugagcuggagcaaggagauccugagaacccaggagagcgagugcgugugcaucaacggcaccugcaccguggugaugaccgacggcagcgccagcggcaaggccgacaccaagauccuguucaucgaggagggcaagaucgugcacaccagcacccugagcggcagcgcccagcacguggaggagugcagcugcuaccccagauaccccggcgugagaugcgugugcagagacaacuggaagggcagcaacagacccaucguggacaucaacaucaaggaccacagcaucgugagcagcuacgugugcagcggccuggugggcgacacccccagaaagaacgacagcagcagcagcagccacugccuggaccccaacaacgaggagggcggccacggcgugaagggcugggccuucgacgacggcaacgacguguggaugggcagaaccaucagcgagaagagcagacugggcuacgagaccuucaaggugaucgagggcuggagcaaccccaagagcaagcugcagaucaacagacaggugaucguggacagaggcgacagaagcggcuacagcggcaucuucagcguggagggcaagagcugcaucaacagaugcuucuacguggagcugaucagaggcagaaaggaggagaccgaggugcuguggaccagcaacagcaucgugguguucugcggcaccagcggcaccuacggcaccggcagcuggcccgacggcgccgacaucaaccugaugcccaucuga

SEQ ID NO: 177288 - RNA, 1410 nt, Artificial Sequence; identical to SEQ ID NO: 176572
  derived and/or modified CDS sequence (opt4) from neuraminidase__InfluenzaA__ACU80204

SEQ ID NO: 177289 - RNA, 1413 nt, Artificial Sequence
  derived and/or modified CDS sequence (opt4) from neuraminidase__InfluenzaA__ACU80237
augaaccccaaccagaagaucaucaccaucggcagcaucagcaucgccaucggcaucaucagccugaugcugcagaucggcaacaucaucagcaucugggccagccacagcauccagaccggcaaccagaacaacaccggcaucugcaaccagagaaucaucaccuacgagaacagcaccugggugaaccacaccuacgugaacaucaacaacaccaacgugguggccggcgaggacaagaccagcgugacccuggccggcaacagcagccugugcagcaucagcggcugggccaucuacaccaaggacaacagcaucagaaucggcagcaagggcgacguguucgugaucagagagcccuucaucagcugcagccaccuggagugcagaaccuucuuccugacccagggcgcccugcugaacgacaagcacagcaacggcaccgugaaggacagaagccccuacagagcccugaugagcugcccccugggcgaggcccccagccccuacaacagcaaguucgagagcguggccuggagcgccagcgccugccacgacggcaugggcuggcugaccaucggcaucagcggccccgacaacggcgccguggccgugcugaaguacaacggcaucaucaccggcaccaucaagagcuggaagaagcagauccugagaacccaggagagcgagugcgugugcaugaacggcagcugcuucaccaucaugaccgacggccccagcaacaaggccgccagcuacaagaucuucaagaucgagaagggcaaggugaccaagagcaucgagcugaacgcccccaacuuccacuacgaggagugcagcugcuaccccgacaccggcaucgugaugugcgugugcagagacaacuggcacggcagcaacagacccugggugagcuucaaccagaaccuggacuaccagaucggcuacaucugcagcggcguguucggcgacaaccccagacccgaggacggcgagggcagcugcaaccccgugaccguggacggcgccaacggcgugaagggcuucagcuacaaguacgacaacggcguguggaucggcagaaccaagagcaacagacugagaaagggcuucgagaugaucugggaccccaacggcuggaccaacaccgacagcgacuucagcgugaagcaggacgugguggccaucaccgacuggagcggcuacagcggcagcuucgugcagcaccccgagcugaccggccuggacugcaucagacccugcuucuggguggagcuggugagaggccugcccagagagaacaccaccaucuggaccagcggcagcagcaucagcuucugcggcgugaacagcgacaccgccaacuggagcuggcccgacggcgccgagcugcccuucaccaucgacaaguga

SEQ ID NO: 177290 - RNA, 1410 nt, Artificial Sequence; identical to SEQ ID NO: 176663
  derived and/or modified CDS sequence (opt4) from neuraminidase__InfluenzaA__ACU80248

SEQ ID NO: 177291 - RNA, 1410 nt, Artificial Sequence; identical to SEQ ID NO: 176663
  derived and/or modified CDS sequence (opt4) from neuraminidase__InfluenzaA__ACU80259

SEQ ID NO: 177292 - RNA, 1413 nt, Artificial Sequence
  derived and/or modified CDS sequence (opt4) from neuraminidase__InfluenzaA__ACU80270
augaaccccaaccagaagaucaucaccaucggcagcaucagcaucgccaucggcaucaucagccugaugcugcagaucggcaacaucaucagcaucugggccagccacagcauccagaccggcagccagaacaacaccggcaucugcaaccagagaaucaucaccuacgagaacagcaccugggugaaccacaccuacgugaacaucaacaacaccaacgugguggccggcgaggacaagaccagcgugacccuggccggcaacagcagccugugcagcaucagcggcugggccaucuacaccaaggacaacagcaucagaaucggcagcaagggcgacguguucgugaucagagagcccuucaucagcugcagccaccuggagugcagaaccuucuuccugacccagggcgcccugcugaacgacaagcacagcaacggcaccgugaaggacagaagccccuacagagcccugaugagcugcccccugggcgaggcccccagccccuacaacagcaaguucgagagcguggccuggagcgccagcgccugccacgacggcaugggcuggcugaccaucggcaucagcggccccgacaacggcgccguggccgugcugaaguacaacggcaucaucaccggcaccaucaagagcuggaagaagcagauccugagaacccaggagagcgagugcgugugcaugaacggcagcugcuucaccaucaugaccgacggccccagcaacaaggccgccagcuacaagaucuucaagaucgagaagggcaaggugaccaagagcaucgagcugaacgcccccaacuuccacuacgaggagugcagcugcuaccccgacaccagcaucgugaugugcgugugcagagacaacuggcacggcagcaacagacccugggugagcuucaaccagaaccuggacuaccagaucggcuacaucugcagcggcguguucggcgacaaccccagacccgaggacggcgagggcagcugcaaccccgugaccguggacggcgccaacggcgugaagggcuucagcuacaaguacgacaacggcguguggaucggcagaaccaagagcaacagacugagaaagggcuucgagaugaucugggaccccaacggcuggaccaacaccgacagcgacuucagcgugaagcaggacgugguggccaucaccgacuggagcggcuacagcggcagcuucgugcagcaccccgagcugaccggccuggacugcaucagacccugcuucuggguggagcuggugagaggccugcccagagagaacaccaccaucuggaccagcggcagcagcaucagcuucugcggcgugaacagcgacaccgccaacuggagcuggcccgacggcgccgagcugcccuucaccaucgacaaguga

SEQ ID NO: 177293 - RNA, 1413 nt, Artificial Sequence
  derived and/or modified CDS sequence (opt4) from neuraminidase__InfluenzaA__ACU80281
augaaccagaaccagaagaucaucaccaucggcagcaucagcaucgccaucggcaucaucagccugaugcugcagaucggcaacaucaucagcaucugggccagccacagcauccagaccggcagccagaacaacaccggcaucugcaaccagagaaucaucaccuacgagaacagcaccugggugaaccacaccuacgugaacaucaacaacaccaacgugguggccggcgaggacaagaccagcgugacccuggccggcaacagcagccugugcagcaucagcggcugggccaucuacaccaaggacaacagcaucagaaucggcagcaagggcgacguguucgugaucagagagcccuucaucagcugcagccaccuggagugcagaaccuucuuccugacccagggcgcccugcugaacgacaagcacagcaacggcaccgugaaggacagaagccccuacagagcccugaugagcugcccccugggcgaggcccccagccccuacaacagcaaguucgagagcguggccuggagcgccagcgccugccacgacggcaugggcuggcugaccaucggcaucagcggccccgacaacggcgccguggccgugcugaaguacaacggcaucaucaccggcaccaucaagagcuggaagaagcagauccugagaacccaggagagcgagugcgugugcaugaacggcagcugcuucaccaucaugaccgacggccccagcaacaaggccgccagcuacaagaucuucaagaucgagaagggcaaggugaccaagagcaucgagcugaacgcccccaacuuccacuacgaggagugcagcugcuaccccgacaccggcaucgugaugugcgugugcagagacaacuggcacggcagcaacagacccugggugagcuucaaccagaaccuggacuaccagaucggcuacaucugcagcggcguguucggcgacaaccccagacccgaggacggcgagggcagcugcaaccccgugaccguggacggcgccaacggcgugaagggcuucagcuacaaguacgacaacggcguguggaucggcagaaccaagagcaacagacugagaaagggcuucgagaugaucugggaccccaacggcuggaccaacaccgacagcgacuucagcgugaagcaggacgugguggccaucaccgacuggagcggcuacagcggcagcuucgugcagcaccccgagcugaccggccuggacugcaucagacccugcuucuggguggagcuggugagaggccugcccagagagaacaccaccaucuggaccagcggcagcagcaucagcuucugcggcgugaacagcgacaccgccaacuggagcuggcccgacggcgccgagcugcccuucaccaucgacaaguga

SEQ ID NO: 177294 - RNA, 1410 nt, Artificial Sequence
  derived and/or modified CDS sequence (opt4) from neuraminidase__InfluenzaA__ACU80303
augaaccccaaccagaagaucaucaccaucggcagcgugagccugaccaucagcaccaucugcuucuucaugcagaucgccauccugaucaccaccgugacccugcacuucaagcaguacgaguucaacagcagccccaacaaccaggugaugcugugcgagcccaccaucaucgagagaaacaucaccgagaucguguaccugaccaacaccaccaucgagaaggagaucugccccaagcuggccgaguacagaaacuggagcaagccccagugcgacaucaccggcuucgcccccuucagcaaggacaacagcaucagacugagcgccggcggcgacaucugggugaccagagagcccuacgugagcugcgaccccgacaagugcuaccaguucgcccugggccagggcaccacccugaacaacgugcacagcaacaacaccgugagagacagaacccccuacagaacccugcugaugaacgagcugggcgugcccuuccaccugggcaccaagcaggugugcaucgccuggagcagcagcagcugccacgacggcaaggccuggcugcacgugugcaucaccggcgacgacaagaacgccaccgccagcuucaucuacaacggcagacugguggacagcaucgugagcuggagcaaggagauccugagaacccaggagagcgagugcgugugcaucaacggcaccugcaccguggugaugaccgacggcagcgccagcggcaaggccgacaccaagauccuguucaucgaggagggcaagaucgugcacaccagcacccugagcggcagcgcccagcacguggaggagugcagcugcuaccccagauaccccggcgugagaugcgugugcagagacaacuggaagggcagcaacagacccaucguggacaucaacaucaaggaccacagcaucgugagcagcuacgugugcagcggccuggugggcgacacccccagaaagaacgacagcagcagcagcagccacugccuggaccccaacaacgaggagggcggcaacggcgugaagggcugggccuucgacgacggcaacgacguguggaugggcagaaccaucagcgagaagagcagacugggcuacgagaccuucaaggugaucgagggcuggagcaaccccaagagcaagcugcagaucaacagacaggugaucguggacagaggcaacagaagcggcuacagcggcaucuucagcguggagggcaagagcugcaucaacagaugcuucuacguggagcugaucagaggcagaaaggaggagaccgaggugcuguggaccagcaacagcaucgugguguucugcggcaccagcggcaccuacggcaccggcagcuggcccgacggcgccgacaucaaccugaugcccaucuga

SEQ ID NO: 177295 - RNA, 1410 nt, Artificial Sequence; identical to SEQ ID NO: 176663
  derived and/or modified CDS sequence (opt4) from neuraminidase__InfluenzaA__ACU80314

SEQ ID NO: 177296 - RNA, 1410 nt, Artificial Sequence; identical to SEQ ID NO: 176663
  derived and/or modified CDS sequence (opt4) from neuraminidase__InfluenzaA__ACU80325

SEQ ID NO: 177297 - RNA, 1410 nt, Artificial Sequence; identical to SEQ ID NO: 176659
  derived and/or modified CDS sequence (opt4) from neuraminidase__InfluenzaA__ACU80336

SEQ ID NO: 177298 - RNA, 1410 nt, Artificial Sequence; identical to SEQ ID NO: 176663
  derived and/or modified CDS sequence (opt4) from neuraminidase__InfluenzaA__ACU80347

SEQ ID NO: 177299 - RNA, 1410 nt, Artificial Sequence; identical to SEQ ID NO: 176663
  derived and/or modified CDS sequence (opt4) from neuraminidase__InfluenzaA__ACU80358

SEQ ID NO: 177300 - RNA, 1410 nt, Artificial Sequence; identical to SEQ ID NO: 176663
  derived and/or modified CDS sequence (opt4) from neuraminidase__InfluenzaA__ACU80369

SEQ ID NO: 177301 - RNA, 1410 nt, Artificial Sequence; identical to SEQ ID NO: 176663
  derived and/or modified CDS sequence (opt4) from neuraminidase__InfluenzaA__ACU80380

SEQ ID NO: 177302 - RNA, 1410 nt, Artificial Sequence
  derived and/or modified CDS sequence (opt4) from neuraminidase__InfluenzaA__ACU80391
augaaccccaaccagaagaucaucaccaucggcagcgugagccugaccaucagcaccaucugcuucuucaugcagaucgccauccugaucaccaccgugacccugcacuucaagcaguacgaguucaacagcagccccaacaaccaggugaugcugugcgagcccaccaucaucgagagaaacaucaccgagaucguguaccugaccaacaccaucaucgagaaggagaucugccccaagcuggccgaguacagaaacuggagcaagccccagugcgacaucaccggcuucgcccccuucagcaaggacaacagcaucagacugagcgccggcggcgacaucugggugaccagagagcccuacgugagcugcgaccccgacaagugcuaccaguucgcccugggccagggcaccacccugaacaacgugcacagcaacaacaccgugagagacagaacccccuacagaacccugcugaugaacgagcugggcgugcccuuccaccugggcaccaagcaggugugcaucgccuggagcagcagcagcugccacgacggcaaggccuggcugcacgugugcaucaccggcgacgacaagaacgccaccgccagcuucaucuacaacggcagacugguggacagcaucgugagcuggagcaaggagauccugagaacccaggagagcgagugcgugugcaucaacggcaccugcaccguggugaugaccgacggcagcgccagcggcaaggccgacaccaagauccuguucaucgaggagggcaagaucgugcacaccagcacccugagcggcagcgcccagcacguggaggagugcagcugcuaccccagauaccccggcgugagaugcgugugcagagacaacuggaagggcagcaacagacccaucguggacaucaacaucaaggaccacagcaucgugagcagcuacgugugcagcggccuggugggcgacacccccagaaagaacgacagcagcagcagcagccacugccuggaccccaacaacgaggagggcggccacggcgugaagggcugggccuucgacgacggcaacgacguguggaugggcagaaccaucagcgagaagagcagacugggcuacgagaccuucaaggugaucgagggcuggagcaaccccaagagcaagcugcagaucaacagacaggugaucguggacagaggcaacagaagcggcuacagcggcaucuucagcguggagggcaagagcugcaucaacagaugcuucuacguggagcugaucagaggcagaaaggaggagaccgaggugcuguggaccagcaacagcaucgugguguucugcggcaccagcggcaccuacggcaccggcagcuggcccgacggcgccgacaucaaccugaugcccaucuga

SEQ ID NO: 177303 - RNA, 1410 nt, Artificial Sequence; identical to SEQ ID NO: 176659
  derived and/or modified CDS sequence (opt4) from neuraminidase__InfluenzaA__ACU80402

SEQ ID NO: 177304 - RNA, 1413 nt, Artificial Sequence; identical to SEQ ID NO: 176692
  derived and/or modified CDS sequence (opt4) from neuraminidase__InfluenzaA__ACU80413

SEQ ID NO: 177305 - RNA, 1410 nt, Artificial Sequence; identical to SEQ ID NO: 176663
  derived and/or modified CDS sequence (opt4) from neuraminidase__InfluenzaA__ACU80427

SEQ ID NO: 177306 - RNA, 1410 nt, Artificial Sequence; identical to SEQ ID NO: 176663
  derived and/or modified CDS sequence (opt4) from neuraminidase__InfluenzaA__ACU80438

SEQ ID NO: 177307 - RNA, 1410 nt, Artificial Sequence; identical to SEQ ID NO: 176659
  derived and/or modified CDS sequence (opt4) from neuraminidase__InfluenzaA__ACU80461

SEQ ID NO: 177308 - RNA, 1410 nt, Artificial Sequence; identical to SEQ ID NO: 176663
  derived and/or modified CDS sequence (opt4) from neuraminidase__InfluenzaA__ACU80603

SEQ ID NO: 177309 - RNA, 1410 nt, Artificial Sequence; identical to SEQ ID NO: 176663
  derived and/or modified CDS sequence (opt4) from neuraminidase__InfluenzaA__ACU80614

SEQ ID NO: 177310 - RNA, 1410 nt, Artificial Sequence; identical to SEQ ID NO: 176663
  derived and/or modified CDS sequence (opt4) from neuraminidase__InfluenzaA__ACU80625

SEQ ID NO: 177311 - RNA, 1410 nt, Artificial Sequence; identical to SEQ ID NO: 176659
  derived and/or modified CDS sequence (opt4) from neuraminidase__InfluenzaA__ACU80636

SEQ ID NO: 177312 - RNA, 1410 nt, Artificial Sequence
  derived and/or modified CDS sequence (opt4) from neuraminidase__InfluenzaA__ACU80647
augaaccccaaccagaagaucaucaccaucggcagcgugagccugaccaucagcaccaucugcuucuucaugcagaccgccauccugaucaccaccgugacccugcacuucaagcaguacgaguucaacagcccccccaacaaccaggugaugcugugcgagcccaccaucaucgagagaaacaucaccgagaucguguaccugaccaacaccaccaucgagaaggagaucugccccaagcuggccgaguacagaaacuggagcaagccccagugcgacaucaccggcuucgcccccuucagcaaggacaacagcaucagacugagcgccggcggcgacaucugggugaccagagagcccuacgugagcugcgaccccgacaagugcuaccaguucgcccugggccagggcaccacccugaacaacgugcacagcaacgacaccgugagagacagaacccccuacagaacccugcugaugaacgagcugggcgugcccuuccaccugggcaccaagcaggugugcaucgccuggagcagcagcagcugccacgacggcaaggccuggcugcacgugugcaucaccggcgacgacaagaacgccaccgccagcuucaucuacaacggcagacugguggacagcguggugagcuggagcaaggagauccugagaacccaggagagcgagugcgugugcaucaacggcaccugcaccguggugaugaccgacggcagcgccagcggcaaggccgacaccaagauccuguucaucgaggagggcaagaucgugcacaccagcacccugagcggcagcgcccagcacguggaggagugcagcugcuaccccagauaccccggcgugagaugcgugugcagagacaacuggaagggcagcaacagacccaucguggacaucaacaucaaggaccacagcaucgugagcagcuacgugugcagcggccuggugggcgacacccccagaaagaacgacagcagcagcagcagccacugccuggaccccaacaacgaggagggcggccacggcgugaagggcugggccuucgacgacggcaacgacguguggaugggcagaaccaucagcgagaagagcagacugggcuacgagaccuucaaggugaucgagggcuggagcaaccccaagagcaagcugcagaucaacagacaggugaucguggacagaggcgacagaagcggcuacagcggcaucuucagcguggagggcaagagcugcaucaacagaugcuucuacguggagcugaucagaggcagaaaggaggagaccgaggugcuguggaccagcaacagcaucgugguguucugcggcaccagcggcaccuacggcaccggcagcuggcccgacggcgccgacaucaaccugaugcccaucuga

SEQ ID NO: 177313 - RNA, 1410 nt, Artificial Sequence
  derived and/or modified CDS sequence (opt4) from neuraminidase__InfluenzaA__ACU80658
augaaccccaaccagaagaucaucaccaucggcagcgugagccugaccaucagcaccaucugcuucuucaugcagaucgccauccugaucaccaccgugacccugcacuucaagcaguacgaguucaacagcccccccaacaaccaggugaugcugugcgagcccaagaucaucgagagaaacaucaccgagaucguguaccugaccaacaccaccaucgagaaggagaucugccccaagcuggccgaguacagaaacuggagcaagccccagugcgacaucaccggcuucgcccccuucagcaaggacaacagcaucagacugagcgccggcggcgacaucugggugaccagagagcccuacgugagcugcgaccccgacaagugcuaccaguucgcccugggccagggcaccacccugaacaacgugcacagcaacgacaccgugagagacagaacccccuacagaacccugcugaugaacgagcugggcgugcccuuccaccugggcaccaagcaggugugcaucgccuggagcagcagcagcugccacgacggcaaggccuggcugcacgugugcaucaccggcgacgacaagaacgccaccgccagcuucaucuacaacggcagacugguggacagcguggugagcuggagcaaggagauccugagaacccaggagagcgagugcgugugcaucaacggcaccugcaccguggugaugaccgacggcagcgccagcggcaaggccgacaccaagauccuguucaucgaggagggcaagaucgugcacaccagcacccugagcggcagcgcccagcacguggaggagugcagcugcuaccccagauaccccggcgugagaugcgugugcagagacaacuggaagggcagcaacagacccaucguggacaucaacaucaaggaccacagcaucgugagcagcuacgugugcagcggccuggugggcgacacccccagaaagaacgacagcagcagcagcagccacugccuggaccccaacaacgaggagggcggccacggcgugaagggcugggccuucgacgacggcaacgacguguggaugggcagaaccaucagcgagaagagcagacugggcuacgagaccuucaaggugaucgagggcuggagcaaccccaagagcaagcugcagaucaacagacaggugaucguggacagaggcaacagaagcggcuacagcggcaucuucagcguggagggcaagagcugcaucaacagaugcuucuacguggagcugaucagaggcagaaaggaggagaccgaggugcuguggaccagcaacagcaucgugguguucugcggcaccagcggcaccuacggcaccggcagcuggcccgacggcgccgacaucaaccugaugcccaucuga

SEQ ID NO: 177314 - RNA, 1410 nt, Artificial Sequence; identical to SEQ ID NO: 176572
  derived and/or modified CDS sequence (opt4) from neuraminidase__InfluenzaA__ACU80669

SEQ ID NO: 177315 - RNA, 1410 nt, Artificial Sequence; identical to SEQ ID NO: 176659
  derived and/or modified CDS sequence (opt4) from neuraminidase__InfluenzaA__ACU80691

SEQ ID NO: 177316 - RNA, 1410 nt, Artificial Sequence; identical to SEQ ID NO: 176663
  derived and/or modified CDS sequence (opt4) from neuraminidase__InfluenzaA__ACU80702

SEQ ID NO: 177317 - RNA, 1410 nt, Artificial Sequence; identical to SEQ ID NO: 176663
  derived and/or modified CDS sequence (opt4) from neuraminidase__InfluenzaA__ACU80713

SEQ ID NO: 177318 - RNA, 1410 nt, Artificial Sequence; identical to SEQ ID NO: 176659
  derived and/or modified CDS sequence (opt4) from neuraminidase__InfluenzaA__ACU80724

SEQ ID NO: 177319 - RNA, 1410 nt, Artificial Sequence; identical to SEQ ID NO: 176572
  derived and/or modified CDS sequence (opt4) from neuraminidase__InfluenzaA__ACU80735

SEQ ID NO: 177320 - RNA, 1410 nt, Artificial Sequence; identical to SEQ ID NO: 176659
  derived and/or modified CDS sequence (opt4) from neuraminidase__InfluenzaA__ACU80746

SEQ ID NO: 177321 - RNA, 1410 nt, Artificial Sequence
  derived and/or modified CDS sequence (opt4) from neuraminidase__InfluenzaA__ACU80757
augaaccccaaccagaagaucaucaccaucggcagcgugagccugaccaucagcaccaucugcuucuucaugcagaucgccauccugaucaccaccgugacccugcacuucaagcaguacgaguucaacagcccccccaacaaccaggugaugcugugcgagcccaccaucaucgagagaaacaucaccgaggugguguaccugaccaacaccaccaucgagaaggagaucugccccaagcuggccgaguacagaaacuggagcaagccccagugcgacaucaccggcuucgcccccuucagcaaggacaacagcaucagacugagcgccggcggcgacaucugggugaccagagagcccuacgugagcugcgaccccgacaagugcuaccaguucgcccugggccagggcaccacccugaacaacgugcacagcaacgacaccgugagagacagaacccccuacagaacccugcugaugaacgagcugggcgugcccuuccaccugggcaccaagcaggugugcaucgccuggagcagcagcagcugccacgacggcaaggccuggcugcacgugugcaucaccggcgacgacaagaacgccaccgccagcuucaucuacaacggcagacugguggacagcguggugagcuggagcaaggagauccugagaacccaggagagcgagugcgugugcaucaacggcaccugcaccguggugaugaccgacggcagcgccagcggcaaggccgacaccaagauccuguucaucgaggagggcaagaucgugcacaccagcacccugagcggcagcgcccagcacguggaggagugcagcugcuaccccagauaccccggcgugagaugcgugugcagagacaacuggaagggcagcaacagacccaucguggacaucaacaucaaggaccacagcaucgugagcagcuacgugugcagcggccuggugggcgacacccccagaaagaacgacagcagcagcagcagccacugccuggaccccaacaacgaggagggcggccacggcgugaagggcugggccuucgacgacggcaacgacguguggaugggcagaaccaucagcgagaagagcagacugggcuacgagaccuucaaggugaucgagggcuggagcaaccccaagagcaagcugcagaucaacagacaggugaucguggacagaggcaacagaagcggcuacagcggcaucuucagcguggagggcaagagcugcaucaacagaugcuucuacguggagcugaucagaggcagaaaggaggagaccgaggugcuguggaccagcaacagcaucgugguguucugcggcaccagcggcaccuacggcaccggcagcuggcccgacggcgccgacaucaaccugaugcccaucuga

SEQ ID NO: 177322 - RNA, 1410 nt, Artificial Sequence; identical to SEQ ID NO: 177287
  derived and/or modified CDS sequence (opt4) from neuraminidase__InfluenzaA__ACU80768

SEQ ID NO: 177323 - RNA, 1410 nt, Artificial Sequence; identical to SEQ ID NO: 176659
  derived and/or modified CDS sequence (opt4) from neuraminidase__InfluenzaA__ACU80779

SEQ ID NO: 177324 - RNA, 1410 nt, Artificial Sequence; identical to SEQ ID NO: 176572
  derived and/or modified CDS sequence (opt4) from neuraminidase__InfluenzaA__ACU80790

SEQ ID NO: 177325 - RNA, 1410 nt, Artificial Sequence; identical to SEQ ID NO: 176659
  derived and/or modified CDS sequence (opt4) from neuraminidase__InfluenzaA__ACU80801

SEQ ID NO: 177326 - RNA, 1410 nt, Artificial Sequence
  derived and/or modified CDS sequence (opt4) from neuraminidase__InfluenzaA__ACU81106
augaaccccaaccagaagaucaucaccaucggcagcgugagccugaccaucagcaccaucugcuucuucaugcagaucgccauccugaucaccaccgugacccugcacuucaagcaguacgaguucaacagcccccccaacaaccaggugaugcugugcgagcccaccaucaucgagagaaacaucaccgagaucguguaccugaccaacaccaccaucgagaaggagaucugccccaagcuggccgaguacagaaacuggagcaagccccagugcgacaucaccggcuucgcccccuucagcaaggacaacagcaucagacugagcgccggcggcgacaucugggugaccagagagcccuacgugagcugcgaccccgacaagugcuaccaguucgcccugggccagggcaccacccugaacaacgugcacagcaacaacaccgugagagacagaacccccuacagaacccugcugaugaacgagcugggcgugcccuuccaccugggcaccaagcaggugugcaucgccuggagcagcagcagcugccacgacggcaaggccuggcugcacgugugcaucaccggcgacgacaagaacgccaccgccagcuucaucuacaacggcagacugguggacagcguggugagcuggagcaaggagauccugagaacccaggagagcgagugcgugugcaucaacggcaccugcaccguggugaugaccgacggcagcgccagcggcaaggccgacaccaagauccuguucaucgaggagggcaagaucgugcacaccagcacccugagcggcagcgcccagcacguggaggagugcagcugcuaccccagauaccccggcgugagaugcgugugcagagacaacuggaagggcagcaacagacccaucguggacaucaacaucaaggaccacagcaucgugagcagcuacgugugcagcggccuggugggcgacacccccagaaagaacgacagcagcagcagcagccacugccuggaccccaacaacgaggagggcggccacggcgugaagggcugggccuucgacgacggcaacgacguguggaugggcagaaccaucagcgagaagagcagacugggcuacgagaccuucaaggugaucgagggcuggagcaaccccaagagcaagcugcagaucaacagacaggugaucguggacagaggcaacagcagcggcuacagcggcaucuucagcguggagggcaagagcugcaucaacagaugcuucuacguggagcugaucagaggcagaaaggaggagaccgaggugcuguggaccagcaacagcaucgugguguucugcggcaccagcggcaccuacggcaccggcagcuggcccgacggcgccgacaucaaccugaugcccaucuga

SEQ ID NO: 177327 - RNA, 1410 nt, Artificial Sequence; identical to SEQ ID NO: 176953
  derived and/or modified CDS sequence (opt4) from neuraminidase__InfluenzaA__ACU87265

SEQ ID NO: 177328 - RNA, 1410 nt, Artificial Sequence; identical to SEQ ID NO: 176798
  derived and/or modified CDS sequence (opt4) from neuraminidase__InfluenzaA__ACU87273

SEQ ID NO: 177329 - RNA, 1410 nt, Artificial Sequence; identical to SEQ ID NO: 176798
  derived and/or modified CDS sequence (opt4) from neuraminidase__InfluenzaA__ACV04231

SEQ ID NO: 177330 - RNA, 1410 nt, Artificial Sequence; identical to SEQ ID NO: 176798
  derived and/or modified CDS sequence (opt4) from neuraminidase__InfluenzaA__ACV04241

SEQ ID NO: 177331 - RNA, 1410 nt, Artificial Sequence; identical to SEQ ID NO: 176798
  derived and/or modified CDS sequence (opt4) from neuraminidase__InfluenzaA__ACV04251

SEQ ID NO: 177332 - RNA, 1410 nt, Artificial Sequence; identical to SEQ ID NO: 176798
  derived and/or modified CDS sequence (opt4) from neuraminidase__InfluenzaA__ACV04261

SEQ ID NO: 177333 - RNA, 1410 nt, Artificial Sequence; identical to SEQ ID NO: 176798
  derived and/or modified CDS sequence (opt4) from neuraminidase__InfluenzaA__ACV04271

SEQ ID NO: 177334 - RNA, 1410 nt, Artificial Sequence
  derived and/or modified CDS sequence (opt4) from neuraminidase__InfluenzaA__ACV04281
augaaccccaaccagaagaucaucaccaucggcagcgugugcaugaccaucggcauggccaaccugauccugcagaucggcaacaucaucagcaucuggaucagccacagcauccagcugggcaaccagaaccagaucgagaccugcaaccagagcgugaucaccuacgagaacaacaccugggugaaccagaccuacgugaacaucggcaacaccaacuucgccgccggccagagcguggugagcgugaagcuggccggcaacagcagccugugccccgugagcggcugggccaucuacagcaaggacaacagcaucagaaucggcagcaagggcgacguguucgugaucagagagcccuucaucagcugcagcccccuggagugcagaaccuucuuccugacccagggcgcccugcugaacgacaagcacagcaacggcaccaucaaggacagaagccccuacagaacccugaugagcugccccaucggcgaggugcccagccccuacaacagcagauucgagagcguggccuggagcgccagcgccugccacgacggcaucaacuggcugaccaucggcaucagcggccccgacaacggcgccguggccgugcugaaguacaacggcaucaucaccgacaccaucaagagcuggagaaacaacauccugagaacccaggagagcgagugcgccugcgugaacggcagcugcuucaccgugaugaccgacggccccagcgacggccaggccagcuacaagaucuucagaaucgagaagggcaagaucgugaagagcguggagaugaacgcccccaacuaccacuacgaggagugcagcugcuaccccgacagcagcgagaucaccugcgugugcagagacaacuggcacggcagcaacagacccugggugagcuucaaccagaaccuggaguaccagaucggcuacaucugcagcggcaucuucggcgacaaccccagacccaacgacaagaccggcagcugcggccccgugagcagcaacggcgccaacggcgugaagggcuucagcuucaaguacggcaacggcguguggaucggcagaaccaagagcaucagcagcagaaacggcuucgagaugaucugggaccccaacggcuggaccggcaccgacaacaacuucagcaucaagcaggacaucgugggcaucaacgaguggagcggcuacagcggcagcuucgugcagcaccccgagcugaccggccuggacugcaucagacccugcuucuggguggagcugaucagaggcagacccaaggagaacaccaucuggaccagcggcagcagcaucagcuucugcggcgugaacagcgacaccgugggcuggagcuggcccgacggcgccgagcugcccuucaccaucgacaaguga

SEQ ID NO: 177335 - RNA, 1410 nt, Artificial Sequence; identical to SEQ ID NO: 176798
  derived and/or modified CDS sequence (opt4) from neuraminidase__InfluenzaA__ACV04291

SEQ ID NO: 177336 - RNA, 1410 nt, Artificial Sequence; identical to SEQ ID NO: 176798
  derived and/or modified CDS sequence (opt4) from neuraminidase__InfluenzaA__ACV04301

SEQ ID NO: 177337 - RNA, 1410 nt, Artificial Sequence; identical to SEQ ID NO: 176798
  derived and/or modified CDS sequence (opt4) from neuraminidase__InfluenzaA__ACV04321

SEQ ID NO: 177338 - RNA, 1410 nt, Artificial Sequence; identical to SEQ ID NO: 176798
  derived and/or modified CDS sequence (opt4) from neuraminidase__InfluenzaA__ACV04331

SEQ ID NO: 177339 - RNA, 1410 nt, Artificial Sequence; identical to SEQ ID NO: 176798
  derived and/or modified CDS sequence (opt4) from neuraminidase__InfluenzaA__ACV04341

SEQ ID NO: 177340 - RNA, 1410 nt, Artificial Sequence; identical to SEQ ID NO: 176798
  derived and/or modified CDS sequence (opt4) from neuraminidase__InfluenzaA__ACV04351

SEQ ID NO: 177341 - RNA, 1410 nt, Artificial Sequence; identical to SEQ ID NO: 176798
  derived and/or modified CDS sequence (opt4) from neuraminidase__InfluenzaA__ACV04361

SEQ ID NO: 177342 - RNA, 1410 nt, Artificial Sequence; identical to SEQ ID NO: 176798
  derived and/or modified CDS sequence (opt4) from neuraminidase__InfluenzaA__ACV04371

SEQ ID NO: 177343 - RNA, 1410 nt, Artificial Sequence; identical to SEQ ID NO: 176798
  derived and/or modified CDS sequence (opt4) from neuraminidase__InfluenzaA__ACV04381

SEQ ID NO: 177344 - RNA, 1410 nt, Artificial Sequence; identical to SEQ ID NO: 176798
  derived and/or modified CDS sequence (opt4) from neuraminidase__InfluenzaA__ACV04391

SEQ ID NO: 177345 - RNA, 1410 nt, Artificial Sequence; identical to SEQ ID NO: 176798
  derived and/or modified CDS sequence (opt4) from neuraminidase__InfluenzaA__ACV04401

SEQ ID NO: 177346 - RNA, 1410 nt, Artificial Sequence; identical to SEQ ID NO: 176788
  derived and/or modified CDS sequence (opt4) from neuraminidase__InfluenzaA__ACV04411

SEQ ID NO: 177347 - RNA, 1410 nt, Artificial Sequence; identical to SEQ ID NO: 176798
  derived and/or modified CDS sequence (opt4) from neuraminidase__InfluenzaA__ACV04492

SEQ ID NO: 177348 - RNA, 1410 nt, Artificial Sequence; identical to SEQ ID NO: 176798
  derived and/or modified CDS sequence (opt4) from neuraminidase__InfluenzaA__ACV04502

SEQ ID NO: 177349 - RNA, 1410 nt, Artificial Sequence; identical to SEQ ID NO: 176788
  derived and/or modified CDS sequence (opt4) from neuraminidase__InfluenzaA__ACV04512

SEQ ID NO: 177350 - RNA, 1410 nt, Artificial Sequence
  derived and/or modified CDS sequence (opt4) from neuraminidase__InfluenzaA__ACV04522
augaaccccaaccagaagaucaucaccaucggcagcgugugcaugaccaucggcauggccaaccugauccugcagaucggcaacaucaucagcaucuggaucagccacagcauccagcugggcaaccagaaccagaucgagaccugcaaccagagcgugaucaccuacgagaacaacaccugggugaaccagaccuacgugaacaucagcaacaccaacuucgccgccggcaagagcguggugagcgugaagcuggccggcaacagcagccugugccccgugagcggcugggccaucuacagcaaggacaacagcaucagaaucggcagcaagggcgacguguucgugaucagagagcccuucaucagcugcagcccccuggagugcagaaccuucuuccugacccagggcgcccugcugaacgacaagcacagcaacggcaccaucaaggacagaagccccuacagaacccugaugagcugccccaucggcgaggugcccagccccuacaacagcagauucgagagcguggccuggagcgccagcgccugccacgacggcaucaacuggcugaccaucggcaucagcggccccgacaacggcgccguggccgugcugaaguacaacggcaucaucaccgacaccaucaagagcuggagaaacaacauccugagaacccaggagagcgagugcgccugcgugaacggcagcugcuucaccgugaugaccgacggccccagcgacggccaggccagcuacaagaucuucagaaucgagaagggcaagaucgugaagagcguggagaugaacgcccccaacuaccacuacgaggagugcagcugcuaccccgacagcagcgagaucaccugcgugugcagagacaacuggcacggcagcaacagacccugggugagcuucaaccagaaccuggaguaccagaucggcuacaucugcagcggcaucuucggcgacaaccccagacccaacgacaagaccggcagcugcggccccgugagcagcaacggcgccaacggcgugaagggcuucagcuucaaguacggcaacggcguguggaucggcagaaccaagagcaucagcagcagaaacggcuucgagaugaucugggaccccaacggcuggaccggcaccgacaacaacuucagcaucaagcaggacaucgugggcaucaacgaguggagcggcuacagcggcagcuucgugcagcaccccgagcugaccggccuggacugcaucagacccugcuucuggguggagcugaucagaggcagacccaaggagaacaccaucuggaccagcggcagcagcaucagcuucugcggcgugaacagcgacaccgugggcuggagcuggcccgacggcgccgagcugcccuucaccaucgacaaguga

SEQ ID NO: 177351 - RNA, 1410 nt, Artificial Sequence; identical to SEQ ID NO: 176798
  derived and/or modified CDS sequence (opt4) from neuraminidase__InfluenzaA__ACV04532

SEQ ID NO: 177352 - RNA, 1410 nt, Artificial Sequence; identical to SEQ ID NO: 176798
  derived and/or modified CDS sequence (opt4) from neuraminidase__InfluenzaA__ACV04542

SEQ ID NO: 177353 - RNA, 1410 nt, Artificial Sequence; identical to SEQ ID NO: 176798
  derived and/or modified CDS sequence (opt4) from neuraminidase__InfluenzaA__ACV04552

SEQ ID NO: 177354 - RNA, 1410 nt, Artificial Sequence; identical to SEQ ID NO: 176798
  derived and/or modified CDS sequence (opt4) from neuraminidase__InfluenzaA__ACV04562

SEQ ID NO: 177355 - RNA, 1410 nt, Artificial Sequence; identical to SEQ ID NO: 176788
  derived and/or modified CDS sequence (opt4) from neuraminidase__InfluenzaA__ACV04572

SEQ ID NO: 177356 - RNA, 1410 nt, Artificial Sequence; identical to SEQ ID NO: 176798
  derived and/or modified CDS sequence (opt4) from neuraminidase__InfluenzaA__ACV04582

SEQ ID NO: 177357 - RNA, 1410 nt, Artificial Sequence
  derived and/or modified CDS sequence (opt4) from neuraminidase__InfluenzaA__ACV04758
augaaccccaaccagaagaucaucaccaucggcagcgugugcaugaccaucggcauggccaaccugauccugcagaucggcaacaucaucagcaucuggaucagccacagcauccagcugggcaaccagaaccagaucgagaccugcaaccagagcgugaucaccuacgagaacaacaccugggugaaccagaccuacgugaacaucagcaacaccaacuucgccgccggccagagcguggugagcgugaagcuggccggcaacagcagccugugccccgugagcggcugggccaucuacagcaaggacaacagcaucagaaucggcagcaagggcgacguguucgugaucagagagcccuucaucagcugcagccccagcgagugcagaaccuucuuccugacccagggcgcccugcugaacgacaagcacagcaacggcaccaucaaggacagaagccccuacagaacccugaugagcugccccaucggcgaggugcccagccccuacaacagcagauucgagagcguggccuggagcgccagcgccugccacgacggcaucaacuggcugaccaucggcaucagcggccccgacaacggcgccguggccgugcugaaguacaacggcaucaucaccgacaccaucaagagcuggagaaacaacauccugagaacccaggagagcgagugcgccugcgugaacggcagcugcuucaccgugaugaccgacggccccagcaacggccaggccagcuacaagaucuucagaaucgagaagggcaagaucgugaagagcguggagaugaacgcccccaacuaccacuacgaggagugcagcugcuaccccgacagcagcgagaucaccugcgugugcagagacaacuggcacggcagcaacagacccugggugagcuucaaccagaaccuggaguaccagaucggcuacaucugcagcggcaucuucggcgacaaccccagacccaacgacaagaccggcagcugcggccccgugagcagcaacggcgccaacggcgugaagggcuucagcuucaaguacggcaacggcguguggaucggcagaaccaagagcaucagcagcagaaacggcuucgagaugaucugggaccccaacggcuggaccggcaccgacaacaacuucagcaucaagcaggacaucgugggcaucaacgaguggagcggcuacagcggcagcuucgugcagcaccccgagcugaccggccuggacugcaucagacccugcuucuggguggagcugaucagaggcagacccaaggagaacaccaucuggaccagcggcagcagcaucagcuucugcggcgugaacagcgacaccgugggcuggagcuggcccgacggcgccgagcugcccuucaccaucgacaaguga

SEQ ID NO: 177358 - RNA, 1410 nt, Artificial Sequence; identical to SEQ ID NO: 176788
  derived and/or modified CDS sequence (opt4) from neuraminidase__InfluenzaA__ACV33087

SEQ ID NO: 177359 - RNA, 1410 nt, Artificial Sequence; identical to SEQ ID NO: 176798
  derived and/or modified CDS sequence (opt4) from neuraminidase__InfluenzaA__ACV33107

SEQ ID NO: 177360 - RNA, 1410 nt, Artificial Sequence; identical to SEQ ID NO: 176798
  derived and/or modified CDS sequence (opt4) from neuraminidase__InfluenzaA__ACV33117

SEQ ID NO: 177361 - RNA, 1410 nt, Artificial Sequence; identical to SEQ ID NO: 176798
  derived and/or modified CDS sequence (opt4) from neuraminidase__InfluenzaA__ACV33127

SEQ ID NO: 177362 - RNA, 1410 nt, Artificial Sequence; identical to SEQ ID NO: 176798
  derived and/or modified CDS sequence (opt4) from neuraminidase__InfluenzaA__ACV33137

SEQ ID NO: 177363 - RNA, 1410 nt, Artificial Sequence; identical to SEQ ID NO: 176798
  derived and/or modified CDS sequence (opt4) from neuraminidase__InfluenzaA__ACV33147

SEQ ID NO: 177364 - RNA, 1410 nt, Artificial Sequence
  derived and/or modified CDS sequence (opt4) from neuraminidase__InfluenzaA__ACV33157
augaaccccaaccagaagaucaucaccaucggcagcgugugcaugaccaucggcauggccaaccugauccugcagaucggcaacaucaucagcaucuggaucagccacagcauccagcugggcaaccagaaccagaucgagaccugcaaccagagcgugaucaccuacgagaacaacaccugggugaaccagaccuacgugaacaucagcaacaccaacuucgccgccggccagagcguggugagcgugaagcuggccggcaacagcagccugugccccgugagcggcugggccaucuacagcaaggacaacagcaucagaaucggcagcaagggcgacguguucgugaucagagagcccuucaucagcugcagcccccuggagugcagaaccuucuuccugacccagggcgcccugcugaacgacaagcacagcaacggcaccaucaaggacagaagccccuacagaacccugaugagcugccccgugggcgaggugcccagccccuacaacagcagauucgagagcguggccuggagcgccagcgccugccacgacggcaucaacuggcugaccaucggcaucagcggccccgacaacggcgccguggccgugcugaaguacaacggcaucaucaccgacaccaucaagagcuggagaaacaacauccugagaacccaggagagcgagugcgccugcgugaacggcagcugcuucaccgugaugaccgacggccccagcgacggccaggccagcuacaagaucuucagaaucgagaagggcaagaucgugaagagcguggagaugaacgcccccaacuaccacuacgaggagugcagcugcuaccccgacagcagcgagaucaccugcgugugcagagacaacuggcacggcagcaacagacccugggugagcuucaaccagaaccuggaguaccagaucggcuacaucugcagcggcaucuucggcgacaaccccagacccaacgacaagaccggcagcugcggccccgugagcagcaacggcgccaacggcgugaagggcuucagcuucaaguacggcaacggcguguggaucggcagaaccaagagcaucagcagcagaaacggcuucgagaugaucugggaccccaacggcuggaccggcaccgacaacaacuucagcaucaagcaggacaucgugggcaucaacgaguggagcggcuacagcggcagcuucgugcagcaccccgagcugaccggccuggacugcaucagacccugcuucuggguggagcugaucagaggcagacccaaggagaacaccaucuggaccagcggcagcagcaucagcuucugcggcgugaacagcgacaccgugggcuggagcuggcccgacggcgccgagcugcccuucaccaucgacaaguga

SEQ ID NO: 177365 - RNA, 1410 nt, Artificial Sequence
  derived and/or modified CDS sequence (opt4) from neuraminidase__InfluenzaA__ACV33167
augaaccccaaccagaagaucaucaccaucggcagcgugugcaugaccaucggcauggccaaccugauccugcagaucggcaacaucaucagcaucuggaucagccacagcauccagcugggcaaccagaaccagaucgagaccugcaaccagagcgugaucaccuacgagaacaacaccugggugaaccagaccuacgugaacaucagcaacaccaacuucgccgccggccagagcguggugagcgugaagcuggccggcaacagcagccugugccccgugagcggcugggccaucuacagcaaggacaacagcaucagaaucggcagcaagggcgacguguucgugaucagagagcccuucaucagcugcagcccccuggagugcagaaccuucuuccugacccagggcgcccugcugaacgacaagcacagcaacggcaccaucaaggacagaagccccuacagaacccugaugagcugccccaucggcgaggugcccagccccuacaacagcagauucgagagcguggccuggagcgccagcgccugccacgacggcaucaacuggcugaccaucggcaucagcggccccgacaacggcgccguggccgugcugaaguacaacggcaucaucaccgacaccaucaagagcuggagaaacaacauccugagaacccaggagagcgagugcgccugcgugaacggcagcugcuucaccgugaugaccgacggccccagcgacggccaggccagcuacaagaucuucagaaucgagaagggcaagaucgugaagagcguggagaugaacgcccccaacuaccacuacgaggagugcagcugcuaccccgacagcagcgagaucaccugcgugugcagagacaacuggcacggcagcaacagacccugggugagcuucaaccagaaccuggaguaccagaucggcuacaucugcagcggcaucuucggcgacaaccccagacccaacgacaagaccggcagcugcggccccgugagcagcaacggcgccaacggcgugaagggcuucagcuucaaguacggcaacggcguguggaucggcagaaccaagagcaucagcagcagaaacggcuucgagaugaucugggaccccaacggcuggaccggcaccgacaacaacuucagcaucaagcaggacaucgugggcaucaacgaguggagcggcuacagcggcagcuucgugcagcaccccgagcugaccggccuggacugcaucagacccugcuucuggguggagcugaucagaggcagacccaaggagaacaccaucuggaccagcggcagcagcaucagcuucugcggcgugaacagcgacaccguggacuggagcuggcccgacggcgccgagcugcccuucaccaucgacaaguga

SEQ ID NO: 177366 - RNA, 1410 nt, Artificial Sequence; identical to SEQ ID NO: 176798
  derived and/or modified CDS sequence (opt4) from neuraminidase__InfluenzaA__ACV33177

SEQ ID NO: 177367 - RNA, 1410 nt, Artificial Sequence
  derived and/or modified CDS sequence (opt4) from neuraminidase__InfluenzaA__ACV41993
augaaccccaaccagaagaucaucaccaucggcagcgugugcaugaccaucggcauggccaaccugauccugcagaucggcaacaucaucagcaucuggaucagccacagcauccagcugggcaaccagaaccagaucgagaucugcaaccagagcgugaucaccuacgagaacaacaccugggugaaccagaccuacgugaacaucagcaacaccaacuucgccgccggccagagcguggugagcgugaagcuggccggcaacagcagccugugccccgugggcggcugggccaucuacagcaaggacaacagcgugagaaucggcagcaagggcgacguguucgugaucagagagcccuucaucagcugcagcccccuggagugcagaaccuucuuccugacccagggcgcccugcugaacgacaagcacagcaacggcaccaucaaggacagaagccccuacagaacccugaugagcugccccaucggcgaggugcccagccccuacaacagcagauucgagagcguggccuggagcgccagcgccugccacgacggcaucaacuggcugaccaucggcaucagcggccccgacaacggcgccguggccgugcugaaguacaacggcaucaucaccgacaccaucaagagcuggagaaacaacauccugagaacccaggagagcgagugcgccugcgugaacggcagcugcuucaccgugaugaccgacggccccagcaacggccaggccagcuacaagaucuucagaaucgagaagggcaagaucgugaagagcguggagaugaacgcccccaacuaccacuacgaggagugcagcugcuaccccgacagcagcgagaucaccugcgugugcagagacaacuggcacggcagcaacagacccugggugagcuucaaccagaaccuggaguaccagaucggcuacaucugcagcggcaucuucggcgacaaccccagacccaacgacaagaccggcagcugcggccccgugagcagcaacggcgccaacggcgugaagggcuucagcuucaaguacggcaacggcguguggaucggcagaaccaagagcaucagcagcagaaacggcuucgagaugaucugggaccccaacggcuggaccggcaccgacaacaacuucagcaucaagcaggacaucgugggcaucaacgaguggagcggcuacagcggcagcuucgugcagcaccccgagcugaccggccuggacugcaucagacccugcuucuggguggagcugaucagaggcagacccaaggagaacaccaucuggaccagcggcagcagcaucagcuucugcggcgugaacagcgacaccgugggcuggagcuggcccgacggcgccgagcugcccuucaccaucgacaaguga

SEQ ID NO: 177368 - RNA, 1410 nt, Artificial Sequence; identical to SEQ ID NO: 176798
  derived and/or modified CDS sequence (opt4) from neuraminidase__InfluenzaA__ACV42010

SEQ ID NO: 177369 - RNA, 1410 nt, Artificial Sequence; identical to SEQ ID NO: 176798
  derived and/or modified CDS sequence (opt4) from neuraminidase__InfluenzaA__ACV42020

SEQ ID NO: 177370 - RNA, 1410 nt, Artificial Sequence; identical to SEQ ID NO: 176563
  derived and/or modified CDS sequence (opt4) from neuraminidase__InfluenzaA__ACV49504

SEQ ID NO: 177371 - RNA, 1362 nt, Artificial Sequence
  derived and/or modified CDS sequence (opt4) from neuraminidase__InfluenzaA__ACV49537
augaaccccaaccagaagaucaucaccaucggcagcaucugcaugguggugggcaucaucagccugauccugcagaucggcaacaucaucagcaucuggaucagccacagcauccagaccggcaaccagaaccacaccggcaucugcaaccagggcaucaucaccuacaacgugguggccggccaggacagcaccagcgugauccugaccggcaacagcagccugugccccaucagaggcugggccauccacagcaaggacaacggcaucagaaucggcagcaagggcgacguguucgugaucagagagcccuucaucagcugcagccaccuggagugcagaaccuucuuccugacccagggcgcccugcugaacgacaagcacagcaacggcgccgugaaggacagaagccccuacagagcccugaugagcugccccgugggcgaggcccccagccccuacaacagcagauucgagagcguggccuggagcgccagcgccugccacgacggcaugggcuggcugaccaucggcaucagcggccccgacaacggcgccguggccgugcugaaguacaacggcaucaucaccgagaccaucaagagcuggagaaagaagauccugagaacccaggagagcgagugcaccugcgugaacggcagcugcuucaccaucaugaccgacggccccagcgacggccuggccagcuacaagaucuucaagaucgagaagggcaaggugaccaagagcaucgagcugaacgcccccaacagccacuacgaggagugcagcugcuaccccgacaccggcaaggugaugugcgugugcagagacaacuggcacggcagcaacagacccugggugagcuucgaccagaaccuggacuaccagaucggcuacaucugcagcggcguguucggcgacaaccccagacccaaggacggcaccggcagcugcggccccgugagcgccgacggcgccaacggcgugaagggcuucagcuacagauacggcaacggcguguggaucggcagaaccaagagcgacagcagcagacacggcuucgagaugaucugggaccccaacggcuggaccgagaccgacagcagauucagcgugagacaggacgugguggccaugaccgacagaagcggcuacagcggcagcuucgugcagcaccccgagcugaccggccuggacugcaugagacccugcuucuggguggagcugaucagaggcagacccgaggagaagaccaucuggaccagcggcagcaucaucagcuucugcggcgugaacagcgacaccguggacuggagcuggcccgacggcgccgagcugcccuucaccaucgacaaguga

SEQ ID NO: 177372 - RNA, 1362 nt, Artificial Sequence
  derived and/or modified CDS sequence (opt4) from neuraminidase__InfluenzaA__ACV49559
augaaccccaaccagaagaucaucaccaucggcagcaucugcaugguggugggcaucaucagccugauccugcagaucggcaacaucaucagcaucuggaucagccacagcauccaggccggcagcagcaccugggugaaccagaccuacgugaacaucagcaacaccaacgugguggccggccaggacgccaccagcgugauccugaccggcaacagcagccugugccccaucagaggcugggccaucuacagcaaggacaacggcaucagaaucggcagcaagggcgacaucuucgugaucagagagcccuucaucagcugcagccaccuggagugcagagccuucuuccugacccagggcgcccugcugaacgacaagcacagcaacggcaccgugaaggacagaagccccuacagagcccugaugagcugccccgugggcgaggcccccagccccuacaacagcagauucgagagcguggccuggagcgccagcgccugccacgacggcaugggcuggcugaccaucggcaucagcggccccgacaacggcgccguggccgugcugaaguacaacggcaucaucaccgagaccaucaagagcuggagaaagaagauccugagaacccaggagagcgagugcgccugcgugaacggcagcugcuucaccaucaugaccgacggccccagcgacggccccgccagcuacaagaucuucaagaucgagaagggcaaggugaccaagagcaucgagcuggacgcccccaacagccacuacgaggagugcagcugcuaccccgacaccggcaaggugaugugcgugugcagagacaacuggcacggcagcaacagacccugggugagcuucgaccagaaccuggacuaccagaucggcuacaucugcagcggcguguucggcgacacccccagacccaaggacggcaccggcagcugcggccccgugagcguggacggcgccaacggcgugaagggcuucagcuacagauacggcgacggcguguggaucggcagaaccaagagccagagcagcagacacggcuucgagaugaucugggaccccaacggcuggaccgagaccgacagcagauucagcgugagacaggacgugguggccaucaccgacuggagcggcuacagcggcagcuucgugcagcaccccgagcugaccggccuggacugcaugagacccugcuucuggguggagcugaucagaggccagcccaaggagaagaccaucuggaccagcggcagcagcaucagcuucugcggcgugaacagcgacaccguggacuggagcuggcccgacggcgccgagcugcccuucaccaucgacaaguga

SEQ ID NO: 177373 - RNA, 1395 nt, Artificial Sequence
  derived and/or modified CDS sequence (opt4) from neuraminidase__InfluenzaA__ACV49570
augaaccccaaccagaagaucaucaccaucggcagcaucugcaugguggugggcaucaucagccugauccugcagaucggcaacaucgugagcaucuggaucagccacagcauccagaccggcaaccagaaccacaccggcaccugcgaccagagcaucaucaccuacaagaacagcaccugggugaaccagaccuacgugaacgugguggccggcaaggacaccaccagcgugauccuggccggcaacagcagccugugccccaucagaggcugggccaucuacagcaaggacaacggcgugagaaucggcagcaagggcgacguguucgugaucagagagcccuucaucagcugcagccaccuggagugcagaaccuucuuccugacccagggcgcccugcugaacgacaagcacagcaacggcaccgugaaggacagaagccccuacagagcccugaugagcugccccgugggcgaggcccccagccccuacaacagcagauucgagagcguggccuggagcgccagcgccugccacgacggcaugggcuggcugaccaucggcaucagcggccccgacgacggcgccguggccgugcugaaguacaacggcaucaucaccgagaccaucaagagcuggagaaaggagauccugagaacccaggagagcgagugcgugugcgugaacggcagcugcuucaccaucaugaccgacggccccagcggcggccccgccagcuacaagaucuucaagaucgagaagggcaaggugaccaagagcaucgagcuggacgcccccaacagccacuacgaggagugcagcugcuaccccgacaccagcaaggugaugugcgugugcagagacaacuggcacggcagcaacagacccugggugagcuucgaccagaaccuggacuaccagaugggcuacaucugcagcggcguguucggcgacaaccccagacccaaggacggcaagggcagcugcggccccguguacguggacggcgccaacggcgugaagggcuucagcuacaaguacggcaacggcguguggaucggcagaaccaagagcaacagcagcagacagggcuucgagaugaucugggaccccaacggcuggaccgagaccgacagcaacuucuucaccaagcaggacgugguggccgugaccgacuggagcggcuacagcggcagcuucgugcagcaccccgagcugaccggccuggacugcaugagacccugcuucuggguggagcugaucagaggcagacccaaggagaacaccaucuggaccagcggcagcagcaucagcuucugcggcgugaacagcgacaccguggacuggagcuggcccgacggcgccgagcugcccuucaccaucgacaaguga

SEQ ID NO: 177374 - RNA, 1410 nt, Artificial Sequence; identical to SEQ ID NO: 176464
  derived and/or modified CDS sequence (opt4) from neuraminidase__InfluenzaA__ACV49581

SEQ ID NO: 177375 - RNA, 1410 nt, Artificial Sequence; identical to SEQ ID NO: 176464
  derived and/or modified CDS sequence (opt4) from neuraminidase__InfluenzaA__ACV49592

SEQ ID NO: 177376 - RNA, 1410 nt, Artificial Sequence
  derived and/or modified CDS sequence (opt4) from neuraminidase__InfluenzaA__ACV49603
augaaccccaaccagaagaucaucaccaucggcagcgugagccugaccaucgagaccgugugcuuccugaugcagaucgccauccuggccaccaccgugacccugcacuucaagcagcacgagugcgacagccccgccagcaaccaggugaugcccugcgagcccaucaucaucgagagaaacaucaccgagaucguguaccugaacaacaccaccaucgagaaggagaucugccccgaggugguggaguacagaaacuggagcaagccccagugccagaucaccggcuucgcccccuucagcaaggacaacagcaucagacugagcgccggcggcgacaucugggugaccagagagcccuacgugagcugcgaccccggcaagugcuaccaguucgcccugggccagggcaccacccuggacaacaagcacagcaacggcaccauccacgacagaaucccccacagaacccugcugaugaacgagcugggcgugcccuuccaccugggcaccaagcaggugugcguggccuggagcagcagcagcugccacgacggcaaggccuggcugcacgugugcgugaccggcgacgacagaaacgccaccgccagcuucaucuacgacggcagacugguggacagcaucggcagcuggagccagaacauccugagaacccaggagagcgagugcgugugcaucaacggcaccugcaccguggugaugaccgacggcagcgccagcggcagagccgacaccagaauccuguucaucaaggagggcaagaucgugcacaucagcccccugagcggcagcgcccagcacaucgaggagugcagcugcuaccccagauaccccgacgugagaugcaucugcagagacaacuggaagggcagcaacagacccgugaucgacaucaacauggaggacuacagcaucgacagcagcuacgugugcagcggccuggugggcgacacccccagaaacgacgacagcagcagcaacagcaacugcagagaccccaacaacgagagaggcaaccccggcgugaagggcugggccuucgacaacggcgacgacguguggaugggcagaaccaucagcaaggacagcagaagcggcuacgagaccuucaaggugaucggcggcuggagcacccccaacagcaagagccaggugaacagacaggugaucguggacaacaacaacuggagcggcuacagcggcaucuucagcguggagggcaagagcugcaucaacagaugcuucuacguggagcugaucagaggcagaccccaggagaccagagugugguggaccagcaacagcaucgugguguucugcggcaccagcggcaccuacggcaccggcagcuggcccgacggcgccaacaucaacuucaugcccaucuga

SEQ ID NO: 177377 - RNA, 1410 nt, Artificial Sequence
  derived and/or modified CDS sequence (opt4) from neuraminidase__InfluenzaA__ACV49625
augaaccccaaccagaagaccaucaccaucggcagcgugagccugaccaucgagaccgugugcuuccugaugcagaucgccauccuggccaccaccgugacccugcacuucaagcagcacgagugcgacagccccgccagcaaccaggugaugcccugcgagcccaucaucaucgagagaaacaucaccgagaucguguaccugaacaacaccaccaucgagaaggagaucugccccgaggugguggaguacagaaacuggagcaagccccagugccagaucaccggcuucgcccccuucagcaaggacaacagcaucagacugagcgccggcggcgacaucugggugaccagaggccccuacgugagcugcgaccccggcaagugcuaccaguucgcccugggccagggcaccacccuggacaacaagcacagcaacggcaccauccacgacagaaucccccacagaacccugcugaugaacgagcugggcgugcccuuccaccugggcaccaagcaggugugcguggccuggagcagcagcagcugccacgacggcaaggccuggcugcacgugugcgugaccggcgacgacagaaacgccaccgccagcuucaucuacgacggcagacugguggacagcaucggcagcuggagccagaacauccugagaacccaggagagcgagugcgugugcaucaacggcaccugcaccguggugaugaccgacggcagcgccagcggcagagccgacaccagaauccuguucaucaaggagggcaagaucgugcacaucagcccccugagcggcagcgcccagcacaucgaggagugcagcugcuaccccagauaccccgacgugagaugcaucugcagagacaacuggaagggcagcaacagacccgugaucgacaucaacauggaggacuacagcaucgacagcagcuacgugugcagcggccuggugggcgacacccccagaaacgacgacagcagcagcaacagcaacugcagagaccccaacaacgagagaggcaaccccggcgugaagggcugggccuucgacaacggcgacgacguguggaugggcagaaccaucagcaaggacagcagaagcggcuacgagaccuucaaggugaucggcggcuggagcacccccaacagcaagagccaggugaacagacaggugaucguggacaacaacaacuggagcggcuacagcggcaucuucagcguggagggcaagagcugcaucaacagaugcuucuacguggagcugaucagaggcagaccccaggagaccagagugugguggaccagcaacagcaucgugguguucugcggcaccagcggcaccuacggcaccggcagcuggcccgacggcgccaacaucaacuucaugcccaucuga

SEQ ID NO: 177378 - RNA, 1410 nt, Artificial Sequence; identical to SEQ ID NO: 176516
  derived and/or modified CDS sequence (opt4) from neuraminidase__InfluenzaA__ACV49647

SEQ ID NO: 177379 - RNA, 1413 nt, Artificial Sequence
  derived and/or modified CDS sequence (opt4) from neuraminidase__InfluenzaA__ACV49669
augaaccccaaccagaagaucaucaccaucggcagcaucugcauggccaucggcaucaucagccugauccugcagaucggcaacaucgugagcaucuggaucagccacagcauccagaccggcagccagaacuacaccggcaucugcaaccagagaaucaucaccuacgagaacagcaccugggugaaccagaccuacgugaacaucaacaacaccaacgugguggccggccaggacaccaccagcgugacccuggccggcaacagcagccugugccccaucagcggcugggccaucuacagcaaggacaacagcaucagaaucggcagcaagggcgacguguucgugaucagagagcccuucaucagcugcagccaccuggagugcagaaccuucuuccugacccagggcgcccugcugaacgacaagcacagcaacggcaccgugaaggacagaagccccuacagagcccugaugagcugccccaucggcgaggcccccagccccuacaacagcagauucgagagcguggccuggagcgccagcgccugccacgacggcaugggcuggcugaccaucggcaucagcggccccgacgacggcgccguggccgugcugaaguacaacggcaucaucaccgagaccaucaagagcuggagaaagagaauccugagaacccaggagagcgagugcgugugcgugaacggcagcugcuucaccaucaugaccgacggccccaacaacggccccgccagcuacaagaucuucaagaucgagaagggcaagaucaccaagagcaucgagcuggacgcccccaacagccacuacgaggagugcagcugcuaccccgacgccggcaccgugaugugcgugugcagagacaacuggcacggcagcaacagacccugggugagcuucaaccagaaccuggacuaccagaucggcuacaucugcagcggcguguucggcgacaaccccagacccaaggacggcaagggcagcugcggccccgugaccguggacggcgccgacggcgugaagggcuucagcuacagauacggcaacggcguguggaucggcagaaccaagagcaacagcagcagaagaggcuucgagaugaucugggaccccaacggcuggaccgacaccgacagcaaguuccuggugaagcaggacgugguggccaugaccgacuggagcggcuacagcggcagcuucgugcagcaccccgagcugaccggccuggacugcaugagacccugcuucuggguggagcugaucagaggcagacccagagagaacaccaccaucuggaccagcggcagcagcaucagcuucugcggcgugaacggcgacaccgccaacuggagcuggcccgacggcgccgagcugcccuucaccaucgacaaguga

SEQ ID NO: 177380 - RNA, 1413 nt, Artificial Sequence
  derived and/or modified CDS sequence (opt4) from neuraminidase__InfluenzaA__ACV49679
augaaccccaaccagaagaucaucaccaucggcagcaucagcaucgccaucggcaucaucagccugaugcugcagaucggcagcaucaucagcaucugggccagccacagcaucagaaccggcagccagaacaacaccggcaucugcaaccagagaaucaucaccuacgagaacagcaccugggugaaccacaccuacgugaacaucaacaacaccaacgugguggccggcgaggacaagaccagcgugacccuggccggcaacagcagccugugcagcaucagcggcugggccaucuacaccaaggacaacagcaucagaaucggcagcaagggcgacguguucgugaucagagagcccuucaucagcugcagccaccuggagugcagaaccuucuuccugacccagggcgcccugcugaacgacaagcacagcaacggcaccgugaaggacagaagccccuacagagcccugaugagcugcccccugggcgaggcccccagccccuacaacagcaaguucgagagcguggccuggagcgccagcgccugccacgacggcaugggcuggcugaccaucggcaucagcggccccgacaacggcgccguggccgugcugaaguacaacggcaucaucaccggcaccaucaagagcuggaagaagcagauccugagaacccaggagagcgagugcgugugcaugaacggcagcugcuucaccaucaugaccgacggccccagcaacaaggccgccagcuacaagaucuucaagaucgagaagggcaaggugaccaagagcaucgagcugaacgcccccaacuucuacuacgaggagugcagcugcuaccccgacaccggcaucgugaugugcgugugcagagacaacuggcacggcagcaacagacccugggugagcuucaaccagaaccuggacuaccagaucggcuacaucugcagcggcguguucggcgacaaccccagacccgaggacggcgagggcagcugcaaccccgugaccguggacggcgccaacggcgugaagggcuucagcuacaaguacggcaacggcguguggaucggcagaaccaagagcaacagacugagaaagggcuucgagaugaucugggaccccaacggcuggaccaacaccgacagcgacuucagcgugaagcaggacgugguggccaucaccgacuggagcggcuacagcggcagcuucgugcagcaccccgagcugaccggccuggacugcaucagacccugcuucuggguggagcuggugagaggccugcccagagagaacaccaccaucuggaccagcggcagcagcaucagcuucugcggcgugaacagcgacaccgccaacuggagcuggcccgacggcgccgagcugcccuucaccaucgacaaguga

SEQ ID NO: 177381 - RNA, 1410 nt, Artificial Sequence
  derived and/or modified CDS sequence (opt4) from neuraminidase__InfluenzaA__ACV53442
augaaccccaaccagaagaucaucaccaucggcagcgugugcaugaccaucggcauggccaaccugauccugcagaucggcaacaucaucagcaucuggaucagccacagcauccagcugggcaaccagaaccagaucgagaccugcaaccagagcgugaucaccuacgagaacaacaccugggugaaccagaccuacgugaacaucagcaacaccaacuucgccgccggccagagcguggugagcgugaagcuggccggcaacagcagccugugccccgugagcggcugggccaucuacagcaaggacaacagcgugagaaucggcagcaagggcgacguguucgugaucagagagcccuucaucagcugcagcccccuggagugcagaaccuucuuccugacccagggcgcccugcugaacgacaagcacagcaacggcaccaucaaggacagaagccccuacagaacccugaugagcugccccaucggcgaggugcccagccccuacaacagcagauucgagagcguggccuggagcgccagcgccugccacgacggcaucaacuggcugaccaucggcaucagcggccccgacaacggcgccguggccgugcugaaguacaacggcaucaucaccgacaccaucaagagcuggagaaacaacauccugagaacccaggagagcgagugcgccugcgugaacggcagcugcuucaccgugaugaccgacggccccagcgacggccaggccagcuacaagaucuucagaaucgagaagggcaagaucgugaagagcguggagaugaacgcccccaacuaccacuacgaggagugcagcugcuaccccgacagcagcgagaucaccugcgugugcagagacaacuggcacggcagcaacagacccugggugagcuucaaccagaaccuggaguaccagaucggcuacaucugcagcggcaucuucggcgacaaccccagacccaacgacaagaccggcagcugcggccccgugagcagcaacggcgccaacggcgugaagggcuucagcuucaaguacggcaacggcguguggaucggcagaaccaagagcaucagcagcagaaacggcuucgagaugaucugggaccccaacggcuggaccggcaccgacaacaacuucagcaucaagcaggacaucgugggcaucaacgaguggagcggcuacagcggcagcuucgugcagcaccccgagcugaccggccuggacugcaucagacccugcuucuggguggagcugaucagaggcagacccaaggagaacaccaucuggaccagcggcagcagcaucagcuucugcggcgugaacagcgacaccgugggcuggagcuggcccgacggcgccgagcugcccuucaccaucgacaaguga

SEQ ID NO: 177382 - RNA, 1410 nt, Artificial Sequence; identical to SEQ ID NO: 177165
  derived and/or modified CDS sequence (opt4) from neuraminidase__InfluenzaA__ACV53452

SEQ ID NO: 177383 - RNA, 1410 nt, Artificial Sequence; identical to SEQ ID NO: 176788
  derived and/or modified CDS sequence (opt4) from neuraminidase__InfluenzaA__ACV53462

SEQ ID NO: 177384 - RNA, 1410 nt, Artificial Sequence; identical to SEQ ID NO: 176798
  derived and/or modified CDS sequence (opt4) from neuraminidase__InfluenzaA__ACV53472

SEQ ID NO: 177385 - RNA, 1410 nt, Artificial Sequence
  derived and/or modified CDS sequence (opt4) from neuraminidase__InfluenzaA__ACV53482
augaaccccaaccagaagaucaucaccaucggcagcgugugcaugaccaucggcauggccaaccugauccugcagaucggcaacaucaucagcaucuggaucagccacagcauccagcugggcaaccagaaccagaucgagaccugcaaccagagcgugaucaccuacgagaacaacaccugggugaaccagaccuacgugaacaucagcaacaccaacuucgccgccggccagagcguggugagcgugaagcuggccggcaacagcagccugugccccgugagcggcugggccaucuacagcaaggacaacagcgugagaaucggcagcaagggcgacguguucgugaucagagagcccuucaucagcugcagcccccuggagugcagaaccuucuuccugacccagggcgcccugcugaacgacaagcacagcaacggcaccaucaaggacagaagccccuacagaacccugaugagcugccccaucggcgaggugcccagccccuacaacagcagauucgagagcguggccuggagcgccagcgccugccacgacggcaucaacuggcugaccaucggcaucagcggccccgacaacggcgccguggccgugcugaaguacaacggcaucaucaccgacaccaucaagagcuggagaaacaacauccugagaacccaggagagcgagugcgccugcgugaacggcagcugcuucaccgugaugaccgacggccccagcaacggccaggccagcuacaagaucuucagaaucgagaagggcaagaucgugaagagcguggagaugaacgcccccaacuaccacuacgaggagugcagcugcuaccccgacagcggcgagaucaccugcgugugcagagacaacuggcacggcagcaacagacccugggugagcuucaaccagaaccuggaguaccagaucggcuacaucugcagcggcaucuucggcgacaaccccagacccaacgacaagaccggcagcugcggccccgugagcagcaacggcgccaacggcgugaagggcuucagcuucaaguacggcaacggcguguggaucggcagaaccaagagcaucagcagcagaaacggcuucgagaugaucugggaccccaacggcuggaccgccaccgacaacaacuucagcaucaagcaggacaucgugggcaucaacgaguggagcggcuacagcggcagcuucgugcagcaccccgagcugaccggccuggacugcaucagacccugcuucuggguggagcugaucagaggcagacccaaggagaacaccaucuggaccagcggcagcagcaucagcuucugcggcgugaacagcgacaccgugggcuggagcuggcccgacggcgccgagcugcccuucaccaucgacaaguga

SEQ ID NO: 177386 - RNA, 1410 nt, Artificial Sequence
  derived and/or modified CDS sequence (opt4) from neuraminidase__InfluenzaA__ACV53492
augaaccccaaccagaagaucaucaccaucggcagcgugugcaugaccaucggcauggccaaccugauccugcagaucggcaacaucaucagcaucuggaucagccacagcauccagcugggcaaccagaaccagaucgagaccugcaaccagagcgugaucaccuacgagaacaacaccugggugaaccagaccuacgugaacaucagcaacaccaacuucgccgccggccagagcguggugagcgugaagcuggccggcaacagcagccugugccccgugagcggcugggccaucuacagcaaggacaacagcaucagaaucggcagcaagggcgacguguucgugaucagagagcccuucaucagcugcagcccccuggagugcagaaccuucuuccugacccagggcgcccugcugaacgacaagcacagcaacggcaccaucaaggacagaagccccuacagaacccugaugagcugccccaucggcgaggugcccagccccuacaacagcagauucgagagcguggccuggagcgccagcgccugccacgacggcaucaacuggcugaccaucggcaucagcggccccgacaacggcgccguggccgugcugaaguacaacggcaucaucaccgacaccaucaagagcuggagaaacaacauccugagaacccaggagagcgagugcgccugcgugaacggcagcugcuucaccgugaugaccgacggccccagcgacggccaggccagcuacaagaucuucagaaucgagaagggcaagaucgugaagagcguggagaugaacgcccccaacuaccacuacgaggagugcagcugcuaccccgacagcagcgagaucaccugcgugugcagagacaacuggcacggcagcaacagacccugggugagcuucaaccagaaccuggaguaccagaucggcuacaucugcagcggcaucuucggcgacaaccccagacccaacgacaaggccggcagcugcggccccgugagcagcaacggcgccaacggcgugaagggcuucagcuucaaguacggcaacggcguguggaucggcagaaccaagagcaucagcagcagaaacggcuucgagaugaucugggaccccaacggcuggaccgagaccgacaacaacuuccugaucaagcaggacaucgugggcaucaacgaguggagcggcuacagcggcagcuucgugcagcaccccgagcugaccggccuggacugcaucagacccugcuucuggguggagcugaucagaggcagacccaaggagaacaccaucuggaccagcggcagcagcaucagcuucugcggcgugaacagcgacaccgugggcuggagcuggcccgacggcgccgagcugcccuucaccaucgacaaguga

SEQ ID NO: 177387 - RNA, 1410 nt, Artificial Sequence
  derived and/or modified CDS sequence (opt4) from neuraminidase__InfluenzaA__ACV53502
augaaccccaaccagaagaucaucaccaucggcagcgugugcaugaccaucggcauggccaaccugauccugcagaucggcaacaucaucagcaucuggaucagccacagcauccagcugggcaaccagaaccagaucgagaccugcaaccagagcgugaucaccuacgagaacaacaccugggugaaccagaccuacgugaacaucagcaacaccaacuucgccgccggccagagcguggugagcgugaagcuggccggcaacagcagccugugccccgugagcggcugggccaucuacagcaaggacaacagcaucagaaucggcagcaagggcgacguguucgugaucagagagcccuucaucagcugcagcccccuggagugcagaaccuucuuccugacccagggcgcccugcugaacgacaagcacagcaacggcaccaucaaggacagaagccccuacagaacccugaugagcugccccaucggcgaggugcccagccccuacaacagcagauucgagagcguggccuggagcgccagcgccugccacgacggcaucaacuggcugaccaucggcaucagcggccccgacaacggcgccguggccgugcugaaguacaacggcaucaucaccgacaccaucaagagcuggagaaacaacauccugagaacccaggagagcgagugcgccugcgugaacggcagcugcuucaccgugaugaccgacggccccagcgacggccaggccagcuacaagaucuucagaaucgagaagggcaagaucgugaagagcguggagaugaacgcccccaacuaccacuacgaggagugcagcugcuaccccgacagcagcgagaucaccugcgugugcagagacaacuggcacggcagcaacagacccugggugagcuucaaccagaaccuggaguaccagaucggcuacaucugcagcggcaucuucggcgacaaccccagacccaacgacaaggccggcagcugcggccccgugagcagcaacggcgccaacggcgugaagggcuucagcuucaaguacggcaacggcguguggaucggcagaaccaagagcaucagcagcagaaacggcuucgagaugaucugggaccccaacggcuggaccggcaccgacaacaacuuccugaucaagcaggacaucgugggcaucaacgaguggagcggcuacagcggcagcuucgugcagcaccccgagcugaccggccuggacugcaucagacccugcuucuggguggagcugaucagaggcagacccaaggagaacaccaucuggaccagcggcagcagcaucagcuucugcggcgugaacagcgacaccgugggcuggagcuggcccgacggcgccgagcugcccuucaccaucgacaaguga

SEQ ID NO: 177388 - RNA, 1410 nt, Artificial Sequence
  derived and/or modified CDS sequence (opt4) from neuraminidase__InfluenzaA__ACV53891
augaaccccaaccagaagaucaucaccaucggcagcgugugcaugaccaucggcauggccaaccugauccugcagaucggcaacaucaucagcaucuggaucagccacagcauccagcugggcaaccagaaccagaucgagaccugcaaccagagcgugaucaccuacgagaacaacaccugggugaaccagaccuacgugaacaucagcaacaccaacuucgccgccggccagagcguggugagcgugaagcuggccggcaacagcagccugugccccgugagcggcugggccaucuacagcaaggacaacagcaucagaaucggcagcaagggcgacguguucgugaucagagagcccuucaucagcugcagcccccuggagugcagaaccuucuuccugacccagggcgcccugcugaacgacaagcacagcaacggcaccaucaaggacagaagccccuacagaacccugaugagcugccccaucggcgaggugcccagccccuacaacagcagauucgagagcguggccuggagcgccagcgccugccacgacggcaucaacuggcugaccaucggcaucagcggccccgacaacggcgccguggccgugcugaaguacaacggcaucaucaccgacaccaucaagagcuggagaaacaagauccugagaacccaggagagcgagugcgccugcgugaacggcagcugcuucaccgugaugaccgacggccccagcgacggccaggccagcuacaagaucuucagaaucgagaagggcaagaucgugaagagcguggagaugaacgcccccaacuaccacuacgaggagugcagcugcuaccccgacagcagcgagaucaccugcgugugcagagacaacuggcacggcagcaacagacccugggugagcuucaaccagaaccuggaguaccagaucggcuacaucugcagcggcaucuucggcgacaaccccagacccaacgacaagaccggcagcugcggccccgugagcagcaacggcgccaacggcgugaagggcuucagcuucaaguacggcaacggcguguggaucggcagaaccaagagcaucagcagcagaaacggcuucgagaugaucugcgaccccaacggcuggaccggcaccgacaacaacuucagcaucaagcaggacaucgugggcaucaacgaguggagcggcuacagcggcagcuucgugcagcaccccgagcugaccggccuggacugcaucagacccugcuucuggguggagcugaucagaggcagacccaaggagaacaccaucuggaccagcggcagcagcaucagcuucugcggcgugaacagcgacaccgugggcuggagcuggcccgacggcgccgagcugcccuucaccaucgacaaguga

SEQ ID NO: 177389 - RNA, 1410 nt, Artificial Sequence
  derived and/or modified CDS sequence (opt4) from neuraminidase__InfluenzaA__ACV53901
augaaccccaaccagaagaucaucaccaucggcagcgugugcaugaccaucggcauggccaaccugauccugcagaucggcaacaucaucagcaucuggaucagccacagcauccagcugggcaaccagaaccagaucgagaccugcaaccagagcgugaucaccuacgagaacaacaccugggugaaccagaccuacgugaacaucagcaacaccaacuucgccgccggccagagcguggugagcgugaagcuggccggcaacagcagccugugccccgugagcggcugggccaucuacagcaaggacaacagcaucagaaucggcagcaagggcgacguguucgugaucagagagcccuucaucagcugcagcccccuggagugcagaaccuucuuccugacccagggcgcccugcugaacgacaagcacagcaacggcaccaucaaggacagaagccccuacagaacccugaugagcugccccaucggcgaggugcccagccccuacaacagcagauucgagagcguggccuggagcgccagcgccugccacgacggcaucaacuggcugaccaucggcaucagcggccccgacaacggcgccguggccgugcugaaguacaacggcaucaucaccgacaccaucaagagcuggagaaacaacauccugagaacccaggagagcgagugcgccugcgugaacggcagcugcuucaccgugaugaccgacggccccagcgacggccaggccagcuacaagaucuucagaaucgagaagggcaagaucgugaagagcguggagaugaacgcccccaacuaccacuacgaggagugcagcugcuaccccgacagcagcgagaucaccugcgugugcagagacaacuggcacggcagcaacagacccugggugagcuucaaccagaaccuggaguaccagaucggcuacaucugcagcggcaucuucggcgacaaccccagacccaacgacaagaccggcagcugcggccccgugagcagcaacggcgccaacggcgugaagggcuucagcuucaaguacggcaacggcguguggaucggcagaaccaagagcaucagcagcagaaacggcuucgagaugaucugggaccccaacggcuggaccggcaccgacaacaacuucagcaucaagcaggacaucgugggcaucaacgaguggagcggcuacagcagaagcuucgugcagcaccccgagcugaccggccuggacugcaucagacccugcuucuggguggagcugaucagaggcagacccaaggagaacaccaucuggaccagcggcagcagcaucagcuucugcggcgugaacagcgacaccgugggcuggagcuggcccgacggcgccgagcugcccuucaccaucgacaaguga

SEQ ID NO: 177390 - RNA, 1410 nt, Artificial Sequence; identical to SEQ ID NO: 176798
  derived and/or modified CDS sequence (opt4) from neuraminidase__InfluenzaA__ACV53911

SEQ ID NO: 177391 - RNA, 1410 nt, Artificial Sequence; identical to SEQ ID NO: 176788
  derived and/or modified CDS sequence (opt4) from neuraminidase__InfluenzaA__ACV67088

SEQ ID NO: 177392 - RNA, 1410 nt, Artificial Sequence; identical to SEQ ID NO: 176798
  derived and/or modified CDS sequence (opt4) from neuraminidase__InfluenzaA__ACV67168

SEQ ID NO: 177393 - RNA, 1410 nt, Artificial Sequence; identical to SEQ ID NO: 176788
  derived and/or modified CDS sequence (opt4) from neuraminidase__InfluenzaA__ACV67169

SEQ ID NO: 177394 - RNA, 1410 nt, Artificial Sequence; identical to SEQ ID NO: 176798
  derived and/or modified CDS sequence (opt4) from neuraminidase__InfluenzaA__ACV67171

SEQ ID NO: 177395 - RNA, 1410 nt, Artificial Sequence; identical to SEQ ID NO: 176798
  derived and/or modified CDS sequence (opt4) from neuraminidase__InfluenzaA__ACV67172

SEQ ID NO: 177396 - RNA, 1410 nt, Artificial Sequence; identical to SEQ ID NO: 176828
  derived and/or modified CDS sequence (opt4) from neuraminidase__InfluenzaA__ACV67173

SEQ ID NO: 177397 - RNA, 1410 nt, Artificial Sequence; identical to SEQ ID NO: 176788
  derived and/or modified CDS sequence (opt4) from neuraminidase__InfluenzaA__ACV67174

SEQ ID NO: 177398 - RNA, 1410 nt, Artificial Sequence
  derived and/or modified CDS sequence (opt4) from neuraminidase__InfluenzaA__ACV67175
augaaccccaaccagaagaucaucaccaucggcagcgugugcaugaccaucggcauggccaaccugauccugcagaucggcaacaucaucagcaucuggaucagccacagcauccagcugggcaaccagaaccagaucgagaccugcaaccagagcgugaucaccuacgagaacaacaccugggugaaccagaccuacgugaacaucagcaacaccaacuucgccgccggccagagcguggugagcgugaagcuggccggcaacagcagccugugccccgugagcggcugggccaucuacagcaaggacaacagcaucagaaucggcagcaagggcgacguguucgugaucagagagcccuucaucagcugcagcccccuggagugcagaaccuucuuccugacccagggcgcccugcugaacgacaagcacagcaacggcaccaucaaggacagaagccccuacagaacccugaugagcugccccaucggcgaggugcccagccccuacaacagcagauucgagagcguggccuggagcgccagcgccugccacgacggcaucaacuggcugaccaucggcaucagcggccccgacaacggcgccguggccgugcugaaguacaacggcaucaucaccgacaccaucaagagcuggagaaacaacauccugagaacccaggagagcgagugcgccugcgugaacggcagcugcuucaccgugaugaccgacggccccagcgacggccaggccagcuacaagaucuucagaaucgagaagggcaagaucgugaagagcguggagaugaacgcccccaacuaccacuacgaggagugcagcugcuaccccgacagcagcgagaucaccugcgugugcagagacaacuggcacggcagcaacagacccugggugagcuucaaccagaaccuggaguaccagaucggcuacaucugcagcggcaucuucggcgacaaccccagacccaacgacaagaccggcagcugcggccccgugagcagcaacggcagcaacggcgugaagggcuucagcuucaaguacggcaacggcguguggaucggcagaaccaagagcaucagcagcagaaacggcuucgagaugaucugggaccccaacggcuggaccggcaccgacaacaacuucagcaucaagcaggacaucgugggcaucaacgaguggagcggcuacagcggcagcuucgugcagcaccccgagcugaccggccuggacugcaucagacccugcuucuggguggagcugaucagaggcagacccaaggagaacaccaucuggaccagcggcagcagcaucagcuucugcggcgugaacagcgacaccgugggcuggagcuggcccgacggcgccgagcugcccuucaccaucgacaaguga

SEQ ID NO: 177399 - RNA, 1410 nt, Artificial Sequence; identical to SEQ ID NO: 176798
  derived and/or modified CDS sequence (opt4) from neuraminidase__InfluenzaA__ACV67176

SEQ ID NO: 177400 - RNA, 1410 nt, Artificial Sequence; identical to SEQ ID NO: 176788
  derived and/or modified CDS sequence (opt4) from neuraminidase__InfluenzaA__ACV67177

SEQ ID NO: 177401 - RNA, 1410 nt, Artificial Sequence; identical to SEQ ID NO: 176798
  derived and/or modified CDS sequence (opt4) from neuraminidase__InfluenzaA__ACV67178

SEQ ID NO: 177402 - RNA, 1410 nt, Artificial Sequence; identical to SEQ ID NO: 176798
  derived and/or modified CDS sequence (opt4) from neuraminidase__InfluenzaA__ACV67179

SEQ ID NO: 177403 - RNA, 1410 nt, Artificial Sequence
  derived and/or modified CDS sequence (opt4) from neuraminidase__InfluenzaA__ACV67180
augaaccccaaccagaagaucaucaccaucggcagcgugugcaugaccaucggcauggccaaccugauccugcagaucggcaacaucaucagcaucuggaucagccacagcauccagcugggcaaccagaaccagaucgagaccugcaaccagagcgugaucaccuacgagaacaacaccugggugaaccagaccuacgugaacaucagcaacaccaacuucgccgccggccagcccguggugagcgugaagcuggccggcaacagcagccugugccccgugagcggcugggccaucuacagcaaggacaacagcaucagaaucggcagcaagggcgacguguucgugaucagagagcccuucaucagcugcagcccccuggagugcagaaccuucuuccugacccagggcgcccugcugaacgacaagcacagcaacggcaccaucaaggacagaagccccuacagaacccugaugagcugccccaucggcgaggugcccagccccuacaacagcagauucgagagcguggccuggagcgccagcgccugccacgacggcaucaacuggcugaccaucggcaucagcggccccgacaacggcgccguggccgugcugaaguacaacggcaucaucaccgacaccaucaagagcuggagaaacaacauccugagaacccaggagagcgagugcgccugcgugaacggcagcugcuucaccgugaugaccgacggccccagcgacggccaggccagcuacaagaucuucagaaucgagaagggcaagaucgugaagagcguggagaugaacgcccccaacuaccacuacgaggagugcagcugcuaccccgacagcagcgagaucaccugcgugugcagagacaacuggcacggcagcaacagacccugggugagcuucaaccagaaccuggaguaccagaucggcuacaucugcagcggcaucuucggcgacaaccccagacccaacgacaagaccggcagcugcggccccgugagcagcaacggcgccaacggcgugaagggcuucagcuucaaguacggcaacggcguguggaucggcagaaccaagagcaucagcagcagaaacggcuucgagaugaucugggaccccaacggcuggaccggcaccgacaacaacuucagcaucaagcaggacaucgugggcaucaacgaguggagcggcuacagcggcagcuucgugcagcaccccgagcugaccggccuggacugcaucagacccugcuucuggguggagcugaucagaggcagacccaaggagaacaccaucuggaccagcggcagcagcaucagcuucugcggcgugaacagcgacaccgugggcuggagcuggcccgacggcgccgagcugcccuucaccaucgacaaguga

SEQ ID NO: 177404 - RNA, 1410 nt, Artificial Sequence
  derived and/or modified CDS sequence (opt4) from neuraminidase__InfluenzaA__ACV67181
augaaccccaaccagaagaucaucaccaucggcagcgugugcaugaccaucggcauggccaaccugauccugcagaucggcaacaucaucagcaucuggaucagccacagcauccagcugggcaaccagaaccagaucgagaccugcaaccagagcgugaucaccuacgagaacaacaccugggugaaccagaccuacgugaacaucagcaacaccaacuucgccgccggccagagcguggugagcgugaagcuggccggcaacagcagccugugccccgugagcggcugggccaucuacagcaaggacaacagcaucagaaucggcagcaagggcgacguguucaucaucagagagcccuucaucagcugcagcccccuggagugcagaaccuucuuccugacccagggcgcccugcugaacgacaagcacagcaacggcaccaucaaggacagaagccccuacagaacccugaugagcugccccaucggcgaggugcccagccccuacaacagcagauucgagagcguggccuggagcgccagcgccugccacgacggcaucaacuggcugaccaucggcaucagcggccccgacaacggcgccguggccgugcugaaguacaacggcaucaucaccgacaccaucaagagcuggagaaacaacauccugagaacccaggagagcgagugcgccugcgugaacggcagcugcuucaccgugaugaccgacggccccagcgacggccaggccagcuacaagaucuucagaaucgagaagggcaagaucaucaagagcguggagaugaacgcccccaacuaccacuacgaggagugcagcugcuaccccgacagcagcgagaucaccugcgugugcagagacaacuggcacggcagcaacagacccugggugagcuucaaccagaaccuggaguaccagaucggcuacaucugcagcggcaucuucggcgacaaccccagacccaacgacaagaccggcagcugcggccccgugagcagcaacggcgccaacggcgugaagggcuucagcuucaaguacggcaacggcguguggaucggcagaaccaagagcaucagcagcagaaacggcuucgagaugaucugggaccccaacggcuggaccggcaccgacaacaacuucagcaucaagcaggacaucgugggcaucaacgaguggagcggcuacagcggcagcuucgugcagcaccccgagcugaccggccuggacugcaucagacccugcuucuggguggagcugaucagaggcagacccaaggagaacaccaucuggaccagcggcagcagcaucagcuucugcggcgugaacagcgacaccgugggcuggagcuggcccgacggcgccgagcugcccuucaccaucgacaaguga

SEQ ID NO: 177405 - RNA, 1410 nt, Artificial Sequence; identical to SEQ ID NO: 177222
  derived and/or modified CDS sequence (opt4) from neuraminidase__InfluenzaA__ACV67182

SEQ ID NO: 177406 - RNA, 1410 nt, Artificial Sequence
  derived and/or modified CDS sequence (opt4) from neuraminidase__InfluenzaA__ACV67183
augaaccccaaccagaagaucaucaccaucggcagcgugugcaugaccaucggcauggccaaccugauccugcagaucggcaacaucaucagcaucuggaucagccacagcauccagcugggcaaccagaaccagaucgagaccugcaaccagagcgugaucaccuacgagaacaacaccugggugaaccagaccuacgugaacaucagcaacaccaacuucgccgccggccagagcguggugagcgugaagcuggccggcaacagcagccugugccccgugagcggcugggccaucuacagcaaggacaacagcgugagaaucggcagcaagggcgacguguucgugaucagagagcccuucaucagcugcagcccccuggagugcagaaccuucuuccugacccagggcgcccugcugaacgacaagcacagcaacggcaccaucaaggacagaagccccuacagaacccugaugagcugccccaucggcgaggugcccagccccuacaacagcagauucgagagcguggccuggagcgccagcgccugccacgacggcaucaacuggcugaccaucggcaucagcggccccgacaacggcgccguggccgugcugaaguacaacggcaucaucaccgacaccaucaagagcuggagaaacaacauccugagaacccaggagagcgagugcgccugcgugaacggcagcugcuucaccgugaugaccgacggccccagcaacggccaggccagcuacaagaucuucagaaucgagaagggcaagaucgugaagagcguggagaugaacgcccccaacuaccacuacgaggagugcagcugcuaccccgacagcaacgagaucaccugcgugugcagagacaacuggcacggcagcaacagacccugggugagcuucaaccagaaccuggaguaccagaucggcuacaucugcagcggcaucuucggcgacaaccccagacccaacgacaagaccggcagcugcggccccgugagcagcaacggcgccaacggcgugaagggcuucagcuucaaguacggcaacggcguguggaucggcagaaccaagagcaucaacagcagaaacggcuucgagaugaucugggaccccaacggcuggaccggcaccgacaacaacuucagcaucaagcaggacaucgugggcaucaacgaguggagcggcuacagcggcagcuucgugcagcaccccgagcugaccggccuggacugcaucagacccugcuucuggguggagcugaucagaggcagacccaaggagaacaccaucuggaccagcggcagcagcaucagcuucugcggcgugaacagcgacaccgugggcuggagcuggcccgacggcgccgagcugcccuucaccaucgacaaguga

SEQ ID NO: 177407 - RNA, 1410 nt, Artificial Sequence; identical to SEQ ID NO: 176798
  derived and/or modified CDS sequence (opt4) from neuraminidase__InfluenzaA__ACV67184

SEQ ID NO: 177408 - RNA, 1410 nt, Artificial Sequence; identical to SEQ ID NO: 176788
  derived and/or modified CDS sequence (opt4) from neuraminidase__InfluenzaA__ACV67186

SEQ ID NO: 177409 - RNA, 1410 nt, Artificial Sequence; identical to SEQ ID NO: 176798
  derived and/or modified CDS sequence (opt4) from neuraminidase__InfluenzaA__ACV67187

SEQ ID NO: 177410 - RNA, 1410 nt, Artificial Sequence; identical to SEQ ID NO: 176798
  derived and/or modified CDS sequence (opt4) from neuraminidase__InfluenzaA__ACV67188

SEQ ID NO: 177411 - RNA, 1410 nt, Artificial Sequence; identical to SEQ ID NO: 176828
  derived and/or modified CDS sequence (opt4) from neuraminidase__InfluenzaA__ACV67189

SEQ ID NO: 177412 - RNA, 1410 nt, Artificial Sequence; identical to SEQ ID NO: 176828
  derived and/or modified CDS sequence (opt4) from neuraminidase__InfluenzaA__ACV67190

SEQ ID NO: 177413 - RNA, 1410 nt, Artificial Sequence; identical to SEQ ID NO: 176788
  derived and/or modified CDS sequence (opt4) from neuraminidase__InfluenzaA__ACV67191

SEQ ID NO: 177414 - RNA, 1410 nt, Artificial Sequence; identical to SEQ ID NO: 176828
  derived and/or modified CDS sequence (opt4) from neuraminidase__InfluenzaA__ACV67192

SEQ ID NO: 177415 - RNA, 1410 nt, Artificial Sequence; identical to SEQ ID NO: 176828
  derived and/or modified CDS sequence (opt4) from neuraminidase__InfluenzaA__ACV67193

SEQ ID NO: 177416 - RNA, 1410 nt, Artificial Sequence; identical to SEQ ID NO: 176798
  derived and/or modified CDS sequence (opt4) from neuraminidase__InfluenzaA__ACV67194

SEQ ID NO: 177417 - RNA, 1410 nt, Artificial Sequence; identical to SEQ ID NO: 176798
  derived and/or modified CDS sequence (opt4) from neuraminidase__InfluenzaA__ACV67195

SEQ ID NO: 177418 - RNA, 1410 nt, Artificial Sequence; identical to SEQ ID NO: 176798
  derived and/or modified CDS sequence (opt4) from neuraminidase__InfluenzaA__ACV67196

SEQ ID NO: 177419 - RNA, 1410 nt, Artificial Sequence; identical to SEQ ID NO: 176788
  derived and/or modified CDS sequence (opt4) from neuraminidase__InfluenzaA__ACV67197

SEQ ID NO: 177420 - RNA, 1410 nt, Artificial Sequence; identical to SEQ ID NO: 176788
  derived and/or modified CDS sequence (opt4) from neuraminidase__InfluenzaA__ACV67199

SEQ ID NO: 177421 - RNA, 1410 nt, Artificial Sequence; identical to SEQ ID NO: 176788
  derived and/or modified CDS sequence (opt4) from neuraminidase__InfluenzaA__ACV67200

SEQ ID NO: 177422 - RNA, 1410 nt, Artificial Sequence; identical to SEQ ID NO: 176788
  derived and/or modified CDS sequence (opt4) from neuraminidase__InfluenzaA__ACV67201

SEQ ID NO: 177423 - RNA, 1410 nt, Artificial Sequence; identical to SEQ ID NO: 176788
  derived and/or modified CDS sequence (opt4) from neuraminidase__InfluenzaA__ACV67202

SEQ ID NO: 177424 - RNA, 1410 nt, Artificial Sequence; identical to SEQ ID NO: 176798
  derived and/or modified CDS sequence (opt4) from neuraminidase__InfluenzaA__ACV67203

SEQ ID NO: 177425 - RNA, 1410 nt, Artificial Sequence; identical to SEQ ID NO: 176798
  derived and/or modified CDS sequence (opt4) from neuraminidase__InfluenzaA__ACV67204

SEQ ID NO: 177426 - RNA, 1410 nt, Artificial Sequence; identical to SEQ ID NO: 176798
  derived and/or modified CDS sequence (opt4) from neuraminidase__InfluenzaA__ACV67205

SEQ ID NO: 177427 - RNA, 1410 nt, Artificial Sequence
  derived and/or modified CDS sequence (opt4) from neuraminidase__InfluenzaA__ACV67206
augaaccccaaccagaagaucaucaccaucggcagcgugugcaugaccaucggcauggccaaccugauccugcagaucggcaacaucaucagcaucuggaucagccacagcauccagcugggcaaccagaaccagaucgagaccugcaaccagagcgugaucaccuacgagaacaacaccugggugaaccagaccuacgugaacaucagcaacaccaacuucgccgccggccagagcauggugagcgugaagcuggccggcaacagcagccugugccccgugagcggcugggccaucuacagcaaggacaacagcgugagaaucggcagcaagggcgacguguucgugaucagagagcccuucaucagcugcagcccccuggagugcagaaccuucuuccugacccagggcgcccugcugaacgacaagcacagcaacggcaccaucaaggacagaagccccuacagaacccugaugagcugccccaucggcgaggugcccagccccuacaacagcagauucgagagcguggccuggagcgccagcgccugccacgacggcaucaacuggcugaccaucggcaucagcggccccgacaacggcgccguggccgugcugaaguacaacggcaucaucaccgacaccaucaagagcuggagaaacaacauccugagaacccaggagagcgagugcgccugcgugaacggcagcugcuucaccgugaugaccgacggccccagcaacggccaggccagcuacaagaucuucagaaucgagaagggcaagaucgugaagagcguggagaugaacgcccccaacuacuacuacgaggagugcagcugcuaccccgacagcagcgagaucaccugcgugugcagagacaacuggcacggcagcaacagacccugggugagcuucaaccagaaccuggaguaccagaucggcuacaucugcagcggcaucuucggcgacaaccccagacccaacgacaagaccggcagcugcggccccgugagcagcaacggcgccaacggcgugaagggcuucagcuucaaguacggcaacggcguguggaucggcagaaccaagagcaucagcagcagaaacggcuucgagaugaucugggaccccaacggcuggaccggcaccgacaacaacuucagcaucaagcaggacaucgugggcaucaacgaguggagcggcuacagcggcagcuucgugcagcaccccgagcugaccggccuggacugcaucagacccugcuucuggguggagcugaucagaggcagacccaaggagaacaccaucuggaccagcggcagcagcaucagcuucugcggcgugaacagcgacaccgugggcuggagcuggcccgacggcgccgagcugcccuucaccaucgacaaguga

SEQ ID NO: 177428 - RNA, 1410 nt, Artificial Sequence; identical to SEQ ID NO: 176788
  derived and/or modified CDS sequence (opt4) from neuraminidase__InfluenzaA__ACV67207

SEQ ID NO: 177429 - RNA, 1410 nt, Artificial Sequence; identical to SEQ ID NO: 176798
  derived and/or modified CDS sequence (opt4) from neuraminidase__InfluenzaA__ACV67208

SEQ ID NO: 177430 - RNA, 1410 nt, Artificial Sequence; identical to SEQ ID NO: 176788
  derived and/or modified CDS sequence (opt4) from neuraminidase__InfluenzaA__ACV67210

SEQ ID NO: 177431 - RNA, 1410 nt, Artificial Sequence; identical to SEQ ID NO: 176798
  derived and/or modified CDS sequence (opt4) from neuraminidase__InfluenzaA__ACV67211

SEQ ID NO: 177432 - RNA, 1410 nt, Artificial Sequence; identical to SEQ ID NO: 176798
  derived and/or modified CDS sequence (opt4) from neuraminidase__InfluenzaA__ACV70076

SEQ ID NO: 177433 - RNA, 1410 nt, Artificial Sequence
  derived and/or modified CDS sequence (opt4) from neuraminidase__InfluenzaA__ACV70086
augaaccccaaccagaagaucaucaccaucggcagcgugugcaugaccaucggcauggccaaccugauccugcagaucggcaacaucaucagcaucuggaucagccacagcauccagcugggcaaccagaaccagaucgagaccugcaaccagagcaucaucaccuacgagaacaacaccugggugaaccagaccuacgugaacaucagcaacaccaacuucgccgccggccagagcguggugagcgugaagcuggccggcaacagcagccugugccccgugagcggcugggccaucuacagcaaggacaacagcgugagaaucggcagcaagggcgacguguucgugaucagagagcccuucaucagcugcagcccccuggagugcagaaccuucuuccugacccagggcgcccugcugaacgacaagcacagcaacggcaccaucaaggacagaagccccuacagaacccugaugagcugccccaucggcgaggugcccagccccuacaacagcagauucgagagcguggccuggagcgccagcgccugccacgacggcaucaacuggcugaccaucggcaucagcggccccgacaacggcgccguggccgugcugaaguacaacggcaucaucaccgacaccaucaagagcuggagaaacaacauccugagaacccaggagagcgagugcgccugcgugaacggcagcugcuucaccgugaugaccgacggccccagcaacggccaggccagcuacaagaucuucagaaucgagaagggcaagaucgugaagagcguggagaugaacgcccccaacuaccacuacgaggagugcagcugcuaccccgacagcagcgagaucaccugcgugugcagagacaacuggcacggcagcaacagacccugggugagcuucaaccagaaccuggaguaccagaucggcuacaucugcagcggcaucuucggcgacaaccccagacccaacgacaagaccggcagcugcggccccgugagcagcaacggcgccaacggcgugaagggcuucagcuucaaguacggcaacggcguguggaucggcagaaccaagagcaucagcagcagaaacggcuucgagaugaucugggaccccaacggcuggaccggcaccgacaacaacuucagcaucaagcaggacaucgugggcaucaacgaguggagcggcuacagcggcagcuucgugcagcaccccgagcugaccggccuggacugcaucagacccugcuucuggguggagcugaucagaggcagacccaaggagaacaccaucuggaccagcggcagcagcaucagcuucugcggcgugaacagcgacaccgugggcuggagcuggcccgacggcgccgagcugcccuucaccaucgacaaguga

SEQ ID NO: 177434 - RNA, 1410 nt, Artificial Sequence
  derived and/or modified CDS sequence (opt4) from neuraminidase__InfluenzaA__ACV70096
augaaccccaaccagaagaucaucaccaucggcagcgugugcaugaccaucggcauggccaaccugauccugcagaucggcaacaucaucagcaucuggaucagccacagcauccagcugggcaaccagaaccagaucgagaccugcaaccagagcgugaucaccuacgagaacaacaccugggugaaccagaccuacgugaacaucagcaacaccaacuucaccgccggccagagcguggugagcgugaagcuggccggcaacagcagccugugccccgugagcggcugggccaucuacagcaaggacaacagcaucagaaucggcagcaagggcgacguguucgugaucagagagcccuucaucagcugcagcccccuggagugcagaaccuucuuccugacccagggcgcccugcugaacgacaagcacagcaacggcaccaucaaggacagaagccccuacagaacccugaugagcugccccaucggcgaggugcccagccccuacaacagcagauucgagagcguggccuggagcgccagcgccugccacgacggcaucaacuggcugaccaucggcaucagcggccccgacaacggcgccguggccgugcugaaguacaacggcaucaucaccgacaccaucaagagcuggagaaacaacauccugagaacccaggagagcgagugcgccugcgugaacggcagcugcuucaccgugaugaccgacggccccagcgacggccaggccagcuacaagaucuucagaaucgagaagggcaagaucgugaagagcguggagaugaacgcccccaacuaccacuacgaggagugcagcugcuaccccgacagcagcgagaucaccugcgugugcagagacaacuggcacggcagcaacagacccugggugagcuucaaccagaaccuggaguaccagaucggcuacaucugcagcggcaucuucggcgacaaccccagacccaacgacaagaccggcagcugcggccccgugagcagcaacggcgccaacggcgugaagggcuucagcuucaaguacggcaacggcguguggaucggcagaaccaagagcaucagcagcagaaacggcuucgagaugaucugggaccccaacggcuggaccggcaccgacaacaacuucagcaucaagcaggacaucgugggcaucaacgaguggagcggcuacagcggcagcuucgugcagcaccccgagcugaccggccuggacugcaucagacccugcuucuggguggagcugaucagaggcagacccaaggagaacaccaucuggaccagcggcagcagcaucagcuucugcggcgugaacagcgacaccgugggcuggagcuggcccgacggcgccgagcugcccuucaccaucgacaaguga

SEQ ID NO: 177435 - RNA, 1410 nt, Artificial Sequence; identical to SEQ ID NO: 176798
  derived and/or modified CDS sequence (opt4) from neuraminidase__InfluenzaA__ACV70106

SEQ ID NO: 177436 - RNA, 1410 nt, Artificial Sequence; identical to SEQ ID NO: 176798
  derived and/or modified CDS sequence (opt4) from neuraminidase__InfluenzaA__ACV70116

SEQ ID NO: 177437 - RNA, 1410 nt, Artificial Sequence; identical to SEQ ID NO: 176798
  derived and/or modified CDS sequence (opt4) from neuraminidase__InfluenzaA__ACV70126

SEQ ID NO: 177438 - RNA, 1410 nt, Artificial Sequence; identical to SEQ ID NO: 176798
  derived and/or modified CDS sequence (opt4) from neuraminidase__InfluenzaA__ACV70157

SEQ ID NO: 177439 - RNA, 1410 nt, Artificial Sequence; identical to SEQ ID NO: 176788
  derived and/or modified CDS sequence (opt4) from neuraminidase__InfluenzaA__ACV70167

SEQ ID NO: 177440 - RNA, 1410 nt, Artificial Sequence; identical to SEQ ID NO: 176798
  derived and/or modified CDS sequence (opt4) from neuraminidase__InfluenzaA__ACV70177

SEQ ID NO: 177441 - RNA, 1410 nt, Artificial Sequence; identical to SEQ ID NO: 176798
  derived and/or modified CDS sequence (opt4) from neuraminidase__InfluenzaA__ACV70187

SEQ ID NO: 177442 - RNA, 1410 nt, Artificial Sequence; identical to SEQ ID NO: 176798
  derived and/or modified CDS sequence (opt4) from neuraminidase__InfluenzaA__ACV70197

SEQ ID NO: 177443 - RNA, 1410 nt, Artificial Sequence; identical to SEQ ID NO: 176798
  derived and/or modified CDS sequence (opt4) from neuraminidase__InfluenzaA__ACV70207

SEQ ID NO: 177444 - RNA, 1410 nt, Artificial Sequence
  derived and/or modified CDS sequence (opt4) from neuraminidase__InfluenzaA__ACV70217
augaaccccaaccagaagaucaucaccaucggcagcgugugcaugaccaucggcauggccaaccugauccugcagaucggcaacaucaucagcaucuggaucagccacagcauccagcugggcaaccagaaccagaucgagaccugcaaccagagcgugaucaccuacgagaacaacaccugggugaaccagaccuacgugaacaucagcaacaccaacuucgccgccggccagagcguggugagcgugaagcuggccggcaacagcagccugugccccgugagcggcugggccaucuacagcaaggacaacagcgugagaaucggcagcaagggcgacguguucgugaucagagagcccuucaucagcugcagccaccuggagugcagaaccuucuuccugacccagggcgcccugcugaacgacaagcacagcaacggcaccaucaaggacagaagccccuacagaacccugaugagcugccccaucggcgaggugcccagccccuacaacagcagauucgagagcguggccuggagcgccagcgccugccacgacggcaucaacuggcugaccaucggcaucagcggccccgacaacggcgccguggccgugcugaaguacaacggcaucaucaccgacaccaucaagagcuggagaaacaacauccugagaacccaggagagcgagugcgccugcgugaacggcagcugcuucaccgugaugaccgacggccccagcaacggccaggccagcuacaagaucuucagaaucgagaagggcaagaucgugaagagcguggagaugaacgcccccaacuaccacuacgaggagugcagcugcuaccccgacagcagcgagaucaccugcgugugcagagacaacuggcacggcagcaacagacccugggugagcuucaaccagaaccuggaguaccagaucggcuacaucugcagcggcaucuucggcgacaaccccagacccaacgacaagaccggcagcugcggccccgugagcagcaacggcgccaacggcgugaagggcuucagcuucaaguacggcaacggcguguggaucggcagaaccaagagcaucagcagcagaaacggcuucgagaugaucugggaccccaacggcuggaccggcaccgacaacaacuucagcaucaagcaggacaucgugggcaucaacgaguggagcggcuacagcggcagcuucgugcagcaccccgagcugaccggccuggacugcaucagacccugcuucuggguggagcugaucagaggcagacccaaggagaacaccaucuggaccagcggcagcagcaucagcuucugcggcgugaacagcgacaccgugggcuggagcuggcccgacggcgccgagcugcccuucaccaucgacaaguga

SEQ ID NO: 177445 - RNA, 1410 nt, Artificial Sequence; identical to SEQ ID NO: 176798
  derived and/or modified CDS sequence (opt4) from neuraminidase__InfluenzaA__ACV70227

SEQ ID NO: 177446 - RNA, 1410 nt, Artificial Sequence; identical to SEQ ID NO: 176798
  derived and/or modified CDS sequence (opt4) from neuraminidase__InfluenzaA__ACV70237

SEQ ID NO: 177447 - RNA, 1410 nt, Artificial Sequence; identical to SEQ ID NO: 176798
  derived and/or modified CDS sequence (opt4) from neuraminidase__InfluenzaA__ACV70247

SEQ ID NO: 177448 - RNA, 1410 nt, Artificial Sequence; identical to SEQ ID NO: 176798
  derived and/or modified CDS sequence (opt4) from neuraminidase__InfluenzaA__ACV70257

SEQ ID NO: 177449 - RNA, 1410 nt, Artificial Sequence; identical to SEQ ID NO: 176798
  derived and/or modified CDS sequence (opt4) from neuraminidase__InfluenzaA__ACV70267

SEQ ID NO: 177450 - RNA, 1410 nt, Artificial Sequence; identical to SEQ ID NO: 176798
  derived and/or modified CDS sequence (opt4) from neuraminidase__InfluenzaA__ACV70277

SEQ ID NO: 177451 - RNA, 1410 nt, Artificial Sequence; identical to SEQ ID NO: 176798
  derived and/or modified CDS sequence (opt4) from neuraminidase__InfluenzaA__ACV70287

SEQ ID NO: 177452 - RNA, 1410 nt, Artificial Sequence; identical to SEQ ID NO: 176798
  derived and/or modified CDS sequence (opt4) from neuraminidase__InfluenzaA__ACV70297

SEQ ID NO: 177453 - RNA, 1410 nt, Artificial Sequence; identical to SEQ ID NO: 176798
  derived and/or modified CDS sequence (opt4) from neuraminidase__InfluenzaA__ACV70307

SEQ ID NO: 177454 - RNA, 1410 nt, Artificial Sequence; identical to SEQ ID NO: 176788
  derived and/or modified CDS sequence (opt4) from neuraminidase__InfluenzaA__ACV70317

SEQ ID NO: 177455 - RNA, 1410 nt, Artificial Sequence; identical to SEQ ID NO: 176798
  derived and/or modified CDS sequence (opt4) from neuraminidase__InfluenzaA__ACV70327

SEQ ID NO: 177456 - RNA, 1410 nt, Artificial Sequence; identical to SEQ ID NO: 176798
  derived and/or modified CDS sequence (opt4) from neuraminidase__InfluenzaA__ACV70337

SEQ ID NO: 177457 - RNA, 1410 nt, Artificial Sequence; identical to SEQ ID NO: 176798
  derived and/or modified CDS sequence (opt4) from neuraminidase__InfluenzaA__ACV70347

SEQ ID NO: 177458 - RNA, 1410 nt, Artificial Sequence; identical to SEQ ID NO: 176798
  derived and/or modified CDS sequence (opt4) from neuraminidase__InfluenzaA__ACV70357

SEQ ID NO: 177459 - RNA, 1410 nt, Artificial Sequence; identical to SEQ ID NO: 176798
  derived and/or modified CDS sequence (opt4) from neuraminidase__InfluenzaA__ACV70367

SEQ ID NO: 177460 - RNA, 1410 nt, Artificial Sequence; identical to SEQ ID NO: 176798
  derived and/or modified CDS sequence (opt4) from neuraminidase__InfluenzaA__ACV70377

SEQ ID NO: 177461 - RNA, 1410 nt, Artificial Sequence; identical to SEQ ID NO: 176798
  derived and/or modified CDS sequence (opt4) from neuraminidase__InfluenzaA__ACV70387

SEQ ID NO: 177462 - RNA, 1410 nt, Artificial Sequence; identical to SEQ ID NO: 176798
  derived and/or modified CDS sequence (opt4) from neuraminidase__InfluenzaA__ACV70397

SEQ ID NO: 177463 - RNA, 1410 nt, Artificial Sequence; identical to SEQ ID NO: 176798
  derived and/or modified CDS sequence (opt4) from neuraminidase__InfluenzaA__ACV70407

SEQ ID NO: 177464 - RNA, 1410 nt, Artificial Sequence; identical to SEQ ID NO: 176788
  derived and/or modified CDS sequence (opt4) from neuraminidase__InfluenzaA__ACV70417

SEQ ID NO: 177465 - RNA, 1410 nt, Artificial Sequence; identical to SEQ ID NO: 176798
  derived and/or modified CDS sequence (opt4) from neuraminidase__InfluenzaA__ACV70427

SEQ ID NO: 177466 - RNA, 1410 nt, Artificial Sequence; identical to SEQ ID NO: 176798
  derived and/or modified CDS sequence (opt4) from neuraminidase__InfluenzaA__ACV70437

SEQ ID NO: 177467 - RNA, 1410 nt, Artificial Sequence; identical to SEQ ID NO: 176798
  derived and/or modified CDS sequence (opt4) from neuraminidase__InfluenzaA__ACV70447

SEQ ID NO: 177468 - RNA, 1410 nt, Artificial Sequence; identical to SEQ ID NO: 176798
  derived and/or modified CDS sequence (opt4) from neuraminidase__InfluenzaA__ACV70457

SEQ ID NO: 177469 - RNA, 1410 nt, Artificial Sequence; identical to SEQ ID NO: 176798
  derived and/or modified CDS sequence (opt4) from neuraminidase__InfluenzaA__ACV70467

SEQ ID NO: 177470 - RNA, 1410 nt, Artificial Sequence; identical to SEQ ID NO: 176798
  derived and/or modified CDS sequence (opt4) from neuraminidase__InfluenzaA__ACV70477

SEQ ID NO: 177471 - RNA, 1410 nt, Artificial Sequence; identical to SEQ ID NO: 176798
  derived and/or modified CDS sequence (opt4) from neuraminidase__InfluenzaA__ACV70487

SEQ ID NO: 177472 - RNA, 1410 nt, Artificial Sequence; identical to SEQ ID NO: 176798
  derived and/or modified CDS sequence (opt4) from neuraminidase__InfluenzaA__ACV70497

SEQ ID NO: 177473 - RNA, 1410 nt, Artificial Sequence; identical to SEQ ID NO: 176798
  derived and/or modified CDS sequence (opt4) from neuraminidase__InfluenzaA__ACV70507

SEQ ID NO: 177474 - RNA, 1410 nt, Artificial Sequence; identical to SEQ ID NO: 176798
  derived and/or modified CDS sequence (opt4) from neuraminidase__InfluenzaA__ACV70517

SEQ ID NO: 177475 - RNA, 1410 nt, Artificial Sequence; identical to SEQ ID NO: 176798
  derived and/or modified CDS sequence (opt4) from neuraminidase__InfluenzaA__ACV70527

SEQ ID NO: 177476 - RNA, 1410 nt, Artificial Sequence; identical to SEQ ID NO: 176798
  derived and/or modified CDS sequence (opt4) from neuraminidase__InfluenzaA__ACV70547

SEQ ID NO: 177477 - RNA, 1410 nt, Artificial Sequence; identical to SEQ ID NO: 176798
  derived and/or modified CDS sequence (opt4) from neuraminidase__InfluenzaA__ACV70557

SEQ ID NO: 177478 - RNA, 1410 nt, Artificial Sequence; identical to SEQ ID NO: 176798
  derived and/or modified CDS sequence (opt4) from neuraminidase__InfluenzaA__ACV70567

SEQ ID NO: 177479 - RNA, 1410 nt, Artificial Sequence; identical to SEQ ID NO: 176798
  derived and/or modified CDS sequence (opt4) from neuraminidase__InfluenzaA__ACV70577

SEQ ID NO: 177480 - RNA, 1410 nt, Artificial Sequence; identical to SEQ ID NO: 176798
  derived and/or modified CDS sequence (opt4) from neuraminidase__InfluenzaA__ACV70587

SEQ ID NO: 177481 - RNA, 1410 nt, Artificial Sequence; identical to SEQ ID NO: 176788
  derived and/or modified CDS sequence (opt4) from neuraminidase__InfluenzaA__ACV70597

SEQ ID NO: 177482 - RNA, 1410 nt, Artificial Sequence; identical to SEQ ID NO: 176798
  derived and/or modified CDS sequence (opt4) from neuraminidase__InfluenzaA__ACV70607

SEQ ID NO: 177483 - RNA, 1410 nt, Artificial Sequence; identical to SEQ ID NO: 177381
  derived and/or modified CDS sequence (opt4) from neuraminidase__InfluenzaA__ACV70617

SEQ ID NO: 177484 - RNA, 1410 nt, Artificial Sequence; identical to SEQ ID NO: 176798
  derived and/or modified CDS sequence (opt4) from neuraminidase__InfluenzaA__ACV70647

SEQ ID NO: 177485 - RNA, 1410 nt, Artificial Sequence; identical to SEQ ID NO: 176798
  derived and/or modified CDS sequence (opt4) from neuraminidase__InfluenzaA__ACV70657

SEQ ID NO: 177486 - RNA, 1410 nt, Artificial Sequence; identical to SEQ ID NO: 176798
  derived and/or modified CDS sequence (opt4) from neuraminidase__InfluenzaA__ACV70667

SEQ ID NO: 177487 - RNA, 1410 nt, Artificial Sequence; identical to SEQ ID NO: 176798
  derived and/or modified CDS sequence (opt4) from neuraminidase__InfluenzaA__ACV70677

SEQ ID NO: 177488 - RNA, 1410 nt, Artificial Sequence; identical to SEQ ID NO: 176798
  derived and/or modified CDS sequence (opt4) from neuraminidase__InfluenzaA__ACV70687

SEQ ID NO: 177489 - RNA, 1410 nt, Artificial Sequence; identical to SEQ ID NO: 176798
  derived and/or modified CDS sequence (opt4) from neuraminidase__InfluenzaA__ACV70697

SEQ ID NO: 177490 - RNA, 1410 nt, Artificial Sequence; identical to SEQ ID NO: 176798
  derived and/or modified CDS sequence (opt4) from neuraminidase__InfluenzaA__ACV70707

SEQ ID NO: 177491 - RNA, 1410 nt, Artificial Sequence; identical to SEQ ID NO: 176798
  derived and/or modified CDS sequence (opt4) from neuraminidase__InfluenzaA__ACV70717

SEQ ID NO: 177492 - RNA, 1410 nt, Artificial Sequence; identical to SEQ ID NO: 176798
  derived and/or modified CDS sequence (opt4) from neuraminidase__InfluenzaA__ACV70727

SEQ ID NO: 177493 - RNA, 1410 nt, Artificial Sequence; identical to SEQ ID NO: 176798
  derived and/or modified CDS sequence (opt4) from neuraminidase__InfluenzaA__ACV70737

SEQ ID NO: 177494 - RNA, 1410 nt, Artificial Sequence; identical to SEQ ID NO: 176798
  derived and/or modified CDS sequence (opt4) from neuraminidase__InfluenzaA__ACV70757

SEQ ID NO: 177495 - RNA, 1410 nt, Artificial Sequence; identical to SEQ ID NO: 176798
  derived and/or modified CDS sequence (opt4) from neuraminidase__InfluenzaA__ACV70767

SEQ ID NO: 177496 - RNA, 1410 nt, Artificial Sequence; identical to SEQ ID NO: 176798
  derived and/or modified CDS sequence (opt4) from neuraminidase__InfluenzaA__ACV70777

SEQ ID NO: 177497 - RNA, 1410 nt, Artificial Sequence; identical to SEQ ID NO: 176798
  derived and/or modified CDS sequence (opt4) from neuraminidase__InfluenzaA__ACV70787

SEQ ID NO: 177498 - RNA, 1410 nt, Artificial Sequence; identical to SEQ ID NO: 176798
  derived and/or modified CDS sequence (opt4) from neuraminidase__InfluenzaA__ACV70797

SEQ ID NO: 177499 - RNA, 1410 nt, Artificial Sequence; identical to SEQ ID NO: 176798
  derived and/or modified CDS sequence (opt4) from neuraminidase__InfluenzaA__ACV70807

SEQ ID NO: 177500 - RNA, 1410 nt, Artificial Sequence; identical to SEQ ID NO: 176798
  derived and/or modified CDS sequence (opt4) from neuraminidase__InfluenzaA__ACV70817

SEQ ID NO: 177501 - RNA, 1410 nt, Artificial Sequence; identical to SEQ ID NO: 176788
  derived and/or modified CDS sequence (opt4) from neuraminidase__InfluenzaA__ACV70827

SEQ ID NO: 177502 - RNA, 1410 nt, Artificial Sequence; identical to SEQ ID NO: 176798
  derived and/or modified CDS sequence (opt4) from neuraminidase__InfluenzaA__ACV70837

SEQ ID NO: 177503 - RNA, 1410 nt, Artificial Sequence
  derived and/or modified CDS sequence (opt4) from neuraminidase__InfluenzaA__ACV70847
augaaccccaaccagaagaucaucaccaucggcagcgugugcaugaccaucggcauggccaaccugauccugcagaucggcaacaucaucagcaucuggaucagccacagcauccagcugggcaaccagaaccagaucgagaccugcaaccagagcgugaucaccuacgagaacaacaccugggugaaccagaccuacgugaacaucagcaacaccaacuucgccgccggccagagcguggugagcgugaagcuggccggcaacagcagccugugccccgugagcggcugggccaucuacagcaaggacaacagcaucagaaucggcagcaagggcgacguguucgugaucagagagcccuucaugagcugcagcccccuggagugcagaaccuucuuccugacccagggcgcccugcugaacgacaagcacagcaacggcaccaucaaggacagaagccccuacagaacccugaugagcugccccaucggcgaggugcccagccccuacaacagcagauucgagagcguggccuggagcgccagcgccugccacgacggcaucaacuggcugaccaucggcaucagcggccccgacaacggcgccguggccgugcugaaguacaacggcaucaucaccgacaccaucaagagcuggagaaacaacauccugagaacccaggagagcgagugcgccugcgugaacggcagcugcuucaccgugaugaccgacggccccagcgacggccaggccagcuacaagaucuucagaaucgagaagggcaagaucgugaagagcguggagaugaacgcccccaacuaccacuacgaggagugcagcugcuaccccgacagcagcgagaucaccugcgugugcagagacaacuggcacggcagcaacagacccugggugagcuucaaccagaaccuggaguaccagaucggcuacaucugcagcggcaucuucggcgacaaccccagacccaacgacaagaccggcagcugcggccccgugagcagcaacggcgccaacggcgugaagggcuucagcuucaaguacggcaacggcguguggaucggcagaaccaagagcaucagcagcagaaacggcuucgagaugaucugggaccccaacggcuggaccggcaccgacaacaacuucagcaucaagcaggacaucgugggcaucaacgaguggagcggcuacagcggcagcuucgugcagcaccccgagcugaccggccuggacugcaucagacccugcuucuggguggagcugaucagaggcagacccaaggagaacaccaucuggaccagcggcagcagcaucagcuucugcggcgugaacagcgacaccgugggcuggagcuggcccgacggcgccgagcugcccuucaccaucgacaaguga

SEQ ID NO: 177504 - RNA, 1410 nt, Artificial Sequence; identical to SEQ ID NO: 176798
  derived and/or modified CDS sequence (opt4) from neuraminidase__InfluenzaA__ACV70867

SEQ ID NO: 177505 - RNA, 1410 nt, Artificial Sequence; identical to SEQ ID NO: 176798
  derived and/or modified CDS sequence (opt4) from neuraminidase__InfluenzaA__ACV70877

SEQ ID NO: 177506 - RNA, 1410 nt, Artificial Sequence
  derived and/or modified CDS sequence (opt4) from neuraminidase__InfluenzaA__ACV70887
augaaccccaaccagaagaucaucaccaucggcagcgugugcaugaccaucggcauggccaaccugauccugcagaucggcaacaucaucagcaucuggaucagccacagcauccagcugggcaaccagaaccagaucgagaccugcaaccagagcgugaucaccuacgagaacaacaccugggugaaccagaccuacgugaacaucagcaacaccaacuucgccgccggccagagcauggugagcgugaagcuggccggcaacagcagccugugccccgugagcggcugggccaucuacagcaaggacaacagcgugagaaucggcagcaagggcgacguguucgugaucagagagcccuucaucagcugcagcccccuggagugcagaaccuucuuccugacccagggcgcccugcugaacgacaagcacagcaacggcaccaucaaggacagaagccccuacagaacccugaugagcugccccaucggcgaggugcccagccccuacaacagcagauucgagagcguggccuggagcgccagcgccugccacgacggcaucaacuggcugaccaucggcaucagcggccccgacaacggcgccguggccgugcugaaguacaacggcaucaucaccgacaccaucaagagcuggagaaacaacauccugagaacccaggagagcgagugcgccugcgugaacggcagcugcuucaccgugaugaccgacggccccagcaacggccaggccagcuacaagaucuucagaaucgagaagggcaagaucgugaagagcguggagaugaacgcccccaacuaccacuacgaggagugcagcugcuaccccgacagcagcgagaucaccugcgugugcagagacaacuggcacggcagcaacagacccugggugagcuucaaccagaaccuggaguaccagaucggcuacaucugcagcggcaucuucggcgacaaccccagacccaacgacaagaccggcagcugcggccccgugagcagcaacggcgccaacggcgugaagggcuucagcuucaaguacggcaacggcguguggaucggcagaaccaagagcaucagcagcagaaacggcuucgagaugaucugggaccccaacggcuggaccggcaccgacaacaacuucagcaucaagcaggacaucgugggcaucaacgaguggagcggcuacagcggcagcuucgugcagcaccccgagcugaccggccuggacugcaucagacccugcuucuggguggagcugaucagaggcagacccaaggagaacaccaucuggaccagcggcagcagcaucagcuucugcggcgugaacagcgacaccgugggcuggagcuggcccgacggcgccgagcugcccuucaccaucgacaaguga

SEQ ID NO: 177507 - RNA, 1410 nt, Artificial Sequence; identical to SEQ ID NO: 176798
  derived and/or modified CDS sequence (opt4) from neuraminidase__InfluenzaA__ACV70897

SEQ ID NO: 177508 - RNA, 1410 nt, Artificial Sequence; identical to SEQ ID NO: 176798
  derived and/or modified CDS sequence (opt4) from neuraminidase__InfluenzaA__ACV70907

SEQ ID NO: 177509 - RNA, 1410 nt, Artificial Sequence; identical to SEQ ID NO: 176798
  derived and/or modified CDS sequence (opt4) from neuraminidase__InfluenzaA__ACV70917

SEQ ID NO: 177510 - RNA, 1410 nt, Artificial Sequence; identical to SEQ ID NO: 176788
  derived and/or modified CDS sequence (opt4) from neuraminidase__InfluenzaA__ACV70927

SEQ ID NO: 177511 - RNA, 1410 nt, Artificial Sequence; identical to SEQ ID NO: 176798
  derived and/or modified CDS sequence (opt4) from neuraminidase__InfluenzaA__ACV70937

SEQ ID NO: 177512 - RNA, 1410 nt, Artificial Sequence; identical to SEQ ID NO: 176798
  derived and/or modified CDS sequence (opt4) from neuraminidase__InfluenzaA__ACV70947

SEQ ID NO: 177513 - RNA, 1410 nt, Artificial Sequence; identical to SEQ ID NO: 176798
  derived and/or modified CDS sequence (opt4) from neuraminidase__InfluenzaA__ACV70957

SEQ ID NO: 177514 - RNA, 1410 nt, Artificial Sequence; identical to SEQ ID NO: 176798
  derived and/or modified CDS sequence (opt4) from neuraminidase__InfluenzaA__ACV70967

SEQ ID NO: 177515 - RNA, 1410 nt, Artificial Sequence; identical to SEQ ID NO: 176798
  derived and/or modified CDS sequence (opt4) from neuraminidase__InfluenzaA__ACV70977

SEQ ID NO: 177516 - RNA, 1410 nt, Artificial Sequence; identical to SEQ ID NO: 176798
  derived and/or modified CDS sequence (opt4) from neuraminidase__InfluenzaA__ACV70987

SEQ ID NO: 177517 - RNA, 1410 nt, Artificial Sequence; identical to SEQ ID NO: 176798
  derived and/or modified CDS sequence (opt4) from neuraminidase__InfluenzaA__ACV71007

SEQ ID NO: 177518 - RNA, 1410 nt, Artificial Sequence; identical to SEQ ID NO: 176659
  derived and/or modified CDS sequence (opt4) from neuraminidase__InfluenzaA__ACV82218

SEQ ID NO: 177519 - RNA, 1410 nt, Artificial Sequence; identical to SEQ ID NO: 176659
  derived and/or modified CDS sequence (opt4) from neuraminidase__InfluenzaA__ACV82219

SEQ ID NO: 177520 - RNA, 1410 nt, Artificial Sequence
  derived and/or modified CDS sequence (opt4) from neuraminidase__InfluenzaA__ACV82220
augaaccccaaccagaagaucaucaccaucggcagcgugagccugaccaucagcaccaucugcuucuucaugcagcuggccauccugaucaccaccgugacccugcacuucaagcaguacgaguucaacagcccccccaacaaccaggugaugcugugcgagcccaccaucaucgagagaaacaucaccgagaucguguaccugaccaacaccaccaucgagaaggagaucugccccaagcuggccgaguacagaaacuggagcaagccccagugcgacaucaccggcuucgcccccuucagcaaggacaacagcaucagacugagcgccggcggcgacaucugggugaccagagagcccuacgugagcugcgaccccgacaagugcuaccaguucgcccugggccagggcaccacccugaacaacgugcacagcaacaacaccgugagagacagaacccccuacagaacccugcugaugaacgagcugggcgugcccuuccaccugggcaccaagcaggugugcaucgccuggagcagcuacagcugccacgacggcaaggccuggcugcacgugugcaucaccggcgacgacaagaacgccaccgccagcuucaucuacaacggcagacugguggacagcguggugagcuggagcaaggagauccugagaacccaggagagcgagugcgugugcaucaacggcaccugcaccguggugaugaccgacggcagcgccagcggcaaggccgacaccaagauccuguucaucgaggagggcaagaucgugcacaccagcacccugagcggcagcgcccagcacguggaggagugcagcugcuaccccagauaccccggcgugagaugcgugugcagagacaacuggaagggcagcaacagacccaucguggacaucaacaucaaggaccacagcaucgugagcagcuacgugugcagcggccuggugggcgacacccccagaaagaacgacagcagcagcagcagccacugccuggaccccaacaacgaggagggcggccacggcgugaagggcugggccuucgacgacggcaacgacguguggaugggcagaaccaucagcgagaagagcagacugggcuacgagaccuucaaggugaucgagggcuggagcaaccccaagagcaagcugcagaucaacagacaggugaucguggacagaggcaacagaagcggcuacagcggcaucuucagcguggagggcaagagcugcaucaacagaugcuucuacguggagcugaucagaggcagaaaggagaagaccgaggugcuguggaccagcaacagcaucgugguguucugcggcaccagcggcaccuacggcaccggcagcuggcccgacggcgccgacaucaaccugaugcccaucuga

SEQ ID NO: 177521 - RNA, 1413 nt, Artificial Sequence
  derived and/or modified CDS sequence (opt4) from neuraminidase__InfluenzaA__ACV82221
augaaccccaaccagaagaucaucaccaucggcagcaucagcaucgccaucggcaucaucagccugaugcugcagaucggcaacaucaucagcaucugggccagccacagcauccagaccggcagccagaacaacaccggcaucugcaaccagagaaucaucaccuacgagaacagcaccugggugaaccacaccuacgugaacaucaacaacaccaacgugguggccggcgaggacaagaccagcgugacccuggccggcaacagcagccugugcagcaucagcggcugggccaucuacaccaaggacaacagcaucagaaucggcagcaagggcgacguguucgugaucagagagcccuucaucagcugcagccaccuggagugcagaaccuucuuccugacccagggcgcccugcugaacgacaagcacagcaacggcaccgugaaggacagaagccccuacagagcccugaugagcugcccccugggcgaggcccccagccccuacaacagcaaguucgagagcguggccuggagcgccagcgccugccacgacggcaugggcuggcugaccaucggcaucagcggccccgacaacggcgccguggccgugcugaaguacaacggcaucaucaccggcaccaucaagagcuggaagaagcagauccugagaacccaggagagcgagugcgugugcaugaacggcagcugcuucaccaucaugaccgacggccccagcaacaaggccgccagcuacaagaucuucaagaucgagaagggcaaggugaccaagagcaucgagcugaacgcccccaacuucuacuacgaggagugcagcugcuaccccgacaccggcaucgugaugugcgugugcagagacaacuggcacggcagcaacagacccugggugagcuucaaccagaaccuggacuaccagaucggcuacaucugcagcggcguguucggcgacaaccccagacccgaggacggcgagggcagcugcaaccccgugaccguggacggcgccaacggcgugaagggcuucagcuacaaguacggcaacggcguguggaucggcagaaccaagagcaacagacugagaaagggcuucgagaugaucugggaccccaacggcuggaccaacaccgacagcgacuucagcgugaagcaggacgugguggccaucaccgacuggagcggcuacagcggcagcuucgugcagcaccccgagcugaccggccuggacugcaucagacccugcuucuggguggagcuggugagaggccugcccagagagaacaccaccaucuggaccagcggcagcagcaucagcuucugcggcgugaacagcgacaccgccaacuggagcuggcccgacggcgccgagcugcccuucaccaucgacaaguga

SEQ ID NO: 177522 - RNA, 1410 nt, Artificial Sequence; identical to SEQ ID NO: 176798
  derived and/or modified CDS sequence (opt4) from neuraminidase__InfluenzaA__ACV88402

SEQ ID NO: 177523 - RNA, 1410 nt, Artificial Sequence; identical to SEQ ID NO: 176798
  derived and/or modified CDS sequence (opt4) from neuraminidase__InfluenzaA__ACV88412

SEQ ID NO: 177524 - RNA, 1410 nt, Artificial Sequence; identical to SEQ ID NO: 176788
  derived and/or modified CDS sequence (opt4) from neuraminidase__InfluenzaA__ACV88422

SEQ ID NO: 177525 - RNA, 1365 nt, Artificial Sequence
  derived and/or modified CDS sequence (opt4) from neuraminidase__InfluenzaA__ACV89505
augaaccccaaccagaagaucaucaccaucggcagcaucugccugguggugggccugaucagccugauccugcagaucggcaacaucaucagcaucuggaucagccacagcauccagaccggcagccagaaccacaccggcaucugcaaccagaacaucaucaccuacaagaacagcaccugggugaaggacaccaccagcgugauccugaccggcaacagcagccugugccccaucagaggcugggccaucuacagcaaggacaacagcaucagaaucggcagcaagggcgacguguucgugaucagagagcccuucaucagcugcagccaccuggagugcagaaccuucuuccugacccagggcgcccugcugaacgacaagcacagcagcggcaccgugaaggacagaagccccuacagagcccugaugagcugccccgugggcgaggcccccagccccuacaacagcagauucgagagcguggccuggagcgccagcgccugccacgacggcaugggcuggcugaccaucggcaucagcggccccgacaacggcgccguggccgugcugaaguacaacggcaucaucaccgagaccaucaagagcuggagaaagaagauccugagaacccaggagagcgagugcgccugcgugaacggcagcugcuucaccaucaugaccgacggccccagcgacggccuggccagcuacaagaucuucaagaucgagaagggcaaggugaccaagagcaucgagcugaacgcccccaacagccacuacgaggagugcagcugcuaccccgacaccggcaaggugaugugcgugugcagagacaacuggcacggcagcaacagacccugggugagcuucgaccagaaccuggacuaccagaucggcuacaucugcagcggcguguucggcgacaaccccagacccgaggacggcaccggcagcugcggccccguguacguggacggcgccaacggcgugaagggcuucagcuacagauacggcaacggcguguggaucggcagaaccaagagccacagcagcagacacggcuucgagaugaucugggaccccaacggcuggaccgagaccgacagcaaguucagcgugagacaggacgugguggccaugaccgacuggagcggcuacagcggcagcuucgugcagcaccccgagcugaccggccuggacugcaugagacccugcuucuggguggagcugaucagaggcagacccaaggagggcaccaucuggaccagcgccagcagcaucagcuucugcggcgugaacagcgacaccguggacuggagcuggcccgacggcgccgagcugcccuucagcaucgacaaguga

SEQ ID NO: 177526 - RNA, 1410 nt, Artificial Sequence; identical to SEQ ID NO: 176798
  derived and/or modified CDS sequence (opt4) from neuraminidase__InfluenzaA__ACV91673

SEQ ID NO: 177527 - RNA, 1410 nt, Artificial Sequence; identical to SEQ ID NO: 176798
  derived and/or modified CDS sequence (opt4) from neuraminidase__InfluenzaA__ACV91681

SEQ ID NO: 177528 - RNA, 1410 nt, Artificial Sequence
  derived and/or modified CDS sequence (opt4) from neuraminidase__InfluenzaA__ACX31593
augaaccccaaccagaagaucaucaccaucggcagcgugagccugaccaucagcaccaucugcuucuucaugcagaucgccauccugaucaccaccgugacccugcacuucaagcaguacgaguucaacagcccccccaacaaccaggugcugcugugcgagcccgccaucaucgagagaaacaucaccgagaucguguaccugaccaacaccaccaucgagaaggagaucugccccaagcuggccgaguacagaaacuggagcaagccccagugcgacaucaccggcuucgcccccuucagcaaggacaacagcaucagacugagcgccggcggcgacaucugggugaccagagagcccuacgugagcugcgaccccgacaagugcuaccaguucgcccugggccagggcaccacccugaacaacgugcacagcaacaacaccgugagagacagaacccccuacagaacccugcugaugaacgagcugggcgugcccuuccaccugggcaccaagcaggugugcaucgccuggagcagcagcagcugccacgacggcaaggccuggcugcacgugugcaucaccggcgacgacaagaacgccaccgccagcuucaucuacaacggcagacugguggacagcguggugagcuggagcaaggagauccugagaacccaggagagcgagugcgugugcaucaacggcaccugcaccguggugaugaccgacggcagcgccagcggcaaggccgacaccaagauccuguucaucgaggagggcaagaucgugcacaccagcacccugagcggcagcgcccagcacguggaggagugcagcugcuaccccagauaccccggcgugagaugcgugugcagagacaacuggaagggcagcaacagacccaucguggacaucaacaucaaggaccacagcaucgugagcagcuacgugugcagcggccuggugggcgacacccccagaaagaacgacagcagcagcagcagccacugccuggaccccaacaacgaggagggcggccacggcgugaagggcugggccuucgacgacggcaacgacguguggaugggcagaaccaucagcgagaagagcagacugggcuacgagaccuucaaggugaucgagggcuggagcaaccccaagagcaagcugcagaucaacagacaggugaucguggacagaggcaacagaagcggcuacagcggcaucuucagcguggagggcaagagcugcaucaacagaugcuucuacguggagcugaucagaggcagaaaggaggagaccgaggugcuguggaccagcaacagcaucgugguguucugcggcaccagcggcaccuacggcaccggcagcuggcccgacggcgccgacaucaaccugaugcccaucuga

SEQ ID NO: 177529 - RNA, 1410 nt, Artificial Sequence; identical to SEQ ID NO: 176798
  derived and/or modified CDS sequence (opt4) from neuraminidase__InfluenzaA__ACX31901

SEQ ID NO: 177530 - RNA, 1410 nt, Artificial Sequence; identical to SEQ ID NO: 176798
  derived and/or modified CDS sequence (opt4) from neuraminidase__InfluenzaA__ACX31902

SEQ ID NO: 177531 - RNA, 1410 nt, Artificial Sequence; identical to SEQ ID NO: 176798
  derived and/or modified CDS sequence (opt4) from neuraminidase__InfluenzaA__ACX31905

SEQ ID NO: 177532 - RNA, 1410 nt, Artificial Sequence; identical to SEQ ID NO: 176798
  derived and/or modified CDS sequence (opt4) from neuraminidase__InfluenzaA__ACX31906

SEQ ID NO: 177533 - RNA, 1410 nt, Artificial Sequence; identical to SEQ ID NO: 176798
  derived and/or modified CDS sequence (opt4) from neuraminidase__InfluenzaA__ACX31907

SEQ ID NO: 177534 - RNA, 1410 nt, Artificial Sequence; identical to SEQ ID NO: 176798
  derived and/or modified CDS sequence (opt4) from neuraminidase__InfluenzaA__ACX31908

SEQ ID NO: 177535 - RNA, 1410 nt, Artificial Sequence; identical to SEQ ID NO: 176953
  derived and/or modified CDS sequence (opt4) from neuraminidase__InfluenzaA__ACX31909

SEQ ID NO: 177536 - RNA, 1410 nt, Artificial Sequence; identical to SEQ ID NO: 176798
  derived and/or modified CDS sequence (opt4) from neuraminidase__InfluenzaA__ACX31911

SEQ ID NO: 177537 - RNA, 1410 nt, Artificial Sequence; identical to SEQ ID NO: 176798
  derived and/or modified CDS sequence (opt4) from neuraminidase__InfluenzaA__ACX31912

SEQ ID NO: 177538 - RNA, 1410 nt, Artificial Sequence; identical to SEQ ID NO: 176798
  derived and/or modified CDS sequence (opt4) from neuraminidase__InfluenzaA__ACX31913

SEQ ID NO: 177539 - RNA, 1410 nt, Artificial Sequence; identical to SEQ ID NO: 176798
  derived and/or modified CDS sequence (opt4) from neuraminidase__InfluenzaA__ACX31914

SEQ ID NO: 177540 - RNA, 1410 nt, Artificial Sequence; identical to SEQ ID NO: 176798
  derived and/or modified CDS sequence (opt4) from neuraminidase__InfluenzaA__ACX31915

SEQ ID NO: 177541 - RNA, 1410 nt, Artificial Sequence; identical to SEQ ID NO: 176798
  derived and/or modified CDS sequence (opt4) from neuraminidase__InfluenzaA__ACX31916

SEQ ID NO: 177542 - RNA, 1410 nt, Artificial Sequence
  derived and/or modified CDS sequence (opt4) from neuraminidase__InfluenzaA__ACX31917
augaaccccaaccagaagaucaucaccaucggcagcgugugcaugaccaucggcauggccaaccugauccugcagaucggcaacaucaucagcaucuggaucagccacagcauccagcugggcaaccagaaccagaucgagaccugcaaccagagcgugaucaccuacgagaacaacaccugggugaaccagaccuacgugaacaucagcaacaccaacuucgccgccggccagagcguggugagcgugaagcuggccggcaacagcagccugugccccgugagcggcugggccaucuacagcaaggacaacagcaucagaaucggcagcaagggcgacguguucgugaucagagagcccuucaucagcugcagcccccuggagugcagaaccuucuuccugacccagggcgcccugcugaacgacaagcacagcaacggcaccaucaccgacagaagccccuacagaacccugaugagcugccccaucggcgaggugcccagccccuacaacagcagauucgagagcguggccuggagcgccagcgccugccacgacggcaucaacuggcugaccaucggcaucagcggccccgacaacggcgccguggccgugcugaaguacaacggcaucaucaccgacaccaucaagagcuggagaaacaacauccugagaacccaggagagcgagugcgccugcgugaacggcagcugcuucaccgugaugaccgacggccccagcgacggccaggccagcuacaagaucuucagaaucgagaagggcaagaucgugaagagcguggagaugaacgcccccaacuaccacuacgaggagugcagcugcuaccccgacagcagcgagaucaccugcgugugcagagacaacuggcacggcagcaacagacccugggugagcuucaaccagaaccuggaguaccagaucggcuacaucugcagcggcaucuucggcgacaaccccagacccaacgacaagaccggcagcugcggccccgugagcagcaacggcgccaacggcgugaagggcuucagcuucaaguacggcaacggcguguggaucggcagaaccaagagcaucagcagcagaaacggcuucgagaugaucugggaccccaacggcuggaccggcaccgacaacaacuucagcaucaagcaggacaucgugggcaucaacgaguggagcggcuacagcggcagcuucgugcagcaccccgagcugaccggccuggacugcaucagacccugcuucuggguggagcugaucagaggcagacccaaggagaacaccaucuggaccagcggcagcagcaucagcuucugcggcgugaacagcgacaccgugggcuggagcuggcccgacggcgccgagcugcccuucaccaucgacaaguga

SEQ ID NO: 177543 - RNA, 1410 nt, Artificial Sequence; identical to SEQ ID NO: 176798
  derived and/or modified CDS sequence (opt4) from neuraminidase__InfluenzaA__ACX31918

SEQ ID NO: 177544 - RNA, 1410 nt, Artificial Sequence; identical to SEQ ID NO: 176798
  derived and/or modified CDS sequence (opt4) from neuraminidase__InfluenzaA__ACX31919

SEQ ID NO: 177545 - RNA, 1410 nt, Artificial Sequence; identical to SEQ ID NO: 176798
  derived and/or modified CDS sequence (opt4) from neuraminidase__InfluenzaA__ACX31920

SEQ ID NO: 177546 - RNA, 1410 nt, Artificial Sequence; identical to SEQ ID NO: 177152
  derived and/or modified CDS sequence (opt4) from neuraminidase__InfluenzaA__ACX31922

SEQ ID NO: 177547 - RNA, 1410 nt, Artificial Sequence; identical to SEQ ID NO: 176798
  derived and/or modified CDS sequence (opt4) from neuraminidase__InfluenzaA__ACX31923

SEQ ID NO: 177548 - RNA, 1410 nt, Artificial Sequence; identical to SEQ ID NO: 176788
  derived and/or modified CDS sequence (opt4) from neuraminidase__InfluenzaA__ACX31924

SEQ ID NO: 177549 - RNA, 1410 nt, Artificial Sequence
  derived and/or modified CDS sequence (opt4) from neuraminidase__InfluenzaA__ACX31925
augaaccccaaccagaagaucaucaccaucggcagcgugugcaugaccaucggcauggccaaccugauccugcagaucggcaacaucaucagcaucuggaucagccacagcauccagcugggcaaccagaaccagaucgagaccugcaaccagagcgugaucaccuacgagaacaacaccugggugaaccagaccuacgugaacaucagcaacaccaacuucgccgccggccagagcguggugagcgugaagcuggccggcaacagcagccugugccccgugagcggcugggccaucuacagcaaggacaacagcaucagaaucggcagcaagggcgacguguucgugaucagagagcccuucaucagcugcagcccccuggagugcagaaccuucuuccugacccagggcgcccugcugaacgacaagcacagcaacggcaccaucaaggacagaagccccuacagaacccugaugagcugccccaucggcgaggugcccagccccuacaacagcagauucgagagcguggccuggagcgccagcgccugccacgacggcaucaacuggcugaccaucggcaucagcggccccgacaacggcgccguggccgugcugaaguacaacggcaucaucaccgacaccaucaagagcuggagaaacaacauccugagaacccaggagagcgagugcgccugcgugaacggcagcugcuucacccugaugaccgacggccccagcgacggccaggccagcuacaagaucuucagaaucgagaagggcaagaucgugaagagcguggagaugaacgcccccaacuaccacuacgaggagugcagcugcuaccccgacagcagcgagaucaccugcgugugcagagacaacuggcacggcagcaacagacccugggugagcuucaaccagaaccuggaguaccagaucggcuacaucugcagcggcaucuucggcgacaaccccagacccaacgacaagaccggcagcugcggccccgugagcagcaacggcgccaacggcgugaagggcuucagcuucaaguacggcaacggcguguggaucggcagaaccaagagcaucagcagcagaaacggcuucgagaugaucugggaccccaacggcuggaccggcaccgacaacaacuucagcaucaagcaggacaucgugggcaucaacgaguggagcggcuacagcggcagcuucgugcagcaccccgagcugaccggccuggacugcaucagacccugcuucuggguggagcugaucagaggcagacccaaggagaacaccaucuggaccagcggcagcagcaucagcuucugcggcgugaacagcgacaccgugggcuggagcuggcccgacggcgccgagcugcccuucaucaucgacaaguga

SEQ ID NO: 177550 - RNA, 1410 nt, Artificial Sequence; identical to SEQ ID NO: 176798
  derived and/or modified CDS sequence (opt4) from neuraminidase__InfluenzaA__ACX31926

SEQ ID NO: 177551 - RNA, 1410 nt, Artificial Sequence; identical to SEQ ID NO: 176798
  derived and/or modified CDS sequence (opt4) from neuraminidase__InfluenzaA__ACX31927

SEQ ID NO: 177552 - RNA, 1410 nt, Artificial Sequence
  derived and/or modified CDS sequence (opt4) from neuraminidase__InfluenzaA__ACX31928
augaaccccaaccagaagaucaucaccaucggcagcgugugcaugaccaucggcauggccaaccugauccugcagaucggcaacaucaucagcaucuggaucagccacagcauccagcugggcaaccagaaccagaucgagaccugcaaccagagcgugaucaccuacgagaacaacaccugggugaaccagaccuacgugaacaucagcaacaccaacuucgccgccggccagagcguggugagcgugaagcuggccggcaacagcagccugugccccgugagcggcugggccaucuacagcaaggacaacagcaucagaaucggcagcaagggcgacguguucgugaucagagagcccuucaucagcugcagcccccuggagugcagaaccuucuuccugacccagggcgcccugcugaacgacaagcacagcaacggcaccaucaaggacagaagccccuacagaacccugaugagcugccccaucggcgaggugcccagccccuacaacagcagauucgagagcguggccuggagcgccagcgccugccacgacggcaucaacuggcugaccaucggcaucagcggccccgacaacggcgccguggccgugcugaaguacaacggcaucaucaccgacaccaucaagagcuggagaaacaacauccugagaacccaggagagcgagugcgccugcgugaacggcagcugcuucaccgugaugaccgacggccccagcgacggccaggccagcuacaagaucuucagaaucgagaagggcaagaucgugaagagcguggagaugaacgcccccaacuaccacuacgaggagugcagcugcuaccccgacagcagcgagaucaccugcgugugcagagacaacuggcacggcagcaacagacccugggugagcuucaaccagaaccuggaguaccagaucggcuacaucugcagcggcaucuucggcgacaaccccagacccaacgacaagaccggcagcugcggccccgugagcagcaacggcgagaacggcgugaagggcuucagcuucaaguacggcaacggcguguggaucggcagaaccaagagcaucagcagcagaaacggcuucgagaugaucugggaccccaacggcuggaccggcaccgacaacaacuucagcaucaagcaggacaucgugggcaucaacgaguggagcggcuacagcggcagcuucgugcagcaccccgagcugaccggccuggacugcaucagacccugcuucuggguggagcugaucagaggcagacccaaggagaacaccaucuggaccagcggcagcagcaucagcuucugcggcgugaacggcgacaccgugggcuggagcuggcccgacggcgccgagcugcccuucaccaucgacaaguga

SEQ ID NO: 177553 - RNA, 1410 nt, Artificial Sequence; identical to SEQ ID NO: 176828
  derived and/or modified CDS sequence (opt4) from neuraminidase__InfluenzaA__ACX31929

SEQ ID NO: 177554 - RNA, 1410 nt, Artificial Sequence; identical to SEQ ID NO: 177152
  derived and/or modified CDS sequence (opt4) from neuraminidase__InfluenzaA__ACX31930

SEQ ID NO: 177555 - RNA, 1410 nt, Artificial Sequence; identical to SEQ ID NO: 176798
  derived and/or modified CDS sequence (opt4) from neuraminidase__InfluenzaA__ACX31931

SEQ ID NO: 177556 - RNA, 1410 nt, Artificial Sequence; identical to SEQ ID NO: 176798
  derived and/or modified CDS sequence (opt4) from neuraminidase__InfluenzaA__ACX31932

SEQ ID NO: 177557 - RNA, 1410 nt, Artificial Sequence; identical to SEQ ID NO: 176798
  derived and/or modified CDS sequence (opt4) from neuraminidase__InfluenzaA__ACX35250

SEQ ID NO: 177558 - RNA, 1410 nt, Artificial Sequence; identical to SEQ ID NO: 176798
  derived and/or modified CDS sequence (opt4) from neuraminidase__InfluenzaA__ACX35260

SEQ ID NO: 177559 - RNA, 1410 nt, Artificial Sequence; identical to SEQ ID NO: 176798
  derived and/or modified CDS sequence (opt4) from neuraminidase__InfluenzaA__ACX35270

SEQ ID NO: 177560 - RNA, 1410 nt, Artificial Sequence
  derived and/or modified CDS sequence (opt4) from neuraminidase__InfluenzaA__ACX35280
augaaccccaaccagaagaucaucaccaucggcagcgugugcaugaccaucggcauggccaaccugauccugcagaucggcaacaucaucagcaucuggaucagccacagcauccagcugggcaaccagaaccagaucgagaccugcaaccagagcgugaucaccuacgagaacaacaccugggugaaccagaccuacgugaacaucagcaacaccaacuucgccgccggccagagcguggugagcgugaagcuggccggcaacagcagccugugccccgugagcggcugggccaucuacagcaaggacaacagcaucagaaucggcagcaagggcgacguguucgugaucagagagcccuucaucagcugcagcccccuggagugcagaaccuucuuccugacccagggcgcccugcugaacgacaagcacagcaacggcaccaucaaggacagaagccccuacagaacccugaugagcugccccaucggcgaggugcccagccccuacaacagcagauucgagagcguggccuggagcgccagcgccugccacgacggcaucaacuggcugaccaucggcaucagcggccccgacaacggcgccguggccgugcugaaguacaacggcaucaucaccgacaccaucaagagcuggagaaacaacauccugagaacccaggagagcgagugcgccugcgugaacggcagcugcuucaccgugaugaccgacggccccagcgacggccaggccagcuacaagaucuucagaaucgagaagggcaagaucgugaagagcguggacaugaacgcccccaacuaccacuacgaggagugcagcugcuaccccgacagcagcgagaucaccugcgugugcagagacaacuggcacggcagcaacagacccugggugagcuucaaccagaaccuggaguaccagaucggcuacaucugcagcggcaucuucggcgacaaccccagacccaacgacaagaccggcagcugcggccccgugagcagcaacggcgccaacggcgugaagggcuucagcuucaaguacggcaacggcguguggaucggcagaaccaagagcaucagcagcagaaacggcuucgagaugaucugggaccccaacggcuggaccggcaccgacaacaacuucagcaucaagcaggacaucgugggcaucaacgaguggagcggcuacagcggcagcuucgugcagcaccccgagcugaccggccuggacugcaucagacccugcuucuggguggagcugaucagaggcagacccaaggagaacaccaucuggaccagcggcagcagcaucagcuucugcggcgugaacagcgacaccgugggcuggagcuggcccgacggcgccgagcugcccuucaccaucgacaaguga

SEQ ID NO: 177561 - RNA, 1410 nt, Artificial Sequence; identical to SEQ ID NO: 176798
  derived and/or modified CDS sequence (opt4) from neuraminidase__InfluenzaA__ACX35290

SEQ ID NO: 177562 - RNA, 1410 nt, Artificial Sequence; identical to SEQ ID NO: 176798
  derived and/or modified CDS sequence (opt4) from neuraminidase__InfluenzaA__ACX35300

SEQ ID NO: 177563 - RNA, 1410 nt, Artificial Sequence
  derived and/or modified CDS sequence (opt4) from neuraminidase__InfluenzaA__ACX35310
augaaccccaaccagaagaucaucaccaucggcagcgugugcaugaccaucggcauggccaaccugauccugcagaucggcaacaucaucagcaucuggaucagccacagcauccagcugggcaaccagaaccagaucggcaccugcaaccagagcgugaucaccuacgagaacaacaccugggugaaccagaccuacgugaacaucagcaacaccaacuucgccgccggccagagcguggugagcgugaagcuggccggcaacagcagccugugccccgugagcggcugggccaucuacagcaaggacaacagcaucagaaucggcagcaagggcgacguguucgugaucagagagcccuucaucagcugcagcccccuggagugcagaaccuucuuccugacccagggcgcccugcugaacgacaagcacagcaacggcaccaucaaggacagaagccccuacagaacccugaugagcugccccaucggcgaggugcccagccccuacaacagcagauucgagagcguggccuggagcgccagcgccugccacgacggcaucaacuggcugaccaucggcaucagcggccccgacaacggcgccguggccgugcugaaguacaacggcaucaucaccgacaccaucaagagcuggagaaacaacauccugagaacccaggagagcgagugcgccugcgugaacggcagcugcuucaccgugaugaccgacggccccagcgacggccaggccagcuacaagaucuucagaaucgagaagggcaagaucgugaagagcguggagaugaacgcccccaacuaccacuacgaggagugcagcugcuaccccgacagcagcgagaucaccugcgugugcagagacaacuggcacggcagcaacagacccugggugagcuucaaccagaaccuggaguaccagaucggcuacaucugcagcggcaucuucggcgacaaccccagacccaacgacaagaccggcagcugcggccccgugagcagcaacggcgccaacggcgugaagggcuucagcuucaaguacggcaacggcguguggaucggcagaaccaagagcaucagcagcagaaacggcuucgagaugaucugggaccccaacggcuggaccggcaccgacaacaacuucagcaucaagcaggacaucgugggcaucaacgaguggagcggcuacagcggcagcuucgugcagcaccccgagcugaccggccuggacugcaucagacccugcuucuggguggagcugaucagaggcagacccaaggagaacaccaucuggaccagcggcagcagcaucagcuucugcggcgugaacagcgacaccgugggcuggagcuggcccgacggcgccgagcugcccuucaccaucgacaaguga

SEQ ID NO: 177564 - RNA, 1410 nt, Artificial Sequence; identical to SEQ ID NO: 176798
  derived and/or modified CDS sequence (opt4) from neuraminidase__InfluenzaA__ACX35320

SEQ ID NO: 177565 - RNA, 1410 nt, Artificial Sequence
  derived and/or modified CDS sequence (opt4) from neuraminidase__InfluenzaA__ACX35330
augaaccccaaccagaagaucaucaccaucggcagcgugugcaucaccaucggcauggccaaccugauccugcagaucggcaacaucaucagcaucuggaucagccacagcauccagcugggcaaccagaaccagaucgagaccugcaaccagagcgugaucaccuacgagaacaacaccugggugaaccagaccuacgugaacaucagcaacaccaacuucgccgccggccagagcguggugagcgugaagcuggccggcaacagcagccugugccccgugagcggcugggccaucuacagcaaggacaacagcaucagaaucggcagcaagggcgacguguucgugaucagagagcccuucaucagcugcagcccccuggagugcagaaccuucuuccugacccagggcgcccugcugaacgacaagcacagcaacggcaccaucaaggacagaagccccuacagaacccugaugagcugccccaucggcgaggugcccagccccuacaacagcagauucgagagcguggccuggagcgccagcgccugccacgacggcaucaacuggcugaccaucggcaucagcggccccgacaacggcgccguggccgugcugaaguacaacggcaucaucaccgacaccaucaagagcuggagaaacaacauccugagaacccaggagagcgagugcgccugcgugaacggcagcugcuucaccgugaugaccgacggccccagcgacggccaggccagcuacaagaucuucagaaucgagaagggcaagaucgugaagagcguggagaugaacgcccccaacuaccacuacgaggagugcagcugcuaccccgacagcagcgagaucaccugcgugugcagagacaacuggcacggcagcaacagacccugggugagcuucaaccagaaccuggaguaccagaucggcuacaucugcagcggcaucuucggcgacaaccccagacccaacgacaagaccggcagcugcggccccgugagcagcaacggcgccaacggcgugaagggcuucagcuucaaguacggcaacggcguguggaucggcagaaccaagagcaucagcagcagaaacggcuucgagaugaucugggaccccaacggcuggaccggcaccgacaacaacuucagcaucaagcaggacaucgugggcaucaacgaguggagcggcuacagcggcagcuucgugcagcaccccgagcugaccggccuggacugcaucagacccugcuucuggguggagcugaucagaggcagacccaaggagaacaccaucuggaccagcggcagcagcaucagcuucugcggcgugaacagcgacaccgugggcuggagcuggcccgacggcgccgagcugcccuucaccaucgacaaguga

SEQ ID NO: 177566 - RNA, 1410 nt, Artificial Sequence; identical to SEQ ID NO: 176798
  derived and/or modified CDS sequence (opt4) from neuraminidase__InfluenzaA__ACX48479

SEQ ID NO: 177567 - RNA, 1410 nt, Artificial Sequence; identical to SEQ ID NO: 176798
  derived and/or modified CDS sequence (opt4) from neuraminidase__InfluenzaA__ACX48481

SEQ ID NO: 177568 - RNA, 1410 nt, Artificial Sequence; identical to SEQ ID NO: 176798
  derived and/or modified CDS sequence (opt4) from neuraminidase__InfluenzaA__ACX55836

SEQ ID NO: 177569 - RNA, 1410 nt, Artificial Sequence
  derived and/or modified CDS sequence (opt4) from neuraminidase__InfluenzaA__ACX56269
augaaccccaagcagaagaucaucaccaucggcagcgugugcaugaccaucggcauggccaaccugauccugcagaucggcaacaucaucagcaucuggaucagccacagcauccagcugggcaaccagaaccagaucgagaccugcaaccagagcgugaucaccuacgagaacaacaccugggugaaccagaccuacgugaacaucagcaacaccaacuucgccgccggccagagcguggugagcgugaagcuggccggcaacagcagccugugccccgugagcggcugggccaucuacagcaaggacaacagcaucagaaucggcagcaagggcgacguguucgugaucagagagcccuucaucagcugcagcccccuggagugcagaaccuucuuccugacccagggcgcccugcugaacgacaagcacagcaacggcaccaucaaggacagaagccccuacagaacccugaugagcugccccaucggcgaggugcccagccccuacaacagcagauucgagagcguggccuggagcgccagcgccugccacgacggcaucaacuggcugaccaucggcaucagcggccccgacaacggcgccguggccgugcugaaguacaacggcaucaucaccgacaccaucaagagcuggagaaacaacauccugagaacccaggagagcgagugcgccugcgugaacggcagcugcuucaccgugaugaccgacggccccagcgacggccaggccagcuacaagaucuucagaaucgagaagggcaagaucgugaagagcguggagaugaacgcccccaacuaccacuacgaggagugcagcugcuaccccgacagcagcgagaucaccugcgugugcagagacaacuggcacggcagcaacagacccugggugagcuucaaccagaaccuggaguaccagaucggcuacaucugcagcggcaucuucggcgacaaccccagacccaacgacaagaccggcagcugcggccccgugagcagcaacggcgccaacggcgugaagggcuucagcuucaaguacggcaacggcguguggaucggcagaaccaagagcaucagcagcagaaacggcuucgagaugaucugggaccccaacggcuggaccggcaccgacaacaacuucagcaucaagcaggacaucgugggcaucaacgaguggagcggcuacagcggcagcuucgugcagcaccccgagcugaccggccuggacugcaucagacccugcuucuggguggagcugaucagaggcagacccaaggagaacaccaucuggaccagcggcagcagcaucagcuucugcggcgugaacagcgacaccgugggcuggagcuggcccgacggcgccgagcugcccuucaccaucgacaaguga

SEQ ID NO: 177570 - RNA, 1410 nt, Artificial Sequence
  derived and/or modified CDS sequence (opt4) from neuraminidase__InfluenzaA__ACX56270
augaaccccaagcagaagaucaucaccaucggcagcgugugcaugaccaucggcauggccaaccugauccugcagaucggcaacaucaucagcaucuggaucagccacagcauccagcugggcaaccagaaccagaucgagaccugcaaccagagcgugaucaccuacgagaacaacaccugggugaaccagaccuacgugaacaucagcaacaccaacuucgccgccggccagagcguggugagcgugaagcuggccggcaacagcagccugugccccgugagcggcugggccaucuacagcaaggacaacagcaucagaaucggcagcaagggcgacguguucgugaucagagagcccuucaucagcugcagcccccuggagugcagaaccuucuuccugacccagggcgcccugcugaacgacaagcacagcaacggcaccaucaaggacagaagccccuacagaacccugaugagcugccccaucggcgaggugcccagccccuacaacagcagauucgagagcguggccuggagcgccagcgccugccacgacggcaucaacuggcugaccaucggcaucagcggccccgacaacggcgccguggccgugcugaaguacaacggcaucaucaccgacaccaucaagagcuggagaaacaacauccugagaacccaggagagcgagugcgccugcgugaacggcagcugcuucaccgugaugaccgacggccccagcgacggccaggccagcuacaagaucuucagaaucgagaagggcaagaucgugaagagcguggagaugaacgcccccaacuaccacuacgaggagugcagcugcuaccccgacagcagcgagaucaccugcgugugcagagacaacuggcacggcagcaacagacccugggugagcuucaaccagaaccuggaguaccagaucggcuacaucugcagcggcaucuucggcgacaaccccagacccaacgacaagaccggcagcugcggccccgugagcagcaacggcgccaacggcgugaagggcuucagcuucaaguacggcaacggcguguggaucggcagaaccaagagcaucagcagcagaaacggcuucgagaugaucugggaccccaacggcuggaccggcaccgacaacaacuucagcaucaagcaggacaucgugggcaucaacgaguggagcggcuacagcggcagcuucgugcagcaccccgagcugaccggccuggacugcaucagacccugcuucuggguggagcugaucagaggcagacccaaggagaacaccaucuggaccagcggcagcagcaucagcuucugcggcgugaacagcgacagcgugagcuggagcuggcccgacggcgccgagcugcccuucaccaucgacaaguga

SEQ ID NO: 177571 - RNA, 1410 nt, Artificial Sequence
  derived and/or modified CDS sequence (opt4) from neuraminidase__InfluenzaA__ACX56271
augaaccccaagcagaagaucaucaccaucggcagcgugugcaugaccaucggcauggccaaccugauccugcagaucggcaacaucaucagcaucuggaucagccacagcauccagcugggcaaccagaaccagaucgagaccugcaaccagagcgugaucaccuacgagaacaacaccugggugaaccagaccuacgugaacaucagcaacaccaaccuggccgccggccagagcgugggcagcgugaagcuggccggcaacagcagccugugccccgugagcggcugggccaucuacagcaaggacaacagcaucagaaucggcagcaagggcgacguguucgugaucagagagcccuucaucagcugcagcccccuggagugcagaaccuucuuccugacccagggcgcccugcugaacgacaagcacagcaacggcaccaucaaggacagaagccccuacagaacccugaugagcugccccaucggcgaggugcccagccccuacaacagcagauucgagagcguggccuggagcgccagcgccugccacgacggcaucaacuggcugaccaucggcaucagcggccccgacaacggcgccguggccgugcugaaguacaacggcaucaucaccgacaccaucaagagcuggagaaacaacauccugagaacccaggagagcgagugcgccugcgugaacggcagcugcuucaccgugaugaccgacggccccagcgacggccaggccagcuacaagaucuucagaaucgagaagggcaagaucgugaagagcguggagaugaacgcccccaacuaccacuacgaggagugcagcugcuaccccgacagcagcgagaucaccugcgugugcagagacaacuggcacggcagcaacagacccugggugagcuucaaccagaaccuggaguaccagaucggcuacaucugcagcggcaucuucggcgacaaccccagacccaacgacaagaccggcagcugcggccccgugagcagcaacggcgccaacggcgugaagggcuucagcuucaaguacggcaacggcguguggaucggcagaaccaagagcaucagcagcagaaacggcuucgagaugaucugggaccccaacggcuggaccggcaccgacaacaacuucagcaucaagcaggacaucgugggcaucaacgaguggagcggcuacagcggcagcuucgugcagcaccccgagcugaccggccuggacugcaucagacccugcuucuggguggagcugaucagaggcagacccaaggagaacaccaucuggaccagcggcagcagcaucagcuucugcggcgugaacagcgacaccgugggcuggagcuggcccgacggcgccgagcugcccuucaccaucgacaaguga

SEQ ID NO: 177572 - RNA, 1410 nt, Artificial Sequence; identical to SEQ ID NO: 176798
  derived and/or modified CDS sequence (opt4) from neuraminidase__InfluenzaA__ACX83579

SEQ ID NO: 177573 - RNA, 1410 nt, Artificial Sequence; identical to SEQ ID NO: 176798
  derived and/or modified CDS sequence (opt4) from neuraminidase__InfluenzaA__ACX85425

SEQ ID NO: 177574 - RNA, 1410 nt, Artificial Sequence; identical to SEQ ID NO: 176798
  derived and/or modified CDS sequence (opt4) from neuraminidase__InfluenzaA__ACX85426

SEQ ID NO: 177575 - RNA, 1410 nt, Artificial Sequence
  derived and/or modified CDS sequence (opt4) from neuraminidase__InfluenzaA__ACY02998
augaaccccaaccagaagaucaucaccaucggcagcgugugcaugaccaucggcauggccaaccugauccugcagaucggcaacaucaucagcaucuggaucagccacagcauccagcugggcaaccagaaccagaucgagaccugcaaccagagcgugaucaccuacgagaacaacaccugggugaaccagaccuacgugaacaucagcaacaccaacuucgccgccggccagagcguggugagcgugaagcuggccggcaacagcagccugugccccgugagcggcugggccaucuacagcaaggacaacagcaucagaaucggcagcaagggcgacguguucgugaucagagagcccuucaucagcugcagcccccuggagugcagaaccuucuuccugacccagggcgcccugcugaacgacaagcacagcaacggcaccaucaaggacagaagccccuacagaacccugaugagcugccccaucggcgaggugcccagccccuacaacagcagauucgagagcguggccuggagcgccagcgccugccacgacggcaucaacuggcugaccaucggcaucagcggccccgacaacggcgccguggccgugcugaaguacaacggcaucaucaccgacaccaucaagagcuggagaaacaacauccugagaacccaggagagcgagugcgccugcgugaacggcagcugcuucaccgugaugaccgacggccccagcaacggccaggccagcuacaagaucuucagaaucgagaagggcaagaucgugaagagcguggagaugaacgcccccaacuaccacuacgaggagugcagcugcuaccccgacagcggcgagaucaccugcgugugcagagacaacuggcacggcagcaacagacccugggugagcuucaaccagaaccuggaguaccagaucggcuacaucugcagcggcaucuucggcgacaaccccagacccaacgacaagaccggcagcugcggccccgugagcagcaacggcgccaacggcgugaagggcuucagcuucaaguacggcaacggcguguggaucggcagaaccaagagcaucagcagcagaaacggcuucgagaugaucugggaccccaacggcuggaccggcaccgacaacaacuucagcaucaagcaggacaucgugggcaucaacgaguggagcggcuacagcggcagcuucgugcagcaccccgagcugaccggccuggacugcaucagacccugcuucuggguggagcugaucagaggcagacccaaggagaacaccaucuggaccagcggcagcagcaucagcuucugcggcgugaacagcgacaccgugggcuggagcuggcccgacggcgccgagcugcccuucaccaucgacaaguga

SEQ ID NO: 177576 - RNA, 1410 nt, Artificial Sequence; identical to SEQ ID NO: 176798
  derived and/or modified CDS sequence (opt4) from neuraminidase__InfluenzaA__ACY03005

SEQ ID NO: 177577 - RNA, 1410 nt, Artificial Sequence; identical to SEQ ID NO: 176798
  derived and/or modified CDS sequence (opt4) from neuraminidase__InfluenzaA__ACY03008

SEQ ID NO: 177578 - RNA, 1410 nt, Artificial Sequence; identical to SEQ ID NO: 176798
  derived and/or modified CDS sequence (opt4) from neuraminidase__InfluenzaA__ACY03011

SEQ ID NO: 177579 - RNA, 1410 nt, Artificial Sequence; identical to SEQ ID NO: 176798
  derived and/or modified CDS sequence (opt4) from neuraminidase__InfluenzaA__ACY03012

SEQ ID NO: 177580 - RNA, 1410 nt, Artificial Sequence; identical to SEQ ID NO: 176798
  derived and/or modified CDS sequence (opt4) from neuraminidase__InfluenzaA__ACY03016

SEQ ID NO: 177581 - RNA, 1410 nt, Artificial Sequence; identical to SEQ ID NO: 176798
  derived and/or modified CDS sequence (opt4) from neuraminidase__InfluenzaA__ACY26194

SEQ ID NO: 177582 - RNA, 1410 nt, Artificial Sequence; identical to SEQ ID NO: 176798
  derived and/or modified CDS sequence (opt4) from neuraminidase__InfluenzaA__ACY26204

SEQ ID NO: 177583 - RNA, 1410 nt, Artificial Sequence; identical to SEQ ID NO: 176798
  derived and/or modified CDS sequence (opt4) from neuraminidase__InfluenzaA__ACY30123

SEQ ID NO: 177584 - RNA, 1410 nt, Artificial Sequence; identical to SEQ ID NO: 176798
  derived and/or modified CDS sequence (opt4) from neuraminidase__InfluenzaA__ACY30124

SEQ ID NO: 177585 - RNA, 1410 nt, Artificial Sequence; identical to SEQ ID NO: 176798
  derived and/or modified CDS sequence (opt4) from neuraminidase__InfluenzaA__ACY30125

SEQ ID NO: 177586 - RNA, 1410 nt, Artificial Sequence; identical to SEQ ID NO: 176798
  derived and/or modified CDS sequence (opt4) from neuraminidase__InfluenzaA__ACY30127

SEQ ID NO: 177587 - RNA, 1410 nt, Artificial Sequence; identical to SEQ ID NO: 176798
  derived and/or modified CDS sequence (opt4) from neuraminidase__InfluenzaA__ACY30128

SEQ ID NO: 177588 - RNA, 1410 nt, Artificial Sequence; identical to SEQ ID NO: 176798
  derived and/or modified CDS sequence (opt4) from neuraminidase__InfluenzaA__ACY46105

SEQ ID NO: 177589 - RNA, 1410 nt, Artificial Sequence; identical to SEQ ID NO: 176798
  derived and/or modified CDS sequence (opt4) from neuraminidase__InfluenzaA__ACY46165

SEQ ID NO: 177590 - RNA, 1410 nt, Artificial Sequence; identical to SEQ ID NO: 176798
  derived and/or modified CDS sequence (opt4) from neuraminidase__InfluenzaA__ACY46175

SEQ ID NO: 177591 - RNA, 1410 nt, Artificial Sequence; identical to SEQ ID NO: 176798
  derived and/or modified CDS sequence (opt4) from neuraminidase__InfluenzaA__ACY46345

SEQ ID NO: 177592 - RNA, 1410 nt, Artificial Sequence; identical to SEQ ID NO: 176798
  derived and/or modified CDS sequence (opt4) from neuraminidase__InfluenzaA__ACY46385

SEQ ID NO: 177593 - RNA, 1410 nt, Artificial Sequence; identical to SEQ ID NO: 176798
  derived and/or modified CDS sequence (opt4) from neuraminidase__InfluenzaA__ACY46485

SEQ ID NO: 177594 - RNA, 1410 nt, Artificial Sequence; identical to SEQ ID NO: 176828
  derived and/or modified CDS sequence (opt4) from neuraminidase__InfluenzaA__ACY77536

SEQ ID NO: 177595 - RNA, 1410 nt, Artificial Sequence; identical to SEQ ID NO: 176788
  derived and/or modified CDS sequence (opt4) from neuraminidase__InfluenzaA__ACY77546

SEQ ID NO: 177596 - RNA, 1410 nt, Artificial Sequence; identical to SEQ ID NO: 176828
  derived and/or modified CDS sequence (opt4) from neuraminidase__InfluenzaA__ACY77565

SEQ ID NO: 177597 - RNA, 1410 nt, Artificial Sequence
  derived and/or modified CDS sequence (opt4) from neuraminidase__InfluenzaA__ACY77575
augaaccccaaccagaagaucaucaccaucggcagcgugugcaugaccaucggcauggccaaccugauccugcagaucggcaacaucaucagcaucuggaucagccacagcauccagcugggcaaccagaaccagaucgagaccugcaaccagagcgugaucaccuacgagaacaacaccugggugaaccagaccuacgugaacaucagcaacaccaacuucgccgccggccagagcguggugagcgugaagcuggccggcaacagcagccugugccccgugagcggcugggccaucuacagcaaggacaacagcaucagaaucggcagcaagggcgacguguucgugaucagagagcccuucaucagcugcagcccccuggagugcagaaccuucuuccugacccagggcgcccugcugaacgacaagcacagcaacggcaccaucaaggacagaagccccuacagaacccugaugagcugccccaucggcgaggugcccagccccuacaacagcagauucgagagcguggccuggagcgccagcgccugccacgacggcaucaacuggcugaccaucggcaucagcggccccgacaacggcgccguggccgugcugaaguacaacggcaucaucaccgacaccaucaagagcuggagaaacaacauccugagaacccaggagagcgagugcgccugcgugaacggcagcugcuucaccgugaugaccgacggccccagcgacggccaggccagcuacaagaucuucagaaucgagaagggcaagaucgugaagagcguggagaugaacgcccccaacuaccacuacgaggagugcagcugcuaccccgacagcagcgagaucaccugcgugugcagagacaacuggcacggcagcaacagacccugggugagcuucaaccagaaccuggaguaccagaucggcuacaucugcagcggcaucuucggcgacaaccccagacccagcgacaagaccggcagcugcggccccgugagcagcaacggcgccaacggcgugaagggcuucagcuucaaguacggcaacggcguguggaucggcagaaccaagagcaucagcagcagaaacggcuucgagaugaucugggaccccaacggcuggaccggcaccgacaacaacuucagcaucaagcaggacaucgugggcaucaacgaguggagcggcuacagcggcagcuucgugcagcaccccgagcugaccggccuggacugcaucagacccugcuucuggguggagcugaucagaggcagacccaaggagaacaccaucuggaccagcggcagcagcaucagcuucugcggcgugaacagcgacaccgugggcuggagcuggcccgacggcgccgagcugcccuucaccaucgacaaguga

SEQ ID NO: 177598 - RNA, 1410 nt, Artificial Sequence; identical to SEQ ID NO: 176798
  derived and/or modified CDS sequence (opt4) from neuraminidase__InfluenzaA__ACY77585

SEQ ID NO: 177599 - RNA, 1410 nt, Artificial Sequence; identical to SEQ ID NO: 176828
  derived and/or modified CDS sequence (opt4) from neuraminidase__InfluenzaA__ACY77595

SEQ ID NO: 177600 - RNA, 1410 nt, Artificial Sequence; identical to SEQ ID NO: 176828
  derived and/or modified CDS sequence (opt4) from neuraminidase__InfluenzaA__ACY77605

SEQ ID NO: 177601 - RNA, 1410 nt, Artificial Sequence; identical to SEQ ID NO: 176798
  derived and/or modified CDS sequence (opt4) from neuraminidase__InfluenzaA__ACY77625

SEQ ID NO: 177602 - RNA, 1410 nt, Artificial Sequence
  derived and/or modified CDS sequence (opt4) from neuraminidase__InfluenzaA__ACY77655
augaaccccaaccagaagaucaucaccaucggcagcgugugcaugaccaucggcauggccaaccugauccugcagaucggcaacaucaucagcaucuggaucagccacagcauccagcugggcaaccagaaccagaucgagaccugcaaccagagcgugaucaccuacgagaacaacaccugggugaaccagaccuacgugaacaucagcaacaccaacuucgccgccggccagagcguggugagcgugaagcuggccggcaacagcagccugugccccgugagcggcugggccaucuacagcaaggacaacagcgugagaaucggcagcaagggcgacguguucgugaucagagagcccuucaucagcugcagcccccuggagugcagaaccuucuuccugacccagggcgcccugcugaacgacaagcacagcaacggcaccaucaaggacagaagccccuacagaacccugaugagcugccccaucggcgaggugcccagccccuacaacagcagauucgagagcguggccuggagcgccagcgccugccacgacggcaucaacuggcugaccaucggcaucagcggccccgacaacggcgccguggccgugcugaaguacaacggcaucaucaccgacaccaucaagagcuggagaaacaacauccugagaacccaggagagcgagugcgccugcgugaacggcagcugcuucaccgugaugaccgacggccccagcaacggccaggccagcuacaagaucuucagaaucgagaagggcaagaucgugaagagcguggagaugaacgcccccaacuaccacuacgaggagugcagcugcuaccccgacagcagcgagaucaccugcgugugcagagacaacuggcacggcagcaacagacccugggugagcuucaaccagaaccuggaguaccagaucggcuacaucugcagcggcaucuucggcgacaaccccagacccaacgacaagaccggcagcugcggccccgugagcuucaacggcgccaacggcgugaagggcuucagcuucaaguacggcaacggcguguggaucggcagaaccaagagcaucagcagcagaaacggcuucgagaugaucugggaccccaacggcuggaccggcaccgacaacaacuucagcaucaagcaggacaucgugggcaucaacgaguggagcggcuacagcggcagcuucgugcagcaccccgagcugaccggccuggacugcaucagacccugcuucuggguggagcugaucagaggcagacccaaggagaacaccaucuggaccagcggcagcagcaucagcuucugcggcgugaacagcgacaccgugggcuggagcuggcccgacggcgccgagcugcccuucaccaucgacaaguga

SEQ ID NO: 177603 - RNA, 1410 nt, Artificial Sequence; identical to SEQ ID NO: 176798
  derived and/or modified CDS sequence (opt4) from neuraminidase__InfluenzaA__ACY77665

SEQ ID NO: 177604 - RNA, 1410 nt, Artificial Sequence; identical to SEQ ID NO: 176798
  derived and/or modified CDS sequence (opt4) from neuraminidase__InfluenzaA__ACY77675

SEQ ID NO: 177605 - RNA, 1410 nt, Artificial Sequence; identical to SEQ ID NO: 176788
  derived and/or modified CDS sequence (opt4) from neuraminidase__InfluenzaA__ACY77685

SEQ ID NO: 177606 - RNA, 1410 nt, Artificial Sequence; identical to SEQ ID NO: 176788
  derived and/or modified CDS sequence (opt4) from neuraminidase__InfluenzaA__ACY77695

SEQ ID NO: 177607 - RNA, 1410 nt, Artificial Sequence; identical to SEQ ID NO: 176788
  derived and/or modified CDS sequence (opt4) from neuraminidase__InfluenzaA__ACY77705

SEQ ID NO: 177608 - RNA, 1410 nt, Artificial Sequence; identical to SEQ ID NO: 176788
  derived and/or modified CDS sequence (opt4) from neuraminidase__InfluenzaA__ACY77725

SEQ ID NO: 177609 - RNA, 1410 nt, Artificial Sequence; identical to SEQ ID NO: 176788
  derived and/or modified CDS sequence (opt4) from neuraminidase__InfluenzaA__ACY77735

SEQ ID NO: 177610 - RNA, 1410 nt, Artificial Sequence; identical to SEQ ID NO: 176798
  derived and/or modified CDS sequence (opt4) from neuraminidase__InfluenzaA__ACY77745

SEQ ID NO: 177611 - RNA, 1410 nt, Artificial Sequence; identical to SEQ ID NO: 176798
  derived and/or modified CDS sequence (opt4) from neuraminidase__InfluenzaA__ACY77755

SEQ ID NO: 177612 - RNA, 1410 nt, Artificial Sequence; identical to SEQ ID NO: 176798
  derived and/or modified CDS sequence (opt4) from neuraminidase__InfluenzaA__ACY77775

SEQ ID NO: 177613 - RNA, 1410 nt, Artificial Sequence; identical to SEQ ID NO: 176798
  derived and/or modified CDS sequence (opt4) from neuraminidase__InfluenzaA__ACY77785

SEQ ID NO: 177614 - RNA, 1410 nt, Artificial Sequence; identical to SEQ ID NO: 176798
  derived and/or modified CDS sequence (opt4) from neuraminidase__InfluenzaA__ACY77795

SEQ ID NO: 177615 - RNA, 1410 nt, Artificial Sequence
  derived and/or modified CDS sequence (opt4) from neuraminidase__InfluenzaA__ACY77825
augaaccccaaccagaagaucaucaccaucggcagcgugugcaugaccaucggcauggccaaccugauccugcagaucggcaacaucaucagcaucuggaucagccacagcauccagcugggcaaccagaaccagaucgagaccugcaaccagagcgugaucaccuacgagaacaacaccugggugaaccagaccuacgugaacaucagcaacaccaacuucgccgccggccagagcguggugagcgccaagcuggccggcaacagcagccugugccccgugagcggcugggccaucuacagcaaggacaacagcaucagaaucggcagcaagggcgacguguucgugaucagagagcccuucaucagcugcagcccccuggagugcagaaccuucuuccugacccagggcgcccugcugaacgacaagcacagcaacggcaccaucaaggacagaagccccuacagaacccugaugagcugccccaucggcgaggugcccagccccuacaacagcagauucgagagcguggccuggagcgccagcgccugccacgacggcaucaacuggcugaccaucggcaucagcggccccgacaacggcgccguggccgugcugaaguacaacggcaucaucaccgacaccaucaagagcuggagaaacaacauccugagaacccaggagagcgagugcgccugcgugaacggcagcugcuucaccgugaugaccgacggccccagcgacggccaggccagcuacaagaucuucagaaucgagaagggcaagaucgugaagagcguggagaugaacgcccccaacuaccacuacgaggagugcagcugcuaccccgacagcagcgagaucaccugcgugugcagagacaacuggcacggcagcaacagacccugggugagcuucaaccagaaccuggaguaccagaucggcuacaucugcagcggcaucuucggcgacaaccccagacccaacgacaagaccggcagcugcggccccgugagcagcaacggcgccaacggcgugaagggcuucagcuucaaguacggcaacggcguguggaucggcagaaccaagagcaucaacagcagaaacggcuucgagaugaucugggaccccaacggcuggaccggcaccgacaacaacuucagcaucaagcaggacaucgugggcaucaacgaguggagcggcuacagcggcagcuucgugcagcaccccgagcugaccggccuggacugcaucagacccugcuucuggguggagcugaucagaggcagacccaaggagaacaccaucuggaccagcggcagcagcaucagcuucugcggcgugaacagcgacaccgugggcuggagcuggcccgacggcgccgagcugcccuucaccaucgacaaguga

SEQ ID NO: 177616 - RNA, 1410 nt, Artificial Sequence; identical to SEQ ID NO: 177615
  derived and/or modified CDS sequence (opt4) from neuraminidase__InfluenzaA__ACY77835

SEQ ID NO: 177617 - RNA, 1410 nt, Artificial Sequence; identical to SEQ ID NO: 176828
  derived and/or modified CDS sequence (opt4) from neuraminidase__InfluenzaA__ACY77845

SEQ ID NO: 177618 - RNA, 1410 nt, Artificial Sequence; identical to SEQ ID NO: 176798
  derived and/or modified CDS sequence (opt4) from neuraminidase__InfluenzaA__ACY77865

SEQ ID NO: 177619 - RNA, 1410 nt, Artificial Sequence
  derived and/or modified CDS sequence (opt4) from neuraminidase__InfluenzaA__ACY77870
augaaccccaaccagaagaucaucaccaucggcagcgugugcaugaccaucggcauggccaaccugauccugcagaucggcaacaucaucagcaucuggaucagccacagcauccagcugggcaaccagaaccagaucgagaccugcaaccagagcgugaucaccuacgagaacaacaccugggugaaccagaccuacgugaacaucagcaacaccaaccuggccgccggccagagcguggugagcgugaagcuggccggcaacagcagccugugccccgugagcggcugggccaucuacagcaaggacaacagcaucagaaucggcagcaagggcgacguguucgugaucagagagcccuucaucagcugcagcccccuggagugcagaaccuucuuccugacccagggcgcccugcugaacgacaagcacagcaacggcaccaucaaggacagaagccccuacagaacccugaugagcugccccaucggcgaggugcccagccccuacaacagcagauucgagagcguggccuggagcgccagcgccugccacgacggcaucaacuggcugaccaucggcaucagcggccccgacaacggcgccguggccgugcugaaguacaacggcaucaucaccgacaccaucaagagcuggagaaacaacauccugagaacccaggagagcgagugcgccugcgugaacggcagcugcuucaccgugaugaccgacggccccagcgacggccaggccagcuacaagaucuucagaaucgagaagggcaagaucgugaagagcguggagaugaacgcccccaacuaccacuacgaggagugcagcugcuaccccgacagcagcgagaucaccugcgugugcagagacaacuggcacggcagcaacagacccugggugagcuucaaccagaaccuggaguaccagaucggcuacaucugcagcggcaucuucggcgacaaccccagacccaacgacaagaccggcagcugcggccccgugagcagcaacggcgccaacggcgugaagggcuucagcuucaaguacggcaacggcguguggaucggcagaaccaagagcaucagcagcagaaacggcuucgagaugaucugggaccccaacggcuggaccggcaccgacaacaacuucagcaucaagcaggacaucgugggcaucaacgaguggagcggcuacagcggcagcuucgugcagcaccccgagcugaccggccuggacugcaucagacccugcuucuggguggagcugaucagaggcagacccaaggagaacaccaucuggaccagcggcagcagcaucagcuucugcggcgugaacagcgacaccgugggcuggagcuggcccgacggcgccgagcugcccuucaccaucgacaaguga

SEQ ID NO: 177620 - RNA, 1410 nt, Artificial Sequence; identical to SEQ ID NO: 176798
  derived and/or modified CDS sequence (opt4) from neuraminidase__InfluenzaA__ACY77877

SEQ ID NO: 177621 - RNA, 1410 nt, Artificial Sequence; identical to SEQ ID NO: 176798
  derived and/or modified CDS sequence (opt4) from neuraminidase__InfluenzaA__ACY77887

SEQ ID NO: 177622 - RNA, 1410 nt, Artificial Sequence; identical to SEQ ID NO: 176798
  derived and/or modified CDS sequence (opt4) from neuraminidase__InfluenzaA__ACY77907

SEQ ID NO: 177623 - RNA, 1410 nt, Artificial Sequence; identical to SEQ ID NO: 176828
  derived and/or modified CDS sequence (opt4) from neuraminidase__InfluenzaA__ACY77917

SEQ ID NO: 177624 - RNA, 1410 nt, Artificial Sequence
  derived and/or modified CDS sequence (opt4) from neuraminidase__InfluenzaA__ACY77927
augaaccccaaccagaagaucaucaccaucggcagcgugugcaugaccaucggcauggccaaccugauccugcagaucggcaacaucaucagcaucuggaucagccacagcauccagcugggcaaccagaaccagaucgagaccugcaaccagagcgugaucaccuacgagaacaacaccugggugaaccagaccuacgugaacaucagcaacaccaacuucgccgccggccagagcguggugagcgugaagcuggccggcaacagcagccugugccccgugagcggcugggccaucuacagcaaggacaacagcaucagaaucggcagcaagggcgacguguucgugaucagagagcccuucaucagcugcagcccccuggagugcagaaccuucuuccugacccagggcgcccugcugaacgacaagcacagcaacggcaccaucaaggacagaagccccuacagaacccugaugagcugccccaucggcgaggugcccagccccuacaacagcagauucgagagcguggccuggagcgccagcgccugccacgacggcaucaacuggcugaccaucggcaucagcggccccaacaacggcgccguggccgugcugaaguacaacggcaucaucaccgacaccaucaagagcuggagaaacaacauccugagaacccaggagagcgagugcgccugcgugaacggcagcugcuucaccgugaugaccgacggccccagcgacggccaggccagcuacaagaucuucagaaucgagaagggcaagaucgugaagagcguggagaugaacgcccccaacuaccacuacgaggagugcagcugcuaccccgacagcagcgagaucaccugcgugugcagagacaacuggcacggcagcaacagacccugggugagcuucaaccagaaccuggaguaccagaucggcuacaucugcagcggcaucuucggcgacaaccccagacccaacgacaagaccggcagcugcggccccgugagcagcaacggcgccaacggcgugaagggcuucagcuucaaguacggcaacggcguguggaucggcagaaccaagagcaucagcagcagaaacggcuucgagaugaucugggaccccaacggcuggaccggcaccgacaacaacuucagcaucaagcaggacaucgugggcaucaacgaguggagcggcuacagcggcagcuucgugcagcaccccgagcugaccggccuggacugcaucagacccugcuucuggguggagcugaucagaggcagacccaaggagaacaccaucuggaccagcggcagcagcaucagcuucugcggcgugaacagcgacaccgugggcuggagcuggcccgacggcgccgagcugcccuucaccaucgacaaguga

SEQ ID NO: 177625 - RNA, 1410 nt, Artificial Sequence; identical to SEQ ID NO: 176798
  derived and/or modified CDS sequence (opt4) from neuraminidase__InfluenzaA__ACY77937

SEQ ID NO: 177626 - RNA, 1410 nt, Artificial Sequence; identical to SEQ ID NO: 176798
  derived and/or modified CDS sequence (opt4) from neuraminidase__InfluenzaA__ACY77947

SEQ ID NO: 177627 - RNA, 1410 nt, Artificial Sequence; identical to SEQ ID NO: 176798
  derived and/or modified CDS sequence (opt4) from neuraminidase__InfluenzaA__ACY77967

SEQ ID NO: 177628 - RNA, 1410 nt, Artificial Sequence; identical to SEQ ID NO: 176788
  derived and/or modified CDS sequence (opt4) from neuraminidase__InfluenzaA__ACY77977

SEQ ID NO: 177629 - RNA, 1410 nt, Artificial Sequence; identical to SEQ ID NO: 176798
  derived and/or modified CDS sequence (opt4) from neuraminidase__InfluenzaA__ACY77987

SEQ ID NO: 177630 - RNA, 1410 nt, Artificial Sequence
  derived and/or modified CDS sequence (opt4) from neuraminidase__InfluenzaA__ACY77997
augaaccccaaccagaagaucaucaccaucggcagcgugugcaugaccaucggcauggccaaccugauccugcagaucggcaacaucaucagcaucuggaucagccacagcauccagcugggcaaccagaaccagaucgagaccugcaaccagagcgugaucaccuacgagaacaacaccugggugaaccagaccuacgugaacaucagcaacaccaacuucgccgccggccagagcguggugagcgugacccuggccggcaacagcagccugugccccgugagcggcugggccaucuacagcaaggacaacagcaucagaaucggcagcaagggcgacguguucgugaucagagagcccuucaucagcugcagcccccuggagugcagaaccuucuuccugacccagggcgcccugcugaacgacaagcacagcaacggcaccaucaaggacagaagccccuacagaacccugaugagcugccccaucggcgaggugcccagccccuacaacagcagauucgagagcguggccuggagcgccagcgccugccacgacggcaucaacuggcugaccaucggcaucagcggccccgacaacggcgccguggccgugcugaaguacaacggcaucaucaccgacaccaucaagagcuggagaaacaacauccugagaacccaggagagcgagugcgccugcgugaacggcagcugcuucaccgugaugaccgacggccccagcgacggccaggccagcuacaagaucuucagaaucgagaagggcaagaucgugaagagcguggagaugaacgcccccaacuaccacuacgaggagugcagcugcuaccccgacagcagcgagaucaccugcgugugcagagacaacuggcacggcagcaacagacccugggugagcuucaaccagaaccuggaguaccagaucggcuacaucugcagcggcaucuucggcgacaaccccagacccaacgacaagaccggcagcugcggccccgugagcagcaacggcgccaacggcgugaagggcuucagcuucaaguacggcaacggcguguggaucggcagaaccaagagcaucagcagcagaaacggcuucgagaugaucugggaccccaacggcuggaccggcaccgacaacaacuucagcaucaagcaggacaucgugggcaucaacgaguggagcggcuacagcggcagcuucgugcagcaccccgagcugaccggccuggacugcaucagacccugcuucuggguggagcugaucagaggcagacccaaggagaacaccaucuggaccagcggcagcagcaucagcuucugcggcgugaacagcgacaccgugggcuggagcuggcccgacggcgccgagcugcccuucaccaucgacaaguga

SEQ ID NO: 177631 - RNA, 1410 nt, Artificial Sequence; identical to SEQ ID NO: 176798
  derived and/or modified CDS sequence (opt4) from neuraminidase__InfluenzaA__ACY78017

SEQ ID NO: 177632 - RNA, 1410 nt, Artificial Sequence
  derived and/or modified CDS sequence (opt4) from neuraminidase__InfluenzaA__ACZ01955
augaaccccaaccagaagaucaucaccaucggcagcgugugcaugaccaucggcauggccaaccugauccugcagaucggcaacaucaucagcaucuggaucagccacagcauccagcugggcaaccagaaccagaucgagaccugcaaccagagcgugaucaccuacgagaacaacaccugggugaaccagaccuacgugaacaucagcaacaccaacuucgccgccggccagagcguggugagcgugaagcuggccggcaacagcagccugugccccgugagcggcugggccaucuacagcaaggacaacagcaucagaaucggcagcaagggcgacguguucgugaucagagagcccuucaucagcugcagcccccuggagugcagaaccuucuuccugacccagggcgcccugcugaacgacaagcacagcaacggcaccaucaaggacagaagccccuacagaacccugaugagcugccccaucggcgaggugcccagccccuacaacagcagauucgagagcguggccuggagcgccagcgccugccacgacggcaucaacuggcugaccaucggcaucagcggccccggcaacggcgccguggccgugcugaaguacaacggcaucaucaccgacaccaucaagagcuggagaaacaacauccugagaacccaggagagcgagugcgccugcgugaacggcagcugcuucaccgugaugaccgacggccccagcgacggccaggccagcuacaagaucuucagaaucgagaagggcaagaucgugaagagcguggagaugaacgcccccaacuaccacuacgaggagugcagcugcuaccccgacagcagcgagaucaccugcgugugcagagacaacuggcacggcagcaacagacccugggugagcuucaaccagaaccuggaguaccagaucggcuacaucugcagcggcaucuucggcgacaaccccagacccaacgacaagaccggcagcugcggccccgugagcagcaacggcgccaacggcgugaagggcuucagcuucaaguacggcaacggcguguggaucggcagaaccaagagcaucagcagcagaaacggcuucgagaugaucugggaccccaacggcuggaccggcaccgacaacaacuucagcaucaagcaggacaucgugggcaucaacgaguggagcggcuacagcggcagcuucgugcagcaccccgagcugaccggccuggacugcaucagacccugcuucuggguggagcugaucagaggcagacccaaggagaacaccaucuggaccagcggcagcagcaucagcuucugcggcgugaacagcgacaccgugggcuggagcuggcccgacggcgccgagcugcccuucaccaucgacaaguga

SEQ ID NO: 177633 - RNA, 1410 nt, Artificial Sequence; identical to SEQ ID NO: 176798
  derived and/or modified CDS sequence (opt4) from neuraminidase__InfluenzaA__ACZ05053

SEQ ID NO: 177634 - RNA, 1410 nt, Artificial Sequence; identical to SEQ ID NO: 176788
  derived and/or modified CDS sequence (opt4) from neuraminidase__InfluenzaA__ACZ05064

SEQ ID NO: 177635 - RNA, 1410 nt, Artificial Sequence; identical to SEQ ID NO: 176798
  derived and/or modified CDS sequence (opt4) from neuraminidase__InfluenzaA__ACZ05074

SEQ ID NO: 177636 - RNA, 1410 nt, Artificial Sequence; identical to SEQ ID NO: 176798
  derived and/or modified CDS sequence (opt4) from neuraminidase__InfluenzaA__ACZ05084

SEQ ID NO: 177637 - RNA, 1410 nt, Artificial Sequence; identical to SEQ ID NO: 176798
  derived and/or modified CDS sequence (opt4) from neuraminidase__InfluenzaA__ACZ05094

SEQ ID NO: 177638 - RNA, 1410 nt, Artificial Sequence; identical to SEQ ID NO: 176798
  derived and/or modified CDS sequence (opt4) from neuraminidase__InfluenzaA__ACZ05104

SEQ ID NO: 177639 - RNA, 1410 nt, Artificial Sequence; identical to SEQ ID NO: 176798
  derived and/or modified CDS sequence (opt4) from neuraminidase__InfluenzaA__ACZ05114

SEQ ID NO: 177640 - RNA, 1410 nt, Artificial Sequence; identical to SEQ ID NO: 176798
  derived and/or modified CDS sequence (opt4) from neuraminidase__InfluenzaA__ACZ05124

SEQ ID NO: 177641 - RNA, 1410 nt, Artificial Sequence; identical to SEQ ID NO: 176798
  derived and/or modified CDS sequence (opt4) from neuraminidase__InfluenzaA__ACZ05144

SEQ ID NO: 177642 - RNA, 1410 nt, Artificial Sequence; identical to SEQ ID NO: 176798
  derived and/or modified CDS sequence (opt4) from neuraminidase__InfluenzaA__ACZ05154

SEQ ID NO: 177643 - RNA, 1410 nt, Artificial Sequence; identical to SEQ ID NO: 176659
  derived and/or modified CDS sequence (opt4) from neuraminidase__InfluenzaA__ACZ05164

SEQ ID NO: 177644 - RNA, 1410 nt, Artificial Sequence; identical to SEQ ID NO: 176659
  derived and/or modified CDS sequence (opt4) from neuraminidase__InfluenzaA__ACZ05175

SEQ ID NO: 177645 - RNA, 1413 nt, Artificial Sequence
  derived and/or modified CDS sequence (opt4) from neuraminidase__InfluenzaA__ACZ05197
augaaccccaaccagaagaucaugaccaucggcagcaucagcaucgccaucggcaucaucagccugaugcugcagaucggcaacaucaucagcaucugggccagccacagcauccagaccggcagccagaacaacaccggcaucugcaaccagagaaucaucaccuacgagaacagcaccugggugaaccacaccuacgugaacaucaacaacaccaacgugguggccggcgaggacaagaccagcgugacccuggccggcaacagcagccugugcagcaucagcggcugggccaucuacaccaaggacaacagcaucagaaucggcagcaagggcgacguguucgugaucagagagcccuucaucagcugcagccaccuggagugcagaaccuucuuccugacccagggcgcccugcugaacgacaagcacagcaacggcaccgugaaggacagaagccccuacagagcccugaugagcugcccccugggcgaggcccccagccccuacaacagcaaguucgagagcguggccuggagcgccagcgccugccacgacggcaugggcuggcugaccaucggcaucagcggccccgacaacggcgccguggccgugcugaaguacaacggcaucaucaccggcaccaucaagagcuggaagaagcagauccugagaacccaggagagcgagugcgugugcaugaacggcagcugcuucaccaucaugaccgacggccccagcaacaaggccgccagcuacaagaucuucaagaucgagaagggcaaggugaccaagagcaucgagcugaacgcccccaacuucuacuacgaggagugcagcugcuaccccgacaccggcaucgugaugugcgugugcagagacaacuggcacggcagcaacagacccugggugagcuucaaccagaaccuggacuaccagaucggcuacaucugcagcggcguguucggcgacaaccccagacccgaggacggcgagggcagcugcaaccccgugaccguggacggcgccaacggcgugaagggcuucagcuacaaguacggcaacggcguguggaucggcagaaccaagagcaacagacugagaaagggcuucgagaugaucugggaccccaacggcuggaccaacaccgacagcgacuucagcgugaagcaggacgugguggccaucaccgacuggagcggcuacagcggcagcuucgugcagcaccccgagcugaccggccuggacugcaucagacccugcuucuggguggagcuggugagaggccugcccagagagaacaccaccaucuggaccagcggcagcagcaucagcuucugcggcgugaacagcgacaccgccaacuggagcuggcccgacggcgccgagcugcccuucaccaucgacaaguga

SEQ ID NO: 177646 - RNA, 1410 nt, Artificial Sequence
  derived and/or modified CDS sequence (opt4) from neuraminidase__InfluenzaA__ACZ05208
augaaccccaaccagaagaucaucaccaucggcagcgugagccugaccaucagcaccaucugcuucuucaugcagaucgccauccugaucaccaccgugacccugcacuucaagcaguacgaguucaacagcccccccaacaaccaggugaugcugugcgagcccaccaucaucgagagaaacaucaccgagaucguguaccugaccaacaccaccaucgagaaggagaucugccccaagcuggccgaguacagaaacuggagcaagccccagugcgacaucaccggcuucgcccccuucagcaaggacaacagcaucagacugagcgccggcggcgacaucugggugaccagagagcccuacgugagcugcgaccccgacaagugcuaccaguucgcccugggccagggcaccacccugaacaacgugcacagcaacaacaccgugagagacagaacccccuacagaacccugcugaugaacgagcugggcgugcccuuccaccugggcaccaagcaggugugcaucgccuggagcagcagcagcugccacgacggcaaggccuggcugcacgugugcaucaccggcgacgacaagaacgccaccgccagcuucaucuacaacggcagacugguggacagcguggugagcuggagcaaggagauccugagaacccaggagagcgagugcgugugcaucaacggcaccugcaccguggugaugaccgacggcagcgccagcggcaaggccgacaccaagauccuguucaucgaggagggcaagaucgugcacaccagcacccugagcggcagcgcccagcacguggaggagugcagcugcuaccccagauaccccggcgugagaugcgugugcagagacaacuggaagggcagcaacagacccaucguggacaucaacaucaaggaccacagcaucgugagcagcuacgugugcagcggccuggugggcgacacccccagaaagaacgacagcagcagcagcagccacugcagcgaccccaacaacgaggagggcggccacggcgugaagggcugggccuucgacagcggcaacgacguguggaugggcagaaccaucagcgagaagagcagacugggcuacgagaccuucaaggugaucgagggcuggagcaaccccaagagcaagcugcagaucaacagacaggugaucguggacagaggcaacagaagcggcuacagcggcaucuucagcguggagggcaagagcugcaucaacagaugcuucuacguggagcugaucagaggcagaaaggaggagaccgaggugcuguggaccagcaacagcaucgugguguucugcggcaccagcggcaccuacggcaccggcagcuggcccgacggcgccgacaucaaccugaugcccaucuga

SEQ ID NO: 177647 - RNA, 1410 nt, Artificial Sequence
  derived and/or modified CDS sequence (opt4) from neuraminidase__InfluenzaA__ACZ05219
augaaccccaaccagaagaucaucaccaucggcagcgugagccugaccaucagcaccaucugcuucuucaugcagaucgccauccugaucaccaccgugacccugcacuucaagcaguacgaguucaacagcccccccaacaaccaggugaugcugugcgagcccaccaucaucgagagaaacaucaccgagaucguguaccugaccaacaccaccaucgagaaggagaucugccccaagcuggccgaguacagaaacuggagcaagccccagugcggcaucaccggcuucgcccccuucagcaaggacaacagcaucagacugagcgccggcggcgacaucugggugaccagagagcccuacgugagcugcgaccccgacaagugcuaccaguucgcccugggccagggcaccacccugaacaacgugcacagcaacaacaccgugagagacagaacccccuacagaacccugcugaugaacgagcugggcgugcccuuccaccugggcaccaagcaggugugcaucgccuggagcagcagcagcugccacgacggcaaggccuggcugcacgugugcaucaccggcgacgacaagaacgccaccgccagcuucaucuacaacggcagacugguggacagcguggugagcuggagcaaggagauccugagaacccaggagagcgagugcgugugcaucaacggcaccugcaccguggugaugaccgacggcagcgccagcggcaaggccgacaccaagauccuguucaucgaggagggcaagaucgugcacaccagcacccugagcggcagcgcccagcacguggaggagugcagcugcuaccccagauaccccggcgugagaugcgugugcagagacaacuggaagggcagcaacagacccaucguggacaucaacaucaaggaccacagcaucgugagcagcuacgugugcagcggccuggugggcgacacccccagaaagaacgacagcagcagcagcagccacugccuggaccccaacaacgaggagggcggccacggcgugaagggcugggccuucgacgacggcaacgacguguggaugggcagaaccaucagcgagaagagcagacugggcuacgagaccuucaaggugaucgagggcuggagcaaccccaagagcaagcugcagaucaacagacaggugaucguggacagaggcaacagaagcggcuacagcggcaucuucagcguggagggcaagagcugcaucaacagaugcuucuacguggagcugaucagaggcagaaaggaggagaccgaggugcuguggaccagcaacagcaucgugguguucugcggcaccagcggcaccuacggcaccggcagcuggcccgacggcgccgacaucaaccugaugcccaucuga

SEQ ID NO: 177648 - RNA, 1410 nt, Artificial Sequence; identical to SEQ ID NO: 176659
  derived and/or modified CDS sequence (opt4) from neuraminidase__InfluenzaA__ACZ05230

SEQ ID NO: 177649 - RNA, 1410 nt, Artificial Sequence
  derived and/or modified CDS sequence (opt4) from neuraminidase__InfluenzaA__ACZ05241
augaaccccaaccagaagaucaucaccaucggcagcgugagccugaccaucagcaccaucugcuucuucaugcagaucgccauccugaucaccaccgugacccugcacuucaagcaguacgaguucaacagcccccccaacaaccaggugaugcugugcgagcccaccaucaucgagagaaacaucaccgagaucguguaccugaccaacaccaccaucgagaaggagaucugccccaagcuggccgaguacagaaacuggagcaagccccagugcgacaucaccggcuucgcccccuucagcaaggacaacagcaucagacugagcgccggcggcgacaucugggugaccagagagcccuacgugagcugcgaccccgacaagugcuaccaguucgcccugggccagggcaccacccugaacaacgugcacagcaacaacaccgugagagacagaacccccuacagaacccugcugaugaacgagcugggcgugcccuuccaccugggcaccaagcaggugugcaucgccuggagcagcagcagcugccacgacggcaaggccuggcugcacgugugcaucaccggcgacgacaagaacgccaccgccagcuucaucuacaacggcagacugguggacagcguggugagcuggagcaaggagauccugagaacccaggagagcgagugcgugugcaucaacggcaccugcaccguggugaugaccgacggcagcgccagcggcaaggccgacaccaagauccuguucaucgaggagggcaagaucgugcacaccagcaagcugagcggcagcgcccagcacguggaggagugcagcugcuaccccagauaccccggcgugagaugcgugugcagagacaacuggaagggcagcaacagacccaucguggacaucaacaucaaggaccacagcaucgugagcagcuacgugugcagcggccuggugggcgacacccccagaaagaacgacagcagcagcagcagccacugccuggaccccaacaacgaggagggcggccacggcgugaagggcugggccuucgacgacggcaacgacguguggaugggcagaaccaucagcgagaagagcagacugggcuacgagaccuucaaggugaucgagggcuggagcaaccccaagagcaagcugcagaucaacagacaggugaucguggacagaggcaacagaagcggcuacagcggcaucuucagcguggagggcaagagcugcaucaacagaugcuucuacguggagcugaucagaggcagaaaggaggagaccgaggugcuguggaccagcaacagcaucgugguguucugcggcaccagcggcaccuacggcaccggcagcuggcccgacggcgccgacaucaaccugaugcccaucuga

SEQ ID NO: 177650 - RNA, 1413 nt, Artificial Sequence
  derived and/or modified CDS sequence (opt4) from neuraminidase__InfluenzaA__ACZ05296
augaaccccaaccagaagaucaucaccaucggcagcaucagcaucgccaucggcaucaucagccugaugcugcagaucggcaacaucaucagcaucugggccagccacagcauccagaccggcagccagaacaacaccggcaucugcaaccagagaaucaucaccuacgagaacagcaccugggugaaccacaccuacgugaacaucaacaacaccaacgugguggccggcgaggacaagaccagcgugacccuggccggcaacagcagccugugcagcaucagcggcugggccaucuacaccaaggacaacagcaucagaaucggcagcaagggcgacguguucgugaucagagagcccuucaucagcugcagccaccuggagugcagaaccuucuuccugacccagggcgcccugcugaacgacaagcacagcaacggcaccgugaaggacagaagccccuacagagcccugaugagcugcccccugggcgaggcccccagccccuacaacagcaaguucgagagcguggccuggagcgccagcgccugccacgacggcaugggcuggcugaccaucggcaucagcggccccgacaacggcgccguggccgugcugaaguacaacggcaucaucaccggcaccaucaagagcuggaagaagcagauccugagaacccaggagagcgagugcgugugcaugaacggcagcugcuucaccaucaugaccgacggccccagcaacaaggccgccagcuacaagaucuucaagaucgagaagggcaaggugaccaagagcaucgagcugaacgcccccaacuucuacuacgaggagugcagcugcuaccccgacaccggcaucgugaugugcgugugcagagacaacuggcacggcagcaacagacccugggugagcuucaaccagaaccuggacuaccagaucggcuacaucugcagcggcguguucggcgacaaccccagacccgaggacggcgagggcagcugcaaccccguggccguggacggcgccaacggcgugaagggcuucagcuacaaguacggcaacggcguguggaucggcagaaccaagagcaacagacugagaaagggcuucgagaugaucugggaccccaacggcuggaccaacaccgacagcgacuucagcgugaagcaggacgugguggccaucaccgacuggagcggcuacagcggcagcuucgugcagcaccccgagcugaccggccuggacugcaucagacccugcuucuggguggagcuggugagaggccugcccagagagaacaccaccaucuggaccagcggcagcagcaucagcuucugcggcgugaacagcgacaccgccaacuggagcuggcccgacggcgccgagcugcccuucaccaucgacaaguga

SEQ ID NO: 177651 - RNA, 1410 nt, Artificial Sequence; identical to SEQ ID NO: 176659
  derived and/or modified CDS sequence (opt4) from neuraminidase__InfluenzaA__ACZ05307

SEQ ID NO: 177652 - RNA, 1410 nt, Artificial Sequence
  derived and/or modified CDS sequence (opt4) from neuraminidase__InfluenzaA__ACZ05318
augaaccccaaccagaagaucaucaccaucggcagcgugagccugaccaucagcaccaucugcuucuucaugcagaccgccauccugaucaccaccgugacccugcacuucaagcagugcgaguucaacagcccccccaacaaccaggugaugcugugcgagcccaccaucaucgagagaaacaucaccgagaucguguaccugaccaacaccaccaucgagaaggagaucugccccaagcuggccgaguacagaaacuggagcaagccccagugcgacaucaccggcuucgcccccuucagcaaggacaacagcaucagacugagcgccggcggcgacaucugggugaccagagagcccuacgugagcugcgaccccgacaagugcuaccaguucgcccugggccagggcaccacccugaacaacgugcacagcaacaacaccgugagagacagaacccccuacagaacccugcugaugaacgagcugggcgugcccuuccaccugggcaccaagcaggugugcaucgccuggagcagcagcagcugccacgacggcaaggccuggcugcacgugugcaucaccggcgacgacaagaacgccaccgccagcuucaucuacaacggcagacugguggacagcguggugagcuggagcaaggagauccugagaacccaggagagcgagugcgugugcaucaacggcaccugcaccguggugaugaccgacggcagcgccagcggcaaggccgacaccaagauccuguucaucgaggagggcaagaucgugcacaccagcacccugagcggcagcgcccagcacguggaggagugcagcugcuaccccagauaccccggcgugagaugcgugugcagagacaacuggaagggcagcaacagacccaucguggacaucaacaucaaggaccacagcaucgugagcagcuacgugugcagcggccuggugggcgacacccccagaaagaacgacagcagcagcagcagccacugccuggaccccaacaacgaggagggcggccacggcgugaagggcugggccuucgacgacggcaacgacguguggaugggcagaaccaucagcgagaagagcagacugggcuacgagaccuucaaggugaucgagggcuggagcaaccccaagagcaagcugcagaucaacagacaggugaucguggacagaggcaacagaagcggcuacagcggcaucuucagcguggagggcaagagcugcaucaacagaugcuucuacguggagcugaucagaggcagaaaggaggagaccgaggugcuguggaccagcaacagcaucgugguguucugcggcaccagcggcaccuacggcaccggcagcuggcccgacggcgccgacaucaaccugaugcccaucuga

SEQ ID NO: 177653 - RNA, 1410 nt, Artificial Sequence; identical to SEQ ID NO: 176659
  derived and/or modified CDS sequence (opt4) from neuraminidase__InfluenzaA__ACZ05329

SEQ ID NO: 177654 - RNA, 1410 nt, Artificial Sequence; identical to SEQ ID NO: 176572
  derived and/or modified CDS sequence (opt4) from neuraminidase__InfluenzaA__ACZ05340

SEQ ID NO: 177655 - RNA, 1410 nt, Artificial Sequence; identical to SEQ ID NO: 177649
  derived and/or modified CDS sequence (opt4) from neuraminidase__InfluenzaA__ACZ05362

SEQ ID NO: 177656 - RNA, 1410 nt, Artificial Sequence; identical to SEQ ID NO: 176659
  derived and/or modified CDS sequence (opt4) from neuraminidase__InfluenzaA__ACZ05373

SEQ ID NO: 177657 - RNA, 1410 nt, Artificial Sequence; identical to SEQ ID NO: 176659
  derived and/or modified CDS sequence (opt4) from neuraminidase__InfluenzaA__ACZ05395

SEQ ID NO: 177658 - RNA, 1410 nt, Artificial Sequence; identical to SEQ ID NO: 176659
  derived and/or modified CDS sequence (opt4) from neuraminidase__InfluenzaA__ACZ05406

SEQ ID NO: 177659 - RNA, 1413 nt, Artificial Sequence
  derived and/or modified CDS sequence (opt4) from neuraminidase__InfluenzaA__ACZ05450
augaaccccaaccagaagaucaucaccaucggcagcaucagcaucgccaucggcaucaucagccugaugcugcagaucggcagcaucaucagcaucugggccagccacagcauccagaccggcagccagaacaacaccggcaucugcaaccagagaaucaucaccuacgagaacagcaccugggugaaccacaccuacgugaacaucaacaacaccaacgugguggccggcgaggacaagaccagcgugacccuggccggcaacagcagccugugcagcaucagcggcugggccaucuacaccaaggacaacagcgugagaaucggcagcaagggcgacguguucgugaucagagagcccuucaucagcugcagccaccuggagugcagaaccuucuuccugacccagggcgcccugcugaacgacaagcacagcaacggcaccgugaaggacagaagccccuacagagcccugaugagcugcccccugggcgaggcccccagccccuacaacagcaaguucgagagcguggccuggagcgccagcgccugccacgacggcaugggcuggcugaccaucggcaucagcggccccgacaacggcgccguggccgugcugaaguacaacggcaucaucaccggcaccaucaagagcuggaagaagcagauccugagaacccaggagagcgagugcgugugcaugaacggcagcugcuucaccaucaugaccgacggccccagcaacaaggccgccagcuacaagaucuucaagaucgagaagggcaaggugaccaagagcaucgagcugaacgcccccaacuucuacuacgaggagugcagcugcuaccccgacaccggcaucgugaugugcgugugcagagacaacuggcacggcagcaacagacccugggugagcuucaaccagaaccuggacuaccagaucggcuacaucugcagcggcguguucggcgacaaccccagacccgaggacggcgagggcagcugcaaccccgugaccguggacggcgccaacggcgugaagggcuucagcuacaaguacggcaacggcguguggaucggcagaaccaagagcaacagacugagaaagggcuucgagaugaucugggaccccaacggcuggaccaacaccgacagcgacuucagcgugaagcaggacgugguggccaucaccgacuggagcggcuacagcggcagcuucgugcagcaccccgagcugaccggccuggacugcaucagacccugcuucuggguggagcuggugagaggccugcccagagagaacaccaccaucuggaccagcggcagcagcaucagcuucugcggcgugaacagcgacaccgccaacuggagcuggcccgacggcgccgagcugcccuucaccaucgacaaguga

SEQ ID NO: 177660 - RNA, 1410 nt, Artificial Sequence; identical to SEQ ID NO: 176659
  derived and/or modified CDS sequence (opt4) from neuraminidase__InfluenzaA__ACZ05461

SEQ ID NO: 177661 - RNA, 1410 nt, Artificial Sequence; identical to SEQ ID NO: 176659
  derived and/or modified CDS sequence (opt4) from neuraminidase__InfluenzaA__ACZ05472

SEQ ID NO: 177662 - RNA, 1410 nt, Artificial Sequence
  derived and/or modified CDS sequence (opt4) from neuraminidase__InfluenzaA__ACZ05483
augaaccccaaccagaagaucaucaccaucggcagcgugagccugaccaucagcaccaucugcuucuucaugcagaucgccauccugaucaccaccgugacccugcacuucaagcaguacgaguucaacagcccccccaacaaccaggugaugcugugcgagcccaccaucaucgagagaaacaucaccgagaucguguaccugaccaacaccaccguggagaaggagaucugccccaagcuggccgaguacagaaacuggagcaagccccagugcgacaucaccggcuucgcccccuucagcaaggacaacagcaucagacugagcgccggcggcgacaucugggugaccagagagcccuacgugagcugcgaccccgacaagugcuaccaguucgcccugggccagggcaccacccugaacaacgugcacagcaacaacaccgugagagacagaacccccuacagaacccugcugaugaacgagcugggcgugcccuuccaccugggcaccaagcaggugugcaucgccuggagcagcagcagcugccacgacggcaaggccuggcugcacgugugcaucaccggcgacgacaagaacgccaccgccagcuucaucuacaacggcagacugguggacagcguggugagcuggagcaaggagauccugagaacccaggagagcgagugcgugugcaucaacggcaccugcaccguggugaugaccgacggcagcgccagcggcaaggccgacaccaagauccuguucaucgaggagggcaagaucgugcacaccagcacccugagcggcagcgcccagcacguggaggagugcagcugcuaccccagauaccccggcgugagaugcgugugcagagacaacuggaagggcagcaacagacccaucguggacaucaacaucaaggaccacagcaucgugagcagcuacgugugcagcggccuggugggcgacacccccagaaagaacgacagcagcagcagcagccacugccuggaccccaacaacgaggagggcggccacggcgugaagggcugggccuucgacgacggcaacgacguguggaugggcagaaccaucagcgagaagagcagacugggcuacgagaccuucaaggugaucgagggcuggagcaaccccaagagcaagcugcagaucaacagacaggugaucguggacagaggcaacagaagcggcuacagcggcaucuucagcguggagggcaagagcugcaucaacagaugcuucuacguggagcugaucagaggcagaaaggaggagaccgaggugcuguggaccagcaacagcaucgugguguucugcggcaccagcggcaccuacggcaccggcagcuggcccgacggcgccgacaucaaccugaugcccaucuga

SEQ ID NO: 177663 - RNA, 1410 nt, Artificial Sequence; identical to SEQ ID NO: 176659
  derived and/or modified CDS sequence (opt4) from neuraminidase__InfluenzaA__ACZ05494

SEQ ID NO: 177664 - RNA, 1410 nt, Artificial Sequence; identical to SEQ ID NO: 177652
  derived and/or modified CDS sequence (opt4) from neuraminidase__InfluenzaA__ACZ05516

SEQ ID NO: 177665 - RNA, 1410 nt, Artificial Sequence
  derived and/or modified CDS sequence (opt4) from neuraminidase__InfluenzaA__ACZ05527
augaaccccaaccagaagaucaucaccaucggcagcgugagccugaccaucagcaccaucugcuucuucaugcagaucgccauccugaucaccaccgugacccugcacuucaagcaguacgaguucaacagcccccccaacaaccaggugaugcugugcgagcccaccaucaucgagagaaacaucaccgagaucguguaccugaccaacaccaccaucgagaaggagaucugccccaagcuggccgaguacagaaacuggagcaagccccagugcgacaucaccggcuucgcccccuucagcaaggacaacagcaucagacugagcgccggcggcgacaucugggugaccagagagcccuacgugagcugcgaccccgacaagugcuaccaguucgcccugggccagggcaccacccugaacaacgugcacagcaacaacaccgugagagacagaacccccuacagaacccugcugaugaacgagcugggcgugcccuuccaccugggcaccaagcaggugugcaucgccuggagcagcagcagcugccacgacggcaaggccuggcugcacgugugcaucaccggcgacgacaagaacgccaccgccagcuucaucuacaacggcagacugguggacagcguggugagcuggagcaaggagauccugagaacccaggagagcgagugcgugugcaucaacggcaccugcaccguggugaugaccgacggcagcgccagcggcaaggccgacaccaagauccuguucaucgaggagggcaagaucgugcacaccagcacccugagcggcagcgcccagcacguggaggagugcagcugcuaccccagauaccccggcgugagaugcgugugcagagacaacuggaagggcagcaacagacccaucguggacaucaacaucaaggaccacagcaucgugagcagcuacgugugcagcggccuggugggcgacacccccagaaagaacgacagcagcagcagcagccacugcagcgaccccaacaacgaggagggcggccacggcgugaagggcugggccuucgacgacggcaacgacguguggaugggcagaaccaucagcgagaagagcagacugggcuacgagaccuucaaggugaucgagggcuggagcaaccccaagagcaagcugcagaucaacagacaggugaucguggacagaggcaacagaagcggcuacagcggcaucuucagcguggagggcaagagcugcaucaacagaugcuucuacguggagcugaucagaggcagaaaggaggagaccgaggugcuguggaccagcaacagcaucgugguguucugcggcaccagcggcaccuacggcaccggcagcuggcccgacggcgccgacaucaaccugaugcccaucuga

SEQ ID NO: 177666 - RNA, 1410 nt, Artificial Sequence; identical to SEQ ID NO: 177649
  derived and/or modified CDS sequence (opt4) from neuraminidase__InfluenzaA__ACZ05538

SEQ ID NO: 177667 - RNA, 1413 nt, Artificial Sequence; identical to SEQ ID NO: 177521
  derived and/or modified CDS sequence (opt4) from neuraminidase__InfluenzaA__ACZ05593

SEQ ID NO: 177668 - RNA, 1413 nt, Artificial Sequence
  derived and/or modified CDS sequence (opt4) from neuraminidase__InfluenzaA__ACZ05604
augaaccccaaccagaagaucaucaccaucggcagcaucagcaucgccaucggcaucaucagccugaugcugcagaucggcaacaucaucagcaucugggccagccacagcauccagaccggcagccagaacaacaccggcaucugcaaccagagaaucaucaccuacgagaacagcaccugggugaaccacaccuacgugaacaucaacaacaccaacgugguggccggcgaggacaagaccagcgugacccuggccggcaacagcagccugugcagcaucagaggcugggccaucuacaccaaggacaacagcaucagaaucggcagcaagggcgacguguucgugaucagagagcccuucaucagcugcagccaccuggagugcagaaccuucuuccugacccagggcgcccugcugaacgacaagcacagcaacggcaccgugaaggacagaagccccuacagagcccugaugagcugcccccugggcgaggcccccagccccuacaacagcaaguucgagagcguggccuggagcgccagcgccugccacgacggcaugggcuggcugaccaucggcaucagcggccccgacaacggcgccguggccgugcugaaguacaacggcaucaucaccggcaccaucaagagcuggaagaagcagauccugagaacccaggagagcgagugcgugugcaugaacggcagcugcuucaccaucaugaccgacggccccagcaacaaggccgccagcuacaagaucuucaagaucgagaagggcaaggugaccaagagcaucgagcugaacgcccccaacuucuacuacgaggagugcagcugcuaccccgacaccggcaucgugaugugcgugugcagagacaacuggcacggcagcaacagacccugggugagcuucaaccagaaccuggacuaccagaucggcuacaucugcagcggcguguucggcgacaaccccagacccgaggacggcgagggcagcugcaaccccgugaccguggacggcgccaacggcgugaagggcuucagcuacaaguacggcaacggcguguggaucggcagaaccaagagcaacagacugagaaagggcuucgagaugaucugggaccccaacggcuggaccaacaccgacagcgacuucagcgugaagcaggacgugguggccaucaccgacuggagcggcuacagcggcagcuucgugcagcaccccgagcugaccggccuggacugcaucagacccugcuucuggguggagcuggugagaggccugcccagagagaacaccaccaucuggaccagcggcagcagcaucagcuucugcggcgugaacagcgacaccgccaacuggagcuggcccgacggcgccgagcugcccuucaccaucgacaaguga

SEQ ID NO: 177669 - RNA, 1410 nt, Artificial Sequence; identical to SEQ ID NO: 176659
  derived and/or modified CDS sequence (opt4) from neuraminidase__InfluenzaA__ACZ05953

SEQ ID NO: 177670 - RNA, 1410 nt, Artificial Sequence; identical to SEQ ID NO: 177665
  derived and/or modified CDS sequence (opt4) from neuraminidase__InfluenzaA__ACZ05964

SEQ ID NO: 177671 - RNA, 1410 nt, Artificial Sequence; identical to SEQ ID NO: 176659
  derived and/or modified CDS sequence (opt4) from neuraminidase__InfluenzaA__ACZ05997

SEQ ID NO: 177672 - RNA, 1410 nt, Artificial Sequence; identical to SEQ ID NO: 177665
  derived and/or modified CDS sequence (opt4) from neuraminidase__InfluenzaA__ACZ06008

SEQ ID NO: 177673 - RNA, 1410 nt, Artificial Sequence; identical to SEQ ID NO: 177665
  derived and/or modified CDS sequence (opt4) from neuraminidase__InfluenzaA__ACZ06019

SEQ ID NO: 177674 - RNA, 1413 nt, Artificial Sequence
  derived and/or modified CDS sequence (opt4) from neuraminidase__InfluenzaA__ACZ16015
augaaccccaaccagaagaucaucaccaucggcagcaucagcaucgccaucggcaucaucagccugaugcugcagaucggcaacaucaucagcaucugggccagccacagcauccagaccggcagccagaacaacaccggcaucugcaaccagagaaucaucaccuacgagaacagcaccugggugaaccacaccuacgugaacaucaacaacaccaacgugguggccggcgaggacaagaccagcgugacccuggccggcaacagcagccugugcagcaucagcggcugggccaucuacaccaaggacaacagcaucagaaucggcagcaagggcgacguguucgugaucagagagcccuucaucagcugcagccaccuggagugcagaaccuucuuccugacccagggcgcccugcugaacgacaagcacagcaacggcaccgugaaggacagaagccccuacagagcccugaugagcugcccccugggcgaggcccccagccccuacaacagcaaguucgagagcguggccuggagcgccagcgccugccacgacggcaugggcuggcugaccaucggcaucagcggccccgacaacggcgccguggccgugcugaaguacaacggcaucaucaccggcaccaucaagagcuggaagaagcagauccugagaacccaggagagcgagugcgugugcaugaacggcagcugcuucaccaucaugaccgacggccccagcaacaaggccgccagcuacaagaucuucaagaucgagaagggcaaggugagcaagagcaucgagcugaacgcccccaacuucuacuacgaggagugcagcugcuaccccgacaccggcaucgugaugugcgugugcagagacaacuggcacggcagcaacagacccugggugagcuucaaccagaaccuggacuaccagaucggcuacaucugcagcggcguguucggcgacaaccccagacccgaggacggcgagggcagcugcaaccccgugaccguggacggcgccaacggcgugaagggcuucagcuacaaguacggcaacggcguguggaucggcagaaccaagagcaacagacugagaaagggcuucgagaugaucugggaccccaacggcuggaccaacaccgacagcgacuucagcgugaagcaggacgugguggccaucaccgacuggagcggcuacagcggcagcuucgugcagcaccccgagcugaccggccuggacugcaucagacccugcuucuggguggagcuggugagaggccugcccagagagaacaccaccaucuggaccagcggcagcagcaucagcuucugcggcgugaacagcgacaccgccaacuggagcuggcccgacggcgccgagcugcccuucaccaucgacaaguga

SEQ ID NO: 177675 - RNA, 1413 nt, Artificial Sequence
  derived and/or modified CDS sequence (opt4) from neuraminidase__InfluenzaA__ACZ16025
augaaccccaaccagaagaucaucaccaucggcagcaucagcaucgccaucggcaucaucagccugaugcugcagaucggcaacaucaucagcaucugggccagccacagcauccagaccggcagccagaacaacaccggcaucugcaaccagagaaucaucaccuacgagaacagcaccugggugaaccacaccuacgugaacaucaacaacaccaacgugguggccggcgaggacaagaccagcgugacccuggccggcaacagcagccugugcagcaucagcggcugggccaucuacaccaaggacaacagcaucagaaucggcagcaagggcgacguguucgugaucagagagcccuucaucagcugcagccaccuggagugcagaaccuucuuccugacccagggcgcccugcugaacgacaagcacagcaacggcaccaucaaggacagaagccccuacagagcccugaugagcugcccccugggcgaggcccccagccccuacaacagcaaguucgagagcguggccuggagcgccagcgccugccacgacggcaugggcuggcugaccaucggcaucagcggccccgacaacggcgccguggccgugcugaaguacaacggcaucaucaccggcaccaucaagagcuggaagaagcagauccugagaacccaggagagcgagugcgugugcaugaacggcagcugcuucaccaucaugaccgacggccccagcaacaaggccgccagcuacaagaucuucaagaucgagaagggcaaggugaccaagagcaucgagcugaacgcccccaacuucuacuacgaggagugcagcugcuaccccgacaccggcaucgugaugugcgugugcagagacaacuggcacggcagcaacagacccugggugagcuucaaccagaaccuggacuaccagaucggcuacaucugcagcggcguguucggcgacaaccccagacccgaggacggcgagggcagcugcaaccccgugaccguggacggcgccaacggcgugaagggcuucagcuacaaguacggcaacggcguguggaucggcagaaccaagagcaacagacugagaaagggcuucgagaugaucugggaccccaacggcuggaccaacaccgacagcgacuucagcgugaagcaggacgugguggccaucaccgacuggagcggcuacagcggcagcuucgugcagcaccccgagcugaccggccuggacugcaucagacccugcuucuggguggagcuggugagaggccugcccagagagaacaccaccaucuggaccagcggcagcagcaucagcuucugcggcgugaacagcgacaccgccaacuggagcuggcccgacggcgccgagcugcccuucaccaucgacaaguga

SEQ ID NO: 177676 - RNA, 1413 nt, Artificial Sequence; identical to SEQ ID NO: 177521
  derived and/or modified CDS sequence (opt4) from neuraminidase__InfluenzaA__ACZ16035

SEQ ID NO: 177677 - RNA, 1410 nt, Artificial Sequence
  derived and/or modified CDS sequence (opt4) from neuraminidase__InfluenzaA__ACZ16043
augaaccccaaccagaagaucaucaccaucggcagcgugugcaugaccaucggcauggccaaccugauccugcagaucggcaacaucaucagcaucuggaucagccacagcauccagcugggcaaccagaaccagaucgagaccugcaaccagagcgugaucaccuacgagaacaacaccugggugaaccagaccuacgugaacaucagcaacaccaacuucgccgccggccagagcguggugagcgugaagcuggccggcaacagcagccugugccccgugagcggcugggccaucuacagcaaggacaacaacaucagaaucggcagcaagggcgacguguucgugaucagagagcccuucaucagcugcagcccccuggagugcagaaccuucuuccugacccagggcgcccugcugaacgacaagcacagcaacggcaccaucaaggacagaagccccuacagaacccugaugagcugccccaucggcgaggugcccagccccuacaacagcagauucgagagcguggccuggagcgccagcgccugccacgacggcaucaacuggcugaccaucggcaucagcggccccgacaacggcgccguggccgugcugaaguacaacggcaucaucaccgacaccaucaagagcuggagaaacaacauccugagaacccaggagagcgagugcgccugcgugaacggcagcugcuucaccgugaugaccgacggccccagcgacggccaggccagcuacaagaucuucagaaucgagaagggcaagaucgugaagagcguggagaugaacgcccccaacuaccacuacgaggagugcagcugcuaccccgacagcagcgagaucaccugcgugugcagagacaacuggcacggcagcaacagacccugggugagcuucaaccagaaccuggaguaccagaucggcuacaucugcagcggcaucuucggcgacaaccccagacccaacgacaagaccggcagcugcggccccgugagcagcaacggcgccaacggcgugaagggcuucagcuucaaguacggcaacggcguguggaucggcagaaccaagagcaucagcagcagaaacggcuucgagaugaucugggaccccaacggcuggaccggcaccgacaacaacuucagcaucaagcaggacaucgugggcaucaacgaguggagcggcuacagcggcagcuucgugcagcaccccgagcugaccggccuggacugcaucagacccugcuucuggguggagcugaucagaggcagacccaaggagaacaccaucuggaccagcggcagcagcaucagcuucugcggcgugaacagcgacaccgugggcuggagcuggcccgacggcgccgagcugcccuucaccaucgacaaguga

SEQ ID NO: 177678 - RNA, 1410 nt, Artificial Sequence
  derived and/or modified CDS sequence (opt4) from neuraminidase__InfluenzaA__ACZ16053
augaaccccaaccagaagaucaucaccaucggcagcgugugcaugaccaucggcauggccaaccugauccugcagaucggcaacaucaucagcaucuggaucagccacagcauccagcugggcaaccagaaccagaucgagaccugcaaccagagcgugaucaccuacgagaacaacaccugggugaaccagaccuacgugaacaucagcaacaccaacuucgccgccggccagagcguggugagcgugaagcuggccggcaacagcagccugugccccgugagcggcugggccaucuacagcaaggacaacagcgugagaaucggcagcaagggcgacguguucgugaucagagagcccuucaucagcugcagcccccuggagugcagaaccuucuuccugacccagggcgcccugcugaacgacaagcacagcaacggcaccaucaaggacagaagccccuacagaacccugaugagcugccccaucggcgaggugcccagccccuacaacagcagauucgagagcguggccuggagcgccagcgccugccacgacggcaucaacuggcugaccaucggcaucagcggccccgacaacggcgccguggccgugcugaaguacaacggcaucaucaccgacaccaucaagagcuggagaaacaacauccugagaacccaggagagcgagugcgccugcgugaacggcagcugcuucaccgugaugaccgacggccccagcaacggccaggccagcuacaagaucuucagaaucgagaagggcaagaucgugaagagcguggagaugaacgcccccaacuaccacuacgaggagugcagcugcuaccccgacagcagcgagaucaccugcgugugcagagacaacuggcacggcagcaacagacccugggugagcuucaaccagaaccuggaguaccagaucggcuacaucugcagcggcaucuucggcgacaaccccagacccaacgacaagaccggcagcugcggccccgugagcagcaacggcgccaacggcgugaagggcuucagcuucaaguacggcaacggcguguggaucggcagaaccaagagcaucagcagcagaaacggcuucgagaugaucugggaccccaacggcuggaccggcaccgacaacaacuucagcaccaagcaggacaucgugggcaucaacgaguggagcggcuacagcggcagcuucgugcagcaccccgagcugaccggccuggacugcaucagacccugcuucuggguggagcugaucagaggcagacccaaggagaacaccaucuggaccagcggcagcagcaucagcuucugcggcgugaacagcgacaccgugggcuggagcuggcccgacggcgccgagcugcccuucaccaucgacaaguga

SEQ ID NO: 177679 - RNA, 1410 nt, Artificial Sequence; identical to SEQ ID NO: 176788
  derived and/or modified CDS sequence (opt4) from neuraminidase__InfluenzaA__ACZ16073

SEQ ID NO: 177680 - RNA, 1410 nt, Artificial Sequence
  derived and/or modified CDS sequence (opt4) from neuraminidase__InfluenzaA__ACZ16083
augaaccccaaccagaagaucaucaccaucggcagcgugugcaugaccaucggcauggccaaccugauccugcagaucggcaacaucaucagcaucuggaucagccacagcauccagcugggcaaccagaaccagaucgagaccugcaaccagagcgugaucaccuacgagaacaacaccugggugaaccagaccuacgugaacaucagcaacaccaacuucgccgccagacagagcguggugagcgugaagcuggccggcaacagcagccugugccccgugagcggcugggccaucuacagcaaggacaacagcgugagaaucggcagcaagggcgacguguucgugaucagagagcccuucaucagcugcagcccccugggcugcagaaccuucuuccugacccagggcgcccugcugaacgacaagcacagcaacggcaccaucaaggacagaagccccuacagaacccugaugagcugccccaucggcgaggugcccagccccuacaacagcagauucgagagcguggccuggagcgccagcgccugccacgacggcaucaacuggcugaccaucggcaucagcggccccgacaacggcgccguggccgugcugaaguacaacggcaucaucaccgacaccaucaagagcuggagaaacaacauccugagaacccaggagagcgagugcgccugcgugaacggcagcugcuucaccgugaugaccgacggccccagcaacggccaggccagcuacaagaucuucagaaucgagaagggcaagaucgugaagagcguggagaugaacgcccccaacuaccacuacgaggagugcagcugcuaccccgacagcagcgagaucaccugcgugugcagagacaacuggcacggcagcaacagacccugggugagcuucaaccagaaccuggaguaccagaucggcuacaucugcagcggcaucuucggcgacaaccccagacccaacgacaagaccggcagcugcggccccgugagcagcaacggcgccaacggcgugaagggcuucagcuucaaguacggcaacggcguguggaucggcagaaccaagagcaucagcagcagaaacggcuucgagaugaucugggaccccaacggcuggaccggcaccgacaacaacuucagcaucaagcaggacaucgugggcaucaacgaguggagcggcuacagcggcagcuucgugcagcaccccgagcugaccggccuggacugcaucagacccugcuucuggaucgagcugaucagaggcagacccaaggagaacaccaucuggaccagcggcagcagcaucagcuucugcggcgugaacagcgacaccgugggcuggagcuggcccgacggcgccgagcugcccuucaccaucgacaaguga

SEQ ID NO: 177681 - RNA, 1410 nt, Artificial Sequence; identical to SEQ ID NO: 176788
  derived and/or modified CDS sequence (opt4) from neuraminidase__InfluenzaA__ACZ16093

SEQ ID NO: 177682 - RNA, 1410 nt, Artificial Sequence; identical to SEQ ID NO: 176798
  derived and/or modified CDS sequence (opt4) from neuraminidase__InfluenzaA__ACZ16103

SEQ ID NO: 177683 - RNA, 1410 nt, Artificial Sequence; identical to SEQ ID NO: 176798
  derived and/or modified CDS sequence (opt4) from neuraminidase__InfluenzaA__ACZ16113

SEQ ID NO: 177684 - RNA, 1410 nt, Artificial Sequence; identical to SEQ ID NO: 176798
  derived and/or modified CDS sequence (opt4) from neuraminidase__InfluenzaA__ACZ16123

SEQ ID NO: 177685 - RNA, 1410 nt, Artificial Sequence
  derived and/or modified CDS sequence (opt4) from neuraminidase__InfluenzaA__ACZ16133
augaaccccaaccagaagaucaucaccaucggcagcgugugcaugaccaucggcauggccaaccugauccugcagaucggcaacaucaucagcaucuggaucagccacagcauccagcugggcaaccagaaccagaucgagaccugcaaccagagcgugaucaccuacgagaacaacaccugggugaaccagaccuacgugaacaucagcaacaccaacuucgccgccggccagagcguggugagcgugaagcuggccggcaacagcagccugugccccgugagcggcugggccaucuacagcaaggacaacagcaucagaaucggcagcaagggcgacguguucgugaucagagagcccuucaucagcugcagcccccuggagugcagaaccuucuuccugacccagggcgcccugcugaacgacaagcacagcaacggcaccaucaaggacagaagccccuacagaacccugaugagcugccccaucggcgaggugcccagccccuacaacagcagauucgagagcguggccuggagcgccagcgccugccacgacggcaucaacuggcugaccaucggcaucagcggccccgacaacggcgccguggccgugcugaaguacaacggcaucaucaccgacaccaucaagagcuggagaaacaacauccugagaacccaggagagcgagugcgccugcgugaacggcagcugcuucaccaucaugaccgacggccccagcgacggccaggccagcuacaagaucuucagaaucgagaagggcaagaucgugaagagcguggagaugaacgcccccaacuaccacuacgaggagugcagcugcuaccccgacagcagcgagaucaccugcgugugcagagacaacuggcacggcagcaacagacccugggugagcuucaaccagaaccuggaguaccagaucggcuacaucugcagcggcaucuucggcgacaaccccagacccaacgacaagaccggcagcugcggccccgugagcagcaacggcgccaacggcgugaagggcuucagcuucaaguacggcaacggcguguggaucggcagaaccaagagcaucagcagcagaaacggcuucgagaugaucugggaccccaacggcuggaccggcaccgacaacaacuucagcaucaagcaggacaucgugggcaucaacgaguggagcggcuacagcggcagcuucgugcagcaccccgagcugaccggccuggacugcaucagacccugcuucuggguggagcugaucagaggcagacccaaggagaacaccaucuggaccagcggcagcagcaucagcuucugcggcgugaacagcgacaccgugggcuggagcuggcccgacggcgccgagcugcccuucaccaucgacaaguga

SEQ ID NO: 177686 - RNA, 1410 nt, Artificial Sequence
  derived and/or modified CDS sequence (opt4) from neuraminidase__InfluenzaA__ACZ16143
augaaccccaaccagaagaucaucaccaucggcagcgugugcaugaccaucggcauggccaaccugauccugcagaucggcaacaucaucagcaucuggaucagccacagcauccagcugggcaaccagaaccagaucgagaccugcaaccagagcgugaucaccuacgagaacaacaccugggugaaccagaccuacgugaacaucagcaacaccaacuucgccgccggccagagcguggugagcgugaagcuggccggcaacagcagccugugccccgugagcggcugggccaucuacagcaaggacaacagcaucagaaucggcagcaagggcgacguguucgugaucagagagcccuucaucagcugcagcccccuggagugcagaaccuucuuccugacccagggcgcccugcugaacgacaagcacagcaacggcaccaucaaggacagaagccccuacagaacccugaugagcugccccaucggcgaggugcccagccccuacaacagcagauucgagagcguggccuggagcgccagcgccugccacgacggcaucaacuggcugaccaucggcaucagcggccccgacaacggcgccguggccgugcugaaguacaacggcaucaucaccgacaccaucaagagcuggagaaacaacauccugagaacccaggagagcgagugcgccugcgugaacggcagcugcuucaccgugaugaccgacggccccagcgacggccaggccagcuacaagaucuucagaaucgagaagggcaagaucgugaagagcguggagaugaacgcccccaacuaccacuacgaggagugcagcugcuaccccgacagcagcgagaucaccugcgugugcagagacaacuggcacggcagcaacagacccugggugagcuucaaccagaaccuggaguaccagaucggcuacaucugcagcggcaucuucggcgacaaccccagacccaacgacaagaccggcagcugcggcccccugagcagcaacggcgccaacggcgugaagggcuucagcuucaaguacggcaacggcguguggaucggcagaaccaagagcaucagcagcagaaacggcuucgagaugaucugggaccccaacggcuggaccggcaccgacaacaacuucagcaucaagcaggacaucgugggcaucaacgaguggagcggcuacagcggcagcuucgugcagcaccccgagcugaccggccuggacugcaucagacccugcuucuggguggagcugaucagaggcagacccaaggagaacaccaucuggaccagcggcagcagcaucagcuucugcggcgugaacagcgacaccgugggcuggagcuggcccgacggcgccgagcugcccuucaccaucgacaaguga

SEQ ID NO: 177687 - RNA, 1410 nt, Artificial Sequence; identical to SEQ ID NO: 176798
  derived and/or modified CDS sequence (opt4) from neuraminidase__InfluenzaA__ACZ16153

SEQ ID NO: 177688 - RNA, 1410 nt, Artificial Sequence; identical to SEQ ID NO: 176798
  derived and/or modified CDS sequence (opt4) from neuraminidase__InfluenzaA__ACZ16163

SEQ ID NO: 177689 - RNA, 1410 nt, Artificial Sequence; identical to SEQ ID NO: 176788
  derived and/or modified CDS sequence (opt4) from neuraminidase__InfluenzaA__ACZ16173

SEQ ID NO: 177690 - RNA, 1410 nt, Artificial Sequence; identical to SEQ ID NO: 176798
  derived and/or modified CDS sequence (opt4) from neuraminidase__InfluenzaA__ACZ16193

SEQ ID NO: 177691 - RNA, 1410 nt, Artificial Sequence; identical to SEQ ID NO: 176798
  derived and/or modified CDS sequence (opt4) from neuraminidase__InfluenzaA__ACZ16203

SEQ ID NO: 177692 - RNA, 1410 nt, Artificial Sequence; identical to SEQ ID NO: 176798
  derived and/or modified CDS sequence (opt4) from neuraminidase__InfluenzaA__ACZ16213

SEQ ID NO: 177693 - RNA, 1410 nt, Artificial Sequence
  derived and/or modified CDS sequence (opt4) from neuraminidase__InfluenzaA__ACZ16223
augaaccccaaccagaagaucaucaccaucggcagcgugugcaugaccaucggcauggccaaccugauccugcagaucggcaacaucaucagcaucuggaucagccacagcauccagcugggcaaccagaaccagaucgagaccugcaaccagagcgugaucaccuacgagaacaacaccugggugaaccagaccuacgugaacaucagcaacaccaacuucgccgccggccagagcguggugagcgugaagcuggccggcaacagcagccugugccccgugagcggcugggccaucuacagcaaggacaacagcaucagaaucggcagcaagggcgacguguucgugaucagagagcccuucaucagcugcagcccccuggagugcagaaccuucuuccugacccagggcgcccugcugaacgacaagcacagcaacgagaccaucaaggacagaagccccuacagaacccugaugagcugccccaucggcgaggugcccagccccuacaacagcagauucgagagcguggccuggagcgccagcgccugccacgacggcaucaacuggcugaccaucggcaucagcggccccgacaacggcgccguggccgugcugaaguacaacggcaucaucaccgacaccaucaagagcuggagaaacaacauccugagaacccaggagagcgagugcgccugcgugaacggcagcugcuucaccgugaugaccgacggccccagcgacggccaggccagcuacaagaucuucagaaucgagaagggcaagaucgugaagagcguggagaugaacgcccccaacuaccacuacgaggagugcagcugcuaccccgacagcagcgagaucaccugcgugugcagagacaacuggcacggcagcaacagacccugggugagcuucaaccagaaccuggaguaccagaucggcuacaucugcagcggcaucuucggcgacaaccccagacccaacgacaagaccggcagcugcggccccgugagcagcaacggcgccaacggcgugaagggcuucagcuucaaguacggcaacggcguguggaucggcagaaccaagagcaucagcagcagaaacggcuucgagaugaucugggaccccaacggcuggaccggcaccgacaacaacuucagcaucaagcaggacaucaucggcaucaacgaguggagcggcuacagcggcagcuucgugcagcaccccgagcugaccggccuggacugcaucagacccugcuucuggguggagcugaucagaggcagacccaaggagaacaccaucuggaccagcggcagcagcaucagcuucugcggcgugaacagcgacaccgugggcuggagcuggcccgacggcgccgagcugcccuucaccaucgacaaguga

SEQ ID NO: 177694 - RNA, 1410 nt, Artificial Sequence; identical to SEQ ID NO: 176798
  derived and/or modified CDS sequence (opt4) from neuraminidase__InfluenzaA__ACZ16233

SEQ ID NO: 177695 - RNA, 1410 nt, Artificial Sequence; identical to SEQ ID NO: 177506
  derived and/or modified CDS sequence (opt4) from neuraminidase__InfluenzaA__ACZ16243

SEQ ID NO: 177696 - RNA, 1410 nt, Artificial Sequence
  derived and/or modified CDS sequence (opt4) from neuraminidase__InfluenzaA__ACZ16253
augaaccccaaccagaagaucaucaccaucggcagcgugugcaugaccaucggcauggccaaccugauccugcagaucggcaacaucaucagcaucuggaucagccacagcauccagcugggcaaccagaaccagaucgagaccugcaaccagagcgugaucaccuacgagaacaacaccugggugaaccagaccuacgugaacaucagcaacaccaacuucgccgccggccagagcguggugagcgugaagcuggccggcaacagcagccugugccccgugagcggcugggccaucuacagcaaggacaacagcaucagaaucggcagcaagggcgacguguucgugaucagagagcccuucaucagcugcagcccccuggagugcagaaccuucuuccugacccagggcgcccugcugaacgacaagcacagcaacggcaccaucaaggacagaagccccuacagaacccugaugagcugccccaucggcgaggugcccagccccuacaacagcagauucgagagcguggccuggagcgccagcgccugccacgacggcaucaacuggcugaccaucggcaucagcggccccgacaacggcgccguggccgugcugaaguacaacggcaucaucaccgacaccaucaagagcuggagaaacaacauccugagaacccaggagagcgagugcgccugcgugaacggcagcugcuucaccgugaugaccgacggccccagcgacggccaggccagcuacaagaucuucagaaucgagaagggcaagaucgugaagagcguggagaugaacgcccccaacuaccacuacgaggagugcagcugcuaccccgacagcagcgagaucaccugcgugugcagagacaacuggcacggcagcaacagacccugggugagcuucaaccagaaccuggaguaccagaucggcuacaucugcagcggcaucuucggcgacaaccccagacccaacgacaagaccggcagcugcggccccgugagcagcaacggcgccaacggcgugaagggcuucagcuucaaguacggcaacggcguguggaucggcagaaccaagagcaucagcagcagaaacggcuucgagaugaucugggaccccaacggcuggaccggcaccgacaacaacuucagcaucaagcaggacaucgugggcaucaacgaguggagcggcuacagcggcagcuucgugcagcaccccgagcugaccggccuggacugcaucagacccugcuucuggguggagcugaucagaggcagacccaaggagaacaccaucuggaccagcggcagcagcaucagcuucugcggcgugaacagcgacaccgugggcuggagcuggcccgacggcgccgagcugcccuucaacaucgacaaguga

SEQ ID NO: 177697 - RNA, 1410 nt, Artificial Sequence; identical to SEQ ID NO: 176798
  derived and/or modified CDS sequence (opt4) from neuraminidase__InfluenzaA__ACZ16263

SEQ ID NO: 177698 - RNA, 1410 nt, Artificial Sequence; identical to SEQ ID NO: 176788
  derived and/or modified CDS sequence (opt4) from neuraminidase__InfluenzaA__ACZ16283

SEQ ID NO: 177699 - RNA, 1410 nt, Artificial Sequence; identical to SEQ ID NO: 176798
  derived and/or modified CDS sequence (opt4) from neuraminidase__InfluenzaA__ACZ16293

SEQ ID NO: 177700 - RNA, 1410 nt, Artificial Sequence; identical to SEQ ID NO: 176798
  derived and/or modified CDS sequence (opt4) from neuraminidase__InfluenzaA__ACZ16303

SEQ ID NO: 177701 - RNA, 1410 nt, Artificial Sequence; identical to SEQ ID NO: 176798
  derived and/or modified CDS sequence (opt4) from neuraminidase__InfluenzaA__ACZ16313

SEQ ID NO: 177702 - RNA, 1410 nt, Artificial Sequence; identical to SEQ ID NO: 176798
  derived and/or modified CDS sequence (opt4) from neuraminidase__InfluenzaA__ACZ16323

SEQ ID NO: 177703 - RNA, 1410 nt, Artificial Sequence; identical to SEQ ID NO: 176798
  derived and/or modified CDS sequence (opt4) from neuraminidase__InfluenzaA__ACZ16333

SEQ ID NO: 177704 - RNA, 1410 nt, Artificial Sequence; identical to SEQ ID NO: 177506
  derived and/or modified CDS sequence (opt4) from neuraminidase__InfluenzaA__ACZ16343

SEQ ID NO: 177705 - RNA, 1410 nt, Artificial Sequence; identical to SEQ ID NO: 176798
  derived and/or modified CDS sequence (opt4) from neuraminidase__InfluenzaA__ACZ16353

SEQ ID NO: 177706 - RNA, 1410 nt, Artificial Sequence; identical to SEQ ID NO: 176798
  derived and/or modified CDS sequence (opt4) from neuraminidase__InfluenzaA__ACZ16363

SEQ ID NO: 177707 - RNA, 1410 nt, Artificial Sequence; identical to SEQ ID NO: 176788
  derived and/or modified CDS sequence (opt4) from neuraminidase__InfluenzaA__ACZ16373

SEQ ID NO: 177708 - RNA, 1410 nt, Artificial Sequence; identical to SEQ ID NO: 176798
  derived and/or modified CDS sequence (opt4) from neuraminidase__InfluenzaA__ACZ16383

SEQ ID NO: 177709 - RNA, 1410 nt, Artificial Sequence; identical to SEQ ID NO: 176798
  derived and/or modified CDS sequence (opt4) from neuraminidase__InfluenzaA__ACZ16393

SEQ ID NO: 177710 - RNA, 1410 nt, Artificial Sequence; identical to SEQ ID NO: 176798
  derived and/or modified CDS sequence (opt4) from neuraminidase__InfluenzaA__ACZ16403

SEQ ID NO: 177711 - RNA, 1410 nt, Artificial Sequence; identical to SEQ ID NO: 176798
  derived and/or modified CDS sequence (opt4) from neuraminidase__InfluenzaA__ACZ16423

SEQ ID NO: 177712 - RNA, 1410 nt, Artificial Sequence; identical to SEQ ID NO: 176798
  derived and/or modified CDS sequence (opt4) from neuraminidase__InfluenzaA__ACZ16433

SEQ ID NO: 177713 - RNA, 1410 nt, Artificial Sequence; identical to SEQ ID NO: 176798
  derived and/or modified CDS sequence (opt4) from neuraminidase__InfluenzaA__ACZ16443

SEQ ID NO: 177714 - RNA, 1410 nt, Artificial Sequence; identical to SEQ ID NO: 176798
  derived and/or modified CDS sequence (opt4) from neuraminidase__InfluenzaA__ACZ16453

SEQ ID NO: 177715 - RNA, 1410 nt, Artificial Sequence; identical to SEQ ID NO: 177506
  derived and/or modified CDS sequence (opt4) from neuraminidase__InfluenzaA__ACZ16463

SEQ ID NO: 177716 - RNA, 1410 nt, Artificial Sequence; identical to SEQ ID NO: 176798
  derived and/or modified CDS sequence (opt4) from neuraminidase__InfluenzaA__ACZ16483

SEQ ID NO: 177717 - RNA, 1410 nt, Artificial Sequence; identical to SEQ ID NO: 176798
  derived and/or modified CDS sequence (opt4) from neuraminidase__InfluenzaA__ACZ16493

SEQ ID NO: 177718 - RNA, 1410 nt, Artificial Sequence
  derived and/or modified CDS sequence (opt4) from neuraminidase__InfluenzaA__ACZ16503
augaaccccaaccagaagaucaucaccaucggcagcgugugcaugaccaucggcauggccaaccugauccugcagaucggcaacaucaucagcaucuggaucagccacagcauccagcugggcaaccagaaccagaucgagaccugcaaccagagcgugaucaccuacgagaacaacaccugggugaaccagaccuacgugaacaucagcaacaccaacuucgccgccggccagagcguggugagcgugaagcuggccggcaacagcagccugugccccgugagcggcugggccaucuacagcaaggacaacagcaucagaaucggcagcaagggcgacguguucgugaucagagagcccuucaucagcugcagcccccuggagugcagaaccuucuuccugacccagggcgcccugcugaacgacaagcacagcaacggcaccaucaaggacagaagccccuacagaacccugaugagcugccccaucggcgaggugcccagccccuacaacagcagauucgagagcguggccuggagcgccagcgccugccacgacggcaucaacuggcugaccaucggcaucagcggccccgacaacggcgccguggccgugcugaaguacaacggcaucaucaccgacaccaucaagagcuggagaaacaacauccugagaacccaggagagcgagugcgccugcgugaacggcagcugcuucaccgugaugaccgacggccccagcgacggccaggccagcuacaagaucuucagaaucgagaagggcaagaucgugaagagcguggagauggacgcccccaacuaccacuacgaggagugcagcugcuaccccgacagcagcgagaucaccugcgugugcagagacaacuggcacggcagcaacagacccugggugagcuucaaccagaaccuggaguaccagaucggcuacaucugcagcggcaucuucggcgacaaccccagacccaacgacaagaccggcagcugcggccccgugagcagcaacggcgccaacggcgugaagggcuucagcuucaaguacggcaacggcguguggaucggcagaaccaagagcaucagcagcagaaacggcuucgagaugaucugggaccccaacggcuggaccggcaccgacaacaacuucagcaucaagcaggacaucgugggcaucaacgaguggagcggcuacagcggcagcuucgugcagcaccccgagcugaccggccuggacugcaucagacccugcuucuggguggagcugaucagaggcagacccaaggagaacaccaucuggaccagcggcagcagcaucagcuucugcggcgugaacagcgacaccgugggcuggagcuggcccgacggcgccgagcugcccuucaccaucgacaaguga

SEQ ID NO: 177719 - RNA, 1410 nt, Artificial Sequence; identical to SEQ ID NO: 177506
  derived and/or modified CDS sequence (opt4) from neuraminidase__InfluenzaA__ACZ16513

SEQ ID NO: 177720 - RNA, 1410 nt, Artificial Sequence; identical to SEQ ID NO: 176798
  derived and/or modified CDS sequence (opt4) from neuraminidase__InfluenzaA__ACZ16523

SEQ ID NO: 177721 - RNA, 1410 nt, Artificial Sequence; identical to SEQ ID NO: 176798
  derived and/or modified CDS sequence (opt4) from neuraminidase__InfluenzaA__ACZ16533

SEQ ID NO: 177722 - RNA, 1410 nt, Artificial Sequence; identical to SEQ ID NO: 176788
  derived and/or modified CDS sequence (opt4) from neuraminidase__InfluenzaA__ACZ16543

SEQ ID NO: 177723 - RNA, 1410 nt, Artificial Sequence; identical to SEQ ID NO: 176798
  derived and/or modified CDS sequence (opt4) from neuraminidase__InfluenzaA__ACZ16553

SEQ ID NO: 177724 - RNA, 1410 nt, Artificial Sequence; identical to SEQ ID NO: 176798
  derived and/or modified CDS sequence (opt4) from neuraminidase__InfluenzaA__ACZ16586

SEQ ID NO: 177725 - RNA, 1410 nt, Artificial Sequence; identical to SEQ ID NO: 176798
  derived and/or modified CDS sequence (opt4) from neuraminidase__InfluenzaA__ACZ16596

SEQ ID NO: 177726 - RNA, 1410 nt, Artificial Sequence; identical to SEQ ID NO: 176798
  derived and/or modified CDS sequence (opt4) from neuraminidase__InfluenzaA__ACZ16606

SEQ ID NO: 177727 - RNA, 1410 nt, Artificial Sequence; identical to SEQ ID NO: 176798
  derived and/or modified CDS sequence (opt4) from neuraminidase__InfluenzaA__ACZ16633

SEQ ID NO: 177728 - RNA, 1410 nt, Artificial Sequence
  derived and/or modified CDS sequence (opt4) from neuraminidase__InfluenzaA__ACZ16643
augaaccccaaccagaagaucaucaccaucggcagcgugugcaugaccaucggcauggccaaccugauccugcagaucggcaacaucaucagcaucuggaucagccacagcauccagcugggcaaccagaaccagaucgagaccugcaaccagagcgugaucaccuacgagaacaacaccugggugaaccagaccuacgugaacaucagcaacaccaacuucgccgccggccagagcguggugagcgugaagcuggccggcaacagcagccugugccccgugagcggcugggccaucuacagcaaggacaacagcaucagaaucggcagcaagggcgacguguucgugaucagagagcccuucaucagcugcagcccccuggagugcagaaccuucuuccugacccagggcgcccugcugaacgacaagcacagcaacggcaccaucaaggacagaagccccuacagaacccugaugagcugccccaucggcgaggugcccagccccuacaacagcagauucgagagcguggccuggagcgccagcgccugccacgacggcaucaacuggcugaccaucggcaucagcggccccgacaacggcgccguggccgugcugagauacaacggcaucaucaccgacaccaucaagagcuggagaaacaacauccugagaacccaggagagcgagugcgccugcgugaacggcagcugcuucaccgugaugaccgacggccccagcgacggccaggccagcuacaagaucuucagaaucgagaagggcaagaucgugaagagcguggagaugaacgcccccaacuaccacuacgaggagugcagcugcuaccccgacagcagcgagaucaccugcgugugcagagacaacuggcacggcagcaacagacccugggugagcuucaaccagaaccuggaguaccagaucggcuacaucugcagcggcaucuucggcgacaaccccagacccaacgacaagaccggcagcugcggccccgugagcagcaacggcgccaacggcgugaagggcuucagcuucaaguacggcaacggcguguggaucggcagaaccaagagcaucagcagcagaaacggcuucgagaugaucugggaccccaacggcuggaccggcaccgacaacaacuucagcaucaagcaggacaucgugggcaucaacgaguggagcggcuacagcggcagcuucgugcagcaccccgagcugaccggccuggacugcaucagacccugcuucuggguggagcugaucagaggcagacccaaggagaacaccaucuggaccagcggcagcagcaucagcuucugcggcgugaacagcgacaccgugggcuggagcuggcccgacggcgccgagcugcccuucaccaucgacaaguga

SEQ ID NO: 177729 - RNA, 1410 nt, Artificial Sequence; identical to SEQ ID NO: 176798
  derived and/or modified CDS sequence (opt4) from neuraminidase__InfluenzaA__ACZ16653

SEQ ID NO: 177730 - RNA, 1410 nt, Artificial Sequence; identical to SEQ ID NO: 176798
  derived and/or modified CDS sequence (opt4) from neuraminidase__InfluenzaA__ACZ16663

SEQ ID NO: 177731 - RNA, 1410 nt, Artificial Sequence; identical to SEQ ID NO: 176798
  derived and/or modified CDS sequence (opt4) from neuraminidase__InfluenzaA__ACZ16673

SEQ ID NO: 177732 - RNA, 1410 nt, Artificial Sequence; identical to SEQ ID NO: 176798
  derived and/or modified CDS sequence (opt4) from neuraminidase__InfluenzaA__ACZ16683

SEQ ID NO: 177733 - RNA, 1410 nt, Artificial Sequence; identical to SEQ ID NO: 176798
  derived and/or modified CDS sequence (opt4) from neuraminidase__InfluenzaA__ACZ16693

SEQ ID NO: 177734 - RNA, 1410 nt, Artificial Sequence; identical to SEQ ID NO: 176798
  derived and/or modified CDS sequence (opt4) from neuraminidase__InfluenzaA__ACZ16703

SEQ ID NO: 177735 - RNA, 1410 nt, Artificial Sequence; identical to SEQ ID NO: 176798
  derived and/or modified CDS sequence (opt4) from neuraminidase__InfluenzaA__ACZ16713

SEQ ID NO: 177736 - RNA, 1410 nt, Artificial Sequence; identical to SEQ ID NO: 176798
  derived and/or modified CDS sequence (opt4) from neuraminidase__InfluenzaA__ACZ16723

SEQ ID NO: 177737 - RNA, 1410 nt, Artificial Sequence; identical to SEQ ID NO: 176798
  derived and/or modified CDS sequence (opt4) from neuraminidase__InfluenzaA__ACZ16733

SEQ ID NO: 177738 - RNA, 1410 nt, Artificial Sequence; identical to SEQ ID NO: 176798
  derived and/or modified CDS sequence (opt4) from neuraminidase__InfluenzaA__ACZ16743

SEQ ID NO: 177739 - RNA, 1410 nt, Artificial Sequence; identical to SEQ ID NO: 176798
  derived and/or modified CDS sequence (opt4) from neuraminidase__InfluenzaA__ACZ16753

SEQ ID NO: 177740 - RNA, 1410 nt, Artificial Sequence; identical to SEQ ID NO: 176798
  derived and/or modified CDS sequence (opt4) from neuraminidase__InfluenzaA__ACZ16763

SEQ ID NO: 177741 - RNA, 1410 nt, Artificial Sequence; identical to SEQ ID NO: 176788
  derived and/or modified CDS sequence (opt4) from neuraminidase__InfluenzaA__ACZ16773

SEQ ID NO: 177742 - RNA, 1410 nt, Artificial Sequence; identical to SEQ ID NO: 176798
  derived and/or modified CDS sequence (opt4) from neuraminidase__InfluenzaA__ACZ16783

SEQ ID NO: 177743 - RNA, 1410 nt, Artificial Sequence; identical to SEQ ID NO: 176798
  derived and/or modified CDS sequence (opt4) from neuraminidase__InfluenzaA__ACZ16793

SEQ ID NO: 177744 - RNA, 1410 nt, Artificial Sequence; identical to SEQ ID NO: 176798
  derived and/or modified CDS sequence (opt4) from neuraminidase__InfluenzaA__ACZ16803

SEQ ID NO: 177745 - RNA, 1410 nt, Artificial Sequence; identical to SEQ ID NO: 176798
  derived and/or modified CDS sequence (opt4) from neuraminidase__InfluenzaA__ACZ16813

SEQ ID NO: 177746 - RNA, 1410 nt, Artificial Sequence; identical to SEQ ID NO: 176788
  derived and/or modified CDS sequence (opt4) from neuraminidase__InfluenzaA__ACZ16823

SEQ ID NO: 177747 - RNA, 1410 nt, Artificial Sequence; identical to SEQ ID NO: 176798
  derived and/or modified CDS sequence (opt4) from neuraminidase__InfluenzaA__ACZ16833

SEQ ID NO: 177748 - RNA, 1410 nt, Artificial Sequence; identical to SEQ ID NO: 176798
  derived and/or modified CDS sequence (opt4) from neuraminidase__InfluenzaA__ACZ16843

SEQ ID NO: 177749 - RNA, 1410 nt, Artificial Sequence; identical to SEQ ID NO: 177718
  derived and/or modified CDS sequence (opt4) from neuraminidase__InfluenzaA__ACZ16853

SEQ ID NO: 177750 - RNA, 1410 nt, Artificial Sequence; identical to SEQ ID NO: 176798
  derived and/or modified CDS sequence (opt4) from neuraminidase__InfluenzaA__ACZ16863

SEQ ID NO: 177751 - RNA, 1410 nt, Artificial Sequence; identical to SEQ ID NO: 176798
  derived and/or modified CDS sequence (opt4) from neuraminidase__InfluenzaA__ACZ16873

SEQ ID NO: 177752 - RNA, 1410 nt, Artificial Sequence; identical to SEQ ID NO: 176798
  derived and/or modified CDS sequence (opt4) from neuraminidase__InfluenzaA__ACZ16883

SEQ ID NO: 177753 - RNA, 1410 nt, Artificial Sequence; identical to SEQ ID NO: 176798
  derived and/or modified CDS sequence (opt4) from neuraminidase__InfluenzaA__ACZ16893

SEQ ID NO: 177754 - RNA, 1410 nt, Artificial Sequence; identical to SEQ ID NO: 176798
  derived and/or modified CDS sequence (opt4) from neuraminidase__InfluenzaA__ACZ16903

SEQ ID NO: 177755 - RNA, 1410 nt, Artificial Sequence; identical to SEQ ID NO: 176798
  derived and/or modified CDS sequence (opt4) from neuraminidase__InfluenzaA__ACZ16913

SEQ ID NO: 177756 - RNA, 1410 nt, Artificial Sequence; identical to SEQ ID NO: 176798
  derived and/or modified CDS sequence (opt4) from neuraminidase__InfluenzaA__ACZ16923

SEQ ID NO: 177757 - RNA, 1410 nt, Artificial Sequence; identical to SEQ ID NO: 176798
  derived and/or modified CDS sequence (opt4) from neuraminidase__InfluenzaA__ACZ16933

SEQ ID NO: 177758 - RNA, 1410 nt, Artificial Sequence; identical to SEQ ID NO: 176798
  derived and/or modified CDS sequence (opt4) from neuraminidase__InfluenzaA__ACZ16943

SEQ ID NO: 177759 - RNA, 1410 nt, Artificial Sequence; identical to SEQ ID NO: 176788
  derived and/or modified CDS sequence (opt4) from neuraminidase__InfluenzaA__ACZ16953

SEQ ID NO: 177760 - RNA, 1410 nt, Artificial Sequence; identical to SEQ ID NO: 176798
  derived and/or modified CDS sequence (opt4) from neuraminidase__InfluenzaA__ACZ16963

SEQ ID NO: 177761 - RNA, 1410 nt, Artificial Sequence; identical to SEQ ID NO: 176798
  derived and/or modified CDS sequence (opt4) from neuraminidase__InfluenzaA__ACZ16973

SEQ ID NO: 177762 - RNA, 1410 nt, Artificial Sequence; identical to SEQ ID NO: 176798
  derived and/or modified CDS sequence (opt4) from neuraminidase__InfluenzaA__ACZ16983

SEQ ID NO: 177763 - RNA, 1410 nt, Artificial Sequence; identical to SEQ ID NO: 176798
  derived and/or modified CDS sequence (opt4) from neuraminidase__InfluenzaA__ACZ16993

SEQ ID NO: 177764 - RNA, 1410 nt, Artificial Sequence; identical to SEQ ID NO: 176798
  derived and/or modified CDS sequence (opt4) from neuraminidase__InfluenzaA__ACZ17003

SEQ ID NO: 177765 - RNA, 1410 nt, Artificial Sequence; identical to SEQ ID NO: 176798
  derived and/or modified CDS sequence (opt4) from neuraminidase__InfluenzaA__ACZ17023

SEQ ID NO: 177766 - RNA, 1410 nt, Artificial Sequence; identical to SEQ ID NO: 176798
  derived and/or modified CDS sequence (opt4) from neuraminidase__InfluenzaA__ACZ17043

SEQ ID NO: 177767 - RNA, 1410 nt, Artificial Sequence; identical to SEQ ID NO: 176798
  derived and/or modified CDS sequence (opt4) from neuraminidase__InfluenzaA__ACZ17053

SEQ ID NO: 177768 - RNA, 1410 nt, Artificial Sequence
  derived and/or modified CDS sequence (opt4) from neuraminidase__InfluenzaA__ACZ17063
augaaccccaaccagaagaucaucaccaucggcagcgugugcaugaccaucggcauggccaaccugauccugcagaucggcaacaucaucagcaucuggaucagccacagcauccagcugggcgaccagaaccagaucgagaccugcaaccagagcgugaucaccuacgagaacaacaccugggugaaccagaccuacgugaacaucagcaacaccaacuucgccgccggccagagcguggugagcgugaagcuggccggcaacagcagccugugccccgugagcggcugggccaucuacagcaaggacaacagcaucagaaucggcagcaagggcgacguguucgugaucagagagcccuucaucagcugcagcccccuggagugcagaaccuucuuccugacccagggcgcccugcugaacgacaagcacagcaacggcaccaucaaggacagaagccccuacagaacccugaugagcugccccaucggcgaggugcccagccccuacaacagcagauucgagagcguggccuggagcgccagcgccugccacgacggcaucaacuggcugaccaucggcaucagcggccccgacaacggcgccguggccgugcugaaguacaacggcaucaucaccgacaccaucaagagcuggagaaacaacauccugagaacccaggagagcgagugcgccugcgugaacggcagcugcuucaccgugaugaccgacggccccagcgacggccaggccagcuacaagaucuucagaaucgagaagggcaagaucgugaagagcguggagaugaacgcccccaacuaccacuacgaggagugcagcugcuaccccgacagcagcgagaucaccugcgugugcagagacaacuggcacggcagcaacagacccugggugagcuucaaccagaaccuggaguaccagaucggcuacaucugcagcggcaucuucggcgacaaccccagacccaacgacaagaccggcagcugcggccccgugagcagcaacggcgccaacggcgugaagggcuucagcuucaaguacggcaacggcguguggaucggcagaaccaagagcaucagcagcagaaacggcuucgagaugaucugggaccccaacggcuggaccggcaccgacaacaacuucagcaucaagcaggacaucgugggcaucaacgaguggagcggcuacagcggcagcuucgugcagcaccccgagcugaccggccuggacugcaucagacccugcuucuggguggagcugaucagaggcagacccaaggagaacaccaucuggaccagcggcagcagcaucagcuucugcggcgugaacagcgacaccgugggcuggagcuggcccgacggcgccgagcugcccuucaccaucgacaaguga

SEQ ID NO: 177769 - RNA, 1410 nt, Artificial Sequence; identical to SEQ ID NO: 176798
  derived and/or modified CDS sequence (opt4) from neuraminidase__InfluenzaA__ACZ17073

SEQ ID NO: 177770 - RNA, 1410 nt, Artificial Sequence; identical to SEQ ID NO: 177506
  derived and/or modified CDS sequence (opt4) from neuraminidase__InfluenzaA__ACZ17083

SEQ ID NO: 177771 - RNA, 1410 nt, Artificial Sequence
  derived and/or modified CDS sequence (opt4) from neuraminidase__InfluenzaA__ACZ17093
augaaccccaaccagaagaucaucaccaucggcagcgugugcaugaccaucggcauggccaaccugauccugcagaucggcaacaucaucagcaucuggaucagccacagcauccagcugggcaaccagaaccagaucgagaccugcaaccagagcgugaucaccuacgagaacaacaccugggugaaccagaccuacgugaacaucagcaacaccaacuucgccgccggccagagcguggugagcgugaagcuggccggcaacagcagccugugccccgugagcggcugggccaucuacagcaaggacaacagcaucagaaucggcagcaagggcgacguguucgugaucagagagcccuucaucagcugcagccccuucgagugcagaaccuucuuccugacccagggcgcccugcugaacgacaagcacagcaacggcaccaucaaggacagaagccccuacagaacccugaugagcugccccaucggcgaggugcccagccccuacaacagcagauucgagagcguggccuggagcgccagcgccugccacgacggcaucaacuggcugaccaucggcaucagcggccccgacaacggcgccguggccgugcugaaguacaacggcaucaucaccgacaccaucaagagcuggagaaacaacauccugagaacccaggagagcgagugcgccugcgugaacggcagcugcuucaccgugaugaccgacggccccagcgacggccaggccagcuacaagaucuucagaaucgagaagggcaagaucgugaagagcguggagaugaacgcccccaacuaccacuacgaggagugcagcugcuaccccgacagcagcgagaucaccugcgugugcagagacaacuggcacggcagcaacagacccugggugagcuucaaccagaaccuggaguaccagaucggcuacaucugcagcggcaucuucggcgacaaccccagacccaacgacaagaccggcagcugcggccccgugagcagcaacggcgccaacggcgugaagggcuucagcuucaaguacggcaacggcguguggaucggcagaaccaagagcaucagcagcagaaacggcuucgagaugaucugggaccccaacggcuggaccggcaccgacaacaacuucagcaucaagcaggacaucgugggcaucaacgaguggagcggcuacagcggcagcuucgugcagcaccccgagcugaccggccuggacugcaucagacccugcuucuggguggagcugaucagaggcagacccaaggagaacaccaucuggaccagcggcagcagcaucagcuucugcggcgugaacagcgacaccgugggcuggagcuggcccgacggcgccgagcugcccuucaccaucgacaaguga

SEQ ID NO: 177772 - RNA, 1410 nt, Artificial Sequence
  derived and/or modified CDS sequence (opt4) from neuraminidase__InfluenzaA__ACZ17113
augaaccccaaccagaagaucaucaccaucggcagcgugugcaugaccaucggcauggccaaccugauccugcagaucggcaacaucaucagcaucuggaucagccacagcauccagcugggcaaccagaaccagaucgagaccugcaaccagagcgugaucaccuacgagaacaacaccugggugaaccagaccuacgugaacaucagcaacaccaacuucgccgccggccagagcguggugagcgugaagcuggccggcaacagcagccugugccccgugaacggcugggccaucuacagcaaggacaacagcaucagaaucggcagcaagggcgacguguucgugaucagagagcccuucaucagcugcagcccccuggagugcagaaccuucuuccugacccagggcgcccugcugaacgacaagcacagcaacggcaccaucaaggacagaagccccuacagaacccugaugagcugccccaucggcgaggugcccagccccuacaacagcagauucgagagcguggccuggagcgccagcgccugccacgacggcaucaacuggcugaccaucggcaucagcggccccgacaacggcgccguggccgugcugaaguacaacggcaucaucaccgacaccaucaagagcuggagaaacaacauccugagaacccaggagagcgagugcgccugcgugaacggcagcugcuucaccgugaugaccgacggccccagcgacggccaggccagcuacaagaucuucagaaucgagaagggcaagaucgugaagagcguggagaugaacgcccccaacuaccacuacgaggagugcagcugcuaccccgacagcagcgagaucaccugcgugugcagagacaacuggcacggcagcaacagacccugggugagcuucaaccagaaccuggaguaccagaucggcuacaucugcagcggcaucuucggcgacaaccccagacccaacgacaagaccggcagcugcggccccgugagcagcaacggcgccaacggcgugaagggcuucagcuucaaguacggcaacggcguguggaucggcagaaccaagagcaucagcagcagaaacggcuucgagaugaucugggaccccaacggcuggaccggcaccgacaacaacuucagcaucaagcaggacaucgugggcaucaacgaguggagcggcuacagcggcagcuucgugcagcaccccgagcugaccggccuggacugcaucagacccugcuucuggguggagcugaucagaggcagacccaaggagaacaccaucuggaccagcggcagcagcaucagcuucugcggcgugaacagcgacaccgugggcuggagcuggcccgacggcgccgagcugcccuucaccaucgacaaguga

SEQ ID NO: 177773 - RNA, 1410 nt, Artificial Sequence; identical to SEQ ID NO: 176798
  derived and/or modified CDS sequence (opt4) from neuraminidase__InfluenzaA__ACZ17123

SEQ ID NO: 177774 - RNA, 1410 nt, Artificial Sequence; identical to SEQ ID NO: 176798
  derived and/or modified CDS sequence (opt4) from neuraminidase__InfluenzaA__ACZ17133

SEQ ID NO: 177775 - RNA, 1410 nt, Artificial Sequence
  derived and/or modified CDS sequence (opt4) from neuraminidase__InfluenzaA__ACZ17163
augaaccccaaccagaagaucaucaccaucggcagcgugugcaugaccaucggcauggccaaccugauccugcagaucggcaacaucaucagcaucuggaucagccacagcauccagcugggcaaccagaaccagaucgagaccugcaaccagagcgugaucaccuacgagaacaacaccugggugaaccagaccuacgugaacaucagcaacaccaacuucgccgccggccagagcguggugagcgugaagcuggccggcaacagcagccugugccccgugagcggcugggccaucuacagcaaggacaacagcaucagaaucggcagcaagggcgacguguucgugaucagagagcccuucaucagcugcagcccccuggagugcagaaccuucuuccugacccagggcgcccugcugaacgacaagcacagcaacggcaccaucaaggacagaagccccuacagaacccugaugagcugccccaucggcgaggugcccagccccuacaacagcagauucgagagcguggccuggagcgccagcgccugccacgacggcaucaacuggcugaccaucggcaucagcggccccgacaacggcgccguggccgugcugaaguacaacggcaucaucaccgacaccaucaagagcuggagaaacaacauccugagaacccaggagagcgagugcgccugcgugaacggcagcugcuucaccgugaugaccgacggccccagcgacggccaggccagcuacaagaucuucagaaucgagaagggcaagaucgugaagagcguggagaugaacgcccccaacuaccacuacgaggagugcagcugcuaccccgacagcagcgagaucaccugcgugugcagagacaacuggcacggcagcaacagacccugggugagcuucaacagaaaccuggaguaccagaucggcuacaucugcagcggcaucuucggcgacaaccccagacccaacgacaagaccggcagcugcggccccgugagcagcaacggcgccaacggcgugaagggcuucagcuucaaguacggcaacggcguguggaucggcagaaccaagagcaucagcagcagaaacggcuucgagaugaucugggaccccaacggcuggaccggcaccgacaacaacuucagcaucaagcaggacaucgugggcaucaacgaguggagcggcuacagcggcagcuucgugcagcaccccgagcugaccggccuggacugcaucagacccugcuucuggguggagcugaucagaggcagacccaaggagaacaccaucuggaccagcggcagcagcaucagcuucugcggcgugaacagcgacaccgugggcuggagcuggcccgacggcgccgagcugcccuucaccaucgacaaguga

SEQ ID NO: 177776 - RNA, 1410 nt, Artificial Sequence; identical to SEQ ID NO: 177775
  derived and/or modified CDS sequence (opt4) from neuraminidase__InfluenzaA__ACZ17173

SEQ ID NO: 177777 - RNA, 1410 nt, Artificial Sequence; identical to SEQ ID NO: 177775
  derived and/or modified CDS sequence (opt4) from neuraminidase__InfluenzaA__ACZ17183

SEQ ID NO: 177778 - RNA, 1410 nt, Artificial Sequence; identical to SEQ ID NO: 177775
  derived and/or modified CDS sequence (opt4) from neuraminidase__InfluenzaA__ACZ17193

SEQ ID NO: 177779 - RNA, 1410 nt, Artificial Sequence; identical to SEQ ID NO: 177775
  derived and/or modified CDS sequence (opt4) from neuraminidase__InfluenzaA__ACZ17203

SEQ ID NO: 177780 - RNA, 1410 nt, Artificial Sequence; identical to SEQ ID NO: 176798
  derived and/or modified CDS sequence (opt4) from neuraminidase__InfluenzaA__ACZ17213

SEQ ID NO: 177781 - RNA, 1410 nt, Artificial Sequence; identical to SEQ ID NO: 176798
  derived and/or modified CDS sequence (opt4) from neuraminidase__InfluenzaA__ACZ17223

SEQ ID NO: 177782 - RNA, 1410 nt, Artificial Sequence; identical to SEQ ID NO: 176798
  derived and/or modified CDS sequence (opt4) from neuraminidase__InfluenzaA__ACZ17233

SEQ ID NO: 177783 - RNA, 1410 nt, Artificial Sequence; identical to SEQ ID NO: 176798
  derived and/or modified CDS sequence (opt4) from neuraminidase__InfluenzaA__ACZ17243

SEQ ID NO: 177784 - RNA, 1410 nt, Artificial Sequence; identical to SEQ ID NO: 176798
  derived and/or modified CDS sequence (opt4) from neuraminidase__InfluenzaA__ACZ17263

SEQ ID NO: 177785 - RNA, 1410 nt, Artificial Sequence
  derived and/or modified CDS sequence (opt4) from neuraminidase__InfluenzaA__ACZ17273
augaaccccaaccagaagaucaucaccaucggcagcgugugcaugaccaucggcauggccaaccugauccugcagaucggcaacaucaucagcaucuggaucagccacagcauccagcugggcaaccagaaccagaucgagaccugcaaccagagcgugaucaccuacgagaacaacaccugggugaaccagaccuacgugaacaucagcaacaccaacuucgccgccggccagagcguggugagcgugaagcuggccggcaacagcagccugugccccgugagcggcugggccaucuacagcaaggacaacagcaucagaaucggcagcaagggcgacguguucgugaucagagagcccuucaucagcugcagcccccuggagugcagaaccuucuuccugacccagggcgcccugcugaacgacaagcacagcaacggcaccaucaaggacagaagccccuacagaacccugaugagcugccccaucggcgaggugcccagccccuacaacagcagauucgagagcguggccuggagcgccagcgccugccacgacggcuucaacuggcugaccaucggcaucagcggccccgacaacggcgccguggccgugcugaaguacaacggcaucaucaccgacaccaucaagagcuggagaaacaacauccugagaacccaggagagcgagugcgccugcgugaacggcagcugcuucaccgugaugaccgacggccccagcgacggccaggccagcuacaagaucuucagaaucgagaagggcaagaucgugaagagcguggagaugaacgcccccaacuaccacuacgaggagugcagcugcuaccccgacagcagcgagaucaccugcgugugcagagacaacuggcacggcagcaacagacccugggugagcuucaaccagaaccuggaguaccagaucggcuacaucugcagcggcaucuucggcgacaaccccagacccaacgacaagaccggcagcugcggccccgugcugagcaacggcgccaacggcgugaagggcuucagcuucaaguacggcaacggcguguggaucggcagaaccaagagcaucagcagcagaaacggcuucgagaugaucugggaccccaacggcuggaccggcaccgacaacaacuucagcaucaagcaggacaucgugggcaucaacgaguggagcggcuacagcggcagcuucgugcagcaccccgagcugaccggccuggacugcaucagacccugcuucuggguggagcugaucagaggcagacccaaggagaacaccaucuggaccagcggcagcagcaucagcuucugcggcgugaacagcgacaccgugggcuggagcuggcccgacggcgccgagcugcccuucaccaucgacaaguga

SEQ ID NO: 177786 - RNA, 1410 nt, Artificial Sequence; identical to SEQ ID NO: 176798
  derived and/or modified CDS sequence (opt4) from neuraminidase__InfluenzaA__ACZ17283

SEQ ID NO: 177787 - RNA, 1410 nt, Artificial Sequence; identical to SEQ ID NO: 176828
  derived and/or modified CDS sequence (opt4) from neuraminidase__InfluenzaA__ACZ17293

SEQ ID NO: 177788 - RNA, 1410 nt, Artificial Sequence; identical to SEQ ID NO: 176828
  derived and/or modified CDS sequence (opt4) from neuraminidase__InfluenzaA__ACZ17303

SEQ ID NO: 177789 - RNA, 1410 nt, Artificial Sequence; identical to SEQ ID NO: 176828
  derived and/or modified CDS sequence (opt4) from neuraminidase__InfluenzaA__ACZ17313

SEQ ID NO: 177790 - RNA, 1410 nt, Artificial Sequence; identical to SEQ ID NO: 176798
  derived and/or modified CDS sequence (opt4) from neuraminidase__InfluenzaA__ACZ17401

SEQ ID NO: 177791 - RNA, 1410 nt, Artificial Sequence; identical to SEQ ID NO: 176798
  derived and/or modified CDS sequence (opt4) from neuraminidase__InfluenzaA__ACZ17411

SEQ ID NO: 177792 - RNA, 1410 nt, Artificial Sequence; identical to SEQ ID NO: 176798
  derived and/or modified CDS sequence (opt4) from neuraminidase__InfluenzaA__ACZ17421

SEQ ID NO: 177793 - RNA, 1410 nt, Artificial Sequence
  derived and/or modified CDS sequence (opt4) from neuraminidase__InfluenzaA__ACZ17431
augaaccccaaccagaagaucaucaccaucggcagcgugugcaugaccaucggcauggccaaccugauccugcagaucggcaacaucaucagcaucuggaucagccacagcauccagcugggcaaccagaaccagaucgagaccugcaaccagagcgugaucaccuacgagaacaacaccugggugaaccagaccuacgugaacaucagcaacaccaacuucgccgccggccagagcguggugagcgugaagcuggccggcaacagcagccugugccccgugagcggcugggccaucuacagcaaggacaacagcgugagaaucggcagcaagggcgacguguucgugaucagagagcccuucaucagcugcagcccccuggagugcagaaccuucuuccugacccagggcgcccugcugaacgacaagcacagcaacggcaccaucaaggacagaagccccuacagaacccugaugagcugccccaucggcgaggugcccagccccuacaacagcagauucgagagcguggccuggagcgccagcgccugccacgacggcaucaacuggcugaccaucggcaucagcggccccgacaacggcgccguggccgugcugaaguacaacggcaucaucaccgacaccaucaagagcuggagaaacaacauccugagaacccaggagagcgagugcgccugcgugaacggcagcugcuucaccgugaugaccgacggccccagcaacggccaggccagcuacaagaucuucagaaucgagaagggcaagaucgugaagagcguggagaugaacgcccccaacuaccacuacgaggagugcagcugcuaccccgacagcagcgagaucaccugcgugugcagagacaacuggcacggcagcaacagacccugggugagcuucaaccagaaccuggaguaccagaucggcuacaucugcagcggcaucuucggcgacaaccccagacccaacgacaagaccggcagcugcggccccgugagcagcaacggcgccaacggcgugaagggcuucagcuucaaguacggcaacggcguguggaucggcagaaccaagagcaucaacagcagaaacggcuucgagaugaucugggaccccaacggcuggaccggcaccgacaacaacuucagcaucaagcaggacaucgugggcaucaacgaguggagcggcuacagcggcagcuucgugcagcaccccgagcugaccggccuggacugcaucagacccugcuucuggguggagcugaucagaggcagacccaaggagaacaccaucuggaccagcggcagcagcaucagcuucugcggcgugaacagcgacaccgugggcuggagcuggcccgacggcgccgagcugcccuucaccaucgacaaguga

SEQ ID NO: 177794 - RNA, 1410 nt, Artificial Sequence; identical to SEQ ID NO: 177793
  derived and/or modified CDS sequence (opt4) from neuraminidase__InfluenzaA__ACZ17441

SEQ ID NO: 177795 - RNA, 1410 nt, Artificial Sequence; identical to SEQ ID NO: 176788
  derived and/or modified CDS sequence (opt4) from neuraminidase__InfluenzaA__ACZ17451

SEQ ID NO: 177796 - RNA, 1410 nt, Artificial Sequence; identical to SEQ ID NO: 176798
  derived and/or modified CDS sequence (opt4) from neuraminidase__InfluenzaA__ACZ17461

SEQ ID NO: 177797 - RNA, 1410 nt, Artificial Sequence; identical to SEQ ID NO: 176798
  derived and/or modified CDS sequence (opt4) from neuraminidase__InfluenzaA__ACZ17471

SEQ ID NO: 177798 - RNA, 1410 nt, Artificial Sequence; identical to SEQ ID NO: 176828
  derived and/or modified CDS sequence (opt4) from neuraminidase__InfluenzaA__ACZ17481

SEQ ID NO: 177799 - RNA, 1410 nt, Artificial Sequence; identical to SEQ ID NO: 176798
  derived and/or modified CDS sequence (opt4) from neuraminidase__InfluenzaA__ACZ17491

SEQ ID NO: 177800 - RNA, 1410 nt, Artificial Sequence; identical to SEQ ID NO: 177264
  derived and/or modified CDS sequence (opt4) from neuraminidase__InfluenzaA__ACZ27803

SEQ ID NO: 177801 - RNA, 1410 nt, Artificial Sequence; identical to SEQ ID NO: 176788
  derived and/or modified CDS sequence (opt4) from neuraminidase__InfluenzaA__ACZ27813

SEQ ID NO: 177802 - RNA, 1410 nt, Artificial Sequence; identical to SEQ ID NO: 176798
  derived and/or modified CDS sequence (opt4) from neuraminidase__InfluenzaA__ACZ27823

SEQ ID NO: 177803 - RNA, 1410 nt, Artificial Sequence; identical to SEQ ID NO: 176788
  derived and/or modified CDS sequence (opt4) from neuraminidase__InfluenzaA__ACZ27833

SEQ ID NO: 177804 - RNA, 1410 nt, Artificial Sequence; identical to SEQ ID NO: 176798
  derived and/or modified CDS sequence (opt4) from neuraminidase__InfluenzaA__ACZ45022

SEQ ID NO: 177805 - RNA, 1410 nt, Artificial Sequence
  derived and/or modified CDS sequence (opt4) from neuraminidase__InfluenzaA__ACZ53958
augaaccccaaccagaagaucaucaccaucggcagcgugagccugaccaucgccaccaucugcuuccugaugcagaucgccauccuggugaccaccgugacccugcacuucaagcaguacgagugcaacagcccccccaacaaccaggugaugcugugcgagcccaccaucaucgagagaaacaucaccgagaucguguaccugaccaacaccaccaucgagaaggagaucugccccaagcuggccgaguacagaaacuggagcaagccccagugcaacaucaccggcuucgcccccuucagcaaggacaacagcaucagacugagcgccggcggcgacaucugggugaccagagagcccuacgugagcugcgaccccgacaagugcuaccaguucgcccugggccagggcaccacccugaacaacggccacagcaacgacaccgugcacgacagaacccccuacagaacccugcugaugaacgagcugggcgugcccuuccaccugggcaccaagcaggugugcaucgccuggagcagcagcagcugccacgacggcaaggccuggcugcacgugugcgugaccggcgacgacgagaacgccaccgccagcuucaucuacaacggcagacugguggacagcaucggcagcuggagcaagaagauccugagaacccaggagagcgagugcgugugcaucaacggcaccugcaccguggugaugaccgacggcagcgccagcggcaaggccgacaccaagauccuguucaucgaggagggcaagaucgugcacaccagcagccugagcggcagcgcccagcacguggaggagugcagcugcuaccccagauaccccggcgugagaugcgugugcagagacaacuggaagggcagcaacagacccaucguggacaucaacgugaaggacuacagcaucgugagcagcuacgugugcagcggccuggugggcgacacccccagaaagaacgacagcagcagcagcagccacugccuggaccccaacaacgaggagggcggccacggcgugaagggcugggccuucgacgacggcaacgacguguggaugggcagaaccaucagcgagaagcugagaagcggcuacgagaccuucaaggugaucgagggcuggagcaagcccaacagcaagcugcagaucaacagacaggugaucguggacagaggcaacagaagcggcuacagcggcaucuucagcguggagggcaagagcugcaucaacagaugcuucuacguggagcugaucagaggcagaaagcaggagaccgaggugcuguggaccagcaacagcaucgugguguucugcggcaccagcggcaccuacggcaccggcagcugccccgacggcagcgugcugaaccugaugcccaucuga

SEQ ID NO: 177806 - RNA, 1410 nt, Artificial Sequence
  derived and/or modified CDS sequence (opt4) from neuraminidase__InfluenzaA__ACZ53969
augaaccccaaccagaagaucaucaccaucggcagcgugagccugaccaucgccaccaucugcuuccugaugcagaucgccauccuggugaccaccgugacccugcacuucaagcaguacgagugcaacagcccccccaacaaccaggugaugcugugcgagcccaccaucaucgagagaaacaucaccgagaucguguaccugaccaacaccaccaucgagaaggagaucugccccaagcuggccgaguacagaaacuggagcaagccccagugcaacaucaccggcuucgcccccuucagcaaggacaacagcaucagacugagcgccggcggcgacaucugggugaccagagagcccuacgugagcugcgaccccgacaagugcuaccaguucgcccugggccagggcaccacccugaacaacggccacagcaacgacaccgugcacgacagaacccccuacagaacccugcugaugaacgagcugggcgugcccuuccaccugggcaccaagcaggugugcaucgccuggagcagcagcagcugccacgacggcaaggccuggcugcacgugugcgugaccggcgacgacgagaacgccaccgccagcuucaucuacaacggcagacugguggacagcaucggcagcuggagcaagaagauccugagaacccaggagagcgagugcgugugcaucaacggcaccugcaccguggugaugaccgacggcagcgccagcggcaaggccgacaccaagauccuguucaucgaggagggcgagaucgugcacaccagcccccugagcggcagcgcccagcacguggaggagugcagcugcuaccccagauaccccggcgugagaugcgugugcagagacaacuggaagggcagcaacagacccaucguggacaucaacgugaaggacuacagcaucgugagcagcuacgugugcagcggccuggugggcgacacccccagaaagaacgacagcagcagcagcagccacugccuggaccccaacaacgaggagggcggccacggcgugaagggcugggccuucgacgacggcaacgacguguggaugggcagaaccaucagcgagaagagcagaagcggcuacgagaccuucaaggugaucgagggcuggagcaagcccaacagcaagcugcagaucaacagacaggugaucguggacagaggcaacagaagcggcuacagcggcaucuucagcguggagggcaagagcugcaucaacagaugcuucuacguggagcugaucagaggcagaaagcaggagaccgaggugcuguggaccagcaacagcaucgugguguucugcggcaccagcggcaccuacggcaccggcagcuggcccgacggcagcgugcugaaccugaugcccaucuga

SEQ ID NO: 177807 - RNA, 1410 nt, Artificial Sequence
  derived and/or modified CDS sequence (opt4) from neuraminidase__InfluenzaA__ACZ53980
augaaccccaaccagaacaagcugcccaucggcagcgugagccugaccaucgccaccaucugcuuccugaugcagaucgccauccugaagaccaccgugacccugcacuucaagcaguacgagugcaacagcccccccaacaaccaggugaugcugugcgagcccaccaucaucgagagaaaccugaccaagaucguguaccugaccaacaccaccaucaagaaggagaucugccccaagcagcccaaguacagaaacuggagcaagcccaagugcaagaucaccgagcuggcccccuucagcaaggacaacagcaucagacugagcgccggcggcgacaucugggugaccagagagcccuacgugagcugcgaccccgacaagugcuaccaguucgcccugggccagggcaccacccugaacaacggccacagcaacgacaccgugcacgacagaacccccuacagaacccugcugaugaacgagcugggcgugcccuuccaccugggcaccaagcaggugugcaucgccuggagcagcagcagcugccacgacggcaaggccuggcugcacgugugcaucaccggcgacgacaagaacgccaccgccagcuucaucuacaacggcagacugguggacagcaucgugagcuggagcaaggagauccugagaacccaggagagcgagugcgugugcaucaacggcaccugcaccguggugaugaccgacggcagcgccagcggcaaggccgacaccaagauccuguucaucgaggagggcaagaucgugcacaucagcccccugagcggcagcgcccagcacguggaggagugcagcugcuaccccagauaccccggcgugagaugcaucugcagagacaacuggaagggcagcaacagacccgugguggacaucaacauggaggacuacagcaucgacagcagcuacgugugcagcggccuggugggcgacacccccagaaagaacgacagcagcagcagcagccacugccuggaccccaacaacgaggagggcggccacggcgugaagggcugggccuucgacgacggcaacgacguguggaugggcagaaccaucagcgagaagcugagaagcggcuacgagaccuucaaggugaucggcggcuggagcaagcccaacagcaagcugcagaucaacagacaggugaucguggacagaggcaacagaagcggcuacagcggcaucuucagcguggagggcaagagcugcaucaacagaugcuucuacguggagcugaucagaggcagaaagcaggagaccgaggugcuguggaccagcaacagcaucgugguguucugcggcaccagcggcaccuacggcaccggcagcuggcccgacggcagcgugcugaaccugaugcccaucuga

SEQ ID NO: 177808 - RNA, 1410 nt, Artificial Sequence; identical to SEQ ID NO: 176798
  derived and/or modified CDS sequence (opt4) from neuraminidase__InfluenzaA__ACZ56082

SEQ ID NO: 177809 - RNA, 1410 nt, Artificial Sequence; identical to SEQ ID NO: 177381
  derived and/or modified CDS sequence (opt4) from neuraminidase__InfluenzaA__ACZ57183

SEQ ID NO: 177810 - RNA, 1413 nt, Artificial Sequence
  derived and/or modified CDS sequence (opt4) from neuraminidase__InfluenzaA__ACZ81542
augaaccccaaccagaaggugaucaccaucggcagcaucagcaucgccaucggcaucaucagccugaugcugcagaucggcaacaucaucagcaucugggccagccacagcauccagaccggcagccagaacaacaccggcaucugcaaccagagaaucaucaccuacgagaacagcaccugggugaaccacaccuacgugaacaucaacaacaccaacgugguggccggcgaggacaagaccagcgugacccuggccggcaacagcagccugugcagcaucagcggcugggccaucuacaccaaggacaacagcaucagaaucggcagcaagggcgacguguucgugaucagagagcccuucaucagcugcagccaccuggagugcagaaccuucuuccugacccagggcgcccugcugaacgacaagcacagcaacggcaccgugaaggacagaagccccuacagagcccugaugagcugcccccugggcgaggcccccagccccuacaacagcaaguucgagagcguggccuggagcgccagcgccugccacgacggcaugggcuggcugaccaucggcaucagcggccccgacaacggcgccguggccgugcugaaguacaacggcaucaucaccggcaccaucaagagcuggaagaagcagauccugagaacccaggagagcgagugcgugugcaugaacggcagcugcuucaccaucaugaccgacggccccagcaacaaggccgccagcuacaagaucuucaagaucgagaagggcaaggugaccaagagcaucgagcugaacgcccccaacuucuacuacgaggagugcagcugcuaccccgacaccggcaucgugaugugcgugugcagagacaacuggcacggcagcaacagacccugggugagcuucaaccagaaccuggacuaccagaucggcuacaucugcagcggcguguucggcgacaaccccagacccgaggacggcgagggcagcugcaaccccgugaccguggacggcgccaacggcgugaagggcuucagcuacaaguacggcaacggcguguggaucggcagaaccaagagcaacagacugagaaagggcuucgagaugaucugggaccccaacggcuggaccaacaccgacagcgacuucagcgugaagcaggacgugguggccaucaccgacuggagcggcuacagcggcagcuucgugcagcaccccgagcugaccggccuggacugcaucagacccugcuucuggguggagcuggugagaggccugcccagagagaacaccaccaucuggaccagcggcagcagcaucagcuucugcggcgugaacagcgacaccgccaacuggagcuggcccgacggcgccgagcugcccuucaccaucgacaaguga

SEQ ID NO: 177811 - RNA, 1413 nt, Artificial Sequence
  derived and/or modified CDS sequence (opt4) from neuraminidase__InfluenzaA__ACZ81543
augaaccccaaccagaagaucaucaccaucggcagcaucagcaucgccaucggcaucaucagccugaugcugcagaucggcaacaucaucagcaucugggccagccacagcauccagaccggcagccagaacaacaccggcaucugcaaccagagaaucaucaccuacgagaacaacaccugggugaaccacaccuacgugaacaucaacaacaccaacgugguggccggcgaggacaagaccagcgugacccuggccggcaacagcagccugugcagcaucagcggcugggccaucuacaccaaggacaacagcaucagaaucggcagcaagggcgacguguucgugaucagagagcccuucaucagcugcagccaccuggagugcagaaccuucuuccugacccagggcgcccugcugaacgacaagcacagcaacggcaccgugaaggacagaagccccuacagagcccugaugagcugcccccugggcgaggcccccagccccuacaacagcaaguucgagagcguggccuggagcgccagcgccugccacgacggcaugggcuggcugaccaucggcaucagcggccccgacaacggcgccguggccgugcugaaguacaacggcaucaucaccggcaccaucaagagcuggaaggagcagauccugagaacccaggagagcgagugcgugugcaugaacggcagcugcuucaccaucaugaccgacggccccagcaacaaggccgccagcuacaagaucuucaagaucgagaagggcaaggugaccaagagcaucgagcugaacgcccccaacuucuacuacgaggagugcagcugcuaccccgacaccggcaucgugaugugcgugugcagagacaacuggcacggcagcaacagacccugggugagcuucaaccagaaccuggacuaccagaccggcuacaucugcagcggcguguucggcgacaaccccagacccgaggacggcgagggcagcugcaaccccgugaccguggacggcgccaacggcgugaagggcuucagcuacaaguacggcaacggcguguggaucggcagaaccaagagcaacagacugagaaagggcuucgagaugaucugggaccccaacggcuggaccaacaccgacagcgacuucagcgugaagcaggacgugguggccaucaccgacuggagcggcuacagcggcagcuucgugcagcaccccgagcugaccggccuggacugcaucagacccugcuucuggguggagcuggugagaggccugcccagagagaacaccaccaucuggaccagcggcagcagcaucagcuucugcggcgugaacagcgacaccgccaacuggagcuggcccgacggcgccgagcugcccuucaccaucgacaaguga

SEQ ID NO: 177812 - RNA, 1410 nt, Artificial Sequence
  derived and/or modified CDS sequence (opt4) from neuraminidase__InfluenzaA__ACZ81546
augaaccccaaccagaagaucaucaccaucggcagcgugagccugaccaucagcaccaucugcuucuucaugcagaucgccauccugaucaccaccgugacccugcacuucaagcaguacgaguucaacagcccccccaacaaccaggugaugcugugcgagcccaccaucaucgagagaaacaucaccgagaucguguaccugaccaacaccaccaucgagaaggagaucugccccaagcuggccgaguacagaaacuggagcaagccccagugcgacaucaccggcagcgcccccuucagcaaggacaacagcaucagacugagcgccggcggcgacaucugggugaccagagagcccuacgugagcugcgaccccgacaagugcuaccaguucgcccugggccagggcaccacccugaacaacgugcacagcaacaacaccgugcacgacagaacccccuacagaacccugcugaugaacgagcugggcgugcccuuccaccugggcaccaagcaggugugcaucgccuggagcagcagcagcugccacgacggcaaggccuggcugcacgugugcaucaccggcgacgacaagaacgccaccgccagcuucaucuacaacggcagacugguggacagcguggugagcuggagcaaggagauccugagaacccaggagagcgagugcgugugcaucaacggcaccugcaccguggugaugaccgacggcagcgccagcggcaaggccgacaccaagauccuguucaucgaggagggcaagaucgugcacaccagcacccugagcggcagcgcccagcacguggaggagugcagcugcuaccccagauaccccggcgugagaugcgugugcagagacaacuggaagggcagcaacagacccaucguggacaucaacaucaaggaccacagcaucgugagcagcuacgugugcagcggccuggugggcgacacccccagaaagaacgacagcagcagcagcagccacugccuggaccccaacaacgaggagggcggccacggcgugaagggcugggccuucgacgacggcaacgacguguggaugggcagaaccaucagcgagaagagcagacugggcuacgagaccuucaaggugaucgagggcuggagcaaccccaagagcaagcugcagaucaacagacaggugaucguggacagaggcaacagaagcggcuacagcggcaucuucagcguggagggcaagagcugcaucaacagaugcuucuacguggagcugaucagaggcagaaaggaggagaccgaggugcuguggaccagcaacagcaucgugguguucugcggcaccagcggcaccuacggcaccggcagcuggcccgacggcgccgacaucaaccugaugcccaucuga

SEQ ID NO: 177813 - RNA, 1410 nt, Artificial Sequence
  derived and/or modified CDS sequence (opt4) from neuraminidase__InfluenzaA__ACZ81547
augaaccccaaccagaagaucaucaccaucggcagcgugagccugaccaucagcaccaucugcuucuucaugcagaucgccauccugaucaccaccgugacccugcacuucaagcaguacgaguucaacagcccccccaacaaccaggugaugcugugcgagcccaccaucaucgagagaaacaucaccgagaucguguaccugaccaacaccaccaucgagaaggagaucugccccaagcuggccgaguacagaaacuggagcaagccccagugcgacaucaccggcuucgcccccuucagcaaggacaacagcaucagacugagcgccggcggcgacaucugggugaccagagagcccuacgugagcugcgaccccgacaagugcuaccaguucgcccugggccagggcaccacccugaacaacgugcacagcaacaacaccgugagagacagaacccccuacagaacccugcugaugaacgagcugggcgugcccuuccaccugggcaccaagcaggugugcaucgccuggagcagcagcagcugccacgacggcaaggccuggcugcacgugugcaucaccggcgacgacaagaacgccaccgccagcuucaucuacaacggcagacugguggacagcguggugagcuggagcaaggagauccugagaacccaggagagcgagugcgugugcaucaacggcaccugcaccguggugaugaccgacggcagcgccagcggcaaggccgacaccaagauccuguucaucgaggagggcaagaucgugcacaccagcacccugagcggcagcgcccagcacguggaggagugcagcugcuaccccagauaccccggcgugagaugcgugugcagagacaacuggaagggcagcaacagacccaucguggacaucaacaccaaggaccacagcaucgugagcagcuacgugugcagcggccuggugggcgacacccccagaaagaacgacagcagcagcagcagccacugccuggaccccaacaacgaggagggcggccacggcgugaagggcugggccuucgacgacggcaacgacguguggaugggcagaaccaucagcgagaagagcagacugggcuacgagaccuucaaggugaucgagggcuggagcaaccccaagagcaagcugcagaucaacagacaggugaucguggacaagggcaacagaagcggcuacagcggcaucuucagcguggagggcaagagcugcaucaacagaugcuucuacguggagcugaucagaggcagaaaggaggagaccgaggugcuguggaccagcaacagcaucgugguguucugcggcaccagcggcaccuacggcaccggcagcuggcccgacggcgccgacaucaaccugaugcccaucuga

SEQ ID NO: 177814 - RNA, 1410 nt, Artificial Sequence; identical to SEQ ID NO: 176798
  derived and/or modified CDS sequence (opt4) from neuraminidase__InfluenzaA__ACZ81634

SEQ ID NO: 177815 - RNA, 1410 nt, Artificial Sequence
  derived and/or modified CDS sequence (opt4) from neuraminidase__InfluenzaA__ACZ81644
augaaccccaaccagaagaucaucaccaucggcagcgugugcaugaccaucggcauggccaaccugauccugcagaucggcaacaucaucagcaucuggaucagccacagcauccagcugggcaaccagaaccagaucgagaccugcaaccagagcgugaucaccuacgagaacaacaccugggugaaccagaccuacgugaacaucagcaacaccaacuucgccgccggccagagcguggugagcgugaagcuggccggcaacagcagccugugccccgugagcggcugggccaucuacagcaaggacaacagcaucagaaucggcagcaagggcgacguguucgugaucagagagcccuucaucagcugcagcccccuggagugcagaaccuucuuccugacccagggcgcccugcugaacgacaagcacagcaacggcaccaucaaggacagaagccccuacagaacccugaugagcugccccaucggcgaggugcccagccccuacaacagcagauucgagagcguggccuggagcgccagcgccugccacgacggcaucaacuggcugaccaucggcaucagcggccccgacaacggcgccguggccgugcugaaguacaacggcaucaucaccgacaccaucaagagcuggagaaacaacauccugagaacccaggagagcgagugcgccugcgugaacggcagcugcuucaccgugaugaccgacggccccagcgacggccaggccagcuacaagaucuucagaaucgagaagggcaagaucgugaagagcguggagaugaacgcccccaacuaccacuacgaggagugcagcugcuaccccgacagcagcgagaucaccugcgugugcagagacaacuggcacggcagcaacagacccugggugagcuucaaccagaaccuggaguaccagaucggcuacaucugcagcggcaucuucggcgacaaccccagacccaacgacaagaccggcagcugcggccccgugagcagcaacggcgccaacggcgugaagggcuucagcuucaaguacggcaacggcguguggaucggcagaaccaagagcaucagcagcagaaacggcuucgagaugaucugggaccccaacggcuggaccggcaccgacaacaacuucagcaucaagcaggacaucaucggcaucaacgaguggagcggcuacagcggcagcuucgugcagcaccccgagcugaccggccuggacugcaucagacccugcuucuggguggagcugaucagaggcagacccaaggagaacaccaucuggaccagcggcagcagcaucagcuucugcggcgugaacagcgacaccgugggcuggagcuggcccgacggcgccgagcugcccuucaccaucgacaaguga

SEQ ID NO: 177816 - RNA, 1410 nt, Artificial Sequence
  derived and/or modified CDS sequence (opt4) from neuraminidase__InfluenzaA__ACZ81653
augaaccccaaccagaagaucaucaccaucggcagcgugugcaugaccaucggcauggccaaccugauccugcagaucggcaacaucaucagcaucuggaucagccacagcauccagcugggcaaccagaaccagaucgagaccugcaaccagagcgugaucaccuacgagaacaacaccugggugaaccagaccuacgugaacaucagcaacaccaacuucgccgccggccagagcguggugagcgugaagcuggccggcaacagcagccugugccccgugagcggcugggccaucuacagcaaggacaacagcaucagaaucggcagcaagggcgacguguucgugaucagagagcccuucaucagcugcagcccccuggagugcagaaccuucuuccugacccagggcgcccugcugaacgacaagcacagcaacggcaccaucaaggacagaagccccuacagaacccugaugagcugccccaucggcgaggugcccagccccuacaacagcagauucgagagcguggccuggagcgccagcgccugccacgacggcaucaacuggcugaccaucggcaucagcggccccgacaacggcgccguggccgugcugaaguacaacggcaucaucaccgacaccaucaagagcuggagaaacaacauccugagaacccaggagagcgagugcgccugcgugaacggcagcugcuucaccgugaugaccgacggccccagcgacggccaggccagcuacaagaucuucagaaucgagaagggcaagaucgugaagagcguggagaugaacgcccccaacuaccacuacgaggagugcagcugcuaccccgacagcagcgagaucaccugcgugugcagagacaacuggcacggcagcaacagacccugggugagcuucaaccagaaccuggaguaccagaucggcuacaucugcagcggcaucuucggcgacaaccccagacccaacgacaagaccggcagcugcggccccgugagcagcaacggcgccaacggcgugaagggcuucagcuucaaguacggcaacggcguguggaucggcagaaccaagagcaucagcagcagaaacggcuucgagaugaucugggaccccaacggcuggaccggcaccgacaacaacuucagcaucaagcaggacaucgugggcaucaacgaguggagcggcuacagcggcagcuucgugcagcaccccgagcugaccggccugaacugcaucagacccugcuucuggguggagcugaucagaggcagacccaaggagaacaccaucuggaccagcggcagcagcaucagcuucugcggcgugaacagcgacaccgugggcuggagcuggcccgacggcgccgagcugcccuucaccaucgacaaguga

SEQ ID NO: 177817 - RNA, 1410 nt, Artificial Sequence; identical to SEQ ID NO: 176798
  derived and/or modified CDS sequence (opt4) from neuraminidase__InfluenzaA__ACZ95840

SEQ ID NO: 177818 - RNA, 1410 nt, Artificial Sequence; identical to SEQ ID NO: 176798
  derived and/or modified CDS sequence (opt4) from neuraminidase__InfluenzaA__ACZ95850

SEQ ID NO: 177819 - RNA, 1410 nt, Artificial Sequence; identical to SEQ ID NO: 176798
  derived and/or modified CDS sequence (opt4) from neuraminidase__InfluenzaA__ACZ95860

SEQ ID NO: 177820 - RNA, 1410 nt, Artificial Sequence; identical to SEQ ID NO: 176798
  derived and/or modified CDS sequence (opt4) from neuraminidase__InfluenzaA__ACZ95870

SEQ ID NO: 177821 - RNA, 1410 nt, Artificial Sequence; identical to SEQ ID NO: 176798
  derived and/or modified CDS sequence (opt4) from neuraminidase__InfluenzaA__ACZ95880

SEQ ID NO: 177822 - RNA, 1410 nt, Artificial Sequence; identical to SEQ ID NO: 176798
  derived and/or modified CDS sequence (opt4) from neuraminidase__InfluenzaA__ACZ95890

SEQ ID NO: 177823 - RNA, 1410 nt, Artificial Sequence; identical to SEQ ID NO: 176798
  derived and/or modified CDS sequence (opt4) from neuraminidase__InfluenzaA__ACZ95900

SEQ ID NO: 177824 - RNA, 1410 nt, Artificial Sequence; identical to SEQ ID NO: 176798
  derived and/or modified CDS sequence (opt4) from neuraminidase__InfluenzaA__ACZ95910

SEQ ID NO: 177825 - RNA, 1410 nt, Artificial Sequence; identical to SEQ ID NO: 176798
  derived and/or modified CDS sequence (opt4) from neuraminidase__InfluenzaA__ACZ95920

SEQ ID NO: 177826 - RNA, 1410 nt, Artificial Sequence; identical to SEQ ID NO: 177685
  derived and/or modified CDS sequence (opt4) from neuraminidase__InfluenzaA__ACZ95930

SEQ ID NO: 177827 - RNA, 1410 nt, Artificial Sequence; identical to SEQ ID NO: 176798
  derived and/or modified CDS sequence (opt4) from neuraminidase__InfluenzaA__ACZ95940

SEQ ID NO: 177828 - RNA, 1410 nt, Artificial Sequence; identical to SEQ ID NO: 177815
  derived and/or modified CDS sequence (opt4) from neuraminidase__InfluenzaA__ACZ95950

SEQ ID NO: 177829 - RNA, 1410 nt, Artificial Sequence; identical to SEQ ID NO: 176798
  derived and/or modified CDS sequence (opt4) from neuraminidase__InfluenzaA__ACZ95960

SEQ ID NO: 177830 - RNA, 1410 nt, Artificial Sequence; identical to SEQ ID NO: 177815
  derived and/or modified CDS sequence (opt4) from neuraminidase__InfluenzaA__ACZ95970

SEQ ID NO: 177831 - RNA, 1410 nt, Artificial Sequence; identical to SEQ ID NO: 176798
  derived and/or modified CDS sequence (opt4) from neuraminidase__InfluenzaA__ACZ95980

SEQ ID NO: 177832 - RNA, 1410 nt, Artificial Sequence; identical to SEQ ID NO: 176798
  derived and/or modified CDS sequence (opt4) from neuraminidase__InfluenzaA__ACZ95990

SEQ ID NO: 177833 - RNA, 1410 nt, Artificial Sequence; identical to SEQ ID NO: 176798
  derived and/or modified CDS sequence (opt4) from neuraminidase__InfluenzaA__ACZ96000

SEQ ID NO: 177834 - RNA, 1410 nt, Artificial Sequence; identical to SEQ ID NO: 176798
  derived and/or modified CDS sequence (opt4) from neuraminidase__InfluenzaA__ACZ96010

SEQ ID NO: 177835 - RNA, 1410 nt, Artificial Sequence
  derived and/or modified CDS sequence (opt4) from neuraminidase__InfluenzaA__ACZ96020
augaaccccaaccagaagaucaucaccaucggcagcgugugcaugaccaucggcauggccaaccugauccugcagaucggcaacaucauccugaucuggaucagccacagcauccagcugggcaaccagaaccagaccgagaccugcaaccagagcgugaucaccuacgagaacaacaccugggugaaccagaccuacgugaacaucagcaacaccaacuucgccgccggccagagcguggugagcgugaagcuggccggcaacagcagccugugccccgugagcggcugggccaucuacagcaaggacaacagcgugagaaucggcagcaagggcgacguguucgugaucagagagcccuucaucagcugcagcccccuggagugcagaaccuucuuccugacccagggcgcccugcugaacgacaagcacagcaacggcaccaucaaggacagaagccccuacagaacccugaugagcugccccaucggcgaggugcccagccccuacaacagcagauucgagagcguggccuggagcgccagcgccugccacgacggcaucaacuggcugaccaucggcaucagcggccccgacaacggcgccguggccgugcugaaguacaacggcaucaucaccgacaccaucaagagcuggagaaacaacauccugagaacccaggagagcgagugcgccugcgugaacggcagcugcuucaccgugaugaccgacggccccagcaacggccaggccagcuacaagaucuucagaaucgagaagggcaagaucgugaagagcguggagaugaacgcccccaacuaccacuacgaggagugcagcugcuaccccgacagcagcgagaucaccugcgugugcagagacaacuggcacggcagcaacagacccugggugagcuucaaccagaaccuggaguaccagaucggcuacaucugcagcggcaucuucggcgacaaccccagacccaucgacaagaccggcagcugcggccccgugagcagcaacggcgccaacggcgugaagggcuucagcuucaaguacggcaacggcguguggaucggcagaaccaagagcaucagcagcagaaacggcuucgagaugaucugggaccccaacggcuggaccggcaccgacaacaacuucagcaucaagcaggacaucgugggcaucaacgaguggagcggcuacagcggcagcuucgugcagcaccccgagcugaccggccuggacugcaucagacccugcuucuggguggagcugaucagaggcagacccaaggagaacaccaucuggaccagcggcagcagcaucagcuucugcggcgugaacagcgacaccgugggcuggagcuggcccgacggcgccgagcugcccuucaccaucgacaaguga

SEQ ID NO: 177836 - RNA, 1410 nt, Artificial Sequence; identical to SEQ ID NO: 176798
  derived and/or modified CDS sequence (opt4) from neuraminidase__InfluenzaA__ACZ96050

SEQ ID NO: 177837 - RNA, 1410 nt, Artificial Sequence; identical to SEQ ID NO: 176798
  derived and/or modified CDS sequence (opt4) from neuraminidase__InfluenzaA__ACZ96060

SEQ ID NO: 177838 - RNA, 1410 nt, Artificial Sequence; identical to SEQ ID NO: 176798
  derived and/or modified CDS sequence (opt4) from neuraminidase__InfluenzaA__ACZ96072

SEQ ID NO: 177839 - RNA, 1410 nt, Artificial Sequence; identical to SEQ ID NO: 176798
  derived and/or modified CDS sequence (opt4) from neuraminidase__InfluenzaA__ACZ96082

SEQ ID NO: 177840 - RNA, 1410 nt, Artificial Sequence; identical to SEQ ID NO: 176798
  derived and/or modified CDS sequence (opt4) from neuraminidase__InfluenzaA__ACZ96092

SEQ ID NO: 177841 - RNA, 1410 nt, Artificial Sequence; identical to SEQ ID NO: 176798
  derived and/or modified CDS sequence (opt4) from neuraminidase__InfluenzaA__ACZ96102

SEQ ID NO: 177842 - RNA, 1410 nt, Artificial Sequence; identical to SEQ ID NO: 176798
  derived and/or modified CDS sequence (opt4) from neuraminidase__InfluenzaA__ACZ96112

SEQ ID NO: 177843 - RNA, 1410 nt, Artificial Sequence
  derived and/or modified CDS sequence (opt4) from neuraminidase__InfluenzaA__ACZ96122
augaaccccaaccagaagaucaucaccaucggcagcgugugcaugaccaucggcauggccaaccugauccugcagaucggcaacaucaucagcaucuggaucagccacagcauccagcugggcaaccagaaccagaucgaggccugcaaccagagcgugaucaccuacgagaacaacaccugggugaaccagaccuacgugaacaucagcaacaccaacuucgccgccggccagagcguggugagcgugaagcuggccggcaacagcagccugugccccgugagcggcugggccaucuacagcaaggacaacagcaucagaaucggcagcaagggcgacguguucgugaucagagagcccuucaucagcugcagcccccuggagugcagaaccuucuuccugacccagggcgcccugcugaacgacaagcacagcaacggcaccaucaaggacagaagccccuacagaacccugaugagcugccccaucggcgaggugcccagccccuacaacagcagauucgagagcguggccuggagcgccagcgccugccacgacggcaucaacuggcugaccaucggcaucagcggccccgacaacggcgccguggccgugcugaaguacaacggcaucaucaccgacaccaucaagagcuggagaaacaacauccugagaacccaggagagcgagugcgccugcgugaacggcagcugcuucaccgugaugaccgacggccccagcgacggccaggccagcuacaagaucuucagaaucgagaagggcaagaucgugaagagcguggagaugaacgcccccaacuaccacuacgaggagugcagcugcuaccccgacagcagcgagaucaccugcgugugcagagacaacuggcacggcagcaacagacccugggugagcuucaaccagaaccuggaguaccagaucggcuacaucugcagcggcaucuucggcgacaaccccagacccaacgacaagaccggcagcugcggccccgugagcagcaacggcgccaacggcgugaagggcuucagcuucaaguacggcaacggcguguggaucggcagaaccaagagcaucagcagcagaaacggcuucgagaugaucugggaccccaacggcuggaccggcaaggacaacaacuucagcaucaagcaggacaucgugggcaucaacgaguggagcggcuacagcggcagcuucgugcagcaccccgagcugaccggccuggacugcaucagacccugcuucuggguggagcugaucagaggcagacccaaggagaacaccaucuggaccagcggcagcagcaucagcuucugcggcaucaacagcgacaccgugggcuggagcuggcccgacggcgccgagcugcccuucaccaucgacaaguga

SEQ ID NO: 177844 - RNA, 1410 nt, Artificial Sequence; identical to SEQ ID NO: 176798
  derived and/or modified CDS sequence (opt4) from neuraminidase__InfluenzaA__ACZ96132

SEQ ID NO: 177845 - RNA, 1410 nt, Artificial Sequence; identical to SEQ ID NO: 176798
  derived and/or modified CDS sequence (opt4) from neuraminidase__InfluenzaA__ACZ96142

SEQ ID NO: 177846 - RNA, 1410 nt, Artificial Sequence; identical to SEQ ID NO: 176798
  derived and/or modified CDS sequence (opt4) from neuraminidase__InfluenzaA__ACZ96152

SEQ ID NO: 177847 - RNA, 1410 nt, Artificial Sequence; identical to SEQ ID NO: 176798
  derived and/or modified CDS sequence (opt4) from neuraminidase__InfluenzaA__ACZ96162

SEQ ID NO: 177848 - RNA, 1410 nt, Artificial Sequence; identical to SEQ ID NO: 176798
  derived and/or modified CDS sequence (opt4) from neuraminidase__InfluenzaA__ACZ96172

SEQ ID NO: 177849 - RNA, 1410 nt, Artificial Sequence
  derived and/or modified CDS sequence (opt4) from neuraminidase__InfluenzaA__ACZ96182
augaaccccaaccagaagaucaucaccaucggcagcgugugcaugaccaucggcauggccaaccugauccugcagaucggcaacaucaucagcaucuggaucagccacagcauccagcugggcaaccagaaccagaucgagaccugcaaccagagcgugaucaccuacgagaacaacaccugggugaaccagaccuacgugaacaucagcaacaccaacuucgccgccggccagagcguggugagcgugaagcuggccggcaacagcagccugugccccgugagcggcugggccaucuacagcaaggacaacagcaucagaaucggcagcaagggcgacguguucgugaucagagagcccuucaucagcugcagcccccuggagugcagaaccuucuuccugacccagggcgcccugcugaacgacagacacagcaacggcaccaucaaggacagaagccccuacagaacccugaugagcugccccaucggcgaggugcccagccccuacaacagcagauucgagagcguggccuggagcgccagcgccugccacgacggcaucaacuggcugaccaucggcaucagcggccccgacaacggcgccguggccgugcugaaguacaacggcaucaucaccgacaccaucaagagcuggagaaacaacauccugagaacccaggagagcgagugcgccugcgugaacggcagcugcuucaccgugaugaccgacggccccagcgacggccaggccagcuacaagaucuucagaaucgagaagggcaagaucgugaagagcguggagaugaacgcccccaacuaccacuacgaggagugcagcugcuaccccgacagcagcgagaucaccugcgugugcagagacaacuggcacggcagcaacagacccugggugagcuucaaccagaaccuggaguaccagaucggcuacaucugcagcggcaucuucggcgacaaccccagacccaacgacaagaccggcagcugcggccccgugagcagcaacggcgccaacggcgugaagggcuucagcuucaaguacggcaacggcguguggaucggcagaaccaagagcaucagcagcagaaacggcuucgagaugaucugggaccccaacggcuggaccggcaccgacaacaacuucagcaucaagcaggacaucgugggcaucaacgaguggagcggcuacagcggcagcuucgugcagcaccccgagcugaccggccuggacugcaucagacccugcuucuggguggagcugaucagaggcagacccaaggagaacaccaucuggaccagcggcagcagcaucagcuucugcggcgugaacagcgacaccgugggcuggagcuggcccgacggcgccgagcugcccuucaccaucgacaaguga

SEQ ID NO: 177850 - RNA, 1410 nt, Artificial Sequence
  derived and/or modified CDS sequence (opt4) from neuraminidase__InfluenzaA__ACZ96192
augaaccccaaccagaagaucaucaccaucggcagcgugugcaugaccaucggcauggccaaccugauccugcagaucggcaacaucaucagcaucuggaucagccacagcauccagcugggcaaccagaaccagaucgagaccugcaaccagagcgugaucaccuacgagaacaacaccugggugaaccagaccuacgugaacaucagcaacaccaacuucgccgccggccagagcguggugagcgugaagcuggccggcaacagcagccugugccccgugagcggcugggccaucuacagcaaggacaacagcaucagaaucggcagcaagggcgacguguucgugaucagagagcccuucaucagcugcagcccccuggagugcagaaccuucuuccugacccagggcgcccugcugaacgacaagcacagcaacggcaccaucaaggacagaagccccuacagaacccugaugagcugccccaucggcgaggugcccagccccuacaacagcagauucgagagcguggccuggagcgccagcgccugccacgacggcaucaacuggcugaccaucggcaucagcggccccgacaacggcgccguggccgugcugaaguacaacggcaucaucaccgacaccaucaagagcuggagaaacaacauccugagaacccaggagagcgagugcgccugcgugaacggcagcugcuucaccgugaugaccgacggccccagcgacggccaggccagcuacaagaucuucagaaucgagaagggcaagaucgugaagagcguggagaugaacgcccccaacuaccacuacgaggagugcagcugcuaccccgacagcagcgagaucaccugcgugugcagagacaacuggcacggcagcaacagacccugggugagcuucaaccagaaccuggaguaccagaucggcuacaucugcagcggcaucuucggcgacaaccccagaagcaacgacaagaccggcagcugcggccccgugagcagcaacggcgccaacggcgugaagggcuucagcuucaaguacggcaacggcguguggaucggcagaaccaagagcaucagcagcagaaacggcuucgagaugaucugggaccccaacggcuggaccggcaccgacaacaacuucagcaucaagcaggacaucgugggcaucaacgaguggagcggcuacagcggcagcuucgugcagcaccccgagcugaccggccuggacugcaucagacccugcuucuggguggagcugaucagaggcagacccaaggagaacaccaucuggaccagcggcagcagcaucagcuucugcggcgugaacagcgacaccgugggcuggagcuggcccgacggcgccgagcugcccuucaccaucgacaaguga

SEQ ID NO: 177851 - RNA, 1410 nt, Artificial Sequence
  derived and/or modified CDS sequence (opt4) from neuraminidase__InfluenzaA__ACZ96232
augaaccccaaccagaagaucaucaccaucggcagcgugugcaugaccgugggcauggccaaccugauccugcagaucggcaacaucaucagcaucuggaucagccacagcauccagcugggcaaccagaaccagaucgagaccugcaaccagagcgugaucaccuacgagaacaacaccugggugaaccagaccuacgugaacaucagcaacaccaacuucgccgccggccagagcguggugagcgugaagcuggccggcaacagcagccugugccccgugagcggcugggccaucuacagcaaggacaacagcaucagaaucggcagcaagggcgacguguucgugaucagagagcccuucaucagcugcagcccccuggagugcagaaccuucuuccugacccagggcgcccugcugaacgacaagcacagcaacggcaccaucaaggacagaagccccuacagaacccugaugagcugccccaucggcgaggugcccagccccuacaacagcagauucgagagcguggccuggagcgccagcgccugccacgacggcaucaacuggcugaccaucggcaucagcggccccgacaacggcgccguggccgugcugaaguacaacggcaucaucaccgacaccaucaagagcuggagaaacaacauccugagaacccaggagagcgagugcgccugcgugaacggcagcugcuucaccgugaugaccgacggccccagcgacggccaggccagcuacaagaucuucagaaucgagaagggcaagaucgugaagagcguggagaugaacgcccccaacuaccacuacgaggagugcagcugcuaccccgacagcagcgagaucaccugcgugugcagagacaacuggcacggcagcaacagacccugggugagcuucaaccagaaccuggaguaccagaucggcuacaucugcagcggcaucuucggcgacaaccccagacccaacgacaagaccggcagcugcggccccgugagcagcaacggcgccaacggcgugaagggcuucagcuucaaguacggcaacggcguguggaucggcagaaccaagagcaucagcagcagaaacggcuucgagaugaucugggaccccaacggcuggaccggcaccgacaacgacuucagcaucaagcaggacaucgugggcaucaacgaguggagcggcuacagcggcagcuucgugcagcaccccgagcugaccggccuggacugcaucagacccugcuucuggguggagcugaucagaggcagacccaaggagaacaccaucuggaccagcggcagcagcaucagcuucugcggcgugaacagcgacaccgugggcuggagcuggcccgacggcgccgagcugcccuucaccaucgacaaguga

SEQ ID NO: 177852 - RNA, 1410 nt, Artificial Sequence
  derived and/or modified CDS sequence (opt4) from neuraminidase__InfluenzaA__ACZ96242
augaaccccaaccagaagaucaucaccaucggcagcgugugcaugaccaucggcauggccaaccugauccugcagaucggcaacaucaucagcaucuggaucagccacagcauccagcugggcaaccagaaccagaucgagaccugcaaccagagcgugaucaccuacgagaacaacaccugggugaaccagaccuacgugaacaucagcaacaccaacuucgccgccggccagagcguggugagcgugaagcuggccggcaacagcagccugugccccgugagcggcugggccaucuacagcaaggacaacagcaucagaaucggcagcaagggcgacguguucgugaucagagagcccuucaucagcugcagcccccuggagugcagaaccuucuuccugacccagggcgcccugcugaacgacaagcacagcaacggcaccaucaaggacagaagccccuacagaacccugaugagcugccccaucggcgaggugcccagccccuacaacagcagauucgagagcguggccuggagcgccagcgccugccacgacggcaucaacuggcugaccaucggcaucagcggccccgacaacggcgccguggccgugcugaaguacaacggcaucaucaccgacaccaucaagagcuggagaaacaacauccugagaacccaggagagcgagugcgccugcgugaacggcagcugcuucaccgugaugaccgacggccccagcgacggccaggccagcuacaagaucuucagaaucgagaagggcaagaucgugaagagcguggagaugaacgcccccaacuaccacuacgaggagugcagcugcuaccccgacagcagcgagaucaccugcgugugcagagacaacuggcacggcagcaacagacccugggugagcuucaaccagaaccuggaguaccagaucggcuacaucugcagcggcaucuucggcgacaaccccagacccaacgacaagaccggcagcugcggccccgugagcagcaacggcgccaacggcgugaagggcuucagcuucaaguacggcaacggcguguggaucggcagaaccaagagcaucagcagcagaaacggcuucgagaugaucugggaccccaacggcuggaccggcaccgacaacaacuucagcaucaagcaggacaucgugggcaucaacgaguggagcggcuacagcggcagcuucgugcagcaccccgagcugaccggccuggacugcaucagacccugcuucuggguggagcugaucagaggcagacccaaggagagcaccaucuggaccagcggcagcagcaucagcuucugcggcgugaacagcgacaccgugggcuggagcuggcccgacggcgccgagcugcccuucaccaucgacaaguga

SEQ ID NO: 177853 - RNA, 1410 nt, Artificial Sequence; identical to SEQ ID NO: 176798
  derived and/or modified CDS sequence (opt4) from neuraminidase__InfluenzaA__ACZ96252

SEQ ID NO: 177854 - RNA, 1410 nt, Artificial Sequence; identical to SEQ ID NO: 176798
  derived and/or modified CDS sequence (opt4) from neuraminidase__InfluenzaA__ACZ96292

SEQ ID NO: 177855 - RNA, 1410 nt, Artificial Sequence; identical to SEQ ID NO: 176798
  derived and/or modified CDS sequence (opt4) from neuraminidase__InfluenzaA__ACZ96302

SEQ ID NO: 177856 - RNA, 1410 nt, Artificial Sequence; identical to SEQ ID NO: 176798
  derived and/or modified CDS sequence (opt4) from neuraminidase__InfluenzaA__ACZ96312

SEQ ID NO: 177857 - RNA, 1410 nt, Artificial Sequence
  derived and/or modified CDS sequence (opt4) from neuraminidase__InfluenzaA__ACZ96322
augaaccccaaccagaagaucaucaccaucggcagcgugugcaugaccaucggcauggccaaccugauccugcagaucggcaacaucaucagcaucuggaucagccacagcauccagcugggcaaccagaaccagaucgagaccugcaaccagagcgugaucaccuacgagaacaacaccugggugaaccagaccuacgugaacaucagcaacaccaacuucgccgccggccagagcguggugagcgugaagcugaccggcaacagcagccugugccccgugagcggcugggccaucuacagcaaggacaacagcaucagaaucggcagcaagggcgacguguucgugaucagagagcccuucaucagcugcagcccccuggagugcagaaccuucuuccugacccagggcgcccugcugaacgacaagcacagcaacggcaccaucaaggacagaagccccuacagaacccugaugagcugccccaucggcgaggugcccagccccuacaacagcagauucgagagcguggccuggagcgccagcgccugccacgacggcaucaacuggcugaccaucggcaucagcggccccgacaacggcgccguggccgugcugaaguacaacggcaucaucaccgacaccaucaagagcuggagaaacaacauccugagaacccaggagagcgagugcgccugcgugaacggcagcugcuucaccgugaugaccgacggccccagcgacggccaggccagcuacaagaucuucagaaucgagaagggcaagaucgugaagagcguggagaugaacgcccccaacuaccacuacgaggagugcagcugcuaccccgacagcagcgagaucaccugcgugugcagagacaacuggcacggcagcaacagacccugggugagcuucaaccagaaccuggaguaccagaucggcuacaucugcagcggcaucuucggcgacaaccccagacccaacgacaagaccggcagcugcggccccgugagcagcaacggcgccaacggcgugaagggcuucagcuucaaguacggcaacggcguguggaucggcagaaccaagagcaucagcagcagaaacggcuucgagaugaucugggaccccaacggcuggaccggcaccgacaacaacuucagcaucaagcaggacaucgugggcaucaacgaguggagcggcuacagcggcagcuucgugcagcaccccgagcugaccggccuggacugcaucagacccugcuucuggguggagcugaucagaggcagacccaaggagaacaccaucuggaccagcggcagcagcaucagcuucugcggcgugaacagcgacaccgugggcuggagcuggcccgacggcgccgagcugcccuucaccaucgacaaguga

SEQ ID NO: 177858 - RNA, 1410 nt, Artificial Sequence; identical to SEQ ID NO: 177857
  derived and/or modified CDS sequence (opt4) from neuraminidase__InfluenzaA__ACZ96332

SEQ ID NO: 177859 - RNA, 1410 nt, Artificial Sequence; identical to SEQ ID NO: 176798
  derived and/or modified CDS sequence (opt4) from neuraminidase__InfluenzaA__ACZ96352

SEQ ID NO: 177860 - RNA, 1410 nt, Artificial Sequence; identical to SEQ ID NO: 177857
  derived and/or modified CDS sequence (opt4) from neuraminidase__InfluenzaA__ACZ96362

SEQ ID NO: 177861 - RNA, 1410 nt, Artificial Sequence; identical to SEQ ID NO: 176798
  derived and/or modified CDS sequence (opt4) from neuraminidase__InfluenzaA__ACZ96375

SEQ ID NO: 177862 - RNA, 1410 nt, Artificial Sequence; identical to SEQ ID NO: 177857
  derived and/or modified CDS sequence (opt4) from neuraminidase__InfluenzaA__ACZ96385

SEQ ID NO: 177863 - RNA, 1410 nt, Artificial Sequence
  derived and/or modified CDS sequence (opt4) from neuraminidase__InfluenzaA__ACZ96395
augaaccccaaccagaagaucaucaccaucggcagcgugugcaugaccaucggcauggccaaccugauccugcagaucggcaacaucaucagcaucuggaucagccacagcauccagcugggcaaccagaaccagaccgagaccugcaaccagagcgugaucaccuacgagaacaacaccugggugaaccagaccuacgugaacaucagcaacaccaacuucgccgccggccagagcguggugagcgugaagcuggccggcaacagcagccugugccccgugagcggcugggccaucuacagcaaggacaacagcgugagaaucggcagcaagggcgacguguucgugaucagagagcccuucaucagcugcagcccccuggagugcagaaccuucuuccugacccagggcgcccugcugaacgacaagcacagcaacggcaccaucaaggacagaagccccuacagaacccugaugagcugccccaucggcgaggugcccagccccuacaacagcagauucgagagcguggccuggagcgccagcgccugccacgacggcaucaacuggcugaccaucggcaucagcggccccgacaacggcgccguggccgugcugaaguacaacggcaucaucaccgacaccaucaagagcuggagaaacaacauccugagaacccaggagagcgagugcgccugcgugaacggcagcugcuucaccgugaugaccgacggccccagcaacggccaggccagcuacaagaucuucagaaucgagaagggcaagaucgugaagagcguggagaugaacgcccccaacuaccacuacgaggagugcagcugcuaccccgacagcagcgagaucaccugcgugugcagagacaacuggcacggcagcaacagacccugggugagcuucaaccagaaccuggaguaccagaucggcuacaucugcagcggcaucuucggcgacaaccccagacccaucgacaagaccggcagcugcggccccgugagcagcaacggcgccaacggcgugaagggcuucagcuucaaguacggcaacggcguguggaucggcagaaccaagagcaucagcagcagaaacggcuucgagaugaucugggaccccaacggcuggaccggcaccgacaacaacuucagcaucaagcaggacaucgugggcaucaacgaguggagcggcuacagcggcagcuucgugcagcaccccgagcugaccggccuggacugcaucagacccugcuucuggguggagcugaucagaggcagacccaaggagaacaccaucuggaccagcggcagcagcaucagcuucugcggcgugaacagcgacaccgugggcuggagcuggcccgacggcgccgagcugcccuucaccaucgacaaguga

SEQ ID NO: 177864 - RNA, 1410 nt, Artificial Sequence; identical to SEQ ID NO: 176798
  derived and/or modified CDS sequence (opt4) from neuraminidase__InfluenzaA__ACZ96408

SEQ ID NO: 177865 - RNA, 1410 nt, Artificial Sequence; identical to SEQ ID NO: 176798
  derived and/or modified CDS sequence (opt4) from neuraminidase__InfluenzaA__ACZ96428

SEQ ID NO: 177866 - RNA, 1410 nt, Artificial Sequence; identical to SEQ ID NO: 176798
  derived and/or modified CDS sequence (opt4) from neuraminidase__InfluenzaA__ACZ96438

SEQ ID NO: 177867 - RNA, 1410 nt, Artificial Sequence; identical to SEQ ID NO: 176798
  derived and/or modified CDS sequence (opt4) from neuraminidase__InfluenzaA__ACZ96448

SEQ ID NO: 177868 - RNA, 1410 nt, Artificial Sequence; identical to SEQ ID NO: 176798
  derived and/or modified CDS sequence (opt4) from neuraminidase__InfluenzaA__ACZ96479

SEQ ID NO: 177869 - RNA, 1410 nt, Artificial Sequence; identical to SEQ ID NO: 177815
  derived and/or modified CDS sequence (opt4) from neuraminidase__InfluenzaA__ACZ96489

SEQ ID NO: 177870 - RNA, 1410 nt, Artificial Sequence; identical to SEQ ID NO: 176798
  derived and/or modified CDS sequence (opt4) from neuraminidase__InfluenzaA__ACZ96499

SEQ ID NO: 177871 - RNA, 1410 nt, Artificial Sequence
  derived and/or modified CDS sequence (opt4) from neuraminidase__InfluenzaA__ACZ96509
augaaccccaaccagaagaucaucaccaucggcagcgugugcaugaccaucggcauggccaaccugauccugcagaucggcaacaucaucagcaucuggaucagccacagcauccagcugggcaaccagaaccagaucgagaccugcaaccagagcgugaucaccuacgagaacaacaccuggaucaaccagaccuacgugaacaucagcaacaccaacuucgccgccggccagagcguggugagcgugaagcuggccggcaacagcagccugugccccgugagcggcugggccaucuacagcaaggacaacagcaucagaaucggcagcaagggcgacguguucgugaucagagagcccuucaucagcugcagcccccuggagugcagaaccuucuuccugacccagggcgcccugcugaacgacaagcacagcaacggcaccaucaaggacagaagccccuacagaacccugaugagcugccccaucggcgaggugcccagccccuacaacagcagauucgagagcguggccuggagcgccagcgccugccacgacggcaucaacuggcugaccaucggcaucagcggccccgacaacggcgccguggccgugcugaaguacaacggcaucaucaccgacaccaucaagagcuggagaaacaacauccugagaacccaggagagcgagugcgccugcgugaacggcagcugcuucaccgugaugaccgacggccccagcgacggccaggccagcuacaagaucuucagaaucgagaagggcaagaucgugaagagcguggagaugaacgcccccaacuaccacuacgaggagugcagcugcuaccccgacagcagcgagaucaccugcgugugcagagacaacuggcacggcagcaacagacccugggugagcuucaaccagaaccuggaguaccagaucggcuacaucugcagcggcaucuucggcgacaaccccagacccaacgacaagaccggcagcugcggccccgugagcagcaacggcgccaacggcgugaagggcuucagcuucaaguacggcaacggcguguggaucggcagaaccaagagcaucagcagcagaaacggcuucgagaugaucugggaccccaacggcuggaccggcaccgacaacaacuucagcaucaagcaggacaucgugggcaucaacgaguggagcggcuacagcggcagcuucgugcagcaccccgagcugaccggccuggacugcaucagacccugcuucuggguggagcugaucagaggcagacccaaggagaacaccaucuggaccagcggcagcagcaucagcuucugcggcgugaacagcgacaccgugggcuggagcuggcccgacggcgccgagcugcccuucaccaucgacaaguga

SEQ ID NO: 177872 - RNA, 1410 nt, Artificial Sequence; identical to SEQ ID NO: 176798
  derived and/or modified CDS sequence (opt4) from neuraminidase__InfluenzaA__ACZ96519

SEQ ID NO: 177873 - RNA, 1410 nt, Artificial Sequence; identical to SEQ ID NO: 176798
  derived and/or modified CDS sequence (opt4) from neuraminidase__InfluenzaA__ACZ96529

SEQ ID NO: 177874 - RNA, 1410 nt, Artificial Sequence
  derived and/or modified CDS sequence (opt4) from neuraminidase__InfluenzaA__ACZ96552
augaaccccaaccagaagaucaucaccaucggcagcgugugcaugaccaucggcauggccaaccugauccugcagaucggcaacaucaucagcaucuggaucagccacagcagccagcugggcaaccagaaccagaucgagaccugcaaccagagcgugaucaccuacgagaacaacaccugggugaaccagaccuacgugaacaucagcaacaccaacuucgccgccggccagagcguggugagcgugaagcuggccggcaacagcagccugugccccgugagcggcugggccaucuacagcaaggacaacagcaucagaaucggcagcaagggcgacguguucgugaucagagagcccuucaucagcugcagcccccuggagugcagaaccuucuuccugacccagggcgcccugcugaacgacaagcacagcaacggcaccaucaaggacagaagccccuacagaacccugaugagcugccccaucggcgaggugcccagccccuacaacagcagauucgagagcguggccuggagcgccagcgccugccacgacggcaucaacuggcugaccaucggcaucagcggccccgacaacggcgccguggccgugcugaaguacaacggcaucaucaccgacaccaucaagagcuggagaaacaacauccugagaacccaggagagcgagugcgccugcgugaacggcagcugcuucaccgugaugaccgacggccccagcgacggccaggccagcuacaagaucuucagaaucgagaagggcaagaucgugaagagcguggagaugaacgcccccaacuaccacuacgaggagugcagcugcuaccccgacagcagcgagaucaccugcgugugcagagacaacuggcacggcagcaacagacccugggugagcuucaaccagaaccuggaguaccagaucggcuacaucugcagcggcaucuucggcgacaaccccagacccaacgacaagaccggcagcugcggccccgugagcagcaacggcgccaacggcgugaagggcuucagcuucaaguacggcaacggcguguggaucggcagaaccaagagcaucagcagcagaaacggcuucgagaugaucugggaccccaacggcuggaccggcaccgacaacaacuucagcaucaagcaggacaucgugggcaucaacgaguggagcggcuacagcggcagcuucgugcagcaccccgagcugaccggccuggacugcaucagacccugcuucuggguggagcugaucagaggcagacccaaggagaacaccaucuggaccagcggcagcagcaucagcuucugcggcgugaacagcgacaccgugggcuggagcuggcccgacggcgccgagcugcccuucaccaucgacaaguga

SEQ ID NO: 177875 - RNA, 1410 nt, Artificial Sequence; identical to SEQ ID NO: 176798
  derived and/or modified CDS sequence (opt4) from neuraminidase__InfluenzaA__ACZ96562

SEQ ID NO: 177876 - RNA, 1410 nt, Artificial Sequence; identical to SEQ ID NO: 176798
  derived and/or modified CDS sequence (opt4) from neuraminidase__InfluenzaA__ACZ96572

SEQ ID NO: 177877 - RNA, 1410 nt, Artificial Sequence; identical to SEQ ID NO: 176798
  derived and/or modified CDS sequence (opt4) from neuraminidase__InfluenzaA__ACZ96582

SEQ ID NO: 177878 - RNA, 1410 nt, Artificial Sequence
  derived and/or modified CDS sequence (opt4) from neuraminidase__InfluenzaA__ACZ96592
augaaccccaaccagaagaucaucaccaucggcagcgugugcaugaccaucggcauggccaaccugauccugcagaucggcaacaucaucagcaucuggaucagccacagcauccagcugggcaaccagaaccagaucgagaccugcaaccagagcgugaucaccuacgagaacaacaccugggugaaccagaccuacgugaacaucagcaacaccaacuucgccgccggccagagcguggugagcgugaagcuggccggcaacagcagccugugccccgugagcggcugggccaucuacagcaaggacaacagcaucagaaucggcagcaagggcgacguguucgugaucagagagcccuucaucagcugcagcccccuggagugcagaaccuucuuccugacccagggcgcccugcugaacgacaagcacagcaacggcaccaucaaggacagaagccccuacagaacccugaugagcugccccaucggcgaggugcccagccccuacaacagcagauucgagagcguggccuggagcgccagcgccugccacgacggcaucaacuggcugaccaucggcaucagcggccccgacaacggcgccguggccgugcugaaguacaacggcaucaucaccgacaccaucaagagcuggagaaacaacauccugagaacccaggagagcgagugcgccugcgugaacggcagcugcuucaccgugaugaccgacggccccagcgacggccagagcagcuacaagaucuucaagaucgagaagggcaagaucgugaagagcguggagaugaacgcccccaacuaccacuacgaggagugcagcugcuaccccgacagcagcgagaucaccugcgugugcagagacaacuggcacggcagcaacagacccugggugagcuucaaccagaaccuggaguaccagaucggcuacaucugcagcggcaucuucggcgacaaccccagacccaacgacaagaccggcagcugcggccccgugagcagcaacggcgccaacggcgugaagggcuucagcuucaaguacggcaacggcguguggaucggcagaaccaagagcaucagcagcagaaacggcuucgagaugaucugggaccccaacggcuggaccggcaccgacaacaacuucagcaucaagcaggacaucgugggcaucaacgaguggagcggcuacagcggcagcuucgugcagcaccccgagcugaccggccuggacugcaucagacccugcuucuggguggagcugaucagaggcagacccaaggagaacaccaucuggaccagcggcagcagcaucagcuucugcggcgugaacagcgacaccgugggcuggagcuggcccgacggcgccgagcugcccuucaccaucgacaaguga

SEQ ID NO: 177879 - RNA, 1410 nt, Artificial Sequence; identical to SEQ ID NO: 176798
  derived and/or modified CDS sequence (opt4) from neuraminidase__InfluenzaA__ACZ96602

SEQ ID NO: 177880 - RNA, 1410 nt, Artificial Sequence
  derived and/or modified CDS sequence (opt4) from neuraminidase__InfluenzaA__ACZ96612
augaaccccaaccagaagaucaucaccaucggcagcgugugcaugaccaucggcauggccaaccugauccugcagaucggcaacaucaucagcaucuggaucagccacagcauccagcugggcaaccagaaccagaucgagaccugcaaccagagcguggugaccuacgagaacaacaccugggugaaccagaccuacgugaacaucagcaacaccaacuucgccgccggccagagcguggugagcgugaagcuggccggcaacagcagccugugccccgugagcggcugggccaucuacagcaaggacaacagcgugagaaucggcagcaagggcgacguguucgugaucagagagcccuucaucagcugcagcccccuggagugcagaaccuucuuccugacccagggcgcccugcugaacgacaagcacagcaacggcaccaucaaggacagaagccccuacagaacccugaugagcugccccaucggcgaggugcccagccccuacaacagcagauucgagagcguggccuggagcgccagcgccugccacgacggcaucaacuggcugaccaucggcaucagcggccccgacaacggcgccguggccgugcugaaguacaacggcaucaucaccgacaccaucaagagcuggagaaacaacauccugagaacccaggagagcgagugcgccugcgugaacggcagcugcuucaccgugaugaccgacggccccagcaacggccaggccagcuacaagaucuucagaaucgagaagggcaagaucgugaagagcguggagaugaacgcccccaacuaccacuacgaggagugcagcugcuaccccgacagcagcgagaucaccugcgugugcagagacaacuggcacggcagcaacagacccugggugagcuucaaccagaaccuggaguaccagaucggcuacaucugcagcggcaucuucggcgacaaccccagacccaacgacaagaccggcagcugcggccccgugagcagcaacggcgccaacggcgugaagggcuucagcuucaaguacggcaacggcguguggaucggcagaaccaagagcaucagcagcagaaacggcuucgagaugaucugggaccccaacggcuggaccggcaccgacaacaacuucagcaucaagcaggacaucgugggcaucaacgaguggagcggcuacagcggcagcuucgugcagcaccccgagcugaccggccuggacugcaucagacccugcuucuggguggagcugaucagaggcagacccaaggagaacaccaucuggaccagcggcagcagcaucagcuucugcggcgugaacagcgacaccgugggcuggagcuggcccgacggcgccgagcugcccuucaccaucgacaaguga

SEQ ID NO: 177881 - RNA, 1410 nt, Artificial Sequence; identical to SEQ ID NO: 176828
  derived and/or modified CDS sequence (opt4) from neuraminidase__InfluenzaA__ACZ96622

SEQ ID NO: 177882 - RNA, 1410 nt, Artificial Sequence; identical to SEQ ID NO: 176828
  derived and/or modified CDS sequence (opt4) from neuraminidase__InfluenzaA__ACZ96632

SEQ ID NO: 177883 - RNA, 1410 nt, Artificial Sequence; identical to SEQ ID NO: 176828
  derived and/or modified CDS sequence (opt4) from neuraminidase__InfluenzaA__ACZ96642

SEQ ID NO: 177884 - RNA, 1410 nt, Artificial Sequence; identical to SEQ ID NO: 176828
  derived and/or modified CDS sequence (opt4) from neuraminidase__InfluenzaA__ACZ96652

SEQ ID NO: 177885 - RNA, 1410 nt, Artificial Sequence; identical to SEQ ID NO: 176828
  derived and/or modified CDS sequence (opt4) from neuraminidase__InfluenzaA__ACZ96662

SEQ ID NO: 177886 - RNA, 1410 nt, Artificial Sequence; identical to SEQ ID NO: 176828
  derived and/or modified CDS sequence (opt4) from neuraminidase__InfluenzaA__ACZ96672

SEQ ID NO: 177887 - RNA, 1410 nt, Artificial Sequence; identical to SEQ ID NO: 176828
  derived and/or modified CDS sequence (opt4) from neuraminidase__InfluenzaA__ACZ96682

SEQ ID NO: 177888 - RNA, 1410 nt, Artificial Sequence; identical to SEQ ID NO: 176828
  derived and/or modified CDS sequence (opt4) from neuraminidase__InfluenzaA__ACZ96692

SEQ ID NO: 177889 - RNA, 1410 nt, Artificial Sequence; identical to SEQ ID NO: 176828
  derived and/or modified CDS sequence (opt4) from neuraminidase__InfluenzaA__ACZ96702

SEQ ID NO: 177890 - RNA, 1410 nt, Artificial Sequence; identical to SEQ ID NO: 176828
  derived and/or modified CDS sequence (opt4) from neuraminidase__InfluenzaA__ACZ96712

SEQ ID NO: 177891 - RNA, 1410 nt, Artificial Sequence; identical to SEQ ID NO: 176828
  derived and/or modified CDS sequence (opt4) from neuraminidase__InfluenzaA__ACZ96722

SEQ ID NO: 177892 - RNA, 1410 nt, Artificial Sequence; identical to SEQ ID NO: 176828
  derived and/or modified CDS sequence (opt4) from neuraminidase__InfluenzaA__ACZ96732

SEQ ID NO: 177893 - RNA, 1410 nt, Artificial Sequence; identical to SEQ ID NO: 176828
  derived and/or modified CDS sequence (opt4) from neuraminidase__InfluenzaA__ACZ96742

SEQ ID NO: 177894 - RNA, 1410 nt, Artificial Sequence; identical to SEQ ID NO: 176788
  derived and/or modified CDS sequence (opt4) from neuraminidase__InfluenzaA__ACZ96752

SEQ ID NO: 177895 - RNA, 1410 nt, Artificial Sequence; identical to SEQ ID NO: 176788
  derived and/or modified CDS sequence (opt4) from neuraminidase__InfluenzaA__ACZ96762

SEQ ID NO: 177896 - RNA, 1410 nt, Artificial Sequence; identical to SEQ ID NO: 176788
  derived and/or modified CDS sequence (opt4) from neuraminidase__InfluenzaA__ACZ96772

SEQ ID NO: 177897 - RNA, 1410 nt, Artificial Sequence; identical to SEQ ID NO: 176788
  derived and/or modified CDS sequence (opt4) from neuraminidase__InfluenzaA__ACZ96782

SEQ ID NO: 177898 - RNA, 1410 nt, Artificial Sequence; identical to SEQ ID NO: 176788
  derived and/or modified CDS sequence (opt4) from neuraminidase__InfluenzaA__ACZ96792

SEQ ID NO: 177899 - RNA, 1410 nt, Artificial Sequence; identical to SEQ ID NO: 176798
  derived and/or modified CDS sequence (opt4) from neuraminidase__InfluenzaA__ACZ96802

SEQ ID NO: 177900 - RNA, 1410 nt, Artificial Sequence; identical to SEQ ID NO: 176798
  derived and/or modified CDS sequence (opt4) from neuraminidase__InfluenzaA__ACZ96812

SEQ ID NO: 177901 - RNA, 1410 nt, Artificial Sequence; identical to SEQ ID NO: 177381
  derived and/or modified CDS sequence (opt4) from neuraminidase__InfluenzaA__ACZ96822

SEQ ID NO: 177902 - RNA, 1410 nt, Artificial Sequence
  derived and/or modified CDS sequence (opt4) from neuraminidase__InfluenzaA__ACZ96842
augaaccccaaccagaagaucaucaccaucggcagcgugugcaugaccaucggcauggccaaccugauccugcagaucggcaacaucaucagcaucuggaucagccacagcauccagcugggcaaccagaaccagaucgagaccugcaaccagagcgugaucaccuacgagaacaacaccugggugaaccagaccuacgugaacaucagcaacaccaacuucgccgccggccagagcguggugagcgugaagcuggccggcaacagcagccugugccccgugagcggcugggccaucuacagcaaggacaacagcgugagaaucggcagcaagggcgacguguucgugaucagagagcccuucaucagcugcagcccccuggagugcagaaccuucuuccugacccagggcgcccugcugaacgacaagcacagcaacggcaccaucaaggacagaagccccuacagaacccugaugagcugccccaucggcgaggugcccagccccuacaacagcagauucgagagcguggccuggagcgccagcgccugccacgacggcaucaacuggcugaccaucggcaucagcggccccgacaacggcgccguggccgugcugaaguacaacggcaucaucaccgacaccaucaagagcuggagaaacaacauccugagaacccaggagagcgagugcgccugcgugaacggcagcugcuucaccgugaugaccgacggccccagcaacggccaggccagcuacaagaucuucagaaucgagaagggcaagaucgugaagagcguggagaugaucgcccccaacuaccacuacgaggagugcagcugcuaccccgacagcagcgagaucaccugcgugugcagagacaacuggcacggcagcaacagacccugggugagcuucaaccagaaccuggaguaccagaucggcuacaucugcagcggcaucuucggcgacaaccccagacccaacgacaagaccggcagcugcggccccgugagcagcaacggcgccaacggcgugaagggcuucagcuucaaguacggcaacggcguguggaucggcagaaccaagagcaucagcagcagaaacggcuucgagaugaucugggaccccaacggcuggaccggcaccgacaacaacuucagcaucaagcaggacaucgugggcaucaacgaguggagcggcuacagcggcagcuucgugcagcaccccgagcugaccggccuggacugcaucagacccugcuucuggguggagcugaucagaggcagacccaaggagaacaccaucuggaccagcggcagcagcaucagcuucugcggcgugaacagcgacaccgugggcuggagcuggcccgacggcgccgagcugcccuucaccaucgacaaguga

SEQ ID NO: 177903 - RNA, 1410 nt, Artificial Sequence; identical to SEQ ID NO: 176798
  derived and/or modified CDS sequence (opt4) from neuraminidase__InfluenzaA__ACZ96852

SEQ ID NO: 177904 - RNA, 1410 nt, Artificial Sequence; identical to SEQ ID NO: 176798
  derived and/or modified CDS sequence (opt4) from neuraminidase__InfluenzaA__ACZ96862

SEQ ID NO: 177905 - RNA, 1410 nt, Artificial Sequence
  derived and/or modified CDS sequence (opt4) from neuraminidase__InfluenzaA__ACZ96872
augaaccccaaccagaagaucaucaccaucggcagcgugugcaugaccaucggcauggccaaccugauccugcagaucggcaacaucaucagcaucuggaucagccacagcauccagcugggcaaccagaaccagaucgagaccugcaaccagagcgugaucaccuacgagaacaacaccugggugaaccagaccuacgugaacaucagcaacaccaacuucgccgccggccagagcguggugagcaugaagcuggccggcaacagcagccugugccccgugagcggcugggccaucuacagcaaggacaacagcaucagaaucggcagcaagggcgacguguucgugaucagagagcccuucaucagcugcagcccccuggagugcagaaccuucuuccugacccagggcgcccugcugaacgacaagcacagcaacggcaccaucaaggacagaagccccuacagaacccugaugagcugccccaucggcgaggugcccagccccuacaacagcagauucgagagcguggccuggagcgccagcgccugccacgacggcaucaacuggcugaccaucggcaucagcggccccgacaacggcgccguggccgugcugaaguacaacggcaucaucaccgacaccaucaagagcuggagaaacaacauccugagaacccaggagagcgagugcgccugcgugaacggcagcugcuucaccgugaugaccgacggccccagcgacggccaggccagcuacaagaucuucagaaucgagaagggcaagaucgugaagagcguggagaugaacgcccccaacuaccacuacgaggagugcagcugcuaccccgacagcagcgagaucaccugcgugugcagagacaacuggcacggcagcaacagacccugggugagcuucaaccagaaccuggaguaccagaucggcuacaucugcagcggcaucuucggcgacaaccccagacccaacgacaagaccggcagcugcggccccgugagcagcaacggcgccaacggcgugaagggcuucagcuucaaguacggcaacggcguguggaucggcagaaccaagagcaucagcagcagaaacggcuucgagaugaucugggaccccaacggcuggaccggcaccgacaacaacuucagcaucaagcaggacaucgugggcaucaacgaguggagcggcuacagcggcagcuucgugcagcaccccgagcugaccggccuggacugcaucagacccugcuucuggguggagcugaucagaggcagacccaaggagaacaccaucuggaccagcggcagcagcaucagcuucugcggcgugaacagcgacaccgugggcuggagcuggcccgacggcgccgagcugcccuucaccaucgacaaguga

SEQ ID NO: 177906 - RNA, 1410 nt, Artificial Sequence; identical to SEQ ID NO: 176788
  derived and/or modified CDS sequence (opt4) from neuraminidase__InfluenzaA__ACZ96882

SEQ ID NO: 177907 - RNA, 1410 nt, Artificial Sequence; identical to SEQ ID NO: 177905
  derived and/or modified CDS sequence (opt4) from neuraminidase__InfluenzaA__ACZ96892

SEQ ID NO: 177908 - RNA, 1410 nt, Artificial Sequence; identical to SEQ ID NO: 177905
  derived and/or modified CDS sequence (opt4) from neuraminidase__InfluenzaA__ACZ96902

SEQ ID NO: 177909 - RNA, 1410 nt, Artificial Sequence; identical to SEQ ID NO: 176788
  derived and/or modified CDS sequence (opt4) from neuraminidase__InfluenzaA__ACZ96912

SEQ ID NO: 177910 - RNA, 1410 nt, Artificial Sequence; identical to SEQ ID NO: 176788
  derived and/or modified CDS sequence (opt4) from neuraminidase__InfluenzaA__ACZ96922

SEQ ID NO: 177911 - RNA, 1410 nt, Artificial Sequence; identical to SEQ ID NO: 177905
  derived and/or modified CDS sequence (opt4) from neuraminidase__InfluenzaA__ACZ96932

SEQ ID NO: 177912 - RNA, 1410 nt, Artificial Sequence; identical to SEQ ID NO: 177905
  derived and/or modified CDS sequence (opt4) from neuraminidase__InfluenzaA__ACZ96942

SEQ ID NO: 177913 - RNA, 1410 nt, Artificial Sequence; identical to SEQ ID NO: 176788
  derived and/or modified CDS sequence (opt4) from neuraminidase__InfluenzaA__ACZ96952

SEQ ID NO: 177914 - RNA, 1410 nt, Artificial Sequence; identical to SEQ ID NO: 176788
  derived and/or modified CDS sequence (opt4) from neuraminidase__InfluenzaA__ACZ97024

SEQ ID NO: 177915 - RNA, 1410 nt, Artificial Sequence; identical to SEQ ID NO: 177905
  derived and/or modified CDS sequence (opt4) from neuraminidase__InfluenzaA__ACZ97336

SEQ ID NO: 177916 - RNA, 1410 nt, Artificial Sequence; identical to SEQ ID NO: 177905
  derived and/or modified CDS sequence (opt4) from neuraminidase__InfluenzaA__ACZ97346

SEQ ID NO: 177917 - RNA, 1410 nt, Artificial Sequence; identical to SEQ ID NO: 176798
  derived and/or modified CDS sequence (opt4) from neuraminidase__InfluenzaA__ACZ97366

SEQ ID NO: 177918 - RNA, 1410 nt, Artificial Sequence; identical to SEQ ID NO: 176798
  derived and/or modified CDS sequence (opt4) from neuraminidase__InfluenzaA__ACZ97376

SEQ ID NO: 177919 - RNA, 1410 nt, Artificial Sequence; identical to SEQ ID NO: 176798
  derived and/or modified CDS sequence (opt4) from neuraminidase__InfluenzaA__ACZ97386

SEQ ID NO: 177920 - RNA, 1410 nt, Artificial Sequence; identical to SEQ ID NO: 177905
  derived and/or modified CDS sequence (opt4) from neuraminidase__InfluenzaA__ACZ97396

SEQ ID NO: 177921 - RNA, 1410 nt, Artificial Sequence; identical to SEQ ID NO: 176798
  derived and/or modified CDS sequence (opt4) from neuraminidase__InfluenzaA__ACZ98171

SEQ ID NO: 177922 - RNA, 1410 nt, Artificial Sequence; identical to SEQ ID NO: 176798
  derived and/or modified CDS sequence (opt4) from neuraminidase__InfluenzaA__ACZ98181

SEQ ID NO: 177923 - RNA, 1410 nt, Artificial Sequence
  derived and/or modified CDS sequence (opt4) from neuraminidase__InfluenzaA__ACZ98191
augaaccccaaccagaagaucaucaccaucggcagcgugugcaugaccaucggcauggccaaccugauccugcagaucggcaacaucaucagcaucuggaucagccacagcauccagcugggcaaccagaaccagaucgagaccugcaaccagagcgugaucagcuacgagaacaacaccugggugaaccagaccuacgugaacaucagcaacaccaacuucgccgccggccagagcguggugagcgugaagcuggccggcaacagcagccugugccccgugagcggcugggccaucuacagcaaggacaacagcaucagaaucggcagcaagggcgacguguucgugaucagagagcccuucaucagcugcagcccccuggagugcagaaccuucuuccugacccagggcgcccugcugaacgacaagcacagcaacggcaccaucaaggacagaagccccuacagaacccugaugagcugccccaucggcgaggugcccagccccuacaacagcagauucgagagcguggccuggagcgccagcgccugccacgacggcaucaacuggcugaccaucggcaucagcggccccgacaacggcgccguggccgugcugaaguacaacggcaucaucaccgacaccaucaagagcuggagaaacaacauccugagaacccaggagagcgagugcgccugcgugaacggcagcugcuucaccgugaugaccgacggccccagcgacggccaggccagcuacaagaucuucagaaucgagaagggcaagaucgugaagagcguggagaugaacgcccccaacuaccacuacgaggagugcagcugcuaccccgacagcagcgagaucaccugcgugugcagagacaacuggcacggcagcaacagacccugggugagcuucaaccagaaccuggaguaccagaucggcuacaucugcagcggcaucuucggcgacaaccccagacccaacgacaagaccggcagcugcggccccgugagcagcaacggcgccaacggcgugaagggcuucagcuucaaguacggcaacggcguguggaucggcagaaccaagagcaucagcagcagaaacggcuucgagaugaucugggaccccaacggcuggaccggcaccgacaacaacuucagcaucaagcaggacaucgugggcaucaacgaguggagcggcuacagcggcagcuucgugcagcaccccgagcugaccggccuggacugcaucagacccugcuucuggguggagcugaucagaggcagacccaaggagaacaccaucuggaccagcggcagcagcaucagcuucugcggcgugaacagcgacaccgugggcuggagcuggcccgacggcgccgagcugcccuucaccaucgacaaguga

SEQ ID NO: 177924 - RNA, 1410 nt, Artificial Sequence; identical to SEQ ID NO: 176788
  derived and/or modified CDS sequence (opt4) from neuraminidase__InfluenzaA__ACZ98201

SEQ ID NO: 177925 - RNA, 1410 nt, Artificial Sequence; identical to SEQ ID NO: 176798
  derived and/or modified CDS sequence (opt4) from neuraminidase__InfluenzaA__ACZ98211

SEQ ID NO: 177926 - RNA, 1410 nt, Artificial Sequence; identical to SEQ ID NO: 176798
  derived and/or modified CDS sequence (opt4) from neuraminidase__InfluenzaA__ACZ98221

SEQ ID NO: 177927 - RNA, 1410 nt, Artificial Sequence; identical to SEQ ID NO: 176798
  derived and/or modified CDS sequence (opt4) from neuraminidase__InfluenzaA__ACZ98231

SEQ ID NO: 177928 - RNA, 1410 nt, Artificial Sequence; identical to SEQ ID NO: 176798
  derived and/or modified CDS sequence (opt4) from neuraminidase__InfluenzaA__ACZ98241

SEQ ID NO: 177929 - RNA, 1410 nt, Artificial Sequence; identical to SEQ ID NO: 177775
  derived and/or modified CDS sequence (opt4) from neuraminidase__InfluenzaA__ACZ98251

SEQ ID NO: 177930 - RNA, 1410 nt, Artificial Sequence; identical to SEQ ID NO: 176798
  derived and/or modified CDS sequence (opt4) from neuraminidase__InfluenzaA__ACZ98261

SEQ ID NO: 177931 - RNA, 1410 nt, Artificial Sequence; identical to SEQ ID NO: 176798
  derived and/or modified CDS sequence (opt4) from neuraminidase__InfluenzaA__ACZ98271

SEQ ID NO: 177932 - RNA, 1410 nt, Artificial Sequence; identical to SEQ ID NO: 176798
  derived and/or modified CDS sequence (opt4) from neuraminidase__InfluenzaA__ACZ98281

SEQ ID NO: 177933 - RNA, 1410 nt, Artificial Sequence; identical to SEQ ID NO: 176798
  derived and/or modified CDS sequence (opt4) from neuraminidase__InfluenzaA__ACZ98291

SEQ ID NO: 177934 - RNA, 1410 nt, Artificial Sequence; identical to SEQ ID NO: 176788
  derived and/or modified CDS sequence (opt4) from neuraminidase__InfluenzaA__ACZ98301

SEQ ID NO: 177935 - RNA, 1410 nt, Artificial Sequence
  derived and/or modified CDS sequence (opt4) from neuraminidase__InfluenzaA__ACZ98321
augaaccccaaccagaagaucaucaccaucggcagcgugugcaugaccaucggcauggccaaccugauccugcagaucggcaacaucaucagcaucuggaucagccacagcauccagcugggcaaccagaaccagaucgagaccugcaaccagagcgugaucaccuacgagaacaacaccugggugaaccagaccuacgugaacaucagcaacaccaacuucgccgccggccagagcguggugagcgugaagcuggccggcaacagcagccugugccccgugagcggcugggccaucuacagcaaggacaacagcaucagaaucggcagcaagggcgacguguucgugaucagagagcccuucaucagcugcagcccccuggagugcagaaccuucuuccugacccagggcgcccugcugaacgacaagcacagcaacggcaccaucaaggacagaagccccuacagaacccugaugagcugccccaucggcgaggugcccagccccuacaacagcagauucgagagcguggccuggagcgccagcgccugccacgacggcaucaacuggcugaccaucggcaucagcggccccgacaacggcgccguggccgugcugaaguacaacggcaucaucaccgacaccaucaagagcuggagaaacaacauccugagaacccaggagagcgagugcgccugcgugaacggcagcugcuucaccgugaugaccgacggccccagcgacggccaggccagcuacaagaucuucagaaucgagaagggcaagaucgugaagagcguggagaugaacgcccccaacuaccacuacgaggagugcagcugcuaccccgacagcagcgagaucaccugcgugugcagagacaacuggcacggcagcaacagacccugggugagcuucaaccagaaccuggaguaccagaucggcuacaucugcagcggcaucuucggcgacaaccccagacccaacgacaagaccggcagcugcggccccgugagcagcaacggcgccaacggcgugaagggcuucagcuucaaguacggcaacggcguguggaucggcagaaccaagagcaucaacagcagaaacggcuucgagaugaucugggaccccaacggcuggaccggcaccgacaacaacuucagcaucaagcaggacaucgugggcaucaacgaguggagcggcuacagcggcagcuucgugcagcaccccgagcugaccggccuggacugcaucagacccugcuucuggguggagcugaucagaggcagacccaaggagaacaccaucuggaccagcggcagcagcaucagcuucugcggcgugaacagcgacaccgugggcuggagcuggcccgacggcgccgagcugcccuucaccaucgacaaguga

SEQ ID NO: 177936 - RNA, 1410 nt, Artificial Sequence; identical to SEQ ID NO: 176798
  derived and/or modified CDS sequence (opt4) from neuraminidase__InfluenzaA__ACZ98331

SEQ ID NO: 177937 - RNA, 1410 nt, Artificial Sequence
  derived and/or modified CDS sequence (opt4) from neuraminidase__InfluenzaA__ACZ98341
augaaccccaaccagaagaucaucaccaucggcagcgugugcaucaccaucggcauggccaaccugauccugcagaucggcaacaucaucagcaucuggaucagccaccccauccagcugggcaaccagaaccagaucgagaccugcaaccagagcgugaucaccuacgagaacaacaccugggugaaccagaccuacgugaacaucagcaacaccaaccuggccgccggccagagcguggugagcgugaagcuggccggcaacagcagccugugccccgugagcggcugggccaucuacagcaaggacaacagcaucagaaucggcagcaagggcgacguguucgugaucagagagcccuucaucagcugcagcccccuggagugcagaaccuucuuccugacccagggcgcccugcugaacgacaagcacagcaacggcaccaucaaggacagaagccccuacagaacccugaugagcugccccaucggcgaggugcccagccccuacaacagcagauucgagagcguggccuggagcgccagcgccugccacgacggcaucaacuggcugaccaucggcaucagcggccccgacaacggcgccguggccgugcugaaguacaacggcaucaucaccgacaccaucaagagcuggagaaacaacauccugagaacccaggagagcgagugcgccugcgugaacggcagcugcuucaccgugaugaccgacggccccagcgacggccaggccagcuacaagaucuucagaaucgagaagggcaagaucgugaagagcguggagaugaacgcccccaacuaccacuacgaggagugcagcugcuaccccgacagcagcgagaucaccugcgugugcagagacaacuggcacggcagcaacagacccugggugagcuucaaccagaaccuggaguaccagaucggcuacaucugcagcggcaucuucggcgacaaccccagacccaacgacaagaccggcagcugcggccccgugagcagcaacggcgccaacggcgugaagggcuucagcuucaaguacggcaacggcguguggaucggcagaaccaagagcaucagcagcagaaacggcuucgagaugaucugggaccccaacggcuggaccggcaccgacaacaacuucagcaucaagcaggacaucgugggcaucaacgaguggagcggcuacagcggcagcuucgugcagcaccccgagcugaccggccuggacugcaucagacccugcuucuggguggagcugaucagaggcagacccaaggagaacaccaucuggaccagcggcagcagcaucagcuucugcggcgugaacagcgacaccgugggcuggagcuggcccgacggcgccgagcugcccuucaccaucgacaaguga

SEQ ID NO: 177938 - RNA, 1410 nt, Artificial Sequence; identical to SEQ ID NO: 176798
  derived and/or modified CDS sequence (opt4) from neuraminidase__InfluenzaA__ACZ98351

SEQ ID NO: 177939 - RNA, 1410 nt, Artificial Sequence; identical to SEQ ID NO: 176798
  derived and/or modified CDS sequence (opt4) from neuraminidase__InfluenzaA__ACZ98361

SEQ ID NO: 177940 - RNA, 1410 nt, Artificial Sequence; identical to SEQ ID NO: 176798
  derived and/or modified CDS sequence (opt4) from neuraminidase__InfluenzaA__ACZ98371

SEQ ID NO: 177941 - RNA, 1410 nt, Artificial Sequence; identical to SEQ ID NO: 176798
  derived and/or modified CDS sequence (opt4) from neuraminidase__InfluenzaA__ACZ98381

SEQ ID NO: 177942 - RNA, 1410 nt, Artificial Sequence; identical to SEQ ID NO: 176798
  derived and/or modified CDS sequence (opt4) from neuraminidase__InfluenzaA__ACZ98391

SEQ ID NO: 177943 - RNA, 1410 nt, Artificial Sequence; identical to SEQ ID NO: 176798
  derived and/or modified CDS sequence (opt4) from neuraminidase__InfluenzaA__ACZ98401

SEQ ID NO: 177944 - RNA, 1410 nt, Artificial Sequence; identical to SEQ ID NO: 176798
  derived and/or modified CDS sequence (opt4) from neuraminidase__InfluenzaA__ACZ98411

SEQ ID NO: 177945 - RNA, 1410 nt, Artificial Sequence; identical to SEQ ID NO: 176828
  derived and/or modified CDS sequence (opt4) from neuraminidase__InfluenzaA__ACZ98421

SEQ ID NO: 177946 - RNA, 1410 nt, Artificial Sequence; identical to SEQ ID NO: 176798
  derived and/or modified CDS sequence (opt4) from neuraminidase__InfluenzaA__ACZ98431

SEQ ID NO: 177947 - RNA, 1410 nt, Artificial Sequence; identical to SEQ ID NO: 176798
  derived and/or modified CDS sequence (opt4) from neuraminidase__InfluenzaA__ACZ98441

SEQ ID NO: 177948 - RNA, 1410 nt, Artificial Sequence; identical to SEQ ID NO: 176798
  derived and/or modified CDS sequence (opt4) from neuraminidase__InfluenzaA__ACZ98451

SEQ ID NO: 177949 - RNA, 1410 nt, Artificial Sequence; identical to SEQ ID NO: 176798
  derived and/or modified CDS sequence (opt4) from neuraminidase__InfluenzaA__ACZ98461

SEQ ID NO: 177950 - RNA, 1410 nt, Artificial Sequence; identical to SEQ ID NO: 177381
  derived and/or modified CDS sequence (opt4) from neuraminidase__InfluenzaA__ACZ98674

SEQ ID NO: 177951 - RNA, 1410 nt, Artificial Sequence; identical to SEQ ID NO: 177905
  derived and/or modified CDS sequence (opt4) from neuraminidase__InfluenzaA__ACZ98684

SEQ ID NO: 177952 - RNA, 1410 nt, Artificial Sequence; identical to SEQ ID NO: 177851
  derived and/or modified CDS sequence (opt4) from neuraminidase__InfluenzaA__ACZ98694

SEQ ID NO: 177953 - RNA, 1410 nt, Artificial Sequence; identical to SEQ ID NO: 176798
  derived and/or modified CDS sequence (opt4) from neuraminidase__InfluenzaA__ADA60801

SEQ ID NO: 177954 - RNA, 1410 nt, Artificial Sequence; identical to SEQ ID NO: 176798
  derived and/or modified CDS sequence (opt4) from neuraminidase__InfluenzaA__ADA69294

SEQ ID NO: 177955 - RNA, 1410 nt, Artificial Sequence; identical to SEQ ID NO: 176798
  derived and/or modified CDS sequence (opt4) from neuraminidase__InfluenzaA__ADA69304

SEQ ID NO: 177956 - RNA, 1410 nt, Artificial Sequence; identical to SEQ ID NO: 176798
  derived and/or modified CDS sequence (opt4) from neuraminidase__InfluenzaA__ADA69314

SEQ ID NO: 177957 - RNA, 1410 nt, Artificial Sequence; identical to SEQ ID NO: 176798
  derived and/or modified CDS sequence (opt4) from neuraminidase__InfluenzaA__ADA69324

SEQ ID NO: 177958 - RNA, 1410 nt, Artificial Sequence; identical to SEQ ID NO: 176798
  derived and/or modified CDS sequence (opt4) from neuraminidase__InfluenzaA__ADA69334

SEQ ID NO: 177959 - RNA, 1410 nt, Artificial Sequence; identical to SEQ ID NO: 176798
  derived and/or modified CDS sequence (opt4) from neuraminidase__InfluenzaA__ADA69451

SEQ ID NO: 177960 - RNA, 1410 nt, Artificial Sequence; identical to SEQ ID NO: 176798
  derived and/or modified CDS sequence (opt4) from neuraminidase__InfluenzaA__ADA69453

SEQ ID NO: 177961 - RNA, 1410 nt, Artificial Sequence
  derived and/or modified CDS sequence (opt4) from neuraminidase__InfluenzaA__ADA71153
augaaccccaaccagaagaucaucaccaucggcagcgugagccugaccaucagcaccaucugcuucuucaugcagaucgccauccuggugaccaccgugacccugcacuucaagcaguacgaguucaacagcccccccaacaaccaggugaugcugugcgagcccaccaucaucgagagaaacaucaccgagaucguguaccugaccaacaccaccaucgagaaggagaucugccccaagcuggccgaguacagaaacuggagcaagccccagugcgacaucaccggcuucgcccccuucagcaaggacaacagcaucagacugagcgccggcggcgacaucugggugaccagagagcccuacgugagcugcgaccccgacaagugcuaccaguucgcccugggccagggcaccacccugaacaacgugcacagcaacaacaccgugagagacagaacccccuacagaacccugcugaugaacgagcugggcgugcccuuccaccugggcaccaagcaggugugcaucgccuggagcagcagcagcugccacgacggcaaggccuggcugcacgugugcaucaccggcgacgacaagaacgccaccgccagcuucaucuacaacggcagacugguggacagcguggugagcuggagcaaggacauccugagaacccaggagagcgagugcgugugcaucaacggcaccugcaccguggugaugaccgacggcagcgccagcggcaaggccgacaccaagauccuguucaucgaggagggcaagaucgugcacaccagcacccugagcggcagcgcccagcacguggaggagugcagcugcuaccccagauaccccggcgugagaugcgugugcagagacaacuggaagggcagcaacagacccaucguggacaucaacaucaaggaccacagcaucgugagcagauacgugugcagcggccuggugggcgacccccccagaaagaacgacagcagcagcagcagccacugccuggaccccaacaacgaggagggcggccacggcgugaagggcugggccuucgacgacggcaacgacguguggaugggcagaaccaucagcgagaagagcagacugggcuacgagaccuucaaggugaucgagggcuggagcaaccccaagagcaagcugcagaucaacagacaggugaucguggacagaggcaacagaagcggcuacagcggcaucuucagcguggagggcaagagcugcaucaacagaugcuucuacguggagcugaucagaggcagaaaggaggagaccgaggugcuguggaccagcaacagcaucgugguguucugcggcaccagcggcaccuacggcaccggcagcuggcccgacggcgccaacaucaaccugaugcccaucuga

SEQ ID NO: 177962 - RNA, 1413 nt, Artificial Sequence
  derived and/or modified CDS sequence (opt4) from neuraminidase__InfluenzaA__ADA71155
augaaccccaaccagaagaucaucaccaucggcagcaucagcaucgccaucggcaucaucagccugaugcugcagaucggcaacaucaucagcaucugggccagccacagcauccagaucggcagccagaacaacaccggcaucugcaaccagagaaucaucaccuacgagaacagcaccugggugaaccacaccuacgugaacaucaacaacaccaaggugguggccggcgaggacaagaccagcgugacccuggccggcaacagcagccugugcagcaucagcggcugggccaucuacaccaaggacaacagcaucagaaucggcagcaagggcgacguguucgugaucagagagcccuucaucagcugcagccaccuggagugcagaaccuucuuccugacccagggcgcccugcugaacgacaagcacagcaacggcaccgugaaggacagaagccccuacagagcccugaugagcugcccccugggcgaggcccccagccccuacaacagcaaguucgagagcguggccuggagcgccagcgccugccacgacggcaugggcuggcugaccaucggcaucagcggccccgacaacggcgccguggccgugcugaaguacaacggcaucaucaccggcaccaucaagagcuggaagaagcagauccugagaacccaggagagcgagugcgugugcaugaacggcagcugcuucaccaucaugaccgacggccccagcaacaaggccgccagcuacaagaucuucaagaucgagaagggcaaggugaccaagagcaucgagcugaacgcccccaacuucuacuacgaggagugcagcugcuaccccgacaccggcaucgugaugugcgugugcagagacaacuggcacggcagcaacagacccugggugagcuucaaccagaaccuggacuaccagaucggcuacaucugcagcggcguguucggcgacaaccccagacccgaggacggcgagggcagcugcaaccccgugaccguggacggcgccaacggcgugaagggcuucagcuacaaguacggcaacggcguguggaucggcagaaccaagagcaacagacugagaaagggcuucgagaugaucugggaccccaacggcuggaccaacaccgacagcgacuucagcgugaagcaggacgugguggccaucaccgacuggagcggcuacagcggcagcuucgugcagcaccccgagcugaccggccuggacugcaucagacccugcuucuggguggagcuggugagaggccugcccagagagaacaccaccaucuggaccagcggcagcagcaucagcuucugcggcgugaacagcgacaccgccaacuggagcuggcccgacggcgccgagcugcccuucaccaucgacaaguga

SEQ ID NO: 177963 - RNA, 1413 nt, Artificial Sequence; identical to SEQ ID NO: 177521
  derived and/or modified CDS sequence (opt4) from neuraminidase__InfluenzaA__ADA71157

SEQ ID NO: 177964 - RNA, 1413 nt, Artificial Sequence
  derived and/or modified CDS sequence (opt4) from neuraminidase__InfluenzaA__ADA71159
augaaccccaaccagaagaucaucaccaucggcagcaucagcaucgccaucggcaucaucagccugaugcugcagaucggcaacaucaucagcaucugggccagccacagcauccagaucggcagccagaacaacaccggcaucugcaaccagagaaucaucaccuacgagaacagcaccugggugaaccacaccuacgugaacaucaacaacaccaaggugguggccggcgagggcaagaccagcgugacccuggccggcaacagcagccugugcagcaucagcggcugggccaucaacaccaaggacaacagcaucagaaucggcagcaagggcgacguguucgugaucagagagcccuucaucagcugcagccaccuggagugcagaaccuucuuccugacccagggcgcccugcugaacgacaagcacagcaacagaaccgugaaggacagaagccccuacagagcccugaugagcugcccccugggcgaggcccccagccccuacaacagcaaguucgagagcguggccuggagcgccagcgccugccacgacggcaugggcuggcugaccaucggcaucagcggccccgacaacggcgccguggccgugcugaaguacaacggcaucaucaccggcaccaucaagagcuggaagaagcagauccugagaacccaggagagcgagugcgugugcaugaacggcagcugcuucaccaucaugaccgacggccccagcaacaaggccgccagcuacaagaucuucaagaucgagaagggcaaggugaccaagagcaucgagcugaacgcccccaacuucuacuacgaggagugcagcugcuaccccgacaccggcaucgugaugugcgugugcagagacaacuggcacggcagcaacagacccugggugagcuucaaccagaaccuggacuaccagaucggcuacaucugcagcggcguguucggcgacaaccccagacccgaggacggcgagggcagcugcaaccccgugaccguggacggcgccaacggcgugaagggcuucagcuacaaguacggcaacggcguguggaucggcagaaccaagagcaacagacugagaaagggcuucgagaugaucugggaccccaacggcuggaccaacaccgacagcgacuucagcgugaagcaggacgugguggccaucaccgacuggagcggcuacagcggcagcuucgugcagcaccccgagcugaccggccuggacugcaucagacccugcuucuggguggagcuggugagaggccugcccagagagaacaccaccaucuggaccagcggcagcagcaucagcuucugcggcgugaacagcgacaccgccaacuggagcuggcccgacggcgccgagcugcccuucaccaucgacaaguga

SEQ ID NO: 177965 - RNA, 1410 nt, Artificial Sequence
  derived and/or modified CDS sequence (opt4) from neuraminidase__InfluenzaA__ADA71161
augaaccccaaccagaagaucaucaccaucggcagcgugagccugaccaucagcaccaucugcuucuucaugcagaucgccauccugaucaccaccgugacccugcacuucaagcaguacgaguucaacagcccccccaacaaccaggugaugcugugcgagcccaccaucaucgagagaaacaucaccgagaucguguaccugaccaacaccaccaucgagaaggagaucugccccaagcuggccgaguacagaaacuggagcaagccccagugcgacaucaccggcuucgcccccuucagcaaggacaacagcaucagacugagcgccggcggcgacaucugggugaccagagagcccuacgugagcugcgaccccgacaagugcuaccaguucgcccugggccagggcaccacccugaacaacgugcacagcaacaacaccgugagagacagaacccccuacagaacccugcugaugaacgagcugggcgugcccuuccaccugggcaccaagcaggugugcaucgccuggagcagcagcagcugccacgacggcaaggccuggcugcacgugugcaucaccggcgacgacaagaacgccaccgccagcuucaucuacaacggcagacugguggacagcguggugagcuggagcaaggagauccugagaacccaggagagcgagugcgugugcaucaacggcaccugcaccguggugaugaccgacggcagcgccagcggcaaggccgacaccaagauccuguucaucgaggagggcaagaucgugcacaccagcacccugagcggcagcgcccagcacguggaggagugcagcugcuaccccagauaccccggcgugagaugcgugugcagagacaacuggaagggcagcaacagacccaucguggacaucaacaucaaggaccacagcaucgugagcagcuacgugugcagcggccuggugggcgacacccccagaaagaacgacagcagcagcagcagccacugccuggaccccaacaacgaggagggcggccacggcgugaagggcugggccuucgacgacggcaacgacguguggaugggcagaaccaucagcgagaagagcagacugggcuacgagaccuucaaggugaucgagggcuggagcaaccacaagagcaagcugcagaucaacagacaggugaucguggacagaggcaacagaagcggcuacagcggcaucuucagcguggagggcaagagcugcaucaacagaugcuucuacguggagcugaucagaggcagaaaggaggagaccgaggugcuguggaccagcaacagcaucgugguguucugcggcaccagcggcaccuacggcaccggcagcuggcccgacggcgccgaccugaaccugaugcccaucuga

SEQ ID NO: 177966 - RNA, 1413 nt, Artificial Sequence
  derived and/or modified CDS sequence (opt4) from neuraminidase__InfluenzaA__ADA71165
augaaccccaaccagaagaucaucaccaucggcagcaucagcaucgccaucggcaucaucagccugaugcugcagaucggcaacaucaucagcaucugggccagccacagcauccagaccggcagccagaacaacaccggcaucugcaaccagagaaucaucaccuacgagaacagcaccugggugaaccacaccuacgugaacaucaacaacaccaacgugguggccggcgaggacaagaccagcgugacccuggccggcaacagcagccugugcagcaucagcggcugggccaucuacaccaaggacaacagcaucagaaucggcagcaagggcgacguguucgugaucagagagcccuucaucagcugcagccaccuggagugcagaaccuucuuccugacccagggcgcccugcugaacgacaagcacagcaacggcaccgugaaggacagaagccccuacagagcccugaugagcugcccccugggcgaggcccccagccccuacaacagcaaguucgagagcguggccuggagcgccagcgccugccacgacggcaugggcuggcugaccaucggcaucagcggccccgacaacggcgccguggccgugcugaaguacaacggcaucaucaccggcaccaucaagagcuggaagaagcagauccugagaacccaggagagcgagugcgugugcaugaacggcagcugcuucaccaucaugaccgacggccccagcaacaaggccgccagcuacaagaucagcaagaucgagaagggcaaggugaccaagagcaucgagcugaacgcccccaacuucuacuacgaggagugcagcugcuaccccgacaccggcaucgugaugugcgugugcagagacaacuggcacggcagcaacagacccugggugagcuucaaccagaaccuggacuaccagaucggcuacaucugcagcggcguguucggcgacaaccccagacccgaggacggcgagggcagcugcaaccccgugaccguggacggcgccaacggcgugaagggcuucagcuacaaguacggcaacggcguguggaucggcagaaccaagagcaacagacugagaaagggcuucgagaugaucugggaccccaacggcuggaccaacaccgacagcgacuucagcgugaagcaggacgugguggccaucaccgacuggagcggcuacagcggcagcuucgugcagcaccccgagcugaccggccuggacugcaucagacccugcuucuggguggagcuggugagaggccugcccagagagaacaccaccaucuggaccagcggcagcagcaucagcuucugcggcgugaacagcgacaccgccaacuggagcuggcccgacggcgccgagcugcccuucaccaucgacaaguga

SEQ ID NO: 177967 - RNA, 1410 nt, Artificial Sequence
  derived and/or modified CDS sequence (opt4) from neuraminidase__InfluenzaA__ADA71167
augaaccccaaccagaagaucaucaccaucggcagcgugagccugaccaucagcaccaucugcuucuucaugcagaucgccauccugaucaccaccgugacccugcacuucaagcaguacgaguucaacagcccccccaacaaccaggugaugcugugcgagcccaccaucaucgagagaaacaucaccgagaucguguaccugaccaacaccaccaucgagaaggagaucugccccaagcuggccgaguacagaaacuggagcaagccccagugcgacaucaccggcuucgcccccuucagcaaggacaacagcaucagacugagcgccggcggcgacaucugggugaccagagagcccuacgugagcugcgaccccgacaagugcuaccaguucgcccugggccagggcaccacccugaacaacgugcacagcaacaacaccgugagaggcagaacccccuacagaacccugcugaugaacgagcugggcgugcccuuccaccugggcaccaagcaggugugcaucgccuggagcagcagcagcugccacgacggcaaggccuggcugcacgugugcaucaccggcgacgacaagaacgccaccgccagcuucaucuacaacggcagacugguggacagcguggugagcuggagcaaggacauccugagaacccaggagagcgagugcgugugcaucaacggcaccugcaccguggugaugaccgacggcagcgccagcggcaaggccgacaccaagauccuguucaucgaggagggcaagaucgugcacaccagcacccugagcggcagcgcccagcacguggaggagugcagcugcuaccccagauaccccggcgugagaugcgugugcagagacaacuggaagggcagcaacagacccaucguggacaucaacaucaaggaccacagcaucgugagcagcuacgugugcagcggccuggugggcgacacccccagaaagaacgacagcagcagcagcagccacugccugaaccccaacaacgaggagggcggccacggcgugaagggcugggccuucgacgacggcaacgacguguggaugggcagaaccaucagcgagaagagcagacugggcuacgagaccuucaaggugaucgagggcuggagcaaccccaagagcaagcugcagaucaacagacaggugaucguggacagaggcaacagaagcggcuacagcggcaucuucagcguggagggcaagagcugcaucaacagaugcuucuacguggagcugaucagaggcagaaaggaggagaccgaggugcuguggaccagcaacagcaucgugguguucugcggcaccagcggcaccuacggcaccggcagcuggcccgacggcgccaacaucaaccugaugcccaucuga

SEQ ID NO: 177968 - RNA, 1413 nt, Artificial Sequence
  derived and/or modified CDS sequence (opt4) from neuraminidase__InfluenzaA__ADA71169
augaaccccaaccagaagaucaucaccaucggcagcaucagcaucgccaucggcaucaucagccugaugcugcagaucggcaacaucaucagcaucugggccagccacagcauccagaccggcagccagaaccacaccggcaucugcaaccagagaaucaucaccuacgagaacagcaccugggugaaccacaccuacgugaacaucaacaacaccaacgugguggccggcaaggacaagacccccgugacccuggugggcaacagcagccugugcagcaucagcggcugggccaucuacaccaaggacaacagcaucagaaucggcagcaagggcgacguguucgugaucagagagcccuucaucagcugcagccaccuggagugcaagaccuucuuccugacccagggcgcccugcugaacgacaagcacagcaacggcaccgugaaggacagaagccccuacagagcccugaugagcugcccccugggcgaggcccccagccccuacaacagcaaguucgagagcguggccuggagcgccagcgccugccacgacggcaucggcuggcugaccaucggcaucagcggccccgacaacggcgccguggccgugcugaaguacaagggcaucaucaccggcaccaucaagagcuggaagaagcagauccugagaacccaggagagcgagugcgugugcaucaacggcagcugcuucaccaucaugaccgacggccccagcgacggcgccgccagcuacaagaucuucaagaucgagaagggcaaggugaccaagagcauggagcugaacgcccccaacuuccacuacgaggagugcagcugcuaccccgacaccggcaccgugaugugcgugugcagagacaacuggcacggcagcaacagacccugggugagcuucaaccagaaccuggacuaccagaucggcuacaucugcagcggcguguucggcgacaaccccagacccaaggacggcgagggcagcugcaaccccgugaccguggacggcgccaacggcgugaagggcuucagcuacaaguacggcaacggcguguggaucggcagaaccaagagcaacagaaucagaaagggcuucgagaugaucugggaccccaacggcuggaccaacaccgacagcgacuucagcgugaagcaggacaucguggccaucaccgacuggagcggcuacagcggcagcuucgugcagcaccccgagcugaccggccuggacugcaucagacccugcuucuggguggagcuggugagaggccugcccagagagaacaccaccaucuggaccagcggcagcagcaucagcuucugcggcgugaacggcgacaucgccaacuggagcuggcccgacggcgccgagcugcccuucaccaucgacaaguga

SEQ ID NO: 177969 - RNA, 1413 nt, Artificial Sequence; identical to SEQ ID NO: 177521
  derived and/or modified CDS sequence (opt4) from neuraminidase__InfluenzaA__ADA71171

SEQ ID NO: 177970 - RNA, 1410 nt, Artificial Sequence
  derived and/or modified CDS sequence (opt4) from neuraminidase__InfluenzaA__ADA71173
augaaccccaaccagaagaucaucaccaucggcagcgugagccugaccaucagcaccaucugcuucuucaugcagaucgccauccugaucaccaccgugacccugcacuucaagcaguacgaguucaacagcccccccaacaaccaggugaugcugugcgagcccaccaucaucgagagaaacaucaccgagaucguguaccugaccaacaccaccaucgagaaggagaucugccccaagcuggccgaguacagaaacuggagcaagccccagugcgacaucaccggcuucgcccccuucagcaaggacaacagcaucagacugagcgccggcggcgacaucugggugaccagagagcccuacgugagcugcgaccccgacaagugcuaccaguucgcccugggccagggcaccacccugaacaacgugcacagcaacaacaccgugagagccagaacccccuacagaacccugcugaugaacgagcugggcgugcccuuccaccugggcaccaagcaggugugcaucgccuggagcagcagcagcugccacgacggcaaggccuggcugcacgugugcaucaccggcgacgacaagaacgccaccgccagcuucaucuacaacggcagacugguggacagcguggugagcuggagcaaggacauccugagaacccaggagagcgagugcgugugcaucaacggcaccugcaccguggugaugaccgacggcagcgccagcggcaaggccgacaccaagauccuguucaucgaggagggcaagaucgugcacaccagcacccugagcggcagcgcccagcacguggaggagugcagcugcuaccccagauaccccggcgugagaugcgugugcagagacaacuggaagggcagcaacagacccaucguggacaucaacaucaaggaccacagcaucgugagcagcuacgugugcagcggccuggugggcgacacccccagaaagaacgacagcagcagcagcagccacugccugaaccccaacaacgaggagggcggccacggcgugaagggcugggccuucgacgacggcaacgacguguggaugggcagaaccaucagcgagaagagcagacugggcuacgagaccuucaaggugaucgagggcuggagcaaccccaagagcaagcugcagaucaacagacaggugaucguggacagaggcaacagaagcggcuacagcggcaucuucagcguggagggcaagagcugcaucaacagaugcuucuacguggagcugaucagaggcagaaaggaggagaccgaggugcuguggaccagcaacagcaucgugguguucugcggcaccagcggcaccuacggcaccggcagcuggcccgacggcgccaacaucaaccugaugcccaucuga

SEQ ID NO: 177971 - RNA, 1413 nt, Artificial Sequence
  derived and/or modified CDS sequence (opt4) from neuraminidase__InfluenzaA__ADA71175
augaaccccaaccagaagaucaucaccaucggcagcaucagcaucgccaucggcaucaucagccugaugcugcagaucggcaacaucaucagcaucugggccagccacagcauccagaucggcagccagaacaacaccggcaucugcaaccagagaaucaucaccuacgagaacagcaccugggugaaccacaccuacgugaacaucaacaacaccaaggugguggccggcgaggacaagaccagcgugacccuggccggcaacagcagccugugcagcaucagcggcugggccaucaacaccaaggacaacagcaucagaaucggcagcaagggcgacguguucgugaucagagagcccuucaucagcugcagccaccuggagugcagaaccuucuuccugacccagggcgcccugcugaacgacaagcacagcaacggcaccgugaaggacagaagccccuacagagcccugaugagcugcccccugggcgaggcccccagccccuacaacagcaaguucgagagcguggccuggagcgccagcgccugccacgacggcaugggcuggcugaccaucggcaucagcggccccgacaacggcgccguggccgugcugaaguacaacggcaucaucaccggcaccaucaagagcuggaagaagcagauccugagaacccaggagagcgagugcgugugcaugaacggcagcugcuucaccaucaugaccgacggccccagcaacaaggccgccagcuacaagaucuucaagaucgagaagggcaaggugaccaagagcaucgagcugaacgcccccaacuucuacuacgaggagugcagcugcuaccccgacaccggcaucgugaugugcgugugcagagacaacuggcacggcagcaacagacccugggugagcuucaaccagaaccuggacuaccagaucggcuacaucugcagcggcguguucggcgacaaccccagacccgaggacggcgagggcagcugcaaccccgugaccguggacggcgccaacggcgugaagggcuucagcuacaaguacggcaacggcguguggaucggcagaaccaagagcaacagacugagaaagggcuucgagaugaucugggaccccaacggcuggaccaacaccgacagcgacuucagcgugaagcaggacgugguggccaucaccgacuggagcggcuacagcggcagcuucgugcagcaccccgagcugaccggccuggacugcaucagacccugcuucuggguggagcuggugagaggccugcccagagagaacaccaccaucuggaccagcggcagcagcaucagcuucugcggcgugaacagcgacaccgccaacuggagcuggcccgacggcgccgagcugcccuucaccaucgacaaguga

SEQ ID NO: 177972 - RNA, 1413 nt, Artificial Sequence; identical to SEQ ID NO: 177521
  derived and/or modified CDS sequence (opt4) from neuraminidase__InfluenzaA__ADA71177

SEQ ID NO: 177973 - RNA, 1410 nt, Artificial Sequence
  derived and/or modified CDS sequence (opt4) from neuraminidase__InfluenzaA__ADA71193
augaaccccaaccagaagaucaucaccaucggcagcgugugcaugaccaucggcauggccaaccugauccugcagaucggcaacaucaucagcaucuggaucagccacagcauccagcugggcaaccagaaccagaucgagaccugcaaccagagcgugaucaccuacgagaacaacaccugggugaaccagaccuacgugaacaucagcaacaccaacuucgccgccggccagagcguggugagcgugaagcuggccggcaacagcagccugugccccgugagcggcugggccaucuacagcaaggacaacagcaucagaaucggcagcaagggcgacguguucgugaucagagagcccuucaucagcugcagcccccuggagugcagaaccuucuuccugacccagggcgcccugcugaacgacaagcacagcaacggcaccaucaaggacagaagccccuacagaacccugaugagcugccccaucggcgaggugcccagccccuacaacagcagauucgagagcguggccuggagcgccagcgccugccacgacggcaucaacuggcugaccaucggcaucagcggccccgacaacggcgccguggccgugcugaaguacaacggcaucaucaccgacaccaucaagagcuggagaaacaacauccugagaacccaggagagcgagugcgccugcgugaacggcagcugcuucaccgugaugaccgacggccccagcgacggccaggccagcuacaagaucuucagaaucgagaagggcaagguggugaagagcguggagaugaacgcccccaacuaccacuacgaggagugcagcugcuaccccgacagcagcgagaucaccugcgugugcagagacaacuggcacggcagcaacagacccugggugagcuucaaccagaaccuggaguaccagaucggcuacaucugcagcggcaucuucggcgacaaccccagacccaacgacaagaccggcagcugcggccccgugagcagcaacggcgccaacggcgugaagggcuucagcuucaaguacggcaacggcguguggaucggcagaaccaagagcaucagcagcagaaacggcuucgagaugaucugggaccccaacggcuggaccggcaccgacaacaacuucagcaucaagcaggacaucgugggcaucaacgaguggagcggcuacagcggcagcuucgugcagcaccccgagcugaccggccuggacugcaucagacccugcuucuggguggagcugaucagaggcagacccaaggagaacaccaucuggaccagcggcagcagcaucagcuucugcggcgugaacagcgacaccgugggcuggagcuggcccgacggcgccgagcugcccuucaccaucgacaaguga

SEQ ID NO: 177974 - RNA, 1410 nt, Artificial Sequence
  derived and/or modified CDS sequence (opt4) from neuraminidase__InfluenzaA__ADA79589
augaaccccaaccagaagaucaucaccaucggcagcgugugcaugaccaucggcauggccaaccugauccugcagaucggcaacaucaucagcaucuggaucagccacagcauccagcugggcaaccagaaccagaucgagaccugcaaccagagcgugaucaccuacgagaacaacaccugggugaaccagaccuacgugaacaucagcaacaccaacuucgccgccggccagagcguggugagcgugaagcuggccggcagcagcagccugugccccgugagcggcugggccaucuacagcaaggacaacagcaucagaaucggcagcaagggcgacguguucgugaucagagagcccuucaucagcugcagcccccuggagugcagaaccuucuuccugacccagggcgcccugcugaacgacaagcacagcaacggcaccaucaaggacagaagccccuacagaacccugaugagcugccccaucggcgaggugcccagccccuacaagagcagauucgagagcguggccuggagcgccagcgccugccacgacggcaucaacuggcugaccaucggcaucagcggccccgacaacggcgccguggccgugcugaaguacaacggcaucaucaccgacaccaucaagagcuggagaaacaacauccugagaacccaggagagcgagugcgccugcgugaacggcagcugcuucaccgugaugaccgacggccccagcgacggccaggccagcuacaagaucuucagaaucgagaagggcaagaucgugaagagcguggagaugaacgcccccaacuaccacuacgaggagugcagcugcuaccccgacagcagcgagaucaccugcgugugcagagacaacuggcacggcagcaacagacccugggugagcuucaaccagaaccuggaguaccagaucggcuacaucugcagcggcaucuucggcgacaaccccagacccaacgacaagaccggcagcugcggccccgugagcagcaacggcgccaacggcgugaagggcuucagcuucaaguacggcaacggcguguggaucggcagaaccaagagcaucagcagcagaaacggcuucgagaugaucugggaccccaacggcuggaccggcaccgacaacaacuucagcaucaagcaggacaucgugggcaucaacgaguggagcggcuacagcggcagcuucgugcagcaccccgagcugaccggccuggacugcaucagacccugcuucuggguggagcugaucagaggcagacccaaggagaacaccaucuggaccagcggcagcagcaucagcuucugcggcgugaacagcgacaccgugggcuggagcuggcccgacggcgccgagcugcccuucaccaucgacaaguga

SEQ ID NO: 177975 - RNA, 1410 nt, Artificial Sequence
  derived and/or modified CDS sequence (opt4) from neuraminidase__InfluenzaA__ADA79599
augaaccccaaccagaagaucaucaccaucggcagcgugugcaugaccaucggcauggccaaccugauccugcagaucggcaacaucaucagcaucuggaucagccacagcauccagcugggcaaccagaaccagaucgagaccugcaaccagagcgugaucaccuacgagaacaacaccugggugaaccagaccuacgugaacaucagcaacaccaacuucgccgccggccagagcguggugagcgugaagcuggccggcaacagcagccugugccccgugagcggcugggccaucuacagcaaggacaacagcaucagaaucggcagcaagggcgacguguucgugaucagagagcccuucaucagcugcagcccccuggagugcagaaccuucuuccugacccagggcgcccugcugaacgacaagcacagcaacggcaccaucaaggacagaagccccuacagaacccugaugagcugccccaucggcgaggugcccagccccuacaacagcagauucgagagcguggccuggagcgccagcgccugccacgacggcaucaacuggcugaccaucggcaucagcggccccgacaacggcgccguggccgugcugaaguacaacggcaucaucaccgacaccaucaagagcuggagaaacaacauccugagaacccaggagagcgagugcgccugcgugaacggcagcugcuucaccgugaugaccgacggccccagcgacggccaggccagcuacaagaucuucagaaucgagaagggcaagaucgugaagagcguggagaugaacgcccccaacuaccacuacgaggagugcagcugcuaccccgacagcagcgagaucaccugcgugugcagagacaacuggcacggcagcaacagacccugggugagcuucaaccagaaccuggaguaccagaucggcuacaucugcagcggcaucuucggcgacaaccccagacccaacgacaagaccggcagcugcggccccgugagcagcaacggcgccaacggcgugaagggcuucagcuucaaguacggcaacggcguguggaucggcagaaccaagagcaucagcagcagaaacggcuucgagaugaucugggaccccaacggcuggaccggcaccgacaacaaguucagcaucaagcaggacaucgugggcaucaacgaguggagcggcuacagcggcagcuucgugcagcaccccgagcugaccggccuggacugcaucagacccugcuucuggguggagcugaucagaggcagacccaaggagaacaccaucuggaccagcggcagcagcaucagcuucugcggcgugaacagcgacaccgugggcuggagcuggcccgacggcgccgagcugcccuucaccaucgacaaguga

SEQ ID NO: 177976 - RNA, 1410 nt, Artificial Sequence; identical to SEQ ID NO: 177975
  derived and/or modified CDS sequence (opt4) from neuraminidase__InfluenzaA__ADA79609

SEQ ID NO: 177977 - RNA, 1410 nt, Artificial Sequence
  derived and/or modified CDS sequence (opt4) from neuraminidase__InfluenzaA__ADA79619
augaaccccaaccagaagaucaucaccaucggcagcaucugcaugaccaucggcauggccaaccugauccugcagaucggcaacaucaucagcaucuggaucagccacagcauccagcugggcaaccagaaccagaucgagaccugcaaccagagcgugaucaccuacgagaacaacaccugggugaaccagaccuacgugaacaucagcaacaccaacuucgccgccggccagagcguggccagcgugaagcuggccggcaacagcagccugugccccgugagcggcugggccaucuacagcaaggacaacagcaucagaaucggcagcaagggcgacguguucgugaucagagagcccuucaucagcugcagcccccuggagugcagaaccuucuuccugacccagggcgcccugcugaacgacaagcacagcaacggcaccaucaaggacagaagccccuacagaacccugaugagcugccccaucggcgaggugcccagccccuacaacagcagauucgagagcguggccuggagcgccagcgccugccacgacggcaucaacuggcugaccaucggcaucagcggccccgacaacggcgccguggccgugcugaaguacaacggcaucaucaccgacaccaucaagagcuggagaaacaacauccugagaacccaggagagcgagugcgccugcgugaacggcagcugcuucaccgugaugaccgacggccccagcgacggccaggccagcuacaagaucuucagaaucgagaagggcaagaucgugaagagcguggagaugaacgcccccaacuaccacuacgaggagugcagcugcuaccccgacagcagcgagaucaccugcgugugcagagacaacuggcacggcagcaacagacccugggugagcuucaaccagaaccuggaguaccagaucggcuacaucugcagcggcaucuucggcgacaaccccagacccaacgacaagaccggcagcugcggccccgugagcagcaacggcgccaacggcgugaagggcuucagcuucaaguacggcaacggcguguggaucggcagaaccaagagcaucagcagcagaaacggcuucgagaugaucugggaccccaacggcuggaccggcaccgacaacaacuucagcaucaagcaggacaucgugggcaucaacgaguggagcggcuacagcggcagcuucgugcagcaccccgagcugaccggccuggacugcaucagacccugcuucuggguggagcugaucagaggcagacccaaggagaacaccaucuggaccagcggcagcagcaucagcuucugcggcgugaacagcgacaccgugggcuggagcuggcccgacggcgccgagcugcccuucaccaucgacaaguga

SEQ ID NO: 177978 - RNA, 1410 nt, Artificial Sequence; identical to SEQ ID NO: 176798
  derived and/or modified CDS sequence (opt4) from neuraminidase__InfluenzaA__ADA81211

SEQ ID NO: 177979 - RNA, 1410 nt, Artificial Sequence
  derived and/or modified CDS sequence (opt4) from neuraminidase__InfluenzaA__ADA83035
augaaccccaaccagaagaucaucaccaucggcagcgugugcaugaccaucggcauggccaaccugauccugcagaucggcaacaucaucagcaucuggaucagccacagcauccagcugggcaaccagaaccagaucgagaccugcaaccagagcgugaucaccuacgagaacaacaccugggugaaccagaccuacgugaacaucagcaacaccaacuucgccgccggccagagcguggugagcgugaagcuggccggcaacagcagccugugccccgugagcggcugggccaucuacagcaaggacaacagcaucagaaucggcagcaagggcgacguguucgugaucagagagcccuucaucagcugcagcccccuggagugcagcaccuucuuccugacccagggcgcccugcugaacgacaagcacagcaacggcaccaucaaggacagaagccccuacagaacccugaugagcugccccaucggcgaggugcccagccccuacaacagcagauucgagagcguggccuggagcgccagcgccugccacgacggcaucaacuggcugaccaucggcaucagcggccccgacaacggcgccguggccgugcugaaguacaacggcaucaucaccgacaccaucaagagcuggagaaacaacauccugagaacccaggagagcgagugcgccugcgugaacggcagcugcuucaccgugaugaccgacggccccagcgacggccaggccagcuacaagaucuucagaaucgagaagggcaagaucgugaagagcguggagaugaacgcccccaacuaccacuacgaggagugcagcugcuaccccgacagcagcgagaucaccugcgugugcagagacaacuggcacggcagcaacagacccugggugagcuucaaccagaaccuggaguaccagaucggcuacaucugcagcggcaucuucggcgacaaccccagacccaacgacaagaccggcagcugcggccccgugagcagcaacggcgccaacggcgugaagggcuucagcuucaaguacggcaacggcguguggaucggcagaaccaagagcaucagcagcagaaacggcuucgagaugaucugggaccccaacggcuggaccggcaccgacaacaacuucagcaucaagcaggacaucgugggcaucaacgaguggagcggcuacagcggcagcuucgugcagcaccccgagcugaccggccuggacugcaucagacccugcuucuggguggagcugaucagaggcagacccaaggagaacaccaucuggaccagcggcagcagcaucagcuucugcggcgugaacagcgacaccgugggcuggagcuggcccgacggcgccgagcugcccuucaccaucgacaaguga

SEQ ID NO: 177980 - RNA, 1410 nt, Artificial Sequence
  derived and/or modified CDS sequence (opt4) from neuraminidase__InfluenzaA__ADA83037
augaaccccaaccagaagaucaucaccaucggcagcgugugcaugaccaucggcauggccaaccugauccugcagaucggcaacaucaucagcaucuggaucagccacagcauccagcugggcaaccaggaccagaucgagaccugcaaccagagcgugaucaccuacgagaacaacaccugggugaaccagaccuacgugaacaucagcaacaccaacuucgccgccggccagagcguggugagcgugaagcuggccggcaacagcagccugugccccgugagcggcugggccaucuacagcaaggacaacagcaucagaaucggcagcaagggcgacguguucgugaucagagagcccuucaucagcugcagcccccuggagugcagaaccuucuuccugacccagggcgcccugcugaacgacaagcacagcaacggcaccaucaaggacagaagccccuacagaacccugaugagcugccccaucggcgaggugcccagccccuacaacagcagauucgagagcguggccuggagcgccagcgccugccacgacggcaucaacuggcugaccaucggcaucagcggccccgacaacggcgccguggccgugcugaaguacaacggcaucaucaccgacaccaucaagagcuggagaaacaacauccugagaacccaggagagcgagugcgccugcgugaacggcagcugcuucaccgugaugaccgacggccccagcgacggccaggccagcuacaagaucuucagaaucgagaagggcaagaucgugaagagcguggagaugaacgcccccaacuaccacuacgaggagugcagcugcuaccccgacagcagcgagaucaccugcgugugcagagacaacuggcacggcagcaacagacccugggugagcuucaaccagaaccuggaguaccagaucggcuacaucugcagcggcaucuucggcgacaaccccagacccaacgacaagaccggcagcugcggccccgugagcagcaacggcgccaacggcgugaagggcuucagcuucaaguacggcaacggcguguggaucggcagaaccaagagcaucagcagcagaaacggcuucgagaugaucugggaccccaacggcuggaccggcaccgacaacaaguucagcaucaagcaggacaucgugggcaucaacgaguggagcggcuacagcggcagcuucgugcagcaccccgagcugaccggccuggacugcaucagacccugcuucuggguggagcugaucagaggcagacccaaggagaacaccaucuggaccagcggcagcagcaucagcuucugcggcgugaacagcgacaccgugggcuggagcuggcccgacggcgccgagcugcccuucaccaucgacaaguga

SEQ ID NO: 177981 - RNA, 1410 nt, Artificial Sequence; identical to SEQ ID NO: 176798
  derived and/or modified CDS sequence (opt4) from neuraminidase__InfluenzaA__ADA83588

SEQ ID NO: 177982 - RNA, 1410 nt, Artificial Sequence; identical to SEQ ID NO: 176798
  derived and/or modified CDS sequence (opt4) from neuraminidase__InfluenzaA__ADA83592

SEQ ID NO: 177983 - RNA, 1410 nt, Artificial Sequence; identical to SEQ ID NO: 176798
  derived and/or modified CDS sequence (opt4) from neuraminidase__InfluenzaA__ADA83596

SEQ ID NO: 177984 - RNA, 1410 nt, Artificial Sequence; identical to SEQ ID NO: 176798
  derived and/or modified CDS sequence (opt4) from neuraminidase__InfluenzaA__ADA83600

SEQ ID NO: 177985 - RNA, 1410 nt, Artificial Sequence; identical to SEQ ID NO: 176798
  derived and/or modified CDS sequence (opt4) from neuraminidase__InfluenzaA__ADA83604

SEQ ID NO: 177986 - RNA, 1410 nt, Artificial Sequence; identical to SEQ ID NO: 176798
  derived and/or modified CDS sequence (opt4) from neuraminidase__InfluenzaA__ADA83608

SEQ ID NO: 177987 - RNA, 1410 nt, Artificial Sequence; identical to SEQ ID NO: 176798
  derived and/or modified CDS sequence (opt4) from neuraminidase__InfluenzaA__ADA83612

SEQ ID NO: 177988 - RNA, 1410 nt, Artificial Sequence; identical to SEQ ID NO: 177152
  derived and/or modified CDS sequence (opt4) from neuraminidase__InfluenzaA__ADA83616

SEQ ID NO: 177989 - RNA, 1410 nt, Artificial Sequence; identical to SEQ ID NO: 176798
  derived and/or modified CDS sequence (opt4) from neuraminidase__InfluenzaA__ADA83624

SEQ ID NO: 177990 - RNA, 1410 nt, Artificial Sequence; identical to SEQ ID NO: 176798
  derived and/or modified CDS sequence (opt4) from neuraminidase__InfluenzaA__ADA83630

SEQ ID NO: 177991 - RNA, 1410 nt, Artificial Sequence; identical to SEQ ID NO: 176798
  derived and/or modified CDS sequence (opt4) from neuraminidase__InfluenzaA__ADA83634

SEQ ID NO: 177992 - RNA, 1410 nt, Artificial Sequence; identical to SEQ ID NO: 176798
  derived and/or modified CDS sequence (opt4) from neuraminidase__InfluenzaA__ADA83638

SEQ ID NO: 177993 - RNA, 1410 nt, Artificial Sequence; identical to SEQ ID NO: 176798
  derived and/or modified CDS sequence (opt4) from neuraminidase__InfluenzaA__ADA83642

SEQ ID NO: 177994 - RNA, 1410 nt, Artificial Sequence; identical to SEQ ID NO: 176798
  derived and/or modified CDS sequence (opt4) from neuraminidase__InfluenzaA__ADA83649

SEQ ID NO: 177995 - RNA, 1410 nt, Artificial Sequence; identical to SEQ ID NO: 176798
  derived and/or modified CDS sequence (opt4) from neuraminidase__InfluenzaA__ADA83653

SEQ ID NO: 177996 - RNA, 1410 nt, Artificial Sequence; identical to SEQ ID NO: 176798
  derived and/or modified CDS sequence (opt4) from neuraminidase__InfluenzaA__ADA83657

SEQ ID NO: 177997 - RNA, 1410 nt, Artificial Sequence; identical to SEQ ID NO: 176798
  derived and/or modified CDS sequence (opt4) from neuraminidase__InfluenzaA__ADA83661

SEQ ID NO: 177998 - RNA, 1410 nt, Artificial Sequence; identical to SEQ ID NO: 176798
  derived and/or modified CDS sequence (opt4) from neuraminidase__InfluenzaA__ADA83669

SEQ ID NO: 177999 - RNA, 1410 nt, Artificial Sequence; identical to SEQ ID NO: 176798
  derived and/or modified CDS sequence (opt4) from neuraminidase__InfluenzaA__ADA83673

SEQ ID NO: 178000 - RNA, 1410 nt, Artificial Sequence; identical to SEQ ID NO: 176798
  derived and/or modified CDS sequence (opt4) from neuraminidase__InfluenzaA__ADA83677

SEQ ID NO: 178001 - RNA, 1410 nt, Artificial Sequence; identical to SEQ ID NO: 176798
  derived and/or modified CDS sequence (opt4) from neuraminidase__InfluenzaA__ADA83681

SEQ ID NO: 178002 - RNA, 1410 nt, Artificial Sequence; identical to SEQ ID NO: 176798
  derived and/or modified CDS sequence (opt4) from neuraminidase__InfluenzaA__ADA83685

SEQ ID NO: 178003 - RNA, 1410 nt, Artificial Sequence; identical to SEQ ID NO: 176798
  derived and/or modified CDS sequence (opt4) from neuraminidase__InfluenzaA__ADA86069

SEQ ID NO: 178004 - RNA, 1410 nt, Artificial Sequence; identical to SEQ ID NO: 176798
  derived and/or modified CDS sequence (opt4) from neuraminidase__InfluenzaA__ADB27973

SEQ ID NO: 178005 - RNA, 1410 nt, Artificial Sequence; identical to SEQ ID NO: 176798
  derived and/or modified CDS sequence (opt4) from neuraminidase__InfluenzaA__ADB27983

SEQ ID NO: 178006 - RNA, 1410 nt, Artificial Sequence
  derived and/or modified CDS sequence (opt4) from neuraminidase__InfluenzaA__ADB66693
augaaccccaaccagaagaucaucaccaucggcagcgugugcaugaccaucggcauggccaaccugauccugcagaucggcaacaucaucagcaucuggaucauccacagcauccagcugggcaaccagaaccagaucgagaccugcaaccagagcgugaucaccuacgagaacaacaccugggugaaccagaccuacgugaacaucagcaacaccaacuucgccgccggccagagcguggugagcgugaagcuggccggcaacagcagccugugccccgugagcggcugggccaucuacagcaaggacaacagcaucagaaucggcagcaagggcgacguguucgugaucagagagcccuucaucagcugcagcccccuggagugcagaaccuucuuccugacccagggcgcccugcugaacgacaagcacagcaacggcaccaucaaggacagaagccccuacagaacccugaugagcugccccaucggcgaggugcccagccccuacaacagcagauucgagagcguggccuggagcgccagcgccugccacgacggcaucaacuggcugaccaucggcaucagcggccccgacaacggcgccguggccgugcugaaguacaacggcaucaucaccgacaccaucaagagcuggagaaacaacauccugagaacccaggagagcgagugcgccugcgugaacggcagcugcuucaccgugaugaccgacggccccagcgacggccaggccagcuacaagaucuucagaaucgagaagggcaagaucgugaagagcguggagaugaacgcccccaacuaccacuacgaggagugcagcugcuaccccgacagcagcgagaucaccugcgugugcagagacaacuggcacggcagcaacagacccugggugagcuucaaccagaaccuggaguaccagaucggcuacaucugcagcggcaucuucggcgacaaccccagacccaacgacaagaccggcagcugcggccccgugagcagcaacggcgccaacggcgugaagggcuucagcuucaaguacggcaacggcguguggaucggcagaaccaagagcaucagcagcagaaacggcuucgagaugaucugggaccccaacggcuggaccggcaccgacaacaacuucagcaucaagcaggacaucgugggcaucaacgaguggagcggcuacagcggcagcuucgugcagcaccccgagcugaccggccuggacugcaucagacccugcuucuggguggagcugaucagaggcagacccaaggagaacaccaucuggaccagcggcagcagcaucagcuucugcggcgugaacagcgacaccgugggcuggagcuggcccgacggcgccgagcugcccuucaccaucgacaaguga

SEQ ID NO: 178007 - RNA, 1410 nt, Artificial Sequence; identical to SEQ ID NO: 176798
  derived and/or modified CDS sequence (opt4) from neuraminidase__InfluenzaA__ADB66695

SEQ ID NO: 178008 - RNA, 1410 nt, Artificial Sequence; identical to SEQ ID NO: 176798
  derived and/or modified CDS sequence (opt4) from neuraminidase__InfluenzaA__ADB66696

SEQ ID NO: 178009 - RNA, 1410 nt, Artificial Sequence
  derived and/or modified CDS sequence (opt4) from neuraminidase__InfluenzaA__ADB66697
augaaccccaaccagaagaucaucaccaucggcagcgugugcaucaccaucggcauggccaaccugauccugcagaucggcaacaucaucagcaucuggaucagccacagcauccagcugggcaaccagaaccagaucgagaccugcaaccagagcgugaucaccuacgagaacaacaccugggugaaccagaccuacgugaacaucagcaacaccaacuucgccgccggccagagcguggugagcgugaagcuggccggcaacagcagccugugccccgugagcggcugggccaucuacagcaaggacaacagcaucagaaucggcagcaagggcgacguguucgugaucagagagcccuucaucagcugcagcccccuggagugcagaaccuucuuccugacccagggcgcccugcugaacgacaagcacagcaacggcaccaucaaggacagaagccccuacagaacccugaugagcugccccaucggcgaggugcccagccccuacaacagcagauucgagagcguggccuggagcgccagcgccugccacgacggcaucaacuggcugaccaucggcaucagcggccccgacaacggcgccguggccgugcugaaguacaacggcaucaucaccgacaccaucaagagcuggagaaacaacauccugagaacccaggagagcgagugcgccugcgugaacggcagcugcuucaccgugaugaccgacggccccagcgacgagcaggccagcuacaagaucuucagaaucgagaagggcaagaucgugaagagcguggagaugaacgcccccaacuaccacuacgaggagugcagcugcuaccccgacagcagcgagaucaccugcgugugcagagacaacuggcacggcagcaacagacccugggugagcuucaaccagaaccuggaguacagaaucggcuacaucugcagcggcaucuucggcgacaaccccagacccaacgacaagaccggcagcugcggccccgugagcagcaacggcgccaacggcgugaagggcuucagcuucaaguacggcaacggcguguggaucggcagaaccaagagcaucagcagcagaaacggcuucgagaugaucugggaccccaacggcuggaccggcaccgacaacaacuucagcaucaagcaggacaucgugggcauccacgaguggagcggcuacagcggcagcuucgugcagcaccccgagcugaccggccuggacugcaucagacccugcuucuggguggagcugaucagaggcagacccaaggagaacaccaucuggaccagcggcagcagcaucagcuucugcggcgugaacagcgacaccgugggcuggagcuggcccgacggcgccgagcugcccuucaccaucgacaaguga

SEQ ID NO: 178010 - RNA, 1410 nt, Artificial Sequence; identical to SEQ ID NO: 177973
  derived and/or modified CDS sequence (opt4) from neuraminidase__InfluenzaA__ADB81401

SEQ ID NO: 178011 - RNA, 1410 nt, Artificial Sequence; identical to SEQ ID NO: 177816
  derived and/or modified CDS sequence (opt4) from neuraminidase__InfluenzaA__ADB81421

SEQ ID NO: 178012 - RNA, 1410 nt, Artificial Sequence; identical to SEQ ID NO: 177152
  derived and/or modified CDS sequence (opt4) from neuraminidase__InfluenzaA__ADB81431

SEQ ID NO: 178013 - RNA, 1410 nt, Artificial Sequence; identical to SEQ ID NO: 176798
  derived and/or modified CDS sequence (opt4) from neuraminidase__InfluenzaA__ADB81441

SEQ ID NO: 178014 - RNA, 1410 nt, Artificial Sequence
  derived and/or modified CDS sequence (opt4) from neuraminidase__InfluenzaA__ADB81451
augaaccccaaccagaagaucaucaccaucggcagcgugugcaugaccaucggcauggccaaccugauccugcagaucggcaacaucaucagcaucuggaucagccacagcauccagcugggcaaccagaaccagaucgagaccugcaaccagagcgugaucaccuacgagaacaacaccugggugaaccagaccuacgugaacaucagcaacaccaacuucgccgccggccagagcguggugagcgugaagcuggccggcaacagcagccugugccccgugagcggcugggccaucuacagcaaggacaacagcaucagaaucggcagcaagggcgacguguucgugaucagagagcccuucaucagcugcagcccccuggagugcagaaccuucuuccugacccagggcgcccugcugaacgacaagcacagcaacggcaccaucaaggacagaagccccuacagaacccugaugagcugccccaucggcgaggugcccagccccuacaacagcagauucgagagcguggccuggagcgccagcgccugccacgacggcaucaacuggcugaccaucggcaucagcggccccgacaacggcgccguggccgugcugaaguacaacggcaucaucaccgacaccaucaagagcuggagaaacaacauccugagaacccaggagagcgagugcgugugcgugaacggcagcugcuucaccgugaugaccgacggccccagcgacggccaggccagcuacaagaucuucagaaucgagaagggcaagaucgugaagagcguggagaugaacgcccccaacuaccacuacgaggagugcagcugcuaccccgacagcagcgagaucaccugcgugugcagagacaacuggcacggcagcaacagacccugggugagcuucaaccagaaccuggaguaccagaucggcuacaucugcagcggcaucuucggcgacaaccccagacccaacgacaagaccggcagcugcggccccgugagcagcaacggcgccaacggcgugaagggcuucagcuucaaguacggcaacggcguguggaucggcagaaccaagagcaucagcagcagaaacggcuucgagaugaucugggaccccaacggcuggaccggcaccgacaacaaguucagcaucaagcaggacaucgugggcaucaacgaguggagcggcuacagcggcagcuucgugcagcaccccgagcugaccggccuggacugcaucagacccugcuucuggguggagcugaucagaggcagacccaaggagaacaccaucuggaccagcggcagcagcaucagcuucugcggcgugaacagcgacaccgugggcuggagcuggcccgacggcgccgagcugcccuucaccaucgacaaguga

SEQ ID NO: 178015 - RNA, 1410 nt, Artificial Sequence; identical to SEQ ID NO: 177975
  derived and/or modified CDS sequence (opt4) from neuraminidase__InfluenzaA__ADB81461

SEQ ID NO: 178016 - RNA, 1410 nt, Artificial Sequence; identical to SEQ ID NO: 177975
  derived and/or modified CDS sequence (opt4) from neuraminidase__InfluenzaA__ADB82942

SEQ ID NO: 178017 - RNA, 1410 nt, Artificial Sequence; identical to SEQ ID NO: 176953
  derived and/or modified CDS sequence (opt4) from neuraminidase__InfluenzaA__ADB82945

SEQ ID NO: 178018 - RNA, 1410 nt, Artificial Sequence; identical to SEQ ID NO: 176798
  derived and/or modified CDS sequence (opt4) from neuraminidase__InfluenzaA__ADB89132

SEQ ID NO: 178019 - RNA, 1410 nt, Artificial Sequence; identical to SEQ ID NO: 177381
  derived and/or modified CDS sequence (opt4) from neuraminidase__InfluenzaA__ADB89142

SEQ ID NO: 178020 - RNA, 1410 nt, Artificial Sequence; identical to SEQ ID NO: 176798
  derived and/or modified CDS sequence (opt4) from neuraminidase__InfluenzaA__ADB89224

SEQ ID NO: 178021 - RNA, 1410 nt, Artificial Sequence
  derived and/or modified CDS sequence (opt4) from neuraminidase__InfluenzaA__ADB89234
augaaccccaaccagaagaucaucaccaucggcagcgugugcaugaccaucggcauggccaaccugauccugcagaucggcaacaucaucagcaucuggaucagccacagcauccagcugggcaaccagaaccagaucgagaccugcaaccagagcgugaucaccuacgagaacaacaccugggugaaccagaccuacgugaacaucagcaacaccaacuucgccgccggccagagcguggugagcgugaagcuggugggcaacagcagccugugccccgugagcggcugggccaucuacagcaaggacaacagcgugagaaucggcagcaagggcgacguguucgugaucagagagcccuucaucagcugcagcccccuggagugcagaaccuucuuccugacccagggcgcccugcugaacgacaagcacagcaacggcaccaucaaggacagaagccccuacagaacccugaugagcugccccaucggcgaggugcccagccccuacaacagcagauucgagagcguggccuggagcgccagcgccugccacgacggcaucaacuggcugaccaucggcaucagcggccccgacaacggcgccguggccgugcugaaguacaacggcaucaucaccgacaccaucaagagcuggagaaacaacauccugagaacccaggagagcgagugcgccugcgugaacggcagcugcuucaccgugaugaccgacggccccagcaacggccaggccagcuacaagaucuucagaaucgagaagggcaagaucgugaagagcguggagaugaacgcccccaacuaccacuacgaggagugcagcugcuaccccgacagcagcgagaucaccugcgugugcagagacaacuggcacggcagcaacagacccugggugagcuucaaccagaaccuggaguaccagaucggcuacaucugcagcggcaucuucggcgacaaccccagacccaacgacaagaccggcagcugcggccccgugagcagcaacggcgccaacggcgugaagggcuucagcuucaaguacggcaacggcguguggaucggcagaaccaagagcaucagcagcagaaacggcuucgagaugaucugggaccccaacggcuggaccggcaccgacaacaacuucagcaucaagcaggacaucgugggcaucaacgaguggagcggcuacagcggcagcuucgugcagcaccccgagcugaccggccuggacugcaucagacccugcuucuggguggagcugaucagaggcagacccaaggagaacaccaucuggaccagcggcagcagcaucagcuucugcggcgugaacagcgacaccgugggcuggagcuggcccgacggcgccgagcugcccuucaccaucgacaaguga

SEQ ID NO: 178022 - RNA, 1410 nt, Artificial Sequence; identical to SEQ ID NO: 176788
  derived and/or modified CDS sequence (opt4) from neuraminidase__InfluenzaA__ADB89244

SEQ ID NO: 178023 - RNA, 1410 nt, Artificial Sequence; identical to SEQ ID NO: 176798
  derived and/or modified CDS sequence (opt4) from neuraminidase__InfluenzaA__ADB89264

SEQ ID NO: 178024 - RNA, 1410 nt, Artificial Sequence; identical to SEQ ID NO: 177768
  derived and/or modified CDS sequence (opt4) from neuraminidase__InfluenzaA__ADB89274

SEQ ID NO: 178025 - RNA, 1410 nt, Artificial Sequence; identical to SEQ ID NO: 176953
  derived and/or modified CDS sequence (opt4) from neuraminidase__InfluenzaA__ADB89284

SEQ ID NO: 178026 - RNA, 1410 nt, Artificial Sequence; identical to SEQ ID NO: 176798
  derived and/or modified CDS sequence (opt4) from neuraminidase__InfluenzaA__ADB89294

SEQ ID NO: 178027 - RNA, 1410 nt, Artificial Sequence; identical to SEQ ID NO: 176798
  derived and/or modified CDS sequence (opt4) from neuraminidase__InfluenzaA__ADB89304

SEQ ID NO: 178028 - RNA, 1410 nt, Artificial Sequence; identical to SEQ ID NO: 176798
  derived and/or modified CDS sequence (opt4) from neuraminidase__InfluenzaA__ADB89314

SEQ ID NO: 178029 - RNA, 1410 nt, Artificial Sequence; identical to SEQ ID NO: 176798
  derived and/or modified CDS sequence (opt4) from neuraminidase__InfluenzaA__ADB89324

SEQ ID NO: 178030 - RNA, 1410 nt, Artificial Sequence; identical to SEQ ID NO: 176798
  derived and/or modified CDS sequence (opt4) from neuraminidase__InfluenzaA__ADB89334

SEQ ID NO: 178031 - RNA, 1410 nt, Artificial Sequence; identical to SEQ ID NO: 176798
  derived and/or modified CDS sequence (opt4) from neuraminidase__InfluenzaA__ADB89344

SEQ ID NO: 178032 - RNA, 1410 nt, Artificial Sequence; identical to SEQ ID NO: 176798
  derived and/or modified CDS sequence (opt4) from neuraminidase__InfluenzaA__ADB89364

SEQ ID NO: 178033 - RNA, 1410 nt, Artificial Sequence; identical to SEQ ID NO: 176798
  derived and/or modified CDS sequence (opt4) from neuraminidase__InfluenzaA__ADB89374

SEQ ID NO: 178034 - RNA, 1410 nt, Artificial Sequence; identical to SEQ ID NO: 176798
  derived and/or modified CDS sequence (opt4) from neuraminidase__InfluenzaA__ADB89384

SEQ ID NO: 178035 - RNA, 1410 nt, Artificial Sequence; identical to SEQ ID NO: 176798
  derived and/or modified CDS sequence (opt4) from neuraminidase__InfluenzaA__ADB89394

SEQ ID NO: 178036 - RNA, 1410 nt, Artificial Sequence
  derived and/or modified CDS sequence (opt4) from neuraminidase__InfluenzaA__ADB89404
augaaccccaaccagaagaucaucaccaucggcagcgugugcaugaccaucggcauggccaaccugauccugcagaucggcaacaucaucagcaucuggaucagccacagcauccagcugggcaaccagaaccagaucgagaccugcaaccagagcgugaucaccuacgagaacaacaccugggugaaccagaccuacgugaacaucagcaacaccaacuucgccgccggccagagcguggugagcgugaagcuggccggcaacagcagccugugccccgugagcggcugggccaucuacagcaaggacaacagcgugagaaucggcagcaagggcgacguguucgugaucagagagcccuucaucagcugcagcccccuggagugcagaaccuucuuccugacccagggcgcccugcugaacgacaagcacagcaacggcaccaucaaggacagaagccccuacagaacccugaugagcugccccaucggcgaggugcccagccccuacaacagcagauucgagagcguggccuggagcgccagcgccugccacgacggcaucaacuggcugaccaucggcaucagcggccccgacaacggcgccguggccgugcugaaguacaacggcaucaucaccgacaccaucaagagcuggagaaacagcauccugagaacccaggagagcgagugcgccugcgugaacggcagcugcuucaccgugaugaccgacggccccagcaacggccaggccagcuacaagaucuucagaaucgagaagggcaagaucgugaagagcguggagaugaacgcccccaacuaccacuacgaggagugcagcugcuaccccgacagcagcgagaucaccugcgugugcagagacaacuggcacggcagcaacagacccugggugagcuucaaccagaaccuggaguaccagaucggcuacaucugcagcggcaucuucggcgacaaccccagacccaacgacaagaccggcagcugcggccccgugagcagcaacggcgccaacggcgugaagggcuucagcuucaaguacggcaacggcguguggaucggcagaaccaagagcaucagcagcagaaacggcuucgagaugaucugggaccccaacggcuggaccggcaccgacaacaacuucagcaucaagcaggacaucgugggcaucaacgaguggagcggcuacagcggcagcuucgugcagcaccccgagcugaccggccuggacugcaucagacccugcuucuggguggagcugaucagaggcagacccaaggagaacaccaucuggaccagcggcagcagcaucagcuucugcggcgugaacagcgacaccgugggcuggagcuggcccgacggcgccgagcugcccuucaccaucgacaaguga

SEQ ID NO: 178037 - RNA, 1410 nt, Artificial Sequence; identical to SEQ ID NO: 176798
  derived and/or modified CDS sequence (opt4) from neuraminidase__InfluenzaA__ADB89414

SEQ ID NO: 178038 - RNA, 1410 nt, Artificial Sequence; identical to SEQ ID NO: 176798
  derived and/or modified CDS sequence (opt4) from neuraminidase__InfluenzaA__ADB89424

SEQ ID NO: 178039 - RNA, 1410 nt, Artificial Sequence; identical to SEQ ID NO: 176798
  derived and/or modified CDS sequence (opt4) from neuraminidase__InfluenzaA__ADB89434

SEQ ID NO: 178040 - RNA, 1410 nt, Artificial Sequence; identical to SEQ ID NO: 176798
  derived and/or modified CDS sequence (opt4) from neuraminidase__InfluenzaA__ADB89444

SEQ ID NO: 178041 - RNA, 1410 nt, Artificial Sequence
  derived and/or modified CDS sequence (opt4) from neuraminidase__InfluenzaA__ADB89454
augaaccccaaccagaagaucaucaccaucggcagcgugugcaugaccaucggcauggccaaccugauccugcagaucggcaacaucaucagcaucuggaucagccacagcauccagcugggcaaccagaaccagaucgagaccugcaaccagagcgugaucaccuacgagaacaacaccugggugaaccagaccuacgugaacaucagcaacaccaacuucgccgccggccagagcguggugagcgugaagcuggccggcaacagcagccugugccccgugagcggcugggccaucuacagcaaggacaacagcaucagaaucggcagcaagggcgacguguucgugaucagagagcccuucaucagcugcagcccccuggagugcagaaccuucuuccugacccagggcgcccugcugaacgacaagcacagcaacggcaccaucaaggacagaagccccuacagaacccugaugagcugccccaucggcgaggugcccagccccuacaacagcagauucgagagcguggccuggagcgccagcgccugccacgacggcaucaacuggcugaccaucggcaucagcggccccgacaacggcgccguggccgugcugaaguacaacggcaucaucaccgacaccaucaagagcuggagaaacaacauccugagaacccaggagagcgagugcgccugcgugaacggcagcugcuucaccgugaugaccgacggccccaacgacggccaggccagcuacaagaucuucagaaucgagaagggcaagaucgugaagagcguggagaugaacgcccccaacuaccacuacgaggagugcagcugcuaccccgacagcagcgagaucaccugcgugugcagagacaacuggcacggcagcaacagacccugggugagcuucaaccagaaccuggaguaccagaucggcuacaucugcagcggcaucuucggcgacaaccccagacccaacgacaagaccggcagcugcggccccgugagcagcaacggcgccaacggcgugaagggcuucagcuucaaguacggcaacggcguguggaucggcagaaccaagagcaucagcagcagaaacggcuucgagaugaucugggaccccaacggcuggaccggcaccgacaacaacuucagcaucaagcaggacaucgugggcaucaacgaguggagcggcuacagcggcagcuucgugcagcaccccgagcugaccggccuggacugcaucagacccugcuucuggguggagcugaucagaggcagacccaaggagaacaccaucuggaccagcggcagcagcaucagcuucugcggcgugaacagcgacaccgugggcuggagcuggcccgacggcgccgagcugcccuucaccaucgacaaguga

SEQ ID NO: 178042 - RNA, 1410 nt, Artificial Sequence; identical to SEQ ID NO: 176798
  derived and/or modified CDS sequence (opt4) from neuraminidase__InfluenzaA__ADB89464

SEQ ID NO: 178043 - RNA, 1410 nt, Artificial Sequence; identical to SEQ ID NO: 176798
  derived and/or modified CDS sequence (opt4) from neuraminidase__InfluenzaA__ADB89484

SEQ ID NO: 178044 - RNA, 1410 nt, Artificial Sequence; identical to SEQ ID NO: 176798
  derived and/or modified CDS sequence (opt4) from neuraminidase__InfluenzaA__ADB89494

SEQ ID NO: 178045 - RNA, 1410 nt, Artificial Sequence; identical to SEQ ID NO: 176788
  derived and/or modified CDS sequence (opt4) from neuraminidase__InfluenzaA__ADB89504

SEQ ID NO: 178046 - RNA, 1410 nt, Artificial Sequence; identical to SEQ ID NO: 176798
  derived and/or modified CDS sequence (opt4) from neuraminidase__InfluenzaA__ADB89514

SEQ ID NO: 178047 - RNA, 1410 nt, Artificial Sequence; identical to SEQ ID NO: 176798
  derived and/or modified CDS sequence (opt4) from neuraminidase__InfluenzaA__ADB89524

SEQ ID NO: 178048 - RNA, 1410 nt, Artificial Sequence
  derived and/or modified CDS sequence (opt4) from neuraminidase__InfluenzaA__ADB89544
augaaccccaaccagaagaucaucaccaucggcagcgugugcaugaccaucggcauggccaaccugauccugcagaucggcaacaucaucagcaucuggaucagccacagcauccagcugggcaaccagaaccagaucgagaccugcaaccagagcgugaucaccuacgagaacaacaccugggugaaccagaccuacgugaacaucagcaacaccaacuucgccgccggccagagcguggugagcgugaagcuggccggcaacagcagccugugccccgugagcggcugggccaucuacagcaaggacaacagcaucagaaucggcagcaagggcgacguguucgugaucagagagcccuucaucagcugcagccugcuggagugcagaaccuucuuccugacccagggcgcccugcugaacgacaagcacagcaacggcaccaucaaggacagaagccccuacagaacccugaugagcugccccaucggcgaggugcccagccccuacaacagcagauucgagagcguggccuggagcgccagcgccugccacgacggcaucaacuggcugaccaucggcaucagcggccccgacaacggcgccguggccgugcugaaguacaacggcaucaucaccgacaccaucaagagcuggagaaacaacauccugagaacccaggagagcgagugcgccugcgugaacggcagcugcuucaccgugaugaccgacggccccagcgacggccaggccagcuacaagaucuucagaaucgagaagggcaagaucgugaagagcguggagaugaacgcccccaacuaccacuacgaggagugcagcugcuaccccgacagcagcgagaucaccugcgugugcagagacaacuggcacggcagcaacagacccugggugagcuucaaccagaaccuggaguaccagaucggcuacaucugcagcggcaucuucggcgacaaccccagacccaacgacaagaccggcagcugcggccccgugagcagcaacggcgccaacggcgugaagggcuucagcuucaaguacggcaacggcguguggaucggcagaaccaagagcaucagcagcagaaacggcuucgagaugaucugggaccccaacggcuggaccggcaccgacaacaacuucagcaucaagcaggacaucgugggcaucaacgaguggagcggcuacagcggcagcuucgugcagcaccccgagcugaccggccuggacugcaucagacccugcuucuggguggagcugaucagaggcagacccaaggagaacaccaucuggaccagcggcagcagcaucagcuucugcggcgugaacagcgacaccgugggcuggagcuggcccgacggcgccgagcugcccuucaccaucgacaaguga

SEQ ID NO: 178049 - RNA, 1410 nt, Artificial Sequence; identical to SEQ ID NO: 176798
  derived and/or modified CDS sequence (opt4) from neuraminidase__InfluenzaA__ADB89564

SEQ ID NO: 178050 - RNA, 1410 nt, Artificial Sequence; identical to SEQ ID NO: 176798
  derived and/or modified CDS sequence (opt4) from neuraminidase__InfluenzaA__ADB89574

SEQ ID NO: 178051 - RNA, 1410 nt, Artificial Sequence; identical to SEQ ID NO: 176798
  derived and/or modified CDS sequence (opt4) from neuraminidase__InfluenzaA__ADB89594

SEQ ID NO: 178052 - RNA, 1410 nt, Artificial Sequence; identical to SEQ ID NO: 176798
  derived and/or modified CDS sequence (opt4) from neuraminidase__InfluenzaA__ADB89604

SEQ ID NO: 178053 - RNA, 1410 nt, Artificial Sequence
  derived and/or modified CDS sequence (opt4) from neuraminidase__InfluenzaA__ADB89614
augaaccccaaccagaagaucaucaccaucggcagcgugugcaugaccaucggcauggccaaccugauccugcagaucggcaacaucaucagcaucuggaucagccacagcauccagcugggcaaccagaaccagaucgagaccugcaaccagagcgugaucaccuacgagaacaacaccugggugaaccagaccuacgugaacaucagcaacaccaacuucgccgccggccagagcguggugagcgugaagcuggccggcaacagcagccugugccccgugagcggcugggccaucuacagcaaggacaacagcaucagaaucggcagcaagggcgacguguucgugaucagagagcccuucaucagcugcagcccccuggagugcagaaccuucuuccugacccagggcgcccugcugaacgacaagcacagcaacggcaccaucaaggacagaagccccuacagaacccugaugagcugccccaucggcgaggugcccagccccuacaacagcagauucgagagcguggccuggagcgccagcgccugccacgacggcaucaacuggcugaccaucggcaucagcggccccgacaacggcgccguggccgugcugaaguacaacggcaucaucaccgacaccaucaagagcuggagaaacaacauccugagaacccaggagagcgagugcgccugcgugaacggcagcugcuucaccgugaugaccgacggccccagcgacggccaggccagcuacaagaucuucagaaucgagaagggcaagaucgugaagagcguggagaugaacgcccccaacuaccacuacgaggagugcagcugcuaccccgacagcagcgagaucaccugcgugugcagagacaacuggcacggcagcaacagacccugggugagcuucaaccagaaccuggaguaccagaucggcuacaucugcagcggcaucuucggcgacaaccccagacccaacgacaagaccggcagcugcggccccgugagcagcaacggcgccaacggcgugaagggcuucagcuucaaguacggcaacggcaucuggaucggcagaaccaagagcaucagcagcagaaacggcuucgagaugaucugggaccccaacggcuggaccggcaccgacaacaacuucagcaucaagcaggacaucgugggcaucaacgaguggagcggcuacagcggcagcuucgugcagcaccccgagcugaccggccuggacugcaucagacccugcuucuggguggagcugaucagaggcagacccaaggagaacaccaucuggaccagcggcagcagcaucagcuucugcggcgugaacagcgacaccgugggcuggagcuggcccgacggcgccgagcugcccuucaccaucgacaaguga

SEQ ID NO: 178054 - RNA, 1410 nt, Artificial Sequence; identical to SEQ ID NO: 176798
  derived and/or modified CDS sequence (opt4) from neuraminidase__InfluenzaA__ADB89624

SEQ ID NO: 178055 - RNA, 1410 nt, Artificial Sequence; identical to SEQ ID NO: 176798
  derived and/or modified CDS sequence (opt4) from neuraminidase__InfluenzaA__ADB89634

SEQ ID NO: 178056 - RNA, 1410 nt, Artificial Sequence; identical to SEQ ID NO: 176798
  derived and/or modified CDS sequence (opt4) from neuraminidase__InfluenzaA__ADB89644

SEQ ID NO: 178057 - RNA, 1410 nt, Artificial Sequence; identical to SEQ ID NO: 177816
  derived and/or modified CDS sequence (opt4) from neuraminidase__InfluenzaA__ADB89664

SEQ ID NO: 178058 - RNA, 1410 nt, Artificial Sequence; identical to SEQ ID NO: 176798
  derived and/or modified CDS sequence (opt4) from neuraminidase__InfluenzaA__ADB89674

SEQ ID NO: 178059 - RNA, 1410 nt, Artificial Sequence; identical to SEQ ID NO: 176798
  derived and/or modified CDS sequence (opt4) from neuraminidase__InfluenzaA__ADB89684

SEQ ID NO: 178060 - RNA, 1410 nt, Artificial Sequence
  derived and/or modified CDS sequence (opt4) from neuraminidase__InfluenzaA__ADB89694
augaaccccaaccagaagaucaucaccaucggcagcgugugcaugaccaucggcauggccaaccugauccugcagaucggcaacaucaucagcaucuggaucagccacagcauccagcugggcaaccagaaccagaucgagaccugcaaccagagcgugaucaccuacgagaacaacaccugggugaaccagaccuacgugaacaucagcaacaccaacuucgccgccggccagagcguggugagcgugaagcuggccggcaacagcagccugugccccgugagcggcugggccaucuacagcaaggacaacagcaucagaaucggcagcaagggcgacguguucgugaucagagagcccuucaucagcugcagcccccuggagugcagaaccuucuuccugacccagggcgcccugcugaacgacaagcacagcaacggcaccaucaaggacagaagccccuacagaacccugaugagcugccccaucggcgaggugcccagccccuacaacagcagauucgagagcguggccuggagcgccagcgccugccacgacggcaucaacuggcugaccaucggcaucagcggccccgacaacggcgccguggccgugcugaaguacaacggcaucaucaccgacaccaucaagagcuggagaaacaacauccugagaacccaggagagcgagugcgccugcgugaacggcagcugcuucaccgugaugaccgacggccccagcgacggccaggccagcuacaagaucuucagaaucgagaagggcaagaucgugaagagcguggagaugaacgcccccaacuaccacuacgaggagugcagcugcuaccccgacagcagcgagaucaccugcgugugcagagacaacuggcacggcagcaacagacccugggugagcuucaaccagaaccuggaguaccagaucggcuacaucugcagcggcaucuucggcgacaaccccagacccaacgacaagaccggcagcugcggccccgugagcagcaacggcgccaacggcgugaagggcuucagcuucaaguacggcaacggcguguggaucggcagaaccaagagcaucagcagcagaaacggcuucgagaugaucugggaccccaacggcuggaccggcaccgacaacaacuucaccaucaagcaggacaucgugggcaucaacgaguggagcggcuacagcggcagcuucgugcagcaccccgagcugaccggccuggacugcaucagacccugcuucuggguggagcugaucagaggcagacccaaggagaacaccaucuggaccagcggcagcagcaucagcuucugcggcgugaacagcgacaccgugggcuggagcuggcccgacggcgccgagcugcccuucaccaucgacaaguga

SEQ ID NO: 178061 - RNA, 1410 nt, Artificial Sequence; identical to SEQ ID NO: 176798
  derived and/or modified CDS sequence (opt4) from neuraminidase__InfluenzaA__ADB89704

SEQ ID NO: 178062 - RNA, 1410 nt, Artificial Sequence; identical to SEQ ID NO: 176798
  derived and/or modified CDS sequence (opt4) from neuraminidase__InfluenzaA__ADB89714

SEQ ID NO: 178063 - RNA, 1410 nt, Artificial Sequence; identical to SEQ ID NO: 176659
  derived and/or modified CDS sequence (opt4) from neuraminidase__InfluenzaA__ADB89724

SEQ ID NO: 178064 - RNA, 1410 nt, Artificial Sequence; identical to SEQ ID NO: 176659
  derived and/or modified CDS sequence (opt4) from neuraminidase__InfluenzaA__ADB89735

SEQ ID NO: 178065 - RNA, 1410 nt, Artificial Sequence; identical to SEQ ID NO: 176798
  derived and/or modified CDS sequence (opt4) from neuraminidase__InfluenzaA__ADB90357

SEQ ID NO: 178066 - RNA, 1410 nt, Artificial Sequence; identical to SEQ ID NO: 176798
  derived and/or modified CDS sequence (opt4) from neuraminidase__InfluenzaA__ADB90358

SEQ ID NO: 178067 - RNA, 1410 nt, Artificial Sequence
  derived and/or modified CDS sequence (opt4) from neuraminidase__InfluenzaA__ADB90359
augaaccccaaccagaagaucaucaccaucggcagcgugugcaugaccaucggcauggccaaccugauccugcagaucggcaacaucaucagcaucuggaucagccacagcauccagcugggcaaccagaaccagaucgagaccugcaaccagagcaucaucaccuacgagaacaacaccugggugaaccagaccuacgugaacaucagcaacaccaacuucgccgccggccagagcguggugagcgugaagcuggccggcaacagcagccugugccccgugagcggcugggccaucuacagcaaggacaacagcaucagaaucggcagcaagggcgacguguucgugaucagagagcccuucaucagcugcagcccccuggagugcagaaccuucuuccugacccagggcgcccugcugaacgacaagcacagcaacggcaccaucaaggacagaagccccuacagaacccugaugagcugccccaucggcgaggugcccagccccuacaacagcagauucgagagcguggccuggagcgccagcgccugccacgacggcaucaacuggcugaccaucggcaucagcggccccgacaacggcgccguggccgugcugaaguacaacggcaucaucaccgacaccaucaagagcuggagaaacaacauccugagaacccaggagagcgagugcgccugcgugaacggcagcugcuucaccgugaugaccgacggccccagcgacggccaggccagcuacaagaucuucagaaucgagaagggcaagaucgugaagagcguggagaugaacgcccccaacuaccacuacgaggagugcagcugcuaccccgacagcagcgagaucaccugcgugugcagagacaacuggcacggcagcaacagacccugggugagcuucaaccagaaccuggaguacagaaucggcuacaucugcagcggcaucuucggcgacaaccccagacccaacgacaagaccggcagcugcggccccgugagcagcaacggcgccaacggcgugaagggcuucagcuucaaguacggcaacggcguguggaucggcagaaccaagagcaucagcagcagaaacggcuucgagaugaucugggaccccaacggcuggaccggcaccgacaacaacuucagcaucaagcaggacaucgugggcaccaacgaguggagcggcuacagcggcagcuucgugcagcaccccgagcugaccggccuggacugcaucagacccugcuucuggguggagcugaucagaggcagacccaaggagaacaccaucuggaccagcggcagcagcaucagcuucugcggcgugaacagcgacaccgugggcuggagcuggcccgacggcgccgagcugcccuucaccaucgacaaguga

SEQ ID NO: 178068 - RNA, 1410 nt, Artificial Sequence; identical to SEQ ID NO: 176798
  derived and/or modified CDS sequence (opt4) from neuraminidase__InfluenzaA__ADB90363

SEQ ID NO: 178069 - RNA, 1410 nt, Artificial Sequence; identical to SEQ ID NO: 177975
  derived and/or modified CDS sequence (opt4) from neuraminidase__InfluenzaA__ADB90373

SEQ ID NO: 178070 - RNA, 1410 nt, Artificial Sequence; identical to SEQ ID NO: 176798
  derived and/or modified CDS sequence (opt4) from neuraminidase__InfluenzaA__ADB98137

SEQ ID NO: 178071 - RNA, 1410 nt, Artificial Sequence; identical to SEQ ID NO: 177152
  derived and/or modified CDS sequence (opt4) from neuraminidase__InfluenzaA__ADB98138

SEQ ID NO: 178072 - RNA, 1410 nt, Artificial Sequence; identical to SEQ ID NO: 176798
  derived and/or modified CDS sequence (opt4) from neuraminidase__InfluenzaA__ADB98139

SEQ ID NO: 178073 - RNA, 1410 nt, Artificial Sequence; identical to SEQ ID NO: 177152
  derived and/or modified CDS sequence (opt4) from neuraminidase__InfluenzaA__ADB98140

SEQ ID NO: 178074 - RNA, 1410 nt, Artificial Sequence; identical to SEQ ID NO: 177152
  derived and/or modified CDS sequence (opt4) from neuraminidase__InfluenzaA__ADB98141

SEQ ID NO: 178075 - RNA, 1410 nt, Artificial Sequence; identical to SEQ ID NO: 176798
  derived and/or modified CDS sequence (opt4) from neuraminidase__InfluenzaA__ADC32391

SEQ ID NO: 178076 - RNA, 1410 nt, Artificial Sequence; identical to SEQ ID NO: 176798
  derived and/or modified CDS sequence (opt4) from neuraminidase__InfluenzaA__ADC32392

SEQ ID NO: 178077 - RNA, 1410 nt, Artificial Sequence; identical to SEQ ID NO: 176798
  derived and/or modified CDS sequence (opt4) from neuraminidase__InfluenzaA__ADC32393

SEQ ID NO: 178078 - RNA, 1410 nt, Artificial Sequence; identical to SEQ ID NO: 176798
  derived and/or modified CDS sequence (opt4) from neuraminidase__InfluenzaA__ADC32394

SEQ ID NO: 178079 - RNA, 1410 nt, Artificial Sequence; identical to SEQ ID NO: 176798
  derived and/or modified CDS sequence (opt4) from neuraminidase__InfluenzaA__ADC32395

SEQ ID NO: 178080 - RNA, 1410 nt, Artificial Sequence; identical to SEQ ID NO: 176798
  derived and/or modified CDS sequence (opt4) from neuraminidase__InfluenzaA__ADC32396

SEQ ID NO: 178081 - RNA, 1410 nt, Artificial Sequence; identical to SEQ ID NO: 176798
  derived and/or modified CDS sequence (opt4) from neuraminidase__InfluenzaA__ADC32397

SEQ ID NO: 178082 - RNA, 1410 nt, Artificial Sequence; identical to SEQ ID NO: 176798
  derived and/or modified CDS sequence (opt4) from neuraminidase__InfluenzaA__ADC32398

SEQ ID NO: 178083 - RNA, 1410 nt, Artificial Sequence; identical to SEQ ID NO: 176798
  derived and/or modified CDS sequence (opt4) from neuraminidase__InfluenzaA__ADC32399

SEQ ID NO: 178084 - RNA, 1410 nt, Artificial Sequence; identical to SEQ ID NO: 176798
  derived and/or modified CDS sequence (opt4) from neuraminidase__InfluenzaA__ADC32400

SEQ ID NO: 178085 - RNA, 1410 nt, Artificial Sequence; identical to SEQ ID NO: 176798
  derived and/or modified CDS sequence (opt4) from neuraminidase__InfluenzaA__ADC32401

SEQ ID NO: 178086 - RNA, 1410 nt, Artificial Sequence
  derived and/or modified CDS sequence (opt4) from neuraminidase__InfluenzaA__ADC32404
augaaccccaaccagaagaucaucaccaucggcagcgugugcaugaccaucggcauggccaaccugauccugcagaucggcaacaucaucagcaucuggaucagccacagcauccagcugggcaaccagaaccagaucgagaccugcaaccagagcgugaucaccuacgagaacaacaccugggugaaccagaccuacgugaacaucagcaacaccaacuucgccgccggccagagcguggugagcgugaagcuggccggcaacagcagccugugccccgugagcggcugggccaucuacagcaaggacaacagcaucagaaucggcagcaagggcgacguguucgugaucagagagcccuucaucagcugcagcccccuggagugcagaaccuucuuccugacccagggcgcccugcugaacgacaagcacagcaacggcaccaucaaggacagaagccccuacagaacccugaugagcugccccaucggcgaggugcccagccccuacaacagcagauucgagagcguggccuggagcgccagcgccugccacgacggcaucaacuggcugaccaucggcaucagcggccccgacaacggcgccguggccgugcugaaguacaacggcaucaucaccgacaccaucaagagcuggagaaacaacauccugagaacccaggagagcgagugcgccugcgugaacggcagcugcuucaccgugaugaccgacggccccagcgacggccaggccagcuacaagaucuucagaaucgagaagggcaagaucgugaagagcguggagaugaacgcccccaacuaccacuacgaggagugcagcugcuaccccgacagcagcgagaucaccugcgugugcagagacaacuggcacggcagcaacagacccugggugagcuucaaccagaaccuggaguaccagaucggcuacaucugcagcggcaucuucggcgacaaccccagacccaacgacaagaagggcagcugcggccccgugagcagcaacggcgccaacggcgugaagggcuucagcuucaaguacggcaacggcguguggaucggcagaaccaagagcaucagcagcagaaacggcuucgagaugaucugggaccccaacggcuggaccggcaccgacaacaacuucagcaucaagcaggacaucgugggcaucaacgaguggagcggcuacagcggcagcuucgugcagcaccccgagcugaccggccuggacugcaucagacccugcuucuggguggagcugaucagaggcagacccaaggagaacaccaucuggaccagcggcagcagcaucagcuucugcggcgugaacagcgacaccgugggcuggagcuggcccgacggcgccgagcugcccuucaccaucgacaaguga

SEQ ID NO: 178087 - RNA, 1410 nt, Artificial Sequence
  derived and/or modified CDS sequence (opt4) from neuraminidase__InfluenzaA__ADC32407
augaaccccaagcagaagaucaucaccaucggcagcgugugcaugaccaucggcauggccaaccugauccugcagaucggcaacaucaucagcaucuggaucagccacagcauccagcugggcaaccagaaccagaucgagaccugcaaccagagcgugaucaccuacgagaacaacaccugggugaaccagaccuacgugaacaucagcaacaccaacuucgccgccggccagagcguggugagcgugaagcuggccggcaacagcagccugugccccgugagcggcugggccaucuacagcaaggacaacagcaucagaaucggcagcaagggcgacguguucgugaucagagagcccuucaucagcugcagcccccuggagugcagaaccuucuuccugacccagggcgcccugcugaacgacaagcacagcaacggcaccaucaaggacagaagccccuacagaacccugaugagcugccccaucggcgaggugcccagccccuacaacagcagauucgagagcguggccuggagcgccagcgccugccacgacggcaucaacuggcugaccaucggcaucagcggccccgacaacggcgccguggccgugcugaaguacaacggcaucaucaccgacaccaucaagagcuggagaaacaacauccugagaacccaggagagcgagugcgccugcgugaacggcagcugcuucaccgugaugaccgacggccccagcgacggccaggccagcuacaagaucuucagaaucgagaagggcaagaucgugaagagcguggagaugaacgcccccaacuaccacuacgaggagugcagcugcuaccccgacagcagcgagaucaccugcgugugcagagacaacuggcacggcagcaacagacccugggugagcuucaaccagaaccuggaguaccagaucggcuacaucugcagcggcaucuucggcgacaaccccagacccaacgacaagaagggcagcugcggccccgugagcagcaacggcgccaacggcgugaagggcuucagcuucaaguacggcaacggcguguggaucggcagaaccaagagcaucagcagcagaaacggcuucgagaugaucugggaccccaacggcuggaccggcaccgacaacaacuucagcaucaagcaggacaucgugggcaucaacgaguggagcggcuacagcggcagcuucgugcagcaccccgagcugaccggccuggacugcaucagacccugcuucuggguggagcugaucagaggcagacccaaggagaacaccaucuggaccagcggcagcagcaucagcuucugcggcgugaacagcgacaccgugggcuggagcuggcccgacggcgccgagcugcccuucaccaucgacaaguga

SEQ ID NO: 178088 - RNA, 1410 nt, Artificial Sequence
  derived and/or modified CDS sequence (opt4) from neuraminidase__InfluenzaA__ADC34942
augaaccccaaccagaagaucaucaccaucggcagcgugagccugaccaucagcaccaucugcuucuucaugcagaucgccauccugaucaccaccgugacccugcacuucaagcaguacgaguucaaccccccccccaacaaccaggugaugcugugcgagcccaccaucaucgagagaaacaucaccgagaucguguaccugaccaacaccaccaucgagaaggagaucugccccaagcuggccgaguacagagaguggagcaagccccagugcaacaucaccggcuucgcccccuucagcaaggacaacagcaucagacugagcgccggcggcgacaucugggugaccagagagcccuacgugagcugcgaccccgacaagugcuaccaguucgcccugggccagggcaccacccugaacaacgugcacagcaacgacaucgugagagacagaacccccuacagaacccugcugaugaacgagcugggcgugcccuuccaccugggcaccaagcaggugugcaucgccuggagcagcagcagcugccacgacggcaaggccuggcugcacgugugcgugaccggcgacgacaagaacgccaccgccagcuucaucuacaacggcagacugguggacagcaucgugagcuggagcaaggagauccugagaacccaggagagcgagugcgugugcaucaacggcaccugcaccguggugaugaccgacggcagcgccagcggcaaggccgacaccaagauccuguucaucgaggagggcaagaucgugcacaccagcacccugagcggcagcgcccagcacguggaggagugcagcugcuaccccagauaccccggcgugagaugcgugugcagagacaacuggagaggcagcaacagacccaucguggacaucaacaugaaggacuacagcaucgugagcagcuacgugugcagcggccuggugggcgacacccccagaaagaacgacagcagcagcagcggccacugccugaaccccaacaacgaggagggcggccacggcgugaagggcugggccuucgacgacggcaacgacguguggaugggcagaaccaucagcgagaagcugagaagcggcuacgagaccuucaaggugaucgagggcuggagcaaccccaacagcaagcugcagaucaacagacaggugaucguggacagaggcaacagaagcggcuacagcggcaucuucagcguggagggcaagagcugcaucaacagaugcuucuacguggagcugaucagaggcagaaaggaggagaccgaggugcuguggaccagcaacagcaucgugguguucugcggcaccagcggcaccuacggcaccggcagcuggcccgacggcgccgacaucaaccugaugcccaucuga

SEQ ID NO: 178089 - RNA, 1410 nt, Artificial Sequence
  derived and/or modified CDS sequence (opt4) from neuraminidase__InfluenzaA__ADC39000
augaaccccaaccagaagaucaucaccaucggcagcgugugcaugaccaucggcauggccaaccugauccugcagaucggcaacaucaucagcaucuggaucagccacagcauccagcugggcaaccagaaccagaucgagaccugcaaccagagcgugaucaccuacgagaacaacaccugggugaaccagaccuacgugaacaucagcaacaccaacuucgccgccggccagagcguggugagcgugaagcuggccggcaacagcagccugugccccgugagcggcugggccaucuacagcaaggacaacagcaucagaaucggcagcaagggcgacguguucgugaucagagagcccuucaucagcugcagcccccuggagugcagaaccuucuuccugacccagggcgcccugcugaacgacaagcacagcaacggcaccaucaaggacagaagccccuacagaacccugaugagcugccccaucggcgaggugcccagccccuacaacagcagauucgagagcguggccuggagcgccagcgccugccacgacggcaucaacuggcugaccaucggcaucagcggccccgacaacggcgccguggccgugcugaaguacaacggcaucaucaccgacaccaucaagagcuggagaaacaacauccugagaacccaggagagcgagugcgccugcgugaacggcagcugcuucaccgugaugaccgacggccccagcgacggccaggccagcuacaagaucuucagaaucgagaagggcaagaucgugaagagcguggagaugaacgcccccaacuaccacuacgaggagugcagcugcuaccccgacagcagcgagaucaccugcgugugcagagacaacuggcacggcagcaacagacccugggugagcuucaaccagaaccuggaguaccagaucggcuacaucugcagcggcaucuucggcgacaaccccagacccaacgacaagaccggcagcugcggccccgugagcagcaacggcgccaacggcgugaagggcuucagcuucaaguacggcaacggcguguggaucggcagaaccaagagcaucagcagcagaaacggcuucgagaugaucugggaccccaacggcuggaccggcaccgacaacaacuucagcaucaagcaggacaucgugggcaucaacgaguggagcggcuacagcggcagcuucgugcagcaccccgagcugaccggccuggacugcaucagacccugcuucuggguggagcugaucagaggcagacccaaggagaacaccaucuggaccagcggcagcagcaucagcuucugcggcgugaacagcgacaacgugggcuggagcuggcccgacggcgccgagcugcccuucaccaucgacaaguga

SEQ ID NO: 178090 - RNA, 1410 nt, Artificial Sequence; identical to SEQ ID NO: 176798
  derived and/or modified CDS sequence (opt4) from neuraminidase__InfluenzaA__ADC39010

SEQ ID NO: 178091 - RNA, 1413 nt, Artificial Sequence; identical to SEQ ID NO: 176692
  derived and/or modified CDS sequence (opt4) from neuraminidase__InfluenzaA__ADC45606

SEQ ID NO: 178092 - RNA, 1413 nt, Artificial Sequence
  derived and/or modified CDS sequence (opt4) from neuraminidase__InfluenzaA__ADC45628
augaaccccaaccagaagaucaucaccaucggcagcaucagcaucgccaucggcaucaucagccugaugcugcagaugggcaacaucaucagcaucugggccagccacagcauccagaccggcagccagaaccacaccggcaucugcaaccagagaaucaucaccuacgagaacagcaccugggugaaccacaccuacgugaacaucaacaacaccaacgugguggccggcaaggacaagacccccgugacccuggugggcaacagcagccugugcagcaucagcggcugggccaucuacaccaaggacaacagcaucagaaucggcagcaagggcgacguguucgugaucagagagcccuucaucagcugcagccaccuggagugcaagaccuucuuccugacccagggcgcccugcugaacgacaagcacagcaacggcaccgugaaggacagaagccccuacagagcccugaugagcugcccccugggcgaggcccccagccccuacaacagcaaguucgagagcguggccuggagcgccagcgccugccacgacggcaucggcuggcugaccaucggcaucagcggccccgacaacggcgccguggccgugcugaaguacaagggcaucaucaccggcaccaucaagagcuggaagaagcagauccugagaacccaggagagcgagugcgugugcaugaacggcagcugcuucaccaucaugaccgacggccccagcaacggcgccgccagcuacaagaucuucaagaucgagaagggcaaggugaccaagagcauggagcugaacgcccccaacuuccacuacgaggagugcagcugcuaccccgacaccggcaccgugaugugcgugugcagagacaacuggcacggcagcaacagacccugggugagcuucaaccagaaccuggacuaccagaucggcuacaucugcagcggcguguucggcgacaaccccagacccaaggacagagagggcagcugcaaccccgugaccguggacggcgccaacggcgugaagggcuucagcuacaaguacggcaacggcguguggaucggcagaaccaagagcaacagaaucagaaagggcuucgagaugaucugggaccccaacggcuggaccaacaccgacagcgacuucagcgugaagcaggacaucguggccaucaccgacuggagcggcuacagcggcagcuucgugcagcaccccgagcugaccggccuggacugcaucagacccugcuucuggguggagcuggugagaggccugcccagagagaacaccaccaucuggaccagcggcagcagcaucagcuucugcggcgugaacggcgacaucgccaacuggagcuggcccgacggcgccgagcugcccuucaccaucgacaaguga

SEQ ID NO: 178093 - RNA, 1413 nt, Artificial Sequence
  derived and/or modified CDS sequence (opt4) from neuraminidase__InfluenzaA__ADC45639
augaaccccaaccagaagaucaucaccaucggcagcaucagcaucgccaucggcaucaucagccugaugcugcagaucggcaacaucaucagcaucugggccagccacagcauccagaccggcagccagaaccacaccggcaucugcaaccagagaaucaucaccuacgagaacagcaccugggugaaccacaccuacgugaacaucaacaacaccaacgugguggccggcaaggacaagacccccgugacccuggugggcaacagcagccugugcagcaucagcggcugggccaucuacaccaaggacaacagcaucagaaucggcagcaagggcgacguguucgugaucagagagcccuucaucagcugcagccaccuggagugcaagaccuucuuccugacccagggcgcccugcugaacgacaagcacagcaacggcaccgugaaggacagaagccccuacagagcccugaugagcugcccccugggcgaggcccccagccccuacaacagcaaguucgagagcguggccuggagcgccagcgccugccacgacggcaucggcuggcugaccaucggcgugagcggccccgacaacggcgccguggccgugcugaaguacaagggcaucaucaccggcaccaucaagagcuggaagaagcagauccugagaacccaggagagcgagugcgugugcaugaacggcagcugcuucaccaucaugaccgacggccccagcaacggcgccgccagcuacaagaucuucaagaucgagaagggcaaggugaccaagagcauggagcugaacgcccccaacuuccacuacgaggagugcagcugcuaccccgacaccggcaccgugaugugcgugugcagagacaacuggcacggcagcaacagacccugggugagcuucaaccagaaccuggacuaccagaucggcuacaucugcagcggcguguucggcgacaaccccagacccaaggacagagagggcagcugcaaccccgugaccguggacggcgccaacggcgugaagggcuucagcuacaaguacggcaacggcguguggaucggcagaaccaagagcaacagaaucagaaagggcuucgagaugaucugggaccccaacggcuggaccaacaccgacagcgacuucagcgugaagcaggacaucguggccaucaccgacuggagcggcuacagcggcagcuucgugcagcaccccgagcugaccggccuggacugcaucagacccugcuucuggguggagcuggugagaggccugcccagagagaacaccaccaucuggaccagcggcagcagcaucagcuucugcggcgugaacggcgacaucgccaacuggagcuggcccgacggcgccgagcugcccuucaccaucgacaaguga

SEQ ID NO: 178094 - RNA, 1413 nt, Artificial Sequence; identical to SEQ ID NO: 176692
  derived and/or modified CDS sequence (opt4) from neuraminidase__InfluenzaA__ADC45650

SEQ ID NO: 178095 - RNA, 1413 nt, Artificial Sequence; identical to SEQ ID NO: 176692
  derived and/or modified CDS sequence (opt4) from neuraminidase__InfluenzaA__ADC45661

SEQ ID NO: 178096 - RNA, 1413 nt, Artificial Sequence
  derived and/or modified CDS sequence (opt4) from neuraminidase__InfluenzaA__ADC45683
augaaccccaaccagaagaucaucaccaucggcagcaucagcaucgccaucggcaucaucagccugaugcugcagaucggcaacaucaucagcaucugggccagccacagcauccagaccggcagccagaaccacaccggcaucugcaaccagagaaucaucaccuacgagaacagcaccugggugaaccacaccuacgugaacaucaacaacaccaacgugguggccggcgaggacaagacccccgugacccuggugggcaacagcagccugugcagcaucagcggcugggccaucuacaccaaggacaacagcaucagaaucggcagcaagggcgacguguucgugaucagagagcccuucaucagcugcagccaccuggagugcaagaccuucuuccugacccagggcgcccugcugaacgacaagcacagcaacggcaccgugaaggacagaagccccuacagagcccugaugagcugcccccugggcgaggcccccagccccuacaacagcaaguucgagagcguggccuggagcgccagcgccugccacgacggcaucggcuggcugaccaucggcaucagcggccccgacaacggcgccguggccgugcugaaguacaagggcaucaucaccggcaccaucaagagcuggaagaagcagauccugagaacccaggagagcgagugcgugugcaugaacggcagcugcuucaccaucaugaccgacggccccagcaacggcgccgccagcuacaagaucuucaagaucgagaagggcaaggugaccaagagcauggagcugaacgcccccaacuuccacuacgaggagugcagcugcuaccccgacaccggcaccgugaugugcgugugcagagacaacuggcacggcagcaacagacccugggugagcuucaaccagaaccuggacuaccagaucggcuacaucugcagcggcguguucggcgacaaccccagacccaaggacagagagggcagcugcaaccccgugaccguggacggcgccaacggcgugaagggcuucagcuacaaguacggcaacggcguguggaucggcagaaccaagagcaacagaaucagaaagggcuucgagaugaucugggaccccaacggcuggaccaacaccgacagcgacuucagcgugaagcaggacaucguggccaucaccgacuggagcggcuacagcggcagcuucgugcagcaccccgagcugaccggccuggacugcaucagacccugcuucuggguggagcuggugagaggccugcccagagagaacaccaccaucuggaccagcggcagcagcaucagcuucugcggcgugaacggcgacaucgccaacuggagcuggcccgacggcgccgagcugcccuucaccaucgacaaguga

SEQ ID NO: 178097 - RNA, 1413 nt, Artificial Sequence
  derived and/or modified CDS sequence (opt4) from neuraminidase__InfluenzaA__ADC45705
augaaccccaaccagaagaucaucaccaucggcagcaucagcaucgccaucggcaucaucagccugaugcugcagaucggcaacaucaucagcaucugggccagccacagcauccagaccggcagccagaacaacaccggcaucugcaaccagagaaucaucaccuacgagaacagcaccugggugaaccacaccuacgugaacaucaacaacaccaacgugguggccggcgaggacaagaccagcgugacccuggccggcaacagcagccugugcagcaucagcggcugggccaucuacaccaaggacaacagcaucagaaucggcagcaagggcgacguguucgugaucagagagcccuucaucagcugcagccaccuggagugcagaaccuucuuccugacccagggcgcccugcugaacgacaagcacagcaacggcaccgugaagaacagaagccccuacagagcccugaugagcugcccccugggcgaggcccccagccccuacaacagcaaguucgagagcguggccuggagcgccagcgccugccacgacggcaugggcuggcugaccaucggcaucagcggccccgacaacggcgccguggccgugcugaaguacaacggcaucaucaccggcaccaucaagagcuggaagaagcagauccugagaacccaggagagcgagugcgugugcaugaacggcagcugcuucaccaucaugaccgacggccccagcaacaaggccgccagcuacaagaucuucaagaucgagaagggcaaggugaccaagagcaucgagcugaacgcccccaacuuccacuacgaggagugcagcugcuaccccgacaccggcaucgugaugugcgugugcagagacaacuggcacggcagcaacagacccugggugagcuucaaccagaaccuggacuaccagaucggcuacaucugcagcggcguguucggcgacaaccccagacccgaggacggcgagggcagcugcaaccccgugaccguggacggcgccaacggcgugaagggcuucagcuacaaguacgacaacggcguguggaucggcagaaccaagagcaacagacugagaaagggcuucgagaugaucugggaccccaacggcuggaccaacaccgacagcgacuucagcgugaagcaggacgugguggccaucaccgacuggagcggcuacagcggcagcuucgugcagcaccccgagcugaccggccuggacugcaucagacccugcuucuggguggagcuggugagaggccugcccagagagaacaccaccaucuggaccagcggcagcagcaucagcuucugcggcgugaacagcgacaccgccaacuggagcuggcccgacggcgccgagcugcccuucaccaucgacaaguga

SEQ ID NO: 178098 - RNA, 1413 nt, Artificial Sequence
  derived and/or modified CDS sequence (opt4) from neuraminidase__InfluenzaA__ADC45716
augaaccccaaccagaagaucaucaccaucggcagcaucagcaucgccaucggcaucaucagccugaugcugcagaucggcaacaucaucagcaucugggccagccacagcauccagaccggcagccagaaccacaccggcaucugcaaccagagaaucaucaccuacgagaacagcaccugggugaaccacaccuacgugaacaucaacaacaccaacgugguggccggcaaggacaagacccccgugacccuggugggcaacagcagccugugcagcaucagcggcugggccaucuacaccaaggacaacagcaucagaaucggcagcaagggcgacguguucgugaucagagagcccuucaucagcugcagccaccuggagugcaagaccuucuuccugacccagggcgcccugcugaacgacaagcacagcaacggcaccgugaaggacagaagccccuacagagcccugaugagcugcccccugggcgaggcccccagccccuacaacagcaaguucgagagcguggccuggagcgccagcgccugccacgacggcaucggcuggcugaccaucggcaucagcggccccgacaacggcgccguggccgugcugaaguacaagggcaucaucaccggcaccaucaagagcuggaagaagcagauccugagaacccaggagagcgagugcgugugcaugaacggcagcugcuucaccaucaugaccgacggccccagcaacggcgccgccagcuacaagaucuucaagaucgagaagggcaaggugaccaagagcauggagcugaacgcccccaacuuccacuacgaggagugcagcugcuaccccgacaccggcaccgugaugugcgugugcagagacaacuggcacggcagcaacagacccugggugagcuucaaccagaaccuggacuaccagaucggcuacaucugcagcggcguguucggcgacaaccccagacccaaggacagagagggcagcugcaaccccgugaccguggacggcgccaacggcguggagggcuucagcuacaaguacggcaacggcguguggaucggcagaaccaagagcaacagaaucagaaagggcuucgagaugaucugggaccccaacggcuggaccaacaccgacagcgacuucagcgugaagcaggacaucguggccaucaccaacuggagcggcuacagcggcagcuucgugcagcaccccgagcugaccggccuggacugcaucagacccugcuucuggguggagcuggugagaggccugcccagagagaacaccaccaucuggaccagcggcagcagcaucagcuucugcggcgugaacggcgacaucgccaacuggagcuggcccgacggcgccgagcugcccuucaccaucgacaaguga

SEQ ID NO: 178099 - RNA, 1413 nt, Artificial Sequence
  derived and/or modified CDS sequence (opt4) from neuraminidase__InfluenzaA__ADC45738
augaaccccaaccagaagaucaucaccaucggcagcaucagcaucgccaucggcaucaucagccugaugcugcagaucggcaacaucaucagcaucugggccagccacagcauccagaccggcagccagaacaacaccggcaucugcaaccagagaaucaucaccuacgagaacagcaccugggugaaccacaccuacgugaacaucaacaacaccaacgugguggccggcgaggacaagaccagcgugacccuggccggcaacagcagccugugcagcaucagcggcugggccaucuacaccaaggacaacagcaucagaaucggcagcaagggcgacguguucgugaucagagagcccuucaucagcugcagccaccuggagugcagaaccuucuuccugacccagggcgcccugcugaacgacaagcacagcaacggcaccgugaaggacagaagccccuacagagcccugaugagcugcccccugggcgaggcccccagccccuacaacagcaaguucgagagcguggccuggagcgccagcgccugccacgacggcaugggcuggcugaccaucggcaucagcggccccgacaacggcgccguggccgugcugaaguacaacggcaucaucaccggcaccaucaagagcuggaagaagcagauccugagaacccaggagagcgagugcgugugcaugaacggcagcugcuucaccaucaugaccgacggccccagcaacaaggccgccagcuacaagaucuucaagaucgagaagggcaaggugaccaagagcaucgagcugaacgcccccaacuucuacuacgaggagugcagcugcuaccccgacaccggcaucgugaugugcgugugcagagacaacuggcacggcagcaacagacccugggugagcuucaaccagaaccuggacuaccagaucggcuacaucugcagcggcguguucggcgacaaccccagacccgaggacggcgagggcagcugcaaccccgugaccguggacggcgccaacggcgugaagggcuucagcuacaaguacgacaacggcguguggaucggcagaaccaagagcaacagacugagaaagggcuucgagaugaucugggaccccaacggcuggaccaacaccgacagcgacuucagcgugaagcaggacgugguggccaucaccgacuggagcggcuacagcggcagcuucgugcagcaccccgagcugaccggccuggacugcaucagacccugcuucuggguggagcuggugagaggccugcccagagagaacaccaccaucuggaccagcggcagcagcaucagcuucugcggcgugaacagcgacaccgccaacuggagcuggcccgacggcgccgagcugcccuucaccaucgacaaguga

SEQ ID NO: 178100 - RNA, 1413 nt, Artificial Sequence
  derived and/or modified CDS sequence (opt4) from neuraminidase__InfluenzaA__ADC45760
augaaccccaaccagaagaucaucaccaucggcagcaucagcaucgccaucggcaucaucagccugaugcugcagaucggcaacaucaucagcaucugggccagccacagcauccagaccggcagccagaacaacaccggcaucugcaaccagagaaucaucaccuacgagaacagcaccugggugaaccacaccuacgugaacaucaacaacaccaacgugguggccggcgaggacaagaccagcgugacccuggccggcaacagcagccugugcagcaucagcggcugggccaucuacaccaaggacaacagcaucagaaucggcagcaagggcgacguguucgugaucagagagcccuucaucagcugcagccaccuggagugcagaaccuucuuccugacccagggcgcccugcugaacgacaagcacagcaacggcaccgccaaggacagaagccccuacagagcccugaugagcugcccccugggcgaggcccccagccccuacaacagcaaguucgagagcguggccuggagcgccagcgccugccacgacggcaugggcuggcugaccaucggcaucagcggccccgacaacggcgccguggccgugcugaaguacaacggcaucaucaccggcaccaucaagagcuggaagaagcagauccugagaacccaggagagcgagugcgugugcaugaacggcagcugcuucaccaucaugaccgacggccccagcaacaaggccgccagcuacaagaucuucaagaucgagaagggcaaggugaccaagagcaucgagcugaacgcccccaacuucuacuacgaggagugcagcugcuaccccgacaccggcaucgugaugugcgugugcagagacaacuggcacggcagcaacagacccugggugagcuucaaccagaaccuggacuaccagaucggcuacaucugcagcggcguguucggcgacaaccccagacccgaggacggcgagggcagcugcaaccccgugaccguggacggcgccaacggcgugaagggcuucagcuacaaguacggcaacggcguguggaucggcagaaccaagagcaacagacugagaaagggcuucgagaugaucugggaccccaacggcuggaccaacaccgacagcgacuucagcgugaagcaggacgugguggccaucaccgacuggagcggcuacagcggcagcuucgugcagcaccccgagcugaccggccugggcugcaucagacccugcuucuggguggagcuggugagaggccugcccagagagaacaccaccaucuggaccagcggcagcagcaucagcuucugcggcgugaacagcgacaccgccaacuggagcuggcccgacggcgccgagcugcccuucaccaucgacaaguga

SEQ ID NO: 178101 - RNA, 1413 nt, Artificial Sequence
  derived and/or modified CDS sequence (opt4) from neuraminidase__InfluenzaA__ADC45771
augaaccccaaccagaagaucaucaccaucggcagcaucagcaucgccaucggcaucaucagccugaugcugcagaucggcaacaucaucagcaucugggccagccacagcauccagaccggcagccagaacaacaccggcaucugcaaccagagaaucaucaccuacgagaacagcaccugggugaaccacaccuacgugaacaucaacaacaccaacgugguggccggcgaggacaagaccagcgugacccuggccggcaacagcagccugugcagcaucagcggcugggccaucuacaccaaggacaacagcaucagaaucggcagcaagggcgacguguucgugaucagagagcccuucaucagcugcagccaccuggagugcagaaccuucuuccugacccagggcgcccugcugaacgacaagcacagcaacggcaccgugaaggacagaagccccuacagagcccugaugagcugcccccugggcgaggcccccagccccuacaacagcaaguucgagagcguggccuggagcgccagcgccugccacgacggcaugggcuggcugaccaucggcaucagcggccccgacaacggcgccguggccgugcugaaguacaacggcaucaucaccggcaccaucaagagcuggaagaagcagauccugagaacccaggagagcgagugcgugugcaugaacggcagcugcuucaccaucaugaccgacggccccagcaacaaggccgccagcuacaagaucuucaagaucgagaagggcaaggugaccaagagcaucgagcugaacgcccccaacuucuacuacgaggagugcagcugcuaccccgacaccggcaucgugaugugcgugugcagagacaacuggcacggcagcaacagacccugggugagcuucaaccagaaccuggacuaccagaucggcuacaucugcagcggcguguucggcgacaaccccagacccgaggacggcgagggcagcugcaaccccgugaccguggacggcgccaacggcgugaagggcuucagcuacaaguacggcaacggcguguggaucggcagaaccaagagcaacagacugagaaagggcuucgagaugaucugggaccccaacggcuggaccaacaccgacagcgacuucagcaugaagcaggacgugguggccaucaccgacuggagcggcuacagcggcagcuucgugcagcaccccgagcugaccggccuggacugcaucagacccugcuucuggguggagcuggugagaggccugcccagagagaacaccaccaucuggaccagcggcagcagcaucagcuucugcggcgugaacagcgacaccgccaacuggagcuggcccgacggcgccgagcugcccuucaccaucgacaaguga

SEQ ID NO: 178102 - RNA, 1413 nt, Artificial Sequence
  derived and/or modified CDS sequence (opt4) from neuraminidase__InfluenzaA__ADC45782
augaaccccaaccagaagaucaucaccaucggcagcaucagcaucgccaucggcaucaucagccugaugcugcagaucggcaacaucaucagcaucugggccagccacagcauccagaccggcagccagaacaacaccggcaucugcaaccagagaaucaucaccuacgagaacagcaccugggugaaccacaccuacgugaacaucaacaacaccaacgugguggccggcgaggacaagaccagcgugacccuggccggcaacagcagccugugcagcaucagcggcugggccaucuacaccaaggacaacagcaucagaaucggcagcaagggcgacguguucgugaucagagagcccuucaucagcugcagccaccuggagugcagaaccuucuuccugacccagggcgcccugcugaacgacaagcacagcaacagaaccgugaaggacagaagccccuacagagcccugaugagcugcccccugggcgaggcccccagccccuacaacagcaaguucgagagcguggccuggagcgccagcgccugccacgacggcaugggcuggcugaccaucggcaucagcggccccgacaacggcgccguggccgugcugaaguacaacggcaucaucaccggcaccaucaagagcuggaagaagcagauccugagaacccaggagagcgagugcgugugcgugaacggcagcugcuucaccaucaugaccgacggccccagcaacaaggccgccagcuacaagaucuucaagaucgagaagggcaaggugaccaagagcaucgagcugaacgcccccaacuucuacuacgaggagugcagcugcuaccccgacaccggcaucgugaugugcgugugcagagacaacuggcacggcagcaacagacccugggugagcuucaaccagaaccuggacuaccagaucggcuacaucugcagcggcguguucggcgacaaccccagacccgaggacggcgagggcagcugcaaccccgugaccguggacggcgccaacggcgugaagggcuucagcuacaaguacggcaacggcguguggaucggcagaaccaagagcaacagacugagaaagggcuucgagaugaucugggaccccaacggcuggaccaacaccgacagcgacuucagcgugaagcaggacgugguggccaucaccgacuggagcggcuacagcggcagcuucgugcagcaccccgagcugaccggccuggacugcaucagacccugcuucuggguggagcuggugagaggccugcccagagagaacaccaccaucuggaccagcggcagcagcaucagcuucugcggcgugaacagcgacaccgccaacuggagcuggcccgacggcgccgagcugcccuucaccaucgacaaguga

SEQ ID NO: 178103 - RNA, 1413 nt, Artificial Sequence
  derived and/or modified CDS sequence (opt4) from neuraminidase__InfluenzaA__ADC45804
augaaccccaaccagaagaucaucaccaucggcagcaucagcaucgccaucggcaucaucagccugaugcugcagaucggcaacaucaucagcaucugggccagccacagcauccagaccggcagccagaacaacaccggcaucugcaaccagagaaucaucaccuacgagaacagcaccugggugaaccacaccuacgugaacaucaacaacaccaacgugguggccggcgaggacaagaccagcgugacccuggccggcaacagcagccugugcagcaucagcggcugggccaucuacaccaaggacaacagcaucagaaucggcagcaagggcgacguguucgugaucagagagcccuucaucagcugcagccaccuggagugcagaaccuucuuccugacccagggcgcccugcugaacgacaagcacagcaacggcaccgugaaggacagaagccccuacagagcccugaugagcugcccccugggcgaggcccccagccccuacaacagcaaguucgagagcguggccuggagcgccagcgccugccacgacggcaugggcuggcugaccaucggcaucagcggccccgacaacggcgccguggccgugcugaaguacaacggcaucaucaccggcaccaucaagagcuggaagaagcagauccugagaacccaggagagcgagugcgugugcaugaacggcagcugcuucaccaucaugaccgacggccccagcaacaaggccgccagcuacaagaucuucaagaucgagaagggcaagaucaccaagagcaucgagcugaacgcccccaacuucuacuacgaggagugcagcugcuaccccgacaccggcaucgugaugugcgugugcagagacaacuggcacggcagcaacagacccugggugagcuucaaccagaaccuggacuaccagaucggcuacaucugcagcggcguguucggcgacaaccccagacccgaggacggcgagggcagcugcaaccccgugaccguggacggcgccaacggcgugaagggcuucagcuacaaguacggcaacggcguguggaucggcagaaccaagagcaacagacugagaaagggcuucgagaugaucugggaccccaacggcuggaccaacaccgacagcgacuucagcgugaagcaggacgugguggccaucaccgacuggagcggcuacagcggcagcuucgugcagcaccccgagcugaccggccuggacugcaucagacccugcuucuggguggagcuggugagaggccugcccagagagaacaccaccaucuggaccagcggcagcagcaucagcuucugcggcgugaacagcgacaccgccaacuggagcuggcccgacggcgccgagcugcccuucaccaucgacaaguga

SEQ ID NO: 178104 - RNA, 1413 nt, Artificial Sequence
  derived and/or modified CDS sequence (opt4) from neuraminidase__InfluenzaA__ADC45815
augaaccccaaccagaagaucaucaccaucggcagcaucagcaucgccaucggcaucaucagccugaugcugcagaucggcaacaucaucagcaucugggccagccacagcauccagaccggcagccagaacaacaccggcaucugcaaccagagaaucaucaccuacgagaacagcaccugggugaaccacaccuacgugaacaucaacaacaccaacgugguggccggcgaggacaagaccagcgugacccuggccggcaacagcagccugugcagcaucagcggcugggccaucuacaccaaggacaacagcaucagaaucggcagcaagggcgacguguucgugaucagagagcccuucaucagcugcagccaccuggagugcagaaccuucuuccugacccagggcgcccugcugaacgacaagcacagcaacggcaccgugaaggacagaagccccuacagagcccugaugagcugcccccugggcgaggcccccagccccuacaacagcaaguucgagagcguggccuggagcgccagcgccugccacgacggcaugggcuggcugaccaucggcaucagcggccccgacaacggcgccguggccgugcugaaguacaacggcaucaucaccggcaccgugaagagcuggaagaagcagauccugagaacccaggagagcgagugcgugugcaugaacggcagcugcuucaccaucaugaccgacggccccagcaacaaggccgccagcuacaagaucuucaagaucgagaagggcaaggugaccaagagcaucgagcugaacgcccccaacuucuacuacgaggagugcagcugcuaccccgacaccggcauggugaugugcgugugcagagacaacuggcacggcagcaacagacccugggugagcuucaaccagaaccuggacuaccagaucggcuacaucugcagcggcguguucggcgacaaccccagacccgaggacggcgagggcagcugcaaccccgugaccguggacggcgccaacggcgugaagggcuucagcuacaaguacggcaacggcguguggaucggcagaaccaagagcaacagacugagaaagggcuucgagaugaucugggaccccaacggcuggaccaacaccgacagcgacuucagcgugaagcaggacgugguggccaucaccgacuggagcggcuacagcggcagcuucgugcagcaccccgagcugaccggccuggacugcaucagacccugcuucuggguggagcuggugagaggccugcccagagagaacaccaccaucuggaccagcggcagcagcaucagcuucugcggcgugaacagcgacaccgccaacuggagcuggcccgacggcgccgagcugcccuucaccaucgacaaguga

SEQ ID NO: 178105 - RNA, 1413 nt, Artificial Sequence; identical to SEQ ID NO: 177521
  derived and/or modified CDS sequence (opt4) from neuraminidase__InfluenzaA__ADC45837

SEQ ID NO: 178106 - RNA, 1413 nt, Artificial Sequence; identical to SEQ ID NO: 177521
  derived and/or modified CDS sequence (opt4) from neuraminidase__InfluenzaA__ADC45848

SEQ ID NO: 178107 - RNA, 1410 nt, Artificial Sequence; identical to SEQ ID NO: 176798
  derived and/or modified CDS sequence (opt4) from neuraminidase__InfluenzaA__ADC53559

SEQ ID NO: 178108 - RNA, 1410 nt, Artificial Sequence; identical to SEQ ID NO: 176798
  derived and/or modified CDS sequence (opt4) from neuraminidase__InfluenzaA__ADD14088

SEQ ID NO: 178109 - RNA, 1410 nt, Artificial Sequence; identical to SEQ ID NO: 176798
  derived and/or modified CDS sequence (opt4) from neuraminidase__InfluenzaA__ADD14090

SEQ ID NO: 178110 - RNA, 1410 nt, Artificial Sequence; identical to SEQ ID NO: 176798
  derived and/or modified CDS sequence (opt4) from neuraminidase__InfluenzaA__ADD14094

SEQ ID NO: 178111 - RNA, 1410 nt, Artificial Sequence; identical to SEQ ID NO: 176798
  derived and/or modified CDS sequence (opt4) from neuraminidase__InfluenzaA__ADD14096

SEQ ID NO: 178112 - RNA, 1410 nt, Artificial Sequence; identical to SEQ ID NO: 176798
  derived and/or modified CDS sequence (opt4) from neuraminidase__InfluenzaA__ADD14098

SEQ ID NO: 178113 - RNA, 1410 nt, Artificial Sequence; identical to SEQ ID NO: 176798
  derived and/or modified CDS sequence (opt4) from neuraminidase__InfluenzaA__ADD14100

SEQ ID NO: 178114 - RNA, 1410 nt, Artificial Sequence; identical to SEQ ID NO: 176798
  derived and/or modified CDS sequence (opt4) from neuraminidase__InfluenzaA__ADD14102

SEQ ID NO: 178115 - RNA, 1410 nt, Artificial Sequence; identical to SEQ ID NO: 176798
  derived and/or modified CDS sequence (opt4) from neuraminidase__InfluenzaA__ADD14104

SEQ ID NO: 178116 - RNA, 1410 nt, Artificial Sequence; identical to SEQ ID NO: 176798
  derived and/or modified CDS sequence (opt4) from neuraminidase__InfluenzaA__ADD14106

SEQ ID NO: 178117 - RNA, 1410 nt, Artificial Sequence; identical to SEQ ID NO: 176798
  derived and/or modified CDS sequence (opt4) from neuraminidase__InfluenzaA__ADD14110

SEQ ID NO: 178118 - RNA, 1410 nt, Artificial Sequence; identical to SEQ ID NO: 176798
  derived and/or modified CDS sequence (opt4) from neuraminidase__InfluenzaA__ADD14112

SEQ ID NO: 178119 - RNA, 1410 nt, Artificial Sequence; identical to SEQ ID NO: 177768
  derived and/or modified CDS sequence (opt4) from neuraminidase__InfluenzaA__ADD14114

SEQ ID NO: 178120 - RNA, 1410 nt, Artificial Sequence; identical to SEQ ID NO: 176798
  derived and/or modified CDS sequence (opt4) from neuraminidase__InfluenzaA__ADD14116

SEQ ID NO: 178121 - RNA, 1410 nt, Artificial Sequence; identical to SEQ ID NO: 176798
  derived and/or modified CDS sequence (opt4) from neuraminidase__InfluenzaA__ADD14118

SEQ ID NO: 178122 - RNA, 1410 nt, Artificial Sequence; identical to SEQ ID NO: 176798
  derived and/or modified CDS sequence (opt4) from neuraminidase__InfluenzaA__ADD14120

SEQ ID NO: 178123 - RNA, 1410 nt, Artificial Sequence; identical to SEQ ID NO: 176798
  derived and/or modified CDS sequence (opt4) from neuraminidase__InfluenzaA__ADD14122

SEQ ID NO: 178124 - RNA, 1410 nt, Artificial Sequence; identical to SEQ ID NO: 176798
  derived and/or modified CDS sequence (opt4) from neuraminidase__InfluenzaA__ADD14124

SEQ ID NO: 178125 - RNA, 1410 nt, Artificial Sequence; identical to SEQ ID NO: 177857
  derived and/or modified CDS sequence (opt4) from neuraminidase__InfluenzaA__ADD14126

SEQ ID NO: 178126 - RNA, 1410 nt, Artificial Sequence; identical to SEQ ID NO: 176798
  derived and/or modified CDS sequence (opt4) from neuraminidase__InfluenzaA__ADD14128

SEQ ID NO: 178127 - RNA, 1410 nt, Artificial Sequence; identical to SEQ ID NO: 176798
  derived and/or modified CDS sequence (opt4) from neuraminidase__InfluenzaA__ADD14130

SEQ ID NO: 178128 - RNA, 1410 nt, Artificial Sequence; identical to SEQ ID NO: 176798
  derived and/or modified CDS sequence (opt4) from neuraminidase__InfluenzaA__ADD14132

SEQ ID NO: 178129 - RNA, 1410 nt, Artificial Sequence; identical to SEQ ID NO: 176798
  derived and/or modified CDS sequence (opt4) from neuraminidase__InfluenzaA__ADD14134

SEQ ID NO: 178130 - RNA, 1410 nt, Artificial Sequence; identical to SEQ ID NO: 176798
  derived and/or modified CDS sequence (opt4) from neuraminidase__InfluenzaA__ADD14136

SEQ ID NO: 178131 - RNA, 1410 nt, Artificial Sequence; identical to SEQ ID NO: 176798
  derived and/or modified CDS sequence (opt4) from neuraminidase__InfluenzaA__ADD14138

SEQ ID NO: 178132 - RNA, 1410 nt, Artificial Sequence; identical to SEQ ID NO: 176798
  derived and/or modified CDS sequence (opt4) from neuraminidase__InfluenzaA__ADD14142

SEQ ID NO: 178133 - RNA, 1410 nt, Artificial Sequence; identical to SEQ ID NO: 176798
  derived and/or modified CDS sequence (opt4) from neuraminidase__InfluenzaA__ADD14144

SEQ ID NO: 178134 - RNA, 1410 nt, Artificial Sequence; identical to SEQ ID NO: 176798
  derived and/or modified CDS sequence (opt4) from neuraminidase__InfluenzaA__ADD14146

SEQ ID NO: 178135 - RNA, 1410 nt, Artificial Sequence; identical to SEQ ID NO: 176798
  derived and/or modified CDS sequence (opt4) from neuraminidase__InfluenzaA__ADD14148

SEQ ID NO: 178136 - RNA, 1410 nt, Artificial Sequence
  derived and/or modified CDS sequence (opt4) from neuraminidase__InfluenzaA__ADD14150
augaaccccaaccagaagaucaucaccaucggcagcgugugcaugaccaucggcauggccaaccugauccugcagaucggcaacaucaucagcaucuggaucagccacagcauccagcugggcaaccagaaccagaucgagaccugcaaccagagcgugaucaccuacgagaacaacaccugggugaaccagaccuacgugaacaucagcaacaccaacuucgccgccggccagagcguggugagcgugaagcuggccggcaacagcagccugugccccgugagcggcugggccaucuacagcaaggacaacagcaucagaaucggcagcaagggcgacguguucgugaucagagagcccuucaucagcugcagcccccuggagugcagaaccuucuuccugacccagggcgcccugcugaacgacaagcacagcaacggcaccaucaaggacagaagccccuacagaacccugaugagcugccccaucggcgaggugcccagccccuacaacagcagauucgagagcguggccuggagcgccagcgccugccacgacggcaucaacuggcugaccaucggcaucagcggccccgacaacggcgccguggccgugcugaaguacaacggcaucaucaccgacaccaucaagagcuggagaaacaacauccugagaacccaggagagcgagugcgccugcgugaacggcagcugcuucaccgugaugaccgacggccccagcgacggccaggccagcuacaagaucuucagaaucgagaagggcaagaucgugaagagcguggagaugaacgcccccaacuaccacuacgaggagugcagcugcuaccccgacagcagcgagaucaccugcgugugcagagacaacuggcacggcagcaacagacccugggugagcuucaaccagaaccuggaguaccagaucggcuacaucugcagcggcaucuucggcgacaaccccagacccaacgacaagaccggcagcugcggccccgugagcagcaacggcgccaacggcgugaagggcuucagcuucaaguacggcaacggcguguggaucggcagaaccaagagcaucagcagcagaaacggcuucgagaugaucugggaccccaacggcuggaccggcaccgacgacaacuucagcaucaagcaggacaucgugggcaucaacgaguggagcggcuacagcggcagcuucgugcagcaccccgagcugaccggccuggacugcaucagacccugcuucuggguggagcugaucagaggcagacccaaggagaacaccaucuggaccagcggcagcagcaucagcuucugcggcgugaacagcgacaccgugggcuggagcuggcccgacggcgccgagcugcccuucaccaucgacaaguga

SEQ ID NO: 178137 - RNA, 1410 nt, Artificial Sequence; identical to SEQ ID NO: 176798
  derived and/or modified CDS sequence (opt4) from neuraminidase__InfluenzaA__ADD14152

SEQ ID NO: 178138 - RNA, 1410 nt, Artificial Sequence
  derived and/or modified CDS sequence (opt4) from neuraminidase__InfluenzaA__ADD14154
augaaccccaaccagaagaucaucaccaucggcagcgugugcaugaccaucggcauggccaaccugauccugcagaucggcaacaucaucagcaucuggaucagccacagcauccagcugggcaaccagaaccagaucgagaccugcaaccagagcgugaucaccuacgagaacaacaccugggugaaccagaccuacgugaacaucagcaucaccaacuucgccgccggccagagcguggugagcgugaagcuggccggcaacagcagccugugccccgugagcggcugggccaucuacagcaaggacaacagcaucagaaucggcagcaagggcgacguguucgugaucagagagcccuucaucagcugcagcccccuggagugcagaaccuucuuccugacccagggcgcccugcugaacgacaagcacagcaacggcaccaucaaggacagaagccccuacagaacccugaugagcugccccaucggcgaggugcccagccccuacaacagcagauucgagagcguggccuggagcgccagcgccugccacgacggcaucaacuggcugaccaucggcaucagcggccccgacaacggcgccguggccgugcugaaguacaacggcaucaucaccgacaccaucaagagcuggagaaacaacauccugagaacccaggagagcgagugcgccugcgugaacggcagcugcuucaccgugaugaccgacggccccagcgacggccaggccagcuacaagaucuucagaaucgagaagggcaagaucgugaagagcguggagaugaacgcccccaacuaccacuacgaggagugcagcugcuaccccgacagcagcgagaucaccugcgugugcagagacaacuggcacggcagcaacagacccugggugagcuucaaccagaaccuggaguaccagaucggcuacaucugcagcggcaucuucggcgacaaccccagacccaacgacaagaccggcagcugcggccccgugagcagcaacggcgccaacggcgugaagggcuucagcuucaaguacggcaacggcguguggaucggcagaaccaagagcaucagcagcagaaacggcuucgagaugaucugggaccccaacggcuggaccggcaccgacaacaacuucagcaucaagcaggacaucgugggcaucaacgaguggagcggcuacagcggcagcuucgugcagcaccccgagcugaccggccuggacugcaucagacccugcuucuggguggagcugaucagaggcagacccaaggagaacaccaucuggaccagcggcagcagcaucagcuucugcggcgugaacagcgacaccgugggcuggagcuggcccgacggcgccgagcugcccuucaccaucgacaaguga

SEQ ID NO: 178139 - RNA, 1410 nt, Artificial Sequence; identical to SEQ ID NO: 176798
  derived and/or modified CDS sequence (opt4) from neuraminidase__InfluenzaA__ADD14156

SEQ ID NO: 178140 - RNA, 1410 nt, Artificial Sequence; identical to SEQ ID NO: 176798
  derived and/or modified CDS sequence (opt4) from neuraminidase__InfluenzaA__ADD14158

SEQ ID NO: 178141 - RNA, 1410 nt, Artificial Sequence; identical to SEQ ID NO: 176798
  derived and/or modified CDS sequence (opt4) from neuraminidase__InfluenzaA__ADD14164

SEQ ID NO: 178142 - RNA, 1410 nt, Artificial Sequence; identical to SEQ ID NO: 176798
  derived and/or modified CDS sequence (opt4) from neuraminidase__InfluenzaA__ADD14174

SEQ ID NO: 178143 - RNA, 1410 nt, Artificial Sequence; identical to SEQ ID NO: 176798
  derived and/or modified CDS sequence (opt4) from neuraminidase__InfluenzaA__ADD14184

SEQ ID NO: 178144 - RNA, 1410 nt, Artificial Sequence; identical to SEQ ID NO: 176798
  derived and/or modified CDS sequence (opt4) from neuraminidase__InfluenzaA__ADD14194

SEQ ID NO: 178145 - RNA, 1410 nt, Artificial Sequence; identical to SEQ ID NO: 177152
  derived and/or modified CDS sequence (opt4) from neuraminidase__InfluenzaA__ADD14204

SEQ ID NO: 178146 - RNA, 1410 nt, Artificial Sequence
  derived and/or modified CDS sequence (opt4) from neuraminidase__InfluenzaA__ADD21449
augaaccccaaccagagaaucaucaccaucggcaccgccugccugaucaucggcaucgugagccugcugcugcagaucggcaacaucgugagccuguggaucagccacagcauccagaccggcgagaagaaccacagcgagaccugcaacagaaacaccaucaccuacgagaacagcaccugggugaaccagaccuacgugaacaucagcaacaucaacaucgccggcggccagggcguggccagcaucauccuggccggcaacagcagccugugccccgugaacggcugggccaucuacagcaaggacaacagcaucagaaucggcagcaagggcgacaucuucgugaucagagagcccuucaucagcugcagccaccuggagugcagaaccuucuuccugacccagggcgcccugcugaacgacagacacagcaacggcaccgugaaggacagaagccccuacagaacccugaugagcugccccaucggcgaggcccccagccccuacaacagcaaguucgagagcguggccuggagcgccagcgccugccacgacggcaugggcuggcugaccaucggcaucagcggccccgacaacggcgccguggccgugcugaaguacaacggcaucaucaccgacaccaucaagagcuggagaaacagaauccugagaacccaggagagcgagugcgugugcaucaacggcagcugcuucaccaucaugaccgacggccccagcaacggccaggccagcuacaagaucuucaagauggagagaggcaagaucaucaagagcguggagcuggacgcccccaacuaccacuacgaggagugcagcugcuaccccgacaccggcaagguggugugcgugugcagagacaacuggcacgccagcaacagacccugggugagcuucgaccagaaccuggacuaccagaucggcuacaucagcagcggcguguucggcgacaaccccagaagcaacgacggcaagggcaacugcggccccgugcugagcaacggcgccaacggcgugaagggccugagcuucagauacggcaacggcguguggaucggcagaaccaagagcaccaacagcagaagcggcuucgagaugaucugggaccccaacggcuggaccgagaccgacagcaacuucagcaugaagcaggacaucaucgcccugaccgacuggagcggcuacagcggcagcuucgugcagcaccccgagcugaccggcaugaacugcaucagacccugcuucuggguggagcugaucagaggccagcccaagcagagcaccaucuggaccagcggcagcagcaucagcuucugcggcguggacagcgagaccgccagcuggagcuggcccgacggcgccgaccugcccuucaccaucgacaaguga

SEQ ID NO: 178147 - RNA, 1413 nt, Artificial Sequence
  derived and/or modified CDS sequence (opt4) from neuraminidase__InfluenzaA__ADD21469
augaaccccaaccagaagaucaucaccaucggcagcaucagcaucgccaucggcaucaucagccugaugcugcagaucggcaacaucaucagcgugugggccagccacagcauccagaccggcagccagaaccacaccggcaucugcaaccagagaaucaucaccuacgagaacagcaccugggugaaccacaccuacgugaacaucaacaacaccaacgugguggccggcaaggacaagaccagcgugacccuggccggcaacagcagccugugcagcaucagcggcugggccaucuacaccaaggacaacagcaucagaaucggcagcaagggcgacguguucgugaucagagagcccuucaucagcugcagccaccuggagugcagaaccuucuuccugacccagggcgcccugcugaacgacaagcacagcaacggcaccgugaaggacagaagccccuacagagcccugaugagcugcccccugggcgaggcccccagccccuacaacagcaaguucgagagcguggccuggagcgccagcgccugccacgacggcaugggcuggcugaccaucggcaucagcggccccgacaacggcgccguggccgugcugaaguacaacggcaucaucaccgagaccaucaagagcuggaagaagagaaugcugagaacccaggagagcgagugcaucugcgugaacggcagcugcuucaccaucaugaccgacggccccagcaacggcgccgccagcuacaagaucuucaagaucgagaagggcaaggugaccaagagcaucgagcugaacgcccccaacuuccacuacgaggagugcagcugcuaccccgacaccggcaccgugaugugcgugugcagagacaacuggcacggcagcaacagacccugggugagcuucaaccagaaccuggacuaccagaucggcuacaucugcagcggcguguucggcgacaaccccagacccaaggacggcgagggcagcugcaaccccgugaccguggacggcgccgacggcgugaagggcuucagcuacaaguacggcaacggcguguggaucggcagaaccaagagcaacagacugagaaagggcuucgagaugaucugggaccccaacggcuggaccgacaccgacagcaacuucagcgugaagcaggacgugguggccaucaccgacuggagcggcuacagcggcagcuucgugcagcaccccgagcugaccggccuggacugcaucagacccugcuucuggguggagcuggugagaggccugcccagagagaacaccaccaucuggaccagcggcagcagcaucagcuucugcggcgugaacagcgacaccgccaacuggagcuggcccgacggcgccgagcugcccuucaccaucgacaaguga

SEQ ID NO: 178148 - RNA, 1410 nt, Artificial Sequence; identical to SEQ ID NO: 176798
  derived and/or modified CDS sequence (opt4) from neuraminidase__InfluenzaA__ADD21747

SEQ ID NO: 178149 - RNA, 1410 nt, Artificial Sequence
  derived and/or modified CDS sequence (opt4) from neuraminidase__InfluenzaA__ADD21767
augaaccccaaccagaagaucaucaucaucggcagcgugugcaugaccaucggcauggccaaccugauccugcagaucggcaacaucaucagcaucuggaucagccacagcauccagcugggcaaccagaaccagaucgagaccugcaaccagagcgugaucaccuacgagaacaacaccugggugaaccagaccuacgugaacaucagcaacaccaacuucgccgccggccagagcguggugagcgugaagcuggccggcaacagcagccugugccccgugagcggcugggccaucuacagcaaggacaacagcaucagaaucggcagcaagggcgacguguucgugaucagagagcccuucaucagcugcagcccccuggagugcagaaccuucuuccugacccagggcgcccugcugaacgacaagcacagcaacggcaccaucaaggacagaagccccuacagaacccugaugagcugccccaucggcgaggugcccagccccuacaacagcagauucgagagcguggccuggagcgccagcgccugccacgacggcaucaacuggcugaccaucggcaucagcggccccgacaacggcgccguggccgugcugaaguacaacggcaucaucaccgacaccaucaagagcuggagaaacaacauccugagaacccaggagagcgagugcgccugcgugaacggcagcugcuucaccgugaugaccgacggccccagcgacggccaggccagcuacaagaucuucagaaucgagaagggcaagaucgugaagagcguggagaugaacgcccccaacuaccacuacgaggagugcagcugcuaccccgacagcagcgagaucaccugcgugugcagagacaacuggcacggcagcaacagacccugggugagcuucaaccagaaccuggaguaccagaucggcuacaucugcagcggcaucuucggcgacaaccccagacccaacgacaagaccggcagcugcggccccgugagcagcaacggcgccaacggcgugaagggcuucagcuucaaguacggcaacggcguguggaucggcagaaccaagagcaucagcagcagaaacggcuucgagaugaucugggaccccaacggcuggaccggcaccgacaacaacuucagcaucaagcaggacaucgugggcaucaacgaguggagcggcuacagcggcagcuucgugcagcaccccgagcugaccggccuggacugcaucagacccugcuucuggguggagcugaucagaggcagacccaaggagaacaccaucuggaccagcggcagcagcaucagcuucugcggcgugaacagcgacaccgugggcuggagcuggcccgacggcgccgagcugcccuucaccaucgacaaguga

SEQ ID NO: 178150 - RNA, 1410 nt, Artificial Sequence
  derived and/or modified CDS sequence (opt4) from neuraminidase__InfluenzaA__ADD21777
augaaccccaaccagaagaucaucaccaucggcagcgugugcaugaccaucggcauggccaaccugauccugcagaucggcaacaucaucagcaucuggaucagccacagcauccagcugggcaaccagaaccagaucgagaccugcaaccagagcgugaucaccuacgagaacaacaccugggugaaccagaccuacgugaacaucagcaacaccaacuucgccgccggccagagcguggugagcgugaagcuggccggcaacagcagccugugccccgugagcggcugggccaucuacagcaaggacaacagcaucagaaucggcagcaagggcgacguguucgugaucagagagcccuucaucagcugcagcccccuggagugcagaaccuucuuccugacccagggcgcccugcugaacgacaagcacagcaacggcaccaucaaggacagaagccccuacagaacccugaugagcugccccaucggcgaggugcccagccccuacaacagcagauucgagagcguggccuggagcgccagcgccugccacgacggcaucaacuggcugaccaucggcaucagcggccccgacaacggcgccguggccgugaucaaguacaacggcaucaucaccgacaccaucaagagcuggagaaacaacauccugagaacccaggagagcgagugcgccugcgugaacggcagcugcuucaccgugaugaccgacggccccagcgacggccaggccagcuacaagaucuucagaaucgagaagggcaagaucgugaagagcguggagaugaacgcccccaacuaccacuacgaggagugcagcugcuaccccgacagcagcgagaucaccugcgugugcagagacaacuggcacggcagcaacagacccugggugagcuucaaccagaaccuggaguaccagaucggcuacaucugcagcggcaucuucggcgacaaccccagacccaacgacaagaccggcagcugcggccccgugagcagcaacggcgccaacggcgugaagggcuucagcuucaaguacggcaacggcguguggaucggcagaaccaagagcaucagcagcagaaacggcuucgagaugaucugggaccccaacggcuggaccggcaccgacaacaacuucagcaucaagcaggacaucgugggcaucaacgaguggagcggcuacagcggcagcuucgugcagcaccccgagcugaccggccuggacugcaucagacccugcuucuggguggagcugaucagaggcagacccaaggagaacaccaucuggaccagcggcagcagcaucagcuucugcggcgugaacagcgacaccgugggcuggagcuggcccgacggcgccgagcugcccuucaccaucgacaaguga

SEQ ID NO: 178151 - RNA, 1410 nt, Artificial Sequence; identical to SEQ ID NO: 176798
  derived and/or modified CDS sequence (opt4) from neuraminidase__InfluenzaA__ADD21787

SEQ ID NO: 178152 - RNA, 1410 nt, Artificial Sequence; identical to SEQ ID NO: 176798
  derived and/or modified CDS sequence (opt4) from neuraminidase__InfluenzaA__ADD21797

SEQ ID NO: 178153 - RNA, 1410 nt, Artificial Sequence; identical to SEQ ID NO: 176798
  derived and/or modified CDS sequence (opt4) from neuraminidase__InfluenzaA__ADD21817

SEQ ID NO: 178154 - RNA, 1410 nt, Artificial Sequence; identical to SEQ ID NO: 176798
  derived and/or modified CDS sequence (opt4) from neuraminidase__InfluenzaA__ADD21827

SEQ ID NO: 178155 - RNA, 1410 nt, Artificial Sequence; identical to SEQ ID NO: 176798
  derived and/or modified CDS sequence (opt4) from neuraminidase__InfluenzaA__ADD21837

SEQ ID NO: 178156 - RNA, 1410 nt, Artificial Sequence; identical to SEQ ID NO: 176798
  derived and/or modified CDS sequence (opt4) from neuraminidase__InfluenzaA__ADD21847

SEQ ID NO: 178157 - RNA, 1410 nt, Artificial Sequence; identical to SEQ ID NO: 176798
  derived and/or modified CDS sequence (opt4) from neuraminidase__InfluenzaA__ADD21857

SEQ ID NO: 178158 - RNA, 1410 nt, Artificial Sequence; identical to SEQ ID NO: 176798
  derived and/or modified CDS sequence (opt4) from neuraminidase__InfluenzaA__ADD21867

SEQ ID NO: 178159 - RNA, 1410 nt, Artificial Sequence; identical to SEQ ID NO: 176798
  derived and/or modified CDS sequence (opt4) from neuraminidase__InfluenzaA__ADD21877

SEQ ID NO: 178160 - RNA, 1410 nt, Artificial Sequence; identical to SEQ ID NO: 176798
  derived and/or modified CDS sequence (opt4) from neuraminidase__InfluenzaA__ADD21897

SEQ ID NO: 178161 - RNA, 1410 nt, Artificial Sequence; identical to SEQ ID NO: 176798
  derived and/or modified CDS sequence (opt4) from neuraminidase__InfluenzaA__ADD22494

SEQ ID NO: 178162 - RNA, 1410 nt, Artificial Sequence; identical to SEQ ID NO: 176798
  derived and/or modified CDS sequence (opt4) from neuraminidase__InfluenzaA__ADD22504

SEQ ID NO: 178163 - RNA, 1410 nt, Artificial Sequence; identical to SEQ ID NO: 176798
  derived and/or modified CDS sequence (opt4) from neuraminidase__InfluenzaA__ADD22514

SEQ ID NO: 178164 - RNA, 1410 nt, Artificial Sequence; identical to SEQ ID NO: 176798
  derived and/or modified CDS sequence (opt4) from neuraminidase__InfluenzaA__ADD22524

SEQ ID NO: 178165 - RNA, 1410 nt, Artificial Sequence
  derived and/or modified CDS sequence (opt4) from neuraminidase__InfluenzaA__ADD22534
augaaccccaaccagaagaucaucaccaucggcagcgugugcaugaccaucggcauggccaaccugauccugcagaucggcaacaucaucagcaucuggaucagccacagcauccagcugggcaaccagaaccagaucgagaccugcaaccagagcgugaucaccuacgagaacaacaccugggugaaccagaccuacgugaacaucagcaacaccaacuucgccgccggccagagcguggugagcgugaagcuggccggcaacagcagccugugccccgugagcggcugggccaucuacagcaaggacaacagcaucagaaucggcagcaagggcgacguguucgugaucagagagcccuucaucagcugcagcccccuggagugcagaaccuucuuccugacccagggcgcccugcugaacgacaagcacagcaacggcaccaucaaggacagaagccccuacagaacccugaugagcugccccaucggcgaggugcccagccccuacaacagcagauucgagagcguggccuggagcgccagcgccugccacgacggcaucaacuggcugaccaucggcaucagcggccccgacaacggcgccguggccgugcugaaguacaacggcaucaucaccgacaccaucaagagcuggagaaacaacauccugagaacccaggagagcgagugcgccugcgugaacggcagcugcuucaccgugaugaccgacggccccagcgacggccaggccagcuacaagaucuucagaaucgagaagggcaagaucgugaagagcguggagaugaacgcccccaacuaccacuacgaggagugcagcugcuaccccgacagcagcgagaucaccugcgugugcagagacaacuggcacggcagcaacagacccugggugagcuucaaccagaaccuggaguaccagaucggcuacaucugcagcggcaucuucggcgacagccccagacccaacgacaagaccggcagcugcggccccgugagcagcaacggcgccaacggcgugaagggcuucagcuucaaguacggcaacggcguguggaucggcagaaccaagagcaucagcagcagaaacggcuucgagaugaucugggaccccaacggcuggaccggcaccgacaacaacuucagcaucaagcaggacaucgugggcaucaacgaguggagcggcuacagcggcagcuucgugcagcaccccgagcugaccggccuggacugcaucagacccugcuucuggguggagcugaucagaggcagacccaaggagaacaccaucuggaccagcggcagcagcaucagcuucugcggcgugaacagcgacaccgugggcuggagcuggcccgacggcgccgagcugcccuucaccaucgacaaguga

SEQ ID NO: 178166 - RNA, 1410 nt, Artificial Sequence; identical to SEQ ID NO: 176798
  derived and/or modified CDS sequence (opt4) from neuraminidase__InfluenzaA__ADD22544

SEQ ID NO: 178167 - RNA, 1410 nt, Artificial Sequence; identical to SEQ ID NO: 176798
  derived and/or modified CDS sequence (opt4) from neuraminidase__InfluenzaA__ADD22557

SEQ ID NO: 178168 - RNA, 1410 nt, Artificial Sequence; identical to SEQ ID NO: 176798
  derived and/or modified CDS sequence (opt4) from neuraminidase__InfluenzaA__ADD22567

SEQ ID NO: 178169 - RNA, 1410 nt, Artificial Sequence; identical to SEQ ID NO: 176798
  derived and/or modified CDS sequence (opt4) from neuraminidase__InfluenzaA__ADD22577

SEQ ID NO: 178170 - RNA, 1410 nt, Artificial Sequence; identical to SEQ ID NO: 176798
  derived and/or modified CDS sequence (opt4) from neuraminidase__InfluenzaA__ADD22587

SEQ ID NO: 178171 - RNA, 1410 nt, Artificial Sequence; identical to SEQ ID NO: 176798
  derived and/or modified CDS sequence (opt4) from neuraminidase__InfluenzaA__ADD22597

SEQ ID NO: 178172 - RNA, 1410 nt, Artificial Sequence; identical to SEQ ID NO: 176798
  derived and/or modified CDS sequence (opt4) from neuraminidase__InfluenzaA__ADD22617

SEQ ID NO: 178173 - RNA, 1410 nt, Artificial Sequence; identical to SEQ ID NO: 176798
  derived and/or modified CDS sequence (opt4) from neuraminidase__InfluenzaA__ADD22627

SEQ ID NO: 178174 - RNA, 1410 nt, Artificial Sequence; identical to SEQ ID NO: 176798
  derived and/or modified CDS sequence (opt4) from neuraminidase__InfluenzaA__ADD22637

SEQ ID NO: 178175 - RNA, 1410 nt, Artificial Sequence; identical to SEQ ID NO: 176798
  derived and/or modified CDS sequence (opt4) from neuraminidase__InfluenzaA__ADD22648

SEQ ID NO: 178176 - RNA, 1410 nt, Artificial Sequence; identical to SEQ ID NO: 176798
  derived and/or modified CDS sequence (opt4) from neuraminidase__InfluenzaA__ADD22658

SEQ ID NO: 178177 - RNA, 1410 nt, Artificial Sequence; identical to SEQ ID NO: 176798
  derived and/or modified CDS sequence (opt4) from neuraminidase__InfluenzaA__ADD22668

SEQ ID NO: 178178 - RNA, 1410 nt, Artificial Sequence
  derived and/or modified CDS sequence (opt4) from neuraminidase__InfluenzaA__ADD22688
augaaccccaaccagaagaucaucaccaucggcagcgugugcaugaccaucggcauggccaaccugauccugcagaucggcaacaucaucagcaucuggaucagccacagcauccagcugggcaaccagaaccagaucgagaccugcaaccagagcgugaucaccuacgagaacaacaccugggugaaccagaccuacgugaacaucagcaacaccaacuucgccgccggccagagcguggugagcgugaagcuggccggcaacagcagccugugccccgugagcggcugggccaucuacagcaaggacaacagcaucagaaucggcagcaagggcgacguguucgugaucagagagcccuucaucagcugcagcccccuggagugcagaaccuucuuccugacccagggcgcccugcugaacgacaagcacagcaacggcaccaucaaggacagaagccccuacagaacccugaugagcugccccaucggcgaggugcccagccccuacaacagcagauucgagagcguggccuggagcgccagcgccugccacgacggcaucaacuggcugaccaucggcaucagcggccccgacaacggcgccguggccgugcugaaguacaacggcaucaucaccgacaccaucaagagcuggagaaacaacauccugagaacccaggagagcgagugcgccugcgugaacggcagcugcuucaccgugaugaccgacggccccagcgacggccaggccagcuacaagaucuucagaaucgagaagggcaagaucgugaagagcguggagaugaacgcccccaacuaccacuacgaggagugcagcugcuaccccgacagcagcgagaucaccugcgugugcagagacaacuggcacggcagcaacagacccugggugagcuucaaccagaaccuggaguaccagaucggcuacaucugcagcggcaucuucggcgacaaccccagacccaacgacaagaccggcagcugcggccccgugagcagcaacggcgccaacggcgugaagggcuucagcuucaaguacggcaacggcguguggaucggcagaaccaagagcaucagcagcagaaacggcuucgagaugaucugggaccccaacggcuggaccggcaccgacaacaacuucagcaucaagcaggacaucgugggcaucaacgaguggagcggcuacagcggcagcuucgugcagcaccccgagcugaccggccuggacugcaucagacccugcuucuggaucgagcugaucagaggcagacccaaggagaacaccaucuggaccagcggcagcagcaucagcuucugcggcgugaacagcgacaccgugggcuggagcuggcccgacggcgccgagcugcccuucaccaucgacaaguga

SEQ ID NO: 178179 - RNA, 1410 nt, Artificial Sequence; identical to SEQ ID NO: 176798
  derived and/or modified CDS sequence (opt4) from neuraminidase__InfluenzaA__ADD22698

SEQ ID NO: 178180 - RNA, 1410 nt, Artificial Sequence; identical to SEQ ID NO: 176798
  derived and/or modified CDS sequence (opt4) from neuraminidase__InfluenzaA__ADD22725

SEQ ID NO: 178181 - RNA, 1410 nt, Artificial Sequence; identical to SEQ ID NO: 176798
  derived and/or modified CDS sequence (opt4) from neuraminidase__InfluenzaA__ADD22735

SEQ ID NO: 178182 - RNA, 1410 nt, Artificial Sequence; identical to SEQ ID NO: 176798
  derived and/or modified CDS sequence (opt4) from neuraminidase__InfluenzaA__ADD22745

SEQ ID NO: 178183 - RNA, 1410 nt, Artificial Sequence
  derived and/or modified CDS sequence (opt4) from neuraminidase__InfluenzaA__ADD22755
augaaccccaaccagaagaucaucaccaucggcagcgugugcaugaccaucggcauggccaaccugauccugcagaucggcaacaucaucagcaucuggaucagccacagcauccagcugggcaaccagaaccagaucgagaccugcaaccagagcgugaucaccuacgagaacaacaccugggugaaccagaccuacgugaacaucagcaacaccaacuucgccgccggccagagcguggugagcgugaagcuggccggcaacagcagccugugcaccgugagcggcugggccaucuacagcaaggacaacagcaucagaaucggcagcaagggcgacguguucgugaucagagagcccuucaucagcugcagcccccuggagugcagaaccuucuuccugacccagggcgcccugcugaacgacaagcacagcaacggcaccaucaaggacagaagccccuacagaacccugaugagcugccccaucggcgaggugcccagccccuacaacagcagauucgagagcguggccuggagcgccagcgccugccacgacggcaucaacuggcugaccaucggcaucagcggccccgacaacggcgccguggccgugcugaaguacaacggcaucaucaccgacaccaucaagagcuggagaaacaacauccugagaacccaggagagcgagugcgccugcgugaacggcagcugcuucaccgugaugaccgacggccccagcgacggccaggccagcuacaagaucuucagaaucgagaagggcaagaucgugaagagcguggagaugaacgcccccaacuaccacuacgaggagugcagcugcuaccccgacagcagcgagaucaccugcgugugcagagacaacuggcacggcagcaacagacccugggugagcuucaaccagaaccuggaguaccagaucggcuacaucugcagcggcaucuucggcgacagccccagacccaacgacaagaccggcagcugcggccccgugagcagcaacggcgccaacggcgugaagggcuucagcuucaaguacggcaacggcguguggaucggcagaaccaagagcaucagcagcagaaacggcuucgagaugaucugggaccccaacggcuggaccggcaccgacaacaacuucagcaucaagcaggacaucgugggcaucaacgaguggagcggcuacagcggcagcuucgugcagcaccccgagcugaccggccuggacugcaucagacccugcuucuggguggagcugaucagaggcagacccaaggagaacaccaucuggaccagcggcagcagcaucagcuucugcggcgugaacagcgacaccgugggcuggagcuggcccgacggcgccgagcugcccuucaccaucgacaaguga

SEQ ID NO: 178184 - RNA, 1410 nt, Artificial Sequence
  derived and/or modified CDS sequence (opt4) from neuraminidase__InfluenzaA__ADD22765
augaaccccaaccagaagaucaucaccaucggcagcgugugcaugaccaucggcauggccaaccugauccugcagaucggcaacaucaucagcaucuggaucagccacagcauccagcugggcaaccagaaccagaucgagaccugcaaccagagcgugaucaccuacgagaacaacaccugggugaaccagaccuacgugaacaucagcaacaccaacuucgccgccggccagagcguggugagcgugaagcuggccggcaacagcagccugugccccgugagcggcugggccaucuacagcaaggacaacagcaucagaaucggcagcaagggcgacguguucgugaucagagagcccuucaucagcugcagcccccuggagugcagaaccuucuuccugacccagggcgcccugcugaacgacaagcacagcaacggcaccaucaaggacagaagccccuacagaacccugaugagcugccccaucggcgaggugcccagccccuacaacagcagauucgagagcguggccuggagcgccagcgccugccacgacggcaucaacuggcugaccaucggcaucagcggccccgacaacggcgccguggccgugcugaaguacaacggcaucaucaccgacaccaucaagagcuggagaaacaacauccugagaacccaggagagcgagugcgccugcgugaacggcagcugcuucaccgugaugaccgacggccccagcgacggccaggccagcuacaagaucuucagaaucgagaagggcaagaucgugaagagcguggagaugaacgcccccaacuaccacuacgaggagugcagcugcuaccccgacagcagcgagaucaccugcgugugcagagacaacuggcacggcagcaacagacccugggugagcuucaaccagaaccuggaguaccagaucggcuacaucugcagcggcaucuucggcgacaaccccagacccaacgacaagaccggcagcugcggccccgugagcagcaacggcgccaacggcgugaagggcuucagcuucaaguacggcaacggcguguggaucggcagaaccaagagcaucagcagcagaaacggcuucgagaugaucugggaccccaacggcuggaccggcaccgacaacaacuucagcaucaagcaggacaucgugggcaucaacgacuggagcggcuacagcggcagcuucgugcagcaccccgagcugaccggccuggacugcaucagacccugcuucuggguggagcugaucagaggcagacccaaggagaacaccaucuggaccagcggcagcagcaucagcuucugcggcgugaacagcgacaccgugggcuggagcuggcccgacggcgccgagcugcccuucaccaucgacaaguga

SEQ ID NO: 178185 - RNA, 1410 nt, Artificial Sequence; identical to SEQ ID NO: 176798
  derived and/or modified CDS sequence (opt4) from neuraminidase__InfluenzaA__ADD22775

SEQ ID NO: 178186 - RNA, 1410 nt, Artificial Sequence; identical to SEQ ID NO: 176798
  derived and/or modified CDS sequence (opt4) from neuraminidase__InfluenzaA__ADD22785

SEQ ID NO: 178187 - RNA, 1410 nt, Artificial Sequence; identical to SEQ ID NO: 176798
  derived and/or modified CDS sequence (opt4) from neuraminidase__InfluenzaA__ADD22795

SEQ ID NO: 178188 - RNA, 1410 nt, Artificial Sequence; identical to SEQ ID NO: 176798
  derived and/or modified CDS sequence (opt4) from neuraminidase__InfluenzaA__ADD22805

SEQ ID NO: 178189 - RNA, 1410 nt, Artificial Sequence; identical to SEQ ID NO: 176798
  derived and/or modified CDS sequence (opt4) from neuraminidase__InfluenzaA__ADD22815

SEQ ID NO: 178190 - RNA, 1410 nt, Artificial Sequence; identical to SEQ ID NO: 176798
  derived and/or modified CDS sequence (opt4) from neuraminidase__InfluenzaA__ADD22825

SEQ ID NO: 178191 - RNA, 1410 nt, Artificial Sequence; identical to SEQ ID NO: 176798
  derived and/or modified CDS sequence (opt4) from neuraminidase__InfluenzaA__ADD22835

SEQ ID NO: 178192 - RNA, 1410 nt, Artificial Sequence; identical to SEQ ID NO: 176798
  derived and/or modified CDS sequence (opt4) from neuraminidase__InfluenzaA__ADD22845

SEQ ID NO: 178193 - RNA, 1410 nt, Artificial Sequence; identical to SEQ ID NO: 176798
  derived and/or modified CDS sequence (opt4) from neuraminidase__InfluenzaA__ADD22855

SEQ ID NO: 178194 - RNA, 1410 nt, Artificial Sequence; identical to SEQ ID NO: 176798
  derived and/or modified CDS sequence (opt4) from neuraminidase__InfluenzaA__ADD22924

SEQ ID NO: 178195 - RNA, 1410 nt, Artificial Sequence; identical to SEQ ID NO: 176798
  derived and/or modified CDS sequence (opt4) from neuraminidase__InfluenzaA__ADD22934

SEQ ID NO: 178196 - RNA, 1410 nt, Artificial Sequence; identical to SEQ ID NO: 176798
  derived and/or modified CDS sequence (opt4) from neuraminidase__InfluenzaA__ADD22944

SEQ ID NO: 178197 - RNA, 1410 nt, Artificial Sequence; identical to SEQ ID NO: 176798
  derived and/or modified CDS sequence (opt4) from neuraminidase__InfluenzaA__ADD22954

SEQ ID NO: 178198 - RNA, 1410 nt, Artificial Sequence; identical to SEQ ID NO: 176798
  derived and/or modified CDS sequence (opt4) from neuraminidase__InfluenzaA__ADD22974

SEQ ID NO: 178199 - RNA, 1410 nt, Artificial Sequence; identical to SEQ ID NO: 176798
  derived and/or modified CDS sequence (opt4) from neuraminidase__InfluenzaA__ADD23075

SEQ ID NO: 178200 - RNA, 1410 nt, Artificial Sequence
  derived and/or modified CDS sequence (opt4) from neuraminidase__InfluenzaA__ADD23085
augaaccccaaccagaagaucaucaccaucggcagcgugugcaugaccaucggcauggccaaccugauccugcagaucggcaacaucaucagcaucuggaucagccacagcauccagcugggcaaccagaaccagaucgagaccugcaaccagagcgugaucaccuacgagaacaacaccugggugaaccagaccuacgugaacaucagcaacaccaacuucgccgccggccagagcguggugagcgugaagcuggccggcaacagcagccugugccccgugagcggcugggccaucuacagcaaggacaacagcaucagaaucggcagcaagggcgacguguucgugaucagagagcuguucaucagcugcagcccccuggagugcagaaccuucuuccugacccagggcgcccugcugaacgacaagcacagcaacggcaccaucaaggacagaagccccuacagaacccugaugagcugccccaucggcgaggugcccagccccuacaacagcagauucgagagcguggccuggagcgccagcgccugccacgacggcaucaacuggcugaccaucggcaucagcggccccgacaacggcgccguggccgugcugaaguacaacggcaucaucaccgacaccaucaagagcuggagaaacaacauccugagaacccaggagagcgagugcgccugcgugaacggcagcugcuucaccgugaugaccgacggccccagcgacggccaggccagcuacaagaucuucagaaucgagaagggcaagaucgugaagagcguggagaugaacgcccccaacuaccacuacgaggagugcagcugcuaccccgacagcagcgagaucaccugcgugugcagagacaacuggcacggcagcaacagacccugggugagcuucaaccagaaccuggaguaccagaucggcuacaucugcagcggcaucuucggcgacaaccccagacccaacgacaagaccggcagcugcggccccgugagcagcaacggcgccaacggcgugaagggcuucagcuucaaguacggcaacggcguguggaucggcagaaccaagagcaucagcagcagaaacggcuucgagaugaucugggaccccaacggcuggaccggcaccgacaacaacuucagcaucaagcaggacaucgugggcaucaacgaguggagcggcuacagcggcagcuucgugcagcaccccgagcugaccggccuggacugcaucagacccugcuucuggguggagcugaucagaggcagacccaaggagaacaccaucuggaccagcggcagcagcaucagcuucugcggcgugaacagcgacaccgugggcuggagcuggcccgacggcgccgagcugcccuucaccaucgacaaguga

SEQ ID NO: 178201 - RNA, 1410 nt, Artificial Sequence; identical to SEQ ID NO: 176798
  derived and/or modified CDS sequence (opt4) from neuraminidase__InfluenzaA__ADD23095

SEQ ID NO: 178202 - RNA, 1410 nt, Artificial Sequence; identical to SEQ ID NO: 176798
  derived and/or modified CDS sequence (opt4) from neuraminidase__InfluenzaA__ADD23105

SEQ ID NO: 178203 - RNA, 1410 nt, Artificial Sequence; identical to SEQ ID NO: 176798
  derived and/or modified CDS sequence (opt4) from neuraminidase__InfluenzaA__ADD23115

SEQ ID NO: 178204 - RNA, 1410 nt, Artificial Sequence; identical to SEQ ID NO: 176798
  derived and/or modified CDS sequence (opt4) from neuraminidase__InfluenzaA__ADD23125

SEQ ID NO: 178205 - RNA, 1410 nt, Artificial Sequence; identical to SEQ ID NO: 176798
  derived and/or modified CDS sequence (opt4) from neuraminidase__InfluenzaA__ADD23135

SEQ ID NO: 178206 - RNA, 1410 nt, Artificial Sequence; identical to SEQ ID NO: 176798
  derived and/or modified CDS sequence (opt4) from neuraminidase__InfluenzaA__ADD23145

SEQ ID NO: 178207 - RNA, 1410 nt, Artificial Sequence; identical to SEQ ID NO: 176798
  derived and/or modified CDS sequence (opt4) from neuraminidase__InfluenzaA__ADD23155

SEQ ID NO: 178208 - RNA, 1410 nt, Artificial Sequence; identical to SEQ ID NO: 176798
  derived and/or modified CDS sequence (opt4) from neuraminidase__InfluenzaA__ADD23165

SEQ ID NO: 178209 - RNA, 1410 nt, Artificial Sequence; identical to SEQ ID NO: 176798
  derived and/or modified CDS sequence (opt4) from neuraminidase__InfluenzaA__ADD23175

SEQ ID NO: 178210 - RNA, 1410 nt, Artificial Sequence; identical to SEQ ID NO: 176798
  derived and/or modified CDS sequence (opt4) from neuraminidase__InfluenzaA__ADD23185

SEQ ID NO: 178211 - RNA, 1410 nt, Artificial Sequence; identical to SEQ ID NO: 176798
  derived and/or modified CDS sequence (opt4) from neuraminidase__InfluenzaA__ADD23195

SEQ ID NO: 178212 - RNA, 1410 nt, Artificial Sequence; identical to SEQ ID NO: 176798
  derived and/or modified CDS sequence (opt4) from neuraminidase__InfluenzaA__ADD23223

SEQ ID NO: 178213 - RNA, 1410 nt, Artificial Sequence
  derived and/or modified CDS sequence (opt4) from neuraminidase__InfluenzaA__ADD23233
augaaccccaaccagaagaucaucaccaucggcagcgugugcaugaccaucggcauggccaaccugauccugcagaucggcaacaucaucagcaucuggaucggccacagcauccagcugggcaaccagaaccagaucgagaccugcaaccagagcgugaucaccuacgagaacaacaccugggugaaccagaccuacgugaacaucagcaacaccaacuucgccgccggccagagcguggugagcgugaagcuggccggcaacagcagccugugccccgugagcggcugggccaucuacagcaaggacaacagcaucagaaucggcagcaagggcgacguguucgugaucagagagcccuucaucagcugcagcccccuggagugcagaaccuucuuccugacccagggcgcccugcugaacgacaagcacagcaacggcaccaucaaggacagaagccccuacagaacccugaugagcugccccaucggcgaggugcccagccccuacaacagcagauucgagagcguggccuggagcgccagcgccugccacgacggcaucaacuggcugaccaucggcaucagcggccccgacaacggcgccguggccgugcugaaguacaacggcaucaucaccgacaccaucaagagcuggagaaacaacauccugagaacccaggagagcgagugcgccugcgugaacggcagcugcuucaccgugaugaccgacggccccagcgacggccaggccagcuacaagaucuucagaaucgagaagggcaagaucgugaagagcguggagaugaacgcccccaacuaccacuacgaggagugcagcugcuaccccgacagcagcgagaucaccugcgugugcagagacaacuggcacggcagcaacagacccugggugagcuucaaccagaaccuggaguaccagaucggcuacaucugcagcggcaucuucggcgacaaccccagacccaacgacaagaccggcagcugcggccccgugagcagcaacggcgccaacggcgugaagggcuucagcuucaaguacggcaacggcguguggaucggcagaaccaagagcaucagcagcagaaacggcuucgagaugaucugggaccccaacggcuggaccggcaccgacaacaacuucagcaucaagcaggacaucgugggcaucaacgaguggagcggcuacagcggcagcuucgugcagcaccccgagcugaccggccuggacugcaucagacccugcuucuggguggagcugaucagaggcagacccaaggagaacaccaucuggaccagcggcagcagcaucagcuucugcggcgugaacagcgacaccgugggcuggagcuggcccgacggcgccgagcugcccuucaccaucgacaaguga

SEQ ID NO: 178214 - RNA, 1410 nt, Artificial Sequence; identical to SEQ ID NO: 176798
  derived and/or modified CDS sequence (opt4) from neuraminidase__InfluenzaA__ADD23243

SEQ ID NO: 178215 - RNA, 1410 nt, Artificial Sequence; identical to SEQ ID NO: 178086
  derived and/or modified CDS sequence (opt4) from neuraminidase__InfluenzaA__ADD23253

SEQ ID NO: 178216 - RNA, 1410 nt, Artificial Sequence
  derived and/or modified CDS sequence (opt4) from neuraminidase__InfluenzaA__ADD23273
augaaccccaaccagaagaucaucaccaucggcagcgugugcaugaccaucggcauggccaaccugauccugcagaucggcaacaucaucagcaucuggaucagccacagcauccagcugggcaaccagaaccagaucgagaccugcaaccagagcgugaucaccuacgagaacaacaccugggugaaccagaccuacgugaacaucagcaacaccaacuucgccgccggccagagcguggugagcgugaagcuggccggcaacagcagccugugccccgugagcggcugggccaucuacagcaaggacaacagcaucagaaucggcagcgagggcgacguguucgugaucagagagcccuucaucagcugcagcccccuggagugcagaaccuucuuccugacccagggcgcccugcugaacgacaagcacagcaacggcaccaucaaggacagaagccccuacagaacccugaugagcugccccaucggcgaggugcccagccccuacaacagcagauucgagagcguggccuggagcgccagcgccugccacgacggcaucaacuggcugaccaucggcaucagcggccccgacaacggcgccguggccgugcugaaguacaacggcaucaucaccgacaccaucaagagcuggagaaacaacauccugagaacccaggagagcgagugcgccugcgugaacggcagcugcuucaccgugaugaccgacggccccagcgacggccaggccagcuacaagaucuucagaaucgagaagggcaagaucgugaagagcguggagaugaacgcccccaacuaccacuacgaggagugcagcugcuaccccgacagcagcgagaucaccugcgugugcagagacaacuggcacggcagcaacagacccugggugagcuucaaccagaaccuggaguaccagaucggcuacaucugcagcggcaucuucggcgacaaccccagacccaacgacaagaccggcagcugcggccccgugagcagcaacggcgccaacggcgugaagggcuucagcuucaaguacggcaacggcguguggaucggcagaaccaagagcaucagcagcagaaacggcuucgagaugaucugggaccccaacggcuggaccggcaccgacaacaacuucagcaucaagcaggacaucgugggcaucaacgaguggagcggcuacagcggcagcuucgugcagcaccccgagcugaccggccuggacugcaucagacccugcuucuggguggagcugaucagaggcagacccaaggagaacaccaucuggaccagcggcagcagcaucagcuucugcggcgugaacagcgacaccgugggcuggagcuggcccgacggcgccgagcugcccuucaccaucgacaaguga

SEQ ID NO: 178217 - RNA, 1410 nt, Artificial Sequence; identical to SEQ ID NO: 176798
  derived and/or modified CDS sequence (opt4) from neuraminidase__InfluenzaA__ADD23283

SEQ ID NO: 178218 - RNA, 1410 nt, Artificial Sequence; identical to SEQ ID NO: 176798
  derived and/or modified CDS sequence (opt4) from neuraminidase__InfluenzaA__ADD23293

SEQ ID NO: 178219 - RNA, 1410 nt, Artificial Sequence; identical to SEQ ID NO: 176798
  derived and/or modified CDS sequence (opt4) from neuraminidase__InfluenzaA__ADD23303

SEQ ID NO: 178220 - RNA, 1410 nt, Artificial Sequence; identical to SEQ ID NO: 176798
  derived and/or modified CDS sequence (opt4) from neuraminidase__InfluenzaA__ADD23313

SEQ ID NO: 178221 - RNA, 1410 nt, Artificial Sequence
  derived and/or modified CDS sequence (opt4) from neuraminidase__InfluenzaA__ADD23323
augaaccccaaccagaagaucaucaccaucggcagcgugugcaugaccaucggcauggccaaccugauccugcagaucggcaacaucaucagcaucuggaucagccacagcauccagcugggcaaccagaaccagaucgagaccugcaaccagagcgugaucaccuacgagaacaacaccugggugaaccagaccuacgugaacaucagcaacaccaacuucgccgccggccagagcguggugagcgugaagcuggccggcaacagcagccugugccccgugagcggcugggccaucuacagcaaggacaacagcaucagaaucggcagcaagggcgacguguucgugaucagagagcccuucaucagcugcagcccccuggagugcagaaccuucuuccugacccagggcgcccugcugaacgacaagcacagcaacggcaccaucaaggacagaagccccuacagaacccugaugagcugccccaucggcgaggugcccagccccuacaacagcagauucgagagcguggccuggagcgccagcgccugccacgacggcaucaacuggcugaccaucggcaucagcggccccgacaacggcgccguggccgugcugaaguacaacggcaucaucaccgacaccaucaagagcuggagaaacaacauccugagaacccaggagagcgagugcgccugcgugaacggcagcugcuucaccgugcugaccgacggccccagcgacggccaggccagcuacaagaucuucagaaucgagaagggcaagaucgugaagagcguggagaugaacgcccccaacuaccacuacgaggagugcagcugcuaccccgacagcagcgagaucaccugcgugugcagagacaacuggcacggcagcaacagacccugggugagcuucaaccagaaccuggaguaccagaucggcuacaucugcagcggcaucuucggcgacaaccccagacccaacgacaagaccggcagcugcggccccgugagcagcaacggcgccaacggcgugaagggcuucagcuucaaguacggcaacggcguguggaucggcagaaccaagagcaucagcagcagaaacggcuucgagaugaucugggaccccaacggcuggaccggcaccgacaacaacuucagcaucaagcaggacaucgugggcaucaacgaguggagcggcuacagcggcagcuucgugcagcaccccgagcugaccggccuggacugcaucagacccugcuucuggguggagcugaucagaggcagacccaaggagaacaccaucuggaccagcggcagcagcaucagcuucugcggcgugaacagcgacaccgugggcuggagcuggcccgacggcgccgagcugcccuucaccaucgacaaguga

SEQ ID NO: 178222 - RNA, 1410 nt, Artificial Sequence; identical to SEQ ID NO: 176798
  derived and/or modified CDS sequence (opt4) from neuraminidase__InfluenzaA__ADD23333

SEQ ID NO: 178223 - RNA, 1410 nt, Artificial Sequence; identical to SEQ ID NO: 176798
  derived and/or modified CDS sequence (opt4) from neuraminidase__InfluenzaA__ADD23358

SEQ ID NO: 178224 - RNA, 1410 nt, Artificial Sequence; identical to SEQ ID NO: 178149
  derived and/or modified CDS sequence (opt4) from neuraminidase__InfluenzaA__ADD23368

SEQ ID NO: 178225 - RNA, 1410 nt, Artificial Sequence; identical to SEQ ID NO: 176798
  derived and/or modified CDS sequence (opt4) from neuraminidase__InfluenzaA__ADD23378

SEQ ID NO: 178226 - RNA, 1410 nt, Artificial Sequence; identical to SEQ ID NO: 176798
  derived and/or modified CDS sequence (opt4) from neuraminidase__InfluenzaA__ADD23388

SEQ ID NO: 178227 - RNA, 1410 nt, Artificial Sequence; identical to SEQ ID NO: 177381
  derived and/or modified CDS sequence (opt4) from neuraminidase__InfluenzaA__ADD23398

SEQ ID NO: 178228 - RNA, 1410 nt, Artificial Sequence
  derived and/or modified CDS sequence (opt4) from neuraminidase__InfluenzaA__ADD23408
augaaccccaaccagaagaucaucaccaucggcagcgugugcaugaccaucggcauggccaaccugauccugcagaucggcaacaucaucagcaucuggaucagccacagcauccagcugggcaaccagaaccagaucgagaccugcaaccagagcgugaucaccuacgagaacaacaccugggugaaccagaccuacgugaacaucagcaacaccaacuucgccgccggccagagcguggugagcgugaagcuggccggcaacagcagccugugccccgugagcggcugggccaucuacagcaaggacaacagcaucagaaucggcagcaagggcgacguguucgugaucagagagcccuucaucagcugcagcccccuggagugcagaaccuucuuccugacccagggcgcccugcugaacgacaagcacagcaacggcaccaucaaggacagaagccccuacagaacccugaugagcugccccaucggcgaggugcccagccccuacaacagcagauucgagagcguggccuggagcgccagcgccugccacgacggcaucaacuggcugaccaucggcaucagcggccccgacaacggcgccguggccgugcugaaguacaacggcaucaucaccgacaccaucaagagcuggagaaacaacauccugagaacccaggagagcgagugcgccugcgugaacggcagcugcuucaccgugaugaccgacggccccagcgacggccaggccagcuacaagaucuucagaaucgagaagggcaagaucgugaagagcguggagaugaacgcccccaacuaccacuacgaggagugcagcugcuaccccgacagcagcgagaucaccugcgugugcagagacaacuggcacggcagcaacagacccugggugagcuucaaccaggaccuggaguaccagaucggcuacaucugcagcggcaucuucggcgacaaccccagacccaacgacaagaccggcagcugcggccccgugagcagcaacggcgccaacggcgugaagggcuucagcuucaaguacggcaacggcguguggaucggcagaaccaagagcaucagcagcagaaacggcuucgagaugaucugggaccccaacggcuggaccggcaccgacaacaacuucagcaucaagcaggacaucgugggcaucaacgaguggagcggcuacagcggcagcuucgugcagcaccccgagcugaccggccuggacugcaucagacccugcuucuggguggagcugaucagaggcagacccaaggagaacaccaucuggaccagcggcagcagcaucagcuucugcggcgugaacagcgacaccgugggcuggagcuggcccgacggcgccgagcugcccuucaccaucgacaaguga

SEQ ID NO: 178229 - RNA, 1410 nt, Artificial Sequence
  derived and/or modified CDS sequence (opt4) from neuraminidase__InfluenzaA__ADD23438
augaaccccaaccagaagaucaucaccaucggcagcgugugcaugaccaucggcauggccaaccugauccugcagaucggcaacaucaucagcaucuggaucagccacagcauccagcugggcaaccagaaccagaucgagaccugcaaccagagcgugaucaccuacgagaacaacaccugggugaaccagaccuacgugaacaucagcaacaccaacuucgccgccggccagagcguggugagcgugaagcuggccggcaacagcagccugugccccgugagcggcugggccaucuacagcaaggacaacagcaucagaaucggcagcaagggcgacguguucgugaucagagagcccuucaucagcugcagcccccuggagugcagaaccuucuuccugacccagggcgcccugcugaacgacaagcacagcaacggcaccaucaaggacagaagccccuacagaacccugaugagcugccccaucggcgaggugcccagccccuacaacagcagauucgagagcguggccuggagcgccagcgccugccacgacggcaucaacuggcugaccaucggcaucagcggccccgacaacggcgccguggccgugcugaaguacaacggcaucaucaccgacaccaucaagagcuggagaaacaacauccugagaacccaggagagcgagugcgccugcgugaacggcagcugcuucaccgugaugaccgacggccccagcgacggccaggccagcuacaagaucuucagaaucgagaagggcaagaucgugaagagcguggagaugaacgcccccaacuaccacuacgaggagugcagcugcuaccccgacagcagcgagaucaccugcgugugcagagacaacuggcacggcagcaacagacccugggugagcuucaaccagaaccuggaguaccagaucggcuacaucugcagcggcaucuucggcgacaaccccagacccaacgacaagaccggcagcugcggccccgugagcagcaacggcgccaacggcgugaagggcuucagcuucaaguacggcaacggcguguggaucggcagaaccaagagcaucagcagcagaaacggcuucgagaugaucugggaccccaacggcuggaccggcaccgacaacagcuucagcaucaagcaggacaucgugggcaucaacgaguggagcggcuacagcggcagcuucgugcagcaccccgagcugaccggccuggacugcaucagacccugcuucuggguggagcugaucagaggcagacccaaggagaacaccaucuggaccagcggcagcagcaucagcuucugcggcgugaacagcgacaccgugggcuggagcuggcccgacggcgccgagcugcccuucaccaucgacaaguga

SEQ ID NO: 178230 - RNA, 1410 nt, Artificial Sequence; identical to SEQ ID NO: 176798
  derived and/or modified CDS sequence (opt4) from neuraminidase__InfluenzaA__ADD23448

SEQ ID NO: 178231 - RNA, 1410 nt, Artificial Sequence; identical to SEQ ID NO: 176798
  derived and/or modified CDS sequence (opt4) from neuraminidase__InfluenzaA__ADD23458

SEQ ID NO: 178232 - RNA, 1410 nt, Artificial Sequence
  derived and/or modified CDS sequence (opt4) from neuraminidase__InfluenzaA__ADD23468
augaaccccaaccagaagaucaucaccaucggcagcgugugcaugaccaucggcauggccaaccugauccugcagaucggcaacaucaucagcaucuggaucagccacagcauccagcugggcaaccagaaccagaucgagaccugcaaccagagcgugaucaccuacgagaacaacaccugggugaaccagaccuacgugaacaucagcaacaccaacuucgccgccggccagagcguggugagcgugaagcuggccggcaacagcagccugugccccgugagcggcugggccaucuacagcaaggacaacagcaucagaaucggcagcaagggcgacguguucgugaucagagagcccuucaucagcugcagcccccuggagugcagaaccuucuuccugacccagggcgcccugcugaacgacaagcacagcaacggcaccaucaaggacagaagccccuacagaacccugaugagcugccccaucggcgaggugcccagccccuacaacagcagauucgagagcguggccuggagcgccagcgccugccacgacggcaucaacuggcugaccaucggcaucagcggccccgacaacggcgccguggccgugcugaaguacaacggcaucaucaccgacaccaucaagagcuggagaaacaacauccugagaacccaggagagcgagugcgccugcgugaacggcagcugcuucaccgugaugaccgacggccccagcgacggccaggccagcuacaagaucuucagaaucgagaagggcaagaucgugaagagcguggagaugaacgcccccaacuaccacuacgaggagugcagcugcuaccccgacagcagcgagaucaccugcgugugcagagacaacuggcacggcagcaacagacccugggugagcuucaaccagaaccuggaguaccagaucggcuacaucugcagcggcaucuucggcgacaaccccagacccaacgacaagaccggcagcugcggccccgugagcagcaacggcgccaacggcgugaagggcuucagcuucaaguacggcaacggcguguggaucggcagaaccaagagcaucagcagcagaaacggcuucgagaugaucugggaccccaacggcuggaccggcaccgacaacaacuucagcaucaagcaggacaucgugggcgugaacgaguggagcggcuacagcggcagcuucgugcagcaccccgagcugaccggccuggacugcaucagacccugcuucuggguggagcugaucagaggcagacccaaggagaacaccaucuggaccagcggcagcagcaucagcuucugcggcgugaacagcgacaccgugggcuggagcuggcccgacggcgccgagcugcccuucaccaucgacaaguga

SEQ ID NO: 178233 - RNA, 1410 nt, Artificial Sequence; identical to SEQ ID NO: 176798
  derived and/or modified CDS sequence (opt4) from neuraminidase__InfluenzaA__ADD23478

SEQ ID NO: 178234 - RNA, 1410 nt, Artificial Sequence; identical to SEQ ID NO: 176798
  derived and/or modified CDS sequence (opt4) from neuraminidase__InfluenzaA__ADD23488

SEQ ID NO: 178235 - RNA, 1410 nt, Artificial Sequence
  derived and/or modified CDS sequence (opt4) from neuraminidase__InfluenzaA__ADD23498
augaaccccaaccagaagaucaucaccaucggcagcgugugcaugaccaucggcauggccaaccugauccugcagaucggcaacaucaucagcaucuggaucagccacagcauccagcugggcaaccagaaccacaucgagaccugcaaccagagcgugaucaccuacgagaacaacaccugggugaaccagaccuacgugaacaucagcaacaccaacuucgccgccggccagagcguggugagcgugaagcuggccggcaacagcagccugugccccgugagcggcugggccaucuacagcaaggacaacagcaucagaaucggcagcaagggcgacguguucgugaucagagagcccuucaucagcugcagcccccuggagugcagaaccuucuuccugacccagggcgcccugcugaacgacaagcacagcaacggcaccaucaaggacagaagccccuacagaacccugaugagcugccccaucggcgaggugcccagccccuacaacagcagauucgagagcguggccuggagcgccagcgccugccacgacggcaucaacuggcugaccaucggcaucagcggccccgacaacggcgccguggccgugcugaaguacaacggcaucaucaccgacaccaucaagagcuggagaaacaacauccugagaacccaggagagcgagugcgccugcgugaacggcagcugcuucaccgugaugaccgacggccccagcgacggccaggccagcuacaagaucuucagaaucgagaagggcaagaucgugaagagcguggagaugaacgcccccaacuaccacuacgaggagugcagcugcuaccccgacagcagcgagaucaccugcgugugcagagacaacuggcacggcagcaacagacccugggugagcuucaaccagaaccuggaguaccagaucggcuacaucugcagcggcaucuucggcgacaaccccagacccaacgacaagaccggcagcugcggccccgugagcagcaacggcgccaacggcgugaagggcuucagcuucaaguacggcaacggcguguggaucggcagaaccaagagcaucagcagcagaaacggcuucgagaugaucugggaccccaacggcuggaccggcaccgacaacaacuucagcaucaagcaggacaucgugggcaucaacgaguggagcggcuacagcggcagcuucgugcagcaccccgagcugaccggccuggacugcaucagacccugcuucuggguggagcugaucagaggcagacccaaggagaacaccaucuggaccagcggcagcagcaucagcuucugcggcgugaacagcgacaccgugggcuggagcuggcccgacggcgccgagcugcccuucaccaucgacaaguga

SEQ ID NO: 178236 - RNA, 1410 nt, Artificial Sequence; identical to SEQ ID NO: 176798
  derived and/or modified CDS sequence (opt4) from neuraminidase__InfluenzaA__ADD23508

SEQ ID NO: 178237 - RNA, 1410 nt, Artificial Sequence; identical to SEQ ID NO: 176798
  derived and/or modified CDS sequence (opt4) from neuraminidase__InfluenzaA__ADD23518

SEQ ID NO: 178238 - RNA, 1410 nt, Artificial Sequence; identical to SEQ ID NO: 176798
  derived and/or modified CDS sequence (opt4) from neuraminidase__InfluenzaA__ADD23997

SEQ ID NO: 178239 - RNA, 1410 nt, Artificial Sequence; identical to SEQ ID NO: 176798
  derived and/or modified CDS sequence (opt4) from neuraminidase__InfluenzaA__ADD24007

SEQ ID NO: 178240 - RNA, 1410 nt, Artificial Sequence; identical to SEQ ID NO: 176798
  derived and/or modified CDS sequence (opt4) from neuraminidase__InfluenzaA__ADD24017

SEQ ID NO: 178241 - RNA, 1410 nt, Artificial Sequence; identical to SEQ ID NO: 176798
  derived and/or modified CDS sequence (opt4) from neuraminidase__InfluenzaA__ADD24024

SEQ ID NO: 178242 - RNA, 1410 nt, Artificial Sequence; identical to SEQ ID NO: 176798
  derived and/or modified CDS sequence (opt4) from neuraminidase__InfluenzaA__ADD24025

SEQ ID NO: 178243 - RNA, 1410 nt, Artificial Sequence; identical to SEQ ID NO: 176798
  derived and/or modified CDS sequence (opt4) from neuraminidase__InfluenzaA__ADD24026

SEQ ID NO: 178244 - RNA, 1410 nt, Artificial Sequence; identical to SEQ ID NO: 176798
  derived and/or modified CDS sequence (opt4) from neuraminidase__InfluenzaA__ADD24027

SEQ ID NO: 178245 - RNA, 1410 nt, Artificial Sequence; identical to SEQ ID NO: 176798
  derived and/or modified CDS sequence (opt4) from neuraminidase__InfluenzaA__ADD24028

SEQ ID NO: 178246 - RNA, 1410 nt, Artificial Sequence; identical to SEQ ID NO: 176798
  derived and/or modified CDS sequence (opt4) from neuraminidase__InfluenzaA__ADD24029

SEQ ID NO: 178247 - RNA, 1410 nt, Artificial Sequence; identical to SEQ ID NO: 176798
  derived and/or modified CDS sequence (opt4) from neuraminidase__InfluenzaA__ADD24030

SEQ ID NO: 178248 - RNA, 1410 nt, Artificial Sequence; identical to SEQ ID NO: 176798
  derived and/or modified CDS sequence (opt4) from neuraminidase__InfluenzaA__ADD24031

SEQ ID NO: 178249 - RNA, 1410 nt, Artificial Sequence; identical to SEQ ID NO: 176798
  derived and/or modified CDS sequence (opt4) from neuraminidase__InfluenzaA__ADD24032

SEQ ID NO: 178250 - RNA, 1410 nt, Artificial Sequence; identical to SEQ ID NO: 176798
  derived and/or modified CDS sequence (opt4) from neuraminidase__InfluenzaA__ADD25231

SEQ ID NO: 178251 - RNA, 1410 nt, Artificial Sequence; identical to SEQ ID NO: 176798
  derived and/or modified CDS sequence (opt4) from neuraminidase__InfluenzaA__ADD25233

SEQ ID NO: 178252 - RNA, 1410 nt, Artificial Sequence; identical to SEQ ID NO: 176798
  derived and/or modified CDS sequence (opt4) from neuraminidase__InfluenzaA__ADD25235

SEQ ID NO: 178253 - RNA, 1410 nt, Artificial Sequence; identical to SEQ ID NO: 176798
  derived and/or modified CDS sequence (opt4) from neuraminidase__InfluenzaA__ADD25244

SEQ ID NO: 178254 - RNA, 1410 nt, Artificial Sequence
  derived and/or modified CDS sequence (opt4) from neuraminidase__InfluenzaA__ADD25246
augaaccccaaccagaagaucaucaccaucggcagcgugugcaugaccaucggcauggccaaccugauccugcagaucggcaacaucaucagcaucuggaucagccacagcauccagcugggcaaccagaaccagaucgagaccugcaaccagagcgugaucaccuacgagaacaacaccugggugaaccagaccuacgugaacaucagcaacaccaacuucgccgccggccagagcguggugagcgugaagcuggccggcaacagcagccugugccccgugagcggcugggccaucuacagcaaggacaacagcaucagaaucggcagcaagggcgacguguucgugaucagagagcccuucaucagcugcagcccccuggagugcagaaccuucuuccugacccagggcgcccugcugaacgacaagcacagcaacggcaccaucaaggacagaagccccuacagaacccugaugagcugccccaucggcgaggugcccagccccuacaacagcagauucgagagcguggccuggagcgccagcgccugccacgacggcaccaacuggcugaccaucggcaucagcggccccgacaacggcgccguggccgugcugaaguacaacggcaucaucaccgacaccaucaagagcuggagaaacaacauccugagaacccaggagagcgagugcgccugcgugaacggcagcugcuucaccgugaugaccgacggccccagcgacggccaggccagcuacaagaucuucagaaucgagaagggcaagaucgugaagagcguggagaugaacgcccccaacuaccacuacgaggagugcagcugcuaccccgacagcagcgagaucaccugcgugugcagagacaacuggcacggcagcaacagacccugggugagcuucaaccagaaccuggaguaccagaucggcuacaucugcagcggcaucuucggcgacaaccccagacccaacgacaagaccggcagcugcggccccgugagcagcaacggcgccaacggcgugaagggcuucagcuucaaguacggcaacggcguguggaucggcagaaccaagagcaucagcagcagaaacggcuucgagaugaucugggaccccaacggcuggaccggcaccgacaacaacuucagcaucaagcaggacaucgugggcaucaacgaguggagcggcuacagcggcagcuucgugcagcaccccgagcugaccggccuggacugcaucagacccugcuucuggguggagcugaucagaggcagacccaaggagaacaccaucuggaccagcggcagcagcaucagcuucugcggcgugaacagcgacaccgugggcuggagcuggcccgacggcgccgagcugcccuucaccaucgacaaguga

SEQ ID NO: 178255 - RNA, 1410 nt, Artificial Sequence; identical to SEQ ID NO: 176798
  derived and/or modified CDS sequence (opt4) from neuraminidase__InfluenzaA__ADD25248

SEQ ID NO: 178256 - RNA, 1410 nt, Artificial Sequence
  derived and/or modified CDS sequence (opt4) from neuraminidase__InfluenzaA__ADD25250
augaaccccaaccagaagaucaucaccaucggcagcgugugcaugaccaucggcauggccaaccugauccugcagaucggcaacaucaucagcaucuggaucagcagaagcauccagcugggcaaccagaaccagaucgagaccugcaaccagagcaucaucaccuacgagaacaacaccugggugaaccagaccuacgugaacaucagcaacaccaacuucgccgccggccagagcguggugagcgugaagcuggccggcaacagcagccugugccccgugagcggcugggccaucuacagcaaggacaacagcaucagaaucggcagcaagggcgacguguucgugaucagagagcccuucaucagcugcagcccccuggagugcagaaccuucuuccugacccagggcgcccugcugaacgacaagcacagcaacggcaccaucaaggacagaagccccuacagaacccugaugagcugccccaucggcgaggugcccagccccuacaacagcagauucgagagcguggccuggagcgccagcgccugccacgacggcaucaacuggcugaccaucggcaucagcggccccgacaacggcgccguggccgugcugaaguacaacggcaucaucaccgacaccaucaagagcuggagaaacaacauccugagaacccaggagagcgagugcgccugcgugaacggcagcugcuucaccgugaugaccgacggccccagcgacggccaggccagcuacaagaucuucagaaucgagaagggcaagaucgugaagagcguggagaugaacgcccccaacuaccacuacgaggagugcagcugcuaccccgacagcggcgagaucaccugcgugugcagagacaacuggcacggcagcaacagacccugggugagcuucaaccagaaccuggaguaccagaucggcuacaucugcagcggcaucuucggcgacaaccccagacccaacgacaagaccggcagcugcggccccgugagcagcaacggcgccaacggcgugaagggcuucagcuucaaguacggcaacggcguguggaucggcagaaccaagagcaucagcagcagaaacggcuucgagaugaucugggaccccaacggcuggaccggcaccgacaacaacuucagcaucaagcaggacaucgugggcaucaacgaguggagcggcuacagcggcagcuucgugcagcaccccgagcugaccggccuggacugcaucagacccugcuucuggguggagcugaucagaggcagacccaaggagaacaccaucuggaccagcggcagcagcaucagcuucugcggcgugaacagcgacaccaugggcuggagcuggcccgacggcgccgagcugcccuucaccaucgacaaguga

SEQ ID NO: 178257 - RNA, 1410 nt, Artificial Sequence; identical to SEQ ID NO: 176798
  derived and/or modified CDS sequence (opt4) from neuraminidase__InfluenzaA__ADD25255

SEQ ID NO: 178258 - RNA, 1410 nt, Artificial Sequence; identical to SEQ ID NO: 176798
  derived and/or modified CDS sequence (opt4) from neuraminidase__InfluenzaA__ADD25259

SEQ ID NO: 178259 - RNA, 1410 nt, Artificial Sequence
  derived and/or modified CDS sequence (opt4) from neuraminidase__InfluenzaA__ADD25262
augaaccccaaccagaagaucaucaccaucggcagcgugugcaugaccaucggcauggccaaccugauccugcagaucggcaacaucaucagcaucuggaucagccacagcauccagcugggcaaccagaaccagaucgagaccugcaaccagagcgugaucaccuacgagaacaacaccugggugaaccagaccuacgugaacaucagcaacaccaacuucgccgccggccagagcguggugagcgugaagcuggccggcaacagcagccugugccccgugagcggcugggccaucuacagcaaggacaacagcaucagaaucggcagcaagggcgacguguucgugaucagagagcccuucaucagcugcagcccccuggagugcagaaccuucuuccugacccagggcgcccugcugaacgacaagcacagcaacggcaccaucaaggacagaagccccuacagaacccugaugagcugccccaucggcgaggugcccagccccuacaacagcagauucgagagcguggccuggagcgccagcgccugccacgacggcaucaacuggcugaccaucggcaucagcggccccgacaacggcgccguggccgugcugaaguacaacggcaucaucaccgacaccaucaagagcuggagaaacaacauccugagaacccaggagagcgagugcgccugcgugaacggcagcugcuucaccgugaugaccgacggccccagcgacggccaggccagcuacaagaucuucagaaucgagaagggcaagaucgugaagagcguggagaugaacgcccccaacuaccacuacgaggagugcagcugcuaccccgacagcagcgagaucaccugcgugugcagagacaacuggcacggcagcaacagacccugggugagcuucaaccagaaccuggaguaccagaucggcuacaucugcagcggcaucuucggcgacaaccccagacccaacgacaagaagggcagcugcggccccgugagcagcaacggcgccgacggcgugaagggcuucagcuucaaguacggcaacggcguguggaucggcagaaccaagagcaucagcagcagaaacggcuucgagaugaucugggaccccaacggcuggaccggcaccgacaacaacuucagcaucaagcaggacaucgugggcaucaacgaguggagcggcuacagcggcagcuucgugcagcaccccgagcugaccggccuggacugcaucagacccugcuucuggguggagcugaucagaggcagacccaaggagaacaccaucuggaccagcggcagcagcaucagcuucugcggcgugaacagcgacaccgugggcuggagcuggcccgacggcgccgagcugcccuucaccaucgacaaguga

SEQ ID NO: 178260 - RNA, 1410 nt, Artificial Sequence
  derived and/or modified CDS sequence (opt4) from neuraminidase__InfluenzaA__ADD25266
augaaccccaaccagaagaucaucaccaucggcagcgugugcaugaccaucggcauggccaaccugauccugcagaucggcaacaucaucagcaucuggaucagccacagcauccagcugggcaaccagaaccagaucgagaccugcaaccagagcgugaucaccuacgagaacaacaccugggugaaccagaccuacgugaacaucagcaacaccaacuucgccgccggccagagcguggugcccgugaagcuggccggcaacagcagccugugccccgugagcggcugggccaucuacagcaaggacaacagcaucagaaucggcagcaagggcgacguguucgugaucagagagcccuucaucagcugcagcccccuggagugcagaaccuucuuccugacccagggcgcccugcugaacgacaagcacagcaacggcaccaucaaggacagaagccccuacagaacccugaugagcugccccaucggcgaggugcccagccccuacaacagcagauucgagagcguggccuggagcgccagcgccugccacgacggcaucaacuggcugaccaucggcaucagcggccccgacaacggcgccguggccgugcugaaguacaacggcaucaucaccgacaccaucaagagcuggagaaacaacauccugagaacccaggagagcgagugcgccugcgugaacggcagcugcuucaccgugaugaccgacggccccagcgacggccaggccagcuacaagaucuucagaaucgagaagggcaagaucgugaagagcguggagaugaacgcccccaacuaccacuacgaggagugcagcugcuaccccgacagcagcgagaucaccugcgugugcagagacaacuggcacggcagcaacagacccugggugagcuucaaccagaaccuggaguaccagaucggcuacaucugcagcggcaucuucggcgacaaccccagacccaacgacaagaccggcagcugcggccccgugagcagcaacggcgccaacggcgugaagggcuucagcuucaaguacggcaacggcguguggaucggcagaaccaagagcaucagcagcagaaacggcuucgagaugaucugggaccccaacggcuggaccggcaccgacaacaacuucagcaucaagcaggacaucgugggcaucaacgaguggagcggcuacagcggcagcuucgugcagcaccccgagcugaccggccuggacugcaucagacccugcuucuggguggagcugaucagaggcagacccaaggagaacaccaucuggaccagcggcagcagcaucagcuucugcggcgugaacagcgacaccgugggcuggagcuggcccgacggcgccgagcugcccuucaccaucgacaaguga

SEQ ID NO: 178261 - RNA, 1410 nt, Artificial Sequence; identical to SEQ ID NO: 176798
  derived and/or modified CDS sequence (opt4) from neuraminidase__InfluenzaA__ADD25268

SEQ ID NO: 178262 - RNA, 1410 nt, Artificial Sequence; identical to SEQ ID NO: 176798
  derived and/or modified CDS sequence (opt4) from neuraminidase__InfluenzaA__ADD25271

SEQ ID NO: 178263 - RNA, 1410 nt, Artificial Sequence; identical to SEQ ID NO: 176798
  derived and/or modified CDS sequence (opt4) from neuraminidase__InfluenzaA__ADD25274

SEQ ID NO: 178264 - RNA, 1410 nt, Artificial Sequence; identical to SEQ ID NO: 176798
  derived and/or modified CDS sequence (opt4) from neuraminidase__InfluenzaA__ADD25276

SEQ ID NO: 178265 - RNA, 1410 nt, Artificial Sequence
  derived and/or modified CDS sequence (opt4) from neuraminidase__InfluenzaA__ADD25278
augaaccccaaccagaagaucaucaccaucggcagcgugugcaugaccaucggcauggccaaccugauccugcagaucggcaacaucaucagcaucuggaucagcagaagcauccagcugggcaaccagaaccagaucgagaccugcaaccagagcaucaucaccuacgagaacaacaccugggugaaccagaccuacgugaacaucagcaacaccaacuucgccgccggccagagcguggugagcgugaagcuggccggcaacagcagccugugccccgugagcggcugggccaucuacagcaaggacaacagcaucagaaucggcagcaagggcgacguguucgugaucagagagcccuucaucagcugcagcccccuggagugcagaaccuucuuccugacccagggcgcccugcugaacgacaagcacagcaacggcaccaucaaggacagaagccccuacagaacccugaugagcugccccaucggcgaggugcccagccccuacaacagcagauucgagagcguggccuggagcgccagcgccugccacgacggcaucaacuggcugaccaucggcaucagcggccccgacaacggcgccguggccgugcugaaguacaacggcaucaucaccgacaccaucaagagcuggagaaacaacauccugagaacccaggagagcgagugcgccugcgugaacggcagcugcuucaccgugaugaccgacggccccagcgacggccaggccagcuacaagaucuucagaaucgagaagggcaagaucgugaagagcguggagaugaacgcccccaacuaccacuacgaggagugcagcugcuaccccgacagcggcgagaucaccugcgugugcagagacaacuggcacggcagcaacagacccugggugagcuucaaccagaaccuggaguaccagaucggcuacaucugcagcggcaucuucggcgacaaccccagacccaacgacaagaccggcagcugcggccccgugagcagcaacggcgccaacggcgugaagggcuucagcuucaaguacggcaacggcguguggaucggcagaaccaagagcaucagcagcagaaacggcuucgagaugaucugggaccccaacggcuggaccggcaccgacaacaacuucagcaucaagcaggacaucgugggcaucaacgaguggagcggcuacagcggcagcuucgugcagcaccccgagcugaccggccuggacugcaucagacccugcuucuggguggagcugaucagaggcagacccaaggagaacaccaucuggaccagcggcagcagcaucagcuucugcggcgugaacagcgacaccgugggcuggagcuggcccgacggcgccgagcugcccuucaccaucgacaaguga

SEQ ID NO: 178266 - RNA, 1410 nt, Artificial Sequence; identical to SEQ ID NO: 176798
  derived and/or modified CDS sequence (opt4) from neuraminidase__InfluenzaA__ADD25280

SEQ ID NO: 178267 - RNA, 1410 nt, Artificial Sequence; identical to SEQ ID NO: 176798
  derived and/or modified CDS sequence (opt4) from neuraminidase__InfluenzaA__ADD25282

SEQ ID NO: 178268 - RNA, 1410 nt, Artificial Sequence; identical to SEQ ID NO: 178086
  derived and/or modified CDS sequence (opt4) from neuraminidase__InfluenzaA__ADD25284

SEQ ID NO: 178269 - RNA, 1410 nt, Artificial Sequence; identical to SEQ ID NO: 176798
  derived and/or modified CDS sequence (opt4) from neuraminidase__InfluenzaA__ADD25287

SEQ ID NO: 178270 - RNA, 1410 nt, Artificial Sequence; identical to SEQ ID NO: 176798
  derived and/or modified CDS sequence (opt4) from neuraminidase__InfluenzaA__ADD25291

SEQ ID NO: 178271 - RNA, 1410 nt, Artificial Sequence; identical to SEQ ID NO: 178086
  derived and/or modified CDS sequence (opt4) from neuraminidase__InfluenzaA__ADD25293

SEQ ID NO: 178272 - RNA, 1410 nt, Artificial Sequence; identical to SEQ ID NO: 176798
  derived and/or modified CDS sequence (opt4) from neuraminidase__InfluenzaA__ADD25300

SEQ ID NO: 178273 - RNA, 1410 nt, Artificial Sequence
  derived and/or modified CDS sequence (opt4) from neuraminidase__InfluenzaA__ADD25304
augaaccccaaccagaagaucaucaccaucggcagcgugugcaugaccaucggcauggccaaccugauccugcagaucggcaacaucgugagcaucuggaucagccacagcauccagcugggcaaccagaaccagaucgagaccugcaaccagagcgugaucaccuacgagaacaacaccugggugaaccagaccuacgugaacaucagcaacaccaacuucgccgccggccagagcguggugagcgugaagcuggccggcaacagcagccugugccccgugagcggcugggccaucuacagcaaggacaacagcaucagaaucggcagcaagggcgacguguucgugaucagagagcccuucaucagcugcagcccccuggagugcagaaccuucuuccugacccagggcgcccugcugaacgacaagcacagcaacggcaccaucaaggacagaagccccuacagaacccugaugagcugccccaucggcgaggugcccagccccuacaacagcagauucgagagcguggccuggagcgccagcgccugccacgacggcaucaacuggcugaccaucggcaucagcggccccgacaacggcgccguggccgugcugaaguacaacggcaucaucaccgacaccaucaagagcuggagaaacaacauccugagaacccaggagagcgagugcgccugcgugaacggcagcugcuucaccgugaugaccgacggccccagcgacggccaggccagcuacaagaucuucagaaucgagaagggcaagaucgugaagagcguggagaugaacgcccccaacuaccacuacgaggagugcagcugcuaccccgacagcagcgagaucaccugcgugugcagagacaacuggcacggcagcaacagacccugggugagcuucaaccagaaccuggaguaccagaucggcuacaucugcagcggcaucuucggcgacaaccccagacccaacgacaagaccggcagcugcggccccgugagcagcaacggcgccaacggcgugaagggcuucagcuucaaguacggcaacggcguguggaucggcagaaccaagagcaucagcagcagaaacggcuucgagaugaucugggaccccaacggcuggaccggcaccgacaacaacuucagcaucaagcaggacaucgugggcaucaacgaguggagcggcuacagcggcagcuucgugcagcaccccgagcugaccggccuggacugcaucagacccugcuucuggguggagcugaucagaggcagacccaaggagaacaccaucuggaccagcggcagcagcaucagcuucugcggcgugaacagcgacaccgugggcuggagcuggcccgacggcgccgagcugcccuucaccaucgacaaguga

SEQ ID NO: 178274 - RNA, 1410 nt, Artificial Sequence
  derived and/or modified CDS sequence (opt4) from neuraminidase__InfluenzaA__ADD25306
augaaccccaaccagaagaucaucaccaucggcagcgugugcaugaccaucggcauggccaaccugauccugcagaucggcaacaucaucagcaucuggaucagcagaagcauccagcugggcaaccagaaccagaucgagaccugcaaccagagcaucaucaccuacgagaacaacaccugggugaaccagaccuacgugaacaucagcaacaccaacuucgccgccggccagagcguggugagcgugaagcuggccggcaacagcagccugugccccgugagcggcugggccaucuacagcaaggacaacagcaucagaaucggcagcaagggcgacguguucgugaucagagagcccuucaucagcugcagcccccuggagugcagaaccuucuuccugacccagggcgcccugcugaacgacaagcacagcaacggcaccaucaaggacagaagccccuacagaacccugaugagcugccccaucggcgaggugcccagccccuacaacagcagauucgagagcguggccuggagcgccagcgccugccacgacggcaucaacuggcugaccaucggcaucagcggccccgacaacggcgccguggccgugcugaaguacaacggcaucaucaccgacaccaucaagagcuggagaaacaacauccugagaacccaggagagcgagugcgccugcgugaacggcagcugcuucaccgugaugaccgacgagcccagcgacggccaggccagcuacaagaucuucagaaucgagaagggcaagaucgugaagagcguggagaugaacgcccccaacuaccacuacgaggagugcagcugcuaccccgacagcggcgagaucaccugcgugugcagagacaacuggcacggcagcaacagacccugggugagcuucaaccagaaccuggaguaccagaucggcuacaucugcagcggcaucuucggcgacaaccccagacccaacgacaagaccggcagcugcggccccgugagcagcaacggcgccaacggcgugaagggcuucagcuucaaguacggcaacggcguguggaucggcagaaccaagagcaucagcagcagaaacggcuucgagaugaucugggaccccaacggcuggaccggcaccgacaacaacuucagcaucaagcaggacaucgugggcaucaacgaguggagcggcuacagcggcagcuucgugcagcaccccgagcugaccggccuggacugcaucagacccugcuucuggguggagcugaucagaggcagacccaaggagaacaccaucuggaccagcggcagcagcaucagcuucugcggcgugaacagcgacaccgugggcuggagcuggcccgacggcgccgagcugcccuucaccaucgacaaguga

SEQ ID NO: 178275 - RNA, 1410 nt, Artificial Sequence; identical to SEQ ID NO: 176798
  derived and/or modified CDS sequence (opt4) from neuraminidase__InfluenzaA__ADD25308

SEQ ID NO: 178276 - RNA, 1410 nt, Artificial Sequence; identical to SEQ ID NO: 176798
  derived and/or modified CDS sequence (opt4) from neuraminidase__InfluenzaA__ADD25310

SEQ ID NO: 178277 - RNA, 1410 nt, Artificial Sequence; identical to SEQ ID NO: 176798
  derived and/or modified CDS sequence (opt4) from neuraminidase__InfluenzaA__ADD25312

SEQ ID NO: 178278 - RNA, 1410 nt, Artificial Sequence; identical to SEQ ID NO: 176798
  derived and/or modified CDS sequence (opt4) from neuraminidase__InfluenzaA__ADD25314

SEQ ID NO: 178279 - RNA, 1410 nt, Artificial Sequence; identical to SEQ ID NO: 176798
  derived and/or modified CDS sequence (opt4) from neuraminidase__InfluenzaA__ADD25316

SEQ ID NO: 178280 - RNA, 1410 nt, Artificial Sequence; identical to SEQ ID NO: 176798
  derived and/or modified CDS sequence (opt4) from neuraminidase__InfluenzaA__ADD29799

SEQ ID NO: 178281 - RNA, 1410 nt, Artificial Sequence; identical to SEQ ID NO: 176798
  derived and/or modified CDS sequence (opt4) from neuraminidase__InfluenzaA__ADD29800

SEQ ID NO: 178282 - RNA, 1410 nt, Artificial Sequence; identical to SEQ ID NO: 176798
  derived and/or modified CDS sequence (opt4) from neuraminidase__InfluenzaA__ADD29801

SEQ ID NO: 178283 - RNA, 1410 nt, Artificial Sequence; identical to SEQ ID NO: 176798
  derived and/or modified CDS sequence (opt4) from neuraminidase__InfluenzaA__ADD29802

SEQ ID NO: 178284 - RNA, 1410 nt, Artificial Sequence; identical to SEQ ID NO: 176798
  derived and/or modified CDS sequence (opt4) from neuraminidase__InfluenzaA__ADD29803

SEQ ID NO: 178285 - RNA, 1410 nt, Artificial Sequence; identical to SEQ ID NO: 176798
  derived and/or modified CDS sequence (opt4) from neuraminidase__InfluenzaA__ADD29804

SEQ ID NO: 178286 - RNA, 1410 nt, Artificial Sequence; identical to SEQ ID NO: 176798
  derived and/or modified CDS sequence (opt4) from neuraminidase__InfluenzaA__ADD29805

SEQ ID NO: 178287 - RNA, 1410 nt, Artificial Sequence; identical to SEQ ID NO: 176798
  derived and/or modified CDS sequence (opt4) from neuraminidase__InfluenzaA__ADD29806

SEQ ID NO: 178288 - RNA, 1410 nt, Artificial Sequence; identical to SEQ ID NO: 176798
  derived and/or modified CDS sequence (opt4) from neuraminidase__InfluenzaA__ADD29807

SEQ ID NO: 178289 - RNA, 1410 nt, Artificial Sequence; identical to SEQ ID NO: 176798
  derived and/or modified CDS sequence (opt4) from neuraminidase__InfluenzaA__ADD29808

SEQ ID NO: 178290 - RNA, 1410 nt, Artificial Sequence; identical to SEQ ID NO: 176798
  derived and/or modified CDS sequence (opt4) from neuraminidase__InfluenzaA__ADD52538

SEQ ID NO: 178291 - RNA, 1410 nt, Artificial Sequence; identical to SEQ ID NO: 178021
  derived and/or modified CDS sequence (opt4) from neuraminidase__InfluenzaA__ADD74353

SEQ ID NO: 178292 - RNA, 1410 nt, Artificial Sequence; identical to SEQ ID NO: 176798
  derived and/or modified CDS sequence (opt4) from neuraminidase__InfluenzaA__ADD74373

SEQ ID NO: 178293 - RNA, 1410 nt, Artificial Sequence; identical to SEQ ID NO: 176798
  derived and/or modified CDS sequence (opt4) from neuraminidase__InfluenzaA__ADD74383

SEQ ID NO: 178294 - RNA, 1410 nt, Artificial Sequence; identical to SEQ ID NO: 176798
  derived and/or modified CDS sequence (opt4) from neuraminidase__InfluenzaA__ADD74401

SEQ ID NO: 178295 - RNA, 1410 nt, Artificial Sequence
  derived and/or modified CDS sequence (opt4) from neuraminidase__InfluenzaA__ADD74411
augaaccccaaccagaagaucaucaccaucggcagcgugugcaugaccaucggcauggccaaccugauccugcagaucggcaacaucaucagcaucuggaucagccacagcauccagcugggcaaccagaaccagaucgagaccugcaaccagagcgugaucaccuacgagaacaacaccugggugaaccagaccuacgugaacaucagcaacaccaacguggccgccggccagagcguggugagcgugaagcuggccggcaacagcagccugugccccgugagcggcugggccaucuacagcaaggacaacagcaucagaaucggcagcaagggcgacguguucgugaucagagagcccuucaucagcugcagcccccuggagugcagaaccuucuuccugacccagggcgcccugcugaacgacaagcacagcaacggcaccaucaaggacagaagccccuacagaacccugaugagcugccccaucggcgaggugcccagccccuacaacagcagauucgagagcguggccuggagcgccagcgccugccacgacggcaucaacuggcugaccaucggcaucagcggccccgacaacggcgccguggccgugcugaaguacaacggcaucaucaccgacaccaucaagagcuggagaaacaacauccugagaacccaggagagcgagugcgccugcgugaacggcagcugcuucaccgugaugaccgacggccccagcgacggccaggccagcuacaagaucuucagaaucgagaagggcaagaucgugaagagcguggagaugaacgcccccaacuaccacuacgaggagugcagcugcuaccccgacagcagcgagaucaccugcgugugcagagacaacuggcacggcagcaacagacccugggugagcuucaaccagaaccuggaguaccagaucggcuacaucugcagcggcaucuucggcgacaaccccagacccaacgacaagaccggcagcugcggccccgugagcagcaacggcgccaacggcgugaagggcuucagcuucaaguacggcagcggcguguggaucggcagaaccaagagcaucagcagcagaagcggcuucgagaugaucugggaccccaacggcuggaccggcaccgacaacaacuucagcaucaagcaggacaucgugggcaucaacgaguggagcggcuacagcggcagcuucgugcagcaccccgagcugaccggccuggacugcaucagacccugcuucuggguggagcugaucagaggcagacccaaggagaacaccaucuggaccagcggcagcagcaucagcuucugcggcgugaacagcgacaccgugggcuggagcuggcccgacggcgccgagcugcccuucaccaucgacaaguga

SEQ ID NO: 178296 - RNA, 1410 nt, Artificial Sequence; identical to SEQ ID NO: 176798
  derived and/or modified CDS sequence (opt4) from neuraminidase__InfluenzaA__ADD74421

SEQ ID NO: 178297 - RNA, 1410 nt, Artificial Sequence; identical to SEQ ID NO: 176798
  derived and/or modified CDS sequence (opt4) from neuraminidase__InfluenzaA__ADD74431

SEQ ID NO: 178298 - RNA, 1410 nt, Artificial Sequence
  derived and/or modified CDS sequence (opt4) from neuraminidase__InfluenzaA__ADD74441
augaaccccaaccagaagaucaucaccaucggcagcgugugcaugaccaucggcauggccaaccugauccugcagaucggcaacaucaucagcaucuggaucagccacagcauccagcugggcaaccagaaccagaucgagaccugcaaccagagcgugaucaccuacgagaacaacaccugggugaaccagaccuacgugaacaucagcaacaccaacuucgccgccggccagagcguggugagcgugaagcuggccggcaacagcagccugugccccgugagcggcugggccaucuacagcaaggacaacagcaucagaaucggcagcaagggcgacguguucgugaucagagagcccuucaucagcugcagcccccuggagugcagaaccuucuuccugacccagggcgcccugcugaacgacaagcacagcaacggcaccaucaaggacagaagccccuacagaacccugaugagcugccccaucggcgaggugcccagccccuacaacagcagauucgagagcguggccuggagcgccagcgccugccacgacggcaucaacuggcugaccaucggcaucagcggccccgacaacggcgccguggccgugcugaaguacaacggcaucaucaccgacaccaucaagagcuggagaaacaacauccugagaacccaggagagcgagugcgccugcgugaacggcagcugcuucaccgugaugaccgacggccccagcgacggccaggccagcuacaagaucuucagaaucgagaagggcaagaucgugaagagcguggagaugaacgcccccaacuaccacuacgaggagugcagcugcuaccccgacagcagcgagaucaccugcgugugcagagacaacuggcacggcagcaacagacccugggugagcuucaaccagaaccuggaguaccagaucggcuacaucugcagcggcaucuucggcgacaaccccagacccaacgacaagaccggcagcugcggccccgugagcagcaacggcgccaacggcgugaagggcuucagcuucaaguacggcaacggcguguggaucggcagaaccaagagcaucagcagcagaaacggcuucgagaugaucugggaccccaacggcuggaccggcaccgacaacaucuucagcaucaagcaggacaucgugggcaucaacgaguggagcggcuacagcggcagcuucgugcagcaccccgagcugaccggccuggacugcaucagacccugcuucuggguggagcugaucagaggcagacccaaggagaacaccaucuggaccagcggcagcagcaucagcuucugcggcgugaacagcgacaccgugggcuggagcuggcccgacggcgccgagcugcccuucaccaucgacaaguga

SEQ ID NO: 178299 - RNA, 1410 nt, Artificial Sequence; identical to SEQ ID NO: 176798
  derived and/or modified CDS sequence (opt4) from neuraminidase__InfluenzaA__ADD74451

SEQ ID NO: 178300 - RNA, 1410 nt, Artificial Sequence; identical to SEQ ID NO: 176798
  derived and/or modified CDS sequence (opt4) from neuraminidase__InfluenzaA__ADD74461

SEQ ID NO: 178301 - RNA, 1410 nt, Artificial Sequence; identical to SEQ ID NO: 176798
  derived and/or modified CDS sequence (opt4) from neuraminidase__InfluenzaA__ADD74471

SEQ ID NO: 178302 - RNA, 1410 nt, Artificial Sequence; identical to SEQ ID NO: 176798
  derived and/or modified CDS sequence (opt4) from neuraminidase__InfluenzaA__ADD74481

SEQ ID NO: 178303 - RNA, 1410 nt, Artificial Sequence; identical to SEQ ID NO: 177815
  derived and/or modified CDS sequence (opt4) from neuraminidase__InfluenzaA__ADD74491

SEQ ID NO: 178304 - RNA, 1410 nt, Artificial Sequence; identical to SEQ ID NO: 176798
  derived and/or modified CDS sequence (opt4) from neuraminidase__InfluenzaA__ADD74501

SEQ ID NO: 178305 - RNA, 1410 nt, Artificial Sequence; identical to SEQ ID NO: 176798
  derived and/or modified CDS sequence (opt4) from neuraminidase__InfluenzaA__ADD74511

SEQ ID NO: 178306 - RNA, 1410 nt, Artificial Sequence; identical to SEQ ID NO: 177816
  derived and/or modified CDS sequence (opt4) from neuraminidase__InfluenzaA__ADD74521

SEQ ID NO: 178307 - RNA, 1410 nt, Artificial Sequence; identical to SEQ ID NO: 176798
  derived and/or modified CDS sequence (opt4) from neuraminidase__InfluenzaA__ADD74531

SEQ ID NO: 178308 - RNA, 1410 nt, Artificial Sequence
  derived and/or modified CDS sequence (opt4) from neuraminidase__InfluenzaA__ADD74551
augaaccccaaccagaagaucaucaccaucggcagcgugugcaugaccaucggcauggccaaccugauccugcagaucggcaacaucaucagcaucuggaucagccacagcauccagcugggcaaccagaaccagaucgagaccugcaaccagagcgugaucaccuacgagaacaacaccugggugaaccagaccuacgugaacaucagcaacaccaacuucgccgccggccagagcguggugagcgugaagcuggccggcaacagcagccugugccccgugagcggcugggccaucuacagcaaggacaacagcgugagaaucggcagcaagggcgacguguucgugaucagagagcccuucaucagcugcagcccccuggagugcagaaccuucuuccugacccagggcgcccugcugaacgacaagcacagcaacggcaccaucaaggacagaagccccuacagaacccugaugagcugccccaucggcgaggugcccagccccuacaacagcagauucgagagcguggccuggagcgccagcgccugccacgacggcaucaacuggcugaccaucggcaucagcggccccgacuacggcgccguggccgugcugaaguacaacggcaucaucaccgacaccaucaagagcuggagaaacaacauccugagaacccaggagagcgagugcgccugcgugaacggcagcugcuucaccgugaugaccgacggccccagcgacggccaggccagcuacaagaucuucagaaucgagaagggcaagaucgugaagagcguggagaugaacgcccccaacuaccacuacgaggagugcagcugcuaccccgacagcagcgagaucaccugcgugugcagagacaacuggcacggcagcaacagacccugggugagcuucaaccagaaccuggaguaccagaucggcuacaucugcagcggcaucuucggcgacaaccccagacccaacgacaagaccggcagcugcggccccgugagcagcaacggcgccaacggcgugaagggcuucagcuucaaguacggcaacggcguguggaucggcagaaccaagagcaucagcagcagaaacggcuucgagaugaucugggaccccaacggcuggaccggcaccgacaacaacuucagcaucaagcaggacaucgugggcaucaacgaguggagcggcuacagcggcagcuucgugcagcaccccgagcugaccggccuggacugcaucagacccugcuucuggguggagcugaucagaggcagacccaaggagaacaccaucuggaccagcggcagcagcaucagcuucugcggcgugaacagcgacaccgugggcuggagcuggcccgacggcgccgagcugcccuucaccaucgacaaguga

SEQ ID NO: 178309 - RNA, 1410 nt, Artificial Sequence; identical to SEQ ID NO: 176798
  derived and/or modified CDS sequence (opt4) from neuraminidase__InfluenzaA__ADD74561

SEQ ID NO: 178310 - RNA, 1410 nt, Artificial Sequence; identical to SEQ ID NO: 176798
  derived and/or modified CDS sequence (opt4) from neuraminidase__InfluenzaA__ADD74571

SEQ ID NO: 178311 - RNA, 1410 nt, Artificial Sequence
  derived and/or modified CDS sequence (opt4) from neuraminidase__InfluenzaA__ADD74581
augaaccccaaccagaagaucaucaccaucggcagcgugugcaugaccaucggcauggccaaccugauccugcagaucggcaacaucaucagcaucuggaucagccacagcauccagcugggcaaccagaaccagaucgagaccugcaaccagagcgugaucaccuacgagaacaacaccugggugaaccagaccuacgugaacaucagcaacaccaacuucgccgccggccagagcguggugagcgugaagcuggccggcaacagcagccugugccccgugagcggcugggccaucuacagcaaggacaacagcaucagaaucggcagcaagggcgacguguucgugaucagagagcccuucaucagcugcagcccccuggagugcagaaccuucuuccugacccagggcgcccugcugaacgacaagcacagcaacggcaccaucaaggacagaagccccuacagaacccugaugagcugccccaucggcgaggugcccagccccuacaacagcagauucgagagcguggccuggagcgccagcgccugccacgacggcaucaacuggcugaccaucggcaucagcggccccgacaacggcgccguggccgugcugaaguacaacggcaucaucaccgacaccaucaagagcuggagaaacaacauccugagaacccaggagagcgagugcgccugcgugaacggcagcugcuucaccgugaugaccgacggccccagcgacggccaggccagcuacaagaucuucagaaucgagaagggcaagaucgugaagagcguggagaugaacgcccccaacuaccacuacgaggagugcagcugcuaccccgacagcagcgagaucaccugcgugugcagagacaacuggcacggcagcaacagacccugggugagcuucaaccagaaccuggaguaccagaucggcuacaucugcagcggcaucuucggcgacaaccccagacccaacgacaagaccggcagcugcggccccgugagcagcaacggcgccaacggcgugaagggcuucagcuucaaguacggcaacggcguguggaucggcagaaccaagagcaucagcagcagaaacggcuucgagaugaucugggaccccaacggcuggaccggcaccgacaacaacuucagcaucaagcaggacaucgugggcaucaacgaguggagcggcuacagcggcagcuucgugcagcaccccgagcugaccggccuggacugcaucagacccugcuucuggguggagcugaucagaggcagacccaaggagaacaccaucuggaccagcggcagcagcaucagcuucugcggcgugaacagcgacgccgugggcuggagcuggcccgacggcgccgagcugcccuucaccaucgacaaguga

SEQ ID NO: 178312 - RNA, 1410 nt, Artificial Sequence; identical to SEQ ID NO: 176798
  derived and/or modified CDS sequence (opt4) from neuraminidase__InfluenzaA__ADD74591

SEQ ID NO: 178313 - RNA, 1410 nt, Artificial Sequence; identical to SEQ ID NO: 176798
  derived and/or modified CDS sequence (opt4) from neuraminidase__InfluenzaA__ADD74601

SEQ ID NO: 178314 - RNA, 1410 nt, Artificial Sequence
  derived and/or modified CDS sequence (opt4) from neuraminidase__InfluenzaA__ADD74611
augaaccccaaccagaagaucaucaccaucggcagcgugugcaugaccaucggcauggccaaccugauccugcagaucggcaacaucaucagcaucuggaucagccacagcauccagcugggcaaccagaaccagaucgagaccugcaaccagagcgugaucaccuacgagaacaacaccugggugaaccagaccuacgugaacaucagcaacaccaacuucgccgccggccagagcguggugagcgugaagcuggccggcaacagcagccugugccccgugagcggcugggccaucuacagcaaggacaacagcaucagaaucggcagcaagggcgacguguucgugaucagagagcccuucaucagcugcagcccccuggagugcagaaccuucuuccugacccagggcgcccugcugaacgacaagcacagcaacggcaccaucaaggacagaagccccuacagaacccugaugagcugccccaucggcgaggugcccagccccuacaacagcagauucgagagcguggccuggagcgccagcgccugccacgacggcaucaacuggcugaccaucggcaucagcggccccgacaacggcgccguggccgugcugaaguacaacggcaucaucaccgacaccaucaagagcuggagaaacaacauccugagaacccaggagagcgagugcgccugcgugaacggcagcugcuucaccgugaugaccgacggccccagcgacggccaggccagcuacaagaucuucagaaucgagaagggcaagaucgugaagagcguggagaugaacgcccccaacuaccacuacgaggagugcagcugcuaccccgacagcagcgagaucaccugcgugugcagagacaacuggcacggcagcaacagacccugggugagcuucaaccagaaccuggaguaccagaucggcuacaucugcagcggcaucuucggcgacaaccccagacccaacgacaagaccggcagcugcggccccgugagcagcaacggcgccaacggcaucaagggcuucagcuucaaguacggcaacggcguguggaucggcagaaccaagagcaucagcagcagaaacggcuucgagaugaucugggaccccaacggcuggaccggcaccgacaacaacuucagcaucaagcaggacaucgugggcaucaacgaguggagcggcuacagcggcagcuucgugcagcaccccgagcugaccggccuggacugcaucagacccugcuucuggguggagcugaucagaggcagacccaaggagaacaccaucuggaccagcggcagcagcaucagcuucugcggcgugaacagcgacaccgugggcuggagcuggcccgacggcgccgagcugcccuucaccaucgacaaguga

SEQ ID NO: 178315 - RNA, 1410 nt, Artificial Sequence; identical to SEQ ID NO: 176798
  derived and/or modified CDS sequence (opt4) from neuraminidase__InfluenzaA__ADD74621

SEQ ID NO: 178316 - RNA, 1410 nt, Artificial Sequence; identical to SEQ ID NO: 176798
  derived and/or modified CDS sequence (opt4) from neuraminidase__InfluenzaA__ADD74631

SEQ ID NO: 178317 - RNA, 1410 nt, Artificial Sequence; identical to SEQ ID NO: 176798
  derived and/or modified CDS sequence (opt4) from neuraminidase__InfluenzaA__ADD74641

SEQ ID NO: 178318 - RNA, 1410 nt, Artificial Sequence; identical to SEQ ID NO: 176798
  derived and/or modified CDS sequence (opt4) from neuraminidase__InfluenzaA__ADD74651

SEQ ID NO: 178319 - RNA, 1410 nt, Artificial Sequence; identical to SEQ ID NO: 178149
  derived and/or modified CDS sequence (opt4) from neuraminidase__InfluenzaA__ADD74661

SEQ ID NO: 178320 - RNA, 1410 nt, Artificial Sequence; identical to SEQ ID NO: 176798
  derived and/or modified CDS sequence (opt4) from neuraminidase__InfluenzaA__ADD74671

SEQ ID NO: 178321 - RNA, 1410 nt, Artificial Sequence; identical to SEQ ID NO: 176798
  derived and/or modified CDS sequence (opt4) from neuraminidase__InfluenzaA__ADD74681

SEQ ID NO: 178322 - RNA, 1410 nt, Artificial Sequence
  derived and/or modified CDS sequence (opt4) from neuraminidase__InfluenzaA__ADD74691
augaaccccaaccagaagaucaucaccaucggcagcgugugcaugaccaucggcauggccaaccugauccugcagaucggcaacaucaucagcaucuggaucugccacagcauccagcugggcaaccagaaccagaucgagaccugcaaccagagcgugaucaccuacgagaacaacaccugggugaaccagaccuacgugaacaucagcaacaccaacuucgccgccggccagagcguggugagcgugaagcuggccggcaacagcagccugugccccgugagcggcugggccaucuacagcaaggacaacagcaucagaaucggcagcaagggcgacguguucgugaucagagagcccuucaucagcugcagcccccuggagugcagaaccuucuuccugacccagggcgcccugcugaacgacaagcacagcaacggcaccaucaaggacagaagccccuacagaacccugaugagcugccccaucggcgaggugcccagccccuacaacagcagauucgagagcguggccuggagcgccagcgccugccacgacggcaucaacuggcugaccaucggcaucagcggccccgacaacggcgccguggccgugcugaaguacaacggcaucaucaccgacaccaucaagagcuggagaaacaacauccugagaacccaggagagcgagugcgccugcgugaacggcagcugcuucaccgugaugaccgacggccccagcgacggccaggccagcuacaagaucuucagaaucgagaagggcaagaucgugaagagcguggagaugaacgcccccaacuaccacuacgaggagugcagcugcuaccccgacagcagcgagaucaccugcgugugcagagacaacuggcacggcagcaacagacccugggugagcuucaaccagaaccuggaguaccagaucggcuacaucugcagcggcaucuucggcgacaaccccagacccaacgacaagaccggcagcugcggccccgugagcagcaacggcgccaacggcgugaagggcuucagcuucaaguacggcaacggcguguggaucggcagaaccaagagcaucagcagcagaaacggcuucgagaugaucugggaccccaacggcuggaccggcaccgacaacaacuucagcaucaagcaggacaucgugggcaucaacgaguggagcggcuacagcggcagcuucgugcagcaccccgagcugaccggccuggacugcaucagacccugcuucuggguggagcugaucagaggcagacccaaggagaacaccaucuggaccagcggcagcagcaucagcuucugcggcgugaacagcgacaccgugggcuggagcuggcccgacggcgccgagcugcccuucaccaucgacaaguga

SEQ ID NO: 178323 - RNA, 1410 nt, Artificial Sequence; identical to SEQ ID NO: 176798
  derived and/or modified CDS sequence (opt4) from neuraminidase__InfluenzaA__ADD74701

SEQ ID NO: 178324 - RNA, 1410 nt, Artificial Sequence; identical to SEQ ID NO: 176798
  derived and/or modified CDS sequence (opt4) from neuraminidase__InfluenzaA__ADD74711

SEQ ID NO: 178325 - RNA, 1410 nt, Artificial Sequence; identical to SEQ ID NO: 176798
  derived and/or modified CDS sequence (opt4) from neuraminidase__InfluenzaA__ADD74721

SEQ ID NO: 178326 - RNA, 1410 nt, Artificial Sequence; identical to SEQ ID NO: 176798
  derived and/or modified CDS sequence (opt4) from neuraminidase__InfluenzaA__ADD74731

SEQ ID NO: 178327 - RNA, 1410 nt, Artificial Sequence
  derived and/or modified CDS sequence (opt4) from neuraminidase__InfluenzaA__ADD74741
augaaccccaaccagaagaucaucaccaucggcagcgugugcaucaccaucggcauggccaaccugauccugcagaucggcaacaucaucagcaucuggaucagccacagcauccagcugggcaaccagaaccagaucgagaccugcaaccagagcgugaucaccuacgagaacaacaccugggugaaccagaccuacgugaacaucagcaacaccaacuucgccgccggccagagcguggugagcgugaagcuggccggcagcagcagccugugccccgugagcggcugggccaucuacagcaaggacaacagcaucagaaucggcagcaagggcgacguguucgugaucagagagcccuucaucagcugcagcccccuggagugcagaaccuucuuccugacccagggcgcccugcugaacgacaagcacagcaacggcaccaucaaggacagaagccccuacagaacccugaugagcugccccaucggcgaggugcccagccccuacaacagcagauucgagagcguggccuggagcgccagcgccugccacgacggcaucaacuggcugaccaucggcaucagcggccccgacaacggcgccguggccgugcugaaguacaacggcaucaucaccgacaccaucaagagcuggagaaacaacauccugagaacccaggagagcgagugcgccugcgugaacggcagcugcuucaccgugaugaccgacggccccagcgacggccaggccagcuacaagaucuucagaaucgagaagggcaagaucgugaagagcguggagaugaacgcccccaacuaccacuacgaggagugcagcugcuaccccgacagcagcgagaucaccugcgugugcagagacaacuggcacggcagcaacagacccugggugagcuucaaccagaaccuggaguaccagaucggcuacaucugcagcggcaucuucggcgacaaccccagacccaacgacaagaagggcagcugcggccccgugagcagcaacggcgccaacggcgugaagggcuucagcuucaaguacggcaacggcguguggaucggcagaaccaagagcaucagcagcagaaacggcuucgagaugaucugggaccccaacggcuggaccggcaccgacaacaacuucagcaucaagcaggacaucgugggcaucaacgaguggagcggcuacagcggcagcuucgugcagcaccccgagcugaccggccuggacugcaucagacccugcuucuggguggagcugaucagaggcagacccaaggagaacaccaucuggaccagcggcagcagcaucagcuucugcggcgugaacagcgacaccgugggcuggagcuggcccgacggcgccgagcugcccuucaccaucgacaaguga

SEQ ID NO: 178328 - RNA, 1410 nt, Artificial Sequence
  derived and/or modified CDS sequence (opt4) from neuraminidase__InfluenzaA__ADD74751
augaaccccaaccagaagaucaucaccaucggcagcgugugcaugaccaucggcauggccaaccugauccugcagaucggcaacaucaucagcaucuggaucagccacagcauccagcugggcaacaagaaccagaucgagaccugcaaccagagcgugaucaccuacgagaacaacaccugggugaaccagaccuacgugaacaucagcaacaccaacuucgccgccggccagagcguggugagcgugaagcuggccggcaacagcagccugugccccgugagcggcugggccaucuacagcaaggacaacagcaucagaaucggcagcaagggcgacguguucgugaucagagagcccuucaucagcugcagcccccuggagugcagaaccuucuuccugacccagggcgcccugcugaacgacaagcacagcaacggcaccaucaaggacagaagccccuacagaacccugaugagcugccccaucggcgaggugcccagccccuacaacagcagauucgagagcguggccuggagcgccagcgccugccacgacggcaucaacuggcugaccaucggcaucagcggccccgacaacggcgccguggccgugcugaaguacaacggcaucaucaccgacaccaucaagagcuggagaaacaacauccugagaacccaggagagcgagugcgccugcgugaacggcagcugcuucaccgugaugaccgacggccccagcgacggccaggccagcuacaagaucuucagaaucgagaagggcaagaucgugaagagcguggagaugaacgcccccaacuaccacuacgaggagugcagcugcuaccccgacagcagcgagaucaccugcgugugcagagacaacuggcacggcagcaacagacccugggugagcuucaaccagaaccugaaguaccagaucggcuacaucugcagcggcaucuucggcgacaaccccagacccaacgacaagaagggcagcugcggccccgugagcagcaacggcgccaacggcgugaagggcuucagcuucaaguacggcaacggcguguggaucggcagaaccaagagcaucagcagcagaaacggcuucgagaugaucugggaccccaacggcuggaccggcaccgacaacaacuucagcaucaagcaggacaucgugggcaugaacgaguggagcggcuacagcggcagcuucgugcagcaccccgagcugaccggccuggacugcaucagacccugcuucuggguggagcugaucagaggcagacccaaggagaacaccaucuggaccagcggcagcagcaucagcuucugcggcgugaacagcgacaccgugggcuggagcuggcccgacggcgccgagcugcccuucaccaucgacaaguga

SEQ ID NO: 178329 - RNA, 1410 nt, Artificial Sequence
  derived and/or modified CDS sequence (opt4) from neuraminidase__InfluenzaA__ADD74761
augaaccccaaccagaagaucaucaccaucggcagcgugugcaugaccaucggcauggccaaccugauccugcagaucggcaacaucaucagcaucuggaucagccacagcauccagcugggcaaccagaaccagaucgagaccugcaaccagagcgugaucaccuacgagaacaacaccugggugaaccagaccuacgugaacaucagcaacaccaacuucgccgccggccagagcguggugagcgugaagcuggccggcaacagcagccugugccccgugagcggcugggccaucuacagcaaggacaacagcaucagaaucggcagcaagggcgacguguucgugaucagagagcccuucaucagcugcagcccccuggagugcagaaccuucuuccugacccagggcgcccugcugaacgacaagcacagcaacggcaccaucaaggacagaagccccuacagaacccugaugagcugccccaucggcgaggugcccagccccuacaacagcagauucgagagcguggccuggagcgccagcgccugccacgacggcaucaacuggcugaccaucggcaucagcggccccgacaacggcgccguggccgugcugaaguacaacggcaucaucaccgacaccaucaagagcuggagaaacaacauccugagaacccaggagagcgagugcgccugcgugaacggcagcugcuucaccgugaugaccgacggccccagcgacggccaggccagcuacaagaucuucagaaucgagaagggcaagaucgugaagagcguggagaugaacgcccccaacuaccacuacgaggagugcagcugcuaccccgacagcagcgagaucaccugcgugugcagagacaacuggcacggcagcaacagacccugggugagcuucaaccagaaccuggaguaccagaucggcuacaucugcagcggcaucuucggcgacaaccccagacccaacgacaagaccggcagcugcggccccgugagcagcaacggcgccaacggcgugaagggcuucagcuucaaguacggcaacggcguguggaucggcagaaccaagagcaucagcagcagaaacggcuucgagaugaucugggaccccaacggcuggaccggcaccgacaacaacuucagcaucaagcaggacaucgugggcaucaacgaguggagcggcuacagcggcagcuucgugcagcaccccgagcugaccggccuggacugcaucagacccugcuucuggguggagcugaucagaggcagacccaaggagaacaccaucuggaccagcggcagcagcaucagcuucugcggcaucaacagcgacaccgugggcuggagcuggcccgacggcgccgagcugcccuucaccaucgacaaguga

SEQ ID NO: 178330 - RNA, 1410 nt, Artificial Sequence; identical to SEQ ID NO: 176798
  derived and/or modified CDS sequence (opt4) from neuraminidase__InfluenzaA__ADD74791

SEQ ID NO: 178331 - RNA, 1410 nt, Artificial Sequence; identical to SEQ ID NO: 177381
  derived and/or modified CDS sequence (opt4) from neuraminidase__InfluenzaA__ADD74811

SEQ ID NO: 178332 - RNA, 1410 nt, Artificial Sequence; identical to SEQ ID NO: 176798
  derived and/or modified CDS sequence (opt4) from neuraminidase__InfluenzaA__ADD74821

SEQ ID NO: 178333 - RNA, 1410 nt, Artificial Sequence
  derived and/or modified CDS sequence (opt4) from neuraminidase__InfluenzaA__ADD74831
augaaccccaaccagaagaucaucaccaucggcagcaucugcaugaccaucggcauggccaaccugauccugcagaucggcaacaucaucagcaucuggaucagccacagcauccagcugggcaaccagaaccagaucgagaccugcaaccagagcgugaucaccuacgagaacaacaccugggugaaccagaccuacgugaacaucagcaacaccaacuucgccgccggccagagcguggugagcgugaagcuggccggcaacagcagccugugccccgugagcggcugggccaucuacagcaaggacaacagcaucagaaucggcagcaagggcgacguguucgugaucagagagcccuucaucagcugcagcccccuggagugcagaaccuucuuccugacccagggcgcccugcugaacgacaagcacagcaacggcaccaucaaggacagaagccccuacagaacccugaugagcugccccaucggcgaggugcccagccccuacaacagcagauucgagagcguggccuggagcgccagcgccugccacgacggcaucaacuggcugaccaucggcaucagcggccccgacaacggcgccguggccgugcugaaguacaacggcaucaucaccgacaccaucaagagcuggagaaacaacauccugagaacccaggagagcgagugcgccugccugaacggcagcugcuucaccgugaugaccgacggccccagcgacggccaggccagcuacaagaucuucagaaucgagaagggcaagaucgugaagagcguggagaugaacgcccccaacuaccacuacgaggagugcagcugcuaccccgacagcagcgagaucaccugcgugugcagagacaacuggcacggcagcaacagacccugggugagcuucaaccagaaccuggaguaccagaucggcuacaucugcagcggcaucuucggcgacaaccccagacccaacgacaagaccggcagcugcggccccgugagcagcaacggcgccaacggcgugaagggcuucagcuucaaguacggcaacggcguguggaucggcagaaccaagagcaucagcagcagaaacggcuucgagaugaucugggaccccaacggcuggaccggcaccgacaacaacuucagcaucaagcaggacaucgugggcaucaacgaguggagcggcuacagcggcagcuucgugcagcaccccgagcugaccggccuggacugcaucagacccugcuucuggguggagcugaucagaggcagacccaaggagaacaccaucuggaccagcggcagcagcaucagcuucugcggcgugaacagcgacaccgugggcuggagcuggcccgacggcgccgagcugcccuucaccaucgacaaguga

SEQ ID NO: 178334 - RNA, 1410 nt, Artificial Sequence; identical to SEQ ID NO: 176798
  derived and/or modified CDS sequence (opt4) from neuraminidase__InfluenzaA__ADD74841

SEQ ID NO: 178335 - RNA, 1410 nt, Artificial Sequence; identical to SEQ ID NO: 176798
  derived and/or modified CDS sequence (opt4) from neuraminidase__InfluenzaA__ADD74851

SEQ ID NO: 178336 - RNA, 1410 nt, Artificial Sequence; identical to SEQ ID NO: 177905
  derived and/or modified CDS sequence (opt4) from neuraminidase__InfluenzaA__ADD74861

SEQ ID NO: 178337 - RNA, 1410 nt, Artificial Sequence; identical to SEQ ID NO: 176798
  derived and/or modified CDS sequence (opt4) from neuraminidase__InfluenzaA__ADD74871

SEQ ID NO: 178338 - RNA, 1410 nt, Artificial Sequence; identical to SEQ ID NO: 176798
  derived and/or modified CDS sequence (opt4) from neuraminidase__InfluenzaA__ADD74881

SEQ ID NO: 178339 - RNA, 1410 nt, Artificial Sequence; identical to SEQ ID NO: 176798
  derived and/or modified CDS sequence (opt4) from neuraminidase__InfluenzaA__ADD74891

SEQ ID NO: 178340 - RNA, 1410 nt, Artificial Sequence; identical to SEQ ID NO: 176798
  derived and/or modified CDS sequence (opt4) from neuraminidase__InfluenzaA__ADD74901

SEQ ID NO: 178341 - RNA, 1410 nt, Artificial Sequence; identical to SEQ ID NO: 176798
  derived and/or modified CDS sequence (opt4) from neuraminidase__InfluenzaA__ADD74911

SEQ ID NO: 178342 - RNA, 1410 nt, Artificial Sequence; identical to SEQ ID NO: 176798
  derived and/or modified CDS sequence (opt4) from neuraminidase__InfluenzaA__ADD74921

SEQ ID NO: 178343 - RNA, 1410 nt, Artificial Sequence; identical to SEQ ID NO: 176798
  derived and/or modified CDS sequence (opt4) from neuraminidase__InfluenzaA__ADD74941

SEQ ID NO: 178344 - RNA, 1410 nt, Artificial Sequence
  derived and/or modified CDS sequence (opt4) from neuraminidase__InfluenzaA__ADD74961
augaaccccaaccagaagaucaucaccaucggcagcgugugcaugaccaucggcauggccaaccugauccugcagaucggcaacaucaucagcaucuggaucagccacagcauccagcugggcaaccagaaccagaucggcaccugcaaccagagcgugaucaccuacgagaacaacaccugggugaaccacaccuacgugaacaucagcaacaccaacuucgccgccggccagagcguggugagcgugaagcuggccggcaacagcagccugugccccgugagcggcugggccaucuacagcaaggacaacagcgugagaaucggcagcaagggcgacguguucgugaucagagagcccuucaucagcugcagcccccuggagugcagaaccuucuuccugacccagggcgcccugcugaacgacaagcacagcaacggcaccaucaaggacagaagccccuacagaacccugaugagcugccccaucggcgaggugcccagccccuacaacagcagauucgagagcguggccuggagcgccagcgccugccacgacggcaucaacuggcugaccaucggcaucagcggccccgacaacggcgccguggccgugcugaaguacaacggcaucaucaccgacaccaucaagagcuggagaaacaacauccugagaacccaggagagcgagugcgccugcgugaacggcagcugcuucaccgugaugaccgacggccccagcgacggccaggccagcuacaagaucuucagaaucgagaagggcaagaucgugaagagcguggagaugaacgcccccaacuaccacuacgaggagugcagcugcuaccccgacagcagcgagaucaccugcgugugcagagacaacuggcacggcagcaacagacccugggugagcuucaaccagaaccuggaguaccagaucggcuacaucugcagcggcaucuucggcgacaaccccagacccaacgacaagaccggcagcugcggccccgugagcagcaacggcgccaacggcgugaagggcuucagcuucaaguacggcaacggcguguggaucggcagaaccaagagcaucagcagcagaaacggcuucgagaugaucugggaccccaacggcuggaccggcaccgacaacaacuucagcaucaagcaggacaucgugggcaucaacgaguggagcggcuacagcggcagcuucgugcagcaccccgagcugaccggccuggacugcaucagacccugcuucuggguggagcugaucagaggcagacccaaggagaacaccaucuggaccagcggcagcagcaucagcuucugcggcgugaacagcgacaccgugggcuggagcuggcccgacggcgccgagcugcccuucaccaucgacaaguga

SEQ ID NO: 178345 - RNA, 1410 nt, Artificial Sequence; identical to SEQ ID NO: 176798
  derived and/or modified CDS sequence (opt4) from neuraminidase__InfluenzaA__ADD74971

SEQ ID NO: 178346 - RNA, 1410 nt, Artificial Sequence
  derived and/or modified CDS sequence (opt4) from neuraminidase__InfluenzaA__ADD74981
augaaccccaaccagaagaucaucaccaucggcagcgugugcaugaccaucggcauggccaaccugauccugcagaucggcaacaucaucagcaucuggaucagccacagcauccagcugggcaaccagaaccagaucgagaccugcaaccagagcaucaucaccuacgagaacaacaccugggugaaccagaccuacgugaacaucagcaacaccaacuucgccgccggccagagcguggugagcgugaagcuggccggcaacagcagccugugccccgugagcggcugggccaucuacagcaaggacaacagcaucagaaucggcagcaagggcgacguguucgugaucagagagcccuucaucagcugcagcccccuggagugcagaaccuucuuccugacccagggcgcccugcugaacgacaagcacagcaacggcaccaucaaggacagaagccccuacagaacccugaugagcugccccaucggcgaggugcccagccccuacaacagcagauucgagagcguggccuggagcgccagcgccugccacgacggcaucaacuggcugaccaucggcaucagcggccccgacaacggcgccguggccgugcugaaguacaacggcaucaucaccgacaccaucaagagcuggagaaacaacauccugagaacccaggagagcgagugcgccugcgugaacggcagcugcuucaccgugaugaccgacggccccagcgacggccaggccagcuacaagaucuucagaaucgagaagggcaagaucgugaagagcguggagaugaacgcccccaacuaccacuacgaggagugcagcugcuaccccgacagcagcgagaucaccugcgugugcagagacaacuggcacggcagcaacagacccugggugagcuucaaccagaaccuggaguaccagaucggcuacaucugcagcggcaucuucggcgacaaccccagacccaacgacaagaccggcagcugcggccccgugagcagcaacggcgccaacggcgugaagggcuucagcuucaaguacggcaacggcguguggaucggcagaaccaagagcaucagcagcagaagcggcuucgagaugaucugggaccccaacggcuggaccggcaccgacaacaacuucagcaucaagcaggacaucgugggcaucaacgaguggagcggcuacagcggcagcuucgugcagcaccccgagcugaccggccuggacugcaucagacccugcuucuggguggagcugaucagaggcagacccgaggagaacaccaucuggaccagcggcagcagcaucagcuucugcggcgugaacagcgacaccgugggcuggagcuggcccgacggcgccgagcugcccuucaccaucgacaaguga

SEQ ID NO: 178347 - RNA, 1410 nt, Artificial Sequence; identical to SEQ ID NO: 176798
  derived and/or modified CDS sequence (opt4) from neuraminidase__InfluenzaA__ADD74991

SEQ ID NO: 178348 - RNA, 1410 nt, Artificial Sequence; identical to SEQ ID NO: 176798
  derived and/or modified CDS sequence (opt4) from neuraminidase__InfluenzaA__ADD75001

SEQ ID NO: 178349 - RNA, 1410 nt, Artificial Sequence
  derived and/or modified CDS sequence (opt4) from neuraminidase__InfluenzaA__ADD75011
augaaccccaaccagaagaucaucaccaucggcagcgugugcaugaccaucggcauggccaaccugauccugcagaucggcaacaucaucagcaucuggaucagccacagcauccagcugggcaaccagaaccagaucgagaccugcaaccagagcgugaucaccuacgagaacaacaccugggugaaccagaccuacgugaacaucagcaacaccaacuucgccgccggccagagcguggugagcgugaagcuggccggcaacagcagccugugccccgugagcggcugggccaucuacagcaaggacaacagcaucagaaucggcagcaagggcgacguguucgugaucagagagcccuucaucagcugcagcccccuggagugcagaaccuucuuccugacccagggcgcccugcugaacgacaagcacagcaacggcaccaucaaggacagaagccccuacagaacccugaugagcugccccaucggcgaggugcccagccccuacaacagcagauucgagagcguggccuggagcgccagcgccugccacgacggcaucaacuggcugaccaucggcaucagcggccccgacaacggcgccguggccgugcugaaguacaacggcaucaucaccgacaccaucaagagcuggagaaacaacauccugagaacccaggagagcgagugcgccugcgugaacggcagcugcuucaccgugaugaccgacggccccagcgacggccaggccagcuacaagaucuucagaaucgagaagggcaagaucgugaagagcguggagaugaacgcccccaacuaccacuacgaggagugcagcugcuaccccgacagcagcgagaucaccugcgugugcagagacaacuggcacggcagcaacagacccugggugagcuucaaccagaaccuggaguaccagaucggcuacaucugcagcggcaucuucggcgacaaccccagacccaacgacaagaccggcagcugcgaccccgugagcagcaacggcgccaacggcgugaagggcuucagcuucaaguacggcaacggcguguggaucggcagaaccaagagcaucagcagcagaaacggcuucgagaugaucugggaccccaacggcuggaccggcaccgacaacaacuucagcaucaagcaggacaucgugggcaucaacgaguggagcggcuacagcggcagcuucgugcagcaccccgagcugaccggccuggacugcaucagacccugcuucuggguggagcugaucagaggcagacccaaggagaacaccaucuggaccagcggcagcagcaucagcuucugcggcgugaacagcgacaccgugggcuggagcuggcccgacggcgccgagcugcccuucaccaucgacaaguga

SEQ ID NO: 178350 - RNA, 1410 nt, Artificial Sequence; identical to SEQ ID NO: 178086
  derived and/or modified CDS sequence (opt4) from neuraminidase__InfluenzaA__ADD75031

SEQ ID NO: 178351 - RNA, 1410 nt, Artificial Sequence
  derived and/or modified CDS sequence (opt4) from neuraminidase__InfluenzaA__ADD75041
augaaccccaaccagaagaucaucaccaucggcagcgugugcaugaccaucggcauggccaaccugauccugcagaucggcaacaucaucagcaucuggaucagccacagcauccagcugggcaaccagaaccagaucgagaccugcaaccagagcgugaucaccuacgagaacaagaccugggugaaccagaccuacgugaacaucagcaacaccaacuucgccgccggccagagcguggugagcgugaagcuggccggcaacagcagccugugccccgugagcggcugggccaucuacagcaaggacaacagcaucagaaucggcagcaagggcgacguguucgugaucagagagcccuucaucagcugcagcccccuggagugcagaaccuucuuccugacccagggcgcccugcugaacgacaagcacagcaacggcaccaucaaggacagaagccccuacagaacccugaugagcugccccaucggcgaggugcccagccccuacaacagcagauucgagagcguggccuggagcgccagcgccugccacgacggcaucaacuggcugaccaucggcaucagcggccccgacaacggcgccguggccgugcugaaguacaacggcaucaucaccgacaccaucaagagcuggagaaacaacauccugagaacccaggagagcgagugcgccugcgugaacggcagcugcuucaccgugaugaccgacggccccagcgacggccaggccagcuacaagaucuucagaaucgagaagggcaagaucgugaagagcguggagaugaacgcccccaacuaccacuacgaggagugcagcugcuaccccgacagcagcgagaucaccugcgugugcagagacaacuggcacggcagcaacagacccugggugagcuucaaccagaaccuggaguaccagaucggcuacaucugcagcggcaucuucggcgacaaccccagacccaacgacaagaccggcagcugcggccccgugagcagcaacggcgccaacggcgugaagggcuucagcuucaaguacggcaacggcguguggaucggcagaaccaagagcaucagcagcagaaacggcuucgagaugaucugggaccccaacggcuggaccggcaccgacaacaacuucagcaucaagcaggacaucgugggcaucaacgaguggagcggcuacagcggcagcuucgugcagcaccccgagcugaccggccuggacugcaucagacccugcuucuggguggagcugaucagaggcagacccaaggagaacaccaucuggaccagcggcagcagcaucagcuucugcggcgugaacagcgacaccgugggcuggagcuggcccgacggcgccgagcugcccuucaccaucgacaaguga

SEQ ID NO: 178352 - RNA, 1410 nt, Artificial Sequence; identical to SEQ ID NO: 176798
  derived and/or modified CDS sequence (opt4) from neuraminidase__InfluenzaA__ADD75051

SEQ ID NO: 178353 - RNA, 1410 nt, Artificial Sequence; identical to SEQ ID NO: 176798
  derived and/or modified CDS sequence (opt4) from neuraminidase__InfluenzaA__ADD75061

SEQ ID NO: 178354 - RNA, 1410 nt, Artificial Sequence; identical to SEQ ID NO: 176798
  derived and/or modified CDS sequence (opt4) from neuraminidase__InfluenzaA__ADD75071

SEQ ID NO: 178355 - RNA, 1410 nt, Artificial Sequence; identical to SEQ ID NO: 176798
  derived and/or modified CDS sequence (opt4) from neuraminidase__InfluenzaA__ADD75081

SEQ ID NO: 178356 - RNA, 1410 nt, Artificial Sequence
  derived and/or modified CDS sequence (opt4) from neuraminidase__InfluenzaA__ADD75091
augaaccccaaccagaagaucaucaccaucggcagcgugugcaugaccaucggcauggccaaccugauccugcagaucggcaacaucaucagcaucuggaucagccacagcauccagcugggcaaccagaaccagaucgagaccugcaaccagagcgugaucaccuacgagaacaacaccugggugaaccagaccuacgugaacaucagcaacaccaacuucgccgccggccagagcguggugagcgugaagcuggccggcaacagcagccugugccccgugagcggcugggccaucuacagcaaggacaacagcaucagaaucggcagcaagggcgacguguucgugaucagagagcccuucaucagcugcagcccccuggagugcagaaccuucuuccugacccagggcgcccugcugaacgacaagcacagcaacggcaccaucaaggacagaagccccuacagaacccugaugagcugccccaucggcgaggugcccagccccuacaacagcagauucgagagcguggccuggagcgccagcgccugccacgacggcaucaacuggcugaccaucggcaucagcggccccgacaacggcgccguggccgugcugaaguacaacggcaucaucaccgacaccaucaagagcuggagaaacaacauccugagaacccaggagagcgagugcgccugcgugaacggcagcugcuucaccgugaugaccgacggccccagcgacggccaggccagcuacaagaucuucagaaucgagaagggcaagaucgugaagagcguggagaugaacgcccccaacuaccacuacgaggagugcagcugcuaccccgacagcagcgagaucaccugcgugugcagagacaacuggcacggcagcaacagacccugggugagcuucaaccagaaccuggaguaccagaucggcuacaucugcagcggcaucuucggcgacaaccccagacccaacgacaagaccggcagcugcggccccgugagcagcaacggcgccaacggcgugaagggcuucagcuucaaguacggcaacggcguguggaucggcagaaccaagagcaucagcagcagaagcggcuucgagaugaucugggaccccaacggcuggaccggcaccgacaacaacuucagcaucaagcaggacaucgugggcaucaacgaguggagcggcuacagcggcagcuucgugcagcaccccgagcugaccggccuggacugcaucagacccugcuucuggguggagcugaucagaggcagacccaaggagaacaccaucuggaccagcggcagcagcaucagcuucugcggcgugaacagcgacaccgugggcuggagcuggcccgacggcgccgagcugcccuucaccaucgacaaguga

SEQ ID NO: 178357 - RNA, 1410 nt, Artificial Sequence; identical to SEQ ID NO: 176798
  derived and/or modified CDS sequence (opt4) from neuraminidase__InfluenzaA__ADD75101

SEQ ID NO: 178358 - RNA, 1410 nt, Artificial Sequence; identical to SEQ ID NO: 176798
  derived and/or modified CDS sequence (opt4) from neuraminidase__InfluenzaA__ADD75111

SEQ ID NO: 178359 - RNA, 1410 nt, Artificial Sequence; identical to SEQ ID NO: 176798
  derived and/or modified CDS sequence (opt4) from neuraminidase__InfluenzaA__ADD75121

SEQ ID NO: 178360 - RNA, 1410 nt, Artificial Sequence; identical to SEQ ID NO: 176798
  derived and/or modified CDS sequence (opt4) from neuraminidase__InfluenzaA__ADD75131

SEQ ID NO: 178361 - RNA, 1410 nt, Artificial Sequence; identical to SEQ ID NO: 176798
  derived and/or modified CDS sequence (opt4) from neuraminidase__InfluenzaA__ADD75141

SEQ ID NO: 178362 - RNA, 1410 nt, Artificial Sequence
  derived and/or modified CDS sequence (opt4) from neuraminidase__InfluenzaA__ADD75161
augaaccccaaccagaagaucaucaccaucggcagcgugugcaugaccaucggcauggccaaccugauccugcagaucggcaacaucaucagcaucuggaucagccacagcauccagcugggcaaccagaaccagaucgagaccugcaaccagagcgugaucaccuacgagaacaacaccugggugaaccagaccuacgugaacaucagcaacaccaacuucgccgccggccagagcguggugagcgugaagcuggccggcaacagcagccugugccccgugagcggcugggccaucuacagcaaggacaacagcaucagaaucggcagcaagggcgacguguucgugaucagagagcccuucaucagcugcagcccccuggagugcagaaccuucuuccugacccagggcgcccugcugaacgacaagcacagcaacggcaccaucaaggacagaagcagcuacagaacccugaugagcugccccaucggcgaggugcccagccccuacaacagcagauucgagagcguggccuggagcgccagcgccugccacgacggcaucaacuggcugaccaucggcaucagcggccccgacaacggcgccguggccgugcugaaguacaacggcaucaucaccgacaccaucaagagcuggagaaacaacauccugagaacccaggagagcgagugcgccugcgugaacggcagcugcuucaccgugaugaccgacggccccagcgacggccaggccagcuacaagaucuucagaaucgagaagggcaagaucgugaagagcguggagaugaacgcccccaacuaccacuacgaggagugcagcugcuaccccgacagcagcgagaucaccugcgugugcagagacaacuggcacggcagcaacagacccugggugagcuucaaccagaaccuggaguacaagaucggcuacaucugcagcggcaucuucggcgacaaccccagacccaacgacaagaccggcagcugcggccccgugagcagcaacggcgccaacggcgugaagggcuucagcuucaaguacggcaacggcguguggaucggcagaaccaagagcaucagcagcagaaacggcuucgagaugaucugggaccccaacggcuggaccggcaccgacaacaacuucagcaucaagcaggacaucgugggcaucaacgaguggagcggcuacagcggcagcuucgugcagcaccccgagcugaccggccuggacugcaucagacccugcuucuggguggagcugaucagaggcagacccaaggagaacaccaucuggaccagcggcagcagcaucagcuucugcggcgugaacagcgacaccgugggcuggagcuggcccgacggcgccgagcugcccuucaccaucgacagauga

SEQ ID NO: 178363 - RNA, 1410 nt, Artificial Sequence
  derived and/or modified CDS sequence (opt4) from neuraminidase__InfluenzaA__ADD84500
augaaccccaaccagaacaucaucaccaucggcagcgugugcaugaccaucggcauggccaaccugauccugcagaucggcaacaucaucagcaucuggaucagccacagcauccagcugggcaaccagaaccagaucgagaccugcaaccagagcgugaucaccuacgagaacaacaccugggugaaccagaccuacgugaacaucagcaacaccaacuucgccgccggccagagcguggugagcgugaagcuggccggcaacagcagccugugccccgugagcggcugggccaucuacagcaaggacaacagcaucagaaucggcagcaagggcgacguguucgugaucagagagcccuucaucagcugcagcccccuggagugcagaaccuucuuccugacccagggcgcccugcugaacgacaagcacagcaacggcaccaucaaggacagaagccccuacagaacccugaugagcugccccaucggcgaggugcccagccccuacaacagcagauucgagagcguggccuggagcgccagcgccugccacgacggcaucaacuggcugaccaucggcaucagcggccccgacaacggcgccguggccgugcugaaguacaacggcaucaucaccgacaccaucaagagcuggagaaacaacauccugagaacccaggagagcgagugcgccugcgugaacggcagcugcuucaucgugaugaccgacggccccagcgacggccaggccagcuacaagaucuucagaaucgagaagggcaagaucgugaagagcguggagaugaacgcccccaacuaccacuacgaggagugcagcugcuaccccgacagcagcgagaucaccugcgugugcagagacaacuggcacggcagcaacagacccugggugagcuucaaccagaaccuggaguaccagaucggcuacaucugcagcggcaucuucggcgacaaccccagacccaacgacaagaccggcagcugcggccccgugagcagcaacggcgccaacggcgugaagggcuucagcuucaaguacggcaacggcguguggaucggcagaaccaagagcaucagcagcagaaacggcuucgagaugaucugggaccccaacggcuggaccggcaccgacaacaacuucagcaucaagcaggacaucgugggcaucaacgaguggagcggcuacagcggcagcuucgugcagcaccccgagcugaccggccuggacugcaucagacccugcuucuggguggagcugaucagaggcagacccaaggagaacaccaucuggaccagcggcagcagcaucagcuucugcggcgugaacagcgacaccgugggcuggagcuggcccgacggcgccgagcugcccuucaccaucgacaaguga

SEQ ID NO: 178364 - RNA, 1410 nt, Artificial Sequence
  derived and/or modified CDS sequence (opt4) from neuraminidase__InfluenzaA__ADD84502
augaaccccaaccagaacaucaucaccaucggcagcgugugcaugaccaucggcauggccaaccugauccugcagaucggcaacaucaucagcaucuggaucagccacagcauccagcugggcaaccagaaccagaucgagaccugcaaccagagcgugaucaccuacgagaacaacaccugggugaaccagaccuacgugaacaucagcaacaccaacuucgccgccggccagagcguggugagcgugaagcuggccggcaacagcagccugugccccgugagcggcugggccaucuacagcaaggacaacagcaucagaaucggcagcaagggcgacguguucgugaucagagagcccuucaucagcugcagcccccuggagugcagaaccuucuuccugacccagggcgcccugcugaacgacaagcacagcaacggcaccaucaaggacagaagccccuacagaacccugaugagcugccccaucggcgaggugcccagccccuacaacagcagauucgagagcguggccuggagcgccagcgccugccacgacggcaucaacuggcugaccaucggcaucagcggccccgacaacggcgccguggccgugcugaaguacaacggcaucaucaccgacaccaucaagagcuggagaaacaacauccugagaacccaggagagcgagugcgccugcgugaacggcagcugcuucaccgugaugaccgacggccccagcgacggccaggccagcuacaagaucuucagaaucgagaagggcaagaucgugaagagcguggagaugaacgcccccaacuaccacuacgaggagugcagcugcuaccccgacagcagcgagaucaccugcgugugcagagacaacuggcacggcagcaacagacccugggugagcuucaaccagaaccuggaguaccagaucggcuacaucugcagcggcaucuucggcgacaaccccagacccaacgacaagaccggcagcugcggccccgugagcagcaacggcgccaacggcgugaagggcuucagcuucaaguacggcaacggcguguggaucggcagaaccaagagcaucagcagcagaaacggcuucgagaugaucugggaccccaacggcuggaccggcaccgacaacaacuucagcaucaagcaggacaucgugggcaucaacgaguggagcggcuacagcggcagcuucgugcagcaccccgagcugaccggccuggacugcaucagacccugcuucuggguggagcugaucagaggcagacccaaggagaacaccaucuggaccagcggcagcagcaucagcuucugcggcgugaacagcgacaccgugggcuggagcuggcccgacggcgccgagcugcccuucaccaucgacaaguga

SEQ ID NO: 178365 - RNA, 1410 nt, Artificial Sequence; identical to SEQ ID NO: 178364
  derived and/or modified CDS sequence (opt4) from neuraminidase__InfluenzaA__ADD84503

SEQ ID NO: 178366 - RNA, 1410 nt, Artificial Sequence
  derived and/or modified CDS sequence (opt4) from neuraminidase__InfluenzaA__ADD84504
augaaccccaaccagaacaucaucaccaucggcagcgugugcaugaccaucggcauggccaaccugauccugcagaucggcaacaucaucagcaucuggaucagccacagcauccagcugggcaaccagaaccagaucgagaccugcaaccagagcgugaucaccuacgagaacaacaccugggugaaccagaccuacgugaacaucagcaacaccaacuucgccgccggccagagcguggugagcgugaagcuggccggcaacuucagccugugccccgugagcggcugggccaucuacagcaaggacaacagcaucagaaucggcagcaagggcgacguguucgugaucagagagcccuucaucagcugcagcccccuggagugcagaaccuucuuccugacccagggcgcccugcugaacgacaagcacagcaacggcaccaucaaggacagaagccccuacagaacccugaugagcugccccaucggcgaggugcccagccccuacaacagcagauucgagagcguggccuggagcgccagcgccugccacgacggcaucaacuggcugaccaucggcaucagcggccccgacaacggcgccguggccgugcugaaguacaacggcaucaucaccgacaccaucaagagcuggagaaacaacauccugagaacccaggagagcgagugcgccugcgugaacggcagcugcuucaccgugaugaccgacggccccagcgacggccaggccagcuacaagaucuucagaaucgagaagggcaagaucgugaagagcguggagaugaacgcccccaacuaccacuacgaggagugcagcugcuaccccgacagcagcgagaucaccugcgugugcagagacaacuggcacggcagcaacagacccugggugagcuucaaccagaaccuggaguaccagaucggcuacaucugcagcggcaucuucggcgacaaccccagacccaacgacaagaccggcagcugcggccccgugagcagcaacggcgccaacggcgugaagggcuucagcuucaaguacggcaacggcguguggaucggcagaaccaagagcaucagcagcagaaacggcuucgagaugaucugggaccccaacggcuggaccggcaccgacaacaacuucagcaucaagcaggacaucgugggcaucaacgaguggagcggcuacagcggcagcuucgugcagcaccccgagcugaccggccuggacugcaucagacccugcuucuggguggagcugaucagaggcagacccaaggagaacaccaucuggaccagcggcagcagcaucagcuucugcggcgugaacagcgacaccgugggcuggagcuggcccgacggcgccgagcugcccuucaccaucgacaaguga

SEQ ID NO: 178367 - RNA, 1410 nt, Artificial Sequence; identical to SEQ ID NO: 178364
  derived and/or modified CDS sequence (opt4) from neuraminidase__InfluenzaA__ADD84505

SEQ ID NO: 178368 - RNA, 1410 nt, Artificial Sequence; identical to SEQ ID NO: 178364
  derived and/or modified CDS sequence (opt4) from neuraminidase__InfluenzaA__ADD84506

SEQ ID NO: 178369 - RNA, 1410 nt, Artificial Sequence
  derived and/or modified CDS sequence (opt4) from neuraminidase__InfluenzaA__ADD92528
augaaccccaaccagaagaucaucaccaucggcagcgugugcaugaccaucggcauggccaaccugauccugcagaucggcaacaucaucagcaucuggaucagccacagcauccagcugggcaaccagaaccagaucgagaccugcaaccagagcgugaucaccuacgagaacaacaccugggugaaccagaccuacgugaacaucagcaacaccaacuucgccgccggccagagcguggugagcgugaagcuggccggcaacagcagccugugccccgugagcggcugggccaucuacagcaaggacaacagcaucagaaucggcagcaagggcgacguguucgugaucagagagcccuucaucagcugcagcccccuggagugcagaaccuucuuccugacccagggcgcccugcugaacgacaagcacagcaacggcaccaucaaggacagaagccccuacagaacccugaugagcugccccaucggcgaggugcccagccccuacaacagcagauucgagagcguggccuggagcgccagcgccugccacgacggcaucaacuggcugaccaucggcaucagcggccccgacaacggcgccguggccgugcugaaguacaacggcaucaucaccgacaccaucaagagcuggagaaacaacauccugagaacccaggagagcgagugcgccugcgugaacggcagcugcuucaccgugaugaccgacggccccagcgacggccaggccagcuacaagaucuucagaaucgagaagggcaagaucgugaagagcguggagaugaacgcccccaacuaccacuacgaggagugcagcugcuaccccgacagcagcgagaucaccugcgugugcagagacaacuggcacggcagcaacagacccugggugagcuucaaccagaaccuggaguaccagaucggcuacaucugcagcggcaucuucggcgacaaccccagacccaacgacaagaccggcagcugcggccccgugagcagcaacggcgccaacggcgugaagggcuucagcuucaaguacggcaacggcguguggaucggcagaaccaagagcaucagcagcagaaacggcuucgagaugaucugggaccccaacggcuggaccggcaccgacaacaacuucagcaucaagcaggacaucgugggcaucaacgaguggagcggccacagcggcagcagcgugcagcaccccgagcugaccggccuggacugcaucagacccugcuucuggguggagcugaucagaggcagacccaaggagaacaccaucuggaccagcggcagcagcaucagcuucugcggcgugaacagcgacaccgugggcuggagcuggcccgacggcgccgagcugcccuucaccaucgacaaguga

SEQ ID NO: 178370 - RNA, 1410 nt, Artificial Sequence; identical to SEQ ID NO: 178021
  derived and/or modified CDS sequence (opt4) from neuraminidase__InfluenzaA__ADD96769

SEQ ID NO: 178371 - RNA, 1410 nt, Artificial Sequence; identical to SEQ ID NO: 178021
  derived and/or modified CDS sequence (opt4) from neuraminidase__InfluenzaA__ADD96779

SEQ ID NO: 178372 - RNA, 1410 nt, Artificial Sequence; identical to SEQ ID NO: 178021
  derived and/or modified CDS sequence (opt4) from neuraminidase__InfluenzaA__ADD96789

SEQ ID NO: 178373 - RNA, 1410 nt, Artificial Sequence; identical to SEQ ID NO: 178149
  derived and/or modified CDS sequence (opt4) from neuraminidase__InfluenzaA__ADD96799

SEQ ID NO: 178374 - RNA, 1410 nt, Artificial Sequence; identical to SEQ ID NO: 176798
  derived and/or modified CDS sequence (opt4) from neuraminidase__InfluenzaA__ADD96809

SEQ ID NO: 178375 - RNA, 1410 nt, Artificial Sequence
  derived and/or modified CDS sequence (opt4) from neuraminidase__InfluenzaA__ADD96819
augaaccccaaccagaagaucaucaccaucggcagcgugugcaugaccaucggcauggccaaccugauccugcagaucggcaacaucaucagcaucuggaucagccacagcauccagcugggcaaccagaaccagaucgagaccugcaaccagagcgugaucaccuacgagaacaacaccugggugaaccagaccuacgugaacaucagcaacaccaacuucgccgccggccagagcguggugagcgugaagcuggccggcagcagcagccugugccccgugagcggcugggccaucuacagcaaggacaacagcaucagaaucggcagcaagggcgacguguucgugaucagagagcccuucaucagcugcagcccccuggagugcagaaccuucuuccugacccagggcgcccugcugaacgacaagcacagcaacggcaccaucaaggacagaagccccuacagaacccugaugagcugccccaucggcgaggugcccagccccuacaacagcagauucgagagcguggccuggagcgccagcgccugccacgacggcaucaacuggcugaccaucggcaucagcggccccgacaacggcgccguggccgugcugaaguacaacggcaucaucaccgacaccaucaagagcuggagaaacaacauccugagaacccaggagagcgagugcgccugcgugaacggcagcugcuucaccgugaugaccgacggccccagcgacggccaggccagcuacaagaucuucagaaucgagaagggcaagaucgugaagagcguggagaugaacgcccccaacuaccacuacgaggagugcagcugcuaccccgacagcagcgagaucaccugcgugugcagagacaacuggcacggcagcaacagacccugggugagcuucaaccagaaccuggaguaccagaucggcuacaucugcagcggcaucuucggcgacaaccccagacccaacgacaagaagggcagcugcggccccgugagcagcaacggcgccaacggcgugaagggcuucagcuucaaguacggcaacggcguguggaucggcagaaccaagagcaucagcagcagaaacggcuucgagaugaucugggaccccaacggcuggaccggcaccgacaacaacuucagcaucaagcaggacaucgugggcaucaacgaguggagcggcuacagcggcagcuucgugcagcaccccgagcugaccggccuggacugcaucagacccugcuucuggguggagcugaucagaggcagacccaaggagaacaccaucuggaccagcggcagcagcaucagcuucugcggcgugaacagcgacaccgugggcuggagcuggcccgacggcgccgagcugcccuucaccaucgacaaguga

SEQ ID NO: 178376 - RNA, 1410 nt, Artificial Sequence; identical to SEQ ID NO: 176798
  derived and/or modified CDS sequence (opt4) from neuraminidase__InfluenzaA__ADD96829

SEQ ID NO: 178377 - RNA, 1410 nt, Artificial Sequence; identical to SEQ ID NO: 176798
  derived and/or modified CDS sequence (opt4) from neuraminidase__InfluenzaA__ADD96839

SEQ ID NO: 178378 - RNA, 1410 nt, Artificial Sequence; identical to SEQ ID NO: 176798
  derived and/or modified CDS sequence (opt4) from neuraminidase__InfluenzaA__ADD96849

SEQ ID NO: 178379 - RNA, 1410 nt, Artificial Sequence; identical to SEQ ID NO: 176798
  derived and/or modified CDS sequence (opt4) from neuraminidase__InfluenzaA__ADD96859

SEQ ID NO: 178380 - RNA, 1410 nt, Artificial Sequence
  derived and/or modified CDS sequence (opt4) from neuraminidase__InfluenzaA__ADD96869
augaaccccaaccagaagaucaucaccaucggcagcgugugcaugaccaucggcauggccaaccugauccugcagaucggcaacaucaucagcaucuggaucagccaccccauccagcugggcaaccagaaccagaucgagaccugcaaccagagcgugaucaccuacgagaacaacaccugggugaaccagaccuacgugaacaucagcaacaccaacuucgccgccggccagagcguggugagcgugaagcuggccggcaacagcagccugugccccgugagcggcugggccaucuacagcaaggacaacagcaucagaaucggcagcaagggcgacguguucgugaucagagagcccuucaucagcugcagcccccuggagugcagaaccuucuuccugacccagggcgcccugcugaacgacaagcacagcaacggcaccaucaaggacagaagccccuacagaacccugaugagcugccccaucggcgaggugcccagccccuacaacagcagauucgagagcguggccuggagcgccagcgccugccacgacggcaucaacuggcugaccaucggcaucagcggccccgacaacggcgccguggccgugcugaaguacaacggcaucaucaccgacaccaucaagagcuggaagaacaacauccugagaacccaggagagcgagugcgccugcgugaacggcagcugcuucaccgugaugaccgacggccccagcgacggccaggccagcuacaagaucuucagaaucgagaagggcaagaucgugaagagcguggagaugaacgcccccaacuaccacuacgaggagugcagcugcuaccccgacagcagcgagaucaccugcgugugcagagacaacuggcacggcagcaacagacccugggugagcuucaaccagaaccuggaguaccagaucggcuacaucugcagcggcaucuucggcgacaaccccagacccaacgacaagaccggcagcugcggccccgugagcagcaacggcgccaacggcgugaagggcuucagcuucaaguacggcaacggcguguggaucggcagaaccaagagcaucagcagcagaaacggcuucgagaugaucugggaccccaacggcuggaccggcaccgacaacaacuucagcaucaagcaggacaucgugggcaucaacgaguggagcggcuacagcggcagcuucgugcagcaccccgagcugaccggccuggacugcaucagacccugcuucuggguggagcugaucagaggcagacccaaggagaacaccaucuggaccagcggcagcagcaucagcuucugcggcgugaacagcgacaccgugggcuggagcuggcccgacggcgccgagcugcccuucaccaucgacaaguga

SEQ ID NO: 178381 - RNA, 1410 nt, Artificial Sequence
  derived and/or modified CDS sequence (opt4) from neuraminidase__InfluenzaA__ADD96879
augaaccccaaccagaagaucaucaccaucggcagcgugugcaugaccaucggcauggccaaccugauccugcagaucggcaacaucaucagcaucuggaucagccacagcauccagcugggcaaccagaaccagaucgagaccugcaaccagagcgugaucaccuacgagaacaacaccugggugaaccagaccuacgugaacaucagcaacaccaacuucgccgccggccagagcguggugagcgugaagcuggccggcaacagcagccugugccccgugagcggcugggccaucuacagcaaggacaacagcaucagaaucggcagcaagggcgacguguucgugaucagagagcccuucaucagcugcagcccccugggcugcagaaccuucuuccugacccagggcgcccugcugaacgacaagcacagcaacggcaccaucaaggacagaagccccuacagaacccugaugagcugccccaucggcgaggugcccagccccuacaacagcagauucgagagcguggccuggagcgccagcgccugccacgacggcaucaacuggcugaccaucggcaucagcggccccgacaacggcgccguggccgugcugaaguacaacggcaucaucaccgacaccaucaagagcuggagaaacaacauccugagaacccaggagagcgagugcgccugcgugaacggcagcugcuucaccgugaugaccgacggccccagcgacggccaggccagcuacaagaucuucagaaucgagaagggcaagaucgugaagagcguggagaugaacgcccccaacuaccacuacgaggagugcagcugcuaccccgacagcagcgagaucaccugcgugugcagagacaacuggcacggcagcaacagacccugggugagcuucaaccagaaccuggaguaccagaucggcuacaucugcagcggcaucuucggcgacaaccccagacccaacgacaagaccggcagcugcggccccgugagcagcaacggcgccaacggcgugaagggcuucagcuucaaguacggcaacggcguguggaucggcagaaccaagagcaucagcagcagaaacggcuucgagaugaucugggaccccaacggcuggaccggcaccgacaacaacuucagcaucaagcaggacaucgugggcaucaacgaguggagcggcuacagcggcagcuucgugcagcaccccgagcugaccggccuggacugcaucagacccugcuucuggguggagcugaucagaggcagacccaaggagaacaccaucuggaccagcggcagcagcaucagcuucugcggcgugaacagcgacaccgugggcuggagcuggcccgacggcgccgagcugcccuucaccaucgacaaguga

SEQ ID NO: 178382 - RNA, 1410 nt, Artificial Sequence; identical to SEQ ID NO: 176798
  derived and/or modified CDS sequence (opt4) from neuraminidase__InfluenzaA__ADD96889

SEQ ID NO: 178383 - RNA, 1410 nt, Artificial Sequence; identical to SEQ ID NO: 177381
  derived and/or modified CDS sequence (opt4) from neuraminidase__InfluenzaA__ADD96899

SEQ ID NO: 178384 - RNA, 1410 nt, Artificial Sequence; identical to SEQ ID NO: 176798
  derived and/or modified CDS sequence (opt4) from neuraminidase__InfluenzaA__ADD96909

SEQ ID NO: 178385 - RNA, 1410 nt, Artificial Sequence; identical to SEQ ID NO: 176798
  derived and/or modified CDS sequence (opt4) from neuraminidase__InfluenzaA__ADD96919

SEQ ID NO: 178386 - RNA, 1410 nt, Artificial Sequence; identical to SEQ ID NO: 176798
  derived and/or modified CDS sequence (opt4) from neuraminidase__InfluenzaA__ADD96929

SEQ ID NO: 178387 - RNA, 1410 nt, Artificial Sequence; identical to SEQ ID NO: 176798
  derived and/or modified CDS sequence (opt4) from neuraminidase__InfluenzaA__ADD96939

SEQ ID NO: 178388 - RNA, 1410 nt, Artificial Sequence; identical to SEQ ID NO: 176798
  derived and/or modified CDS sequence (opt4) from neuraminidase__InfluenzaA__ADD96959

SEQ ID NO: 178389 - RNA, 1410 nt, Artificial Sequence; identical to SEQ ID NO: 176798
  derived and/or modified CDS sequence (opt4) from neuraminidase__InfluenzaA__ADD96969

SEQ ID NO: 178390 - RNA, 1410 nt, Artificial Sequence
  derived and/or modified CDS sequence (opt4) from neuraminidase__InfluenzaA__ADD96989
augaaccccaaccagaagaucaucaccaucggcagcgugugcaugaccaucggcauggccaaccugauccugcagaucggcaacaucaucagcaucuggaucagccacagcauccagcugggcaaccagaaccagaucgagaccugcaaccagagcgugaucaccuacgagaacaacaccugggugaaccagaccuacgugaacaucagcaacaccaacuucgccgccggccagagcguggugagcgugaagcuggccggcaacagcagccugugccccgugagcggcugggccaucuacagcaaggacaacagcaucagaaucggcagcaagggcgacguguucgugaucagagagcccuucaucagcugcagcccccuggagugcagaaccuucuuccugacccagggcgcccugcugaacgacaagcacagcaacggcaccaucaaggacagaagcagcuacagaacccugaugagcugccccaucggcgaggugcccagccccuacaacagcagauucgagagcguggccuggagcgccagcgccugccacgacggcaucaacuggcugaccaucggcaucagcggccccgacaacggcgccguggccgugcugaaguacaacggcaucaucaccgacaccaucaagagcuggagaaacaacauccugagaacccaggagagcgagugcgccugcgugaacggcagcugcuucaccgugaugaccgacggccccagcgacggccaggccagcuacaagaucuucagaaucgagaagggcaagaucgugaagagcguggagaugaacgcccccaacuaccacuacgaggagugcagcugcuaccccgacagcagcgagaucaccugcgugugcagagacaacuggcacggcagcaacagacccugggugagcuucaaccagaaccuggaguaccagaucggcuacaucugcagcggcaucuucggcgacaaccccagacccaacgacaagaccggcagcugcggccccgugagcagcaacggcgccaacggcgugaagggcuucagcuucaaguacggcaacggcguguggaucggcagaaccaagagcaucagcagcagaaacggcuucgagaugaucugggaccccaacggcuggaccggcaccgacaacaacuucagcaucaagcaggacaucgugggcaucaacgaguggagcggcuacagcggcagcuucgugcagcaccccgagcugaccggccuggacugcaucagacccugcuucuggguggagcugaucagaggcagacccaaggagaacaccaucuggaccagcggcagcagcaucagcuucugcggcgugaacagcgacaccgugggcuggagcuggcccgacggcgccgagcugcccuucaccaucgacaaguga

SEQ ID NO: 178391 - RNA, 1410 nt, Artificial Sequence
  derived and/or modified CDS sequence (opt4) from neuraminidase__InfluenzaA__ADD97038
augaaccccaaccagaagaucaucaccaucggcagcgugugcaugaccaucggcauggccaaccugauccugcagaucggcaacaucaucagcaucuggaucagccacagcauccagcugggcaaccagaaccagaucgagaccugcaaccagagcgugaucaccuacgagaacaacaccugggugaaccagaccuacgugaacaucagcaacaccaacuucgccgccggccagagcguggugagcgugaagcuggccggcaacagcagccugugccccgugagcggcugggccaucuacagcaaggacaacagcaucagaaucggcagcaagggcgacguguucgugaucagagagcccuucaucagcugcagcccccuggagugcagaaccuucuuccugacccagggcgcccugcugaacgacaagcacagcaacggcaccaucaaggacagaagccccuacagaacccugaugagcugccccaucggcgaggugcccagccccuacaacagcagauucgagagcguggccuggagcgccagcgccugccacgacggcaucaacuggcugaccaucggcaucagcggccccgacaacggcgccguggccgugcugaaguacaacggcaucaucaccgacaccaucaagagcuggagaaacaacauccugagaacccaggagagcgagugcgccugcgugaacggcagcugcuucaccgugaugaccgacggccccagcgacggccaggccagcuacaagaucuucagaaucgagaagggcaagaucgugaagagcguggagaugaacgcccccaacuaccacuacgaggagugcagcugcuaccccgacagcagcgagaucaccugcgugugcagagacaacuggcacggcagcaacagacccugggugagcuucaaccagaaccuggaguaccagaucggcuacaucugcagcggcaucuucggcgacaaccccagacccaacgacaagaccggcagcugcggccccgugagcagcaacggcgccaacggcgugaagggcuucagcuucaaguacggcaacggcguguggaucggcagaaccaagagcaucagcagcagaaacggcuucgagaugaucugggaccccaacggcuggaucggcaccgacaacaacuucagcaucaagcaggacaucgugggcaucaacgaguggagcggcuacagcggcagcuucgugcagcaccccgagcugaccggccuggacugcaucagacccugcuucuggguggagcugaucagaggcagacccaaggagaacaccaucuggaccagcggcagcagcaucagcuucugcggcgugaacagcgacaccggcggcuggagcuggcccgacggcgccgagcugcccuucaccaucgacaaguga

SEQ ID NO: 178392 - RNA, 1410 nt, Artificial Sequence; identical to SEQ ID NO: 176798
  derived and/or modified CDS sequence (opt4) from neuraminidase__InfluenzaA__ADD97048

SEQ ID NO: 178393 - RNA, 1410 nt, Artificial Sequence; identical to SEQ ID NO: 176798
  derived and/or modified CDS sequence (opt4) from neuraminidase__InfluenzaA__ADD97058

SEQ ID NO: 178394 - RNA, 1410 nt, Artificial Sequence; identical to SEQ ID NO: 176798
  derived and/or modified CDS sequence (opt4) from neuraminidase__InfluenzaA__ADD97069

SEQ ID NO: 178395 - RNA, 1410 nt, Artificial Sequence; identical to SEQ ID NO: 176798
  derived and/or modified CDS sequence (opt4) from neuraminidase__InfluenzaA__ADD97126

SEQ ID NO: 178396 - RNA, 1410 nt, Artificial Sequence; identical to SEQ ID NO: 176798
  derived and/or modified CDS sequence (opt4) from neuraminidase__InfluenzaA__ADD97164

SEQ ID NO: 178397 - RNA, 1410 nt, Artificial Sequence; identical to SEQ ID NO: 176798
  derived and/or modified CDS sequence (opt4) from neuraminidase__InfluenzaA__ADD97174

SEQ ID NO: 178398 - RNA, 1410 nt, Artificial Sequence; identical to SEQ ID NO: 176798
  derived and/or modified CDS sequence (opt4) from neuraminidase__InfluenzaA__ADD97184

SEQ ID NO: 178399 - RNA, 1410 nt, Artificial Sequence
  derived and/or modified CDS sequence (opt4) from neuraminidase__InfluenzaA__ADD97194
augaaccccaaccagaagaucaucaccaucggcagcgugugcaugaccaucggcauggccaaccugauccugcagaucggcaacaucaucagcaucuggaucagccacagcauccagcugggcaaccagaaccagaucgagaccugcaaccagagcgugaucaccuacgagaacaacaccugggugaaccagaccuacgugaacaucagcaacgccaacuucgccgccggccagagcguggugagcgugaagcuggccggcaacagcagccugugccccgugagcggcugggccaucuacagcaaggacaacagcaucagaaucggcagcaagggcgacguguucgugaucagagagcccuucaucagcugcagcccccuggagugcagaaccuucuuccugacccagggcgcccugcugaacgacaagcacagcaacggcaccaucaaggacagaagccccuacagaacccugaugagcugccccaucggcgaggugcccagccccuacaacagcagauucgagagcguggccuggagcgccagcgccugccacgacggcaucaacuggcugaccaucggcaucagcggccccgacaacggcgccguggccgugcugaaguacaacggcaucaucaccgacaccaucaagagcuggagaaacaacauccugagaacccaggagagcgagugcgccugcgugaacggcagcugcuucaccgugaugaccgacggccccagcgacggccaggccagcuacaagaucuucagaaucgagaagggcaagaucgugaagagcguggagaugaacgcccccaacuaccacuacgaggagugcagcugcuaccccgacagcagcgagaucaccugcgugugcagagacaacuggcacggcagcaacagacccugggugagcuucaaccagaaccuggaguaccagaucggcuacaucugcagcggcaucuucggcgacaaccccagacccaacgacaagaccggcagcugcggccccgugagcagcaacggcgccaacggcgugaagggcuucagcuucaaguacggcaacggcguguggaucggcagaaccaagagcaucagcagcagaaacggcuucgagaugaucugggaccccaacggcuggaccggcaccgacaacaacuucagcaucaagcaggacaucgugggcaucaacgaguggagcggcuacagcggcagcuucgugcagcaccccgagcugaccggccuggacugcaucagacccugcuucuggguggagcugaucagaggcagacccaaggagaacaccaucuggaccagcggcagcagcaucagcuucugcggcgugaacagcgacaccgugggcuggagcuggcccgacggcgccgagcugcccuucaccaucgacaaguga

SEQ ID NO: 178400 - RNA, 1410 nt, Artificial Sequence; identical to SEQ ID NO: 178390
  derived and/or modified CDS sequence (opt4) from neuraminidase__InfluenzaA__ADD97204

SEQ ID NO: 178401 - RNA, 1410 nt, Artificial Sequence; identical to SEQ ID NO: 176798
  derived and/or modified CDS sequence (opt4) from neuraminidase__InfluenzaA__ADD97214

SEQ ID NO: 178402 - RNA, 1410 nt, Artificial Sequence; identical to SEQ ID NO: 176798
  derived and/or modified CDS sequence (opt4) from neuraminidase__InfluenzaA__ADD97224

SEQ ID NO: 178403 - RNA, 1410 nt, Artificial Sequence; identical to SEQ ID NO: 176798
  derived and/or modified CDS sequence (opt4) from neuraminidase__InfluenzaA__ADD97234

SEQ ID NO: 178404 - RNA, 1410 nt, Artificial Sequence; identical to SEQ ID NO: 176798
  derived and/or modified CDS sequence (opt4) from neuraminidase__InfluenzaA__ADD97244

SEQ ID NO: 178405 - RNA, 1410 nt, Artificial Sequence; identical to SEQ ID NO: 176798
  derived and/or modified CDS sequence (opt4) from neuraminidase__InfluenzaA__ADD97254

SEQ ID NO: 178406 - RNA, 1410 nt, Artificial Sequence; identical to SEQ ID NO: 176798
  derived and/or modified CDS sequence (opt4) from neuraminidase__InfluenzaA__ADD97264

SEQ ID NO: 178407 - RNA, 1410 nt, Artificial Sequence; identical to SEQ ID NO: 176798
  derived and/or modified CDS sequence (opt4) from neuraminidase__InfluenzaA__ADD97274

SEQ ID NO: 178408 - RNA, 1410 nt, Artificial Sequence
  derived and/or modified CDS sequence (opt4) from neuraminidase__InfluenzaA__ADD97284
augaaccccaaccagaagaucaucaccaucggcagcgugugcaugaccaucggcauggccaaccugauccugcagaucggcaacaucaucagcaucuggaucagccacagcauccagcugggcaaccagaaccagaucgagaccugcaaccagagcgugaucaccuacgagaacaacaccugggugaaccagaccuacgugaacaucugcaacaccaacuucgccgccggccagagcguggugagcgugaagcuggccggcaacagcagccugugccccgugagcggcugggccaucuacagcaaggacaacagcaucagaaucggcagcaagggcgacguguucgugaucagagagcccuucaucagcugcagcccccuggagugcagaaccuucuuccugacccagggcgcccugcugaacgacaagcacagcaacggcaccaucaaggacagaagccccuacagaacccugaugagcugccccaucggcgaggugcccagccccuacaacagcagauucgagagcguggccuggagcgccagcgccugccacgacggcaucaacuggcugaccaucggcaucagcggccccgacaacggcgccguggccgugcugaaguacaacggcaucaucaccgacaccaucaagagcuggagaaacaacauccugagaacccaggagagcgagugcgccugcgugaacggcagcugcuucaccgugaugaccgacggccccagcgacggccaggccagcuacaagaucuucagaaucgagaagggcaagaucgugaagagcguggagaugaacgcccccaacuaccacuacgaggagugcagcugcuaccccgacagcagcgagaucaccugcgugugcagagacaacuggcacggcagcaacagacccugggugagcuucaaccagaaccuggaguaccagaucggcuacaucugcagcggcaucuucggcgacaaccccagacccaacgacaagaccggcagcugcggccccgugagcagcaacggcgccaacggcgugaagggcuucagcuucaaguacggcaacggcguguggaucggcagaaccaagagcaucagcagcagaaacggcuucgagaugaucugggaccccaacggcuggaccggcaccgacaacaacuucagcaucaagcaggacaucgugggcaucaacgaguggagcggcuacagcggcagcuucgugcagcaccccgagcugaccggccuggacugcaucagacccugcuucuggguggagcugaucagaggcagacccaaggagaacaccaucuggaccagcggcagcagcaucagcuucugcggcgugaacagcgacaccgugggcuggagcuggcccgacggcgccgagcugcccuucaccaucgacaaguga

SEQ ID NO: 178409 - RNA, 1410 nt, Artificial Sequence; identical to SEQ ID NO: 176798
  derived and/or modified CDS sequence (opt4) from neuraminidase__InfluenzaA__ADD97294

SEQ ID NO: 178410 - RNA, 1410 nt, Artificial Sequence
  derived and/or modified CDS sequence (opt4) from neuraminidase__InfluenzaA__ADD97314
augaaccccaaccagaagaucaucaccaucggcagcgugugcaugaccaucggcauggccaaccugauccugcagaucggcaacaucaucagcaucuggaucagccacagcauccagcugggcaaccagaaccagaucgagaccugcaaccagagcgugaucaccuacgagaacaacaccugggugaaccagaccuacgugaacaucagcaacaccaacuucgccgccggccagagcguggugagcgugaagcuggccggcaacagcagccugugccccgugagcggcugggccaucuacagcaaggacaacagcaucagaaucggcagcaagggcgacguguucgugaucagagagcccuucaucagcugcagcccccuggagugcagaaccuucuuccugacccagggcgcccugcugaacgacaagcacagcaacggcaccaucaaggacagaagccccuacagaacccugaugagcugccccaucggcgaggugcccagccccuacaacagcagauucgagagcguggccuggagcgccagcgccugccacgacggcaucaacuggcugaccaucggcaucagcggccccgacaacggcgccguggccgugcugaaguacaacggcaucaucaccgacaccaucaagagcuggagaaacaacauccugagaacccaggagagcgagugcgccugcgugaacggcagcugcuucaccgugaugaccgacggccccagcgacggccaggccagcuacaagaucuucagaaucgagaagggcaagaucgugaagagcguggagaugaacgcccccaacuaccacuacgaggagugcagcugcuaccccgacagcagcgagaucaccugcgugugcagagacaacuggcacggcagcaacagacccugggugagcuucaaccagaaccuggaguaccagaucggcuacaucugcagcggcaucuucggcgacaaccccagacccaacgacaagaccggcagcugcggccccgugagcagcaacggcgccaacggcgugaagggcuucagcuucaaguacggcaacggcguguggaucggcagaaccaagagcaucagcagcagaaacggcuucgagaugaucugggaccccaacggcuggaccggcaccgacaacaacuucagcaucaagcaggacaucgugggcaccaacgaguggagcggcuacagcggcagcuucgugcagcaccccgagcugaccggccuggacugcaucagacccugcuucuggguggagcugaucagaggcagacccaaggagaacaccaucuggaccagcggcagcagcaucagcuucugcggcgugaacagcgacaccgugggcuggagcuggcccgacggcgccgagcugcccuucaccaucgacaaguga

SEQ ID NO: 178411 - RNA, 1410 nt, Artificial Sequence; identical to SEQ ID NO: 176798
  derived and/or modified CDS sequence (opt4) from neuraminidase__InfluenzaA__ADD97334

SEQ ID NO: 178412 - RNA, 1410 nt, Artificial Sequence; identical to SEQ ID NO: 176798
  derived and/or modified CDS sequence (opt4) from neuraminidase__InfluenzaA__ADD97344

SEQ ID NO: 178413 - RNA, 1410 nt, Artificial Sequence; identical to SEQ ID NO: 176798
  derived and/or modified CDS sequence (opt4) from neuraminidase__InfluenzaA__ADD97354

SEQ ID NO: 178414 - RNA, 1410 nt, Artificial Sequence
  derived and/or modified CDS sequence (opt4) from neuraminidase__InfluenzaA__ADD97384
augaaccccaaccagaagaucaucaccaucggcagcgugugcaugaccaucggcauggccaaccugauccugcagaucggcaacaucaucagcaucuggaucagccacaccauccagcugggcaaccagaaccagaucgagaccugcaaccagagcgugaucaccuacgagaacaacaccugggugaaccagaccuacgugaacaucagcaacaccaacuucgccgccggccagagcguggugagcgugaagcuggccggcaacagcagccugugccccgugagcggcugggccaucuacagcaaggacaacagcaucagaaucggcagcaagggcgacguguucgugaucagagagcccuucaucagcugcagcccccuggagugcagaaccuucuuccugacccagggcgcccugcugaacgacaagcacagcaacggcaccaucaaggacagaagccccuacagaacccugaugagcugccccaucggcgaggugcccagccccuacaacagcagauucgagagcguggccuggagcgccagcgccugccacgacggcaucaacuggcugaccaucggcaucagcggccccgacaacggcgccguggccgugcugaaguacaacggcaucaucaccgacaccaucaagagcuggagaaacaacauccugagaacccaggagagcgagugcgccugcgugaacggcagcugcuucaccgugaugaccgacggccccagcgacggccaggccagcuacaagaucuucagaaucgagaagggcaagaucgugaagagcguggagaugaacgcccccaacuaccacuacgaggagugcagcugcuaccccgacagcagcgagaucaccugcgugugcagagacaacuggcacggcagcaacagacccugggugagcuucaaccagaaccuggaguaccagaucggcuacaucugcagcggcaucuucggcgacaaccccagacccaacgacaagaccggcagcugcggccccgugagcagcaacggcgccaacggcgugaagggcuucagcuucaaguacggcaacggcguguggaucggcagaaccaagagcaucagcagcagaaacggcuucgagaugaucugggaccccaacggcuggaccggcaccgacaacaacuucagcaucaagcaggacaucgugggcaucaacgaguggagcggcuacagcggcagcuucgugcagcaccccgagcugaccggccuggacugcaucagacccugcuucuggguggagcugaucagaggcagacccaaggagaacaccaucuggaccagcggcagcagcaucagcuucugcggcgugaacagcgacaccgugggcuggagcuggcccgacggcgccgagcugcccuucaccaucgacaaguga

SEQ ID NO: 178415 - RNA, 1410 nt, Artificial Sequence
  derived and/or modified CDS sequence (opt4) from neuraminidase__InfluenzaA__ADD97394
augaaccccaaccagaagaucaucaccaucggcagcgugugcaugaccaucggcauggccaaccugauccugcagaucggcaacaucaucagcaucuggaucagccacagcauccagcugggcaaccagaaccagaucgagaccugcaaccagagcgugaucaccuacgagaacaacaccugggugaaccagaccuacgugaacaucagcaacaccaacuucgccgccggccagcccguggugagcgugaagcuggccggcaacagcagccugugccccgugaacggcugggccaucuacagcaaggacaacagcaucagaaucggcagcaagggcgacguguucgugaucagagagcccuucaucagcugcagcccccuggagugcagaaccuucuuccugacccagggcgcccugcugaacgacaagcacagcaacggcaccaucaaggacagaagccccuacagaacccugaugagcugccccaucggcgaggugcccagccccuacaacagcagauucgagagcguggccuggagcgccagcgccugccacgacggcaucaacuggcugaccaucggcaucagcggccccgacaacggcgccguggccgugcugaaguacaacggcaucaucaccgacaccaucaagagcuggagaaacaacauccugagaacccaggagagcgagugcgccugcgugaacggcagcugcuucaccgugaugaccgacggccccagcgacggccaggccagcuacaagaucuucagaaucgagaagggcaagaucgugaagagcguggagaugaacgcccccaacuaccacuacgaggagugcagcugcuaccccgacagcagcgagaucaccugcgugugcagagacaacuggcacggcagcaacagacccugggugagcuucaaccagaaccuggaguaccagaucggcuacaucugcagcggcaucuucggcgacaaccccagacccaacgacaagaccggcagcugcggccccgugagcagcaacggcgccaacggcgugaagggcuucagcuucaaguacggcaacggcguguggaucggcagaaccaagagcaucagcagcagaaacggcuucgagaugaucugggaccccaacggcuggaccggcaccgacaacaacuucagcaucaagcaggacaucgugggcaucaacgaguggagcggcuacagcggcagcuucgugcagcaccccgagcugaccggccuggacugcaucagacccugcuucuggguggagcugaucagaggcagacccaaggagaacaccaucuggaccagcggcagcagcaucagcuucugcggcgugaacagcgacaccgugggcuggagcuggcccgacggcgccgagcugcccuucaccaucgacaaguga

SEQ ID NO: 178416 - RNA, 1410 nt, Artificial Sequence; identical to SEQ ID NO: 176798
  derived and/or modified CDS sequence (opt4) from neuraminidase__InfluenzaA__ADD97404

SEQ ID NO: 178417 - RNA, 1410 nt, Artificial Sequence; identical to SEQ ID NO: 176798
  derived and/or modified CDS sequence (opt4) from neuraminidase__InfluenzaA__ADD97424

SEQ ID NO: 178418 - RNA, 1410 nt, Artificial Sequence; identical to SEQ ID NO: 176798
  derived and/or modified CDS sequence (opt4) from neuraminidase__InfluenzaA__ADD97434

SEQ ID NO: 178419 - RNA, 1410 nt, Artificial Sequence; identical to SEQ ID NO: 176798
  derived and/or modified CDS sequence (opt4) from neuraminidase__InfluenzaA__ADD97444

SEQ ID NO: 178420 - RNA, 1410 nt, Artificial Sequence
  derived and/or modified CDS sequence (opt4) from neuraminidase__InfluenzaA__ADD97454
augaaccccaaccagaagaucaucaccaucggcagcgugugcaugaccaucggcauggccaaccugauccugcagaucggcaacaucaucagcaucuggaucagccacagcauccagcugggcaaccagaaccagaucgagaccugcaaccagagcgugaucaccuacgagaacaacaccugggugaaccagaccuacgugaacaucagcaacaccaacuucgccgccggccagagcguggugagcgugaagcuggccggcaacagcagccugugccccaucagcggcugggccaucuacagcaaggacaacagcaucagaaucggcagcaagggcgacguguucgugaucagagagcccuucaucagcugcagcccccuggagugcagaaccuucuuccugacccagggcgcccugcugagcgacaagcacagcaacggcaccaucaaggacagaagccccuacagaacccugaugagcugccccaucggcgaggugcccagccccuacaacagcagauucgagagcguggccuggagcgccagcgccugccacgacggcaucaacuggcugaccaucggcaucagcggccccgacaacggcgccguggccgugcugaaguacaacggcaucaucaccgacaccaucaagagcuggagaaacaacauccugagaacccaggagagcgagugcgccugcgugaacggcagcugcuucaccgugaugaccgacggccccagcgacggccaggccagcuacaagaucuucagaaucgagaagggcaagaucgugaagagcguggagaugaacgcccccaacuaccacuacgaggagugcagcugcuaccccgacagcagcgagaucaccugcgugugcagagacaacuggcacggcagcaacagacccugggugagcuucaaccagaaccuggaguaccagaucggcuacaucugcagcggcaucuucggcgacaaccccagacccaacgacaagaccggcagcugcggccccgugagcagcaacggcgccaacggcgugaagggcuucagcuucaaguacggcaacggcguguggaucggcagaaccaagagcaucagcagcagaaacggcuucgagaugaucugggaccccaacggcuggaccggcaccgacaacaacuucagcaucaagcaggacaucgugggcaucaacgaguggagcggcuacagcggcagcuucgugcagcaccccgagcugaccggccuggacugcaucagacccugcuucuggguggagcugaucagaggcagacccaaggagaacaccaucuggaccagcggcagcagcaucagcuucugcggcgugaacagcgacaccgugggcuggagcuggcccgacggcgccgagcugcccuucaccaucgacaaguga

SEQ ID NO: 178421 - RNA, 1410 nt, Artificial Sequence
  derived and/or modified CDS sequence (opt4) from neuraminidase__InfluenzaA__ADD97464
augaaccccaaccagaagaucaucaccaucggcagcgugugcaugaccaucggcauggccaaccugauccugcagaucggcaacaucaucagcaucuggaucagccacagcauccagcugggcaaccagaaccagaucgagaccugcaaccagagcgugaucaccuacgagaacaacaccugggugaaccagaccuacgugaacaucagcaacaccaacuucgccgccggccagagcguggugagcgugaagcuggccggcaacagcagccugugccccgugagcggcugggccaucuacagcaaggacaacagcaucagaaucggcagcaagggcgacguguucgugaucagagagcccuucaucagcugcagcccccuggagugcagaaccuucuuccugacccagggcgcccugcugaacgacaagcacagcaacggcaccaucaaggacagaagccccuacagaacccugaugagcugccccaucggcgaggugcccagccccuacaacagcagauucgagagcguggccuggagcgccagcgccugccacgacggcaucaacuggcugaccaucggcaucagcggccccgacaacggcgccguggccgugcugaaguacaacggcaucaucaccgacaccaucaagagcuggagaaacaacauccugagaacccaggagagcgagugcgccugcgugaacggcagcugcuucaccgugaugaccgacggccccagcgacggccaggccagcuacaagaucuucagaaucgagaagggcaagaucgugaagagcguggagaugaacgcccccaacuaccacuacgaggagugcagcugcuaccccgacagcagcgagaucaccugcgugugcagagacaacuggcacggcagcaacagacccugggugagcuucaaccagaaccuggaguaccagaucggcuacaucugcagcggcaucuucggcgacaaccccagacccaacgacaagaccggcagcugcggccccgugagcagcaacggcgccaacggcgugaagggcuucagcuucaaguacggcaacggcguguggaucggcagaaccaagagcaucagcagcagaaacggcuucgagaugaucugggaccccaacggcuggaccggcaccgacaacaacuucagcaccaagcaggacaucgugggcaucaacgaguggagcggcuacagcggcagcuucgugcagcaccccgagcugaccggccuggacugcaucagacccugcuucuggguggagcugaucagaggcagacccaaggagaacaccaucuggaccagcggcagcagcaucagcuucugcggcgugaacagcgacaccgugggcuggagcuggcccgacggcgccgagcugcccuucaccaucgacaaguga

SEQ ID NO: 178422 - RNA, 1410 nt, Artificial Sequence; identical to SEQ ID NO: 176798
  derived and/or modified CDS sequence (opt4) from neuraminidase__InfluenzaA__ADD97474

SEQ ID NO: 178423 - RNA, 1410 nt, Artificial Sequence; identical to SEQ ID NO: 176798
  derived and/or modified CDS sequence (opt4) from neuraminidase__InfluenzaA__ADD97484

SEQ ID NO: 178424 - RNA, 1410 nt, Artificial Sequence
  derived and/or modified CDS sequence (opt4) from neuraminidase__InfluenzaA__ADD97494
augaaccccaaccagaagaucaucaccaucggcagcgugugcaugaccaucggcauggccaaccugauccugcagaucggcaacaucaucagcaucuggaucagccacagcauccagcugggcaaccagaaccagaucgagaccugcaaccagagcgugaucaccuacgagaacaacaccugggugaaccagaccuacgugaacaucagcaacaccaacuucgccgccggccagagcguggugagcgugaagcuggccggcaacagcagccugugccccgugagcggcugggccaucuacagcaaggacaacagcaucagaaucggcagcaagggcgacguguucgugaucagagagcccuucaucagcugcagccccagcgagugcagaaccuucuuccugacccagggcgcccugcugaacgacaagcacagcaacggcaccaucaaggacagaagccccuacagaacccugaugagcugccccaucggcgaggugcccagccccuacaacagcagauucgagagcguggccuggagcgccagcgccugccacgacggcaucaacuggcugaccaucggcaucagcggccccgacaacggcgccguggccgugcugaaguacaacggcaucaucaccgacaccaucaagagcuggagaaacaacauccugagaacccaggagagcgagugcgccugcgugaacggcagcugcuucaccgugaugaccgacggccccagcgacggccaggccagcuacaagaucuucagaaucgagaagggcaagaucgugaagagcguggagaugaacgcccccaacuaccacuacgaggagugcagcugcuaccccgacagcagcgagaucaccugcgugugcagagacaacuggcacggcagcaacagacccugggugagcuucaaccagaaccuggaguaccagaucggcuacaucugcagcggcaucuucggcgacaaccccagacccaacgacaagaccggcagcugcggccccgugagcagcaacggcgccaacggcgugaagggcuucagcuucaaguacggcaacggcguguggaucggcagaaccaagagcaucagcagcagaaacggcuucgagaugaucugggaccccaacggcuggaccggcaccgacaacaacuucagcaucaagcaggacaucgugggcaucaacgaguggagcggcuacagcggcagcuucgugcagcaccccgagcugaccggccuggacugcaucagacccugcuucuggguggagcugaucagaggcagacccaaggagaacaccaucuggaccagcggcagcagcaucagcuucugcggcgugaacagcgacaccgugggcuggagcuggcccgacggcgccgagcugcccuucaccaucgacaaguga

SEQ ID NO: 178425 - RNA, 1410 nt, Artificial Sequence; identical to SEQ ID NO: 176798
  derived and/or modified CDS sequence (opt4) from neuraminidase__InfluenzaA__ADD97504

SEQ ID NO: 178426 - RNA, 1410 nt, Artificial Sequence; identical to SEQ ID NO: 176798
  derived and/or modified CDS sequence (opt4) from neuraminidase__InfluenzaA__ADD97514

SEQ ID NO: 178427 - RNA, 1410 nt, Artificial Sequence; identical to SEQ ID NO: 178410
  derived and/or modified CDS sequence (opt4) from neuraminidase__InfluenzaA__ADD97534

SEQ ID NO: 178428 - RNA, 1410 nt, Artificial Sequence; identical to SEQ ID NO: 176798
  derived and/or modified CDS sequence (opt4) from neuraminidase__InfluenzaA__ADD97544

SEQ ID NO: 178429 - RNA, 1410 nt, Artificial Sequence; identical to SEQ ID NO: 176798
  derived and/or modified CDS sequence (opt4) from neuraminidase__InfluenzaA__ADD97554

SEQ ID NO: 178430 - RNA, 1410 nt, Artificial Sequence; identical to SEQ ID NO: 178414
  derived and/or modified CDS sequence (opt4) from neuraminidase__InfluenzaA__ADD97564

SEQ ID NO: 178431 - RNA, 1410 nt, Artificial Sequence; identical to SEQ ID NO: 176798
  derived and/or modified CDS sequence (opt4) from neuraminidase__InfluenzaA__ADD97574

SEQ ID NO: 178432 - RNA, 1410 nt, Artificial Sequence; identical to SEQ ID NO: 176798
  derived and/or modified CDS sequence (opt4) from neuraminidase__InfluenzaA__ADD97584

SEQ ID NO: 178433 - RNA, 1410 nt, Artificial Sequence
  derived and/or modified CDS sequence (opt4) from neuraminidase__InfluenzaA__ADD97681
augaaccccaaccagaagaucaucaccaucggcagcgugugcaugaccaucggcauggccaaccugauccugcagaucggcaacaucaucagcaucuggaucagccacagcauccagcugggcaaccagaaccagaucgagaccugcaaccagagcgugaucaccuacgagaacaacaccugggugaaccagaccuacgugaacaucagcaacaccaacuucgccgccggccagagcguggugagcgugaagcuggccggcaacagcagccugugccccgugagcggcugggccaucuacagcaaggacaacagcaucagaaucggcagcaagggcgacguguucgugaucagagagcccuucaucagcugcagcccccuggagugcagaaccuucuuccugacccagggcgcccugcugaacgacaagcacagcaacggcaccaucaaggacagaagccccuacagaacccugaugagcugccccaucggcgaggugcccagccccuacaacagcagauucgagagcguggccuggagcgccagcgccugccacgacggcaucaacuggcugaccaucggcaucagcggccccgacaacggcgccguggccgugcugaaguacaacggcaucaucaccgacaccaucaagagcuggagaaacaacauccugagaacccaggagagcgagugcgccugcgugaacggcagcugcuucaccgugaugaccgacggccccagcgacggccaggccagcuacaagaucuucagaaucgagaagggcaagaucgugaagagcguggagaucaacgcccccaacuaccacuacgaggagugcagcugcuaccccgacagcagcgagaucaccugcgugugcagagacaacuggcacggcagcaacagacccugggugagcuucaaccagaaccuggaguaccagaucggcuacaucugcagcggcaucuucggcgacaaccccagacccaacgacaagaccggcagcugcggccccgugagcagcaacggcgccaacggcgugaagggcuucagcuucaaguacggcaacggcguguggaucggcagaaccaagagcaucagcagcagaaacggcuucgagaugaucugggaccccaacggcuggaccggcaccgacaacaacuucagcaucaagcaggacaucgugggcaucaacgaguggagcggcuacagcggcagcuucgugcagcaccccgagcugaccggccuggacugcaucagacccugcuucuggguggagcugaucagaggcagacccaaggagaacaccaucuggaccagcggcagcagcaucagcuucugcggcaucaacagcgacaccgugggcuggagcuggcccgacggcgccgagcugcccuucaccaucgacaaguga

SEQ ID NO: 178434 - RNA, 1410 nt, Artificial Sequence; identical to SEQ ID NO: 178390
  derived and/or modified CDS sequence (opt4) from neuraminidase__InfluenzaA__ADD97691

SEQ ID NO: 178435 - RNA, 1410 nt, Artificial Sequence; identical to SEQ ID NO: 177935
  derived and/or modified CDS sequence (opt4) from neuraminidase__InfluenzaA__ADD97701

SEQ ID NO: 178436 - RNA, 1410 nt, Artificial Sequence; identical to SEQ ID NO: 176798
  derived and/or modified CDS sequence (opt4) from neuraminidase__InfluenzaA__ADD97891

SEQ ID NO: 178437 - RNA, 1410 nt, Artificial Sequence; identical to SEQ ID NO: 176798
  derived and/or modified CDS sequence (opt4) from neuraminidase__InfluenzaA__ADD97901

SEQ ID NO: 178438 - RNA, 1410 nt, Artificial Sequence; identical to SEQ ID NO: 176798
  derived and/or modified CDS sequence (opt4) from neuraminidase__InfluenzaA__ADD97911

SEQ ID NO: 178439 - RNA, 1410 nt, Artificial Sequence; identical to SEQ ID NO: 176798
  derived and/or modified CDS sequence (opt4) from neuraminidase__InfluenzaA__ADD97921

SEQ ID NO: 178440 - RNA, 1410 nt, Artificial Sequence; identical to SEQ ID NO: 176798
  derived and/or modified CDS sequence (opt4) from neuraminidase__InfluenzaA__ADD97931

SEQ ID NO: 178441 - RNA, 1410 nt, Artificial Sequence; identical to SEQ ID NO: 177565
  derived and/or modified CDS sequence (opt4) from neuraminidase__InfluenzaA__ADD97941

SEQ ID NO: 178442 - RNA, 1410 nt, Artificial Sequence
  derived and/or modified CDS sequence (opt4) from neuraminidase__InfluenzaA__ADD97951
augaaccccaaccagaagaucaucaccaucagcagcgugugcaugaccaucggcauggccaaccugauccugcagaucggcaacaucaucagcaucuggaucagccacagcauccagcugggcaaccagaaccagaucgagaccugcaaccagagcgugaucaccuacgagaacaacaccugggugaaccagaccuacgugaacaucagcaacaccaacuucgccgccggccagagcguggugagcgugaagcuggccggcaacagcagccugugccccgugagcggcugggccaucuacagcaaggacaacagcaucagaaucggcagcaagggcgacguguucgugaucagagagcccuucaucagcugcagcccccuggagugcagaaccuucuuccugacccagggcgcccugcugaacgacaagcacagcaacggcaccaucaaggacagaagccccuacagaacccugaugagcugccccaucggcgaggugcccagccccuacaacagcagauucgagagcguggccuggagcgccagcgccugccacgacggcaucaacuggcugaccaucggcaucagcggccccgacaacggcgccguggccgugcugaaguacaacggcaucaucaccgacaccaucaagagcuggagaaacaacauccugagaacccaggagagcgagugcgccugcgugaacggcagcugcuucaccgugaugaccgacggccccagcgacggccaggccagcuacaagaucuucagaaucgagaagggcaagaucgugaagagcguggagaugaacgcccccaacuaccacuacgaggagugcagcugcuaccccgacagcagcgagaucaccugcgugugcagagacaacuggcacggcagcaacagacccugggugagcuucaaccagaaccuggaguaccagaucggcuacaucugcagcggcaucuucggcgacaaccccagacccaacgacaagaccggcagcugcggccccgugagcagcaacggcgccaacggcgugaagggcuucagcuucaaguacggcaacggcguguggaucggcagaaccaagagcaucagcagcagaaacggcuucgagaugaucugggaccccaacggcuggaccggcaccgacaacaacuucagcaucaagcaggacaucgugggcaucaacgaguggagcggcuacagcggcagcuucgugcagcaccccgagcugaccggccuggacugcaucagacccugcuucuggguggagcugaucagaggcagacccaaggagaacaccaucuggaccagcggcagcagcaucagcuucugcggcgugaacagcgacaccgugggcuggagcuggcccgacggcgccgagcugcccuucaccaucgacaaguga

SEQ ID NO: 178443 - RNA, 1410 nt, Artificial Sequence
  derived and/or modified CDS sequence (opt4) from neuraminidase__InfluenzaA__ADD97961
augaaccccaaccagaagaucaucaccaucggcagcgugugcaugaccaucggcauggugaaccugauccugcagaucggcaacaucaucagcaucuggaucagccacagcauccagcugggcaaccagaaccagaucgagaccugcaaccagagcgugaucaccuacgagaacaacaccugggugaaccagaccuacgugaacaucagcaacaccaacuucgccgccggccagagcguggugagcgugaagcuggccggcaacgccagccugugccccgugagcggcugggccaucuacagcaaggacaacagcaucagaaucggcagcaagggcgacguguucgugaucagagagcccuucaucagcugcagcccccuggagugcagaaccuucuuccugacccagggcgcccugcugaacgacaagcacagcaacggcaccaucaaggacagaagccccuacagaacccugaugagcugccccaucggcgaggugcccagccccuacaacagcagauucgagagcguggccuggagcgccagcgccugccacgacggcaucaacuggcugaccaucggcaucagcggccccgacaacggcgccguggccgugcugaaguacaacggcaucaucaccgacaccaucaagagcuggagaaacaacauccugagaacccaggagagcgagugcgccugcgugaacggcagcugcuucaccgugaugaccgacggccccagcgacggccaggccagcuacaagaucuucagaaucgagaagggcaagaucgugaagagcguggagaugaacgcccccaacuaccacuacgaggagugcagcugcuaccccgacagcagcgagaucaccugcgugugcagagacaacuggcacggcagcaacagacccugggugagcuucaaccagaaccuggaguaccagaucggcuacaucugcagcggcaucuucggcgacaaccccagacccaacgacaagaccggcagcugcggccccgugagcagcaacggcgccaacggcgugaagggcuucagcuucaaguacggcaacggcguguggaucggcagaaccaagagcaucagcagcagaaacggcuucgagaugaucugggaccccaacggcuggaccggcaccgacaacaacuucagcaucaagcaggacaucgugggcaucaacgaguggagcggcuacagcggcagcuucgugcagcaccccgagcugaccggccuggacugcaucagacccugcuucuggguggagcugaucagaggcagacccaaggagaacaccaucuggaccagcggcagcagcaucagcuucugcggcgugaacagcgacaccgugggcuggagcuggcccgacggcgccgagcugcccuucaccaucgacaaguga

SEQ ID NO: 178444 - RNA, 1410 nt, Artificial Sequence; identical to SEQ ID NO: 178390
  derived and/or modified CDS sequence (opt4) from neuraminidase__InfluenzaA__ADD97971

SEQ ID NO: 178445 - RNA, 1410 nt, Artificial Sequence; identical to SEQ ID NO: 176798
  derived and/or modified CDS sequence (opt4) from neuraminidase__InfluenzaA__ADD97981

SEQ ID NO: 178446 - RNA, 1410 nt, Artificial Sequence
  derived and/or modified CDS sequence (opt4) from neuraminidase__InfluenzaA__ADD97991
augaaccccaaccagaagaucaucaccaucggcagcgugugcaugaccaucggcauggccaaccugauccugcagaucggcaacaucaucagcaucuggaucagccacagcauccagcugggcaaccagaaccagaucgagaccugcaaccagagcgugaucaccuacgagaacaacaccugggugaaccagaccuacgugaacaucagcaacaccaacuucgccgccggccagagcguggugagcgugaagcuggccggcaacagcagccugugccccgugagcggcugggccaucuacagcaaggacaacagcaucagaaucggcagcaagggcgacguguucgugaucagagagcccuucaucagcugcagcccccuggagugcagaaccuucuuccugacccagggcgcccugcugaacgacaagcacagcaacggcaccaucaaggacagaagccccuacagaacccugaugagcugccccaucggcgaggugcccagccccuacaacagcagauucgagagcguggccuggagcgccagcgccugccacgacggcaucaacuggcugaccaucggcaucagcggccccgacaacggcgccguggccgugcugaaguacaacggcaucaucaccgacaccaucaagagcuggagaaacaacauccugagaacccaggagagcgagugcgccugcgugaacggcagcugcuucaccgugaugaccgacggccccagcgacggccaggccagcuacaagaucuucagaaucgagaagggcaagaucgugaagagcguggagaugaacgcccccaacuaccacuacgaggagugcagcugcuaccccgacagcagcgagaucaccugcgugugcagagacaacuggcacggcagcaacagacccugggugagcuucaaccagaaccuggaguaccagaucggcuacaucugcagcggcaucuucggcgacaaccccagacccaacgacaagaccggcagcugcggccccgugagcagcaacggcgccaacggcgugaagggcuucagcuucaaguacggcaacggcguguggaucggcagaaccaagagcaucagcagcagaaacggcuucgagaugaucugggaccccaacggcuggaucggcaccgacaacaacuucagcaucaagcaggacaucgugggcaucaacgaguggagcggcuacagcggcagcuucgugcagcaccccgagcugaccggccuggacugcaucagacccugcuucuggguggagcugaucagaggcagacccaaggagaacaccaucuggaccagcggcagcagcaucagcuucugcggcgugaacagcgacaccgugggcuggagcuggcccgacggcgccgagcugcccuucaccaucgacaaguga

SEQ ID NO: 178447 - RNA, 1410 nt, Artificial Sequence
  derived and/or modified CDS sequence (opt4) from neuraminidase__InfluenzaA__ADD98001
augaaccccaaccagaagaucaucaccaucggcagcgugugcaugaccaucggcauggccaaccugauccugcagaucggcaacaucaucagcaucuggaucagccacagcauccagcugggcaaccagaaccagaucgagaccugcaaccagagcgugaucaccuacgagaacaacaccugggugaaccagaccuacgugaacaucagcaacaccaacuucgccgccggccagagcguggugagcgugaagcuggccggcaacagcagccugugccccgugagcggcugggccaucuacagcaaggacaacagcaucagaaucggcagcaagggcgacguguucgugaucagagagcccuucaucagcugcagcccccuggagugcagaaccuucuuccugacccagggcgcccugcugaacgacaagcacagcaacggcaccaucaaggacagaagccccuacagaacccugaugagcugccccaucggcgaggugcccagccccuacaacagcagauucgagagcguggccuggagcgccagcgccugccacgacggcaucaacuggcugaccaucggcaucagcggccccgacaacggcgccguggccgugcugaaguacaacggcaucaucaccgacaccgugaagagcuggagaaacaacauccugagaacccaggagagcgagugcgccugcgugaacggcagcugcuucaccgugaugaccgacggccccagcgacggccaggccagcuacaagaucuucagaaucgagaagggcaagaucgugaagagcguggagaugaacgcccccaacuaccacuacgaggagugcagcugcuaccccgacagcagcgagaucaccugcgugugcagagacaacuggcacggcagcaacagacccugggugagcuucaaccagaaccuggaguaccagaucggcuacaucugcagcggcaucuucggcgacaaccccagacccaacgacaagaccggcagcugcggccccgugagcagcaacggcgccaacggcgugaagggcuucagcuucaaguacggcaacggcguguggaucggcagaaccaagagcaucagcagcagaaacggcuucgagaugaucugggaccccaacggcuggaccggcaccgacaacaacuucagcaucaagcaggacaucgugggcaucaacgaguggagcggcuacagcggcagcuucgugcagcaccccgagcugaccggccuggacugcaucagacccugcuucuggguggagcugaucagaggcagacccaaggagaacaccaucuggaccagcggcagcagcaucagcuucugcggcgugaacagcgacaccgugggcuggagcuggcccgacggcgccgagcugcccuucaccaucgacaaguga

SEQ ID NO: 178448 - RNA, 1410 nt, Artificial Sequence; identical to SEQ ID NO: 176798
  derived and/or modified CDS sequence (opt4) from neuraminidase__InfluenzaA__ADD98011

SEQ ID NO: 178449 - RNA, 1410 nt, Artificial Sequence; identical to SEQ ID NO: 176798
  derived and/or modified CDS sequence (opt4) from neuraminidase__InfluenzaA__ADD98031

SEQ ID NO: 178450 - RNA, 1410 nt, Artificial Sequence; identical to SEQ ID NO: 178447
  derived and/or modified CDS sequence (opt4) from neuraminidase__InfluenzaA__ADD98041

SEQ ID NO: 178451 - RNA, 1410 nt, Artificial Sequence; identical to SEQ ID NO: 176798
  derived and/or modified CDS sequence (opt4) from neuraminidase__InfluenzaA__ADD98051

SEQ ID NO: 178452 - RNA, 1410 nt, Artificial Sequence; identical to SEQ ID NO: 176798
  derived and/or modified CDS sequence (opt4) from neuraminidase__InfluenzaA__ADD98061

SEQ ID NO: 178453 - RNA, 1410 nt, Artificial Sequence; identical to SEQ ID NO: 176798
  derived and/or modified CDS sequence (opt4) from neuraminidase__InfluenzaA__ADD98071

SEQ ID NO: 178454 - RNA, 1410 nt, Artificial Sequence; identical to SEQ ID NO: 176798
  derived and/or modified CDS sequence (opt4) from neuraminidase__InfluenzaA__ADD98081

SEQ ID NO: 178455 - RNA, 1410 nt, Artificial Sequence; identical to SEQ ID NO: 176798
  derived and/or modified CDS sequence (opt4) from neuraminidase__InfluenzaA__ADD98091

SEQ ID NO: 178456 - RNA, 1410 nt, Artificial Sequence; identical to SEQ ID NO: 177624
  derived and/or modified CDS sequence (opt4) from neuraminidase__InfluenzaA__ADD98101

SEQ ID NO: 178457 - RNA, 1410 nt, Artificial Sequence
  derived and/or modified CDS sequence (opt4) from neuraminidase__InfluenzaA__ADD98111
augaaccccaaccagaagaucaucaccaucggcagcgugugcaugaccaucggcauggccaaccugauccugcagaucggcaacaucaucagcaucuggaucagccacagcauccagcugggcaaccagaaccagaucgagaccugcaaccagagcgugaucaccuacgagaacaacaccugggugaaccagaccuacgugaacaucagcaacaccaacuucgccgccggccagagcguggugagcgugaagcuggccggcaacagcagccugugccccgugagcggcugggccaucuacagcaaggacaacagcaucagaaucggcagcaagggcgacguguucgugaucagagagcccuucaucagcugcagcccccuggagugcagaaccuucuuccugacccagggcgcccugcugaacgacaagcacagcaacggcaccaucaaggacagaagccccuacagaacccugaugagcugccccaucggcgaggugcccagccccuacaacagcagauucgagagcguggccuggagcgccagcgccugccacgacggcaucaacuggcugaccaucggcaucagcggccccgacaacggcgccguggccgugcugaaguacaacggcaucaucaccgacaccaucaagagcuggagaaacaacauccugagaacccaggagagcgagugcgccugcgugaacggcagcugcuucaccgugaugaccgacggccccagcgacggccaggccagcuacaagaucuucagaaucgagaagggcaagaucgugaagagcguggagaugaacgcccccaacuaccacuacgaggagugcagcugcuaccccgacagcagcgagaucaccugcgugugcagagacaacuggcacggcagcaacagacccugggugagcuucaaccagaaccuggaguaccagaucggcuacaucugcagcggcauccugggcgacaaccccagacccaacgacaagaccggcagcugcggccccgugagcagcaacggcgccaacggcgugaagggcuucagcuucaaguacggcaacggcguguggaucggcagaaccaagagcaucagcagcagaaacggcuucgagaugaucugggaccccaacggcuggaccggcaccgacaacaacuucagcaucaagcaggacaucgugggcaucaacgaguggagcggcuacagcggcagcuucgugcagcaccccgagcugaccggccuggacugcaucagacccugcuucuggguggagcugaucagaggcagacccaaggagaacaccaucuggaccagcggcagcagcaucagcuucugcggcgugaacagcgacaccgugggcuggagcuggcccgacggcgccgagcugcccuucaccaucgacaaguga

SEQ ID NO: 178458 - RNA, 1410 nt, Artificial Sequence; identical to SEQ ID NO: 176798
  derived and/or modified CDS sequence (opt4) from neuraminidase__InfluenzaA__ADD98121

SEQ ID NO: 178459 - RNA, 1410 nt, Artificial Sequence; identical to SEQ ID NO: 176798
  derived and/or modified CDS sequence (opt4) from neuraminidase__InfluenzaA__ADD98131

SEQ ID NO: 178460 - RNA, 1410 nt, Artificial Sequence; identical to SEQ ID NO: 176798
  derived and/or modified CDS sequence (opt4) from neuraminidase__InfluenzaA__ADD98141

SEQ ID NO: 178461 - RNA, 1410 nt, Artificial Sequence; identical to SEQ ID NO: 176798
  derived and/or modified CDS sequence (opt4) from neuraminidase__InfluenzaA__ADD98151

SEQ ID NO: 178462 - RNA, 1410 nt, Artificial Sequence
  derived and/or modified CDS sequence (opt4) from neuraminidase__InfluenzaA__ADD98161
augaaccccaaccagaagaucaucaccaucggcagcgugugcaugaccaucggcauggccaaccugauccugcagaucggcaacaucaucagcaucuggaucagccacaccauccagcugggcaaccagaaccagaucgagaccugcaaccagagcgugaucaccuacgagaacaacaccugggugaaccagaccuacgugaacaucagcaacaccaacuucgccgccggccagagcguggugagcgugaagcuggccggcaacagcagccugugccccgugagcggcugggccaucuacagcaaggacaacagcaucagaaucggcagcaagggcgacguguucgugaucagagagcccuucaucagcugcagcccccuggagugcagaaccuucuuccugacccagggcgcccugcugaacgacaagcacagcaacggcaccaucaaggacagaagccccuacagaacccugaugagcugccccaucggcgaggugcccagccccuacaacagcagauucgagagcguggccuggagcgccagcgccugccacgacggcaucaacuggcugaccaucggcaucagcggccccgacaacggcgccguggccgugcugaaguacaacggcaucaucaccgacaccaucaagagcuggagaaacaacauccugagaacccaggagagcgagugcgccugcgugaacggcagcugcuucaccgugaugaccgacggccccagcgacggccaggccagcuacaagaucuucagaaucgagaagggcaagaucgugaagagcguggagaugaacgcccccaacuaccacuacgaggagugcagcugcuaccccgacagcagcgagaucaccugcgugugcagagacaacuggcacggcagcaacagacccugggugagcuucaaccagaaccuggaguaccagaucggcuacaucugcagcggcaucuucggcgacaaccccagacccaacgacaagaccggcagcugcggccccgugagcagcaacggcgccaacggcgugaagggcuucagcuucaaguacggcaacggcguguggaucggcagaaccaagagcaucagcagcagaaacggcuucgagaugaucugggaccccaacggcuggaccagaaccgacaacaacuucagcaucaagcaggacaucgugggcaucaacgaguggagcggcuacagcggcagcuucgugcagcaccccgagcugaccggccuggacugcaucagacccugcuucuggguggagcugaucagaggcagacccaaggagaacaccaucuggaccagcggcagcagcaucagcuucugcggcgugaacagcgacaccgugggcuggagcuggcccgacggcgccgagcugcccuucaccaucgacaaguga

SEQ ID NO: 178463 - RNA, 1410 nt, Artificial Sequence
  derived and/or modified CDS sequence (opt4) from neuraminidase__InfluenzaA__ADD98171
augaaccccaaccagaagaucaucaucaucggcagcgugugcaugaccaucggcauggccaaccugauccugcagaucggcaacaucaucagcaucuggaucagccacagcauccagcugggcaaccagaaccagaucgagaccugcaaccagagcgugaucaccuacgagaacaacaccugggugaaccagaccuacgugaacaucagcaacaccaacuucgccgccggccagaccguggugagcgugaagcuggccggcaacagcagccugugccccgugagcggcugggccaucuacagcaaggacaacagcaucagaaucggcagcaagggcgacguguucgugaucagagagcccuucaucagcugcagcccccuggagugcagaaccuucuuccugacccagggcgcccugcugaacgacaagcacagcaacggcaccaucaaggacagaagccccuacagaacccugaugagcugccccaucggcgaggugcccagccccuacaacagcagauucgagagcguggccuggagcgccagcgccugccacgacggcaucaacuggcugaccaucggcaucagcggccccgacaacggcgccguggccgugcugaaguacaacggcaucaucaccgacaccaucaagagcuggagaaacaacauccugagaacccaggagagcgagugcgccugcgugaacggcagcugcuucaccgugaugaccgacggccccagcgacggccaggccagcuacaagaucuucagaaucgagaagggcaagaucgugaagagcguggagaugaacgcccccaacuaccacuacgaggagugcagcugcuaccccgacagcagcgagaucaccugcgugugcagagacaacuggcacggcagcaacagacccugggugagcuucaaccagaaccuggaguaccagaucggcuacaucugcagcggcaucuucggcgacaaccccagaagcaacgacaagaccggcagcugcggccccgugagcagcaacggcgccaacggcgugaagggcuucagcuucaaguacggcaacggcguguggaucggcagaaccaagagcaucagcagcagaaacggcuucgagaugaucugggaccccaacggcuggaccggcaccgacaacaacuucagcaucaagcaggacaucgugggcaucaacgaguggagcggcuacagcggcagcuucgugcagcaccccgagcugaccggccuggacugcaucagacccugcuucuggguggagcugaucagaggcagacccaaggagaacaccaucuggaccagcggcagcagcaucagcuucugcggcgugaacagcgacaccgugggcuggagcuggcccgacggcgccgagcugcccuucaccaucgacaaguga

SEQ ID NO: 178464 - RNA, 1410 nt, Artificial Sequence
  derived and/or modified CDS sequence (opt4) from neuraminidase__InfluenzaA__ADD98181
augaaccccaaccagaagaucaucaccaucggcagcgugugcaugaccaucggcauggccaaccugauccugcagaucggcaacaugaucagcaucuggaucagccacagcauccagcuggagaaccagaaccagaucgagaccugcaaccagagcgugaucaccuacgagaacaacaccugggugaaccagaccuacgugaacaucagcaacaccaacuucgccgccggccagagcguggugagcgugaagcuggccggcaacagcagccugugccccgugagcggcugggccaucuacagcaaggacaacagcaucagaaucggcagcaagggcgacguguucgugaucagagagcccuucaucagcugcagcccccuggagugcagaaccuucuuccugacccagggcgcccugcugaacgacaagcacagcaacggcaccaucaaggacagaagccccuacagaacccugaugagcugccccaucggcgaggugcccagccccuacaacagcagauucgagagcguggccuggagcgccagcgccugccacgacggcaucaacuggcugaccaucggcaucagcggccccgacaacggcgccguggccgugcugaaguacaacggcaucaucaccgacaccaucaagagcuggagaaacaacauccugagaacccaggagagcgagugcgccugcgugaacggcagcugcuucaccgugaugaccgacggccccagcgacggccaggccagcuacaagaucuucagaaucgagaagggcaagaucgugaagagcguggagaugaacgcccccaacuaccacuacgaggagugcagcugcuaccccgacagcagcgagaucaccugcgugugcagagacaacuggcacggcagcaacagacccugggugagcuucaaccagaaccuggaguaccagaucggcuacaucugcagcggcaucuucggcgacaaccccagacccaacgacaagaccggcagcugcggccccgugagcagcaacggcgccaacggcgugaagggcuucagcuucaaguacggcaacggcguguggaucggcagaaccaagagcaucagcagcagaaacggcuucgagaugaucugggaccccaacggcuggaccggcaccgacaacaacuucagcaucaagcaggacaucgugggcaucaacgaguggagcggcuacagcggcagcuucgugcagcaccccgagcugaccggccuggacugcaucagacccugcuucuggguggagcugaucagaggcagacccaaggagaacaccaucuggaccagcggcagcagcaucagcuucugcggcgugaacagcgacaccgugggcuggagcuggcccgacggcgccgagcugcccuucaccaucgacaaguga

SEQ ID NO: 178465 - RNA, 1410 nt, Artificial Sequence; identical to SEQ ID NO: 176798
  derived and/or modified CDS sequence (opt4) from neuraminidase__InfluenzaA__ADD98201

SEQ ID NO: 178466 - RNA, 1410 nt, Artificial Sequence; identical to SEQ ID NO: 176798
  derived and/or modified CDS sequence (opt4) from neuraminidase__InfluenzaA__ADD98211

SEQ ID NO: 178467 - RNA, 1410 nt, Artificial Sequence; identical to SEQ ID NO: 178021
  derived and/or modified CDS sequence (opt4) from neuraminidase__InfluenzaA__ADE20324

SEQ ID NO: 178468 - RNA, 1410 nt, Artificial Sequence; identical to SEQ ID NO: 178021
  derived and/or modified CDS sequence (opt4) from neuraminidase__InfluenzaA__ADE20334

SEQ ID NO: 178469 - RNA, 1410 nt, Artificial Sequence; identical to SEQ ID NO: 178021
  derived and/or modified CDS sequence (opt4) from neuraminidase__InfluenzaA__ADE20344

SEQ ID NO: 178470 - RNA, 1410 nt, Artificial Sequence; identical to SEQ ID NO: 178021
  derived and/or modified CDS sequence (opt4) from neuraminidase__InfluenzaA__ADE20354

SEQ ID NO: 178471 - RNA, 1410 nt, Artificial Sequence; identical to SEQ ID NO: 178021
  derived and/or modified CDS sequence (opt4) from neuraminidase__InfluenzaA__ADE20378

SEQ ID NO: 178472 - RNA, 1410 nt, Artificial Sequence; identical to SEQ ID NO: 178021
  derived and/or modified CDS sequence (opt4) from neuraminidase__InfluenzaA__ADE20391

SEQ ID NO: 178473 - RNA, 1410 nt, Artificial Sequence; identical to SEQ ID NO: 178021
  derived and/or modified CDS sequence (opt4) from neuraminidase__InfluenzaA__ADE20631

SEQ ID NO: 178474 - RNA, 1410 nt, Artificial Sequence; identical to SEQ ID NO: 178021
  derived and/or modified CDS sequence (opt4) from neuraminidase__InfluenzaA__ADE20641

SEQ ID NO: 178475 - RNA, 1410 nt, Artificial Sequence
  derived and/or modified CDS sequence (opt4) from neuraminidase__InfluenzaA__ADE20651
augaaccccaaccagaagaucaucaccaucggcagcgugugcaugaccaucggcauggccaaccugauccugcagaucggcaacaucaucagcaucuggaucagccacagcauccagcugggcaaccagaaccagaucgagaccugcaaccagagcgugaucaccuacgagaacaacaccugggugaaccagaccuacgugaacaucagcaacaccaacuucgccgccggccagagcguggugagcgugaagcuggugggcaacagcagccugugccccgugagcggcugggccaucuacagcaaggacaacagcgugagaaucggcagcaagggcgacguguucgugaucagagagcccuucaucagcugcagcccccuggagugcagaaccuucuuccugacccagggcgcccugcugaacgacaagcacagcaacggcaccaucaaggacagaagccccuacagaacccugaugagcugccccaucggcgaggugcccagccccuacaacagcagauucgagagcguggccuggagcgccagcgccugccacgacggcaucaacuggcugaccaucggcaucagcggccccgacaacggcgccguggccgugcugaaguacaacggcaucaucaccgacaccaucaagagcuggagaaacaacauccugagaacccaggagagcgagugcgccugcgugaacggcagcugcuucaccgugaugaccgacggccccagcgacggccaggccagcuacaagaucuucagaaucgagaagggcaagaucgugaagagcguggagaugaacgcccccaacuaccacuacgaggagugcagcugcuaccccgacagcagcgagaucaccugcgugugcagagacaacuggcacggcagcaacagacccugggugagcuucaaccagaaccuggaguaccagaucggcuacaucugcagcggcaucuucggcgacaaccccagacccaacgacaagaccggcagcugcggccccgugagcagcaacggcgccaacggcgugaagggcuucagcuucaaguacggcaacggcguguggaucggcagaaccaagagcaucagcagcagaaacggcuucgagaugaucugggaccccaacggcuggaccggcaccgacaacaacuucagcaucaagcaggacaucgugggcaucaacgaguggagcggcuacagcggcagcuucgugcagcaccccgagcugaccggccuggacugcaucagacccugcuucuggguggagcugaucagaggcagacccaaggagaacaccaucuggaccagcggcagcagcaucagcuucugcggcgugaacagcgacaccgugggcuggagcuggcccgacggcgccgagcugcccuucaccaucgacaaguga

SEQ ID NO: 178476 - RNA, 1410 nt, Artificial Sequence; identical to SEQ ID NO: 178021
  derived and/or modified CDS sequence (opt4) from neuraminidase__InfluenzaA__ADE20661

SEQ ID NO: 178477 - RNA, 1410 nt, Artificial Sequence; identical to SEQ ID NO: 178021
  derived and/or modified CDS sequence (opt4) from neuraminidase__InfluenzaA__ADE20671

SEQ ID NO: 178478 - RNA, 1410 nt, Artificial Sequence; identical to SEQ ID NO: 178021
  derived and/or modified CDS sequence (opt4) from neuraminidase__InfluenzaA__ADE20681

SEQ ID NO: 178479 - RNA, 1410 nt, Artificial Sequence
  derived and/or modified CDS sequence (opt4) from neuraminidase__InfluenzaA__ADE20701
augaaccccaaccagaagaucaucaccaucggcagcgugugcaugaccaucggcauggccaaccugauccugcagaucggcaacaucaucagcaucuggaucagccacagcauccagcugggcaaccagaaccagaucgagaccugcaaccagagcgugaucaccuacgagaacaacaccugggugaaccagaccuacgugaacaucagcaacaccaacuucgccgccggccagagcguggugagcgugaagcuggccggcaacagcagccugugccccgugagcggcugggccaucuacagcaaggacaacagcgugagaaucggcagcaagggcgacguguucgugaucagagagcccuucaucagcugcagcccccuggagugcagaaccuucuuccugacccagggcgcccugcugaacgacaagcacagcaacggcaccaucaaggacagaagccccuacagaacccugaugagcugccccaucggcgaggugcccagccccuacaacagcagauucgagagcguggccuggagcgccagcgccugccacgacggcaucaacuggcugaccaucggcaucagcggccccgacaacggcgccguggccgugcugaaguacaacggcgugaucaccgacaccaucaagagcuggagaaacaacauccugagaacccaggagagcgagugcgccugcgugaacggcagcugcuucaccgugaugaccgacggccccagcaacggccaggccagcuacaagaucuucagaaucgagaagggcaagaucgugaagagcguggagaugaacgcccccaacuaccacuacgaggagugcagcugcuaccccgacagcagcgagaucaccugcgugugcagagacaacuggcacggcagcaacagacccugggugagcuucaaccagaaccuggaguaccagaucggcuacaucugcagcggcaucuucggcgacaaccccagacccaacgacaagaccggcagcugcggccccgugagcagcaacggcgccaacggcgugaagggcuucagcuucaaguacggcaacggcguguggaucggcagaaccaagagcaucagcagcagaaacggcuucgagaugaucugggaccccaacggcuggaccggcaccgacaacaacuucagcaucaagcaggacaucgugggcaucaacgaguggagcggcuacagcggcagcuucgugcagcaccccgagcugaccggccuggacugcaucagacccugcuucuggguggagcugaucagaggcagacccaaggagaacaccaucuggaccagcggcagcagcaucagcuucugcggcgugaacagcgacaccgugggcuggagcuggcccgacggcgccgagcugcccuucaccaucgacaaguga

SEQ ID NO: 178480 - RNA, 1410 nt, Artificial Sequence; identical to SEQ ID NO: 178021
  derived and/or modified CDS sequence (opt4) from neuraminidase__InfluenzaA__ADE20711

SEQ ID NO: 178481 - RNA, 1410 nt, Artificial Sequence
  derived and/or modified CDS sequence (opt4) from neuraminidase__InfluenzaA__ADE20721
augaaccccaaccagaagaucaucaccaucggcagcgugugcaugaccaucggcauggccaaccugauccugcagaucggcaacaucaucagcaucuggaucagccacagcauccagcugggcaaccagaaccagaucgagaccugcaaccagagcgugaucaccuacgagaacaacaccugggugaaccagaccuacgugaacaucagcaacaccaacuucgccgccggccagagcguggugagcgugaagcuggugggcaacagcagccugugccccgugagcggcugggccaucuacagcaaggacaacagcgugagaaucggcagcaagggcgacguguucgugaucagagagcccuucaucagcugcagcccccuggagugcagaaccuucuuccugacccagggcgcccugcugaacgacaagcacagcaacggcaccaucaaggacagaagccccuacagaacccugaugagcugccccaucggcgaggugcccagccccuacaacagcagauucgagagcguggccuggagcgccagcgccugccacgacggcaucaacuggcugaccaucggcaucagcggccccgacaacggcgccguggccgugcugaaguacaacggcaucaucaccgacaccaucaagagcuggagaaacaacauccugagaacccaggagagcgagugcgccugcgugaacggcagcugcuucaccgugaugaccgacggccccagcaacggccaggccagcuacaagaucuucagaaucgagaagggcaagaucgugaagagcguggagaugaacgcccccaacuaccacuacgaggagugcagcugcuaccccgacagcagcgagaucaccugcgugugcagagacaacuggcacggcagcaacagacccugggugagcuucaaccagaaccuggaguaccagaucggcuacaucugcagcggcaucuucggcgacaaccccagacccaacgacaagaccggcagcugcggccccgugagcagcaacggcgccaacggcgugaagggcuucagcuucaaguacggcaacggcguguggaucggcagaaccaagagcaucagcagcagaaacggcuucgagaugaucugggaccccaacggcuggaccggcaccgacaacaacuucagcaucaagcaggacaucgugggcaucaacgaguggagcggcuacagcggcagcuucgugcagcaccccgagcugaccggccuggacugcaucagacccugcuucuggguggagcugaucagaggcagacccaaggagaacaccaucuggaccagcggcagcagcaucagcuucugcggcgugaacagcgacaccgugggcuggagcuggcccgacggcgccgagcugcccuucaccaucgacagauga

SEQ ID NO: 178482 - RNA, 1410 nt, Artificial Sequence; identical to SEQ ID NO: 178479
  derived and/or modified CDS sequence (opt4) from neuraminidase__InfluenzaA__ADE20731

SEQ ID NO: 178483 - RNA, 1410 nt, Artificial Sequence; identical to SEQ ID NO: 178021
  derived and/or modified CDS sequence (opt4) from neuraminidase__InfluenzaA__ADE20741

SEQ ID NO: 178484 - RNA, 1410 nt, Artificial Sequence; identical to SEQ ID NO: 178021
  derived and/or modified CDS sequence (opt4) from neuraminidase__InfluenzaA__ADE20751

SEQ ID NO: 178485 - RNA, 1410 nt, Artificial Sequence; identical to SEQ ID NO: 178479
  derived and/or modified CDS sequence (opt4) from neuraminidase__InfluenzaA__ADE20761

SEQ ID NO: 178486 - RNA, 1410 nt, Artificial Sequence; identical to SEQ ID NO: 178479
  derived and/or modified CDS sequence (opt4) from neuraminidase__InfluenzaA__ADE20781

SEQ ID NO: 178487 - RNA, 1410 nt, Artificial Sequence; identical to SEQ ID NO: 176798
  derived and/or modified CDS sequence (opt4) from neuraminidase__InfluenzaA__ADE20791

SEQ ID NO: 178488 - RNA, 1410 nt, Artificial Sequence; identical to SEQ ID NO: 176798
  derived and/or modified CDS sequence (opt4) from neuraminidase__InfluenzaA__ADE20801

SEQ ID NO: 178489 - RNA, 1410 nt, Artificial Sequence; identical to SEQ ID NO: 176798
  derived and/or modified CDS sequence (opt4) from neuraminidase__InfluenzaA__ADE20811

SEQ ID NO: 178490 - RNA, 1410 nt, Artificial Sequence; identical to SEQ ID NO: 176798
  derived and/or modified CDS sequence (opt4) from neuraminidase__InfluenzaA__ADE20821

SEQ ID NO: 178491 - RNA, 1410 nt, Artificial Sequence; identical to SEQ ID NO: 176798
  derived and/or modified CDS sequence (opt4) from neuraminidase__InfluenzaA__ADE20831

SEQ ID NO: 178492 - RNA, 1410 nt, Artificial Sequence; identical to SEQ ID NO: 176798
  derived and/or modified CDS sequence (opt4) from neuraminidase__InfluenzaA__ADE20841

SEQ ID NO: 178493 - RNA, 1410 nt, Artificial Sequence; identical to SEQ ID NO: 176798
  derived and/or modified CDS sequence (opt4) from neuraminidase__InfluenzaA__ADE20851

SEQ ID NO: 178494 - RNA, 1410 nt, Artificial Sequence; identical to SEQ ID NO: 178414
  derived and/or modified CDS sequence (opt4) from neuraminidase__InfluenzaA__ADE20861

SEQ ID NO: 178495 - RNA, 1410 nt, Artificial Sequence; identical to SEQ ID NO: 176798
  derived and/or modified CDS sequence (opt4) from neuraminidase__InfluenzaA__ADE20871

SEQ ID NO: 178496 - RNA, 1410 nt, Artificial Sequence; identical to SEQ ID NO: 178410
  derived and/or modified CDS sequence (opt4) from neuraminidase__InfluenzaA__ADE20881

SEQ ID NO: 178497 - RNA, 1410 nt, Artificial Sequence; identical to SEQ ID NO: 176798
  derived and/or modified CDS sequence (opt4) from neuraminidase__InfluenzaA__ADE20891

SEQ ID NO: 178498 - RNA, 1410 nt, Artificial Sequence; identical to SEQ ID NO: 176798
  derived and/or modified CDS sequence (opt4) from neuraminidase__InfluenzaA__ADE20901

SEQ ID NO: 178499 - RNA, 1410 nt, Artificial Sequence; identical to SEQ ID NO: 176798
  derived and/or modified CDS sequence (opt4) from neuraminidase__InfluenzaA__ADE20911

SEQ ID NO: 178500 - RNA, 1410 nt, Artificial Sequence; identical to SEQ ID NO: 176798
  derived and/or modified CDS sequence (opt4) from neuraminidase__InfluenzaA__ADE20921

SEQ ID NO: 178501 - RNA, 1410 nt, Artificial Sequence
  derived and/or modified CDS sequence (opt4) from neuraminidase__InfluenzaA__ADE20931
augaaccccaaccagaagaucaucaccaucggcagcgugugcaugaccaucggcauggccaaccugauccugcagaucggcaacaucaucagcaucuggaucagccacagcauccagcugggcaaccagaaccagaucgagaccugcaaccagagcgugaucaccuacgagaacaacaccugggugaaccagaccuacgugaacaucagcaacaccaacuucgccgccggccagagcguggugagcgugaagcuggccggcaacagcagccugugccccgugagcggcugggccaucuacagcaaggacaacagcaucagaaucggcagcaagggcgacguguucgugaucagagagcccuucaucagcugcagcccccuggagugcagaaccuucuuccugacccagggcgcccugcugaacgacaagcacagcaacggcaccaucaaggacagaagccccuacagaacccugaugagcugccccaucggcgaggugcccagccccuacaacagcagauucgagagcguggccuggagcgccagcgccugccacgacggcaucaacuggcugaccaucggcaucagcggccccgacaacggcgccguggccgugcugaaguacaacggcaucaucaccgacaccaucaagagcuggagaaacaacauccugagaacccaggagagcgagugcgccugcgugaacggcagcugcuucaccgugaugaccgacggccccagcgacggccaggccagcuacaagaucuucagaaucgagaagggcaagaucgugaagagcguggagaugaacgcccccaacuaccacuacgaggagugcagcugcuaccccgacagcagcgagaucaccugcgugugcagagacaacuggcacggcagcaacagacccugggugagcuucaaccagaaccuggaguaccagaucggcuacaucugcagcggcaucuucggcgacaaccccagacccaacgacaagaccggcagcugcggccccgugcugagcaacggcgccaacggcgugaagggcuucagcuucaaguacggcaacggcguguggaucggcagaaccaagagcaucggcagcagaaacggcuucgagaugaucugggaccccaacggcuggaccggcaccgacaacaacuucagcaucaagcaggacaucgugggcaucaacgaguggagcggcuacagcggcagcuucgugcagcaccccgagcugaccggccuggacugcaucagacccugcuucuggguggagcugaucagaggcagacccaaggagaacaccaucuggaccagcggcagcagcaucagcuucugcggcgugaacagcgacaccgugggcuggagcuggcccgacggcgccgagcugcccuucaccaucgacaaguga

SEQ ID NO: 178502 - RNA, 1410 nt, Artificial Sequence; identical to SEQ ID NO: 176798
  derived and/or modified CDS sequence (opt4) from neuraminidase__InfluenzaA__ADE20941

SEQ ID NO: 178503 - RNA, 1410 nt, Artificial Sequence
  derived and/or modified CDS sequence (opt4) from neuraminidase__InfluenzaA__ADE20951
augaaccccaaccagaagaucaucaccaucggcagcgugugcaugaccaucggcauggccaaccugauccugcagaucggcaacaucaucagcaucuggaucagccacagcauccagcugggcaaccagaaccagaucgagaccugcaaccagagcgugaucaccuacgagaacaacaccugggugaaccagaccuacgugaacaucagcaacaccaacuucgccgccggccagagcguggugagcgugaagcuggccggcaacagcagccugugccccgugagcggcugggccaucuacagcaaggacaacagcaucagaaucggcagcaagggcgacguguucgugaucagagagcccuucaucagcugcagcccccuggagugcagaaccuucuuccugacccagggcgcccugcugaacgacaagcacagcaacggcaccaucaaggacagaagccccuacagaacccugaugagcugccccaucggcgaggugcccagccccuacaacagcagauucgagagcguggccuggagcgccagcgccugccacgacggcaucaacuggcugaccaucggcaucagcggccccgacaacggcgccguggccgugcugaaguacaacggcaucaucaccgacaccaucaagagcuggagaaacaacauccugagaacccaggagagcgagugcgccugcgugaacggcagcugcuucaccgugaugaccgacggccccagcgacggccaggccagcuacaagaucuucagaaucgagaagggcaagaucgugaagagcguggagaugaacgcccccaacuaccacuacgaggagugcagcugcuaccccgacagcagcgagaucaccugcgugugcagagacaacuggcacggcagcaacagacccugggugagcuucaaccagaaccuggaguaccagaucggcuacaucugcagcggcaucuucggcgacaaccccagacccaacgacaagaccggcagcugcggccccgugagcagcaacggcgccaacggcgugaagggcuucagcuucaaguacggcaacggcguguggaucggcagaaccaagagcaucagcagcagaaacggcuucgagaugaucugggaccccaacggcuggaccggcaccgacaacaacuucagcaucaagcaggacguggugggcaucaacgaguggagcggcuacagcggcagcuucgugcagcaccccgagcugaccggccuggacugcaucagacccugcuucuggguggagcugaucagaggcagacccaaggagaacaccaucuggaccagcggcagcagcaucagcuucugcggcgugaacagcgacaccgugggcuggagcuggcccgacggcgccgagcugcccuucaccaucgacaaguga

SEQ ID NO: 178504 - RNA, 1410 nt, Artificial Sequence
  derived and/or modified CDS sequence (opt4) from neuraminidase__InfluenzaA__ADE20961
augaaccccaaccagaagaucaucaccaucggcagcgugugcaugaccaucggcauggccaaccugauccugcagaucggcaacaucaucagcaucuggaucagccacagcauccagcugggcaaccagaaccagaucgagaccugcaaccagagcgugaucaccuacgagaacaacaccugggugaaccagaccuacgugaacaucagcaacaccaacuucgccgccggccagagcguggugagcgugaagcuggccggcaacagcagccugugccccgugagcggcugggccaucuacagcaaggacaacagcaucagaaucggcagcaagggcgacguguucgugaucagagagcccuucaucagcugcagcccccuggagugcagaaccuucuuccugacccagggcgcccugcugaacgacaagcacagcaacggcaccaucaaggacagaagccccuacagaacccugaugagcugccccaucggcgaggugcccagccccuacaacagcagauucgagagcguggccuggagcgccagcgccugccacgacggcaucaacuggcugaccaucggcaucagcggccccgacaacggcgccguggccgugcugaaguacaacgacaucaucaccgacaccaucaagagcuggagaaacaacauccugagaacccaggagagcgagugcgccugcgugaacggcagcugcuucaccgugaugaccgacggccccagcgacggccaggccagcuacaagaucuucagaaucgagaagggcaagaucgugaagagcguggagaugaacgcccccaacuaccacuacgaggagugcagcugcuaccccgacagcagcgagaucaccugcgugugcagagacaacuggcacggcagcaacagacccugggugagcuucaaccagaaccuggaguaccagaucggcuacaucugcagcggcaucuucggcgacaaccccagacccaacgacaagaccggcagcugcggccccgugagcagcaacggcgccaacggcgugaagggcuucagcuucaaguacggcaacggcguguggaucggcagaaccaagagcaucagcagcagaaacggcuucgagaugaucugggaccccaacggcuggaccggcaccgacaacaacuucagcaucaagcaggacaucgugggcaucaacgaguggagcggcuacagcggcagcuucgugcagcaccccgagcugaccggccuggacugcaucagacccugcuucuggguggagcugaucagaggcagacccaaggagaacaccaucuggaccagcggcagcagcaucagcuucugcggcgugaacagcgacaccgugggcuggagcuggcccgacggcgccgagcugcccuucaccaucgacaaguga

SEQ ID NO: 178505 - RNA, 1410 nt, Artificial Sequence; identical to SEQ ID NO: 176798
  derived and/or modified CDS sequence (opt4) from neuraminidase__InfluenzaA__ADE20971

SEQ ID NO: 178506 - RNA, 1410 nt, Artificial Sequence; identical to SEQ ID NO: 178414
  derived and/or modified CDS sequence (opt4) from neuraminidase__InfluenzaA__ADE20981

SEQ ID NO: 178507 - RNA, 1410 nt, Artificial Sequence; identical to SEQ ID NO: 176798
  derived and/or modified CDS sequence (opt4) from neuraminidase__InfluenzaA__ADE20991

SEQ ID NO: 178508 - RNA, 1410 nt, Artificial Sequence
  derived and/or modified CDS sequence (opt4) from neuraminidase__InfluenzaA__ADE21001
augaaccccaaccagaagaucaucaccaucggcagcgugugcaugaccaucggcauggccaaccugauccugcagaucggcaacaucaucagcaucuggaucagccacaccauccagcugggcaaccagaaccagaucgagaccugcaaccagagcgugaucaccuacgagaacaacaccugggugaaccagaccuacgugaacaucagcaacaccaacuucgccgccggccagagcguggugagcgugaagcuggccggcaacagcagccugugccccgugagcggcugggccaucuacagcaaggacaacagcaucagaaucggcagcaagggcgacguguucaucaucagagagcccuucaucagcugcagcccccuggagugcagaaccuucuuccugacccagggcgcccugcugaacgacaagcacagcaacggcaccaucaaggacagaagccccuacagaacccugaugagcugccccaucggcgaggugcccagccccuacaacagcagauucgagagcguggccuggagcgccagcgccugccacgacggcaucaacuggcugaccaucggcaucagcggccccgacaacggcgccguggccgugcugaaguacaacggcaucaucaccgacaccaucaagagcuggagaaacaacauccugagaacccaggagagcgagugcgccugcgugaacggcagcugcuucaccgugaugaccgacggccccagcgacggccaggccagcuacaagaucuucagaaucgagaagggcaagaucgugaagagcguggagaugaacgcccccaacuaccacuacgaggagugcagcugcuaccccgacagcagcgagaucaccugcgugugcagagacaacuggcacggcagcaacagacccugggugagcuucaaccagaaccuggaguaccagaucggcuacaucugcagcggcaucuucggcgacaaccccagacccaacgacaagaccggcagcugcggccccgugagcagcaacggcgccaacggcgugaagggcuucagcuucaaguacggcaacggcguguggaucggcagaaccaagagcaucagcagcagaaacggcuucgagaugaucugggaccccaacggcuggaccggcaccgacaacaacuucagcaucaagcaggacaucgugggcaucaacgaguggagcggcuacagcggcagcuucgugcagcaccccgagcugaccggccuggacugcaucagacccugcuucuggguggagcugaucagaggcagacccaaggagaacaccaucuggaccagcggcagcagcaucagcuucugcggcgugaacagcgacaccgugggcuggagcuggcccgacggcgccgagcugcccuucaccaucgacaaguga

SEQ ID NO: 178509 - RNA, 1410 nt, Artificial Sequence; identical to SEQ ID NO: 176798
  derived and/or modified CDS sequence (opt4) from neuraminidase__InfluenzaA__ADE21011

SEQ ID NO: 178510 - RNA, 1410 nt, Artificial Sequence; identical to SEQ ID NO: 176798
  derived and/or modified CDS sequence (opt4) from neuraminidase__InfluenzaA__ADE21021

SEQ ID NO: 178511 - RNA, 1410 nt, Artificial Sequence; identical to SEQ ID NO: 178447
  derived and/or modified CDS sequence (opt4) from neuraminidase__InfluenzaA__ADE21031

SEQ ID NO: 178512 - RNA, 1410 nt, Artificial Sequence
  derived and/or modified CDS sequence (opt4) from neuraminidase__InfluenzaA__ADE21041
augaaccccaaccagaagaucaucaccaucggcagcgugugcaugaccaucggcauggccaaccugauccugcagaucggcaacaucaucagcaucuggaucagccacagcauccagcugggcaaccagaaccagaucgagaccugcaaccagagcgugaucaccuacgagaacaacaccugggugaaccagaccuacgugaacaucagcaacaccaacuucgccgccggccagagcguggugagcgugaagcuggccggcaacagcagccugugccccgugagcggcugggccaucuacagcaaggacaacagcaucagaaucggcagcaagggcgacguguucgugaucagagagcccuucaucagcugcagcccccuggagugcagaaccuucuuccugacccagggcgcccugcugaacgacaagcacagcaacggcaccaucaaggacagaagccccuacagaacccugaugagcugccccaucggcgaggugcccagccccuacaacagcagauucgagagcguggccuggagcgccagcgccugccacgacggcaucaacuggcugaccaucggcaucagcggccccgacaacggcgccguggccgugcugaaguacaacggcaucaucaccgacaccaucaagagcuggagaaacaacauccugagaacccaggagagcgagugcgccugcgugaacggcagcugcuucaccgugaugaccgacggccccagcgacggccaggccagcuacaagaucuucagaaucgagaagggcaagaucgugaagagcaucgagaugaacgcccccaacuaccacuacgaggagugcagcugcuaccccgacagcagcgagaucaccugcgugugcagagacaacuggcacggcagcaacagacccugggugagcuucaaccagaaccuggaguaccagaucggcuacaucugcagcggcaucuucggcgacaaccccagacccaacgacaagaccggcagcugcggccccgugagcagcaacggcgccaacggcgugaagggcuucagcuucaaguacggcaacggcguguggaucggcagaaccaagagcaucagcagcagaaacggcuucgagaugaucugggaccccaacggcuggaccggcaccgacaacaacuucagcaucaagcaggacaucgugggcaucaacgaguggagcggcuacagcggcagcuucgugcagcaccccgagcugaccggccuggacugcaucagacccugcuucuggguggagcugaucagaggcagacccaaggagaacaccaucuggaccagcggcagcagcaucagcuucugcggcgugaacagcgacaccgugggcuggagcuggcccgacggcgccgagcugcccuucaccaucgacaaguga

SEQ ID NO: 178513 - RNA, 1410 nt, Artificial Sequence; identical to SEQ ID NO: 176798
  derived and/or modified CDS sequence (opt4) from neuraminidase__InfluenzaA__ADE21051

SEQ ID NO: 178514 - RNA, 1410 nt, Artificial Sequence
  derived and/or modified CDS sequence (opt4) from neuraminidase__InfluenzaA__ADE21071
augaaccccaaccagaagaucaucaccaucggcagcgugugcaugaccaucggcauggccaaccugauccugcagaucggcaacaucaucagcaucuggaucagccacagcauccagcugggcaaccagaaccagaucgagaccugcaaccagagcgugaucaccuacgagaacaacaccugggugaaccagaccuacgugaacaucagcaacaccaacuucgccgccggccagagcguggugagcgugaagcuggccggcaacagcagccugugccccgugaacggcugggccaucuacagcaaggacaacagcaucagaaucggcagcaagggcgacguguucgugaucagagagcccuucaucagcugcagcccccuggagugcagaaccuucuuccugacccagggcgcccugcugaacgacaagcacagcaacggcaccaucaaggacagaagccccuacagaacccugaugagcugccccaucggcgaggugcccagccccuacaacagcagauucgagagcguggccuggagcgccagcgccugccacgacggcaucaacuggcugaccaucggcaucagcggccccgacaacggcgccguggccgugcugaaguacaacggcaucaucaccgacaccaucaagagcuggagaaacaacauccugagaacccaggagagcgagugcgccugcgugaacggcagcugcuucaccgugaugaccgacggccccagcgacggccaggccagcuacaagaucuucagaaucgagaagggcaagaucgugaagagcguggagaugaacgcccccaacuaccacuacgaggagugcagcugcuaccccgacagcagcgagaucaccugcgugugcagagacaacuggcacggcagcaacagacccugggugagcuucaaccagaaccuggaguaccagaucggcuacaucugcagcggcaucuucggcgacaaccccagacccaacgacaagaccggcagcugcggccccgugagcagcaacggcgccaacggcgugaagggcuucagcuucaaguacggcaacggcguguggaucggcagaaccaagagcaucagcagcagaaacggcuucgagaugaucugggaccccaacggcuggaccggcaccgacaacaaguucagcaucaagcaggacaucgugggcaucaacgaguggagcggcuacagcggcagcuucgugcagcaccccgagcugaccggccuggacugcaucagacccugcuucuggguggagcugaucagaggcagacccaaggagaacaccaucuggaccagcggcagcagcaucagcuucugcggcgugaacagcgacaccgugggcuggagcuggcccgacggcgccgagcugcccuucaccaucgacaaguga

SEQ ID NO: 178515 - RNA, 1413 nt, Artificial Sequence; identical to SEQ ID NO: 176692
  derived and/or modified CDS sequence (opt4) from neuraminidase__InfluenzaA__ADE28752

SEQ ID NO: 178516 - RNA, 1413 nt, Artificial Sequence; identical to SEQ ID NO: 177521
  derived and/or modified CDS sequence (opt4) from neuraminidase__InfluenzaA__ADE28763

SEQ ID NO: 178517 - RNA, 1410 nt, Artificial Sequence; identical to SEQ ID NO: 178021
  derived and/or modified CDS sequence (opt4) from neuraminidase__InfluenzaA__ADE28773

SEQ ID NO: 178518 - RNA, 1410 nt, Artificial Sequence; identical to SEQ ID NO: 178021
  derived and/or modified CDS sequence (opt4) from neuraminidase__InfluenzaA__ADE28783

SEQ ID NO: 178519 - RNA, 1410 nt, Artificial Sequence; identical to SEQ ID NO: 178479
  derived and/or modified CDS sequence (opt4) from neuraminidase__InfluenzaA__ADE28803

SEQ ID NO: 178520 - RNA, 1410 nt, Artificial Sequence; identical to SEQ ID NO: 176798
  derived and/or modified CDS sequence (opt4) from neuraminidase__InfluenzaA__ADE28813

SEQ ID NO: 178521 - RNA, 1410 nt, Artificial Sequence; identical to SEQ ID NO: 176798
  derived and/or modified CDS sequence (opt4) from neuraminidase__InfluenzaA__ADE28823

SEQ ID NO: 178522 - RNA, 1410 nt, Artificial Sequence
  derived and/or modified CDS sequence (opt4) from neuraminidase__InfluenzaA__ADE28843
augaaccccaaccagaagaucaucaccaucggcagcgugugcaugaccaucggcauggccaaccugauccugcagaucggcaacaucaucagcaucuggaucagccacagcauccagcugggcaaccagaaccagaucgagaccugcaaccagagcgugaucaccuacgagaacaacaccugggugaaccagaccuacgugaacaucagcaacaccaacuucgccgccggccagagcguggugagcgugaagcuggccggcaacagcagccugugccccgugagcggcugggccaucuacagcaaggacaacagcgugagaaucggcagcaagggcgacguguucgugaucagagagcccuucaucagcugcagcccccuggagugcagaaccuucuuccugacccagggcgcccugcugaacgacaagcacagcaacggcaccaucaaggacagaagccccuacagaacccugaugagcugccccgugggcgaggugcccagccccuacaacagcagauucgagagcguggccuggagcgccagcgccugccacgacggcaucaacuggcugaccaucggcaucagcggccccgacaacggcgccguggccgugcugaaguacaacggcaucaucaccgacaccaucaagagcuggagaaacaacauccugagaacccaggagagcgagugcgccugcgugaacggcagcugcuucaccgugaugaccgacggccccagcaacggccaggccagcuacaagaucuucagaaucgagaagggcaagaucgugaagagcguggagaugaacgcccccaacuaccacuacgaggagugcagcugcuaccccgacagcagcgagaucaccugcgugugcagagacaacuggcacggcagcaacagacccugggugagcuucaaccagaaccuggaguaccagaucggcuacaucugcagcggcaucuucggcgacaaccccagacccaacgacaagaccggcagcugcggccccgugagcagcaacggcgccaacggcgugaagggcuucagcuucaaguacggcaacggcguguggaucggcagaaccaagagcaucagcagcagaaacggcuucgagaugaucugggaccccaacggcuggaccggcaccgacaacaacuucagcaucaagcaggacaucgugggcaucaacgaguggagcggcuacagcggcagcuucgugcagcaccccgagcugaccggccuggacugcaucagacccugcuucuggguggagcugaucagaggcagacccaaggagaacaccaucuggaccagcggcagcagcaucagcuucugcggcgugaacagcgacaccgugggcuggagcuggcccgacggcgccgagcugcccuucaccaucgacaaguga

SEQ ID NO: 178523 - RNA, 1410 nt, Artificial Sequence
  derived and/or modified CDS sequence (opt4) from neuraminidase__InfluenzaA__ADE28853
augaaccccaaccagaagaucaucaccaucgugagcgugugcaugaccaucggcauggccaaccugauccugcagaucggcaacaucaucagcaucuggaucagccacagcauccagcugggcaaccagaaccagaucgagaccugcaaccagagcgugaucaccuacgagaacaacaccugggugaaccagaccuacgugaacaucagcaacaccaacuucgccgccggccagagcguggugagcgugaagcuggccggcaacagcagccugugccccgugagcggcugggccaucuacagcaaggacaacagcgugagaaucggcagcaagggcgacguguucgugaucagagagcccuucaucagcugcagcccccuggagugcagaaccuucuuccugacccagggcgcccugcugaacgacaagcacagcaacggcaccaucaaggacagaagccccuacagaacccugaugagcugccccaucggcgaggugcccagccccuacaacagcagauucgagagcguggccuggagcgccagcgccugccacgacggcaucaacuggcugaccaucggcaucagcggccccgacaacggcgccguggccgugcugaaguacaacggcaucaucaccgacaccaucaagagcuggagaaacaacauccugagaacccaggagagcgagugcgccugcgugaacggcagcugcuucaccgugaugaccgacggccccagcaacggccaggccagcuacaagaucuucagaaucgagaagggcaagaucgugaagagcguggagaugaacgcccccaacuaccacuacgaggagugcagcugcuaccccgacagcagcgagaucaccugcgugugcagagacaacuggcacggcagcaacagacccugggugagcuucaaccagaaccuggaguaccagaucggcuacaucugcagcggcaucuucggcgacaaccccagacccaacgacaagaccggcagcugcggccccgugagcagcaacggcgccaacggcgugaagggcuucagcuucaaguacggcaacggcguguggaucggcagaaccaagagcaucagcagcagaaacggcuucgagaugaucugggaccccaacggcuggaccggcaccgacaacaacuucagcaucaagcaggacaucgugggcaucaacgaguggagcggcuacagcggcagcuucgugcagcaccccgagcugaccggccuggacugcaucagacccugcuucuggguggagcugaucagaggcagacccaaggagaacaccaucuggaccagcggcagcagcaucagcuucugcggcgugaacagcgacaccgugggcuggagcuggcccgacggcgccgagcugcccuucaccaucgacaaguga

SEQ ID NO: 178524 - RNA, 1410 nt, Artificial Sequence; identical to SEQ ID NO: 178522
  derived and/or modified CDS sequence (opt4) from neuraminidase__InfluenzaA__ADE28884

SEQ ID NO: 178525 - RNA, 1410 nt, Artificial Sequence
  derived and/or modified CDS sequence (opt4) from neuraminidase__InfluenzaA__ADE28894
augaaccccaaccagaagaucaucaccaucggcagcgugugcaugaccaucggcauggccaaccugauccugcagaucggcaacaucaucagcaucuggaucagccacagcgugcagcugggcaaccagaaccagaucgagaccugcaaccagagcgugaucaccuacgagaacaacaccugggugaaccagaccuacgugaacaucagcaacaccaacuucgccgccggccagagcguggugagcgugaagcuggccggcaacagcagccugugccccgugagcggcugggccaucuacagcaaggacaacagcgugagaaucggcagcaagggcgacguguucgugaucagagagcccuucaucagcugcagcccccuggagugcagaaccuucuuccugacccagggcgcccugcugaacgacaagcacagcaacggcaccaucaaggacagaagccccuacagaacccugaugagcugccccaucggcgaggugcccagccccuacaacagcagauucgagagcguggccuggagcgccagcgccugccacgacggcaucaacuggcugaccaucggcaucagcggccccgacaacggcgccguggccgugcugaaguacaacggcaucaucaccgacaccaucaagagcuggagaaacaacauccugagaacccaggagagcgagugcgccugcgugaacggcagcugcuucaccgugaugaccgacggccccagcaacggccaggccagcuacaagaucuucagaaucgagaagggcaagaucgugaagagcguggagaugaacgcccccaacuaccacuacgaggagugcagcugcuaccccgacagcagcgagaucaccugcgugugcagagacaacuggcacggcagcaacagacccugggugagcuucaaccagaaccuggaguaccagaucggcuacaucugcagcggcaucuucggcgacaaccccagacccaacgacaagaccggcagcugcggccccgugagcagcaacggcgccaacggcgugaagggcuucagcuucaaguacggcaacggcguguggaucggcagaaccaagagcaucagcagcagaaacggcuucgagaugaucugggaccccaacggcuggaccggcaccgacaacaacuucagcaucaagcaggacaucgugggcaucaacgaguggagcggcuacagcggcagcuucgugcagcaccccgagcugaccggccuggacugcaucagacccugcuucuggguggagcugaucagaggcagacccaaggagaacaccaucuggaccagcggcagcagcaucagcuucugcggcgugaacagcgacaccgugggcuggagcuggcccgacggcgccgagcugcccuucaccaucgacaaguga

SEQ ID NO: 178526 - RNA, 1410 nt, Artificial Sequence; identical to SEQ ID NO: 178446
  derived and/or modified CDS sequence (opt4) from neuraminidase__InfluenzaA__ADE28904

SEQ ID NO: 178527 - RNA, 1410 nt, Artificial Sequence; identical to SEQ ID NO: 176798
  derived and/or modified CDS sequence (opt4) from neuraminidase__InfluenzaA__ADE28914

SEQ ID NO: 178528 - RNA, 1410 nt, Artificial Sequence; identical to SEQ ID NO: 176798
  derived and/or modified CDS sequence (opt4) from neuraminidase__InfluenzaA__ADE28924

SEQ ID NO: 178529 - RNA, 1410 nt, Artificial Sequence
  derived and/or modified CDS sequence (opt4) from neuraminidase__InfluenzaA__ADE28934
augaaccccaaccagaagaucaucaccaucggcagcgugugcaugaccaucggcauggccaaccugauccugcagaucggcaacaucaucagcaucuggaucagccacagcauccagcugggcaaccagaaccagaucgagaccugcaaccagagcgugaucaccuacgagaacaacaccugggugaaccagaccuacgugaacaucagcaacaccaacuucgccgccggccagagcguggugagcgugaagcuggccggcaacagcagccugugccccgugagcggcugggccaucuacagcaaggacaacagcaucagaaucggcagcaagggcgacguguucgugaucagagagcccuucaucagcugcagcccccuggagugcagaaccuucuuccugacccagggcgcccugcugaacgacaagcacagcaacggcaccaucaaggacagaagccccuacagaacccugaugagcugccccaucggcgaggugcccagccccuacaacagcagauucgagagcguggccuggagcgccagcgccugccacgacggcaucaacuggcugaccaucggcaucagcggccccgacaacggcgccguggccgugcugaaguacaacggcaucaucaccgacaccaucaagagcuggagaaacaacauccugagaacccaggagagcgagugcgccugcaucaacggcagcugcuucaccgugaugaccgacggccccagcgacggccaggccagcuacaagaucuucagaaucgagaagggcaagaucgugaagagcguggagaugaacgcccccaacuaccacuacgaggagugcagcugcuaccccgacagcagcgagaucaccugcgugugcagagacaacuggcacggcagcaacagacccugggugagcuucaaccagaaccuggaguaccagaucggcuacaucugcagcggcaucuucggcgacaaccccagacccaacgacaagaccggcagcugcggccccgugagcagcaacggcgccaacggcgugaagggcuucagcuucaaguacggcaacggcguguggaucggcagaaccaagagcaucagcagcagaaacggcuucgagaugaucugggaccccaacggcuggaccggcaccgacaacaacuucagcaucaagcaggacaucgugggcaucaacgaguggagcggcuacagcggcagcuucgugcagcaccccgagcugaccggccuggacugcaucagacccugcuucuggguggagcugaucagaggcagacccaaggagaacaccaucuggaccagcggcagcagcaucagcuucugcggcgugaacagcgacaccgugggcuggagcuggcccgacggcgccgagcugcccuucaccaucgacaaguga

SEQ ID NO: 178530 - RNA, 1410 nt, Artificial Sequence; identical to SEQ ID NO: 176798
  derived and/or modified CDS sequence (opt4) from neuraminidase__InfluenzaA__ADE28954

SEQ ID NO: 178531 - RNA, 1410 nt, Artificial Sequence
  derived and/or modified CDS sequence (opt4) from neuraminidase__InfluenzaA__ADE28964
augaaccccaaccagaagaucaucaccaucggcagcgugugcaugaccaucggcauggccaaccugauccugcagaucggcaacaucaucagcaucuggaucagccacagcauccagcugggcaaccagaaccagaucgagaccugcaaccagagcgugaucaccuacgagaacaacaccugggugaaccagaccuacgugaacaucagcaacaucaacuucgccgccggccagagcguggugagcgugaagcuggccggcaacagcagccugugccccgugagcggcugggccaucuacagcaaggacaacagcaucagaaucggcagcaagggcgacguguucgugaucagagagcccuucaucagcugcagcccccuggagugcagaaccuucuuccugacccagggcgcccugcugaacgacaagcacagcaacggcaccaucaaggacagaagccccuacagaacccugaugagcugccccaucggcgaggugcccagccccuacaacagcagauucgagagcguggccuggagcgccagcgccugccacgacggcaucaacuggcugaccaucggcaucagcggccccgacaacggcgccguggccgugcugaaguacaacggcaucaucaccgacaccaucaagagcuggagaaacaacauccugagaacccaggagagcgagugcgccugcgugaacggcagcugcuucaccgugaugaccgacggccccagcgacggccaggccagcuacaagaucuucagaaucgagaagggcaagaucgugaagagcguggagaugaacgcccccaacuaccacuacgaggagugcagcugcuaccccgacagcagcgagaucaccugcgugugcagagacaacuggcacggcagcaacagacccugggugagcuucaaccagaaccuggaguaccagaucggcuacaucugcagcggcaucuucggcgacaaccccagacccaacgacaagaccggcagcugcggccccgugagcagcaacggcgccaacggcgugaagggcuucagcuucaaguacggcaacggcguguggaucggcagaaccaagagcaucagcagcagaaacggcuucgagaugaucugggaccccaacggcuggaccggcaccgacaacaacuucagcaucaagcaggacaucgugggcaucaacgaguggagcggcuacagcggcagcuucgugcagcaccccgagcugaccggccuggacugcaucagacccugcuucuggguggagcugaucagaggcagacccaaggagaacaccaucuggaccagcggcagcagcaucagcuucugcggcgugaacagcgacaccgugggcuggagcuggcccgacggcgccgagcugcccuucaccaucgacaaguga

SEQ ID NO: 178532 - RNA, 1410 nt, Artificial Sequence; identical to SEQ ID NO: 176798
  derived and/or modified CDS sequence (opt4) from neuraminidase__InfluenzaA__ADE28974

SEQ ID NO: 178533 - RNA, 1410 nt, Artificial Sequence
  derived and/or modified CDS sequence (opt4) from neuraminidase__InfluenzaA__ADE29004
augaaccccaaccagaagaucaucaccaucggcagcgugugcaugaccaucggccuggccaaccugauccugcagaucggcaacaucaucagcaucuggaucagccacagcauccagcugggcaaccagaaccagaucgagaccugcaaccagagcgugaucaccuacgagaacaacaccugggugaaccagaccuacgugaacaucagcaacaccaacuucgccgccggccagagcguggugagcgugaagcuggccggcaacagcagccugugccccgugagcggcugggccaucuacagcaaggacaacagcgugagaaucggcagcaagggcgacguguucgugaucagagagcccuucaucagcugcagcccccuggagugcagaaccuucuuccugacccagggcgcccugcugaacgacaagcacagcaacggcaccaucaaggacagaagccccuacagaacccugaugagcugccccaucggcgaggugcccagccccuacaacagcagauucgagagcguggccuggagcgccagcgccugccacgacggcaucaacuggcugaccaucggcaucagcggccccgacaacggcgccguggccgugcugaaguacaacggcaucaucaccgacaccaucaagagcuggagaaacaacauccugagaacccaggagagcgagugcgccugcgugaacggcagcugcuucaccgugaugaccgacggccccagcgacggccaggccagcuacaagaucuucagaaucgagaagggcaagaucgugaagagcguggagaugaacgcccccaacuaccacuacgaggagugcagcugcuaccccgacagcagcgagaucaccugcgugugcagagacaacuggcacggcagcaacagacccugggugagcuucaaccagaaccuggaguacagaaucggcuacaucugcagcggcaucuucggcgacaaccccagacccaacgacaagaccggcagcugcggccccgugagcagcaacggcgccaacggcgugaagggcuucagcuucaaguacggcaacggcguguggaucggcagaaccaagagcaucagcagcagaaacggcuucgagaugaucugggaccccaacggcuggaccggcaccgacaagaacuucagcaucaagcaggacaucgugggcaucaacgaguggagcggcuacagcggcagcuucgugcagcaccccgagcugaccggccuggacugcaucagacccugcuucuggguggagcugaucagaggcagacccaaggagaacaccaucuggaccagcggcagcagcaucagcuucugcggcgugaacagcgacaccgugggcuggagcuggcccgacggcgccgagcugcccuucaccaucgacaaguga

SEQ ID NO: 178534 - RNA, 1410 nt, Artificial Sequence; identical to SEQ ID NO: 176798
  derived and/or modified CDS sequence (opt4) from neuraminidase__InfluenzaA__ADE29014

SEQ ID NO: 178535 - RNA, 1410 nt, Artificial Sequence
  derived and/or modified CDS sequence (opt4) from neuraminidase__InfluenzaA__ADE29024
augaaccccaaccagaagaucaucaccaucggcagcgugugcaugaccaucggcauggccaaccugauccugcagaucggcaacaucaucagcaucuggaucagccacagcauccagcugggcaaccagaaccagaucgagaccugcaaccagagcgugaucaccuacgagaacaacaccugggugaaccagaccuacgugaacaucagcaacaccaacuucgccgccggccagagcguggugagcgugaagcuggccggcaacagcagccugugccccgugagcggcugggccaucuacagcaaggacaacagcaucagaaucggcagcaagggcgacguguucgugaucagagagcccuucaucagcugcagcccccuggagugcagaaccuucuuccugacccagggcgcccugcugaacgacaagcacagcaacggcaccaucaaggacagaagccccuacagaacccugaugagcugccccaucggcgaggugcccagccccuacaacagcagauucgagagcguggccuggagcgccagcgccugccacgacggcaucaacuggcugaccaucggcaucagcggccccgacaacggcgccguggccgugcugaaguacaacggcaucaucaccgacaccaucaagagcuggaagaacaacauccugagaacccaggagagcgagugcgccugcgugaacggcagcugcuucaccgugaugaccgacggccccagcgacggccaggccagcuacaagaucuucagaaucgagaagggcaagaucgugaagagcguggagaugaacgcccccaacuaccacuacgaggagugcagcugcuaccccgacagcagcgagaucaccugcgugugcagagacaacuggcacggcagcaacagacccugggugagcuucaaccagaaccuggaguaccagaucggcuacaucugcagcggcaucuucggcgacaaccccagacccaacgacaagaccggcagcugcggccccgugagcagcaacggcgccaacggcgugaagggcuucagcuucaaguacggcaacggcguguggaucggcagaaccaagagcaucagcagcagaaacggcuucgagaugaucugggaccccaacggcuggaacggcaccgacaacaacuucagcaucaagcaggacaucgugggcaucaacgaguggagcggcuacagcggcagcuucgugcagcaccccgagcugaccggccuggacugcaucagacccugcuucuggguggagcugaucagaggcagacccaaggagaacaccaucuggaccagcggcagcagcaucagcuucugcggcgugaacagcgacaccgugggcuggagcuggcccgacggcgccgagcugcccuucaccaucgacaaguga

SEQ ID NO: 178536 - RNA, 1410 nt, Artificial Sequence; identical to SEQ ID NO: 176798
  derived and/or modified CDS sequence (opt4) from neuraminidase__InfluenzaA__ADE29034

SEQ ID NO: 178537 - RNA, 1410 nt, Artificial Sequence; identical to SEQ ID NO: 176798
  derived and/or modified CDS sequence (opt4) from neuraminidase__InfluenzaA__ADE29044

SEQ ID NO: 178538 - RNA, 1410 nt, Artificial Sequence; identical to SEQ ID NO: 176798
  derived and/or modified CDS sequence (opt4) from neuraminidase__InfluenzaA__ADE29054

SEQ ID NO: 178539 - RNA, 1410 nt, Artificial Sequence; identical to SEQ ID NO: 178086
  derived and/or modified CDS sequence (opt4) from neuraminidase__InfluenzaA__ADE29064

SEQ ID NO: 178540 - RNA, 1410 nt, Artificial Sequence
  derived and/or modified CDS sequence (opt4) from neuraminidase__InfluenzaA__ADE29087
augaaccccaaccagaagaucaucaccaucggcagcgugugcaugaccaucggcauggccaaccugauccugcagaucggcaacaucaucagcaucuggaucagccacagcauccagcugggcaaccagaaccagaucgagaccugcaaccagagcgugaucaccuacgagaacaacaccugggugaaccagaccuacgugaacaucagcaacaccaacuucgccgccggccagagcguggugagcgugaagcuggccggcaacagcagccugugccccgugagcggcugggccaucuacagcaaggacaacagcgugagaaucggcagcaagggcgacguguucgugaucagagagcccuucaucagcugcagcccccuggagugcaagaccuucuuccugacccagggcgcccugcugaacgacaagcacagcaacggcaccaucaaggacagaagccccuacagaacccugaugagcugccccaucggcgaggugcccagccccuacaacagcagauucgagagcguggccuggagcgccagcgccugccacgacggcaucaacuggcugaccaucggcaucagcggccccgacaacggcgccguggccgugcugaaguacaacggcaucaucaccgacaccaucaagagcuggagaaacaacauccugagaacccaggagagcgagugcgccugcgugaacggcagcugcuucaccgugaugaccgacggccccagcaacggccaggccagcuacaagaucuucagaaucgagaagggcaagaucgugaagagcguggagaugaacgcccccaacuaccacuacgaggagugcagcugcuaccccgacagcagcgagaucaccugcgugugcagagacaacuggcacggcagcaacagacccugggugagcuucaaccagaaccuggaguaccagaucggcuacaucugcagcggcaucuucggcgacaaccccagacccaacgacaagaccggcagcugcggccccgugagcagcaacggcgccaacggcgugaagggcuucagcuucaaguacggcaacggcguguggaucggcagaaccaagagcaucagcagcagaaacggcuucgagaugaucugggaccccaacggcuggaccggcaccgacaacaacuucagcaucaagcaggacaucgugggcaucaacgaguggagcggcuacagcggcagcuucgugcagcaccccgagcugaccggccuggacugcaucagacccugcuucuggguggagcugaucagaggcagacccaaggagaacaccaucuggaccagcggcagcagcaucagcuucugcggcgugaacagcgacaccgugggcuggagcuggcccgacggcgccgagcugcccuucaccaucgacaaguga

SEQ ID NO: 178541 - RNA, 1410 nt, Artificial Sequence; identical to SEQ ID NO: 176788
  derived and/or modified CDS sequence (opt4) from neuraminidase__InfluenzaA__ADE29097

SEQ ID NO: 178542 - RNA, 1410 nt, Artificial Sequence; identical to SEQ ID NO: 177665
  derived and/or modified CDS sequence (opt4) from neuraminidase__InfluenzaA__ADE34194

SEQ ID NO: 178543 - RNA, 1410 nt, Artificial Sequence; identical to SEQ ID NO: 176659
  derived and/or modified CDS sequence (opt4) from neuraminidase__InfluenzaA__ADE34205

SEQ ID NO: 178544 - RNA, 1410 nt, Artificial Sequence
  derived and/or modified CDS sequence (opt4) from neuraminidase__InfluenzaA__ADE34216
augaaccccaaccagaagaucaucaccaucggcagcgugagccugaccaucagcaccaucugcuucuucaugcagaucgccauccuggugaccaccgugacccugcacuucaagcaguacgaguucaacagcccccccaacaaccaggugaugcugugcgagcccaccaucaucgagagaaacaucaccgagaucguguaccugaccaacaccaccaucgagaaggagaucugccccaagcuggccgaguacagaaacuggagcaagccccagugcgacaucaccggcuucgcccccuucagcaaggacaacagcaucagacugagcgccggcggcgacaucugggugaccagagagcccuacgugagcugcgaccccgacaagugcuaccaguucgcccugggccagggcaccacccugaacaacgugcacagcaacaacaccgugagagacagaacccccuacagaacccugcugaugaacgagcugggcgugcccuuccaccugggcaccaagcaggugugcaucgccuggagcagcagcagcugccacgacggcaaggccuggcugcacgugugcaucaccggcgacgacaagaacgccaccgccagcuucaucuacaacggcagacugguggacagcguggugagcuggagcaaggacauccugagaacccaggagagcgagugcgugugcaucaacggcaccugcaccguggugaugaccgacggcagcgccagcggcaaggccgacaccaagauccuguucaucgaggagggcaagaucgugcacaccagcacccugagcggcagcgcccagcacguggaggagugcagcugcuaccccagauaccccggcgugagaugcgugugcagagacaacuggaagggcagcaacagacccaucguggacaucaacaucaaggaccacagcaucgugagcagcuacgugugcagcggccuggugggcgacacccccagaaagaacgacagcagcagcagcagccacugccuggaccccaacaacgaggagggcggccacggcgugaagggcugggccuucgacgacggcaacgacguguggaugggcagaaccaucagcgagaagagcagacugggcuacgagaccuucaaggugaucgagggcuggagcaaccccaagagcaagcugcagaucaacagacaggugaucguggacagaggcaacagaagcggcuacagcggcaucuucagcguggagggcaagagcugcaucaacagaugcuucuacguggagcugaucagaggcagaaaggaggagaccgaggugcuguggaccagcaacagcaucgugguguucugcggcaccagcggcaccuacggcaccggcagcuggcccgacggcgccaacaucaaccugaugcccaucuga

SEQ ID NO: 178545 - RNA, 1410 nt, Artificial Sequence; identical to SEQ ID NO: 177665
  derived and/or modified CDS sequence (opt4) from neuraminidase__InfluenzaA__ADE34227

SEQ ID NO: 178546 - RNA, 1410 nt, Artificial Sequence; identical to SEQ ID NO: 177665
  derived and/or modified CDS sequence (opt4) from neuraminidase__InfluenzaA__ADE34238

SEQ ID NO: 178547 - RNA, 1410 nt, Artificial Sequence
  derived and/or modified CDS sequence (opt4) from neuraminidase__InfluenzaA__ADE34260
augaaccccaaccagaagaucaucaccaucggcagcgugagccugaccaucagcaccaucugcuucuucaugcagaucgccauccugaucaccaccgugacccugcacuucaagcaguacgaguucaacagcccccccaacaaccaggugaugcugugcgagcccaccaucaucgagagaaacaucaccgagaucguguaccugaccaacaccaccaucgagaaggagaucugccccaagcuggccgaguacagaaacuggagcaagccccagugcgacaucaccggcuucgcccccuucagcaaggacaacagcaucagacugagcgccggcggcgacaucugggugaccagagagcccuacgugagcugcgaccccgacaagugcuaccaguucgcccugggccagggcaccacccugaacaacgugcacagcaacaacaccgugagagacagaacccccuacagaacccugcugaugaacgagcugggcgugcccuuccaccugggcaccaagcaggugugcaucgccuggagcagcagcagcugccacgacggcaaggccuggcugcacgugugcaucaccggcgacgacaagaacgccaccgccagcuucaucuacaacggcagacugguggacagcguggugagcuggagcaaggagauccugagaacccaggagagcgagugcgugugcaucaacggcaccugcaccguggugaugaccgacggcagcgccagcggcaaggccgacaccaagauccuguucaucgaggagggcaagaucgugcacaccagcacccugagcggcagcgcccagcacguggaggagugcagcugcuaccccagauaccccggcgugagaugcgugugcagagacaacuggaagggcagcaacagacccaucguggacaucaacaucaaggaccacagcaucgugagcagcuacgugugcagcggccuggugggcgacacccccagaaagaacgacagcagcagcagcagccacugccuggaccccaacaacgaggagggcggccacggcgugaagggcugggccuucgacgacggcaacgacguguggaugggcagaaccaucagcgagaagagcagacugggcuacgagaccuucaaggugaucgagggcuggagcaaccccaagagcaagcugcagaucaacagacaggugaucguggacagaggcaacagaagcggcuacagcggcaucuucagcguggagggcaagagcugcaucaacagaugcuucuacguggagcugaucagaggcagaaaggaggagaccgaggugcuguggaccagcaacagcaucgugguguucugcggcaccagcggcaccuacggcaccggcagcuggcccgacggcgccgacaucaaccugaugagcaucuga

SEQ ID NO: 178548 - RNA, 1410 nt, Artificial Sequence; identical to SEQ ID NO: 177665
  derived and/or modified CDS sequence (opt4) from neuraminidase__InfluenzaA__ADE34271

SEQ ID NO: 178549 - RNA, 1410 nt, Artificial Sequence; identical to SEQ ID NO: 176798
  derived and/or modified CDS sequence (opt4) from neuraminidase__InfluenzaA__ADE45502

SEQ ID NO: 178550 - RNA, 1410 nt, Artificial Sequence; identical to SEQ ID NO: 176798
  derived and/or modified CDS sequence (opt4) from neuraminidase__InfluenzaA__ADE45504

SEQ ID NO: 178551 - RNA, 1410 nt, Artificial Sequence; identical to SEQ ID NO: 176798
  derived and/or modified CDS sequence (opt4) from neuraminidase__InfluenzaA__ADE45506

SEQ ID NO: 178552 - RNA, 1410 nt, Artificial Sequence; identical to SEQ ID NO: 176798
  derived and/or modified CDS sequence (opt4) from neuraminidase__InfluenzaA__ADE45508

SEQ ID NO: 178553 - RNA, 1410 nt, Artificial Sequence; identical to SEQ ID NO: 176798
  derived and/or modified CDS sequence (opt4) from neuraminidase__InfluenzaA__ADE45510

SEQ ID NO: 178554 - RNA, 1410 nt, Artificial Sequence; identical to SEQ ID NO: 176798
  derived and/or modified CDS sequence (opt4) from neuraminidase__InfluenzaA__ADE45512

SEQ ID NO: 178555 - RNA, 1410 nt, Artificial Sequence
  derived and/or modified CDS sequence (opt4) from neuraminidase__InfluenzaA__ADE45514
augaaccccaaccagaagaucaucaccaucggcagcgugugcaugaccaucggcauggccaaccugauccugcagaucggcaacaucaucagcaucuggaucagccacagcauccagcugggcaaccagaaccagaucgagaccugcaaccagagcaucaucaccuacgagaacaacaccugggugaaccagaccuacgugaacaucagcaacaccaacuucgccgccggccagagcguggugagcgugaagcuggccggcaacagcagccugugccccgugagcggcugggccaucuacagcaaggacaacagcaucagaaucggcagcaagggcgacguguucgugaucagagagcccuucaucagcugcagcccccuggagugcagaaccuucuuccugacccagggcgcccugcugaacgacaagcacagcaacggcaccaucaaggacagaagccccuacagaacccugaugagcugccccaucggcgaggugcccagccccuacaacagcagauucgagagcguggccuggagcgccagcgccugccacgacggcaucaacuggcugaccaucggcaucagcggccccgacaacggcgccguggccgugcugaaguacaacggcaucaucaccgacaccaucaagagcuggagaaacaacauccugagaacccaggagagcgagugcgccugcgugaacggcagcugcuucaccgugaugaccgacggccccagcgacggccaggccagcuacaagaucuucagaaucgagaagggcaagaucgugaagagcguggagaugaacgcccccaacuaccacuacgaggagugcagcugcuaccccgacagcagcgagaucaccugcgugugcagagacaacuggcacggcagcaacagacccugggugagcuucaaccagaaccuggaguaccagaucggcuacaucugcagcggcaucuucggcgacaaccccagacccaacgacaagaccggcagcugcggccccgugagcagcaacggcgccaacggcgugaagggcuucagcuuccaguacggcaacggcguguggaucggcagaaccaagagcaucagcagcagaaacggcuucgagaugaucugggaccccaacggcuggaccggcaccgacaacaacuucagcaucaagcaggacaucgugggcaucaacgaguggagcggcuacagcggcagcuucgugcagcaccccgagcugaccggccuggacugcaucagacccugcuucuggguggagcugaucagaggcagacccaaggagaacaccaucuggaccagcggcagcagcaucagcuucugcggcgugaacagcgacaccgugggcuggagcuggcccgacggcgccgagcugcccuucaccaucgacaaguga

SEQ ID NO: 178556 - RNA, 1410 nt, Artificial Sequence
  derived and/or modified CDS sequence (opt4) from neuraminidase__InfluenzaA__ADE45516
augaaccccaaccagaagaucaucaccaucggcagcgugugcaugaccaucggcauggccaaccugauccugcagaucggcaacaucaucagcaucuggaucagccacagcauccagcugggcaaccagaaccagaucgagaccugcaaccagagcgugaucaccuacgagaacaacaccugggugaaccagaccuacgugaacaucagcaacaccaacuucgccgccggccagagcguggugagcgugaagcuggccggcaacagcagccugugccccgugagcggcugggccaucuacagcaaggacaacagcaucagaaucggcagcaagggcgacguguucgugaucagagagcccuucaucagcugcagcccccuggagugcagaaccuucuuccugacccagggcgcccugcugaacgacaagcacagcaacggcaccaucaaggacagaagccccuacagaacccugaugagcugccccaucggcgaggugcccagccccuacaacagcagauucgagagcguggccuggagcgccagcgccugccacgacggcaucaacuggcugaccaucggcaucagcggccccgacaacggcgccguggccgugcugaaguacaacggcaucaucaccgacaccaucaagagcuggagaaacaacauccugagaacccaggagagcgagugcgccugcgugaacggcagcugcuucaccgugaugaccgacggccccagcgacggccaggccagcuacaagaucuucagaaucgagaagggcaagaucgugaagagcguggagaugaacgcccccaacuaccacuacgaggagugcagcugcuaccccgacagcagcgagaucaccugcgugugcagagacaacuggcacggcagcaacagacccugggugagcuucaaccagaaccuggaguaccagaucggcuacaucugcagcggcaucuucggcgacaaccccagacccaacgacaagaccggcagcugcggccccgugagcagcaacggcgccaacggcgugaagggcuucagcuucaaguacggcaacggcguguggaucggcagaaccaagagcaucagccugagaaacggcuucgagaugaucugggaccccaacggcuggaccggcaccgacaacaacuucagcaucaagcaggacaucgugggcaucaacgaguggagcggcuacagcggcagcuucgugcagcaccccgagcugaccggccuggacugcaucagacccugcuucuggguggagcugaucagaggcagacccaaggagaacaccaucuggaccagcggcagcagcaucagcuucugcggcgugaacagcgacaccgugggcuggagcuggcccgacggcgccgagcugcccuucaccaucgacaaguga

SEQ ID NO: 178557 - RNA, 1410 nt, Artificial Sequence
  derived and/or modified CDS sequence (opt4) from neuraminidase__InfluenzaA__ADF10069
augaaccccaaccagaagaucaucaccaucggcagcgugugcaugaccaucggcauggccaaccugauccugcagaucggcaacaucaucagcaucuggaucagccacagcauccagcugggcaaccagaaccagaucgagaccugcaaccagagcgugaucaccuacgagaacaacaccugggugaaccagaccuacgugaacaucagcaacaccaacuucgccgccggccagagcguggugagcgugaagcuggccggcaacagcagccugugccccgugagcggcugggccaucuacagcaaggacaacagcaucagaaucggcagcaagggcgacguguucgugaucagagagcccuucaucagcugcagcccccuggagugcagaaccuucuuccugacccagggcacccugcugaacgacaagcacagcaacggcaccaucaaggacagaagccccuacagaacccugaugagcugccccaucggcgaggugcccagccccuacaacagcagauucgagagcguggccuggagcgccagcgccugccacgacggcaucaacuggcugaccaucggcaucagcggccccgacaacggcgccguggccgugcugaaguacaacggcaucaucaccgacaccaucaagagcuggagaaacaacauccugagaacccaggagagcgagugcgccugcgugaacggcagcugcuucaccgugaugaccgacggccccagcgacggccaggccagcuacaagaucuucagaaucgagaagggcaagaucgugaagagcguggagaugaacgcccccaacuaccacuacgaggagugcagcugcuaccccgacagcagcgagaucaccugcgugugcagagacaacuggcacggcagcaacagacccugggugagcuucaaccagaaccuggaguaccagaucggcuacaucugcagcggcaucuucggcgacaaccccagacccaacgacaagaccggcagcugcggccccgugagcagcaacggcgccaacggcgugaagggcuucagcuucaaguacggcaacggcguguggaucggcagaaccaagagcaucagcagcagaaacggcuucgagaugaucugggaccccaacggcuggaccggcaccgacaacaacuucagcaucaagcaggacaucgugggcaucaacgaguggagcggcuacagcggcagcuucgugcagcaccccgagcugaccggccuggacugcaucagacccugcuucuggguggagcugaucagaggcagacccaaggagaacaccaucuggaccagcggcagcagcaucagcuucugcggcgugaacagcgacaccgugggcuggagcuggcccgacggcgccgagcugcccuucaccaucgacaaguga

SEQ ID NO: 178558 - RNA, 1410 nt, Artificial Sequence; identical to SEQ ID NO: 176798
  derived and/or modified CDS sequence (opt4) from neuraminidase__InfluenzaA__ADF10079

SEQ ID NO: 178559 - RNA, 1410 nt, Artificial Sequence; identical to SEQ ID NO: 176798
  derived and/or modified CDS sequence (opt4) from neuraminidase__InfluenzaA__ADF10089

SEQ ID NO: 178560 - RNA, 1410 nt, Artificial Sequence; identical to SEQ ID NO: 176798
  derived and/or modified CDS sequence (opt4) from neuraminidase__InfluenzaA__ADF10099

SEQ ID NO: 178561 - RNA, 1410 nt, Artificial Sequence
  derived and/or modified CDS sequence (opt4) from neuraminidase__InfluenzaA__ADF10109
augaaccccaaccagaagaucaucaccaucggcagcgugugcaugaccaucggcauggccaaccugauccugcagaucggcaacaucaucagcaucuggaucagccacagcauccagcugggcaaccagaaccagaucgagaccugcaaccagagcgugaucaccuacgagaacaacaccugggugaaccagaccuacgugaacaucagcaacaccaacuucgccgccggccagagcguggugagcgugaagcuggccggcaacagcagccugugccccgugagcggcugggccaucuacagcaaggacaacagcaucagaaucggcagcaagggcgacguguucgugaucagagagcccuucaucagcugcagcccccuggagugcagaaccuucuuccugacccagggcgcccugcugaacgacaagcacagcaacggcaccaucaaggacagaagccccuacagaacccugaugagcugccccaucggcgaggugcccagccccuacaacagcagauucgagagcguggccuggagcgccagcgccugccacgacggcaucaacuggcugaccaucggcaucagcggccccgacaacggcgccguggccgugcugaaguacaacggcaucaucaccgacaccaucaagagcuggagaaacaacauccugagaacccaggagagcgagugcgccugcgugaacggcagcugcuucaccgugaugaccgacggccccagcgacggccaggccagcuacaagaucuucagaaucgagaagggcaagaucgugaagagcguggagaugaacgcccccaacuacuacuacgaggagugcagcugcuaccccgacagcagcgagaucaccugcgugugcagagacaacuggcacggcagcaacagacccugggugagcuucaaccagaaccuggaguaccagaucggcuacaucugcagcggcaucuucggcgacaaccccagacccaacgacaagaccggcaacugcggccccgugagcagcaacggcgccaacggcgugaagggcuucagcuucaaguacggcaacggcguguggaucggcagaaccaagagcaucagcagcagaaacggcuucgagaugaucugggaccccaacggcuggaccggcaccgacaacaacuucagcaucaagcaggacaucgugggcaucaacgaguggagcggcuacagcggcagcuucgugcagcaccccgagcugaccggccuggacugcaucagacccugcuucuggguggagcugaucagaggcagacccaaggagaacaccaucuggaccagcggcagcagcaucagcuucugcggcgugaacagcgacaccgugggcuggagcuggcccgacggcgccgagcugcccuucaccaucgacaaguga

SEQ ID NO: 178562 - RNA, 1410 nt, Artificial Sequence; identical to SEQ ID NO: 176798
  derived and/or modified CDS sequence (opt4) from neuraminidase__InfluenzaA__ADF10129

SEQ ID NO: 178563 - RNA, 1410 nt, Artificial Sequence; identical to SEQ ID NO: 178228
  derived and/or modified CDS sequence (opt4) from neuraminidase__InfluenzaA__ADF10146

SEQ ID NO: 178564 - RNA, 1410 nt, Artificial Sequence
  derived and/or modified CDS sequence (opt4) from neuraminidase__InfluenzaA__ADF10166
augaaccccaaccagaagaucaucaccaucggcagcgugugcaugaucaucggcauggccaaccugauccugcagaucggcaacaucaucagcaucuggaucagccacagcauccagcugggcaaccagaaccagaucgagaccugcaaccagagcgugaucaccuacgagaacaacaccugggugaaccagaccuacgugaacaucagcaacaccaacuucgccgccggccagagcguggugagcgugaagcuggccggcaacagcagccugugccccgugagcggcugggccaucuacagcaaggacaacagcaucagaaucggcagcaagggcgacguguucgugaucagagagcccuucaucagcugcagcccccuggagugcagaaccuucuuccugacccagggcgcccugcugaacgacaagcacagcaacggcaccaucaaggacagaagccccuacagaacccugaugagcugccccaucggcgaggugcccagccccuacaacagcagauucgagagcguggccuggagcgccagcgccugccacgacggcaucaacuggcugaccaucggcaucagcggccccgacaacggcgccguggccgugcugaaguacaacggcaucaucaccgacaccaucaagagcuggagaaacaacauccugagaacccaggagagcgagugcgccugcgugaacggcagcugcuucaccgugaugaccgacggccccagcgacggccaggccagcuacaagaucuucagaaucgagaagggcaagaucgugaagagcguggagaugaacgcccccaacuaccacuacgaggagugcagcugcuaccccgacagcagcgagaucaccugcgugugcagagacaacuggcacggcagcaacagacccugggugagcuucaaccagaaccuggaguaccagaucggcuacaucugcagcggcaucuucggcgacaaccccagacccaacgacaagaccggcagcugcggccccgugagcagcaacggcgccaacggcgugaagggcuucagcuucaaguacggcaacggcguguggaucggcagaaccaagagcaucagcagcagaaagggcuucgagaugaucugggaccccaacggcuggaccggcaccgacaacaacuucagcaucaagcaggacaucgugggcaucaacgaguggagcggcuacagcggcagcuucgugcagcaccccgagcugaccggccuggacugcaucagacccugcuucuggguggagcugaucagaggcagacccaaggagaacaccaucuggaccagcggcagcagcaucagcuucugcggcgugaacagcgacaccgugggcuggagcuggcccgacggcgccgagcugcccuucaccaucgacaaguga

SEQ ID NO: 178565 - RNA, 1410 nt, Artificial Sequence; identical to SEQ ID NO: 178564
  derived and/or modified CDS sequence (opt4) from neuraminidase__InfluenzaA__ADF10176

SEQ ID NO: 178566 - RNA, 1410 nt, Artificial Sequence; identical to SEQ ID NO: 178564
  derived and/or modified CDS sequence (opt4) from neuraminidase__InfluenzaA__ADF10192

SEQ ID NO: 178567 - RNA, 1410 nt, Artificial Sequence; identical to SEQ ID NO: 176798
  derived and/or modified CDS sequence (opt4) from neuraminidase__InfluenzaA__ADF10247

SEQ ID NO: 178568 - RNA, 1410 nt, Artificial Sequence; identical to SEQ ID NO: 178564
  derived and/or modified CDS sequence (opt4) from neuraminidase__InfluenzaA__ADF10290

SEQ ID NO: 178569 - RNA, 1410 nt, Artificial Sequence
  derived and/or modified CDS sequence (opt4) from neuraminidase__InfluenzaA__ADF10304
augaaccccaaccagaagaucaucaccaucggcagcgugugcaugaccaucggcauggccaaccugauccugcagaucggcaacaucaucagcaucuggaucagccacagcauccagcugggcaaccagaaccagaucgagaccugcaaccagagcgugaucaccuacgagaacaacaccugggugaaccagaccuacgugaacaucagcaacaccaacuucgccgccggccagagcguggugagcgugaagcuggccggcaacagcagccugugccccgugagcggcugggccaucuacagcaaggacaacagcaucagaaucggcagcaagggcgacguguucgugaucagagagcccuucaucagcugcagcccccuggagugcagaaccuucuuccugacccagggcgcccugcugaacgacaagcacagcaacggcaccaucaaggacagaagccccuacagaacccugaugagcugccccaucggcgaggugcccagccccuacaacagcagauucgagagcguggccuggagcgccagcgccugccacgacggcaucaacuggcugaccaucggcaucagcggccccgacaacggcgccguggccgugcugaaguacaacggcaucaucaccgacaccaucaagagcuggagaaacaacauccugagaacccaggagagcgagugcgccugcgugaacggcagcugcuucaccgugaugaccgacggccccagcgacggccaggccagcuacaagaucuucagaaucgagaagggcaagaucgugaagagcguggagaugaacgcccccaacuaccacuacgaggagugcagcugcuaccccgacagcagcgagaucaccugcgugugcagagacaacuggcacggcagcaacagacccugggugagcuucaaccagaaccuggaguaccagaucggcuacaucugcagcggcaucuucggcgacaaccccagacccaacgacaagaccggcagcugcggccccgugagcagcaacggcgccaacggcgugaagggcuucagcuucaaguacggcaacggcguguggaucggcagaaccaagagcaucagcagcagaaacggcuucgagaugaucugggaccccaacggcuggaccggcaccgacaacaacuucagcaucaagcaggacaucgugggcaucaacgaguggagcggcuacagcggcagcuucgugcagcaccccgagcugaccggccuggacugcaucagacccugcuucuggguggagcugaucagaggcagacccaaggagaacaccaucuggaccagcggcagcagcaucagcuucugcggcgugaacagcgacaccgugggcuggagcuggcccgacggcgccggccugcccuucaccaucgacaaguga

SEQ ID NO: 178570 - RNA, 1410 nt, Artificial Sequence; identical to SEQ ID NO: 176798
  derived and/or modified CDS sequence (opt4) from neuraminidase__InfluenzaA__ADF10340

SEQ ID NO: 178571 - RNA, 1410 nt, Artificial Sequence; identical to SEQ ID NO: 176798
  derived and/or modified CDS sequence (opt4) from neuraminidase__InfluenzaA__ADF10361

SEQ ID NO: 178572 - RNA, 1410 nt, Artificial Sequence; identical to SEQ ID NO: 178564
  derived and/or modified CDS sequence (opt4) from neuraminidase__InfluenzaA__ADF10371

SEQ ID NO: 178573 - RNA, 1410 nt, Artificial Sequence; identical to SEQ ID NO: 178564
  derived and/or modified CDS sequence (opt4) from neuraminidase__InfluenzaA__ADF10407

SEQ ID NO: 178574 - RNA, 1410 nt, Artificial Sequence; identical to SEQ ID NO: 176798
  derived and/or modified CDS sequence (opt4) from neuraminidase__InfluenzaA__ADF10472

SEQ ID NO: 178575 - RNA, 1410 nt, Artificial Sequence; identical to SEQ ID NO: 178564
  derived and/or modified CDS sequence (opt4) from neuraminidase__InfluenzaA__ADF10616

SEQ ID NO: 178576 - RNA, 1410 nt, Artificial Sequence; identical to SEQ ID NO: 178564
  derived and/or modified CDS sequence (opt4) from neuraminidase__InfluenzaA__ADF10688

SEQ ID NO: 178577 - RNA, 1410 nt, Artificial Sequence; identical to SEQ ID NO: 178564
  derived and/or modified CDS sequence (opt4) from neuraminidase__InfluenzaA__ADF10726

SEQ ID NO: 178578 - RNA, 1410 nt, Artificial Sequence; identical to SEQ ID NO: 176798
  derived and/or modified CDS sequence (opt4) from neuraminidase__InfluenzaA__ADF10773

SEQ ID NO: 178579 - RNA, 1410 nt, Artificial Sequence
  derived and/or modified CDS sequence (opt4) from neuraminidase__InfluenzaA__ADF10837
augaaccccaaccagaagaucaucaccaucggcagcgugugcaugaccaucggcauggccaaccugauccugcagaucggcaacaucaucagcaucuggaucagccacagcauccagcugggcaaccagaaccagaucgagaccugcaaccagagcgugaucaccuacgagaacaacaccugggugaaccagaccuacgugaacaucagcaacaccaacuucgccgccggccagagcguggugagcgugaagcuggccggcaacagcagccugugccccgugagcggcugggccaucuacagcaaggacaacagcaucagaaucggcagcaagggcgacguguucgugaucagagagcccuucaucagcugcagcccccuggagugcagaaccuucuuccugacccagggcgcccugcugaacgacaagcacagcaacggcaccaucaaggacagaagccccuacagaacccugaugagcugccccaucggcgaggugcccagccccuacaacagcagauucgagagcguggccuggagcgccagcgccugccacgacggcaucaacuggcugaccaucggcaucagcggccccgacaacggcgccguggccgugcugaaguacaacggcaucaucaccgacaccaucaagagcuggaagaacaacauccugagaacccaggagagcgagugcgccugcgugaacggcagcugcuucaccgugaugaccgacggccccagcgacggccaggccagcuacaagaucuucagaaucgagaagggcaagaucgugaagagcguggagaugaacgcccccaacuaccacuacgaggagugcagcugcuaccccgacagcagcgagaucaccugcgugugcagagacaacuggcacggcagcaacagacccugggugagcuucaaccagaaccuggaguaccagaucggcuacaucugcagcggcaucuucggcgacaaccccagacccaacgacaagaccggcagcugcggccccgugagcagcaacggcgccaacggcgugaagggcuucagcuucaaguacggcaacggcguguggaucggcagaaccaagagcaucagcagcagaaacggcuucgagaugaucugggaccccaacggcuggaccggcaccgacaacaacuucagcaucaagcaggacaucgugggcaucaacgaguggagcggcuacagcggcagcuucgugcagcaccccgagcugaccggccuggacugcaucagacccugcuucuggguggagcugaucagaggcagacccaaggagaacaccaucuggaccagcggcagcagcaucagcuucugcggcgugaacagcgacaccgugggcuggagcuggcccgacggcgccgagcugcccuucaccaucgacaaguga

SEQ ID NO: 178580 - RNA, 1410 nt, Artificial Sequence; identical to SEQ ID NO: 176798
  derived and/or modified CDS sequence (opt4) from neuraminidase__InfluenzaA__ADF10889

SEQ ID NO: 178581 - RNA, 1410 nt, Artificial Sequence; identical to SEQ ID NO: 176798
  derived and/or modified CDS sequence (opt4) from neuraminidase__InfluenzaA__ADF10947

SEQ ID NO: 178582 - RNA, 1410 nt, Artificial Sequence; identical to SEQ ID NO: 176798
  derived and/or modified CDS sequence (opt4) from neuraminidase__InfluenzaA__ADF11010

SEQ ID NO: 178583 - RNA, 1410 nt, Artificial Sequence
  derived and/or modified CDS sequence (opt4) from neuraminidase__InfluenzaA__ADF27355
augaaccccaaccagaagaucaucaccaucggcagcgugugcaugaccaucggcauggccaaccugauccugcagaucggcaacaucaucagcaucuggaucagccacagcauccagcugggcaaccagaaccagaucgagaccugcaaccagagcgugaucaccuacgagaacaacaccugggugaaccagaccuacgugaacaucagcaacaccaacuucgccgccggccagagcguggugagcgugaagcuggccggcaacagcagccugugccccgugagcggcugggccaucuacagcaaggacaacagcaucagaaucggcagcaagggcgacguguucgugaucagagagcccuucaucagcugcagcccccuggagugcagaaccuucuuccugacccagggcgcccugcugaacgacaagcacagcaacggcaccaucaaggacagaagccccuacagaacccugaugagcugccccaucggcgaggugcccagccccuacaacagcagauucgagagcguggccuggagcgccagcgccugccacgacggcaucaacuggcugaccaucggcaucagcggccccgacaacggcgccguggccgugcugaaguacaacggcaucaucaccgacaccaucaagagcuggagaaacaacauccugagaacccaggagagcgagugcgccugcgugaacggcagcugcuucaccgugaugaccgacggccccagcgacggccaggccagcuacaagaucuucagaaucgagaagggcaagaucgugaagagcguggagaugaacgcccccaacuaccacuacgaggagugcagcugcuaccccgacagcagcgagaucaccugcgugugcagagacaacuggcacggcagcaacagacccugggugagcuucaaccagaaccuggaguaccagaucggcuacaucugcagcggcaucuucggcgacaaccccagacccaacgacaagaccggcagcugcggccccgugagcagcaacggcgccaacggcgugaagggcuucagcuucaaguacggcaacggcguguggaugggcagaaccaagagcaucagcagcagaaacggcuucgagaugaucugggaccccaacggcuggaccggcaccgacaacaacuucagcaucaagcaggacaucgugggcaucaacgaguggagcggcuacagcggcagcuucgugcagcaccccgagcugaccggccuggacugcaucagacccugcuucuggguggagcugaucagaggcagacccaaggagaacaccaucuggaccagcggcagcagcaucagcuucugcggcgugaacagcgacaccgugggcuggagcuggcccgacggcgccgagcugcccuucaccaucgacaaguga

SEQ ID NO: 178584 - RNA, 1410 nt, Artificial Sequence
  derived and/or modified CDS sequence (opt4) from neuraminidase__InfluenzaA__ADF27356
augaaccccaaccagaagaucaucaccaucggcagcgugugcaugaccaucggcauggccaaccugauccugcagaucggcaacaucaucagcaucuggaucagccacagcauccagcugggcaaccagaaccagaucgagaccugcaaccagaacgugaucaccuacgagaacaacaccugggugaaccagaccuacgugaacaucagcaacaccaacuucgccgccggccagagcguggugagcgugaagcuggccggcaacagcagccugugccccgugagcggcugggccaucuacagcaaggacaacagcaucagaaucggcagcaagggcgacguguucgugaucagagagcccuucaucagcugcagcccccuggagugcagaaccuucuuccugacccagggcgcccugcugaacgacaagcacagcaacggcaccaucaaggacagaagccccuacagaacccugaugagcugccccaucggcgaggugcccagccccuacaacagcagauucgagagcguggccuggagcgccagcgccugccacgacggcaucaacuggcugaccaucggcaucagcggccccgacaacggcgccguggccgugcugaaguacaacggcaucaucaccgacaccaucaagagcuggagaaacaacauccugagaacccaggagagcgagugcgccugcgugaacggcagcugcuucaccgugaugaccgacggccccagcgacggccaggccagcuacaagaucuucagaaucgagaagggcaagaucgugaagagcguggagaugaacgcccccaacuacuacuacgaggagugcagcugcuaccccgacagcagcgagaucaccugcgugugcagagacaacuggcacggcagcaacagacccugggugagcuucaaccagaaccuggaguaccagaucggcuacaucugcagcggcaucuucggcgacaaccccagacccaacgacaagaccggcagcugcggccccgugagcagcaacggcgccaacggcgugaagggcuucagcuucaaguacggcaacggcguguggaucggcagaaccaagagcaucagcagcagaaacggcuucgagaugaucugggaccccaacggcuggaccggcaccgacaacaacuucagcaucaagcaggacaucgugggcaucaacgaguggagcggcuacagcggcagcuucgugcagcaccccgagcugaccggccuggacugcaucagacccugcuucuggguggagcugaucagaggcagacccaaggagaacaccaucuggaccagcggcagcagcaucagcuucugcggcgugaacagcgacaccgugggcuggagcuggcccgacggcgccgagcugcccuucaccaucgacaaguga

SEQ ID NO: 178585 - RNA, 1410 nt, Artificial Sequence; identical to SEQ ID NO: 177152
  derived and/or modified CDS sequence (opt4) from neuraminidase__InfluenzaA__ADF27357

SEQ ID NO: 178586 - RNA, 1410 nt, Artificial Sequence; identical to SEQ ID NO: 177152
  derived and/or modified CDS sequence (opt4) from neuraminidase__InfluenzaA__ADF27358

SEQ ID NO: 178587 - RNA, 1410 nt, Artificial Sequence; identical to SEQ ID NO: 177152
  derived and/or modified CDS sequence (opt4) from neuraminidase__InfluenzaA__ADF27360

SEQ ID NO: 178588 - RNA, 1410 nt, Artificial Sequence; identical to SEQ ID NO: 176798
  derived and/or modified CDS sequence (opt4) from neuraminidase__InfluenzaA__ADF27361

SEQ ID NO: 178589 - RNA, 1410 nt, Artificial Sequence; identical to SEQ ID NO: 176798
  derived and/or modified CDS sequence (opt4) from neuraminidase__InfluenzaA__ADF27362

SEQ ID NO: 178590 - RNA, 1410 nt, Artificial Sequence; identical to SEQ ID NO: 176798
  derived and/or modified CDS sequence (opt4) from neuraminidase__InfluenzaA__ADF27363

SEQ ID NO: 178591 - RNA, 1410 nt, Artificial Sequence; identical to SEQ ID NO: 177152
  derived and/or modified CDS sequence (opt4) from neuraminidase__InfluenzaA__ADF27364

SEQ ID NO: 178592 - RNA, 1410 nt, Artificial Sequence; identical to SEQ ID NO: 176798
  derived and/or modified CDS sequence (opt4) from neuraminidase__InfluenzaA__ADF27365

SEQ ID NO: 178593 - RNA, 1410 nt, Artificial Sequence; identical to SEQ ID NO: 177152
  derived and/or modified CDS sequence (opt4) from neuraminidase__InfluenzaA__ADF27366

SEQ ID NO: 178594 - RNA, 1410 nt, Artificial Sequence; identical to SEQ ID NO: 176798
  derived and/or modified CDS sequence (opt4) from neuraminidase__InfluenzaA__ADF27382

SEQ ID NO: 178595 - RNA, 1410 nt, Artificial Sequence; identical to SEQ ID NO: 176798
  derived and/or modified CDS sequence (opt4) from neuraminidase__InfluenzaA__ADF27392

SEQ ID NO: 178596 - RNA, 1410 nt, Artificial Sequence; identical to SEQ ID NO: 176798
  derived and/or modified CDS sequence (opt4) from neuraminidase__InfluenzaA__ADF27402

SEQ ID NO: 178597 - RNA, 1410 nt, Artificial Sequence; identical to SEQ ID NO: 178579
  derived and/or modified CDS sequence (opt4) from neuraminidase__InfluenzaA__ADF27422

SEQ ID NO: 178598 - RNA, 1410 nt, Artificial Sequence
  derived and/or modified CDS sequence (opt4) from neuraminidase__InfluenzaA__ADF27432
augaaccccaaccagaagaucaucaccaucggcagcgugugcgugaccaucggcauggccaaccugauccugcagaucggcaacaucaucagcaucuggaucagccacagcauccagcugggcaaccagaaccagaucgagaccugcaaccagagcgugaucaccuacgagaacaacaccugggugaaccagaccuacgugaacaucagcaacaccaacuucgccgccggccagagcguggugagcgugaagcuggccggcaacagcagccugugccccgugagcggcugggccaucuacagcaaggacaacagcaucagaaucggcagcaagggcgacguguucgugaucagagagcccuucaucagcugcagcccccuggagugcagaaccuucuuccugacccagggcgcccugcugaacgacaagcacagcaacggcaccaucaaggacagaagccccuacagaacccugaugagcugccccaucggcgaggugcccagccccuacaacagcagauucgagagcguggccuggagcgccagcgccugccacgacggcaucaacuggcugaccaucggcaucagcggccccgacaacggcgccguggccgugcugaaguacaacggcaucaucaccgacaccaucaagagcuggagaaacaacauccugagaacccaggagagcgagugcgccugcgugaacggcagcugcuucaccgugaugaccgacggccccagcgacggccaggccagcuacaagaucuucagaaucgagaagggcaagaucgugaagagcguggagaugaacgcccccaacuaccacuacgaggagugcagcugcuaccccgacagcagcgagaucaccugcgugugcagagacaacuggcacggcagcaacagacccugggugagcuucaaccagaaccuggaguaccagaucggcuacaucugcagcggcaucuucggcgacaaccccagacccaacgacaagaccggcagcugcggccccgugagcagcaacggcgccaacggcgugaagggcuucagcuucaaguacggcaacggcguguggaucggcagaaccaagagcaucagcagcagaaacggcuucgagaugaucugggaccccaacggcuggaccggcaccgacaacaacuucagcaucaagcaggacaucgugggcaucaacgaguggagcggcuacagcggcagcuucgugcagcaccccgagcugaccggccuggacugcaucagacccugcuucuggguggagcugaucagaggcagacccaaggagaacaccaucuggaccagcggcagcagcaucagcuucugcggcgugaacagcgacaccgugggcuggagcuggcccgacggcgccgagcugcccuucaccaucgacaaguga

SEQ ID NO: 178599 - RNA, 1410 nt, Artificial Sequence
  derived and/or modified CDS sequence (opt4) from neuraminidase__InfluenzaA__ADF27442
augaaccccaaccagaagaucaucaccaucggcagcgugugcaugaccaucggcauggccaaccugauccugcagaucggcaacaucaucagcaucuggaucagccacagcauccagcuggagaaccagaaccagaucgagaccugcaaccagagcgugaucaccuacgagaacaacaccugggugaaccagaccuacgugaacaucagcaacaccaacuucgccgccggccagagcguggugagcgugaagcuggccggcaacagcagccugugccccgugagcggcugggccaucuacagcaaggacaacagcaucagaaucggcagcaagggcgacguguucgugaucagagagcccuucaucagcugcagcccccuggagugcagaaccuucuuccugacccagggcgcccugcugaacgacaagcacagcaacggcaccaucaaggacagaagccccuacagaacccugaugagcugccccaucggcgaggugcccagccccuacaacagcagauucgagagcguggccuggagcgccagcgccugccacgacggcaucaacuggcugaccaucggcaucagcggccccgacaacggcgccguggccgugcugaaguacaacggcaucaucaccgacaccaucaagagcuggagaaacaacauccugagaacccaggagagcgagugcgccugcgugaacggcagcugcuucaccgugaugaccgacggccccagcgacggccaggccagcuacaagaucuucagaaucgagaagggcaagaucgugaagagcguggagaugaacgcccccaacuaccacuacgaggagugcagcugcuaccccgacagcagcgagaucaccugcgugugcagagacaacuggcacggcagcaacagacccugggugagcuucaaccagaaccuggaguaccagaucggcuacaucugcagcggcaucuucggcgacaaccccagacccaacgacaagaccggcagcugcggccccgugagcagcaacggcgccaacggcgugaagggcuucagcuucaaguacggcaacggcguguggaucggcagaaccaagagcaucagcagcagaaacggcuucgagaugaucugggaccccaacggcuggaccggcaccgacaacaacuucagcaucaagcaggacaucgugggcaucaacgaguggagcggcuacagcggcagcuucgugcagcaccccgagcugaccggccuggacugcaucagacccugcuucuggguggagcugaucagaggcagacccaaggagaacaccaucuggaccagcggcagcagcaucagcuucugcggcgugaacagcgacaccgugggcuggagcuggcccgacggcgccgagcugcccuucaccaucgacaaguga

SEQ ID NO: 178600 - RNA, 1410 nt, Artificial Sequence
  derived and/or modified CDS sequence (opt4) from neuraminidase__InfluenzaA__ADF27462
augaaccccaaccagaagaucaucaccaucggcagcgugugcaugaccaucggcauggccaaccugauccugcagaucggcaacaucaucagcaucuggaucagccacagcauccagcugggcaaccagaaccagaucgaggccugcaaccagagcgugaucaccuacgagaacaacaccugggugaaccagaccuacgugaacaucagcaacaccaacuucgccgccggccagagcguggugagcgugaagcuggccggcaacagcagccugugccccgugagcggcugggccguguacagcaaggacaacagcaucagaaucggcagcaagggcgacguguucgugaucagagagcccuucaucagcugcagcccccuggagugcagaaccuucuuccugacccagggcgcccugcugaacgacaagcacagcaacggcaccaucaaggacagaagccccuacagaacccugaugagcugccccaucggcgaggugcccagccccuacaacagcagauucgagagcguggccuggagcgccagcgccugccacgacggcaucaacuggcugaccaucggcaucagcggccccgacaacggcgccguggccgugcugaaguacaacggcaucaucaccgacaccaucaagagcuggagaaacaacauccugagaacccaggagagcgagugcgccugcgugaacggcagcugcuucaccgugaugaccgacggccccagcgacggccaggccagcuacaagaucuucagaaucgagaagggcaagaucgugaagagcguggagaugaacgcccccaacuaccacuacgaggagugcagcugcuaccccgacagcagcgagaucaccugcgugugcagagacaacuggcacggcagcaacagacccugggugagcuucaaccagaaccuggaguaccagaucggcuacaucugcagcggcaucuucggcgacaaccccagacccaacgacaagaccggcagcugcggccccgugagcagcaacggcgccaacggcgugaagggcuucagcuucaaguacggcaacggcguguggaucggcagaaccaagagcaucagcagcagaaacggcuucgagaugaucugggaccccaacggcuggaccggcaccgacaacaacuucagcaucaagcaggacaucgugggcaucaacgaguggagcggcuacagcggcagcuucgugcagcaccccgagcugaccggccuggacugcaucagacccugcuucuggguggagcugaucagaggcagacccaaggagaacaccaucuggaccagcggcagcagcaucagcuucugcggcgugaacagcgacaccgugggcuggagcuggcccgacggcgccgagcugcccuucaccaucgacaaguga

SEQ ID NO: 178601 - RNA, 1410 nt, Artificial Sequence; identical to SEQ ID NO: 176798
  derived and/or modified CDS sequence (opt4) from neuraminidase__InfluenzaA__ADF27472

SEQ ID NO: 178602 - RNA, 1410 nt, Artificial Sequence
  derived and/or modified CDS sequence (opt4) from neuraminidase__InfluenzaA__ADF27482
augaaccccaaccagaagaucaucaccaucggcagcgugugcaugaccaucggcauggccaaccugauccugcagaucggcaacaucaucagcaucuggaucagccacagcauccagcugggcaaccagaaccagguggagaccugcaaccagagcaucaucaccuacgagaacaacaccugggugaaccagaccuacgugaacaucagcaacaccaacuucgccgccggccagagcguggugagcgugaagcuggccggcaacagcagccugugccccgugagcggcugggccaucuacagcaaggacaacagcaucagaaucggcagcaagggcgacguguucgugaucagagagcccuucaucagcugcagcccccuggagugcagaaccuucuuccugacccagggcgcccugcugaacgacaagcacagcaacggcaccaucaaggacagaagccccuacagaacccugaugagcugccccaucggcgaggugcccagccccuacaacagcagauucgagagcguggccuggagcgccagcgccugccacgacggcaucaacuggcugaccaucggcaucagcggccccgacaacggcgccguggccgugcugaaguacaacggcaucaucaccgacaccaucaagagcuggagaaacaacauccugagaacccaggagagcgagugcgccugcgugaacggcagcugcuucaccgugaugaccgacggccccagcgacggccaggccagcuacaagaucuucagaaucgagaagggcaagaucgugaagagcguggagaugaacgcccccaacuaccacuacgaggagugcagcugcuaccccgacagcagcgagaucaccugcgugugcagagacaacuggcacggcagcaacagacccugggugagcuucaaccagaaccuggaguaccagaucggcuacaucugcagcggcaucuucggcgacaaccccagacccaacgacaagaccggcagcugcggccccgugagcagcaacggcgccaacggcgugaagggcuucagcuucaaguacggcaacggcguguggaucggcagaaccaagagcaucagcagcagaaacggcuucgagaugaucugggaccccaacggcuggaccggcaccgacaacaacuucagcaucaagcaggacaucgugggcaucaacgaguggagcggcuacagcggcagcuucgugcagcaccccgagcugaccggccuggacugcaucagacccugcuucuggguggagcugaucagaggcagacccaaggagaacaccaucuggaccagcggcagcagcaucagcuucugcggcgugaacagcgacaccgugggcuggagcuggcccgacggcgccgagcugcccuucaccaucgacaaguga

SEQ ID NO: 178603 - RNA, 1410 nt, Artificial Sequence
  derived and/or modified CDS sequence (opt4) from neuraminidase__InfluenzaA__ADF27492
augaaccccaaccagaagaucaucaccaucggcagcgugugcaugaccaucggcauggccaaccugauccugcagaucggcaacaucaucagcaucuggaucagccacagcauccagcugggcaaccagaaccagaucgagcccugcaaccagagcgugaucaccuacgagaacaacaccugggugaaccagaccuacgugaacaucagcaacaccaacuucgccgccggccagagcguggugagcgugaagcuggccggcaacagcagccugugccccgugagcggcugggccaucuacagcaaggacaacagcaucagaaucggcagcaagggcgacguguucgugaucagagagcccuucaucagcugcagcccccuggagugcagaaccuucuuccugacccagggcgcccugcugaacgacaagcacagcaacggcaccaucaaggacagaagccccuacagaacccugaugagcugccccaucggcgaggugcccagccccuacaacagcagauucgagagcguggccuggagcgccagcgccugccacgacggcaucaacuggcugaccaucggcaucagcggccccgacaacggcgccguggccgugcugaaguacaacggcaucaucaccgacaccaucaagagcuggagaaacaacauccugagaacccaggagagcgagugcgccugcgugaacggcagcugcuucaccgugaugaccgacggccccagcgacggccaggccagcuacaagaucuucagaaucgagaagggcaagaucgugaagagcaucgagaugaacgcccccaacuaccacuacgaggagugcagcugcuaccccgacagcagcgagaucaccugcgugugcagagacaacuggcacggcagcaacagacccugggugagcuucaaccagaaccuggaguaccagaucggcuacaucugcagcggcaucuucggcgacaaccccagacccaacgacaagaccggcagcugcggccccgugagcagcaacggcgccaacggcgugaagggcuucagcuucaaguacggcaacggcguguggaucggcagaaccaagagcaucagcagcagaaacggcuucgagaugaucugggaccccaacggcuggaccggcaccgacaacaacuucagcaucaagcaggacaucgugggcaucaacgaguggagcggcuacagcggcagcuucgugcagcaccccgagcugaccggccuggacugcaucagacccugcuucuggguggagcugaucagaggcagacccaaggagaacaccguguggaccagcggcagcagcaucagcuucugcggcgugaacagcgacaccgugggcuggagcuggcccgacggcgccgagcugcccuucaccaucgacaaguga

SEQ ID NO: 178604 - RNA, 1410 nt, Artificial Sequence; identical to SEQ ID NO: 176798
  derived and/or modified CDS sequence (opt4) from neuraminidase__InfluenzaA__ADF27502

SEQ ID NO: 178605 - RNA, 1410 nt, Artificial Sequence; identical to SEQ ID NO: 176798
  derived and/or modified CDS sequence (opt4) from neuraminidase__InfluenzaA__ADF27512

SEQ ID NO: 178606 - RNA, 1410 nt, Artificial Sequence
  derived and/or modified CDS sequence (opt4) from neuraminidase__InfluenzaA__ADF27522
augaaccccaaccagaagaucaucaccaucggcagcgugugcaugaccaucggcauggccaaccugauccugcagaucggcaacaucaucagcaucuggaucagccacagcauccagcugggcaaccagaaccagaucgagaccugcaaccagagcgugaucaccuacgagaacaacaccugggugaaccagaccuacgugaacaucagcaacaccaacuucgccgccggccagagcguggugagcgugaagcuggccggcaacagcagccugugccccgugagcggcugggccaucuacagcaaggacaacagcaucagaaucggcagcaagggcgacguguucgugaucagagagcccuucaucagcugcagcccccuggagugcagaaccuucuuccugacccagggcgcccugcugaacgacaagcacagcaacggcaccaucaaggacagaagccccuacagaacccugaugagcugccccaucggcgaggugcccagccccuacaacagcagauucgagagcguggccuggagcgccagcgccugccacgacggcaucaacuggcugaccaucggcaucagcggccccgacaacggcgccguggccgugcugaaguacaacggcaucaucaccgacaccaucaagagcuggagaaacaacauccugagaacccaggagagcgagugcgccugcgugaacggcagcugcuucaccgugaugaccgacggccccagcgacggccaggccagcuacaagaucuucagaaucgagaagggcaagaucgugaagagcguggagaugaacgcccccaacuaccacuacgaggagugcagcugcuaccccgacagcagcgagaucaccugcgugugcagagacaacuggcacggcagcaacagacccugggugagcuucaaccagaaccuggaguaccagaucggcuacaucugcagcggcaucuucggcgacaaccccagacccaacgacaagaccggcagcugcggccccgugagcagcaacggcgccaacggcgugaagggcuucagcuucaaguacggcaacggcguguggaucggcagaaucaagagcaucagcagcagaaacggcuucgagaugaucugggaccccaacggcuggaccggcaccgacaacaacuucagcaucaagcaggacaucgugggcaucaacgaguggagcggcuacagcggcagcuucgugcagcaccccgagcugaccggccuggacugcaucagacccugcuucuggguggagcugaucagaggcagacccaaggagaacaccaucuggaccagcggcagcagcaucagcuucugcggcgugaacagcgacaccgugggcuggagcuggcccgacggcgccgagcugcccuucaccaucgacaaguga

SEQ ID NO: 178607 - RNA, 1410 nt, Artificial Sequence; identical to SEQ ID NO: 176798
  derived and/or modified CDS sequence (opt4) from neuraminidase__InfluenzaA__ADF27532

SEQ ID NO: 178608 - RNA, 1410 nt, Artificial Sequence
  derived and/or modified CDS sequence (opt4) from neuraminidase__InfluenzaA__ADF27542
augaaccccaaccagaagaucaucaccaucggcagcgugugcaugaccaucggcauggccaaccugauccugcagaucggcaacaucaucagcaucuggaucagccacagcauccagcugggcaaccagaaccagaucgagaccugcaaccagagcgugaucaccuacgagaacaacaccugggugaaccagaccuacgugaacaucagcaacaccaacuucgccgccggccagagcguggugagcgugaagcuggccggcaacagcagccugugccccgugagcggcugggccaucuacagcaaggacaacagcgugagaaucggcagcaagggcgacguguucgugaucagagagcccuucaucagcugcagcccccuggagugcagaaccuucuuccugacccagggcgcccugcugaacgacaagcacagcaacggcaccaucaaggacagaagccccuacagaacccugaugagcugccccaucggcgaggugcccagccccuacaacagcagauucgagagcguggccuggagcgccagcgccugccacgacggcaucaacuggcugaccaucggcaucagcggccccgacaacggcgccguggccgugcugaaguacaacggcaucaucaccgacaccaucaagagcuggagaaacaacauccugagaacccaggagagcgagugcgccugcgugaacggcagcugcuucaccgugaugaccgacggccccagcgacggccaggccagcuacaagaucuucagaaucgagaagggcaagaucgugaagagcguggagaugaacgcccccaacuaccacuacgaggagugcagcugcuaccccgacagcagcgagaucaccugcgugugcagagacaacuggcacggcagcaacagacccugggugagcuucaaccagaaccuggaguacagaaucggcuacaucugcagcggcaucuucggcgacaaccccagacccaacgacaagaccggcagcugcggccccgugagcagcaacggcgccaacggcgugaagggcuucagcuucaaguacggcaacggcguguggaucggcagaaccaagagcaucagcagcagaaacggcuucgagaugaucugggaccccaacggcuggaccggcaccgacaacaacuucagcaucaagcaggacaucgugggcaucaacgaguggagcggcuacagcggcagcuucgugcagcaccccgagcugaccggccuggacugcaucagacccugcuucuggguggagcugaucagaggcagacccaaggagaacaccaucuggaccagcggcagcagcaucagcuucugcggcgugaacagcgacaccgugggcuggagcuggcccgacggcgccgagcugcccuucaccaucgacaaguga

SEQ ID NO: 178609 - RNA, 1410 nt, Artificial Sequence
  derived and/or modified CDS sequence (opt4) from neuraminidase__InfluenzaA__ADF27552
augaaccccaaccagaagaucaucaccaucggcagcgugugcaugaccaucggccuggccaaccugauccugcagaucggcaacaucaucagcaucugggugagccacagcauccagcugggcaaccagaaccagaucgagaccugcaaccagagcgugaucaccuacgagaacaacaccugggugaaccagaccuacgugaacaucagcaacaccaacuucgccgccggccagagcguggugagcgugaagcuggccggcaacagcagccugugccccgugagcggcugggccaucuacagcaaggacaacagcgugagaaucggcagcaagggcgacguguucgugaucagagagcccuucaucagcugcagcccccuggagugcagaaccuucuuccugacccagggcgcccugcugaacgacaagcacagcaacggcaccaucaaggacagaagccccuacagaacccugaugagcugccccaucggcgaggugcccagccccuacaacagcagauucgagagcguggccuggagcgccagcgccugccacgacggcaucaacuggcugaccaucggcaucagcggccccgacaacggcgccguggccgugcugaaguacaacggcaucaucaccgacaccaucaagagcuggagaaacaacauccugagaacccaggagagcgagugcgccugcgugaacggcagcugcuucaccgugaugaccgacggccccagcgacggccaggccagcuacaagaucuucagaaucgagaagggcaagaucgugaagagcguggagaugaacgcccccaacuaccacuacgaggagugcagcugcuaccccgacagcagcgagaucaccugcgugugcagagacaacuggcacggcagcaacagacccugggugagcuucaaccagaaccuggaguacagaaucggcuacaucugcagcggcaucuucggcgacaaccccagacccaacgacaagaccggcagcugcggccccgugagcagcaacggcgccaacggcgugaagggcuucagcuucaaguacggcaacggcguguggaucggcagaaccaagagcaucagcagcagaaacggcuucgagaugaucugggaccccaacggcuggaccggcaccgacaagaacuucagcaucaagcaggacaucgugggcaucaacgaguggagcggcuacagcggcagcuucgugcagcaccccgagcugaccggccuggacugcaucagacccugcuucuggguggagcugaucagaggcagacccaaggagaacaccaucuggaccagcggcagcagcaucagcuucugcggcgugaacagcgacaccgugggcuggagcuggcccgacggcgccgagcugcccuucaccaucgacaaguga

SEQ ID NO: 178610 - RNA, 1410 nt, Artificial Sequence; identical to SEQ ID NO: 177624
  derived and/or modified CDS sequence (opt4) from neuraminidase__InfluenzaA__ADF27562

SEQ ID NO: 178611 - RNA, 1410 nt, Artificial Sequence; identical to SEQ ID NO: 176798
  derived and/or modified CDS sequence (opt4) from neuraminidase__InfluenzaA__ADF27572

SEQ ID NO: 178612 - RNA, 1410 nt, Artificial Sequence
  derived and/or modified CDS sequence (opt4) from neuraminidase__InfluenzaA__ADF27582
augaaccccaaccagaagaucaucaccaucggcagcgugugcaugaccaucggcauggccaaccugauccugcagaucggcaacaucaucagcaucuggaucagccacagcauccagcugggcaaccagaaccagaucgagaccugcaaccagagcgugaucaccuacgagaacaacaccugggugaaccagaccuacgugaacaucagcaacaccaacuucgccgccggccagagcguggugagcgugaagcuggccggcaacagcagccugugccccgugagcggcugggccaucuacagcaaggacaacagcaucagaaucggcagcaagggcgacguguucgugaucagagagcccuucaucagcugcagcccccuggagugcagaaccuucuuccugacccagggcgcccugcugaacgacaagcacagcaacggcaccaucaaggacagaagccccuacagaacccugaugagcugccccaucggcgaggugcccagccccuacaacagcagauucgagagcguggccuggagcgccagcgccugccacgacggcaucaacuggcugaccaucggcaucagcggccccgacaacggcgccguggccgugcugaaguacaacggcaucaucaccgacaccaucaagagcuggagaaacaacauccugagaacccaggagagcgagugcgccugcgugaacggcagcugcuucaccgugaugaccgacggccccagcgacggccaggccagcuacaagaucuucagaaucgagaagggcaagaucgugaagagcguggagaugaacgcccccaacuaccacuacgaggagugcagcugcuaccccgacagcagcgagaucaccugcgugugcagagacaacuggcacggcagcaacagacccugggugagcuucaaccagaaccuggaguacagaaucggcuacaucugcagcggcaucuucggcgacaaccccagacccaacgacaagaccggcagcugcggccccgugagcagcaacggcgccaacggcgugaagggcuucagcuucaaguacggcaacggcguguggaucggcagaaccaagagcaucagcagcagaaacggcuucgagaugaucugggaccccaacggcuggaccggcaccgacaacaacuucagcaucaagcaggacaucgugggcaucaacgaguggagcggcuacagcggcagcuucgugcagcaccccgagcugaccggccuggacugcaucagacccugcuucuggguggagcugaucagaggcagacccaaggagaacaccaucuggaccagcggcagcagcaucagcuucugcggcgugaacagcgacaccgugggcuggagcuggcccgacggcgccgagcugcccuucaccaucgacaaguga

SEQ ID NO: 178613 - RNA, 1410 nt, Artificial Sequence; identical to SEQ ID NO: 176798
  derived and/or modified CDS sequence (opt4) from neuraminidase__InfluenzaA__ADF27592

SEQ ID NO: 178614 - RNA, 1410 nt, Artificial Sequence
  derived and/or modified CDS sequence (opt4) from neuraminidase__InfluenzaA__ADF27602
augaaccccaaccagaagaucaucaccaucggcagcgugugcaugaccaucggcauggccaaccugauccugcagaucggcaacaucaucagcaucuggaucagccacagcauccagcugggcaaccagaaccagaucgagaccugcaaccagagcgugaucaccuacgagaacaacaccugggugaaccagaccuacgugaacaucagcaacaccaacuucgccgccggccagagcguggugagcgugaagcuggccggcaacagcagccugugccccgugagcggcugggccaucuacagcaaggacaacagcaucagaaucggcagcaagggcgacguguucgugaucagagagcccuucaucagcugcagcccccuggagugcagaaccuucuuccugacccagggcgcccugcugaacgacaagcacagcaacggcaccaucaaggacagaagccccuacagaacccugaugagcugccccaucggcgaggugcccagccccuacaacagcagauucgagagcguggccuggagcgccagcgccugccacgacggcaucaacuggcugaccaucggcaucagcggccccgacaacggcgccguggccgugcugaaguacaacggcaucaucaccgacaccaucaagagcuggagaaacaacauccugagaacccaggagagcgagugcgccugcgugaacggcagcugcuucaccgugaugaccgacggccccagcgacggccaggccagcuacaagaucuucagaaucgagagaggcaagaucgugaagagcguggagaugaacgcccccaacuaccacuacgaggagugcagcugcuaccccgacagcagcgagaucaccugcgugugcagagacaacuggcacggcagcaacagacccugggugagcuucaaccagaaccuggaguaccagaucggcuacaucugcagcggcaucuucggcgacaaccccagacccaacgacaagaccggcagcugcggccccgugagcagcaacggcgccaacggcgugaagggcuucagcuucaaguacggcaacggcguguggaucggcagaaccaagagcaucagcagcagaaacggcuucgagaugaucugggaccccaacggcuggaccggcaccgacaacagcuucagcaucaagcaggacaucgugggcaucaacgaguggagcggcuacagcggcagcuucgugcagcaccccgagcugaccggccuggacugcaucagacccugcuucuggguggagcugaucagaggcagacccaaggagaacaccaucuggaccagcggcagcagcaucagcuucugcggcgugaacagcgacaccgugggcuggagcuggcccgacggcgccgagcugcccuucaccaucgacaaguga

SEQ ID NO: 178615 - RNA, 1410 nt, Artificial Sequence; identical to SEQ ID NO: 176798
  derived and/or modified CDS sequence (opt4) from neuraminidase__InfluenzaA__ADF27612

SEQ ID NO: 178616 - RNA, 1410 nt, Artificial Sequence; identical to SEQ ID NO: 178086
  derived and/or modified CDS sequence (opt4) from neuraminidase__InfluenzaA__ADF27622

SEQ ID NO: 178617 - RNA, 1410 nt, Artificial Sequence; identical to SEQ ID NO: 178533
  derived and/or modified CDS sequence (opt4) from neuraminidase__InfluenzaA__ADF27632

SEQ ID NO: 178618 - RNA, 1410 nt, Artificial Sequence; identical to SEQ ID NO: 176798
  derived and/or modified CDS sequence (opt4) from neuraminidase__InfluenzaA__ADF27642

SEQ ID NO: 178619 - RNA, 1410 nt, Artificial Sequence; identical to SEQ ID NO: 176798
  derived and/or modified CDS sequence (opt4) from neuraminidase__InfluenzaA__ADF27652

SEQ ID NO: 178620 - RNA, 1410 nt, Artificial Sequence
  derived and/or modified CDS sequence (opt4) from neuraminidase__InfluenzaA__ADF27662
augaaccccaaccagaagaucaucaccaucggcagcgugugcaugaccaucggcauggccaaccugauccugcagaucggcaacaucaucagcaucuggaucagccacagcauccagcugggcaaccagaaccagaucgagaccugcaaccagagcgugaucaccuacgagaacaacaccugggugaaccagaccuacgugaacaucagcaacaccaacuucgccgccggccagagcguggugagcgugaagcuggccggcaacagcagccugugccccgugagcggcugggccaucuacagcaaggacaacagcgugagaaucggcagcaagggcgacguguucgugaucagagagcccuucaucagcugcagcccccuggagugcagaaccuucuuccugacccagggcgcccugcugaacgacaagcacagcaacggcaccaucaaggacagaagccccuacagaacccugaugagcugccccaucggcgaggugcccagccccuacaacagcagauucgagagcguggccuggagcgccagcgccugcaacgacggcaucaacuggcugaccaucggcaucagcggccccgacaacggcgccguggccgugcugaaguacaacggcaucaucaccgacaccaucaagagcuggagaaacaacauccugagaacccaggagagcgagugcgccugcgugaacggcagcugcuucaccgugaugaccgacggccccagcgacggccaggccagcuacaagaucuucagaaucgagaagggcaagaucgugaagagcguggagaugaacgcccccaacuaccacuacgaggagugcagcugcuaccccgacagcagcgagaucaccugcgugugcagagacaacuggcacggcagcaacagacccugggugagcuucaaccagaaccuggaguacagaaucggcuacaucugcagcggcaucuucggcgacaaccccagacccaacgacaagaccggcagcugcggccccgugagcagcaacggcgccaacggcgugaagggcuucagcuucaaguacggcaacggcguguggaucggcagaaccaagagcaucagcagcagaaacggcuucgagaugaucugggaccccaacggcuggaccggcaccgacaacaacuucagcaucaagcaggacaucgugggcaucaacgaguggagcggcuacagcggcagcuucgugcagcaccccgagcugaccggccuggacugcaucagacccugcuucuggguggagcugaucagaggcagacccaaggagaacaccaucuggaccagcggcagcagcaucagcuucugcggcgugaacagcgacaccgugggcuggagcuggcccgacggcgccgagcugcccuucaccaucgacaaguga

SEQ ID NO: 178621 - RNA, 1410 nt, Artificial Sequence; identical to SEQ ID NO: 176798
  derived and/or modified CDS sequence (opt4) from neuraminidase__InfluenzaA__ADF27672

SEQ ID NO: 178622 - RNA, 1410 nt, Artificial Sequence; identical to SEQ ID NO: 176798
  derived and/or modified CDS sequence (opt4) from neuraminidase__InfluenzaA__ADF27682

SEQ ID NO: 178623 - RNA, 1410 nt, Artificial Sequence; identical to SEQ ID NO: 176798
  derived and/or modified CDS sequence (opt4) from neuraminidase__InfluenzaA__ADF27692

SEQ ID NO: 178624 - RNA, 1410 nt, Artificial Sequence; identical to SEQ ID NO: 176798
  derived and/or modified CDS sequence (opt4) from neuraminidase__InfluenzaA__ADF27702

SEQ ID NO: 178625 - RNA, 1410 nt, Artificial Sequence; identical to SEQ ID NO: 176798
  derived and/or modified CDS sequence (opt4) from neuraminidase__InfluenzaA__ADF27712

SEQ ID NO: 178626 - RNA, 1410 nt, Artificial Sequence; identical to SEQ ID NO: 178086
  derived and/or modified CDS sequence (opt4) from neuraminidase__InfluenzaA__ADF27788

SEQ ID NO: 178627 - RNA, 1410 nt, Artificial Sequence; identical to SEQ ID NO: 178041
  derived and/or modified CDS sequence (opt4) from neuraminidase__InfluenzaA__ADF27798

SEQ ID NO: 178628 - RNA, 1410 nt, Artificial Sequence; identical to SEQ ID NO: 178533
  derived and/or modified CDS sequence (opt4) from neuraminidase__InfluenzaA__ADF27808

SEQ ID NO: 178629 - RNA, 1410 nt, Artificial Sequence
  derived and/or modified CDS sequence (opt4) from neuraminidase__InfluenzaA__ADF27818
augaaccccaaccagaagaucaucaccaucggcagcgugugcaugaccaucggcauggccaaccugauccugcagaucggcaacaucaucagcaucuggaucagccacagcauccagcugggcaaccagaaccagaucgagaccugcaaccagagcgugaucaccuacgagaacaacaccugggugaaccagaccuacgugaacaucagcaacaccaacuucgccgccggccagagcguggugagcgugaagcuggccggcaacagcagccugugccccgugagcggcugggccaucuacagcaaggacaacagcaucagaaucggcagcaagggcgacguguucgugaucagagagcccuucaucagcugcagcccccuggagugcagaaccuucuuccugacccagggcgcccugcugaacgacaagcacagcaacggcaccaucaaggacagaagccccuacagaacccugaugagcugccccaucggcgaggugcccagccccuacaacagcagauucgagagcguggccuggagcgccagcgccugccacgacggcaucaacuggcugaccaucggcaucagcggccccgacaacggcgccguggccgugcugaaguacaacggcaucaucaccgacaccaucaagagcuggagaaacaacauccugagaacccaggagagcgagugcgccugcgugaacggcagcugcuucaccaucaugaccgacggccccagcgacggccaggccagcuacaagaucuucagaaucgagaagggcaagaucgugaagagcguggagaugaacgcccccaacuaccacuacgaggagugcagcugcuaccccgacagcagcgagaucaccugcgugugcagagacaacuggcacggcagcaacagacccugggugagcuucaaccagaaccuggaguaccagaucggcuacaucugcagcggcaucuucggcgacaaccccagacccaacgacaagaccggcagcugcggccccgugagcagcaacggcgccaacggcgugaagggcuucagcuucaaguacggcaacggcguguggaucggcagaaccaagagcaucaacagcagaaacggcuucgagaugaucugggaccccaacggcuggaccggcaccgacaacaacuucagcaucaagcaggacaucgugggcaucaacgaguggagcggcuacagcggcagcuucgugcagcaccccgagcugaccggccuggacugcaucagacccugcuucuggguggagcugaucagaggcagacccaaggagaacaccaucuggaccagcggcagcagcaucagcuucugcggcgugaacagcgacaccgugggcuggagcuggcccgacggcgccgagcugcccuucaccaucgacaaguga

SEQ ID NO: 178630 - RNA, 1410 nt, Artificial Sequence; identical to SEQ ID NO: 176798
  derived and/or modified CDS sequence (opt4) from neuraminidase__InfluenzaA__ADF27838

SEQ ID NO: 178631 - RNA, 1410 nt, Artificial Sequence; identical to SEQ ID NO: 176798
  derived and/or modified CDS sequence (opt4) from neuraminidase__InfluenzaA__ADF27848

SEQ ID NO: 178632 - RNA, 1410 nt, Artificial Sequence
  derived and/or modified CDS sequence (opt4) from neuraminidase__InfluenzaA__ADF27858
augaaccccaaccagaagaucaucaccaucggcagcgugugcaugaccaucggcauggccaaccugauccugcagaucggcaacaucaucagcaucuggaucagccacagcauccagcugggcaaccagaaccagaucgagaccugcaaccagagcgugaucaccuacgagaacaacaccugggugaaccagaccuacgugaacaucagcaacaccaacuucgccgccggccagagcguggugagcgugaagcuggccggcaacagcagccugugccccgugagcggcugggccaucuacagcaaggacaacagcaucagaaucggcagcaagggcgacguguucgugaucagagagcccuucaucagcugcagcccccuggagugcagaaccuucuuccugacccagggcgcccugcugaacgacaagcacagcaacggcaccaucaaggacagaagccccuacagaacccugaugagcugccccaucggcgaggugcccagccccuacaacagcagauucgagagcguggccuggagcagcagcgccugccacgacggcaucaacuggcugaccaucggcaucagcggccccgacaacggcgccguggccgugcugaaguacaacggcaucaucaccgacaccaucaagagcuggagaaacaacauccugagaacccaggagagcgagugcgccugcgugaacggcagcugcuucaccgugaugaccgacggccccagcgacggccaggccagcuacaagaucuucagaaucgagaagggcaagaucgugaagagcguggagaugaacgcccccaacuaccacuacgaggagugcagcugcuaccccgacagcagcgagaucaccugcgugugcagagacaacuggcacggcagcaacagacccugggugagcuucaaccagaaccuggaguaccagaucggcuacaucugcagcggcaucuucggcgacaaccccagacccaacgacaagaagggcagcugcggccccgugagcagcaacggcgccaacggcgugaagggcuucagcuucaaguacggcaacggcguguggaucggcagaaccaagagcaucagcagcagaaacggcuucgagaugaucugggaccccaacggcuggaccggcaccgacaacaacuucagcaucaagcaggacaucgugggcaucaacgaguggagcggcuacagcggcagcuucgugcagcaccccgagcugaccggccuggacugcaucagacccugcuucuggguggagcugaucagaggcagacccaaggagaacaccaucuggaccagcggcagcagcaucagcuucugcggcgugaacggcgacaccgugggcuggagcuggcccgacggcgccgagcugcccuucaccaucgacaaguga

SEQ ID NO: 178633 - RNA, 1410 nt, Artificial Sequence
  derived and/or modified CDS sequence (opt4) from neuraminidase__InfluenzaA__ADF27878
augaaccccaaccagaagaucaucaccaucggcagcgugugcaugaccaucggcauggccaaccugauccugcagaucggcaacaucaucagcaucuggaucagccacagcauccagcugggcaaccagaaccagaucgagaccugcaaccagagcgugaucaccuacgagaacaacaccugggugaaccagaccuacgugaacaucagcaacaccaacuucgccgccggccagagcguggugagcgugaagcuggccggcaacagcagccugugccccgugagcggcugggccaucuacagcaaggacaacagcaucagaaucggcagcaagggcgacguguucgugaucagagagcccuucaucagcugcagcccccuggagugcagaaccuucuuccugacccagggcgcccugcugaacgacaagcacagcaacggcaccaucaaggacagaagccccuacagaacccugaugagcugccccaucggcgaggugcccagccccuacaacagcagauucgagagcguggccuggagcgccagcgccugccacgacggcaucaacuggcugaccaucggcaucagcggccccgacaacggcgccguggccgugcugaaguacaacggcaucaucaccgacaccaucaagagcuggagaaacaacauccugagaacccaggagagcgagugcgccugcgugaacggcagcugcuucaccgugaugaccgacggccccagcgacggccaggccagcuacaagaucuucagaaucgagaagggcaagaucgugaagagcguggagaugaacgcccccaacuaccacuacgaggagugcagcugcuaccccgacagcagcgagaucaccugcgugugcagagacaacuggcacggcagcaacagacccugggugagcuucaaccagaaccuggaguaccagaucggcuacaucugcagcggcaucuucggcgacaaccccagacccaacgacaagaagggcagcugcggccccgugagcagcaacggcgccaacggcgugaagggcuucagcuucaaguacggcaacggcguguggaucggcagaaccaagagcaucagcagcagaaacggcuucgagaugaucugggaccccaacggcuggaccggcaccgacaacaacuucagcaucaagcaggacaucgugggcaucaacgaguggagcggcuacagcggcagcuucgugcagcaccccgagcugaccggccuggacugcaucagacccugcuucuggguggagcugaucagaggcagacccaaggagaacaccaucuggaccagcggcagcagcaucagcuucugcggcgugaacggcgacaccgugggcuggagcuggcccgacggcgccgagcugcccuucaccaucgacaaguga

SEQ ID NO: 178634 - RNA, 1410 nt, Artificial Sequence; identical to SEQ ID NO: 178086
  derived and/or modified CDS sequence (opt4) from neuraminidase__InfluenzaA__ADF27888

SEQ ID NO: 178635 - RNA, 1410 nt, Artificial Sequence; identical to SEQ ID NO: 176798
  derived and/or modified CDS sequence (opt4) from neuraminidase__InfluenzaA__ADF27898

SEQ ID NO: 178636 - RNA, 1410 nt, Artificial Sequence; identical to SEQ ID NO: 178086
  derived and/or modified CDS sequence (opt4) from neuraminidase__InfluenzaA__ADF27908

SEQ ID NO: 178637 - RNA, 1410 nt, Artificial Sequence; identical to SEQ ID NO: 178086
  derived and/or modified CDS sequence (opt4) from neuraminidase__InfluenzaA__ADF27918

SEQ ID NO: 178638 - RNA, 1410 nt, Artificial Sequence
  derived and/or modified CDS sequence (opt4) from neuraminidase__InfluenzaA__ADF27938
augaaccccaaccagagaaucaucaccaucggcagcgugugcaugaccaucggcauggccaaccugauccugcagaucggcaacaucaucagcaucuggaucagccacagcauccagcugggcaaccagaaccagaucgagaccugcaaccagagcgugaucaccuacgagaacaacaccugggugaaccagaccuacgugaacaucagcaacaccaacuucgccgccggccagagcguggugagcgugaagcuggccggcaacagcagccugugccccgugagcggcugggccaucuacagcaaggacaacagcaucagaaucggcagcaagggcgacguguucgugaucagagagcccuucaucagcugcagcccccuggagugcagaaccuucuuccugacccagggcgcccugcugaacgacaagcacagcaacggcaccaucaaggacagaagccccuacagaacccugaugagcugccccaucggcgaggugcccagccccuacaacagcagauucgagagcguggccuggagcgccagcgccugccacgacggcaucaacuggcugaccaucggcaucagcggccccgacaacggcgccguggccgugcugaaguacaacggcaucaucaccgacaccaucaagagcuggagaaacaacauccugagaacccaggagagcgagugcgccugcgugaacggcagcugcuucaccgugaugaccgacggccccagcgacggccaggccagcuacaagaucuucagaaucgagaagggcaagaucgugaagagcguggagaugaacgcccccaacuaccacuacgaggagugcagcugcuaccccgacagcagcgagaucaccugcgugugcagagacaacuggcacggcagcaacagacccugggugagcuucaaccagaaccuggaguaccagaucggcuacaucugcagcggcaucuucggcgacaaccccagacccaacgacaagaccggcagcugcggccccgugagcagcaacggcgccaacggcgugaagggcuucagcuucaaguacggcaacggcguguggaucggcagaaccaagagcaucagcagcagaaacggcuucgagaugaucugggaccccaacggcuggaccggcaccgacaacaacuucagcaucaagcaggacaucgugggcaucaacgaguggagcggcuacagcggcagcuucgugcagcaccccgagcugaccggccuggacugcaucagacccugcuucuggguggagcugaucagaggcagacccaaggagaacaccaucuggaccagcggcagcagcaugagcuucugcggcgugaacagcgacaccgugggcuggagcuggcccgacggcgccgagcugcccuucaccaucgacaaguga

SEQ ID NO: 178639 - RNA, 1410 nt, Artificial Sequence; identical to SEQ ID NO: 176798
  derived and/or modified CDS sequence (opt4) from neuraminidase__InfluenzaA__ADF27948

SEQ ID NO: 178640 - RNA, 1410 nt, Artificial Sequence; identical to SEQ ID NO: 178086
  derived and/or modified CDS sequence (opt4) from neuraminidase__InfluenzaA__ADF27958

SEQ ID NO: 178641 - RNA, 1410 nt, Artificial Sequence; identical to SEQ ID NO: 176798
  derived and/or modified CDS sequence (opt4) from neuraminidase__InfluenzaA__ADF27968

SEQ ID NO: 178642 - RNA, 1410 nt, Artificial Sequence; identical to SEQ ID NO: 178086
  derived and/or modified CDS sequence (opt4) from neuraminidase__InfluenzaA__ADF27978

SEQ ID NO: 178643 - RNA, 1410 nt, Artificial Sequence
  derived and/or modified CDS sequence (opt4) from neuraminidase__InfluenzaA__ADF27988
augaaccccaaccagaagaucaucaccaucggcagcgugugcaugaccaucggccuggccaaccugauccugcagaucggcaacaucaucagcaucuggaucagccacagcauccagcugggcaaccagaaccagaucgagaccugcaaccagagcgugaucagcuacgagaacaacaccugggugaaccagaccuacgugaacaucagcaacaccaacuucgccgccggccagagcguggugagcgugaagcuggccggcaacagcagccugugccccgugagcggcugggccaucuacagcaaggacaacagcgugagaaucggcagcaagggcgacguguucgugaucagagagcccuucaucagcugcagcccccuggagugcagaaccuucuuccugacccagggcgcccugcugaacgacaagcacagcaacggcaccaucaaggacagaagccccuacagaacccugaugagcugccccaucggcgaggugcccagccccuacaacagcagauucgagagcguggccuggagcgccagcgccugccacgacggcaucaacuggcugaccaucggcaucagcggccccgacaacggcgccguggccgugcugaaguacaacggcaucaucaccgacaccaucaagagcuggagaaacaacauccugagaacccaggagagcgagugcgccugcgugaacggcagcugcuucaccgugaugaccgacggccccagcgacggccaggccagcuacaagaucuucagaaucgagaagggcaagaucgugaagagcguggagaugaacgcccccaacuaccacuacgaggagugcagcugcuaccccgacagcagcgagaucaccugcgugugcagagacaacuggcacggcagcaacagacccugggugagcuucaaccagaaccuggaguacagaaucggcuacaucugcagcggcaucuucggcgacaaccccagacccaacgacaagaccggcagcugcggccccgugagcagcaacggcgccaacggcgugaagggcuucagcuucaaguacggcaacggcguguggaucggcagaaccaagagcaucagcagcagaaacggcuucgagaugaucugggaccccaacggcuggaccggcaccgacaagaacuucagcaucaagcaggacaucgugggcaucaacgaguggagcggcuacagcggcagcuucgugcagcaccccgagcugaccggccuggacugcaucagacccugcuucuggguggagcugaucagaggcagacccaaggagaacaccaucuggaccagcggcagcagcaucagcuucugcggcgugaacagcgacaccgugggcuggagcuggcccgacggcgccgagcugcccuucaccaucgacaaguga

SEQ ID NO: 178644 - RNA, 1410 nt, Artificial Sequence; identical to SEQ ID NO: 176798
  derived and/or modified CDS sequence (opt4) from neuraminidase__InfluenzaA__ADF27998

SEQ ID NO: 178645 - RNA, 1410 nt, Artificial Sequence; identical to SEQ ID NO: 176798
  derived and/or modified CDS sequence (opt4) from neuraminidase__InfluenzaA__ADF28008

SEQ ID NO: 178646 - RNA, 1410 nt, Artificial Sequence; identical to SEQ ID NO: 177685
  derived and/or modified CDS sequence (opt4) from neuraminidase__InfluenzaA__ADF28018

SEQ ID NO: 178647 - RNA, 1410 nt, Artificial Sequence; identical to SEQ ID NO: 176798
  derived and/or modified CDS sequence (opt4) from neuraminidase__InfluenzaA__ADF28028

SEQ ID NO: 178648 - RNA, 1410 nt, Artificial Sequence
  derived and/or modified CDS sequence (opt4) from neuraminidase__InfluenzaA__ADF28038
augaaccccaaccagaagaucaucaccaucggcagcgugugcaugaccaucggcauggccaaccugauccugcagaucggcaacaucaucagcaucuggaucagccacagcauccagcugggcaaccagaaccagaucgagaccugcaaccagagcgugaucaccuacgagaacaacaccugggugaaccagaccuacgugaacaucagcaacaccaacuucgccaccggccagcugguggugagcgugaagcuggccggcaacagcagccugugccccgugagcggcugggccaucuacagcaaggacaacagcaucagaaucggcagcaagggcgacguguucgugaucagagagcccuucaucagcugcagcccccuggagugcagaaccuucuuccugacccagggcgcccugcugaacgacagacacagcaacggcaccaucaaggacagaagccccuacagaacccugaugagcugccccaucggcgaggugcccagccccuacaacagcagauucgagagcguggccuggagcgccagcgccugccacgacggcaucaacuggcugaccaucggcaucagcggccccgacaacggcgccguggccgugcugaaguacaacggcaucaucaccgacaccaucaagagcuggagaaacaacauccugagaacccaggagagcgagugcgccugcgugaacggcagcugcuucaccgugaugaccgacggccccagcgacggccaggccagcuacaagaucuucagaaucgagaagggcaagaucgugaagagcguggagaugaacgcccccaacuaccacuacgaggagugcagcugcuaccccgacagcagcgagaucaccugcgugugcagagacaacuggcacggcagcaacagacccugggugagcuucaaccagaaccuggaguaccagaucggcuacaucugcagcggcaucuucggcgacaaccccagacccaacgacaagaccggcagcugcggccccgugagcagcaacggcgccaacggcgugaagggcuucagcuucaaguacggcaacggcguguggaucggcagaaccaagagcaucagcagcagaaacggcuucgagaugaucugggaccccaacggcuggaccggcaccgacaacaacuucagcaucaagcaggacaucgugggcaucaacgaguggagcggcuacagcggcagcuucgugcagcaccccgagcugaccggccuggacugcaucagacccugcuucuggguggagcugaucagaggcagacccaaggagaacaccaucuggaccagcggcagcagcaucagcuucugcggcgugaacagcgacaccgugggcuggagcuggcccgacggcgccgagcugcccuucaccaucgacaaguga

SEQ ID NO: 178649 - RNA, 1410 nt, Artificial Sequence; identical to SEQ ID NO: 176798
  derived and/or modified CDS sequence (opt4) from neuraminidase__InfluenzaA__ADF28048

SEQ ID NO: 178650 - RNA, 1410 nt, Artificial Sequence; identical to SEQ ID NO: 176798
  derived and/or modified CDS sequence (opt4) from neuraminidase__InfluenzaA__ADF28058

SEQ ID NO: 178651 - RNA, 1410 nt, Artificial Sequence
  derived and/or modified CDS sequence (opt4) from neuraminidase__InfluenzaA__ADF28068
augaaccccaaccagaagaucaucaccaucggcagcgugugcaugaccaucggcauggccaaccugauccugcagaucggcaacaucaucagcaucuggaucagccacagcauccagcugggcaaccagaaccagaucgagaccugcaaccagagcgugaucaccuacgagaacaacaccugggugaaccagaccuacgugaacaucagcaacaccaacuucgccgccggccagagcguggugagcgugaagcuggccggcagcagcagccugugccccgugagcggcugggccaucuacagcaaggacaacagcaucagaaucggcagcaagggcgacguguucgugaucagagagcccuucaucagcugcagccaccuggagugcagaaccuucuuccugacccagggcgcccugcugaacgacaagcacagcaacggcaccaucaaggacagaagccccuacagaacccugaugagcugccccaucggcgaggugcccagccccuacaacagcagauucgagagcguggccuggagcgccagcgccugccacgacggcaucaacuggcugaccaucggcaucagcggccccgacaacggcgccguggccgugcugaaguacaacggcaucaucaccgacaccaucaagagcuggagaaacaacauccugagaacccaggagagcgagugcgccugcgugaacggcagcugcuucaccgugaugaccgacggccccagcgacggccaggccagcuacaagaucuucagaaucgagaagggcaagaucgugaagagcguggagaugaacgcccccaacuaccacuacgaggagugcagcugcuaccccgacagcagcgagaucaccugcgugugcagagacaacuggcacggcagcaacagacccugggugagcuucaaccagaaccuggaguaccagaucggcuacaucugcagcggcaucuucggcgacaaccccagacccaacgacaagaagggcagcugcggccccgugagcagcaacggcgccaacggcgugaagggcuucagcuucaaguacggcaacggcguguggaucggcagaaccaagagcaucagcagcagaaacggcuucgagaugaucugggaccccaacggcuggaccggcaccgacaacaacuucagcaucaagcaggacaucgugggcaucaacgaguggagcggcuacagcggcagcuucgugcagcaccccgagcugaccggccuggacugcaucagacccugcuucuggguggagcugaucagaggcagacccaaggagaacaccaucuggaccagcggcagcagcaucagcuucugcggcgugaacagcgacaccgugggcuggagcuggcccgacggcgccgagcugcccuucaccaucgacaaguga

SEQ ID NO: 178652 - RNA, 1410 nt, Artificial Sequence; identical to SEQ ID NO: 176798
  derived and/or modified CDS sequence (opt4) from neuraminidase__InfluenzaA__ADF28078

SEQ ID NO: 178653 - RNA, 1410 nt, Artificial Sequence; identical to SEQ ID NO: 176798
  derived and/or modified CDS sequence (opt4) from neuraminidase__InfluenzaA__ADF28088

SEQ ID NO: 178654 - RNA, 1410 nt, Artificial Sequence; identical to SEQ ID NO: 178260
  derived and/or modified CDS sequence (opt4) from neuraminidase__InfluenzaA__ADF28110

SEQ ID NO: 178655 - RNA, 1410 nt, Artificial Sequence; identical to SEQ ID NO: 176798
  derived and/or modified CDS sequence (opt4) from neuraminidase__InfluenzaA__ADF28120

SEQ ID NO: 178656 - RNA, 1410 nt, Artificial Sequence; identical to SEQ ID NO: 176798
  derived and/or modified CDS sequence (opt4) from neuraminidase__InfluenzaA__ADF29919

SEQ ID NO: 178657 - RNA, 1410 nt, Artificial Sequence; identical to SEQ ID NO: 177935
  derived and/or modified CDS sequence (opt4) from neuraminidase__InfluenzaA__ADF42692

SEQ ID NO: 178658 - RNA, 1410 nt, Artificial Sequence; identical to SEQ ID NO: 176798
  derived and/or modified CDS sequence (opt4) from neuraminidase__InfluenzaA__ADF42702

SEQ ID NO: 178659 - RNA, 1410 nt, Artificial Sequence; identical to SEQ ID NO: 178633
  derived and/or modified CDS sequence (opt4) from neuraminidase__InfluenzaA__ADF42712

SEQ ID NO: 178660 - RNA, 1410 nt, Artificial Sequence; identical to SEQ ID NO: 176798
  derived and/or modified CDS sequence (opt4) from neuraminidase__InfluenzaA__ADF42722

SEQ ID NO: 178661 - RNA, 1410 nt, Artificial Sequence; identical to SEQ ID NO: 178086
  derived and/or modified CDS sequence (opt4) from neuraminidase__InfluenzaA__ADF42732

SEQ ID NO: 178662 - RNA, 1410 nt, Artificial Sequence; identical to SEQ ID NO: 176798
  derived and/or modified CDS sequence (opt4) from neuraminidase__InfluenzaA__ADF42742

SEQ ID NO: 178663 - RNA, 1410 nt, Artificial Sequence; identical to SEQ ID NO: 176788
  derived and/or modified CDS sequence (opt4) from neuraminidase__InfluenzaA__ADF58339

SEQ ID NO: 178664 - RNA, 1410 nt, Artificial Sequence; identical to SEQ ID NO: 176798
  derived and/or modified CDS sequence (opt4) from neuraminidase__InfluenzaA__ADF58348

SEQ ID NO: 178665 - RNA, 1410 nt, Artificial Sequence; identical to SEQ ID NO: 176798
  derived and/or modified CDS sequence (opt4) from neuraminidase__InfluenzaA__ADF58350

SEQ ID NO: 178666 - RNA, 1410 nt, Artificial Sequence; identical to SEQ ID NO: 176798
  derived and/or modified CDS sequence (opt4) from neuraminidase__InfluenzaA__ADF58352

SEQ ID NO: 178667 - RNA, 1410 nt, Artificial Sequence
  derived and/or modified CDS sequence (opt4) from neuraminidase__InfluenzaA__ADF80459
augaaccccaaccagaagaucaucaccaucggcagcgugugcaugaccaucggcauggccaaccugauccugcagaucggcaacaucaucagcaucuggaucagccacagcauccagcugggcaaccagaaccagaucgagaccugcaaccagagcgugaucaccuacgagaacaacaccugggugaaccagaccuacgugaacaucagcaacaccaacuucgccgccggccagagcguggugagcgugaagcuggccggcaacagcagccugugccccgugagcggcugggccaucuacagcaaggacaacagcaucagaaucggcagcaagggcgacguguucgugaucagagagcccuucaucagcugcagcccccuggagugcagaaccuucuuccugacccagggcgcccugcugaacgacaagcacagcaacggcaccaucaaggacagaagccccuacagaacccugaugagcugccccaucggcgaggugcccagccccuacaacagcagauucgagagcguggccuggagcgccagcgccugccacgacggcaucaacuggcugaccaucggcaucagcggccccgacaacggcgccguggccgugcugaaguacaacggcaucaucaccgacaccaucaagagcuggagaaacaacauccugagaacccaggagagcgagugcgccugcgugaacggcagcugcuucaccgugaugaccgacggccccagcgacggccaggccagcuacaagaucuucagaaucgagaagggcaagaucgugaagagcguggagaugaacgcccccaacuacuacuacgaggagugcagcugcuaccccgacagcagcgagaucaccugcgugugcagagacaacuggcacggcagcaacagacccugggugaccuucaaccagaaccuggaguaccagaucggcuacaucugcagcggcaucuucggcgacaaccccagacccaacgacaagaccggcagcugcggccccgugagcagcaacggcgccaacggcgugaagggcuucagcuucaaguacggcaacggcguguggaucggcagaaccaagagcaucagcagcagaaacggcuucgagaugaucugggaccccaacggcuggaccggcaccgacaacaacuucagcaucaagcaggacaucgugggcaucaacgaguggagcggcuacagcggcagcuucgugcagcaccccgagcugaccggccuggacugcaucagacccugcuucuggguggagcugaucagaggcagacccaaggagaacaccguguggaccagcggcagcagcaucagcuucugcggcgugaacagcgacaccgugggcuggagcuggcccgacggcgccgagcugcccuucaccaucgacaaguga

SEQ ID NO: 178668 - RNA, 1410 nt, Artificial Sequence
  derived and/or modified CDS sequence (opt4) from neuraminidase__InfluenzaA__ADF80503
augaaccccaaccagaagaucaucaccaucggcagcgugugcaugaccaucggcauggccaaccugauccugcagaucggcaacaucaccagcaucuggaucagccacagcauccagcugggcaaccagaaccagaucgagaccugcaaccagagcgugaucaccuacgagaacaacaccugggugaaccagaccuacgugaacaucagcaacaccaacuucgccgccggccagagcguggugagcgugaagcuggccggcaacagcagccugugccccgugagcggcugggccaucuacagcaaggacaacagcaucagaaucggcagcaagggcgacguguucgugaucagagagcccuucaucagcugcagcccccuggagugcagaaccuucuuccugacccagggcgcccugcugaacgacaagcacagcaacggcaccaucaaggacagaagccccuacagaacccugaugagcugccccaucggcgaggugcccagccccuacaacagcagauucgagagcguggccuggagcgccagcgccugccacgacggcaucaacuggcugaccaucggcaucagcggccccgacaacggcgccguggccgugcugaaguacaacggcaucaucaccgacaccaucaagagcuggagaaacaacauccugagaacccaggagagcgagugcgccugcgugaacggcagcugcuucaccgugaugaccgacggccccagcgacggccaggccagcuacaagaucuucagaaucgagaagggcaagaucgugaagagcguggagaugaacgcccccaacuacuacuacgaggagugcagcugcuaccccgacagcagcgagaucaccugcgugugcagagacaacuggcacggcagcaacagacccugggugagcuucaaccagaaccuggaguaccagaucggcuacaucugcagcggcaucuucggcgacaaccccagacccaacgacaagaccggcagcugcggccccgugagcagcaacggcgccaacggcgugaagggcuucagcuucaaguacggcaacggcguguggaucggcagaaccaagagcaucagcagcagaaacggcuucgagaugaucugggaccccaacggcuggaccggcaccgacaacaacuucagcaucaagcaggacaucgugggcaucaacgaguggagcggcuacagcggcagcuucgugcagcaccccgagcugaccggccuggacugcaucagacccugcuucuggguggagcugaucagaggcagacccaaggagaacaccaucuggaccagcggcagcagcaucagcuucugcggcgugaacagcgacaccgugggcuggagcuggcccgacggcgccgagcugcccuucaccaucgacaaguga

SEQ ID NO: 178669 - RNA, 1410 nt, Artificial Sequence
  derived and/or modified CDS sequence (opt4) from neuraminidase__InfluenzaA__ADF83744
augaaccccaaccagaagaucaucaccaucggcagcgugagccugaccaucagcaccaucugcuucuucaugcagaucgccauccugaucaccaccgugacccugcacuucaagcaguacgaguucaacagcccccccaacaaccaggugaugcugugcgagcccaccaucaucgagaagaacaucaccgagaucguguaccugaccaacaccaccaucgagaaggagaucugccccaagcuggccgaguacagaaacuggagcaagccccagugcgacaucaccggcuucgcccccuucagcaaggacaacagcaucagacugagcgccggcggcgacaucugggugaccagagagcccuacgugagcugcgaccccgacaagugcuaccaguucgcccugggccagggcaccacccugaacaacgugcacagcaacaacaccgugagagacagaacccccuacagaacccugcugaugaacgagcugggcgugcccuuccaccugggcaccaagcaggugugcaucgccuggagcagcagcagcugccacgacggcaaggccuggcugcacgugugcaucaccggcgacgacaagaacgccaccgccagcuucaucuacaacggcagacugguggacagcguggugagcuggagcaaggagauccugagaacccaggagagcgagugcgugugcaucaacggcaccugcaccguggugaugaccgacggcagcgccagcggcaaggccgacaccaagauccuguucaucgaggagggcaagaucgugcacaccagcacccugagcggcagcgcccagcacguggaggagugcagcugcuaccccagauaccccggcgugagaugcgugugcagagacaacuggaagggcagcaacagacccaucguggacaucaacaucaaggaccacagcaucgugagcagcuacgugugcagcggccuggugggcgacacccccagaaagaacgacagcagcagcagcagccacugccuggaccccaacaacgaggagggcggccacggcgugaagggcugggccuucgacgacggcaacgacguguggaugggcagaaccaucagcgagaagagcagacugggcuacgagaccuucaaggugaucgagggcuggagcaaccccaagagcaagcugcagaucaacagacaggugaucguggacagaggcaacagaagcggcuacagcggcaucuucagcguggagggcaagagcugcaucaacagaugcuucuacguggagcugaucagaggcagaaaggaggagaccgaggugcuguggaccagcaacagcaucgugguguucugcggcaccagcggcaccuacggcaccggcagcuggcccgacggcgccgacaucaaccugaugcccaucuga

SEQ ID NO: 178670 - RNA, 1410 nt, Artificial Sequence; identical to SEQ ID NO: 177652
  derived and/or modified CDS sequence (opt4) from neuraminidase__InfluenzaA__ADF83755

SEQ ID NO: 178671 - RNA, 1410 nt, Artificial Sequence
  derived and/or modified CDS sequence (opt4) from neuraminidase__InfluenzaA__ADF83766
augaaccccaaccagaagaucaucaccaucggcagcgugugcaugaccaucggcauggccaaccugauccugcagaucggcaacaucaucagcaucuggaucagccacagcauccagcugggcaaccagaaccagaccgagaccugcaaccagagcgugaucaccuacgagaacaacaccugggugaaccagaccuacgugaacaucagcaacaccaacuucgccgccggccagagcguggugagcgugaagcuggccggcaacagcagccugugccccgugagcggcugggccaucuacagcaaggacaacagcaucagaaucggcagcaagggcgacguguucgugaucagagagcccuucaucagcugcagcccccuggagugcagaaccuucuuccugacccagggcgcccugcugaacgacaagcacagcaacggcaccaucaaggacagaagccccuacagaacccugaugagcugccccaucggcgaggugcccagccccuacaacagcagauucgagagcguggccuggagcgccagcgccugccacgacggcaucaacuggcugaccaucggcaucagcggccccgacaacggcgccguggccgugcugaaguacaacggcaucaucaccgacaccaucaagagcuggagaaacaacauccugagaacccaggagagcgagugcgccugcgugaacggcagcugcuucaccgugaugaccgacggccccagcgacggccaggccagcuacaagaucuucagaaucgagaagggcaagaucgugaagagcguggagaugaacgcccccaacuaccacuacgaggagugcagcugcuaccccgacagcagcgagaucaccugcgugugcagagacaacuggcacggcagcaacagacccugggugagcuucaaccagaaccuggaguaccagaucggcuacaucugcagcggcaucuucggcgacaaccccagacccaacgacaagaccggcagcugcggccccgugagcagcaacggcgccaacggcgugaagggcuucagcuucaaguacgacaacggcguguggaucggcagaaccaagagcaucagcagcagaaacggcuucgagaugaucugggaccccaacggcuggaccggcaccgacaacaacuucagcaucaagcaggacaucgugggcaucaacgaguggagcggcuacagcggcagcuucgugcagcaccccgagcugaccggccuggacugcaucagacccugcuucuggguggagcugaucagaggcagacccaaggagaacaccaucuggaccagcggcagcagcaucagcuucugcggcgugaacagcgacaccgugggcuggagcuggcccgacggcgccgagcugcccuucaccaucgacaaguga

SEQ ID NO: 178672 - RNA, 1410 nt, Artificial Sequence; identical to SEQ ID NO: 176798
  derived and/or modified CDS sequence (opt4) from neuraminidase__InfluenzaA__ADF83776

SEQ ID NO: 178673 - RNA, 1410 nt, Artificial Sequence
  derived and/or modified CDS sequence (opt4) from neuraminidase__InfluenzaA__ADF83786
augaaccccaaccagaagaucaucaccaucggcagcgugugcaugaccaucggcauggccaaccugauccugcagaucggcaacaucaucagcaucuggaucagccacagcauccagcugggcaaccagaaccagaucgagaccugcaaccagagcgugaucaccuacgagaacaacaccugggugaaccagaccuacgugaacaucagcaacaccaacuucgccgccggccagagcguggugagcgugaagcuggccggcaacagcagccugugccccgugagcggcugggccaucuacagcaaggacaacagcaucagaaucggcagcaagggcgacguguucgugaucagagagcccuucaucagcugcagcccccuggagugcagaaccuucuuccugacccagggcgcccugcugaacgacaagcacagcaacggcaccaucaaggacagaagccccuacagaacccugaugagcugccccaucggcgaggugcccagccccuacaacagcagauucgagagcguggccuggagcgccagcgccugccacgacggcaucaacuggcugaccaucggcaucagcggccccgacaacggcgccguggccgugcugaaguacaacggcaucaucaccgacaccaucaagagcuggagaaacaacauccugagaacccaggagagcgagugcgccugcgugaacggcagcugcuucaccgugaugaccgacggccccagcgacggccaggccagcuacaagaucuucagaaucgagaagggcaagaucgugaagagcguggagaugaacgcccccaacuaccacuacgaggagugcagcugcuaccccgacagcagcgagaucaccugcgugugcagagacaacuggcacggcagcaacagacccugggugagcuucaaccagaaccuggaguaccagaucggcuacaucugcagcggcaucuucggcgacaaccccagacccaacgacaagaccggcagcugcggccccgugagcagcaacggcgccaacggcgugaagggcuucagcuucaaguacggcaacggcguguggaucggcagaaccaagagcaucagcagcagaaacggcuucgagaugaucugggaccccaacggcuggaccggcaccgacaacaacuucagcaucaagcaggacaucgugggcaucaacgaguggagcggcuacagcggcagcuucgugcagcaccccgagcugaccggccuggacugcaucagacccugcuucuggguggagcugaucagaggcagacccaaggagaacaccaucuggaccagcggcagcagcaucagcuucugcggcgugaacggcgacaccgugggcuggagcuggcccgacggcgccgagcugcccuucaccaucgacaaguga

SEQ ID NO: 178674 - RNA, 1410 nt, Artificial Sequence
  derived and/or modified CDS sequence (opt4) from neuraminidase__InfluenzaA__ADF83796
augaaccccaaccagaagaucaucaccaucggcagcgugugcaugaccaucggcauggccaaccugauccugcagaucggcaacaucaucagcaucuggaucagccacagcauccagcugggcaaccagaaccagaucgagaccugcaaccagagcgugaucaccuacgagaacaacaccugggugaaccagaccuacgugaacaucagcaacaccaacuucgccgccggccagagcguggugagcgugaagcuggccggcaacagcagccugugccccgugagcggcugggccaucuacagcaaggacaacagcaucagaaucggcagcaagggcgacguguucgugaucagagagcccuucaucagcugcagcccccuggagugcagaaccuucuuccugacccagggcgcccugcugaacgacaagcacagcaacggcaccaucaaggacagaagccccuacagaacccugaugagcugccccaucggcgaggugcccagccccuacaacagcagauucgagagcguggccuggagcgccagcgccugccacgacggcaucaacuggcugaccaucggcaucagcggccccgacaacggcgccguggccgugcugaaguacaacggcaucaucaccgacaccaucaagagcuggagaaacaacauccugagaacccaggagagcgagugcgccugcgugaacggcagcugcuucaccgugaugaccgacggccccagcgacggccaggccagcuacaagaucuucagaaucgagaagggcaagaucgugaagagcguggagaugaacgcccccaacuaccacuacgaggagugcagcugcuaccccgacagcagcgagaucaccugcgugugcagagacaacuggcacggcagcaacagacccugggugagcuucaaccagaaccuggaguaccagaucggcuacaucugcagcggcaucuucggcgacaaccccagacccaacgacaagaccggcagcugcggccccgugagcagcaacggcgccaacggcgugaagggcuucagcuucaaguacggcaacggcguguggaucggcagaaccaagagcaucagcagcagaaacggcuucgagaugaucugggaccccaacggcuggaccggcaccgacaacaacuucagcaucaagcaggacaucgugagaaucaacgaguggagcggcuacagcggcagcuucgugcagcaccccgagcugaccggccuggacugcaucagacccugcuucuggguggagcugaucagaggcagacccaaggagaacaccaucuggaccagcggcagcagcaucagcuucugcggcgugaacagcgacaccgugggcuggagcuggcccgacggcgccgagcugcccuucaccaucgacaaguga

SEQ ID NO: 178675 - RNA, 1410 nt, Artificial Sequence; identical to SEQ ID NO: 176798
  derived and/or modified CDS sequence (opt4) from neuraminidase__InfluenzaA__ADF83806

SEQ ID NO: 178676 - RNA, 1410 nt, Artificial Sequence; identical to SEQ ID NO: 178311
  derived and/or modified CDS sequence (opt4) from neuraminidase__InfluenzaA__ADF83816

SEQ ID NO: 178677 - RNA, 1410 nt, Artificial Sequence; identical to SEQ ID NO: 176798
  derived and/or modified CDS sequence (opt4) from neuraminidase__InfluenzaA__ADF83826

SEQ ID NO: 178678 - RNA, 1410 nt, Artificial Sequence; identical to SEQ ID NO: 176798
  derived and/or modified CDS sequence (opt4) from neuraminidase__InfluenzaA__ADF83836

SEQ ID NO: 178679 - RNA, 1410 nt, Artificial Sequence; identical to SEQ ID NO: 176798
  derived and/or modified CDS sequence (opt4) from neuraminidase__InfluenzaA__ADF83846

SEQ ID NO: 178680 - RNA, 1410 nt, Artificial Sequence; identical to SEQ ID NO: 176798
  derived and/or modified CDS sequence (opt4) from neuraminidase__InfluenzaA__ADF83856

SEQ ID NO: 178681 - RNA, 1410 nt, Artificial Sequence; identical to SEQ ID NO: 178149
  derived and/or modified CDS sequence (opt4) from neuraminidase__InfluenzaA__ADF83866

SEQ ID NO: 178682 - RNA, 1410 nt, Artificial Sequence; identical to SEQ ID NO: 178579
  derived and/or modified CDS sequence (opt4) from neuraminidase__InfluenzaA__ADF83876

SEQ ID NO: 178683 - RNA, 1410 nt, Artificial Sequence; identical to SEQ ID NO: 178229
  derived and/or modified CDS sequence (opt4) from neuraminidase__InfluenzaA__ADF83888

SEQ ID NO: 178684 - RNA, 1410 nt, Artificial Sequence
  derived and/or modified CDS sequence (opt4) from neuraminidase__InfluenzaA__ADF83898
augaaccccaaccagaagaucaucaccaucggcagcgugugcaugaccaucggcauggccaaccugauccugcagaucggcaacaucaucagcaucuggaucagccaccccauccagcugggcaaccagaaccagaucgagaccugcaaccagagcgugaucaccuacgagaacaacaccugggugaaccagaccuacgugaacaucagcaacaccaacuucgccgccggccagagcguggugagcgugaagcuggccggcaacagcagccugugccccgugagcggcugggccaucuacagcaaggacaacagcaucagaaucggcagcaagggcgacguguucgugaucagagagcccuucaucagcugcagcccccuggagugcagaaccuucuuccugacccagggcgcccugcugaacgacaagcacagcaacggcaccaucaaggacagaagccccuacagaacccugaugagcugccccaucggcgaggugcccagccccuacaacagcagauucgagagcguggccuggagcgccagcgccugccacgacggcaucaacuggcugaccaucggcaucagcggccccgacaacggcgccguggccgugcugaaguacaacggcaucaucaccgacaccaucaagagcuggagaaacaacauccugagaacccaggagagcgagugcgccugcgugaacggcagcugcuucaccgugaugaccgacggccccagcgacggccaggccagcuacaagaucuucagaaucgagaagggcaagaucgugaagagcguggagaugaacgcccccaacuaccacuacgaggagugcagcugcuaccccgacagcagcgagaucaccugcgugugcagagacaacuggcacggcagcaacagacccugggugagcuucaaccagaaccuggaguaccagaucggcuacaucugcagcggcaucuucggcgacaaccccagacccaacgacaagaccggcagcugcggccccgugagcagcaacggcgccaacggcgugaagggcuucagcuucaaguacggcaacggcguguggaucggcagaaccaagagcaucagcagcagaaacggcuucgagaugaucugggaccccaacggcuggaccggcaccgacaacaacuucagcaucaagcaggacaucgugggcaucaacgaguggagcggcuacagcggcagcuucgugcagcaccccgagcugaccggccuggacugcaucagacccugcuucuggguggagcugaucagaggcagacccaaggagaacaccaucuggaccagcggcagcagcaucagcuucugcggcgugaacagcgacaccgugggcuggagcuggcccgacggcgccgagcugcccuucaccaucgacaaguga

SEQ ID NO: 178685 - RNA, 1410 nt, Artificial Sequence; identical to SEQ ID NO: 176798
  derived and/or modified CDS sequence (opt4) from neuraminidase__InfluenzaA__ADF83908

SEQ ID NO: 178686 - RNA, 1410 nt, Artificial Sequence; identical to SEQ ID NO: 176798
  derived and/or modified CDS sequence (opt4) from neuraminidase__InfluenzaA__ADF83918

SEQ ID NO: 178687 - RNA, 1410 nt, Artificial Sequence; identical to SEQ ID NO: 176798
  derived and/or modified CDS sequence (opt4) from neuraminidase__InfluenzaA__ADF84444

SEQ ID NO: 178688 - RNA, 1410 nt, Artificial Sequence; identical to SEQ ID NO: 176798
  derived and/or modified CDS sequence (opt4) from neuraminidase__InfluenzaA__ADF84462

SEQ ID NO: 178689 - RNA, 1410 nt, Artificial Sequence
  derived and/or modified CDS sequence (opt4) from neuraminidase__InfluenzaA__ADF84472
augaaccccaaccagaagaucaucaccaucggcagcgugugcaugaccaucggcauggccaaccugauccugcagaucggcaacaucaucagcaucuggaucagccacagcauccagcugggcaaccagaaccagaucgagaccugcaaccagagcgugaucaccuacgagaacaacaccugggugaaccagaccuacgugaacaucagcaacaccaacuucgccgccgagcagagcguggugagcgugaagcuggccggcaacagcagccugugccccgugagcggcugggccaucuacagcaaggacaacagcaucagaaucggcagcaagggcgacguguucgugaucagagagcccuucaucagcugcagcccccuggagugcagaaccuucuuccugacccagggcgcccugcugaacgacaagcacagcaacggcaccaucaaggacagaagccccuacagaacccugaugagcugccccaucggcgaggugcccagccccuacaacagcagauucgagagcguggccuggagcgccagcgccugccacgacggcaucaacuggcugaccaucggcaucagcggccccgacaacggcgccguggccgugcugaaguacaacggcaucaucaccgacaccaucaagagcuggagaaacaacauccugagaacccaggagagcgagugcgccugcgugaacggcagcugcuucaccgugaugaccgacggccccagcgacggccaggccagcuacaagaucuucagaaucgagaagggcaagaucgugaagagcguggagaugaacgcccccaacuaccacuacgaggagugcagcugcuaccccgacagcagcgagaucaccugcgugugcagagacaacuggcacggcagcaacagacccugggugagcuucaaccagaaccuggaguaccagaucggcuacaucugcagcggcaucuucggcgacaaccccagacccaacgacaagaccggcagcugcggccccgugagcagcaacggcgccaacggcgugaagggcuucagcuucaaguacggcaacggcguguggaucggcagaaccaagagcaucagcagcagaaacggcuucgagaugaucugggaccccaacggcuggaccggcaccgacaacaacuucagcaucaagcaggacaucgugggcaucaacgaguggagcggcuacagcggcagcuucgugcagcaccccgagcugaccggccuggacugcaucagacccugcuucuggguggagcugaucagaggcagacccaaggagaacaccaucuggaccagcggcagcagcaucagcuucugcggcgugaacagcgacaccgugggcuggagcuggcccgacggcgccgagcugcccuucaccaucgacaaguga

SEQ ID NO: 178690 - RNA, 1410 nt, Artificial Sequence
  derived and/or modified CDS sequence (opt4) from neuraminidase__InfluenzaA__ADF84482
augaaccccaaccagaagaucaucaucaucggcagcgugugcaugaccaucggcauggccaaccugauccugcagaucggcaacaucaucagcaucuggaucagccacagcauccagcugggcaaccagaaccagaucgagaccugcaaccagagcgugaucaccuacgagaacaacaccugggugaaccagaccuacgugaacaucagcaacaccaacuucgccgccggccagagcguggugagcgugaagcuggccggcaacagcagccugugccccgugagcggcugggccaucuacagcaaggacaacagcaucagaaucggcagcaagggcgacguguucgugaucagagagcccuucaucagcugcagcccccuggagugcagaaccuucuuccugacccagggcgcccugcugaacgacaagcacagcaacggcaccaucaaggacagaagccccuacagaacccugaugagcugccccaucggcgaggugcccagccccuacaacagcagauucgagagcguggccuggagcgccagcgccugccacgacggcaucaacuggcugaccaucggcaucagcggccccgacaacggcgccguggccgugcugaaguacaacggcaucaucaccgacaccaucaagagcuggagaaacaacauccugagaacccaggagagcgagugcgccugcgugaacggcagcugcuucaccgugaugaccgacggccccagcgacggccaggccagcuacaagaucuucagaaucgagaagggcaagaucgugaagagcguggagaugaacgcccccaacuaccacuacgaggagugcagcugcuaccccgacagcagcgagaucaccugcgugugcagagacaacuggcacggcagcaacagacccugggugagcuucaaccagaaccuggaguaccagaucggcuacaucugcagcggcaucuucggcgacaaccccagacccaacgacaagaccggcagcugcggccccgugagcagcaacggcgccaacggcgugaagggcuucagcuucaaguacggcaacggcguguggaucggcagaaccaagagcaucagcagcagaaacggcuucgagaugaucugggaccccaacggcuggaccggcaccgacaacaacuucgccaucaagcaggacaucgugggcaucaacgaguggagcggcuacagcggcagcuucgugcagcaccccgagcugaccggccuggacugcaucagacccugcuucuggguggagcugaucagaggcagacccaaggagaacaccaucuggaccagcggcagcagcaucagcuucugcggcgugaacagcgacaccgugagcuggagcuggcccgacggcgccgagcugcccuucaccaucgacaaguga

SEQ ID NO: 178691 - RNA, 1410 nt, Artificial Sequence
  derived and/or modified CDS sequence (opt4) from neuraminidase__InfluenzaA__ADF84492
augaaccccaaccagaagaucaucaccaucggcagcgugugcaugaccaucggcauggccaaccugauccugcagaucggcaacaucaucagcaucuggaucagccacagcauccagcugggcaaccaggaccagaucgagaccugcaaccagagcgugaucaccuacgagaacaacaccugggugaaccagaccuacgugaacaucagcaacaccaacuucgccgccggccagagcguggugagcgugaagcuggccggcaacagcagccugugccccgugagcggcugggccaucuacagcaaggacaacagcaucagaaucggcagcaagggcgacguguucgugaucagagagcccuucaucagcugcagcccccuggagugcagaaccuucuuccugacccagggcgcccugcugaacgacaagcacagcaacggcaccaucaaggacagaagccccuacagaacccugaugagcugccccaucggcgaggugcccagccccuacaacagcagauucgagagcguggccuggagcgccagcgccugccacgacggcaucaacuggcugaccaucggcaucagcggccccgacaacggcgccguggccgugcugaaguacaacggcaucaucaccgacaccaucaagagcuggagaaacaacauccugagaacccaggagagcgagugcgccugcgugaacggcagcugcuucaccgugaugaccgacggccccagcgacggccaggccagcuacaagaucuucagaaucgagaagggcaagaucgugaagagcguggagaugaacgcccccaacuaccacuacgaggagugcagcugcuaccccgacagcagcgagaucaccugcgugugcagagacaacuggcacggcagcaacagacccugggugagcuucaaccagaaccuggaguaccagaucggcuacaucugcagcggcaucuucggcgacaaccccagacccaacgacaagaccggcagcugcggccccgugagcagcaacggcgccaacggcgugaagggcuucagcuucaaguacggcaacggcguguggaucggcagaaccaagagcaucagcagcagaaacggcuucgagaugaucugggaccccaacggcuggaccggcaccgacaacaacuucagcaucaagcaggacaucgugggcaucaacgaguggagcggcuacagcggcagcuucgugcagcaccccgagcugaccggccuggacugcaucagacccugcuucuggguggagcugaucagaggcagacccaaggagaacaccaucuggaccagcggcagcagcaucagcuucugcggcgugaacagcgacaccgugggcuggagcuggcccgacggcgccgagcugcccuucaccaucgacaaguga

SEQ ID NO: 178692 - RNA, 1410 nt, Artificial Sequence; identical to SEQ ID NO: 177905
  derived and/or modified CDS sequence (opt4) from neuraminidase__InfluenzaA__ADF85020

SEQ ID NO: 178693 - RNA, 1410 nt, Artificial Sequence; identical to SEQ ID NO: 176798
  derived and/or modified CDS sequence (opt4) from neuraminidase__InfluenzaA__ADF87155

SEQ ID NO: 178694 - RNA, 1410 nt, Artificial Sequence
  derived and/or modified CDS sequence (opt4) from neuraminidase__InfluenzaA__ADF87165
augaaccccaaccagaagaucaucaucaucggcagcgugugcaugaccaucggcauggccaaccugauccugcagaucggcaacaucaucagcaucuggaucagccacagcauccagcugggcaaccagaaccagaucgagaccugcaaccagagcgugaucaccuacgagaacaacaccugggugaaccagaccuacgugaacaucagcaacaccaacuucgccgccggccagagcguggugagcgugaagcuggccggcaacagcagccugugccccgugagcggcugggccaucuacagcaaggacaacagcaucagaaucggcagcaagggcgacguguucgugaucagagagcccuucaucagcugcagcccccuggagugcagaaccuucuuccugacccagggcgcccugcugaacgacaagcacagcaacggcaccaucaaggacagaagccccuacagaacccugaugagcugccccaucggcgaggugcccagccccuacaacagcagauucgagagcguggccuggagcgccagcgccugccacgacggcaucaacuggcugaccaucggcaucagcggccccgacaacggcgccguggccgugcugaaguacaacggcaucaucaccgacaccaucaagagcuggagaaacaacauccugagaacccaggagagcgagugcgccugcgugaacggcagcugcuucaccgugaugaccgacggccccagcgacggccaggccagcuacaagaucuucagaaucgacaagggcaagaucgugaagagcguggagaugaacgcccccaacuaccacuacgaggagugcagcugcuaccccgacagcagcgagaucaccugcgugugcagagacaacuggcacggcagcaacagacccugggugagcuucaaccagaaccuggaguaccagaucggcuacaucugcagcggcaucuucggcgacaaccccagacccaacgacaagaccggcagcugcggccccgugagcagcaacggcgccaacggcgugaagggcuucagcuucaaguacggcaacggcguguggaucggcagaaccaagagcaucagcagcagaaacggcuucgagaugaucugggaccccaacggcuggaccggcaccgacaacaacuucgccaucaagcaggacaucgugggcaucaacgaguggagcggcuacagcggcagcuucgugcagcaccccgagcugaccggccuggacugcaucagacccugcuucuggguggagcugaucagaggcagacccaaggagaacaccaucuggaccagcggcagcagcaucagcuucugcggcgugaacagcgacaccgugggcuggagcuggcccgacggcgccgagcugcccuucaccaucgacaaguga

SEQ ID NO: 178695 - RNA, 1410 nt, Artificial Sequence; identical to SEQ ID NO: 178689
  derived and/or modified CDS sequence (opt4) from neuraminidase__InfluenzaA__ADF87175

SEQ ID NO: 178696 - RNA, 1410 nt, Artificial Sequence; identical to SEQ ID NO: 176798
  derived and/or modified CDS sequence (opt4) from neuraminidase__InfluenzaA__ADF87185

SEQ ID NO: 178697 - RNA, 1410 nt, Artificial Sequence; identical to SEQ ID NO: 178689
  derived and/or modified CDS sequence (opt4) from neuraminidase__InfluenzaA__ADF87195

SEQ ID NO: 178698 - RNA, 1410 nt, Artificial Sequence; identical to SEQ ID NO: 176798
  derived and/or modified CDS sequence (opt4) from neuraminidase__InfluenzaA__ADF87205

SEQ ID NO: 178699 - RNA, 1410 nt, Artificial Sequence; identical to SEQ ID NO: 176798
  derived and/or modified CDS sequence (opt4) from neuraminidase__InfluenzaA__ADF87215

SEQ ID NO: 178700 - RNA, 1410 nt, Artificial Sequence
  derived and/or modified CDS sequence (opt4) from neuraminidase__InfluenzaA__ADF87235
augaaccccaaccagaagaucaucaccaucggcagcgugugcaugaccaucggcauggccaaccugauccugcagaucggcaacaucaucagcaucuggaucagccacagcauccagcugggcaaccagaaccagaucgagaccugcaaccagagcgugaucaccuacgagaacaacaccugggugaaccagaccuacgugaacaucagcaacaccaacuucgccgccggccagagcguggugagcgugaagcuggccggcaacagcagccugugccccgugagcggcugggccaucuacagcaaggacaacagcaucagaaucggcagcaagggcgacguguucgugaucagagagcccuucaucagcugcagcccccuggagugcagaaccuucuuccugacccagggcgcccugcugaacgacaagcacagcaacggcaccaucaaggacagaagccccuacagaacccugaugagcugccccaucggcgaggugcccagccccuacaacagcagauucgagagcguggccuggagcgccagcgccugccacgacggcaucaacuggcugaccaucggcaucagcggccccgacaacggcgccguggccgugcugaaguacaacggcaucaucaccgacaccaucaagagcuggagaaacaacauccugagaacccaggagagcgagugcgccugcgugaacggcagcugcuucaccgugaugaccgacggccccagcgacggccaggccagcuacaagaucuucaagaucgagaagggcaagaucgugaagagcguggagaugaacgcccccaacuaccacuacgaggagugcagcugcuaccccgacagcagcgagaucaccugcgugugcagagacaacuggcacggcagcaacagacccugggugagcuucaaccagaaccuggaguaccagaucggcuacaucugcagcggcaucuucggcgacaaccccagacccaacgacaagaccggcagcugcggccccgugagcagcaacggcgccaacggcgugaagggcuucagcuucaaguacggcaacggcguguggaucggcagaaccaagagcaucagcagcagaaacggcuucgagaugaucugggaccccaacggcuggaccggcaccgacaacaacuucagcaucaagcaggacaucgugggcaucaacgaguggagcggcuacagcggcagcuucgugcagcaccccgagcugaccggccuggacugcaucagacccugcuucuggguggagcugaucagaggcagacccaaggagaacaccaucuggaccagcggcagcagcaucagcuucugcggcgugaacagcgacaccgugggcuggagcuggcccgacggcgccgagcugcccuucaccaucgacaaguga

SEQ ID NO: 178701 - RNA, 1410 nt, Artificial Sequence; identical to SEQ ID NO: 178689
  derived and/or modified CDS sequence (opt4) from neuraminidase__InfluenzaA__ADF87245

SEQ ID NO: 178702 - RNA, 1410 nt, Artificial Sequence; identical to SEQ ID NO: 178689
  derived and/or modified CDS sequence (opt4) from neuraminidase__InfluenzaA__ADF87265

SEQ ID NO: 178703 - RNA, 1410 nt, Artificial Sequence
  derived and/or modified CDS sequence (opt4) from neuraminidase__InfluenzaA__ADF87285
augaaccccaaccagaagaucaucaccaucggcagcgugugcaugagcaucggcauggccaaccugauccugcagaucggcaacaucaucagcaucuggaucagccacagcauccagcugggcaacaagaaccagaucgagaccugcaaccagagcgugaucaccuacgagaacaacaccugggugaaccagaccuacgugaacaucagcaacaccaacuucgccgccggccagagcguggugagcgugaagcuggccggcaacagcagccugugccccgugagcggcugggccaucuacagcaaggacaacagcaucagaaucggcagcaagggcgacguguucgugaucagagagcccuucaucagcugcagcccccuggagugcagaaccuucuuccugacccagggcgcccugcugaacgacaagcacagcaacggcaccaucaaggacagaagccccuacagaacccugaugagcugccccaucggcgaggugcccagccccuacaacagcagauucgagagcguggccuggagcgccagcgccugccacgacggcaucaacuggcugaccaucggcaucagcggccccgacaacggcgccguggccgugcugaaguacaacggcaucaucaccgacaccaucaagagcuggagaaacaacauccugagaacccaggagagcgagugcgccugcgugaacggcagcugcuucaccgugaugaccgacggccccagcgacggccaggccagcuacaagaucuucagaaucgagaagggcaagaucgugaagagcguggagaugaacgcccccaacuaccacuacgaggagugcagcugcuaccccgacagcagcgagaucaccugcgugugcagagacaacuggcacggcagcaacagacccugggugagcuucaaccagaaccuggaguaccagaucggcuacaucugcagcggcaucuucggcgacaaccccagacccaacgacaagaagggcagcugcggccccgugagcagcaacggcgccaacggcgugaagggcuucagcuucaaguacggcaacggcguguggaucggcagaaccaagagcaucagcagcagaaacggcuucgagaugaucugggaccccaacggcuggaccggcaccgacaacaacuucagcaucaagcaggacaucgugggcaugaacgaguggagcggcuacagcggcagcuucgugcagcaccccgagcugaccggccuggacugcaucagacccugcuucuggguggagcugaucagaggcagacccaaggagaacaccaucuggaccagcggcagcagcaucagcuucugcggcgugaacagcgacaccgugggcuggagcuggcccgacggcgccgagcugcccuucaccaucgacaaguga

SEQ ID NO: 178704 - RNA, 1410 nt, Artificial Sequence; identical to SEQ ID NO: 176798
  derived and/or modified CDS sequence (opt4) from neuraminidase__InfluenzaA__ADF87295

SEQ ID NO: 178705 - RNA, 1410 nt, Artificial Sequence; identical to SEQ ID NO: 176798
  derived and/or modified CDS sequence (opt4) from neuraminidase__InfluenzaA__ADF87305

SEQ ID NO: 178706 - RNA, 1410 nt, Artificial Sequence; identical to SEQ ID NO: 176798
  derived and/or modified CDS sequence (opt4) from neuraminidase__InfluenzaA__ADF87334

SEQ ID NO: 178707 - RNA, 1410 nt, Artificial Sequence; identical to SEQ ID NO: 176798
  derived and/or modified CDS sequence (opt4) from neuraminidase__InfluenzaA__ADF87344

SEQ ID NO: 178708 - RNA, 1410 nt, Artificial Sequence
  derived and/or modified CDS sequence (opt4) from neuraminidase__InfluenzaA__ADF87354
augaaccccaaccagaagaucaucaccaucggcagcgugugcaugaccaucggcauggccaaccugauccugcagaucggcaacaucaucagcaucuggaucagccacagcauccagcugggcaaccagaaccagaucgagaccugcaaccagagcgugaucaccuacgagaacaacaccugggugaaccagaccuacgugaacaucagcaacaccaacuucgccgccggccagagcguggugagcgugaagcuggccggcaacagcagccugugccccgugagcggcugggccaucuacagcaaggacaacagcaucagaaucggcagcaagggcgacguguucgugaucagagagcccuucaucagcugcagcccccuggagugcagaaccuucuuccugacccagggcgcccugcugaacgacaagcacagcaacggcaccaucaaggacagaagccccuacagaacccugaugagcugccccaucggcgaggugcccagccccuacaacagcagauucgagagcguggccuggagcgccagcgccugccacgacggcaucaacuggcugaccaucggcaucagcggccccgacaacggcgccguggccgugcugaaguacaacggcaucaucaccgacaccaucaagagcuggagaaacaacauccugagaacccaggagagcgagugcgccugcgugaacggcagcugcuucaccgugaugaccgacggccccagcgacggccaggccagcuacaagaucuucagaaucgagaagggcaagaucgugaagagcguggagaugaacgcccccaacuaccacuacgaggagugcagcugcuaccccgacagcagcgagaucaccugcgugugcagagacaacuggcacggcagcaacagacccugggugagcuucaaccagaaccuggaguaccagaucggcuacaucugcagcggcaucuucggcgacaaccccagacccaacgacaagaccggcagcugcggccccgugagcagcaacggcgccaacggcgugaagggcuucagcuucaaguacggcaacggcguguggaucggcagaaccaagagcaucagcagcagaaacggcuucgagaugaucugggaccccaacggcuggaccggcaccgacaacuacuucagcaucaagcaggacaucgugggcaucaacgaguggagcggcuacagcggcagcuucgugcagcaccccgagcugaccggccuggacugcaucagacccugcuucuggguggagcugaucagaggcagacccaaggagaacaccaucuggaccagcggcagcagcaucagcuucugcggcgugaacagcgacaccgugggcuggagcuggcccgacggcgccgagcugcccuucaccaucgacaaguga

SEQ ID NO: 178709 - RNA, 1410 nt, Artificial Sequence; identical to SEQ ID NO: 177381
  derived and/or modified CDS sequence (opt4) from neuraminidase__InfluenzaA__ADF87364

SEQ ID NO: 178710 - RNA, 1410 nt, Artificial Sequence; identical to SEQ ID NO: 176798
  derived and/or modified CDS sequence (opt4) from neuraminidase__InfluenzaA__ADF87374

SEQ ID NO: 178711 - RNA, 1410 nt, Artificial Sequence
  derived and/or modified CDS sequence (opt4) from neuraminidase__InfluenzaA__ADF87384
augaaccccaaccagaagaucaucaccaucggcagcgugugcaugaccaucggcauggccaaccugauccugcagaucggcaacaucaucagcaucuggaucagccacagcauccagcugggcaaccagaaccagaucgagaccugcaaccagagcaucaucaccuacgagaacaacaccugggugaaccagaccuacgugaacaucagcaacaccaacuucgccgccggccagagcguggugagcgugaagcuggccggcaacagcagccugugccccgugagcggcugggccaucuacagcaaggacaacagcaucagaaucggcagcaagggcgacguguucgugaucagagagcccuucaucagcugcagcccccuggagugcagaaccuucuuccugacccagggcgcccugcugaacgacaagcacagcaacggcaccaucaaggacagaagccccuacagaacccugaugagcugccccaucggcgaggugcccagccccuacaacagcagauucgagagcguggccuggagcgccagcgccugccacgacggcaucaacuggcugaccaucggcaucagcggccccgacaacggcgccguggccgugcugaaguacaacggcaucaucaccgacaccaucaagagcuggagaaacaacauccugagaacccaggagagcgagugcgccugcgugaacggcagcugcuucaccgugaugaccgacggccccagcgacggccaggccagcuacaagaucuucagaaucgagaagggcaagaucgugaagagcguggagaugaacgcccccaacuaccacuacgaggagugcagcugcuaccccgacagcagcgagaucaccugcgugugcagagacaacuggcacggcagcaacagacccugggugagcuucaaccagaaccuggaguaccagaucggcuacaucugcagcggcaucuucggcgacaaccccagacccaacgacaagaccggcagcugcggccccgugagcagcaacggcgccaacggcgugaagggcuucagcuucaaguacggcaacggcguguggaucggcagaaccaagagcaucagcagcagaaacggcuucgagaugaucugggaccccaacggcuggaccggcaccgacaacaacuucagcaucaagcaggacaucgugggcaucaacgaguggagcggcuacagcggcagcuucgugcagcaccccgagcugaccggccuggacugcaucagacccugcuucuggguggagcugaucagaggcagacccaaggagaacaccaucuggaccagcggcagcagcaucagcuucugcggcgugaacagcgacaccgugggcuggagcuggcccgacggcgccgagcugcccuucaccaucgacaaguga

SEQ ID NO: 178712 - RNA, 1410 nt, Artificial Sequence; identical to SEQ ID NO: 176798
  derived and/or modified CDS sequence (opt4) from neuraminidase__InfluenzaA__ADF97251

SEQ ID NO: 178713 - RNA, 1410 nt, Artificial Sequence; identical to SEQ ID NO: 178041
  derived and/or modified CDS sequence (opt4) from neuraminidase__InfluenzaA__ADF97252

SEQ ID NO: 178714 - RNA, 1410 nt, Artificial Sequence; identical to SEQ ID NO: 176798
  derived and/or modified CDS sequence (opt4) from neuraminidase__InfluenzaA__ADF97253

SEQ ID NO: 178715 - RNA, 1410 nt, Artificial Sequence; identical to SEQ ID NO: 176798
  derived and/or modified CDS sequence (opt4) from neuraminidase__InfluenzaA__ADF97254

SEQ ID NO: 178716 - RNA, 1410 nt, Artificial Sequence
  derived and/or modified CDS sequence (opt4) from neuraminidase__InfluenzaA__ADF97255
augaaccccaaccagaagaucaucaccaucggcagcgugugcaugaccaucggcauggccaaccugauccugcagaucggcaacaucaucagcaucuggaucagccacagcauccagcugggcaaccagaaccagaucgagaccugcaaccagagcgugaucaccuacgagaacaacaccugggugaaccagaccuacgugaacaucagcaacaccaacuucgccgccggccagagcguggugagcgugaagcuggccggcaacagcagccugugccccgugagcggcugggccaucuacagcaaggacaacagcaucagaaucggcagcaagggcgacguguucgugaucagagagcccuucaucagcugcagcccccuggagugcagaaccuucuuccugacccagggcgcccugcugaacgacaagcacagcaacggcaccaucaaggacagaagccccuacagaacccugaugagcugccccaucggcgaggugcccagccccuacaacagcagauucgagagcguggccuggagcgccagcgccugccacgacggcaucaacuggcugaccaucggcaucagcggccccgacaacggcgccguggccgugcugaaguacaacggcaucaucaccgacaccaucaagagcuggagaaacaacauccugagaacccaggagagcgagugcgccugcgugaacggcagcugcuucaccgugaugaccgacggccccagcgacggccaggccagcuacaagaucuucagaaucgagaagggcaagaucgugaagagcguggagaugaacgcccccaacuaccacuacgaggagugcagcugcuaccccgacagcagcgagaucaccugcgugugcagagacaacuggcacggcagcaacagacccugggugagcuucaaccagaaccuggaguaccagaucggcuacaucugcagcggcaucuucggcgacaaccccagacccaacgacaagaccggcagcugcggccccgugagcagcaacggcgccaacggcgugaagggcuucagcuucaaguacggcaacggcguguggaucggcagaaccaagagcaucagcagcagaaacggcuucgagaugaucugggaccccaacggcuggaccggcaccgacaaccacuucagcaucaagcaggacaucgugggcaucaacgaguggagcggcuacagcggcagcuucgugcagcaccccgagcugaccggccuggacugcaucagacccugcuucuggguggagcugaucagaggcagacccaaggagaacaccaucuggaccagcggcagcagcaucagcuucugcggcgugaacagcgacaccgugggcuggagcuggcccgacggcgccgagcugcccuucaccaucgacaaguga

SEQ ID NO: 178717 - RNA, 1410 nt, Artificial Sequence; identical to SEQ ID NO: 176798
  derived and/or modified CDS sequence (opt4) from neuraminidase__InfluenzaA__ADF97256

SEQ ID NO: 178718 - RNA, 1410 nt, Artificial Sequence; identical to SEQ ID NO: 176798
  derived and/or modified CDS sequence (opt4) from neuraminidase__InfluenzaA__ADF97257

SEQ ID NO: 178719 - RNA, 1410 nt, Artificial Sequence; identical to SEQ ID NO: 177152
  derived and/or modified CDS sequence (opt4) from neuraminidase__InfluenzaA__ADF97837

SEQ ID NO: 178720 - RNA, 1410 nt, Artificial Sequence; identical to SEQ ID NO: 176798
  derived and/or modified CDS sequence (opt4) from neuraminidase__InfluenzaA__ADG08120

SEQ ID NO: 178721 - RNA, 1350 nt, Artificial Sequence
  derived and/or modified CDS sequence (opt4) from neuraminidase__InfluenzaA__ADG21408
augaaccccaaccagaagaucaucaccaucggcagcaucugcauggugaucggcaucgugagccugaugcugcagaucggcaacaugaucagcaucugggugagccacagcauccagaccggcaaccagugccaggacgagcccaucagcaacaccaaguuccugaccgagaaggccguggccagcgugacccuggccggcaaccugagccugugccccgugagcggcugggccguguacagcaaggacaacagcaucagaaucggcagcagaggcgacguguucgugaucagagagcccuucaucagcugcagccaccuggagugcagaaccuucuuccugacccagggcgcccugcugaacgacaagcacagcaacggcaccgugaaggacagaagcccccacagaacccugaugagcugccccgugggcgaggcccccagccccuacaacagcagauucgagagcguggccuggagcgccagcgccugccacgacggcaccagcuggcugaccaucggcaucagcggccccgacaacggcgccguggccgugcugaaguacaacggcaucaucaccgacaccaucaagagcuggagaaacaacaucaugagaacccaggagagcgagugcgccugcgugaacggcagcugcuucaccgugaugaccgacggccccagcagcggccaggccagcuacaagaucuucaagauggagaagggcaagguggugaagagcguggagcuggacgcccccaacuaccacuacgaggagugcagcugcuaccccgacgccggcgagaucaccugcgugugcagagacaacuggcacggcagcaacagacccugggugagcuucaaccagaaccuggaguaccagaucggcuacaucugcagcggcguguucggcgacaaccccagacccaacgacggcaccggcagcugcggccccguguuccccaacggcgccuacggcgugaagggcuucagcuucaaguacggcaacggcguguggaucggcagaaccaagagcaccaacagcagaagcggcuucgagaugaucugggaccccaacggcuggaccggcaccgacagcagcuucagcgugaagcaggacaucguggccaucaccgacuggagcggcuacagcggcagcuucgugcagcaccccgagcugaccggccuggacugcaucagacccugcuucuggguggagcugaucagaggcagacccaaggagagcaccaucuggaccagcggcagcagcaucagcuucugcggcgugaacggcgacaccgugagcuggagcuggcccgacggcgccgagcugcccuucaccaucgacaaguga

SEQ ID NO: 178722 - RNA, 1350 nt, Artificial Sequence; identical to SEQ ID NO: 177083
  derived and/or modified CDS sequence (opt4) from neuraminidase__InfluenzaA__ADG21409

SEQ ID NO: 178723 - RNA, 1350 nt, Artificial Sequence; identical to SEQ ID NO: 177083
  derived and/or modified CDS sequence (opt4) from neuraminidase__InfluenzaA__ADG21415

SEQ ID NO: 178724 - RNA, 1350 nt, Artificial Sequence; identical to SEQ ID NO: 177083
  derived and/or modified CDS sequence (opt4) from neuraminidase__InfluenzaA__ADG21417

SEQ ID NO: 178725 - RNA, 1350 nt, Artificial Sequence
  derived and/or modified CDS sequence (opt4) from neuraminidase__InfluenzaA__ADG21419
augaaccccaaccagaagaucaucaccaucggcagcaucugcauggugaucggcaucgugagccugaugcugcagaucggcaacaugaucagcaucugggugagccacagcauccagaccggcaaccagugccaggacgagagcaucagcaacaccaaguuccugaccgagaaggccguggccagcgugacccuggccggcaacagcagccugugccccaucagcggcugggccguguacagcaaggacaacagcaucagaaucggcagcagaggcgacguguucgugaucagagagcccuucaucagcugcagccaccuggagugcagaaccuucuuccugacccagggcgcccugcugaacgacaagcacagcaacggcaccgugaaggacagaagcccccacagaacccugaugagcugccccgugggcgaggcccccagccccuacaacagcagauucgagagcguggccuggagcgccagcgccugccacgacggcaccagcuggcugaccaucggcaucagcggccccgacaacggcgccguggccgugcugaaguacaacggcaucaucaccgacaccaucaagagcuggagaaacaacaucaugagaacccaggagagcgagugcgccugcgugaacggcagcugcuucaccgugaugaccgacggccccagcagcggccaggccagcuacaagaucuucaagauggagaagggcaagguggugaagagcguggagcuggacgcccccaacuaccacuacgaggagugcagcugcuaccccgacgccggcgagaucaccugcgugugcagagacaacuggcacggcagcaacagacccugggugagcuucaaccagaaccuggaguaccagaucggcuacaucugcagcggcguguucggcgacaaccccagacccaacgacggcaccggcagcugcggccccguguuccccaacggcgccuacggcgugaagggcuucagcuucaaguacggcaacggcguguggaucggcagaaccaagagcaccaacagcagaagcggcuucgagaugaucugggaccccaacggcuggaccggcaccgacagcagcuucagcgugaagcaggacaucguggccaucaccgacuggagcggcuacagcggcagcuucgugcagcaccccgagcugaccggccuggacugcaucagacccugcuucuggguggagcugaucagaggcagacccaaggagagcaccaucuggaccagcggcagcagcaucagcuucugcggcgugaacggcgacaccgugagcuggagcuggcccgacggcgccgagcugcccuucaccaucgacaaguga

SEQ ID NO: 178726 - RNA, 1350 nt, Artificial Sequence
  derived and/or modified CDS sequence (opt4) from neuraminidase__InfluenzaA__ADG21423
augaaccccaaccagaagaucaucaccaucggcagcaucugcauggugaucggcaucgugagccugaugcugcagaucggcaacaugaucagcaucugggugagccacagcauccagaccggcaaccagugccaggacgagcccaucagcaacaccaaguuccugaccgagaaggccguggccagcgugacccuggccggcaacagcagccugugccccaucagcggcugggccguguacagcaaggacaacagcaucagaaucggcagcagaggcgacguguucgugaucagagagcccuucaucagcugcagccaccuggagugcagaaccuucuuccugacccagggcgcccugcugaacgacaagcacagcaacggcaccgugaaggacagaagcccccacagaacccugaugagcugccccgugggcgaggcccccagccccuacaacagcagauucgagagcguggccuggagcgccagcgccugccacgacggcaccagcuggcugaccaucggcaucagcggccccgacaacggcgccguggccgugcugaaguacaacggcaucaucaccgacaccaucaagagcuggagaaacaacaucaugagaacccaggagagcgagugcgccugcgugaacggcagcugcuucaccgugaugaccgacggccccagcagcggccaggccagcuacaagaucuucaagauggagaagggcaagguggugaagagcguggagcuggacgcccccaacuaccacuacgaggagugcagcugcuaccccgacgccggcgagaucaccugcgugugcagagacagcuggcacggcagcaacagacccugggugagcuucaaccagaaccuggaguaccagaucggcuacaucugcagcggcguguucggcgacaaccccagacccaacgacggcaccggcagcugcggccccguguuccccaacggcgccuacggcgugaagggcuucagcuucaaguacggcaacggcguguggaucggcagaaccaagagcaccaacagcagaagcggcuucgagaugaucugggaccccaacggcuggaccggcaccgacagcagcuucagcgugaagcaggacaucguggccaucaccgacuggagcggcuacagcggcagcuucgugcagcaccccgagcugaccggccuggacugcaucagacccugcuucuggguggagcugaucagaggcagacccaaggagagcaccaucuggaccagcggcagcagcaucagcuucugcggcgugaacggcgacaccgugagcuggagcuggcccgacggcgccgagcugcccuucaccaucgacaaguga

SEQ ID NO: 178727 - RNA, 1350 nt, Artificial Sequence
  derived and/or modified CDS sequence (opt4) from neuraminidase__InfluenzaA__ADG21424
augaaccccaaccagaagaucaucaccaucggcagcaucugcauggugaucggcaucgccagccugaugcugcagaucggcaacaugaucagcaucugggugagccacagcauccagaccggcaaccagugccaggacgagagcaucagcaacaccaaguuccugaccgagaaggccguggccagcgugacccuggccggcaacagcagccugugccccaucagcggcugggccguguacagcaaggacaacagcaucagaaucggcagcaagggcgacguguucgugaucagagagcccuucaucagcugcagccaccuggagugcagaaccuucuuccugacccagggcgcccugcugaacgacaagcacagcaacggcaccgugaaggacagaagcccccacagaacccugaugagcugccccgugggcgaggcccccagccccuacaacagcagauucgagagcguggccuggagcgccagcgccugccacgacggcaccagcuggcugaccaucggcaucagcggccccgacaacggcgccguggccgugcugaaguacaacggcaucaucaccgacaccaucaagagcuggagaaacaacaucaugagaacccaggagagcgagugcgccugcgugaacggcagcugcuucaccgugaugaccgacggccccagcagcggccaggccagcuacaagaucuucaagauggagaagggcaagguggugaagagcguggagcuggacgcccccaacuaccacuacgaggagugcagcugcuaccccgacgccggcgagaucaccugcgugugcagagacaacuggcacggcagcaacagacccugggugagcuucaaccagaaccuggaguaccagaucggcuacaucugcagcggcguguucggcgacaaccccagacccaacgacggcaccggcagcugcggccccguguuccccaacggcgccuacggcgugaagggcuucagcuucaaguacggcaacggcguguggaucggcagaaccaagagcaccaacagcagaagcggcuucgagaugaucugggaccccaacggcuggaccggcaccgacagcagcuucagcgugaagcaggacaucguggccaucaccgacuggagcggcuacagcggcagcuucgugcagcaccccgagcugaccggccuggacugcaucagacccugcuucuggguggagcugaucagaggcagacccaaggagagcaccaucuggaccagcggcagcagcaucagcuucugcggcgugaacggcgacaccgugagcuggagcuggcccgacggcgccgagcugcccuucaccaucgacaaguga

SEQ ID NO: 178728 - RNA, 1350 nt, Artificial Sequence
  derived and/or modified CDS sequence (opt4) from neuraminidase__InfluenzaA__ADG21426
augaaccccaaccagaagaucaucaccaucggcagcaucugcauggugaucggcaucgugagccugaugcugcagaucggcaacaugaucagcaucugggugagccacagcauccagaccgagaaccagugccaggacgagcccaucagcaacaccaaguuccugaccgagaaggccguggccagcgugacccuggccggcaacagcagccugugccccaucagcggcugggccguguacagcaaggacaacagcaucagaaucggcagcagaggcgacguguucgugaucagagagcccuucaucagcugcagccaccuggagugcagaaccuucuuccugacccagggcgcccugcugaacgacaagcacagcaacggcaccgugaaggacagaagcccccacagaacccugaugagcugccccgugggcgaggcccccagccccuacaacagcagauucgagagcguggccuggagcgccagcgccugccacgacggcaccagcuggcugaccaucggcaucagcggccccgacaacggcgccguggccgugcugaaguacaacggcaucaucaccgacaccaucaagagcuggagaaacaacaucaugagaacccaggagagcgagugcgccugcgugaacggcagcugcuucaccgugaugaccgacggccccagcagcggccaggccagcuacaagaucuucaagauggagaagggcaagguggugaagagcguggagcuggacgcccccaacuaccacuacgaggagugcagcugcuaccccgacgccggcgagaucaccugcgugugcagagacaacuggcacggcagcaacagacccugggugagcuucaaccagaaccuggaguaccagaucggcuacaucugcagcggcguguucggcgacaaccccagacccaacgacggcaccggcagcugcggccccguguuccccaacggcgccuacggcgugaagggcuucagcuucaaguacggcaacggcguguggaucggcagaaccaagagcaccaacagcagaagcggcuucgagaugaucugggaccccaacggcuggaccggcaccgacagcagcuucagcgugagacaggacaucguggccaucaccgacuggagcggcuacagcggcagcuucgugcagcaccccgagcugaccggccuggacugcaucagacccugcuucuggguggagcugaucagaggcagacccaaggagagcaccaucuggaccagcggcagcagcaucagcuucugcggcgugaacggcgacaccgugagcuggagcuggcccgacggcgccgagcugcccuucaccaucgacaaguga

SEQ ID NO: 178729 - RNA, 1350 nt, Artificial Sequence
  derived and/or modified CDS sequence (opt4) from neuraminidase__InfluenzaA__ADG21428
augaaccccaaccagaagaucaucaccaucggcagcaucugcauggugaucggcaucgugagccugaugcugcagaucggcaacaugaucagcaucugggugagccaccccauccagaccggcaaccagugccaggacaagcccaucagcaacaccaaguuccugaccgagaaggccguggccagcgugacccuggccggcaacagcagccugugccccaucagcggcugggccguguacagcaaggacaacagcaucagaaucggcagcagaggcgacguguucgugaucagagagcccuucaucagcugcagccaccuggagugcagaaccuucuuccugacccagggcgcccugcugaacgacaagcacagcaacggcaccgugaaggacagaagcccccacagaacccugaugagcugccccgugggcgaggcccccagccccuacaacagcagauucgagagcguggccuggagcgccagcgccugccacgacggcaccagcuggcugaccaucggcaucagcggccccgacaacggcgccguggccgugcugaaguacaacggcaucaucaccgacaccaucaagagcuggagaaacagcaucaugagaacccaggagagcgagugcgccugcgugaacggcagcugcuucaccgugaugaccgacggccccagcagcggccaggccagcuacaagaucuucaagauggagaagggcaagguggugaagagcguggagcuggacgcccccaacuaccacuacgaggagugcagcugcuaccccgacgccggcgagaucaccugcgugugcagagacaacuggcacggcagcaacagacccugggugagcuucaaccagaaccuggaguaccagaucggcuacaucugcagcggcguguucggcgacaaccccagacccaacgacggcaccggcagcugcggccccguguuccccaacggcgccuacggcgugaagggcuucagcuucaaguacggcaacggcguguggaucggcagaaccaagagcaccaacagcagaagcggcuucgagaugaucugggaccccaacggcuggaccggcaccgacagcagcuucagcgugaagcaggacaucguggccaucaccgacuggagcggcuacagcggcagcuucgugcagcaccccgagcugaccggccuggacugcaucagacccugcuucuggguggagcugaucagaggcagacccaaggagagcaccaucuggaccagcggcagcagcaucagcuucugcggcgugaacggcgacaccgugagcuggagcuggcccgacggcgccgagcugcccuucaccaucgacaaguga

SEQ ID NO: 178730 - RNA, 1350 nt, Artificial Sequence; identical to SEQ ID NO: 177083
  derived and/or modified CDS sequence (opt4) from neuraminidase__InfluenzaA__ADG21430

SEQ ID NO: 178731 - RNA, 1350 nt, Artificial Sequence
  derived and/or modified CDS sequence (opt4) from neuraminidase__InfluenzaA__ADG21432
augaaccccaaccagaagaucaucaccaucggcagcaucugcauggugaucggcaucgugagccugaugcugcagaucggcaacaugaucagcaucugggugagccacagcauccagaccggcaaccagugccaggacgagcccaucagcaacaccaaguuccugaccgagaaggccguggccagcgugacccuggccggcaacagcagccugugccccaucagcggcugggccguguacagcaaggacaacagcaucagaaucggcagcagaggcgacguguucgugaucagagagcccuucaucagcugcagccaccuggagugcagaaccuucuuccugacccagggcgcccugcugaacgacaagcacagcaacggcaccgugaaggacagaagcccccacagaacccugaugagcugccccgugggcgaggcccccagccccuacaacagcagauucgagagcguggccuggagcgccagcgccugccacgacggcaccagcuggcugaccaucggcaucagcggccccgacaacggcgccguggccgugcugaaguacaacggcaucaucaccgacaccaucaagagcuggagaaacaacaucaugagaacccaggagagcgagugcgccugcgugaacggcagcugcuucaccgugaugaccgacggccccagcagcggccaggccagcuacaagaucuucaagauggagaagggcaagguggugaagagcguggagcuggacgcccccaacuaccacuacgaggagugcagcugcuaccccgacgccggcgagaucaccugcgugugcagagacaacuggcacggcagcaacagacccugggugagcuucaaccagaaccuggaguaccagaucggcuacaucugcagcggcguguucggcgacaaccccagacccaacgacggcaccggcagcugcggccccguguuccccaacggcgccuacggcgugaagggcuucagcuucagauacggcaacggcguguggaucggcagaaccaagagcaccaacagcagaagcggcuucgagaugaucugggaccccaacggcuggaccggcaccgacagcagcuucagcgugaagcaggacaucguggccaucaccgacuggagcggcuacagcggcagcuucgugcagcaccccgagcugaccggccuggacugcaucagacccugcuucuggguggagcugaucagaggcagacccaaggagagcaccaucuggaccagcggcagcagcaucagcuucugcggcgugaacggcgacaccgugagcuggagcuggcccgacggcgccgagcugcccuucaccaucgacaaguga

SEQ ID NO: 178732 - RNA, 1350 nt, Artificial Sequence
  derived and/or modified CDS sequence (opt4) from neuraminidase__InfluenzaA__ADG21438
augaaccccaaccagaagaucaucaccaucggcagcaucugcauggugaucggcaucgugagccugaugcugcagaucggcaacaugaucagcaucuggaucagccacagcauccagaccggcaaccagugccaggacgagcccaucagcaacaccaaguuccugaccgagaaggccguggccagcgugacccuggccggcaacagcagccugugccccaucagcggcugggccguguacagcaaggacaacagcaucagaaucggcagcagaggcgacguguucgugaucagagagcccuucaucagcugcagccaccuggagugcagaaccuucuuccugacccagggcgcccugcugaacgacaagcacagcaacggcaccgugaaggacagaagcccccacagaacccugaugagcugccccgugggcgaggcccccagccccuacaacagcagauucgagagcguggccuggagcgccagcgccugccacgacggcaccagcuggcugaccaucggcaucagcggccccgacaacggcgccguggccgugcugaaguacaacggcaucaucaccgacaccaucaagagcuggagaaacaacaucaugagaacccaggagagcgagugcgccugcgugaacggcagcugcuucaccgugaugaccgacggccccagcagcggccaggccagcuacaagaucuucaagauggagaagggcaagguggugaagagcguggagcuggacgcccccaacuaccacuacgaggagugcagcugcuaccccgacgccggcgagaucaccugcgugugcagagacaacuggcacggcagcaacagacccugggugagcuucaaccagaaccuggaguaccagaucggcuacaucugcagcggcguguucggcgacaaccccagacccaacgacggcaccggcagcugcggccccguguuccccaacggcgccuacggcgugaagggcuucagcuucaaguacggcagcggcguguggaucggcagaaccaagagcaccaacagcagaagcggcuucgagaugaucugggaccccaacggcuggaccggcaccgacagcagcuucagcgugaagcaggacaucguggccaucaccgacuggagcggcuacagcggcagcuucgugcagcaccccgagcugaccggccuggacugcaucagacccugcuucuggguggagcugaucagaggcagacccaaggagagcaccaucuggaccagcggcagcagcaucagcuucugcggcgugaacggcgacaccgugagcuggagcuggcccgacggcgccgagcugcccuucaccaucgacaaguga

SEQ ID NO: 178733 - RNA, 1350 nt, Artificial Sequence
  derived and/or modified CDS sequence (opt4) from neuraminidase__InfluenzaA__ADG21440
augaaccccaaccagaagaucaucaccaucggcagcaucugcauggugaucggcaucgccagccugaugcugcagaucggcaacaugaucagcaucugggugagccacagcauccagaccggcaaccagugccaggacgagagcaucagcaacaccaaguuccugaccgagaaggccguggccagcgugacccuggccggcaacagcagccugugccccaucagcggcugggccguguacagcaaggacaacagcaucagaaucggcagcagaggcgacguguucgugaucagagagcccuucaucagcugcagccaccuggagugcagaaccuucuuccugacccagggcgcccugcugaacgacaagcacagcaacggcaccgugaaggacagaagcccccacagaacccugaugagcugccccgugggcgaggcccccagccccuacaacagcagauucgagagcguggccuggagcgccagcgccugccacgacggcaccagcuggcugaccaucggcaucagcggccccgacaacggcgccguggccgugcugaaguacaacggcaucaucaccgacaccaucaagagcuggagaaacaacaucaugagaacccaggagagcgagugcgccugcgugaacggcagcugcuucaccgugaugaccgacggccccagcagcggccaggccagcuacaagaucuucaagauggagaagggcaagguggugaagagcguggagcuggacgcccccaacuaccacuacgaggagugcagcugcuaccccgacgccggcgagaucaccugcgugugcagagacaacuggcacggcagcaacagacccugggugagcuucaaccagaaccuggaguaccagaucggcuacaucugcagcggcguguucggcgacaaccccagacccaacgacggcaccggcagcugcggccccguguuccccaacggcgccuacggcgugaagggcuucagcuucaaguacggcaacggcguguggaucggcagaaccaagagcaccaacagcagaagcggcuucgagaugaucugggaccccaacggcuggaccggcaccgacagcagcuucagcgugaagcaggacaucguggccaucaccgacuggagcggcuacagcggcagcuucgugcagcaccccgagcugaccggccuggacugcaucagacccugcuucuggguggagcugaucagaggcagacccaaggagagcaccaucuggaccagcggcagcagcaucagcuucugcggcgugaacggcgacaccgugagcuggagcuggcccgacggcgccgagcugcccuucaccaucgacaaguga

SEQ ID NO: 178734 - RNA, 1350 nt, Artificial Sequence; identical to SEQ ID NO: 177083
  derived and/or modified CDS sequence (opt4) from neuraminidase__InfluenzaA__ADG21442

SEQ ID NO: 178735 - RNA, 1350 nt, Artificial Sequence
  derived and/or modified CDS sequence (opt4) from neuraminidase__InfluenzaA__ADG21444
augaaccccaaccagaagaucaucaccaucggcagcaucugcauggugaucggcaucgugagccugaugcugcagaucggcaacaugaucagcaucugggugagccacagcauccagaccggcaaccagugccaggacgagagcaucagcaacaccaaguuccugaccgagaaggccgugaccagcgugacccuggccggcaacagcagccugugccccaucagcggcugggccguguacagcaaggacaacagcaucagaaucggcagcagaggcgacguguucgugaucagagagcccuucaucagcugcagccaccuggagugcagaaccuucuuccugacccagggcgcccugcugaacgacaagcacagcaacggcaccgugaaggacagaagcccccacagaacccugaugagcugccccgugggcgaggcccccagccccuacaacagcagauucgagagcguggccuggagcgccagcgccugccacgacggcaccagcuggcugaccaucggcaucagcggccccgacaacggcgccguggccgugcugaaguacaacggcaucaucaccgacaccaucaagagcuggagaaacaacaucaugagaacccaggagagcgagugcgccugcgugaacggcagcugcuucaccgugaugaccgacggccccagcagcggccaggccagcuacaagaucuucaagauggagaagggcaagguggugaagagcguggagcuggacgcccccaacuaccacuacgaggagugcagcugcuaccccgacgccggcgagaucaccugcgugugcagagacaacuggcacggcagcaacagacccuggaucagcuucaaccagaaccuggaguaccagaucggcuacaucugcagcggcguguucggcgacaaccccagacccaacgacggcaccggcagcugcggccccguguuccccaacggcgccuacggcgugaagggcuucagcuucaaguacggcaacggcguguggaucggcagaaccaagagcaccaacagcagaagcggcuucgagaugaucugggaccccaacggcuggaccggcaccgacagcagcuucagcgugaagcaggacaucguggccaucaccgacuggagcggcuacagcggcagcuucgugcagcaccccgagcugaccggccuggacugcaucagacccugcuucuggguggagcugaucagaggcagacccaaggagagcaccaucuggaccagcggcagcagcaucagcuucugcggcgugaacggcgacaccgugagcuggagcuggcccgacggcgccgagcugcccuucaccaucgacaaguga

SEQ ID NO: 178736 - RNA, 1350 nt, Artificial Sequence; identical to SEQ ID NO: 177083
  derived and/or modified CDS sequence (opt4) from neuraminidase__InfluenzaA__ADG21446

SEQ ID NO: 178737 - RNA, 1350 nt, Artificial Sequence
  derived and/or modified CDS sequence (opt4) from neuraminidase__InfluenzaA__ADG21448
augaaccccaaccagaagaucaucaccaucggcagcaucugcauggugaucggcaucgugagccugaugcugcagaucggcaacaugaucagcaucugggugagccacagcauccagaccggcaaccagugccaggacgagcccaucagcaacaccaaguuccugaccgagaaggccguggccagcgugacccuggccggcaacagcagccugugccccaucagcggcugggccguguacagcaaggacaacagcaucagaaucggcagcagaggcgacguguucgugaucagagagcccuucaucagcugcagccaccuggagugcagaaccuucuuccugacccagggcgcccugcugaacgacaagcacagcaacggcaccgugaaggacagaagcccccacagaacccugaugagcugccccgugggcgaggcccccagccccuacaacagcagauucgagagcguggccuggagcgccagcgccugccacgacggcaccagcuggcugaccaucggcaucagcggccccgacaacggcgccguggccgugcugaaguacaacggcaucaucaccgacaccaucaagagcuggagaaacaacaucaugagaacccaggagagcgagugcgccugcgugaacggcagcugcuucaccgugaugaccgacggccccagcagcggccaggccagcuacaagaucuucaagauggagaagggcaagguggugaagagcguggagcuggacgcccccaacuaccacuacgaggagugcagcugcuaccccgacgccggcgagaucaccugcgugugcagagacaacuggcacggcagcaacagacccuggaucagcuucaaccagaaccuggaguaccagaucggcuacaucugcagcggcguguucggcgacaaccccagacccaacgacggcaccggcagcugcggccccguguuccccaacggcgccuacggcgugaagggcuucagcuucaaguacggcaacggcguguggaucggcagaaccaagagcaccaacagcagaagcggcuucgagaugaucugggaccccaacggcuggaccggcaccgacagcagcuucagcgugaagcaggacaucguggccaucaccgacuggagcggcuacagcggcagcuucgugcagcaccccgagcugaccggccuggacugcaucagacccugcuucuggguggagcugaucagaggcagacccaaggagagcaccaucuggaccagcggcagcagcaucagcuucugcggcgugaacggcgacaccgugagcuggagcuggcccgacggcgccgagcugcccuucaccaucgacaaguga

SEQ ID NO: 178738 - RNA, 1350 nt, Artificial Sequence; identical to SEQ ID NO: 178737
  derived and/or modified CDS sequence (opt4) from neuraminidase__InfluenzaA__ADG21450

SEQ ID NO: 178739 - RNA, 1410 nt, Artificial Sequence; identical to SEQ ID NO: 176798
  derived and/or modified CDS sequence (opt4) from neuraminidase__InfluenzaA__ADG27797

SEQ ID NO: 178740 - RNA, 1410 nt, Artificial Sequence
  derived and/or modified CDS sequence (opt4) from neuraminidase__InfluenzaA__ADG27983
augaaccccaaccagaagaucaucaccaucggcagcgugugcaugaccaucggcauggccaaccugauccugcagaucggcaacaucaucagcaucuggaucagccacagcauccagcugggcaaccagaaccagaucgagaccugcaaccagagcgugaucaccuacgagaacaacaccugggugaaccagaccuacgugaacaucagcaacaccaacuucgccgccggccagagcguggugagcgugaagcuggccggcaacagcagccugugccccgugagcggcugggccaucuacagcaaggacaacagcaucagaaucggcagcaagggcgacguguucgugaucagagagcccuucaucagcugcagcccccuggagugcagaaccuucuuccugacccagggcgcccugcugaacgacaagcacagcaacggcaccaucaaggacagaagccccuacagaacccugaugagcugccccaucggcgaggugcccagccccuacaacagcagauucgagagcguggccuggagcgccagcgccugccacgacggcaucaacuggcugaccaucggcaucagcggccccgacaacggcgccguggccgugcugaaguacaacggcaucaucaccgacaccaucaagagcuggagaaacaacauccugagaacccaggagagcgagugcgccugcgugaacggcagcugcuucaccgugaugaccgacggccccagcgacggccaggccagcuacaagaucuucagaaucgagaagggcaagaucgugaagagcguggagaugaacgcccccaaccaccacuacgaggagugcagcugcuaccccgacagcagcgagaucaccugcgugugcagagacaacuggcacggcagcaacagacccugggugagcuucaaccagaaccuggaguaccagaucggcuacaucugcagcggcaucuucggcgacaaccccagacccaacgacaagaccggcagcugcggccccgugagcagcaacggcgccaacggcgugaagggcuucagcuucaaguacggcaacggcguguggaucggcagaaccaagagcaucagcagcagaaacggcuucgagaugaucugggaccccaacggcuggaccggcaccgacaacaacuucagcaucaagcaggacaucgugggcaucaacgaguggagcggcuacagcggcagcuucgugcagcaccccgagcugaccggccuggacugcaucagacccugcuucuggguggagcugaucagaggcagacccaaggagaacaccaucuggaccagcggcagcagcaucagcuucugcggcgugaacagcgacaccaugggcuggagcuggcccgacggcgccgagcugcccuucaccaucgacaaguga

SEQ ID NO: 178741 - RNA, 1410 nt, Artificial Sequence; identical to SEQ ID NO: 176798
  derived and/or modified CDS sequence (opt4) from neuraminidase__InfluenzaA__ADG27989

SEQ ID NO: 178742 - RNA, 1410 nt, Artificial Sequence; identical to SEQ ID NO: 178740
  derived and/or modified CDS sequence (opt4) from neuraminidase__InfluenzaA__ADG27998

SEQ ID NO: 178743 - RNA, 1410 nt, Artificial Sequence; identical to SEQ ID NO: 177152
  derived and/or modified CDS sequence (opt4) from neuraminidase__InfluenzaA__ADG28013

SEQ ID NO: 178744 - RNA, 1410 nt, Artificial Sequence; identical to SEQ ID NO: 176798
  derived and/or modified CDS sequence (opt4) from neuraminidase__InfluenzaA__ADG42086

SEQ ID NO: 178745 - RNA, 1410 nt, Artificial Sequence; identical to SEQ ID NO: 176798
  derived and/or modified CDS sequence (opt4) from neuraminidase__InfluenzaA__ADG42096

SEQ ID NO: 178746 - RNA, 1410 nt, Artificial Sequence; identical to SEQ ID NO: 178375
  derived and/or modified CDS sequence (opt4) from neuraminidase__InfluenzaA__ADG42106

SEQ ID NO: 178747 - RNA, 1410 nt, Artificial Sequence; identical to SEQ ID NO: 176798
  derived and/or modified CDS sequence (opt4) from neuraminidase__InfluenzaA__ADG42116

SEQ ID NO: 178748 - RNA, 1410 nt, Artificial Sequence; identical to SEQ ID NO: 176798
  derived and/or modified CDS sequence (opt4) from neuraminidase__InfluenzaA__ADG42126

SEQ ID NO: 178749 - RNA, 1410 nt, Artificial Sequence; identical to SEQ ID NO: 176798
  derived and/or modified CDS sequence (opt4) from neuraminidase__InfluenzaA__ADG42136

SEQ ID NO: 178750 - RNA, 1410 nt, Artificial Sequence; identical to SEQ ID NO: 177381
  derived and/or modified CDS sequence (opt4) from neuraminidase__InfluenzaA__ADG42146

SEQ ID NO: 178751 - RNA, 1410 nt, Artificial Sequence; identical to SEQ ID NO: 176798
  derived and/or modified CDS sequence (opt4) from neuraminidase__InfluenzaA__ADG42156

SEQ ID NO: 178752 - RNA, 1410 nt, Artificial Sequence; identical to SEQ ID NO: 176798
  derived and/or modified CDS sequence (opt4) from neuraminidase__InfluenzaA__ADG42166

SEQ ID NO: 178753 - RNA, 1410 nt, Artificial Sequence; identical to SEQ ID NO: 176798
  derived and/or modified CDS sequence (opt4) from neuraminidase__InfluenzaA__ADG42186

SEQ ID NO: 178754 - RNA, 1410 nt, Artificial Sequence; identical to SEQ ID NO: 178689
  derived and/or modified CDS sequence (opt4) from neuraminidase__InfluenzaA__ADG42196

SEQ ID NO: 178755 - RNA, 1410 nt, Artificial Sequence
  derived and/or modified CDS sequence (opt4) from neuraminidase__InfluenzaA__ADG42206
augaaccccaaccagaagaucaucaccaucggcagcgugugcaugaccaucggcauggccaaccugauccugcagaucggcaacaucaucagcaucuggaucagccacagcauccagcugggcaaccagaaccagaucgagaccugcaaccagagcgugaucaccuacgagaacaacaccugggugaaccagaccuacgugaacaucagcaacaccaacuucgccgccggccagagcguggugagcgugaagcuggccggcaacagcagccugugccccgugagcggcugggccaucuacagcaaggacaacagcaucagaaucggcagcaagggcgacguguucgugaucagagagcccuucaucagcugcagcccccuggagugcagaaccuucuuccugacccagggcgcccugcugaacgacaagcacagcaacggcaccaucaaggacagaagccccuacagaacccugaugagcugccccaucggcgaggugcccagccccuacaacagcagauucgagagcguggccuggagcgccagcgccugccacgacggcaucaacuggcugaccaucggcaucagcggccccgacaacggcgccguggccgugcugaaguacaacggcaucaucaccgacaccaucaagagcuggagaaacaacauccugagaacccaggagagcgagugcgccugcgugaacggcagcugcuucaccgugaugaccgacggccccagcgacggccaggccagcuacaagaucuucagaaucgagaagggcaagaucgugaagagcguggagaugaacgcccccaacuaccacuacgaggagugcagcugcuaccccgacagcagcaagaucaccugcgugugcagagacaacuggcacggcagcaacagacccugggugagcuucaaccagaaccuggaguaccagaucggcuacaucugcagcggcaucuucggcgacaaccccagacccaacgacaagaccggcagcugcggccccgugagcagcaacggcgccaacggcgugaagggcuucagcuucaaguacggcaacggcguguggaucggcagaaccaagagcaucagcagcagaaacggcuucgagaugaucugggaccccaacggcuggaccggcaccgacaacaacuucagcaucaagcaggacaucgugggcaucaacgaguggagcggcuacagcggcagcuucgugcagcaccccgagcugaccggccuggacugcaucagacccugcuucuggguggagcugaucagaggcagacccaaggagaacaccaucuggaccagcggcagcagcaucagcuucugcggcgugaacagcgacaccgugggcuggagcuggcccgacggcgccgagcugcccuucaccaucgacaaguga

SEQ ID NO: 178756 - RNA, 1410 nt, Artificial Sequence; identical to SEQ ID NO: 176798
  derived and/or modified CDS sequence (opt4) from neuraminidase__InfluenzaA__ADG42216

SEQ ID NO: 178757 - RNA, 1410 nt, Artificial Sequence; identical to SEQ ID NO: 178149
  derived and/or modified CDS sequence (opt4) from neuraminidase__InfluenzaA__ADG42226

SEQ ID NO: 178758 - RNA, 1410 nt, Artificial Sequence; identical to SEQ ID NO: 176798
  derived and/or modified CDS sequence (opt4) from neuraminidase__InfluenzaA__ADG42236

SEQ ID NO: 178759 - RNA, 1410 nt, Artificial Sequence; identical to SEQ ID NO: 176798
  derived and/or modified CDS sequence (opt4) from neuraminidase__InfluenzaA__ADG42246

SEQ ID NO: 178760 - RNA, 1410 nt, Artificial Sequence; identical to SEQ ID NO: 176798
  derived and/or modified CDS sequence (opt4) from neuraminidase__InfluenzaA__ADG42256

SEQ ID NO: 178761 - RNA, 1410 nt, Artificial Sequence; identical to SEQ ID NO: 176798
  derived and/or modified CDS sequence (opt4) from neuraminidase__InfluenzaA__ADG42276

SEQ ID NO: 178762 - RNA, 1410 nt, Artificial Sequence
  derived and/or modified CDS sequence (opt4) from neuraminidase__InfluenzaA__ADG42296
augaaccccaaccagaagaucaucaccaucggcagcgugugcaugaccaucggcauggccaaccugauccugcagaucggcaacaucaucagcaucuggaucagccacagcauccagcugggcaaccagaaccagaucgagaccugcaaccagagcgugaucaccuacgagaacaacaccugggugaaccagaccuacgugaacaucagcaacaccaacuucgccgccggccagagcguggugagcgugaagcuggccggcaacagcagccugugccccgugagcggcugggccaucuacagcaaggacaacagcaucagaaucggcagcaagggcgacguguucgugaucagagagcccuucaucagcugcagcccccuggagugcagaaccuucuuccugacccagggcgcccugcugaacgacaagcacagcaacggcaccaucaaggacagaagccccuacagaacccugaugagcugccccaucggcgaggugcccagccccuacaacagcagauucgagagcguggccuggagcgccagcgccugccacgacggcaucaacuggcugaccaucggcaucagcggccccgacaacggcgccguggccgugcugaaguacaacggcaucaucaccgacaccaucaagagcuggagaaacaacauccugagagcccaggagagcgagugcgccugcgugaacggcagcugcuucaccgugaugaccgacggccccagcgacggccaggccagcuacaagaucuucagaaucgagaagggcaagaucgugaagagcguggagaugaacgcccccaacuaccacuacgaggagugcagcugcuaccccgacagcagcgagaucaccugcgugugcagagacaacuggcacggcagcaacagacccugggugagcuucaaccagaaccuggaguaccagaucggcuacaucugcagcggcaucuucggcgacaaccccagacccaacgacaagaccggcagcugcggccccgugagcagcaacggcgccaacggcgugaagggcuucagcuucaaguacggcaacggcguguggaucggcagaaccaagagcaucagcagcagaaacggcuucgagaugaucugggaccccaacggcuggaccggcaccgacaacaacuucagcaucaagcaggacaucgugggcaucaacgaguggagcggcuacagcggcagcuucgugcagcaccccgagcugaccggccuggacugcaucagacccugcuucuggguggagcugaucagaggcagacccaaggagaacaccaucuggaccagcggcagcagcaucagcuucugcggcgugaacagcgacaccgugggcuggagcuggcccgacggcgccgagcugcccuucaccaucgacaaguga

SEQ ID NO: 178763 - RNA, 1410 nt, Artificial Sequence; identical to SEQ ID NO: 176798
  derived and/or modified CDS sequence (opt4) from neuraminidase__InfluenzaA__ADG42306

SEQ ID NO: 178764 - RNA, 1410 nt, Artificial Sequence; identical to SEQ ID NO: 176798
  derived and/or modified CDS sequence (opt4) from neuraminidase__InfluenzaA__ADG42316

SEQ ID NO: 178765 - RNA, 1410 nt, Artificial Sequence; identical to SEQ ID NO: 176798
  derived and/or modified CDS sequence (opt4) from neuraminidase__InfluenzaA__ADG42326

SEQ ID NO: 178766 - RNA, 1410 nt, Artificial Sequence
  derived and/or modified CDS sequence (opt4) from neuraminidase__InfluenzaA__ADG42336
augaaccccaaccagaagaucaucaccaucggcagcgugugcaugaccaucggcauggccaaccugauccugcagaucggcaacaucaucagcaucuggaucagccacagcauccagcugggcaaccagaaccagaucgagaccugcaaccagagcgugaucaccuacgagaacaacaccugggugaaccagaccuacgugaacaucagcaacaccaacuucgccgccggccagagcguggugagcaugaagcuggccggcaacagcagccugugccccgugagcggcugggccaucuacagcaaggacaacagcaucagaaucggcagcaagggcgacguguucgugaucagagagcccuucaucagcugcagcccccuggagugcagaaccuucuuccugacccagggcgcccugcugaacgacaagcacagcaacggcaccaucaaggacagaagccccuacagaacccugaugagcugccccaucggcgaggugcccagccccuacaacagcagauucgagagcguggccuggagcgccagcgccugccacgacggcaucaacuggcugaccaucggcaucagcggccccgacaacggcgccguggccgugcugaaguacaacggcaucaucaccgacaccaucaagagcuggagaaacaacauccugagaacccaggagagcgagugcgccugcgugaacggcagcugcuucaccgugaugaccgacggccccagcgacggccaggccagcuacaagaucuucagaaucgagaagggcaagaucgugaagagcguggagaugaacgcccccaacuaccacuacgaggagugcagcugcuaccccgacagcagcgagaucaccugcgugugcagagacaacuggcacggcagcaacagacccugggugagcuucaaccagaaccuggaguaccagaucggcuacaucugcagcggcaucuucggcgacaaccccagacccaacgacaagaccggcagcugcggccccgugagcagcaacggcgccaacggcgugaagggcuucagcuucaaguacggcaacggcguguggaucggcagaaccaagagcaucagcagcagaaacggcuucgagaugaucugggaccccaacggcuggaccggcaccgacaacaaguucagcaucaagcaggacaucgugggcaucaacgaguggagcggcuacagcggcagcuucgugcagcaccccgagcugaccggccuggacugcaucagacccugcuucuggguggagcugaucagaggcagacccaaggagaacaccaucuggaccagcggcagcagcaucagcuucugcggcgugaacagcgacaccgugggcuggagcuggcccgacggcgccgagcugcccuucaccaucgacaaguga

SEQ ID NO: 178767 - RNA, 1410 nt, Artificial Sequence; identical to SEQ ID NO: 178260
  derived and/or modified CDS sequence (opt4) from neuraminidase__InfluenzaA__ADG42346

SEQ ID NO: 178768 - RNA, 1410 nt, Artificial Sequence; identical to SEQ ID NO: 177975
  derived and/or modified CDS sequence (opt4) from neuraminidase__InfluenzaA__ADG42356

SEQ ID NO: 178769 - RNA, 1410 nt, Artificial Sequence
  derived and/or modified CDS sequence (opt4) from neuraminidase__InfluenzaA__ADG42366
augaaccccaaccagaagaucaucaccaucggcagcgugugcaugaccaucggcauggccaaccugauccugcagaucggcaacaucaucagcaucuggaucagccacagcauccagcugggcaaccagaaccagaucgagaccugcaaccagagcgugaucaccuacgagaacaacaccugggugaaccagaccuacgugaacaucagcaacaccaacuucgccgccggccagagcguggugagcgugaagcuggccggcaacagcagccugugccccgugagcggcugggccaucuacagcaaggacaacagcaucagaaucggcagcaagggcgacguguucgugaucagagagcccuucaucagcugcagcccccuggagugcagaaccuucuuccugacccagggcgcccugcugaacgacaagcacagcaacggcaccaucaaggacagaagccccuacagaacccugaugagcugccccaucggcgaggugcccagccccuacaacagcagauucgagagcguggccuggagcgccagcgccugccacgacggcaucaacuggcugaccaucggcaucagcggccccgacaacggcgccguggccgugcugaaguacaacggcaucaucaccgacaccaucaagagcuggagaaacaacauccugagaacccaggagagcgagugcgccugcgugaacggcagcugcuucaccgugaugaccgacggccccagcgacggccaggccagcuacaagaucuucagaaucgagaagggcaagaucgugaagagcguggagaugaacgcccccaacuaccacuacgaggagugcagcugcuaccccgacagcagcgagaucaccugcgugugcagagacaacuggcacggcagcaacagacccuggaucagcuucaaccagaaccuggaguaccagaucggcuacaucugcagcggcaucuucggcgacaaccccagacccaacgacaagaccggcagcugcggccccgugagcagcaacggcgccaacggcgugaagggcuucagcuucaaguacggcaacggcguguggaucggcagaaccaagagcaucagcagcagaaacggcuucgagaugaucugggaccccaacggcuggaccggcaccgacaacaaguucagcaucaagcaggacaucgugggcaucaacgaguggagcggcuacagcggcagcuucgugcagcaccccgagcugaccggccuggacugcaucagacccugcuucuggguggagcugaucagaggcagacccaaggagaacaccaucuggaccagcggcagcagcaucagcuucugcggcgugaacagcgacaccgugggcuggagcuggcccgacggcgccgagcugcccuucaccaucgacaaguga

SEQ ID NO: 178770 - RNA, 1410 nt, Artificial Sequence; identical to SEQ ID NO: 176798
  derived and/or modified CDS sequence (opt4) from neuraminidase__InfluenzaA__ADG42376

SEQ ID NO: 178771 - RNA, 1410 nt, Artificial Sequence
  derived and/or modified CDS sequence (opt4) from neuraminidase__InfluenzaA__ADG42386
augaaccccaaccagaagaucaucaccaucggcagcgugugcaugaccaucggcauggccaaccugauccugcagaucggcaacaucaucagcaucuggaucagccacagcauccagcugggcaaccagaaccagaucgagaccugcaaccagagcgugaucaccuacgagaacaacaccugggugaaccagaccuacgugaacaucagcaacaccaacuucgccgccggccagagcguggugagcgugaaguucgccggcaacagcagccugugccccgugagcggcugggccaucuacagcaaggacaacagcaucagaaucggcagcaagggcgacguguucgugaucagagagcccuucaucagcugcagcccccuggagugcagaaccuucuuccugacccagggcgcccugcugaacgacaagcacagcaacggcaccaucaaggacagaagccccuacagaacccugaugagcugccccaucggcgaggugcccagccccuacaacagcagauucgagagcguggccuggagcgccagcgccugccacgacggcaucaacuggcugaccaucggcaucagcggccccgacaacggcgccguggccgugcugaaguacaacggcaucaucaccgacaccaucaagagcuggagaaacaacauccugagaacccaggagagcgagugcgccugcgugaacggcagcugcuucaccgugaugaccgacggccccaacgacggccaggccagcuacaagaucuucagaaucgagaagggcaagaucgugaagagcguggagaugaacgcccccaacuaccacuacgaggagugcagcugcuaccccgacagcagcgagaucaccugcgugugcagagacaacuggcacggcagcaacagacccugggugagcuucaaccagaaccuggaguaccagaucggcuacaucugcagcggcaucuucggcgacaaccccagacccaacgacaagaccggcagcugcggccccgugagcagcaacggcgccaacggcgugaagggcuucagcuucaaguacggcaacggcguguggaucggcagaaccaagagcaucagcagcagaagcggcuucgagaugaucugggaccccaacggcuggaccggcaccgacaacaaguucagcaucaagcaggacaucgugggcaucaacgaguggagcggcuacagcggcagcuucgugcagcaccccgagcugaccggccuggacugcaucagacccugcuucuggguggagcugaucagaggcagacccaaggagaacaccaucuggaccagcggcagcagcaucagcuucugcggcgugaacagcgacaccgugggcuggagcuggcccgacggcgccgagcugcccuucaccaucgacaaguga

SEQ ID NO: 178772 - RNA, 1410 nt, Artificial Sequence; identical to SEQ ID NO: 178755
  derived and/or modified CDS sequence (opt4) from neuraminidase__InfluenzaA__ADG42396

SEQ ID NO: 178773 - RNA, 1410 nt, Artificial Sequence
  derived and/or modified CDS sequence (opt4) from neuraminidase__InfluenzaA__ADG42406
augaaccccaaccagaagaucaucaccaucggcagcgugugcaugaccaucggcauggccaaccugauccugcagaucggcaacauccugagcaccuggaucagccacagcauccagcugggcaaccagaaccagaucgagaccugcaaccagagcgugaucaccuacgagaacaacaccugggugaaccagaccuacgugaacaucagcaacaccaacuucgccgccggccagagcguggugagcgugaagcuggccggcaacagcagccugugccccgugagcggcugggccaucuacagcaaggacaacagcaucagaaucggcagcaagggcgacguguucgugaucagagagcccuucaucagcugcagcccccuggagugcagaaccuucuuccugacccagggcgcccugcugaacgacaagcacagcaacggcaccaucaaggacagaagccccuacagaacccugaugagcugccccaucggcgaggugcccagccccuacaacagcagauucgagagcguggccuggagcgccagcgccugccacgacggcaucaacuggcugaccaucggcaucagcggccccgacaacggcgccguggccgugcugaaguacaacggcaucaucaccgacaccaucaagagcuggagaaacaacauccugagaacccaggagagcgagugcgccugcgugaacggcagcugcuucaccgugaugaccgacggccccagcgacggccaggccagcuacaagaucuucagaaucgagaagggcaagaucgugaagagcguggagaugaacgcccccaacuaccacuacgaggagugcagcugcuaccccgacagcagcgagaucaccugcgugugcagagacaacuggcacggcagcaacagacccugggugagcuucaaccagaaccuggaguaccagaucggcuacaucugcagcggcaucuucggcgacaaccccagacccaacgacaagaagggcagcugcggccccgugagcagcaacggcgccaacggcgugaagggcuucagcuucaaguacggcaacggcguguggaucggcagaaccaagagcaucagcagcagaaacggcuucgagaugaucugggaccccaacggcuggaccggcaccgacaacaacuucagcaucaagcaggacaucgugggcaucaacgaguggagcggcuacagcggcagcuucgugcagcaccccgagcugaccggccuggacugcaucagacccugcuucuggguggagcugaucagaggcagacccaaggagaacaccaucuggaccagcggcagcagcaucagcuucugcggcgugaacagcgacaccgugggcuggagcuggcccgacggcgccgagcugcccuucaccaucgacaaguga

SEQ ID NO: 178774 - RNA, 1410 nt, Artificial Sequence; identical to SEQ ID NO: 177975
  derived and/or modified CDS sequence (opt4) from neuraminidase__InfluenzaA__ADG42426

SEQ ID NO: 178775 - RNA, 1410 nt, Artificial Sequence; identical to SEQ ID NO: 176798
  derived and/or modified CDS sequence (opt4) from neuraminidase__InfluenzaA__ADG42436

SEQ ID NO: 178776 - RNA, 1410 nt, Artificial Sequence
  derived and/or modified CDS sequence (opt4) from neuraminidase__InfluenzaA__ADG42446
augaaccccaaccagaagaucaucaccaucggcagcgugugcaugaccaucggcauggccaaccugauccugcagaucggcaacaucaucagcaucuggaucagccacagcauccagcugggcaaccagaaccagaucgagaccugcaaccagagcgugaucaccuacgagaacaacaccugggugaaccagaccuacgugaacaucagcaacaccaacuucgccgccggccagagcguggugagcgccaagcuggccggcaacagcagccugugccccgugagcggcugggccaucuacagcaaggacaacagcaucagaaucggcagcaagggcgacguguucgugaucagagagcccuucaucagcugcagcccccuggagugcagaaccuucuuccugacccagggcgcccugcugaacgacaagcacagcaacggcaccaucaaggacagaagccccuacagaacccugaugagcugccccaucggcgaggugcccagccccuacaacagcagauucgagagcguggccuggagcgccagcgccugccacgacggcaucaacuggcugaccaucggcaucagcggccccgacaacggcgccguggccgugcugaaguacaacggcaucaucaccgacaccaucaagagcuggagaaacaacauccugagaacccaggagagcgagugcgccugcgugaacggcagcugcuucaccgugaugaccgacggccccagcgacggccaggccagcuacaagaucuucagaaucgagaagggcaagaucgugaagagcguggagaugaacgcccccaacuaccacuacgaggagugcagcugcuaccccgacagcagcgagaucaccugcgugugcagagacaacuggcacggcagcaacagacccugggugagcuucaaccagaaccuggaguaccagaucggcuacaucugcagcggcaucuucggcgacaaccccagacccaacgacaagaccggcagcugcggccccgugagcagcaacggcgccaacggcgugaagggcuucagcuucaaguacggcaacggcguguggaucggcagaaccaagagcaucagcagcagaaacggcuucgagaugaucugggaccccaacggcuggaccggcaccgacaacaacuucagcaucaagcaggacaucgugggcaucaacgaguggagcggcuacagcggcagcuucgugcagcaccccgagcugaccggccuggacugcaucagacccugcuucuggguggagcugaucagaggcagacccaaggagaacaccaucuggaccagcggcagcagcaucagcuucugcggcgugaacagcgacaccgugggcuggagcuggcccgacggcgccgagcugcccuucaccaucgacaaguga

SEQ ID NO: 178777 - RNA, 1410 nt, Artificial Sequence
  derived and/or modified CDS sequence (opt4) from neuraminidase__InfluenzaA__ADG42456
augaaccccaaccagaagaucaucaccaucggcagcgugugcaugaccaucggcauggccaaccugauccugcagaucggcaacaucaucagcaucuggaucagccacagcauccagcugggcaaccagaaccagaucgagaccugcaaccagagcgugaucaccuacgagaacaacaccugggugaaccagaccuacgugaacaucagcaacaccaacuucgccgccggccagagcguggugagcgugaagcuggccggcaacagcagccugugccccgugagcggcugggccaucuacagcaaggacaacagcaucagaaucggcagcaagggcgacguguucgugaucagagagcccuucaucagcugcagcccccuggagugcagaaccuucuuccugacccagggcgcccugcugaacgacaagcacagcaacggcaccaucaaggacagaagcccccacagaacccugaugagcugccccaucggcgaggugcccagccccuacaacagcagauucgagagcguggccuggagcgccagcgccugccacgacggcaucaacuggcugaccaucggcaucagcggccccgacaacggcgccguggccgugcugaaguacaacggcaucaucaccgacaccaucaagagcuggagaaacaacauccugagaacccaggagagcgagugcgccugcgugaacggcagcugcuucaccgugaugaccgacggccccagcgacggccaggccagcuacaagaucuucagaaucgagaagggcaagaucgugaagagcguggagaugaacgcccccaacuaccacuacgaggagugcagcugcuaccccgacagcagcgagaucaccugcgugugcagagacaacuggcacggcagcaacagacccugggugagcuucaaccagaaccuggaguaccagaucggcuacaucugcagcggcaucuucggcgacaaccccagacccaacgacaagaccggcagcugcggccccgugagcagcaacggcgccaacggcgugaagggcuucagcuucaaguacggcaacggcguguggaucggcagaaccaagagcaucagcagcagaaacggcuucgagaugaucugggaccccaacggcuggaccggcaccgacaacaacuucagcaucaagcaggacaucgugggcaucaacgaguggagcggcuacagcggcagcuucgugcagcaccccgagcugaccggccuggacugcaucagacccugcuucuggguggagcugaucagaggcagacccaaggagaacaccaucuggaccagcggcagcagcaucagcuucugcggcgugaacagcgacaccgugggcuggagcuggcccgacggcgccgagcugcccuucaccaucgacaaguga

SEQ ID NO: 178778 - RNA, 1410 nt, Artificial Sequence; identical to SEQ ID NO: 176798
  derived and/or modified CDS sequence (opt4) from neuraminidase__InfluenzaA__ADG42466

SEQ ID NO: 178779 - RNA, 1410 nt, Artificial Sequence
  derived and/or modified CDS sequence (opt4) from neuraminidase__InfluenzaA__ADG42476
augaaccccaaccagaagaucaucaccaucggcagcgugugcaugaccaucggcauggccaaccugauccugcagaucggcaacaucaucagcaucuggaucagccacagcauccagcugggcaaccagaaccagaccgagaccugcaaccagagcgugaucaccuacgagaacaacaccugggugaaccagaccuacgugaacaucagcaacaccaacuucgccgccggccagagcguggugagcgugaagcuggccggcaacagcagccugugccccgugagcggcugggccaucuacagcaaggacaacagcaucagaaucggcagcaagggcgacguguucgugaucagagagcccuucaucagcugcagcccccuggagugcagaaccuucuuccugacccagggcgcccugcugaacgacaagcacagcaacggcaccaucaaggacagaagccccuacagaacccugaugagcugccccaucggcgaggugcccagccccuacaacagcagauucgagagcguggccuggagcgccagcgccugccacgacggcaucaacuggcugaccaucggcaucagcggccccgacaacggcgccguggccgugcugaaguacaacggcaucaucaccgacaccaucaagagcuggagaaacaacauccugagaacccaggagagcgagugcgccugcgugaacggcagcugcuucaccgugaugaccgacggccccagcgacggccaggccagcuacaagaucuucagaaucgagaagggcaagaucgugaagagcguggagaugaacgcccccaacuaccacuacgaggagugcagcugcuaccccgacagcagcgagaucaccugcgugugcagagacaacuggcacggcagcaacagacccugggugagcuucaaccagaaccuggaguaccagaucggcuacaucugcagcggcaucuucggcgacaaccccagacccaacgacaagaccggcagcugcggccccgugagcagcaacggcgccaacggcgugaagggcuucagcuucaaguacggcaacggcguguggaucggcagaaccaagagcaucagcagcagaaacggcuucgagaugaucugggaccccaacggcuggaccggcaccgacaacaacuucagcaucaagcaggacaucgugggcaucaacgaguggagcggcuacagcggcagcuucgugcagcaccccgagcugaccggccuggacugcaucagacccugcuucuggguggagcugaucagaggcagacccaaggagaacaccaucuggaccagcggcagcagcaucagcuucugcggcgugaacagcgacaccgugggcuggagcuggcccgacggcgccgagcugcccuucaccaucgacaaguga

SEQ ID NO: 178780 - RNA, 1410 nt, Artificial Sequence; identical to SEQ ID NO: 178700
  derived and/or modified CDS sequence (opt4) from neuraminidase__InfluenzaA__ADG42486

SEQ ID NO: 178781 - RNA, 1410 nt, Artificial Sequence; identical to SEQ ID NO: 176798
  derived and/or modified CDS sequence (opt4) from neuraminidase__InfluenzaA__ADG42496

SEQ ID NO: 178782 - RNA, 1410 nt, Artificial Sequence
  derived and/or modified CDS sequence (opt4) from neuraminidase__InfluenzaA__ADG42506
augaaccccaaccagaagaucaucaucaucggcagcgugugcaugaccaucggcauggccaaccugauccugcagaucggcaacaucaucagcaucuggaucagccacagcauccagcugggcaaccagaaccagaucgagaccugcaaccagagcaucaucaccuacgagaacaacaccugggugaaccagaccuacgugaacaucagcaacaccaacuucgccgccggccagagcguggugagcgugaagcuggccggcaacagcagccugugccccgugagcggcugggccaucuacagcaaggacaacagcaucagaaucggcagcaagggcgacguguucgugaucagagagcccuucaucagcugcagcccccuggagugcagaaccuucuuccugacccagggcgcccugcugaacgacaagcacagcaacggcaccaucaaggacagaagccccuacagaacccugaugagcugccccaucggcgaggugcccagccccuacaacagcagauucgagagcguggccuggagcgccagcgccugccacgacggcaucaacuggcugaccaucggcaucagcggccccgacaacggcgccguggccgugcugaaguacaacggcaucaucaccgacaccaucaagagcuggagaaacaacauccugagaacccaggagagcgagugcgccugcgugaacggcagcugcuucaccgugaugaccgacggccccagcgacggccaggccagcuacaagaucuucagaaucgagaagggcaagguggugaagagcguggagaugaacgcccccaacuaccacuacgaggagugcagcugcuaccccgacagcagcgagaucaccugcgugugcagagacaacuggcacggcagcaacagacccugggugagcuucaaccagaaccuggaguaccagaucggcuacaucugcagcggcaucuucggcgacaaccccagacccaacgacaagaccggcagcugcggccccgugagcagcaacggcgccaacggcgugaagggcuucagcuucaaguacggcaacggcguguggaucggcagaaccaagagcaucagcagcagaaacggcuucgagaugaucugggaccccaacggcuggaccggcaccgacaacaacuucagcaucaagcaggacaucgugggcaucaacgaguggagcggcuacagcggcagcuucgugcagcaccccgagcugaccggccuggacugcaucagacccugcuucuggguggagcugaucagaggcagacccaaggagaacaccaucuggaccagcggcagcagcaucagcuucugcggcgugaacagcgacaccgugggcuggagcuggcccgacggcgccgagcugcccuucaccaucgacaaguga

SEQ ID NO: 178783 - RNA, 1410 nt, Artificial Sequence; identical to SEQ ID NO: 177973
  derived and/or modified CDS sequence (opt4) from neuraminidase__InfluenzaA__ADG42516

SEQ ID NO: 178784 - RNA, 1410 nt, Artificial Sequence
  derived and/or modified CDS sequence (opt4) from neuraminidase__InfluenzaA__ADG42526
augaaccccaaccagaagaucaucaccaucggcagcgugugcaugaccaucggcauggccaaccugauccugcagaucggcaacaucaucagcaucuggaucagccacagcauccagcugggcaaccagaaccagaucgagaccugcaaccagagcgugaucaccuacgagaacaacaccugggugaaccagaccuacgugaacaucagcaacaccaacuucgccgccggccagagcguggugagcgugaagcuggccggcaacagcagccugugccccgugagcggcugggccaucuacagcaaggacaacagcaucagaaucggcagcaagggcgacguguucgugaucagagagcccuucaucagcugcagcccccuggagugcagaaccuucuuccugacccagggcgcccugcugaacgacaagcacagcaacggcaccaucaaggacagaagccccuacagaacccugaugagcugccccaucggcgaggugcccagccccuacaacagcagauucgagagcguggccuggagcgccagcgccugccacgacggcaucaacuggcugaccaucggcaucagcggccccgacaacggcgccguggccgugcugaaguacaacggcaucaucaccgacaccaucaagagcuggagaaacaacauccugagaacccaggagagcgagugcgccugccugaacggcagcugcuucaccgugaugaccgacggccccagcgacggccaggccagcuacaagaucuucagaaucgagaagggcaagaucgugaagagcguggagaugaacgcccccaacuaccacuacgaggagugcagcugcuaccccgacagcagcgagaucaccugcgugugcagagacaacuggcacggcagcaacagacccugggugagcuucaaccagaaccuggaguaccagaucggcuacaucugcagcggcaucuucggcgacaaccccagacccaacgacaagaccggcagcugcggccccgugagcagcaacggcgccaacggcgugaagggcuucagcuucaaguacggcaacggcguguggaucggcagaaccaagagcaucagcagcagaaacggcuucgagaugaucugggaccccaacggcuggaccggcaccgacaacaacuucagcaucaagcaggacaucgugggcaucaacgaguggagcggcuacagcggcagcuucgugcagcaccccgagcugaccggccuggacugcaucagacccugcuucuggguggagcugaucagaggcagacccaaggagaacaccaucuggaccagcggcagcagcaucagcuucugcggcgugaacagcgacaccgugggcuggagcuggcccgacggcgccgagcugcccuucaccaucgacaaguga

SEQ ID NO: 178785 - RNA, 1410 nt, Artificial Sequence
  derived and/or modified CDS sequence (opt4) from neuraminidase__InfluenzaA__ADG42536
augaaccccaaccagaagaucaucaccaucggcagcgugugcaugaccaucggcauggccaaccugauccugcagaucggcaacaucaucagcaucuggaucagccacagcauccagcugggcaaccagaaccagaucgagaccugcaaccagagcgugaucaccuacgagaacaacaccugggugaaccagaccuacgugaacaucagcaacaccaacuucgccgccggccagagcguggugagcgugaagcuggccggcaacagcagccugugccccgugagcggcugggccaucuacagcaaggacaacagcaucagaaucggcagcaagggcgacguguucgugaucagagagcccuucaucagcugcagcccccuggagugcagaaccuucuuccugacccagggcgcccugcugaacgacaagcacagcaacggcaccaucaaggacagaagccccuacagaacccugaugagcugccccaucggcgaggugcccagccccuacaacagcagauucgagagcguggccuggagcgccagcgccugccacgacggcaucaacuggcugaccaucggcaucagcggccccgacaacggcgccguggccgugcugaaguacaacggcaucaucaccgacaccaucaagagcuggagaaacaacauccugagaacccaggagagcgagugcgccugcgugaacggcagcugcuucaccgugaugaccgacggccccagcgacggccaggccagcuacaagaucuucagaaucgagaagggcaagaucgugaagagcguggagaugaacgcccccaacuaccacuacgaggagugcagcugcuaccccgacagcagcgagaucaccugcgugugcagagacaacuggcacggcagcaacagacccugggugagcuucaaccagaaccuggaguaccagaucggcuacaucugcagcggcaucuucggcgacaaccccagacccaacgacaagaccggcagcugcggccccgugagcagcaacggcgccaacggcgugaagggcuucagcuucaaguacggcaacggcguguggaucggcagaaccaagagcaucagcagcagaaacggcuucgagaugaucugggaccccaacggcuggaccggcaccgacaacaacuucagcaucaagcaggacaucgugggcaucaacgaguggagcggcuacagcggcagcuucgugcagcaccccgagcugaccggccuggacugcaucagacccugcuucuggguggagcugaucagaggcagacccaaggagaacaccaucuggaccagcggcagcagcaucagcuucugcggcgugaccagcgacaccgugggcuggagcuggcccgacggcgccgagcugcccuucaccaucgacaaguga

SEQ ID NO: 178786 - RNA, 1410 nt, Artificial Sequence; identical to SEQ ID NO: 176798
  derived and/or modified CDS sequence (opt4) from neuraminidase__InfluenzaA__ADG42546

SEQ ID NO: 178787 - RNA, 1410 nt, Artificial Sequence; identical to SEQ ID NO: 176798
  derived and/or modified CDS sequence (opt4) from neuraminidase__InfluenzaA__ADG42556

SEQ ID NO: 178788 - RNA, 1410 nt, Artificial Sequence
  derived and/or modified CDS sequence (opt4) from neuraminidase__InfluenzaA__ADG42566
augaaccccaaccagaagaucaucaccaucggcagcgugugcaugaccaucggcauggccaaccugauccugcagaucggcaacaucaucagcaucuggaucagccacagcauccagcugggcaaccagaaccagaucgagaccugcaaccagagcgugaucaccuacgagaacaacaccugggugaaccagaccuacgugaacaucagcaacaccaacuucgccgccggccacagcguggugagcgugaagcuggccggcaacagcagccugugccccgugagcggcugggccaucuacagcaaggacaacagcaucagaaucggcagcaagggcgacguguucgugaucagagagcccuucaucagcugcagcccccuggagugcagaaccuucuuccugacccagggcgcccugcugaacgacaagcacagcaacggcaccaucaaggacagaagccccuacagaacccugaugagcugccccaucggcgaggugcccagccccuacaacagcagauucgagagcguggccuggagcgccagcgccugccacgacggcaucaacuggcugaccaucggcaucagcggccccgacaacggcgccguggccgugcugaaguacaacggcaucaucaccgacaccaucaagagcuggagaaacaacauccugagaacccaggagagcgagugcgccugcgugaacggcagcugcuucaccgugaugaccgacggccccagcgacggccaggccagcuacaagaucuucagaaucgagaagggcaagaucgugaagagcguggagaugaacgcccccaacuaccacuacgaggagugcagcugcuaccccgacagcagcgagaucaccugcgugugcagagacaacuggcacggcagcaacagacccugggugagcuucaaccagaaccuggaguaccagaucggcuacaucugcagcggcaucuucggcgacaaccccagacccaacgacaagaccggcagcugcggccccgugagcagcaacggcgccaacggcgugaagggcuucagcuucaaguacggcaacggcguguggaucggcagaaccaagagcaucagcagcagaaacggcuucgagaugaucugggaccccaacggcuggaccggcaccgacaacaacuucagcaucaagcaggacaucgugggcaucaacgaguggagcggcuacagcggcagcuucgugcagcaccccgagcugaccggccuggacugcaucagacccugcuucuggguggagcugaucagaggcagacccaaggagaacaccaucuggaccagcggcagcagcaucagcuucugcggcgugaacagcgacaccgugggcuggagcuggcccgacggcgccgagcugcccuucaccaucgacaaguga

SEQ ID NO: 178789 - RNA, 1410 nt, Artificial Sequence
  derived and/or modified CDS sequence (opt4) from neuraminidase__InfluenzaA__ADG42576
augaaccccaaccagaagaucaucaccaucggcagcgugugcaugaccaucggcauggccaaccugauccugcagaucggcaacaucaucagcaucuggaucagccacagcauccagcugggcaaccagaaccagaucgagaccugcaaccagagcgugaucaccuacgagaacaacaccugggugaaccagaccuacgugaacaucagcaacaccaacuucgccgccggccagagcguggugagcgugaagcuggccggcaacagcagccugugccccgugagcggcugggccaucuacagcaaggacaacagcaucagaaucggcagcaagggcgacguguucgugaucagagagcccuucaucagcugcagcccccuggagugcagaaccuucuuccugacccagggcgcccugcugaacgacaagcacagcaacggcaccaucaaggacagaagccccuacagaacccugaugagcugccccaucggcgaggugcccagccccuacaacagcagauucgagagcguggccuggagcgccagcgccugccacgacggcaucaacuggcugaccaucggcaucagcggccccuacaacggcgccguggccgugcugaaguacaacggcaucaucaccgacaccaucaagagcuggagaaacaacauccugagaacccaggagagcgagugcgccugcgugaacggcagcugcuucaccgugaugaccgacggccccagcgacggccaggccagcuacaagaucuucaagaucgagaagggcaagaucgugaagagcguggagaugaacgcccccaacuaccacuacgaggagugcagcugcuaccccgacagcagcgagaucaccugcgugugcagagacaacuggcacggcagcaacagacccugggugagcuucaaccagaaccuggaguaccagaucggcuacaucugcagcggcaucuucggcgacaaccccagacccaacgacaagaccggcagcugcggccccgugagcagcaacggcgccaacggcgugaagggcuucagcuucaaguacggcaacggcguguggaucggcagaaccaagagcaucagcagcagaaacggcuucgagaugaucugggaccccaacggcuggaccggcaccgacaacaacuucagcaucaagcaggacaucgugggcaucaacgaguggagcggcuacagcggcagcuucgugcagcaccccgagcugaccggccuggacugcaucagacccugcuucuggguggagcugaucagaggcagacccaaggagaacaccaucuggaccagcggcagcagcaucagcuucugcggcgugaacagcgacaccgugggcuggagcuggcccgacggcgccgagcugcccuucaccaucgacaaguga

SEQ ID NO: 178790 - RNA, 1410 nt, Artificial Sequence; identical to SEQ ID NO: 176798
  derived and/or modified CDS sequence (opt4) from neuraminidase__InfluenzaA__ADG42586

SEQ ID NO: 178791 - RNA, 1410 nt, Artificial Sequence
  derived and/or modified CDS sequence (opt4) from neuraminidase__InfluenzaA__ADG42606
augaaccccaaccagaagaucaucaccaucggcagcgugugcaugaccaucggcauggccaaccugauccugcagaucggcaacaucaucagcaucuggaucagccacagcauccagcugggcaaccagaaccagaucgagaccugcaaccagagcgugaucaccuacgagaacaacaccugggugaaccagaccuacgugaacaucagcaacaccaacuucgccgccggccagagcguggugagcgugaagcuggccggcaacagcagccugugccccgugagcggcugggccaucuacagcaaggacaacagcaucagaaucggcagcaagggcgacguguucgugaucagagagcccuucaucagcugcagcccccuggagugcagaaccuucuuccugacccagggcgcccugcugaacgacaagcacagcaacggcaccaucaaggacagaagccccuacagaacccugaugagcugccccaucggcgaggugcccagccccuacaacagcagauucgagagcguggccuggagcgccagcgccugccacgacggcaucaacuggcugaccaucggcaucagcggccccgacaacggcgccguggccgugcugaaguacaacggcaucaucaccgacaccaucaagagcuggagaaacaacauccugagaacccaggagagcgagugcgccugcgugaacggcagcugcuucaccgugaugaccgacggccccagcgacggccaggccagcuacaagaucuucagaaucgagaagggcaagaucgugaagagcguggagaugaacgcccccaacuaccacuacgaggagugcagcugcuaccccgacagcagcgagaucaccugcgugugcagagacaacuggcacggcagcaacagacccugggugagcuucaaccagaaccuggaguaccagaucggcuacaucugcagcggcaucuucggcgacaaccccagacccaacgacaagaccggcagcugcggccccgugagcagcaacggcgccaacggcgugaagggcuucagcuucaaguacggcaacggcguguggaucggcagaaccaagagcaucagcagcagaaacggcuucgagaugaucugggaccccaacggcuggaccggcaccgacaacaacuucagcaucaagcaggacaucgugggcaucaacgaguggagcggcuacagcggcagcuucgugcagcaccccgagcugaccggccuggacugcaucagacccugcuucuggguggagcugaucagaggcagacccaaggagaacaccaucuggaccagcggcagcagcaucagcuucugcggcgugaacagcgacaccgugggcuggagcuggcccgacggcgccgagcugcccuuccccaucgacaaguga

SEQ ID NO: 178792 - RNA, 1410 nt, Artificial Sequence
  derived and/or modified CDS sequence (opt4) from neuraminidase__InfluenzaA__ADG42616
augaacagcaaccagaagaucaucaccaucggcagcgugugcaugaccaucggcauggccaaccugauccugcagaucggcaacaucaucagcaucuggaucagccacagcauccagcugggcaaccagaaccagaucgagaccugcaaccagagcgugaucaccuacgagaacaacaccugggugaaccagaccuacgugaacaucagcaacaccaacuucgccgccggccagagcguggugagcgugaagcuggccggcaacagcagccugugccccgugagcggcugggccaucuacagcaaggacaacagcaucagaaucggcagcaagggcgacguguucgugaucagagagcccuucaucagcugcagcccccuggagugcagaaccuucuuccugacccagggcgcccugcugaacgacaagcacagcaacggcaccaucaaggacagaagccccuacagaacccugaugagcugccccaucggcgaggugcccagccccuacaacagcagauucgagagcguggccuggagcgccagcgccugccacgacggcaucaacuggcugaccaucggcaucagcggccccgacaacggcgccguggccgugcugaaguacaacggcaucaucaccgacaccaucaagagcuggagaaacaacauccugagaacccaggagagcgagugcgccugcgugaacggcagcugcuucaccgugaugaccgacggccccagcgacggccaggccagcuacaagaucuucagaaucgagaagggcaagaucgugaagagcguggagaugaacgcccccaacuaccacuacgaggagugcagcugcuaccccgacagcagcgagaucaccugcgugugcagagacaacuggcacggcagcaacagacccugggugagcuucaaccagaaccuggaguaccagaucggcuacaucugcagcggcaucuucggcgacaaccccagacccaacgacaagaccggcagcugcggccccgugagcagcaacggcgccaacggcgugaagggcuucagcuucaaguacggcaacggcguguggaucggcagaaccaagagcaucagcagcagaaacggcuucgagaugaucugggaccccaacggcuggaccggcaccgacaacaacuucagcaucaagcaggacaucgugggcaucaacgaguggagcggcuacagcggcagcuucgugcagcaccccgagcugaccggccuggacugcaucagacccugcuucuggguggagcugaucagaggcagacccaaggagaacaccaucuggaccagcggcagcagcaucagcuucugcggcgugaacagcgacaccgugggcuggagcuggcccgacggcgccgagcugcccuucaccaucgacaaguga

SEQ ID NO: 178793 - RNA, 1410 nt, Artificial Sequence; identical to SEQ ID NO: 177381
  derived and/or modified CDS sequence (opt4) from neuraminidase__InfluenzaA__ADG42626

SEQ ID NO: 178794 - RNA, 1410 nt, Artificial Sequence; identical to SEQ ID NO: 178779
  derived and/or modified CDS sequence (opt4) from neuraminidase__InfluenzaA__ADG42636

SEQ ID NO: 178795 - RNA, 1410 nt, Artificial Sequence
  derived and/or modified CDS sequence (opt4) from neuraminidase__InfluenzaA__ADG42646
augaaccccaaccagagaaucaucaccaucggcagcgugugcaugaccaucggcauggccaaccugauccugcagaucggcaacaucaucagcaucuggaucagccacagcauccagcugggcaaccagaaccagaucgagaccugcaaccagagcgugaucaccuacgagaacaacaccugggugaaccagaccuacgugaacaucagcaacaccaacuucgccgccggccagagcguggugagcgugaagcuggccggcaacagcagccugugccccgugagcggcugggccaucuacagcaaggacaacagcaucagaaucggcagcaagggcgacguguucgugaucagagagcccuucaucagcugcagcccccuggagugcagaaccuucuuccugacccagggcgcccugcugaacgacaagcacagcaacggcaccaucaaggacagaagccccuacagaacccugaugagcugccccaucggcgaggugcccagccccuacaacagcagauucgagagcguggccuggagcgccagcgccugccacgacggcaucaacuggcugaccaucggcaucagcggccccgacaacggcgccguggccgugcugaaguacaacggcaucaucaccgacaccaucaagagcuggagaaacaacauccugagaacccaggagagcgagugcgccugcgugaacggcagcugcuucaccgugaugaccgacggccccagcgacggccaggccagcuacaagaucuucagaaucgagaagggcaagaucgugaagagcguggagaugaacgcccccaacuaccacuacgaggagugcagcugcuaccccgacagcagcgagaucaccugcgugugcagagacaacuggcacggcagcaacagacccugggugagcuucaaccagaaccuggaguaccagaucggcuacaucugcagcggcaucuucggcgacaaccccagacccaacgacaagaccggcagcugcggccccgugagcagcaacggcgccaacggcgugaagggcuucagcuucaaguacggcaacggcguguggaucggcagaaccaagagcaucagcagcagaaacggcuucgagaugaucugggaccccaacggcuggaccggcaccgacaacaacuucagcaucaagcaggacaucgugggcaucaacgaguggagcggcuacagcggcagcuucgugcagcaccccgagcugaccggccuggacugcaucagacccugcuucuggguggagcugaucagaggcagacccaaggagaacaccaucuggaccagcggcagcagcaucagcuucugcggcgugaacagcgacaccgugggcuggagcuggcccgacggcgccgagcugcccuucaccaucgacaaguga

SEQ ID NO: 178796 - RNA, 1410 nt, Artificial Sequence; identical to SEQ ID NO: 176798
  derived and/or modified CDS sequence (opt4) from neuraminidase__InfluenzaA__ADG42656

SEQ ID NO: 178797 - RNA, 1410 nt, Artificial Sequence; identical to SEQ ID NO: 178711
  derived and/or modified CDS sequence (opt4) from neuraminidase__InfluenzaA__ADG42666

SEQ ID NO: 178798 - RNA, 1410 nt, Artificial Sequence
  derived and/or modified CDS sequence (opt4) from neuraminidase__InfluenzaA__ADG42676
augaaccccaaccagaagaucaucaccaucggcagcgugugcaugaccaucggcauggccaaccugauccugcagaucggcaacaucaucagcaucuggaucagccacagcauccagcugggcaaccagaaccagaucgagaucugcaaccagagcgugaucaccuacgagaacaacaccugggugaaccagaccuacgugaacaucagcaacaccaacuucgccgccggccagagcguggugagcgugaagcuggccggcaacagcagccugugccccgugagcggcugggccaucuacagcaaggacaacagcaucagaaucggcagcaagggcgacguguucgugaucagagagcccuucaucagcugcagcccccuggagugcagaaccuucuuccugacccagggcgcccugcugaacgacaagcacagcaacggcaccaucaaggacagaagccccuacagaacccugaugagcugccccaucggcgaggugcccagccccuacaacagcagauucgagagcguggccuggagcgccagcgccugccacgacggcaucaacuggcugaccaucggcaucagcggccccgacaacggcgccguggccgugcugaaguacaacggcaucaucaccgacaccaucaagagcuggagaaacaacauccugagaacccaggagagcgagugcgccugcgugaacggcagcugcuucaccgugaugaccgacggccccagcgacggccaggccagcuacaagaucuucagaaucgagaagggcaagaucgugaagagcguggagaugaacgcccccaacuaccacuacgaggagugcagcugcuaccccgacagcagcgagaucaccugcgugugcagagacaacuggcacggcagcaacagacccugggugagcuucaaccagaaccuggaguaccagaucggcuacaucugcagcggcaucuucggcgacaaccccagacccaacgacaagaccggcagcugcggccccgugagcagcaacggcgccaacggcgugaagggcuucagcuucaaguacggcaacggcguguggaucggcagaaccaagagcaucagcagcagaaacggcuucgagaugaucugggaccccaacggcuggaccggcaccgacaacaacuucagcaucaagcaggacaucgugggcaucaacgaguggagcggcuacagcggcagcuucgugcagcaccccgagcugaccggccuggacugcaucagacccugcuucuggguggagcugaucagaggcagacccaaggagaacaccaucuggaccagcggcagcagcaucagcuucugcggcgugaacagcgacaccgugggcuggagcuggcccgacggcgccgagcugcccuucaccaucgacaaguga

SEQ ID NO: 178799 - RNA, 1410 nt, Artificial Sequence; identical to SEQ ID NO: 176798
  derived and/or modified CDS sequence (opt4) from neuraminidase__InfluenzaA__ADG42686

SEQ ID NO: 178800 - RNA, 1410 nt, Artificial Sequence; identical to SEQ ID NO: 178375
  derived and/or modified CDS sequence (opt4) from neuraminidase__InfluenzaA__ADG42696

SEQ ID NO: 178801 - RNA, 1410 nt, Artificial Sequence; identical to SEQ ID NO: 178579
  derived and/or modified CDS sequence (opt4) from neuraminidase__InfluenzaA__ADG42706

SEQ ID NO: 178802 - RNA, 1410 nt, Artificial Sequence; identical to SEQ ID NO: 176798
  derived and/or modified CDS sequence (opt4) from neuraminidase__InfluenzaA__ADG42716

SEQ ID NO: 178803 - RNA, 1410 nt, Artificial Sequence; identical to SEQ ID NO: 178086
  derived and/or modified CDS sequence (opt4) from neuraminidase__InfluenzaA__ADG42726

SEQ ID NO: 178804 - RNA, 1410 nt, Artificial Sequence; identical to SEQ ID NO: 177381
  derived and/or modified CDS sequence (opt4) from neuraminidase__InfluenzaA__ADG42746

SEQ ID NO: 178805 - RNA, 1410 nt, Artificial Sequence; identical to SEQ ID NO: 178311
  derived and/or modified CDS sequence (opt4) from neuraminidase__InfluenzaA__ADG42756

SEQ ID NO: 178806 - RNA, 1410 nt, Artificial Sequence; identical to SEQ ID NO: 178086
  derived and/or modified CDS sequence (opt4) from neuraminidase__InfluenzaA__ADG42766

SEQ ID NO: 178807 - RNA, 1410 nt, Artificial Sequence; identical to SEQ ID NO: 178086
  derived and/or modified CDS sequence (opt4) from neuraminidase__InfluenzaA__ADG42776

SEQ ID NO: 178808 - RNA, 1410 nt, Artificial Sequence; identical to SEQ ID NO: 178086
  derived and/or modified CDS sequence (opt4) from neuraminidase__InfluenzaA__ADG42796

SEQ ID NO: 178809 - RNA, 1410 nt, Artificial Sequence
  derived and/or modified CDS sequence (opt4) from neuraminidase__InfluenzaA__ADG42806
augaaccccaaccagaagaucaucaccaucggcagcgugugcaugaccaucggcauggccaaccugauccugcagaucggcaacaucaucagcaucuggaucagccacagcauccagcugggcaaccagaaccagaucgagaccugcaaccagagcgugaucaccuacgagaacaacaccugggugaaccagaccuacgugaacaucagcaacaccaacuucgccgccggccagagcguggugagcgugaagcuggccggcaacagcagccugugccccgugagcggcugggccaucuacagcaaggacaacagcaucagaaucggcagcaagggcgacguguucgugaucagagagcccuucaucagcugcagcccccuggagugcagaaccuucuuccugacccagggcgcccugcugaacgacaagcacagcaacggcaccaucaaggacagaagccccuacagaacccugaugagcugccccaucggcgaggugcccagccccuacaacagcagauucgagagcguggccuggagcgccagcgccugccacgacggcaucaacuggcugaccaucggcaucagcggccccgacaacggcgccguggccgugcugaaguacaacggcaucaucaccgacaccaucaagagcuggagaaacaacauccugagaacccaggagagcgagugcgccugcgugaacggcagcugcuucaccgugaugaccgacggccccagcgacggccaggccagcuacaagaucuucagaaucgagaagggcaagaucgugaagagcguggagaugaacgcccccaacuaccacuacgaggagugcagcugcuaccccgacagcagcgagaucaccugcgugugcagagacaacuggcacggcagcaacagacccugggugagcuucaaccagaaccuggaguaccagaucggcuacaucugcagcggcaucuucggcgacaaccccagacccaacgacaagaccggcagcugcggccccgugagcagcaacggcgccaacggcgugaagggcuucagcuucaaguacggcaacggcguguggaucggcagaaccaagagcaucagcagcagaaacggcuucgagaugaucugggaccccaacggcuggaccggcaccgacaacaacuucagcaucaagcaggacaucgugggcaucaacgaguggagcggcuacagcggcagcuucgugcagcaccccgagcugaccggccuggacugcaucagacccugcuucuggguggagcugaucagaggcagacccaaggagaacaccaucuggaccagcggcagcagcaucagcuucugcggcgugaacagcgacaccgugagcuggagcuggcccgacggcgccgagcugcccuucaccaucgacaaguga

SEQ ID NO: 178810 - RNA, 1410 nt, Artificial Sequence; identical to SEQ ID NO: 176798
  derived and/or modified CDS sequence (opt4) from neuraminidase__InfluenzaA__ADG42816

SEQ ID NO: 178811 - RNA, 1410 nt, Artificial Sequence; identical to SEQ ID NO: 176798
  derived and/or modified CDS sequence (opt4) from neuraminidase__InfluenzaA__ADG42826

SEQ ID NO: 178812 - RNA, 1410 nt, Artificial Sequence; identical to SEQ ID NO: 176798
  derived and/or modified CDS sequence (opt4) from neuraminidase__InfluenzaA__ADG42836

SEQ ID NO: 178813 - RNA, 1410 nt, Artificial Sequence; identical to SEQ ID NO: 178414
  derived and/or modified CDS sequence (opt4) from neuraminidase__InfluenzaA__ADG42846

SEQ ID NO: 178814 - RNA, 1410 nt, Artificial Sequence; identical to SEQ ID NO: 176798
  derived and/or modified CDS sequence (opt4) from neuraminidase__InfluenzaA__ADG42856

SEQ ID NO: 178815 - RNA, 1410 nt, Artificial Sequence; identical to SEQ ID NO: 178410
  derived and/or modified CDS sequence (opt4) from neuraminidase__InfluenzaA__ADG42866

SEQ ID NO: 178816 - RNA, 1410 nt, Artificial Sequence; identical to SEQ ID NO: 176798
  derived and/or modified CDS sequence (opt4) from neuraminidase__InfluenzaA__ADG42876

SEQ ID NO: 178817 - RNA, 1410 nt, Artificial Sequence; identical to SEQ ID NO: 178447
  derived and/or modified CDS sequence (opt4) from neuraminidase__InfluenzaA__ADG42886

SEQ ID NO: 178818 - RNA, 1410 nt, Artificial Sequence; identical to SEQ ID NO: 178390
  derived and/or modified CDS sequence (opt4) from neuraminidase__InfluenzaA__ADG42896

SEQ ID NO: 178819 - RNA, 1410 nt, Artificial Sequence; identical to SEQ ID NO: 178390
  derived and/or modified CDS sequence (opt4) from neuraminidase__InfluenzaA__ADG42906

SEQ ID NO: 178820 - RNA, 1410 nt, Artificial Sequence; identical to SEQ ID NO: 176798
  derived and/or modified CDS sequence (opt4) from neuraminidase__InfluenzaA__ADG42916

SEQ ID NO: 178821 - RNA, 1410 nt, Artificial Sequence; identical to SEQ ID NO: 176798
  derived and/or modified CDS sequence (opt4) from neuraminidase__InfluenzaA__ADG42926

SEQ ID NO: 178822 - RNA, 1410 nt, Artificial Sequence; identical to SEQ ID NO: 176798
  derived and/or modified CDS sequence (opt4) from neuraminidase__InfluenzaA__ADG58909

SEQ ID NO: 178823 - RNA, 1410 nt, Artificial Sequence; identical to SEQ ID NO: 176798
  derived and/or modified CDS sequence (opt4) from neuraminidase__InfluenzaA__ADG58910

SEQ ID NO: 178824 - RNA, 1410 nt, Artificial Sequence
  derived and/or modified CDS sequence (opt4) from neuraminidase__InfluenzaA__ADG58913
augaaccccaaccagaagaucaucaccaucggcagcgugugcaugaccaucggcauggccaaccugauccugcagaucggcaacaucaucagcaucuggaucagccacagcauccagcugggcaaccagaaccagaucgagaccugcaaccagagcgugaucaccuacgagaacaacaccugggugaaccagaccuacgugaacaucagcaacaccaacuucgccgccggccagagcguggugagcgugaagcuggccggcaacagcagccugugccccgugagcggcugggccaucuacagcaaggacaacagcaucagaaucggcagcaagggcgacguguucgugaucagagagcccuucaucagcugcagcccccuggagugcagaaccuucuuccugacccagggcgcccugcugaacgacaagcacagcaacggcaccaucaaggacagaagccccuacagaacccugaugagcugccccaucggcgaggugcccagccccuacaacagcagauucgagagcguggccuggagcgccagcgccugccacgacggcaucaacuggcugaccaucggcaucagcggccccgacaacggcgccguggccgugcugaaguacaacggcaucaucaccgacaccaucaagagcuggagaaacaacauccugagaacccaggagagcgagugcgccugcgugaacggcagcugcuucaccgugaugaccgacggccccagcgacggccaggccagcuacaagaucuucagaaucgagaagggcaagaucgugaagagcguggagaugaacgcccccaacuaccacuacgaggagugcagcugcuaccccgacagcagcgagaucaccugcgugugcagagacaacuggcacggcagcaacagacccugggugaccuucaaccagaaccuggaguaccagaucggcuacaucugcagcggcaucuucggcgacaaccccagacccaacgacaagaccggcagcugcggccccgugagcagcaacggcgccaacggcgugaagggcuucagcuucaaguacggcaacggcguguggaucggcagaaccaagagcaucagcagcagaaacggcuucgagaugaucugggaccccaacggcuggaccggcaccgacaacaacuucagcaucaagcaggacaucgugggcaucaacgaguggagcggcuacagcggcagcuucgugcagcaccccgagcugaccggccuggacugcaucagacccugcuucuggaucgagcugaucagaggcagacccaaggagaacaccaucuggaccagcggcagcagcaucagcuucugcggcgugaacagcgacaccgugggcuggagcuggcccgacggcgccgagcugcccuucaccaucgacaaguga

SEQ ID NO: 178825 - RNA, 1410 nt, Artificial Sequence; identical to SEQ ID NO: 176798
  derived and/or modified CDS sequence (opt4) from neuraminidase__InfluenzaA__ADG58914

SEQ ID NO: 178826 - RNA, 1410 nt, Artificial Sequence; identical to SEQ ID NO: 176798
  derived and/or modified CDS sequence (opt4) from neuraminidase__InfluenzaA__ADG58916

SEQ ID NO: 178827 - RNA, 1410 nt, Artificial Sequence; identical to SEQ ID NO: 176798
  derived and/or modified CDS sequence (opt4) from neuraminidase__InfluenzaA__ADG58917

SEQ ID NO: 178828 - RNA, 1410 nt, Artificial Sequence
  derived and/or modified CDS sequence (opt4) from neuraminidase__InfluenzaA__ADG58918
augaaccccaaccagaagaucaucaccaucggcagcgugugcaugaccaucggcauggccaaccugauccugcagaucggcaacaucaucagcaucuggaucagccacagcauccagcugggcaaccagaaccagaucgagaccugcaaccagagcgugaucaccuacgagaacaacaccugggugaaccagaccuacgugaacaucagcaacaccaacuucgccgccggccagagcguggugagcgugaagcuggccggcaacagcagccugugccccgugagcggcugggccaucuacagcaaggacaacagcaucagaaucggcagcaagggcgacguguucgugaucagagagcccuucaucagcugcagcccccuggagugcagaaccuucuuccugacccagggcgcccugcugaacgacaagcacagcaacggcaccaucaaggacagaagccccuacagaacccugaugagcugccccaucggcgaggugcccagccccuacaacagcagauucgagagcguggccuggagcgccagcgccugccacgacggcaucaacuggcugaccaucggcaucagcggccccgacaacggcgccguggccgugcugaaguacaacggcaucaucaccgacaccaucaagagcuggagaaacaacauccugagaacccaggagagcgagugcgccugcgugaacggcagcugcuucaccgugaugaccgacggccccagcgacggccaggccagcuacaagaucuucagaaucgagaagggcaagaucgugaagagcguggagaugaacgcccccaacuaccacuacgaggagugcagcugcuaccccgacagcagcgagaucaccugcgugugcagagacaacuggcacggcagcaacagacccugggugaccuucaaccagaaccuggaguaccagaucggcuacaucugcagcggcaucuucggcgacaaccccagacccaacgacaagaccggcagcugcggccccgugagcagcaacggcgccaacggcgugaagggcuucagcuucaaguacggcaacggcguguggaucggcagaaccaagagcaucagcagcagaaacggcuucgagaugaucugggaccccaacggcuggaccggcaccgacaacaacuucagcaucaagcaggacaucgugggcaucaacgaguggagcggcuacagcggcagcuucgugcagcaccccgagcugaccggccuggacugcaucagacccugcuucuggguggagcugaucagaggcagacccaaggagaacaccaucuggaccagcggcagcagcaucagcuucugcggcgugaacagcgacaccgugggcuggagcuggcccgacggcgccgagcugcccuucaccaucgacaaguga

SEQ ID NO: 178829 - RNA, 1410 nt, Artificial Sequence; identical to SEQ ID NO: 178824
  derived and/or modified CDS sequence (opt4) from neuraminidase__InfluenzaA__ADG58919

SEQ ID NO: 178830 - RNA, 1410 nt, Artificial Sequence; identical to SEQ ID NO: 176953
  derived and/or modified CDS sequence (opt4) from neuraminidase__InfluenzaA__ADG58920

SEQ ID NO: 178831 - RNA, 1410 nt, Artificial Sequence; identical to SEQ ID NO: 176953
  derived and/or modified CDS sequence (opt4) from neuraminidase__InfluenzaA__ADG58921

SEQ ID NO: 178832 - RNA, 1410 nt, Artificial Sequence; identical to SEQ ID NO: 176953
  derived and/or modified CDS sequence (opt4) from neuraminidase__InfluenzaA__ADG58922

SEQ ID NO: 178833 - RNA, 1410 nt, Artificial Sequence; identical to SEQ ID NO: 176953
  derived and/or modified CDS sequence (opt4) from neuraminidase__InfluenzaA__ADG58923

SEQ ID NO: 178834 - RNA, 1410 nt, Artificial Sequence; identical to SEQ ID NO: 176953
  derived and/or modified CDS sequence (opt4) from neuraminidase__InfluenzaA__ADG58924

SEQ ID NO: 178835 - RNA, 1410 nt, Artificial Sequence; identical to SEQ ID NO: 176953
  derived and/or modified CDS sequence (opt4) from neuraminidase__InfluenzaA__ADG58925

SEQ ID NO: 178836 - RNA, 1410 nt, Artificial Sequence; identical to SEQ ID NO: 176953
  derived and/or modified CDS sequence (opt4) from neuraminidase__InfluenzaA__ADG58926

SEQ ID NO: 178837 - RNA, 1410 nt, Artificial Sequence; identical to SEQ ID NO: 176953
  derived and/or modified CDS sequence (opt4) from neuraminidase__InfluenzaA__ADG58927

SEQ ID NO: 178838 - RNA, 1410 nt, Artificial Sequence; identical to SEQ ID NO: 177816
  derived and/or modified CDS sequence (opt4) from neuraminidase__InfluenzaA__ADG58928

SEQ ID NO: 178839 - RNA, 1410 nt, Artificial Sequence; identical to SEQ ID NO: 177816
  derived and/or modified CDS sequence (opt4) from neuraminidase__InfluenzaA__ADG58929

SEQ ID NO: 178840 - RNA, 1410 nt, Artificial Sequence
  derived and/or modified CDS sequence (opt4) from neuraminidase__InfluenzaA__ADG58931
augaaccccaaccagaagaucaucaccaucggcagcgugugcaugaccaucggcauggccaaccugauccugcagaucggcaacaccaucagcaucuggaucaaccacagcauccagcugggcaaccagaaccagaucgagaccugcaaccagagcgugaucaccuacgagaacaacaccugggugaaccagaccuacgugaacaucagcaacaccaacuucgccgccggccagagcguggugagcgugaagcuggccggcaacagcagccugugccccgugagcggcugggccaucuacagcaaggacaacagcaucagaaucggcagcaagggcgacguguucgugaucagagagcccuucaucagcugcagcccccuggagugcagaaccuucuuccugacccagggcgcccugcugaacgacaagcacagcaacggcaccaucaaggacagaagccccuacagaacccugaugagcugccccaucggcgaggugcccagccccuacaacagcagauucgagagcguggccuggagcgccagcgccugccacgacggcaucaacuggcugaccaucggcaucagcggccccgacaacggcgccguggccgugcugaaguacaacggcaucaucaccgacaccaucaagagcuggagaaacaacauccugagaacccaggagagcgagugcgccugcgugaacggcagcugcuucaccgugaugaccgacggccccagcgacggccaggccagcuacaagaucuucagaaucgagaagggcaagaucgugaagagcguggagaugaacgcccccaacuaccacuacgaggagugcagcugcuaccccgacagcagcgagaucaccugcgugugcagagacaacuggcacggcagcaacagacccugggugagcuucaaccagaaccuggaguaccagaucggcuacaucugcagcggcaucuucggcgacaaccccagacccaacgacaagaccggcagcugcggccccgugagcagcaacggcgccaacggcgugaagggcuucagcuucaaguacggcaacggcguguggaucggcagaaccaagagcaucagcagcagaaacggcuucgagaugaucugggaccccaacggcuggaccggcaccgacaacaacuucagcaucaagcaggacaucgugggcaucaacgaguggagcggcuacagcggcagcuucgugcagcaccccgagcugaccggccuggacugcaucagacccugcuucuggguggagcugaucagaggcagacccaaggagaacaccaucuggaccagcggcagcagcaucagcuucugcggcgugaacagcgacaccgugggcuggagcuggcccgacggcgccgagcugcccuucaccaucgacaaguga

SEQ ID NO: 178841 - RNA, 1410 nt, Artificial Sequence; identical to SEQ ID NO: 178840
  derived and/or modified CDS sequence (opt4) from neuraminidase__InfluenzaA__ADG58932

SEQ ID NO: 178842 - RNA, 1410 nt, Artificial Sequence; identical to SEQ ID NO: 178840
  derived and/or modified CDS sequence (opt4) from neuraminidase__InfluenzaA__ADG58933

SEQ ID NO: 178843 - RNA, 1410 nt, Artificial Sequence; identical to SEQ ID NO: 178840
  derived and/or modified CDS sequence (opt4) from neuraminidase__InfluenzaA__ADG58934

SEQ ID NO: 178844 - RNA, 1410 nt, Artificial Sequence; identical to SEQ ID NO: 178840
  derived and/or modified CDS sequence (opt4) from neuraminidase__InfluenzaA__ADG58935

SEQ ID NO: 178845 - RNA, 1410 nt, Artificial Sequence; identical to SEQ ID NO: 178840
  derived and/or modified CDS sequence (opt4) from neuraminidase__InfluenzaA__ADG58936

SEQ ID NO: 178846 - RNA, 1410 nt, Artificial Sequence; identical to SEQ ID NO: 178840
  derived and/or modified CDS sequence (opt4) from neuraminidase__InfluenzaA__ADG58937

SEQ ID NO: 178847 - RNA, 1410 nt, Artificial Sequence; identical to SEQ ID NO: 178840
  derived and/or modified CDS sequence (opt4) from neuraminidase__InfluenzaA__ADG58938

SEQ ID NO: 178848 - RNA, 1410 nt, Artificial Sequence
  derived and/or modified CDS sequence (opt4) from neuraminidase__InfluenzaA__ADG59589
augaaccccaaccagaagaucaucaccaucggcagcgugugcaugaccaucggcauggccaaccugauccugcagaucggcaacaucaucagcaucuggaucagccacagcauccagcugggcaaccagaaccagaucgagaccugcaaccagagcgugaucaccuacgagaacaacaccugggugaaccagaccuacgugaacaucagcaacaccaacuucgccgccggccagagcguggugagcgugaagcuggccggcaacagcagccugugccccgugagcggcugggccaucuacagcaaggacaacagcaucagaaucggcagcaagggcgacguguucgugaucagagagcccuucaucagcugcagcccccuggagugcagaaccuucuuccugacccagggcgcccugcugaacgacaagcacagcaacggcaccaucaaggacagaagccccuacagaacccugaugagcugccccaucggcgaggugcccagccccuacaacagcagauucgagagcguggccuggagcgccagcgccugccacgacggcaucaacuggcugaccaucggcaucagcggccccgacaacggcgccauggccgugcugaaguacaacggcaucaucaccgacaccaucaagagcuggagaaacaacauccugagaacccaggagagcgagugcgccugcgugaacggcagcugcuucaccgugaugaccgacggccccagcgacggccaggccagcuacaagaucuucagaaucgagaagggcaagguggugaagagcguggagaugaacgcccccaacuaccacuacgaggagugcagcugcuaccccgacagcagcgagaucaccugcgugugcagagacaacuggcacggcagcaacagacccugggugagcuucaaccagaaccuggaguaccagaucggcuacaucugcagcggcaucuucggcgacaaccccagacccaacgacaagaccggcagcugcggccccgugagcagcaacggcgccaacggcgugaagggcuucagcuucaaguacggcaacggcguguggaucggcagaaccaagagcaucagcagcagaaacggcuucgagaugaucugggaccccaacggcuggaccggcaccgacaacaacuucagcaucaagcaggacaucgugggcaucaacgaguggagcggcuacagcggcagcuucgugcagcaccccgagcugaccggccuggacugcaucagacccugcuucuggguggagcugaucagaggcagacccaaggagaacaccaucuggaccagcggcagcagcaucagcuucugcggcgugaacagcgacaccgugggcuggagcuggcccgacggcgccgagcugcccuucaccaucgacaaguga

SEQ ID NO: 178849 - RNA, 1410 nt, Artificial Sequence; identical to SEQ ID NO: 176798
  derived and/or modified CDS sequence (opt4) from neuraminidase__InfluenzaA__ADG59590

SEQ ID NO: 178850 - RNA, 1410 nt, Artificial Sequence; identical to SEQ ID NO: 176798
  derived and/or modified CDS sequence (opt4) from neuraminidase__InfluenzaA__ADG59591

SEQ ID NO: 178851 - RNA, 1410 nt, Artificial Sequence; identical to SEQ ID NO: 176798
  derived and/or modified CDS sequence (opt4) from neuraminidase__InfluenzaA__ADG59592

SEQ ID NO: 178852 - RNA, 1410 nt, Artificial Sequence; identical to SEQ ID NO: 178700
  derived and/or modified CDS sequence (opt4) from neuraminidase__InfluenzaA__ADG59593

SEQ ID NO: 178853 - RNA, 1410 nt, Artificial Sequence; identical to SEQ ID NO: 177975
  derived and/or modified CDS sequence (opt4) from neuraminidase__InfluenzaA__ADG59594

SEQ ID NO: 178854 - RNA, 1410 nt, Artificial Sequence; identical to SEQ ID NO: 177975
  derived and/or modified CDS sequence (opt4) from neuraminidase__InfluenzaA__ADG59595

SEQ ID NO: 178855 - RNA, 1410 nt, Artificial Sequence
  derived and/or modified CDS sequence (opt4) from neuraminidase__InfluenzaA__ADG59596
augaaccccaaccagaagaucaucaccaucggcagcgugugcaugaccaucggcauggccaaccugauccugcagaucggcaacaucaucagcaucuggaucagccacagcauccagcugggcaaccagaaccagaucgagaccugcaaccagagcgugaucaccuacgagaacaacaccugggugaaccagaccuacgugaacaucagcaacaccaacuucgccgccggccagagcguggugagcgugaagcuggccggcaacagcagccugugccccgugagcggcugggccaucuacagcaaggacaacagcaucagaaucggcagcaagggcgacguguucgugaucagagagcccuucaucagcugcagcccccuggagugcagaaccuucuuccugacccagggcgcccugcugaacgacaagcacagcaacggcaccaucaaggacagaagccccuacagaacccugaugagcugccccaucggcgaggugcccagccccuacaacagcagauucgagagcguggccuggagcgccagcgccugccacgacggcaucaacuggcugaccaucggcaucagcggccccgacaacggcgccguggccgugcugaaguacaacggcaucaucaccgacaccaucaagagcuggagaaacaacauccugagaacccaggagagcgagugcgccugcgugaacggcagcugcuucaccgugaugaccgacggccccagcgacggccaggccagcuacaagaucuucagaaucgagaagggcaagaucgugaagagcguggagaugaacgcccccaacuaccacuacgaggagugcagcugcuaccccgacagcagcgagaucaccugcgugugcagagacaacuggcacggcagcaacagacccugggugagcuucaaccagaaccuggaguaccagaucggcuacaucugcagcggcaucuucggcgacaaccccagacccaacgacagaaccggcagcugcggccccgugagcagcaacggcgccaacggcgugaagggcuucagcuucaaguacggcaacggcguguggaucggcagaaccaagagcaucagcagcagaaacggcuucgagaugaucugggaccccaacggcuggaccggcaccgacaacaacuucagcaucaagcaggacaucgugggcaucaacgaguggagcggcuacagcggcagcuucgugcagcaccccgagcugaccggccuggacugcaucagacccugcuucuggguggagcugaucagaggcagacccaaggagaacaccaucuggaccagcggcagcagcaucagcuucugcggcgugaacagcgacaccgugggcuggagcuggcccgacggcgccgagcugcccuucaccaucgacaaguga

SEQ ID NO: 178856 - RNA, 1410 nt, Artificial Sequence; identical to SEQ ID NO: 176798
  derived and/or modified CDS sequence (opt4) from neuraminidase__InfluenzaA__ADG59597

SEQ ID NO: 178857 - RNA, 1410 nt, Artificial Sequence; identical to SEQ ID NO: 176798
  derived and/or modified CDS sequence (opt4) from neuraminidase__InfluenzaA__ADG59598

SEQ ID NO: 178858 - RNA, 1410 nt, Artificial Sequence; identical to SEQ ID NO: 177973
  derived and/or modified CDS sequence (opt4) from neuraminidase__InfluenzaA__ADG59599

SEQ ID NO: 178859 - RNA, 1410 nt, Artificial Sequence; identical to SEQ ID NO: 176798
  derived and/or modified CDS sequence (opt4) from neuraminidase__InfluenzaA__ADG59601

SEQ ID NO: 178860 - RNA, 1410 nt, Artificial Sequence; identical to SEQ ID NO: 178700
  derived and/or modified CDS sequence (opt4) from neuraminidase__InfluenzaA__ADG59602

SEQ ID NO: 178861 - RNA, 1410 nt, Artificial Sequence; identical to SEQ ID NO: 178700
  derived and/or modified CDS sequence (opt4) from neuraminidase__InfluenzaA__ADG59603

SEQ ID NO: 178862 - RNA, 1410 nt, Artificial Sequence; identical to SEQ ID NO: 176798
  derived and/or modified CDS sequence (opt4) from neuraminidase__InfluenzaA__ADG59604

SEQ ID NO: 178863 - RNA, 1410 nt, Artificial Sequence; identical to SEQ ID NO: 176798
  derived and/or modified CDS sequence (opt4) from neuraminidase__InfluenzaA__ADG59605

SEQ ID NO: 178864 - RNA, 1410 nt, Artificial Sequence; identical to SEQ ID NO: 177816
  derived and/or modified CDS sequence (opt4) from neuraminidase__InfluenzaA__ADG59606

SEQ ID NO: 178865 - RNA, 1410 nt, Artificial Sequence; identical to SEQ ID NO: 176798
  derived and/or modified CDS sequence (opt4) from neuraminidase__InfluenzaA__ADG59607

SEQ ID NO: 178866 - RNA, 1410 nt, Artificial Sequence; identical to SEQ ID NO: 176798
  derived and/or modified CDS sequence (opt4) from neuraminidase__InfluenzaA__ADG59608

SEQ ID NO: 178867 - RNA, 1410 nt, Artificial Sequence; identical to SEQ ID NO: 177619
  derived and/or modified CDS sequence (opt4) from neuraminidase__InfluenzaA__ADG59609

SEQ ID NO: 178868 - RNA, 1410 nt, Artificial Sequence; identical to SEQ ID NO: 178700
  derived and/or modified CDS sequence (opt4) from neuraminidase__InfluenzaA__ADG59610

SEQ ID NO: 178869 - RNA, 1410 nt, Artificial Sequence; identical to SEQ ID NO: 177816
  derived and/or modified CDS sequence (opt4) from neuraminidase__InfluenzaA__ADG59611

SEQ ID NO: 178870 - RNA, 1410 nt, Artificial Sequence; identical to SEQ ID NO: 178700
  derived and/or modified CDS sequence (opt4) from neuraminidase__InfluenzaA__ADG59612

SEQ ID NO: 178871 - RNA, 1410 nt, Artificial Sequence
  derived and/or modified CDS sequence (opt4) from neuraminidase__InfluenzaA__ADG59613
augaaccccaaccagaagaucaucaccaucggcagcgugugcaugaccaucggcaugaccaaccugauccugcagcugggcaacaucaucagcaucuggaucagccacagcauccagcugggcaaccagaaccagaucgagaccugcaaccagagcgugaucaccuacgagaacaacaccugggugaaccagaccuacgugaacaucagcaacaccaacuucgccgccggccagagcguggugagcgugaagcuggccggcaacagcagccugugccccgugagcggcugggccaucuacagcaaggacaacagcaucagaaucggcagcaagggcgacguguucgugaucagagagcccuucaucagcugcagcccccuggagugcagaaccuucuuccugacccagggcgcccugcugaacgacaagcacagcaacggcaccaucaaggacagaagccccuacagaacccugaugagcugccccaucggcgaggugcccagccccuacaacagcagauucgagagcguggccuggagcgccagcgccugccacgacggcaucaacuggcugaccaucggcaucagcggccccgacaacggcgccguggccgugcugaaguacaacggcaucaucaccgacaccaucaagagcuggagaaacaacauccugagaacccaggagagcgagugcgccugcgugaacggcagcugcuucaccgugaugaccgacggccccagcgacggccaggccagcuacaagaucuucagaaucgagaagggcaagaucgugaagagcguggagaugaacgcccccaacuaccacuacgaggagugcagcugcuaccccgacagcagcgagaucaccugcgugugcagagacaacuggcacggcagcaacagacccugggugagcuucaaccagaaccuggaguaccagaucggcuacaucugcagcggcaucuucggcgacaaccccagacccaacgacaagaccggcagcugcggccccgugagcagcaacggcgccaacggcgugaagggcuucagcuucaaguacggcaacggcguguggaucggcagaaccaagagcaucagcagcagaaacggcuucgagaugaucugggaccccaacggcuggaccggcaccgacaacagcuucagcaucaagcaggacaucgugggcaucaacgaguggagcggcuacagcggcagcuucgugcagcaccccgagcugaccggccuggacugcaucagacccugcuucuggguggagcugaucagaggcagacccaaggagaacaccguguggaccagcggcagcagcaucagcuucugcggcgugaacagcgacaccgugggcuggagcuggcccgacggcgccgagcugcccuucaccaucgacaaguga

SEQ ID NO: 178872 - RNA, 1410 nt, Artificial Sequence; identical to SEQ ID NO: 177973
  derived and/or modified CDS sequence (opt4) from neuraminidase__InfluenzaA__ADG59614

SEQ ID NO: 178873 - RNA, 1410 nt, Artificial Sequence; identical to SEQ ID NO: 176798
  derived and/or modified CDS sequence (opt4) from neuraminidase__InfluenzaA__ADH01811

SEQ ID NO: 178874 - RNA, 1410 nt, Artificial Sequence; identical to SEQ ID NO: 176798
  derived and/or modified CDS sequence (opt4) from neuraminidase__InfluenzaA__ADH01821

SEQ ID NO: 178875 - RNA, 1410 nt, Artificial Sequence; identical to SEQ ID NO: 176798
  derived and/or modified CDS sequence (opt4) from neuraminidase__InfluenzaA__ADH01831

SEQ ID NO: 178876 - RNA, 1410 nt, Artificial Sequence; identical to SEQ ID NO: 176798
  derived and/or modified CDS sequence (opt4) from neuraminidase__InfluenzaA__ADH01841

SEQ ID NO: 178877 - RNA, 1410 nt, Artificial Sequence; identical to SEQ ID NO: 176798
  derived and/or modified CDS sequence (opt4) from neuraminidase__InfluenzaA__ADH01851

SEQ ID NO: 178878 - RNA, 1410 nt, Artificial Sequence; identical to SEQ ID NO: 176798
  derived and/or modified CDS sequence (opt4) from neuraminidase__InfluenzaA__ADH01861

SEQ ID NO: 178879 - RNA, 1410 nt, Artificial Sequence; identical to SEQ ID NO: 176798
  derived and/or modified CDS sequence (opt4) from neuraminidase__InfluenzaA__ADH01871

SEQ ID NO: 178880 - RNA, 1410 nt, Artificial Sequence; identical to SEQ ID NO: 176798
  derived and/or modified CDS sequence (opt4) from neuraminidase__InfluenzaA__ADH01881

SEQ ID NO: 178881 - RNA, 1410 nt, Artificial Sequence; identical to SEQ ID NO: 176798
  derived and/or modified CDS sequence (opt4) from neuraminidase__InfluenzaA__ADH01891

SEQ ID NO: 178882 - RNA, 1410 nt, Artificial Sequence; identical to SEQ ID NO: 176798
  derived and/or modified CDS sequence (opt4) from neuraminidase__InfluenzaA__ADH01901

SEQ ID NO: 178883 - RNA, 1410 nt, Artificial Sequence; identical to SEQ ID NO: 176798
  derived and/or modified CDS sequence (opt4) from neuraminidase__InfluenzaA__ADH01911

SEQ ID NO: 178884 - RNA, 1410 nt, Artificial Sequence; identical to SEQ ID NO: 176798
  derived and/or modified CDS sequence (opt4) from neuraminidase__InfluenzaA__ADH01921

SEQ ID NO: 178885 - RNA, 1410 nt, Artificial Sequence; identical to SEQ ID NO: 176798
  derived and/or modified CDS sequence (opt4) from neuraminidase__InfluenzaA__ADH01931

SEQ ID NO: 178886 - RNA, 1410 nt, Artificial Sequence; identical to SEQ ID NO: 178689
  derived and/or modified CDS sequence (opt4) from neuraminidase__InfluenzaA__ADH01941

SEQ ID NO: 178887 - RNA, 1410 nt, Artificial Sequence; identical to SEQ ID NO: 176798
  derived and/or modified CDS sequence (opt4) from neuraminidase__InfluenzaA__ADH01951

SEQ ID NO: 178888 - RNA, 1410 nt, Artificial Sequence; identical to SEQ ID NO: 176798
  derived and/or modified CDS sequence (opt4) from neuraminidase__InfluenzaA__ADH01961

SEQ ID NO: 178889 - RNA, 1410 nt, Artificial Sequence
  derived and/or modified CDS sequence (opt4) from neuraminidase__InfluenzaA__ADH01981
augaaccccaaccagaagaucaucaccaucggcagcgccugcaugaccaucggcauggccaaccugauccugcagaucggcaacaucaucagcaucuggaucagccacagcauccagcugggcaaccagaaccagaccgagaccugcaaccagagcgugaucaccuacgagaacaacaccugggugaaccagaccuacgugaacaucagcaacaccaacuucgccgccggccagagcguggugagcgugaagcuggccggcaacagcagccugugccccgugagcggcugggccaucuacagcaaggacaacagcaucagaaucggcagcaagggcgacguguucgugaucagagagcccuucaucagcugcagcccccuggagugcagaaccuucuuccugacccagggcgcccugcugaacgacaagcacagcaacggcaccaucaaggacagaagccccuacagaacccugaugagcugccccaucggcgaggugcccagccccuacaacagcagauucgagagcguggccuggagcgccagcgccugccacgacggcaucaacuggcugaccaucggcaucagcggccccgacaacggcgccguggccgugcugaaguacaacggcaucaucaccgacaccaucaagagcuggagaaacaacauccugagaacccaggagagcgagugcgccugcgugaacggcagcugcuucaccgugaugaccgacggccccagcgacggccaggccagcuacaagaucuucagaaucgagaagggcaagaucgugaagagcguggagaugaacgcccccaacuaccacuacgaggagugcagcugcuaccccgacagcagcgagaucaccugcgugugcagagacaacuggcacggcagcaacagacccugggugagcuucaaccagaaccuggaguaccagaucggcuacaucugcagcggcaucuucggcgacaaccccagacccaacgacaagaccggcagcugcggccccgugagcagcaacggcgccaacggcgugaagggcuucagcuucaaguacggcaacggcguguggaucggcagaaccaagagcaucagcagcagaaacggcuucgagaugaucugggaccccaacggcuggaccggcaccgacaacaacuucagcaucaagcaggacaucgugggcaucaacgaguggagcggcuacagcggcagcuucgugcagcaccccgagcugaccggccuggacugcaucagacccugcuucuggguggagcugaucagaggcagacccaaggagaacaccaucuggaccagcggcagcagcaucagcuucugcggcgugaacagcgacaccgugggcuggagcuggcccgacggcgccgagcugcccuucaccaucgacaaguga

SEQ ID NO: 178890 - RNA, 1410 nt, Artificial Sequence; identical to SEQ ID NO: 178086
  derived and/or modified CDS sequence (opt4) from neuraminidase__InfluenzaA__ADH01991

SEQ ID NO: 178891 - RNA, 1410 nt, Artificial Sequence; identical to SEQ ID NO: 178755
  derived and/or modified CDS sequence (opt4) from neuraminidase__InfluenzaA__ADH02011

SEQ ID NO: 178892 - RNA, 1410 nt, Artificial Sequence; identical to SEQ ID NO: 177975
  derived and/or modified CDS sequence (opt4) from neuraminidase__InfluenzaA__ADH02021

SEQ ID NO: 178893 - RNA, 1410 nt, Artificial Sequence; identical to SEQ ID NO: 176798
  derived and/or modified CDS sequence (opt4) from neuraminidase__InfluenzaA__ADI24510

SEQ ID NO: 178894 - RNA, 1410 nt, Artificial Sequence; identical to SEQ ID NO: 176798
  derived and/or modified CDS sequence (opt4) from neuraminidase__InfluenzaA__ADI24516

SEQ ID NO: 178895 - RNA, 1410 nt, Artificial Sequence; identical to SEQ ID NO: 176798
  derived and/or modified CDS sequence (opt4) from neuraminidase__InfluenzaA__ADI24518

SEQ ID NO: 178896 - RNA, 1410 nt, Artificial Sequence; identical to SEQ ID NO: 176798
  derived and/or modified CDS sequence (opt4) from neuraminidase__InfluenzaA__ADI24522

SEQ ID NO: 178897 - RNA, 1410 nt, Artificial Sequence; identical to SEQ ID NO: 176798
  derived and/or modified CDS sequence (opt4) from neuraminidase__InfluenzaA__ADI24524

SEQ ID NO: 178898 - RNA, 1410 nt, Artificial Sequence; identical to SEQ ID NO: 176798
  derived and/or modified CDS sequence (opt4) from neuraminidase__InfluenzaA__ADI24526

SEQ ID NO: 178899 - RNA, 1410 nt, Artificial Sequence; identical to SEQ ID NO: 176798
  derived and/or modified CDS sequence (opt4) from neuraminidase__InfluenzaA__ADI24528

SEQ ID NO: 178900 - RNA, 1410 nt, Artificial Sequence; identical to SEQ ID NO: 176798
  derived and/or modified CDS sequence (opt4) from neuraminidase__InfluenzaA__ADI24530

SEQ ID NO: 178901 - RNA, 1410 nt, Artificial Sequence
  derived and/or modified CDS sequence (opt4) from neuraminidase__InfluenzaA__ADI24532
augaaccccaaccagaagaucaucaccaucggcagcgugugcaugaccaucggcauggccaaccugauccugcagaucggcaacaucaucagcaucuggaucagccacagcauccagcugggcaaccagaaccagaucgagaccugcaaccagagcgugaucaccuacgagaacaacaccugggugaaccagaccuacgugaacaucagcaacaccaacuucgccgccggccagagcguggugagcgugaagcuggccggcaacagcagccugugccccgugagcggcugggccaucuacagcaaggacaacagcaucagaaucggcagcaagggcgacguguucgugaucagagagcccuucaucagcugcagcccccuggagugcagaaccuucuuccugacccagggcgcccugcugaacgacaagcacagcaacggcaccaucaaggacagaagccccuacagaacccugaugagcugccccaucggcgaggugcccagccccuacaacagcagauucgagagcguggccuggagcgccagcgccugccacgacggcaucaacuggcugaccaucggcaucagcggccccgacaacggcgccguggccgugcugaaguacaacggcaucaucaccgacaccaucaagagcuggagaaacaacauccugagaacccaggagagcgagugcgccugcgugaacggcagcugcuucaccgugaugaccgacggccccagcgacggccaggccagcuacaagaucuucagaaucgagaagggcaagaucgugaagagcguggagaugaacgcccccaacuaccacuacgaggagugcagcugcuaccccgacagcagcgagaucaccugcgugugcagagacaacuggcacggcagcaacagacccugggugagcuucaaccagaaccuggaguaccagaucggcuacaucugcagcggcaucuucggcgacaaccccagacccaacgacaagaccggcagcugcggccccgugagcagcagcggcgccaacggcgugaagggcuucagcuucaaguacggcaacggcguguggaucggcagaaccaagagcaucagcagcagaaacggcuucgagaugaucugggaccccaacggcuggaccggcaccgacaacaacuucagcaucaagcaggacaucgugggcaucaacgaguggagcggcuacagcggcagcuucgugcagcaccccgagcugaccggccuggacugcaucagacccugcuucuggguggagcugaucagaggcagacccaaggagaacaccaucuggaccagcggcagcagcaucagcuucugcggcgugaacagcgacaccgugggcuggagcuggcccgacggcgccgagcugcccuucaccaucgacaaguga

SEQ ID NO: 178902 - RNA, 1410 nt, Artificial Sequence; identical to SEQ ID NO: 176798
  derived and/or modified CDS sequence (opt4) from neuraminidase__InfluenzaA__ADI24538

SEQ ID NO: 178903 - RNA, 1410 nt, Artificial Sequence; identical to SEQ ID NO: 176798
  derived and/or modified CDS sequence (opt4) from neuraminidase__InfluenzaA__ADI24548

SEQ ID NO: 178904 - RNA, 1410 nt, Artificial Sequence; identical to SEQ ID NO: 176798
  derived and/or modified CDS sequence (opt4) from neuraminidase__InfluenzaA__ADI24556

SEQ ID NO: 178905 - RNA, 1410 nt, Artificial Sequence; identical to SEQ ID NO: 176798
  derived and/or modified CDS sequence (opt4) from neuraminidase__InfluenzaA__ADI24558

SEQ ID NO: 178906 - RNA, 1410 nt, Artificial Sequence; identical to SEQ ID NO: 176798
  derived and/or modified CDS sequence (opt4) from neuraminidase__InfluenzaA__ADI24560

SEQ ID NO: 178907 - RNA, 1410 nt, Artificial Sequence; identical to SEQ ID NO: 176798
  derived and/or modified CDS sequence (opt4) from neuraminidase__InfluenzaA__ADI24562

SEQ ID NO: 178908 - RNA, 1410 nt, Artificial Sequence; identical to SEQ ID NO: 176798
  derived and/or modified CDS sequence (opt4) from neuraminidase__InfluenzaA__ADI24564

SEQ ID NO: 178909 - RNA, 1410 nt, Artificial Sequence; identical to SEQ ID NO: 176798
  derived and/or modified CDS sequence (opt4) from neuraminidase__InfluenzaA__ADI24566

SEQ ID NO: 178910 - RNA, 1410 nt, Artificial Sequence; identical to SEQ ID NO: 176798
  derived and/or modified CDS sequence (opt4) from neuraminidase__InfluenzaA__ADI24568

SEQ ID NO: 178911 - RNA, 1410 nt, Artificial Sequence; identical to SEQ ID NO: 176798
  derived and/or modified CDS sequence (opt4) from neuraminidase__InfluenzaA__ADI24570

SEQ ID NO: 178912 - RNA, 1410 nt, Artificial Sequence; identical to SEQ ID NO: 176798
  derived and/or modified CDS sequence (opt4) from neuraminidase__InfluenzaA__ADI24572

SEQ ID NO: 178913 - RNA, 1410 nt, Artificial Sequence; identical to SEQ ID NO: 176798
  derived and/or modified CDS sequence (opt4) from neuraminidase__InfluenzaA__ADI24574

SEQ ID NO: 178914 - RNA, 1410 nt, Artificial Sequence; identical to SEQ ID NO: 176798
  derived and/or modified CDS sequence (opt4) from neuraminidase__InfluenzaA__ADI24576

SEQ ID NO: 178915 - RNA, 1410 nt, Artificial Sequence; identical to SEQ ID NO: 176798
  derived and/or modified CDS sequence (opt4) from neuraminidase__InfluenzaA__ADI24580

SEQ ID NO: 178916 - RNA, 1410 nt, Artificial Sequence; identical to SEQ ID NO: 177973
  derived and/or modified CDS sequence (opt4) from neuraminidase__InfluenzaA__ADI24582

SEQ ID NO: 178917 - RNA, 1410 nt, Artificial Sequence
  derived and/or modified CDS sequence (opt4) from neuraminidase__InfluenzaA__ADI24584
augaaccccaaccagaagaucaucaccaucggcagcgugugcaugaccaucggcauggccaaccugauccugcagaucggcaacaucaucagcaucuggaucagccacagcauccagcugggcaaccagaaccagaucgagaccugcaaccagagcgugaucaccuacgagaacaacaccugggugaaccagaccuacgugaacaucagcaacaccaacuucgccgccggccagagcguggugcccgugaagcuggccggcaacagcagccugugccccgugaacggcugggccaucuacagcaaggacaacagcaucagaaucggcagcaagggcgacguguucgugaucagagagcccuucaucagcugcagcccccuggagugcagaaccuucuuccugacccagggcgcccugcugaacgacaagcacagcaacggcaccaucaaggacagaagccccuacagaacccugaugagcugccccaucggcgaggugcccagccccuacaacagcagauucgagagcguggccuggagcgccagcgccugccacgacggcaucaacuggcugaccaucggcaucagcggccccgacaacggcgccguggccgugcugaaguacaacggcaucaucaccgacaccaucaagagcuggagaaacaacauccugagaacccaggagagcgagugcgccugcgugaacggcagcugcuucaccgugaugaccgacggccccagcgacggccaggccagcuacaagaucuucagaaucgagaagggcaagaucgugaagagcguggagaugaacgcccccaacuaccacuacgaggagugcagcugcuaccccgacagcagcgagaucaccugcgugugcagagacaacuggcacggcagcaacagacccugggugagcuucaaccagaaccuggaguaccagaucggcuacaucugcagcggcaucuucggcgacaaccccagacccaacgacaagaccggcagcugcggccccgugagcagcaacggcgccaacggcgugaagggcuucagcuucaaguacggcaacggcguguggaucggcagaaccaagagcaucagcagcagaaacggcuucgagaugaucugggaccccaacggcuggaccggcaccgacaacaacuucagcaucaagcaggacaucgugggcaucaacgaguggagcggcuacagcggcagcuucgugcagcaccccgagcugaccggccuggacugcaucagacccugcuucuggguggagcugaucagaggcagacccaaggagaacaccaucuggaccagcggcagcagcaucagcuucugcggcgugaacagcgacaccgugggcuggagcuggcccgacggcgccgagcugcccuucaccaucgacaaguga

SEQ ID NO: 178918 - RNA, 1410 nt, Artificial Sequence; identical to SEQ ID NO: 177152
  derived and/or modified CDS sequence (opt4) from neuraminidase__InfluenzaA__ADI24592

SEQ ID NO: 178919 - RNA, 1410 nt, Artificial Sequence; identical to SEQ ID NO: 176798
  derived and/or modified CDS sequence (opt4) from neuraminidase__InfluenzaA__ADI24598

SEQ ID NO: 178920 - RNA, 1410 nt, Artificial Sequence; identical to SEQ ID NO: 176798
  derived and/or modified CDS sequence (opt4) from neuraminidase__InfluenzaA__ADI24604

SEQ ID NO: 178921 - RNA, 1410 nt, Artificial Sequence; identical to SEQ ID NO: 176798
  derived and/or modified CDS sequence (opt4) from neuraminidase__InfluenzaA__ADI24620

SEQ ID NO: 178922 - RNA, 1410 nt, Artificial Sequence; identical to SEQ ID NO: 176798
  derived and/or modified CDS sequence (opt4) from neuraminidase__InfluenzaA__ADI24622

SEQ ID NO: 178923 - RNA, 1410 nt, Artificial Sequence; identical to SEQ ID NO: 177152
  derived and/or modified CDS sequence (opt4) from neuraminidase__InfluenzaA__ADI46780

SEQ ID NO: 178924 - RNA, 1410 nt, Artificial Sequence
  derived and/or modified CDS sequence (opt4) from neuraminidase__InfluenzaA__ADI46789
augaaccccaaccagaagaucaucaccaucggcagcgugugcaugaccaucggcauggccaaccugaugcugcagaucggcaacaucaucagcaucuggaucagccacagcauccagcugggcaaccagaaccagaucgagaccugcaaccagagcgugaucaccuacgagaacaacaccugggugaaccagaccuacgugaacaucagcaacaccaacuucgccgccggccagagcguggugagcgugaagcuggccggcaacagcagccugugccccgugagcggcugggccaucuacagcaaggacaacagcgugagaaucggcagcaagggcgacguguucgugaucagagagcccuucaucagcugcagcccccuggagugcagaaccuucuuccugacccagggcgcccugcugaacgacaagcacagcaacggcaccaucaaggacagaagccccuacagaacccugaugagcugccccaucggcgaggugcccagccccuacaacagcagauucgagagcguggccuggagcgccagcgccugccacgacggcaucaacuggcugaccaucggcaucagcggccccgacaacggcgccguggccgugcugaaguacaacggcaucaucaccgacaccaucaagagcuggagaaacaacauccugagaacccaggagagcgagugcgccugcgugaacggcagcugcuucaccgugaugaccgacggccccagcaacgagcaggccagcuacaagaucuucagaaucgagaagggcaagaucgugaagagcguggagaugaacgcccccaacuaccacuacgaggagugcagcugcuaccccgacagcagcgagaucaccugcgugugcagagacaacuggcacggcagcaacagacccugggugagcuucaaccagaaccuggaguaccagaucggcuacaucugcagcggcaucuucggcgacaaccccagacccaacgacaagaccggcagcugcggccccgugagcagcaacggcgccaacggcgugaagggcuucagcuucaaguacggcaacggcguguggaucggcagaaccaagagcaucagcagcagaaacggcuucgagaugaucugggaccccaacggcuggaccggcaccgacaacaacuucagcaucaagcaggacaucgugggcaucaacgaguggagcggcuacagcggcagcuucgugcagcaccccgagcugaccggccuggacugcaucagacccugcuucuggguggagcugaucagaggcagacccaaggagaacaccaucuggaccagcggcagcagcaucagcuucugcggcgugaacagcgacaccgugggcuggagcuggcccgacggcgccgagcugcccuucaccaucgacaaguga

SEQ ID NO: 178925 - RNA, 1410 nt, Artificial Sequence; identical to SEQ ID NO: 176798
  derived and/or modified CDS sequence (opt4) from neuraminidase__InfluenzaA__ADI48185

SEQ ID NO: 178926 - RNA, 1410 nt, Artificial Sequence; identical to SEQ ID NO: 176798
  derived and/or modified CDS sequence (opt4) from neuraminidase__InfluenzaA__ADI48187

SEQ ID NO: 178927 - RNA, 1410 nt, Artificial Sequence; identical to SEQ ID NO: 176798
  derived and/or modified CDS sequence (opt4) from neuraminidase__InfluenzaA__ADI48189

SEQ ID NO: 178928 - RNA, 1410 nt, Artificial Sequence; identical to SEQ ID NO: 176798
  derived and/or modified CDS sequence (opt4) from neuraminidase__InfluenzaA__ADI48191

SEQ ID NO: 178929 - RNA, 1410 nt, Artificial Sequence; identical to SEQ ID NO: 176798
  derived and/or modified CDS sequence (opt4) from neuraminidase__InfluenzaA__ADI48193

SEQ ID NO: 178930 - RNA, 1410 nt, Artificial Sequence; identical to SEQ ID NO: 176798
  derived and/or modified CDS sequence (opt4) from neuraminidase__InfluenzaA__ADI48195

SEQ ID NO: 178931 - RNA, 1410 nt, Artificial Sequence
  derived and/or modified CDS sequence (opt4) from neuraminidase__InfluenzaA__ADI48197
augaaccccaaccagaagaucaucaccaucggcagcgugugcaugaccaucggcauggccaaccugauccugcagaucggcaacaucaucagcaucuggaucagccacagcauccaguucggcaaccagaaccagaucgagaccugcaaccagagcgugaucaccuacgagaacaacaccugggugaaccagaccuacgugaacaucagcaacaccaacuucgccgccggccagagcguggugagcgugaagcuggccggcaacagcagccugugccccgugagcggcugggccaucuacagcaaggacaacagcaucagaaucggcagcaagggcgacguguucgugaucagagagcccuucaucagcugcagcccccuggagugcagaaccuucuuccugacccagggcgcccugcugaacgacaagcacagcaacggcaccaucaaggacagaagccccuacagaacccugaugagcugccccaucggcgaggugcccagccccuacaacagcagauucgagagcguggccuggagcgccagcgccugccacgacggcaucaacuggcugaccaucggcaucagcggccccgacaacggcgccguggccgugcugaaguacaacggcaucaucaccgacaccaucaagagcuggagaaacaacauccugagaacccaggagagcgagugcgccugcgugaacggcagcugcuucaccgugaugaccgacggccccagcgacggccaggccagcuacaagaucuucagaaucgagaagggcaagaucgugaagagcguggagaugaacgcccccaacuaccacuacgaggagugcagcugcuaccccgacagcagcgagaucaccugcgugugcagagacaacuggcacggcagcaacagacccugggugagcuucaaccagaaccuggaguaccagaucggcuacaucugcagcggcaucuucggcgacaaccccagacccaacgacaagaccggcagcugcggccccgugagcagcaacggcgccaacggcgugaagggcuucagcuucaaguacggcaacggcguguggaucggcagaaccaagagcaucagcagcagaaacggcuucgagaugaucugggaccccaacggcuggaccggcaccgacaacaacuucagcaucaagcaggacaucgugggcaucaacgaguggagcggcuacagcggcagcuucgugcagcaccccgagcugaccggccuggacugcaucagacccugcuucuggguggagcugaucagaggcagacccaaggagaacaccaucuggaccagcggcagcagcaucagcuucugcggcgugaacagcgacaccgugggcuggagcuggcccgacggcgccgagcugcccuucaccaucgacaaguga

SEQ ID NO: 178932 - RNA, 1410 nt, Artificial Sequence; identical to SEQ ID NO: 176798
  derived and/or modified CDS sequence (opt4) from neuraminidase__InfluenzaA__ADI48199

SEQ ID NO: 178933 - RNA, 1410 nt, Artificial Sequence; identical to SEQ ID NO: 176798
  derived and/or modified CDS sequence (opt4) from neuraminidase__InfluenzaA__ADI48201

SEQ ID NO: 178934 - RNA, 1410 nt, Artificial Sequence; identical to SEQ ID NO: 176798
  derived and/or modified CDS sequence (opt4) from neuraminidase__InfluenzaA__ADI48203

SEQ ID NO: 178935 - RNA, 1410 nt, Artificial Sequence
  derived and/or modified CDS sequence (opt4) from neuraminidase__InfluenzaA__ADI48205
augaaccccaaccagaagaucaucaccaucggcagcgugugcaugaccaucggcauggccaaccugauccugcagaucggcaacaucaucagcaucuggaucagccacagcauccagcugggcaaccagaaccagaucgagaccugcaaccagagcgugaucaccuacgagaacaacaccugggugaaccagaccuacgugaacaucagcaacaccaacuucgccgccggccagagcguggugagcgugaagcuggccggcaacagcagccugugccccgugagcggcugggccaucuacagcaaggacaacagcaucagaaucggcagcaagggcgacguguucgugaucagagagcccuucaucagcugcagccaccuggagugcagaaccuucuuccugacccagggcgcccugcugaacgacaagcacagcaacggcaccaucaaggacagaagccccuacagaacccugaugagcugccccaucggcgaggugcccagccccuacaacagcagauucgagagcguggccuggagcgccagcgccugccacgacggcaucaacuggcugaccaucggcaucagcggccccgacaacggcgccguggccgugcugaaguacaacggcaucaucaccgacaccaucaagagcuggagaaacaacauccugagaacccaggagagcgagugcgccugcgugaacggcagcugcuucaccgugaugaccgacggccccagcgacggccaggccagcuacaagaucuucagaaucgagaagggcaagaucgugaagagcguggagaugaacgcccccaacuaccacuacgaggagugcagcugcuaccccgacagcagcgagaucaccugcgugugcagagacaacuggcacggcagcaacagacccugggugagcuucaaccagaaccuggaguaccagaucggcuacaucugcagcggcaucuucggcgacaaccccagacccaacgacaagaccggcagcugcggccccgugagcagcaacggcgccaacggcgugaagggcuucagcuucaaguacggcaacggcguguggaucggcagaaccaagagcaucagcagcagaaacggcuucgagaugaucugggaccccaacggcuggaccggcaccgacaacaacuucagcaucaagcaggacaucgugggcaucaacgaguggagcggcuacagcggcagcuucgugcagcaccccgagcugaccggccuggacugcaucagacccugcuucuggguggagcugaucagaggcagacccaaggagaacaccaucuggaccagcggcagcagcaucagcuucugcggcgugaacagcgacaccgugggcuggagcuggcccgacggcgccgagcugcccuucaccaucgacaaguga

SEQ ID NO: 178936 - RNA, 1410 nt, Artificial Sequence; identical to SEQ ID NO: 176798
  derived and/or modified CDS sequence (opt4) from neuraminidase__InfluenzaA__ADI48207

SEQ ID NO: 178937 - RNA, 1410 nt, Artificial Sequence; identical to SEQ ID NO: 176798
  derived and/or modified CDS sequence (opt4) from neuraminidase__InfluenzaA__ADI48209

SEQ ID NO: 178938 - RNA, 1410 nt, Artificial Sequence; identical to SEQ ID NO: 176798
  derived and/or modified CDS sequence (opt4) from neuraminidase__InfluenzaA__ADI48211

SEQ ID NO: 178939 - RNA, 1410 nt, Artificial Sequence; identical to SEQ ID NO: 176798
  derived and/or modified CDS sequence (opt4) from neuraminidase__InfluenzaA__ADI48213

SEQ ID NO: 178940 - RNA, 1410 nt, Artificial Sequence; identical to SEQ ID NO: 176798
  derived and/or modified CDS sequence (opt4) from neuraminidase__InfluenzaA__ADI48215

SEQ ID NO: 178941 - RNA, 1410 nt, Artificial Sequence; identical to SEQ ID NO: 176798
  derived and/or modified CDS sequence (opt4) from neuraminidase__InfluenzaA__ADI48217

SEQ ID NO: 178942 - RNA, 1410 nt, Artificial Sequence; identical to SEQ ID NO: 176798
  derived and/or modified CDS sequence (opt4) from neuraminidase__InfluenzaA__ADI48219

SEQ ID NO: 178943 - RNA, 1410 nt, Artificial Sequence; identical to SEQ ID NO: 176798
  derived and/or modified CDS sequence (opt4) from neuraminidase__InfluenzaA__ADI48221

SEQ ID NO: 178944 - RNA, 1410 nt, Artificial Sequence; identical to SEQ ID NO: 176798
  derived and/or modified CDS sequence (opt4) from neuraminidase__InfluenzaA__ADI48625

SEQ ID NO: 178945 - RNA, 1410 nt, Artificial Sequence; identical to SEQ ID NO: 176798
  derived and/or modified CDS sequence (opt4) from neuraminidase__InfluenzaA__ADI48635

SEQ ID NO: 178946 - RNA, 1410 nt, Artificial Sequence; identical to SEQ ID NO: 176798
  derived and/or modified CDS sequence (opt4) from neuraminidase__InfluenzaA__ADI48655

SEQ ID NO: 178947 - RNA, 1410 nt, Artificial Sequence; identical to SEQ ID NO: 176798
  derived and/or modified CDS sequence (opt4) from neuraminidase__InfluenzaA__ADI48665

SEQ ID NO: 178948 - RNA, 1410 nt, Artificial Sequence
  derived and/or modified CDS sequence (opt4) from neuraminidase__InfluenzaA__ADI48675
augaaccccaaccagaagaucaucaccaucggcagcgugugcaugaccaucggcauggccaaccugauccugcagaucggcaacaucaucagcaucuggaucagccacagcauccagcugggcaaccagaaccagaucgagaccugcaaccagagcgugaucaccuacgagaacaacaccugggugaaccagaccuacgugaacaucagcaacaccaacuucgccgccggccagagcguggugagcgugaagcuggccggcaacagcagccugugccccgugagcggcugggccaucuacagcaaggacaacagcaucagaaucggcagcaagggcgacguguucgugaucagagagcccuucaucagcugcagcccccuggagugcagaaccuucuuccugacccagggcgcccugcugaacgacaagcacagcaacggcaccaucaaggacagaagccccuacagaacccugaugagcugccccaucggcgaggugcccagccccuacaacagcagauucgagagcguggccuggagcgccagcgccugccacgacggcaucaacuggcugaccaucggcaucagcggccccgacaacggcgccguggccgugcugaaguacaacggcaucaucaccgacaccaucaagagcuggagaaacaacauccugagaacccaggagagcgagugcgccugcgugaacggcagcugcuucaccgugaugaccgacggccccagcgacggccaggccagcuacaagaucuucagaaucgagaagggcaagaucgugaagagcguggagaugaacgcccccaacuaccacuacgaggagugcagcugcuaccccgacagcagcgagaucaccugcgugugcagagacaacuggcacggcagcaacagacccugggugagcuucaaccagaaccuggaguaccagaucggcuacaucugcagcggcaucuucggcgacaaccccagacccaacgacaagaccggcagcugcggccccgugagcagcaacggcgccaacggcgugaagggcuucagcuucaaguacggcaacggcguguggaucggcagaaccaagagcaucagcagcagaaacggcuucgagaugaucugggaccccaacggcuggaccggcaccgacaacaacuucagcaucaagcaggacaucgugggcaucaacgaguggagcggcuacagcggcagcuucgugcagcaccccgagcugaccggccuggacugcaucagacccugcuucuggguggagcugaucagaggcagacugaaggagaacaccaucuggaccagcggcagcagcaucagcuucugcggcgugaacagcgacaccgugggcuggagcuggcccgacggcgccgagcugcccuucaccaucgacaaguga

SEQ ID NO: 178949 - RNA, 1410 nt, Artificial Sequence
  derived and/or modified CDS sequence (opt4) from neuraminidase__InfluenzaA__ADI48685
augaaccccaaccagaagaucaucaccaucggcagcgugugcaugaccaucggcauggccaaccugauccugcagaucggcaacaucaucagcaucuggaucagccacagcauccagcugggcaaccagaaccagaucgagaccugcaaccagagcgugaucaccuacgagaacaacaccugggugaaccagaccuacgugaacaucagcaacaccaacuucgccgccggccagagcguggugagcgugaagcuggccggcaacagcagccugugccccgugagcggcugggccaucuacagcaaggacaacagcaucagaaucggcagcaagggcgacguguucgugaucagagagcccuucaucagcugcagcccccuggagugcagaaccuucuuccugacccagggcgcccugcugaacgacaagcacagcaacggcaccaucaaggacagaagccccuacagaacccugaugagcugccccaucggcgaggugcccagccccuacaacagcagauucgagagcguggccuggagcgccagcgccugccacgacggcaucaacuggcugaccaucggcaucagcggccccgacaacggcgccguggccgugcugaaguacaacggcaucaucaccgacaccaucaagagcuggagaaacaacauccugagaacccaggagagcgagugcgccugcgugaacggcgccugcuucaccgugaugaccgacggccccagcgacggccaggccagcuacaagaucuucagaaucgagaagggcaagaucgugaagagcguggagaugaacgcccccaacuaccacuacgaggagugcagcugcuaccccgacagcagcgagaucaccugcgugugcagagacaacuggcacggcagcaacagacccugggugagcuucaaccagaaccuggaguaccagaucggcuacaucugcagcggcaucuucggcgacaaccccagacccaacgacaagaccggcagcugcggccccgugagcagcaacggcgccaacggcgugaagggcuucagcuucaaguacggcaacggcguguggaucggcagaaccaagagcaucagcagcagaaacggcuucgagaugaucugggaccccaacggcuggaccggcaccgacaacaacuucagcaucaagcaggacaucgugggcaucaacgaguggagcggcuacagcggcagcuucgugcagcaccccgagcugaccggccuggacugcaucagacccugcuucuggguggagcugaucagaggcagacccaaggagaacaccaucuggaccagcggcagcagcaucagcuucugcggcgugaacagcgacaccgugggcuggagcuggcccgacggcgccgagcugcccuucaccaucgacaaguga

SEQ ID NO: 178950 - RNA, 1410 nt, Artificial Sequence; identical to SEQ ID NO: 176798
  derived and/or modified CDS sequence (opt4) from neuraminidase__InfluenzaA__ADI48695

SEQ ID NO: 178951 - RNA, 1410 nt, Artificial Sequence; identical to SEQ ID NO: 176788
  derived and/or modified CDS sequence (opt4) from neuraminidase__InfluenzaA__ADI48705

SEQ ID NO: 178952 - RNA, 1410 nt, Artificial Sequence; identical to SEQ ID NO: 176798
  derived and/or modified CDS sequence (opt4) from neuraminidase__InfluenzaA__ADI48715

SEQ ID NO: 178953 - RNA, 1410 nt, Artificial Sequence; identical to SEQ ID NO: 176798
  derived and/or modified CDS sequence (opt4) from neuraminidase__InfluenzaA__ADI48725

SEQ ID NO: 178954 - RNA, 1410 nt, Artificial Sequence; identical to SEQ ID NO: 176798
  derived and/or modified CDS sequence (opt4) from neuraminidase__InfluenzaA__ADI48735

SEQ ID NO: 178955 - RNA, 1410 nt, Artificial Sequence; identical to SEQ ID NO: 176798
  derived and/or modified CDS sequence (opt4) from neuraminidase__InfluenzaA__ADI48745

SEQ ID NO: 178956 - RNA, 1410 nt, Artificial Sequence
  derived and/or modified CDS sequence (opt4) from neuraminidase__InfluenzaA__ADI48755
augaaccccaaccagaagaucaucaccaucggcagcgugugcaugaccaucggcauggccaaccugauccugcagaucggcaacaucaucagcaucuggaucagccacagcauccagcugggcaaccagaaccagaucgagaccugcaaccagagcgugaucaccuacgagaacaacaccugggugaaccagaccuacgugaacaucagcaacaccaacuucgccgccggccagagcguggugagcgugaagcuggccggcaacagcagccugugccccgugagcggcugggccaucuacagcaaggacaacagcaucagaaucggcagcaagggcgacguguucgugaucagagagcccuucaucagcugcagcccccuggagugcagaaccuucuuccugacccagggcgcccugcugaacgacaagcacagcaacggcaccaucaaggacagaagccccuacagaacccugaugagcugccccaucggcgaggugcccagccccuacaacagcagauucgagagcguggccuggagcgccagcgccugccacgacggcaucaacuggcugaccaucggcaucagcggccccgacaacggcgccguggccgugcugaaguacaacggcaucaucagcgacaccaucaagagcuggagaaacaacauccugagaacccaggagagcgagugcgccugcgugaacggcagcugcuucaccgugaugaccgacggccccagcgacggccaggccagcuacaagaucuucagaaucgagaagggcaagaucgugaagagcguggagaugaacgcccccaacuaccacuacgaggagugcagcugcuaccccgacagcagcgagaucaccugcgugugcagagacaacuggcacggcagcaacagacccugggugagcuucaaccagaaccuggaguaccagaucggcuacaucugcagcggcaucuucggcgacaaccccagacccaacgacaagaccggcagcugcggccccgugagcagcaacggcgccaacggcgugaagggcuucagcuucaaguacggcaacggcguguggaucggcagaaccaagagcaucagcagcagaaacggcuucgagaugaucugggaccccaacggcuggaccggcaccgacaacaacuucagcaucaagcaggacaucgugggcaucaacgaguggagcggcuacagcggcagcuucgugcagcaccccgagcugaccggccuggacugcaucagacccugcuucuggguggagcugaucagaggcagacccaaggagaacaccaucuggaccagcggcagcagcaucagcuucugcggcgugaacagcgacaccgugggcuggagcuggcccgacggcgccgagcugcccuucaccaucgacaaguga

SEQ ID NO: 178957 - RNA, 1410 nt, Artificial Sequence; identical to SEQ ID NO: 176798
  derived and/or modified CDS sequence (opt4) from neuraminidase__InfluenzaA__ADI48765

SEQ ID NO: 178958 - RNA, 1410 nt, Artificial Sequence; identical to SEQ ID NO: 176798
  derived and/or modified CDS sequence (opt4) from neuraminidase__InfluenzaA__ADI48775

SEQ ID NO: 178959 - RNA, 1410 nt, Artificial Sequence; identical to SEQ ID NO: 176798
  derived and/or modified CDS sequence (opt4) from neuraminidase__InfluenzaA__ADI48785

SEQ ID NO: 178960 - RNA, 1410 nt, Artificial Sequence; identical to SEQ ID NO: 176798
  derived and/or modified CDS sequence (opt4) from neuraminidase__InfluenzaA__ADI48795

SEQ ID NO: 178961 - RNA, 1410 nt, Artificial Sequence; identical to SEQ ID NO: 176798
  derived and/or modified CDS sequence (opt4) from neuraminidase__InfluenzaA__ADI49032

SEQ ID NO: 178962 - RNA, 1410 nt, Artificial Sequence; identical to SEQ ID NO: 176798
  derived and/or modified CDS sequence (opt4) from neuraminidase__InfluenzaA__ADI49243

SEQ ID NO: 178963 - RNA, 1410 nt, Artificial Sequence; identical to SEQ ID NO: 176798
  derived and/or modified CDS sequence (opt4) from neuraminidase__InfluenzaA__ADI49263

SEQ ID NO: 178964 - RNA, 1410 nt, Artificial Sequence; identical to SEQ ID NO: 176798
  derived and/or modified CDS sequence (opt4) from neuraminidase__InfluenzaA__ADI49273

SEQ ID NO: 178965 - RNA, 1410 nt, Artificial Sequence; identical to SEQ ID NO: 176798
  derived and/or modified CDS sequence (opt4) from neuraminidase__InfluenzaA__ADI49283

SEQ ID NO: 178966 - RNA, 1410 nt, Artificial Sequence; identical to SEQ ID NO: 176798
  derived and/or modified CDS sequence (opt4) from neuraminidase__InfluenzaA__ADI49315

SEQ ID NO: 178967 - RNA, 1410 nt, Artificial Sequence; identical to SEQ ID NO: 176798
  derived and/or modified CDS sequence (opt4) from neuraminidase__InfluenzaA__ADI49325

SEQ ID NO: 178968 - RNA, 1410 nt, Artificial Sequence; identical to SEQ ID NO: 176798
  derived and/or modified CDS sequence (opt4) from neuraminidase__InfluenzaA__ADI49335

SEQ ID NO: 178969 - RNA, 1410 nt, Artificial Sequence
  derived and/or modified CDS sequence (opt4) from neuraminidase__InfluenzaA__ADI49345
augaaccccaaccagaagaucaucaccaucggcagcgugugcaugaccaucggcauggccaaccugauccugcagaucggcaacaucaucagcaucuggaucagccacagcauccagcugggcaaccagaaccagaucgagaccugcaaccagagcgugaucaccuacgagaacaacaccugggugaaccagaccuacgugaacaucagcaacaccaaccuggccgccggccagagcguggugagcgugaagcuggccggcaacagcagccugugccccgugagcggcugggccaucuacagcaaggacaacagcaucagaaucggcagcaagggcgacguguucgugaucagagagcccuucaucagcugcagcccccuggagugcagaaccuucuuccugacccagggcgcccugcugaacgacaagcacagcaacggcaccaucaaggacagaagccccuacagaacccugaugagcugccccaucggcgacgugcccagccccuacaacagcagauucgagagcguggccuggagcgccagcgccugccacgacggcaucaacuggcugaccaucggcaucagcggccccgacaacggcgccguggccgugcugaaguacaacggcaucaucaccgacaccaucaagagcuggagaaacaacauccugagaacccaggagagcgagugcgccugcgugaacggcagcugcuucaccgugaugaccgacggccccagcgacggccaggccagcuacaagaucuucagaaucgagaagggcaagaucgugaagagcguggagaugaacgcccccaacuaccacuacgaggagugcagcugcuaccccgacagcagcgagaucaccugcgugugcagagacaacuggcacggcagcaacagacccugggugagcuucaaccagaaccuggaguaccagaucggcuacaucugcagcggcaucuucggcgacaaccccagacccaacgacaagaccggcagcugcggccccgugagcagcaacggcgccaacggcgugaagggcuucagcuucaaguacggcaacggcguguggaucggcagaaccaagagcaucagcagcagaaacggcuucgagaugaucugggaccccaacggcuggaccggcaccgacaacaacuucagcaucaagcaggacaucgugggcaucaacgaguggagcggcuacagcggcagcuucgugcagcaccccgagcugaccggccuggacugcaucagacccugcuucuggguggagcugaucagaggcagacccaaggagaacaccaucuggaccagcggcagcagcaucagcuucugcggcgugaacagcgacaccgugggcuggagcuggcccgacggcgccgagcugcccuucaccaucgacaaguga

SEQ ID NO: 178970 - RNA, 1410 nt, Artificial Sequence; identical to SEQ ID NO: 176798
  derived and/or modified CDS sequence (opt4) from neuraminidase__InfluenzaA__ADI49355

SEQ ID NO: 178971 - RNA, 1410 nt, Artificial Sequence; identical to SEQ ID NO: 176798
  derived and/or modified CDS sequence (opt4) from neuraminidase__InfluenzaA__ADI49365

SEQ ID NO: 178972 - RNA, 1410 nt, Artificial Sequence; identical to SEQ ID NO: 176798
  derived and/or modified CDS sequence (opt4) from neuraminidase__InfluenzaA__ADI49375

SEQ ID NO: 178973 - RNA, 1410 nt, Artificial Sequence; identical to SEQ ID NO: 176798
  derived and/or modified CDS sequence (opt4) from neuraminidase__InfluenzaA__ADI49385

SEQ ID NO: 178974 - RNA, 1410 nt, Artificial Sequence
  derived and/or modified CDS sequence (opt4) from neuraminidase__InfluenzaA__ADI49395
augaaccccaaccagaagaucaucaccaucggcagcgugugcaugaccaucggcauggccaaccugauccugcagaucggcaacaugaucagcaucuggaucagccacagcauccagcugggcaaccagaaccagaucgagaccugcaaccagagcgugaucaccuacgagaacaacaccugggugaaccagaccuacgugaacaucagcaacaccaacuucgccgccggccagagcguggugagcgugaagcuggccggcaacagcagccugugccccgugagcggcugggccaucuacagcaaggacaacagcaucagaaucggcagcaagggcgacguguucgugaucagagagcccuucaucagcugcagcccccuggagugcagaaccuucuuccugacccagggcgcccugcugaacgacaagcacagcaacggcaccaucaaggacagaagccccuacagaacccugaugagcugccccaucggcgaggugcccagccccuacaacagcagauucgagagcguggccuggagcgccagcgccugccacgacggcaucaacuggcugaccaucggcaucagcggccccgacaacggcgccguggccgugcugaaguacaacggcaucaucaccgacaccaucaagagcuggagaaacaacauccugagaacccaggagagcgagugcgccugcgugaacggcagcugcuucaccgugaugaccgacggccccagcgacggccaggccagcuacaagaucuucagaaucgagaagggcaagaucgugaagagcguggagcugaacgcccccaacuaccacuacgaggagugcagcugcuaccccgacagcagcgagaucaccugcgugugcagagacaacuggcacggcagcaacagacccugggugagcuucaaccagaaccuggaguaccagaucggcuacaucugcagcggcaucuucggcgacaaccccagacccaacgacaagaccggcagcugcggccccgugagcagcaacggcgccaacggcgugaagggcuucagcuucaaguacggcaacggcguguggaucggcagaaccaagagcaucagcagcagaaacggcuucgagaugaucugggaccccaacggcuggaccggcaccgacaacaacuucagcaucaagcaggacaucgugggcaucaacgaguggagcggcuacagcggcagcuucgugcagcaccccgagcugaccggccuggacugcaucagacccugcuucuggguggagcugaucagaggcagacccaaggagaacaccaucuggaccagcggcagcagcaucagcuucugcggcgugaacagcgacaccgugggcuggagcuggcccgacggcgccgagcugcccuucaccaucgacaaguga

SEQ ID NO: 178975 - RNA, 1410 nt, Artificial Sequence; identical to SEQ ID NO: 176798
  derived and/or modified CDS sequence (opt4) from neuraminidase__InfluenzaA__ADI49720

SEQ ID NO: 178976 - RNA, 1410 nt, Artificial Sequence; identical to SEQ ID NO: 176798
  derived and/or modified CDS sequence (opt4) from neuraminidase__InfluenzaA__ADI49730

SEQ ID NO: 178977 - RNA, 1410 nt, Artificial Sequence; identical to SEQ ID NO: 176798
  derived and/or modified CDS sequence (opt4) from neuraminidase__InfluenzaA__ADI49740

SEQ ID NO: 178978 - RNA, 1410 nt, Artificial Sequence; identical to SEQ ID NO: 176798
  derived and/or modified CDS sequence (opt4) from neuraminidase__InfluenzaA__ADI49750

SEQ ID NO: 178979 - RNA, 1410 nt, Artificial Sequence; identical to SEQ ID NO: 176798
  derived and/or modified CDS sequence (opt4) from neuraminidase__InfluenzaA__ADI49760

SEQ ID NO: 178980 - RNA, 1410 nt, Artificial Sequence; identical to SEQ ID NO: 176828
  derived and/or modified CDS sequence (opt4) from neuraminidase__InfluenzaA__ADI49780

SEQ ID NO: 178981 - RNA, 1410 nt, Artificial Sequence; identical to SEQ ID NO: 176788
  derived and/or modified CDS sequence (opt4) from neuraminidase__InfluenzaA__ADI49790

SEQ ID NO: 178982 - RNA, 1410 nt, Artificial Sequence; identical to SEQ ID NO: 176798
  derived and/or modified CDS sequence (opt4) from neuraminidase__InfluenzaA__ADI49821

SEQ ID NO: 178983 - RNA, 1410 nt, Artificial Sequence; identical to SEQ ID NO: 176788
  derived and/or modified CDS sequence (opt4) from neuraminidase__InfluenzaA__ADI50029

SEQ ID NO: 178984 - RNA, 1410 nt, Artificial Sequence
  derived and/or modified CDS sequence (opt4) from neuraminidase__InfluenzaA__ADI52830
augaaccccaaccagaagaucaucaccaucggcagcgugugcaugaccaucggcauggccaaccugauccugcagaucggcaacaucaucagcaucuggaucagccacagcauccagcugggcaaccagaaccagaucgagaccugcaaccagagcgugaucaccuacgagaacaacaccugggugaaccagaccuacgugaacaucagcaacaccaacuucgccgccggccagagcguggugagcgugaagcuggccggcaacagcagccugugccccgugagcggcugggccaucuacagcaaggacaacagcgugagaaucggcagcaagggcgacguguucgugaucagagagcccuucaucagcugcagcccccuggagugcagaaccuucuuccugacccagggcgcccugcugaacgacaagcacagcaacggcaccaucaaggacagaagccccuacagaacccugaugagcugccccaucggcgaggugcccagccccuacaacagcagauucgagagcguggccuggagcgccagcgccugccacgacggcaucaacuggcugaccaucggcaucagcggccccgacaacggcgccguggccgugcugaaguacaacggcaucaucaccgacaccaucaagagcuggagaaacaacauccugagaacccaggagagcgagugcgccugcgugaacggcagcugcuucaccgugaugaccgacggccccagcgacggccaggccagcuacaagaucuucagaaucgagaagggcaagaucgugaagagcguggagaugaacgcccccaacuaccacuacgaggagugcagcugcuaccccgacagcagcgagaucaccugcgugugcagagacaacuggcacggcagcaacagacccugggugagcuucaaccagaaccuggaguaccagaucggcuacaucugcagcggcaucuucggcgacaaccccagacccaacgacaagaccggcagcugcggccccgugagcagcaacggcgccaacggcgugaagggcuucagcuucaaguacggcaacggcguguggaucggcagaaccaagagcaucagcagcagaaacggcuucgagaugaucugggaccccaacggcuggaccggcaccgacaacaacuucagcaucaagcaggacaucgugggcaucaacgaguggagcggcuacagcggcagcuucgugcagcaccccgagcugaccggccuggacugcaucagacccugcuucuggguggagcugaucagaggcagacccaaggagaacaccaucuggaccagcggcagcagcaucagcuucugcggcgugaacagcgacaccgugggcuggagcuggcccgacggcgacgagcugcccuucaccaucgacaaguga

SEQ ID NO: 178985 - RNA, 1410 nt, Artificial Sequence
  derived and/or modified CDS sequence (opt4) from neuraminidase__InfluenzaA__ADI52831
augaaccccaaccagaagaucaucaccaucggcagcgugugcaugaccaucggcauggccaaccugauccugcagaucggcaacaucaucagcaucuggaucagccacagcauccagcugggcaaccagaaccagaucgagaccugcaaccagagcgugaucaccuacgagaacaacaccugggugaaccagaccuacgugaacaucagcaacaccaacuucgccgccggccagagcguggugagcgugaagcuggccggcaacagcagccugugccccgugagcggcugggccaucuacagcaaggacaacagcaucagaaucggcagcaagggcgacguguucgugaucagagagcccuucaucagcugcagcccccuggagugcagaaccuucuuccugacccagggcgcccugcugaacgacaagcacagcaacggcaccaucaaggacagaagccccuacagaacccugaugagcugccccaucggcgaggugcccagccccuacaacagcagauucgagagcguggccuggagcgccagcgccugccacgacggcaucaacuggcugaccaucggcaucagcggccccgacaacggcgccguggccgugcugaaguacaacggcaucaucaccgacaccaucaagagcuggagaaacaacauccugagaacccaggagagcgagugcgccugcgugaacggcagcugcuucaccgugaugaccgacggccccagcgacggccaggccagcuacaagaucuucagaaucgagaagggcaagaucgugaagagcguggagaugaacgcccccaacuaccacuacgaggagugcagcugcuaccccgacagcagcgagaucaccugcgugugcagagacaacuggcacggcagcaacagacccugggugagcuucaaccagaaccuggaguaccagaucggcuacaucugcagcggcaucuucggcgacaaccccagacccaacgacaagaccggcagcugcggccccgugagcagcaacggcgccaacggcgugaagggcuucagcuucaaguacggcaacggcguguggaucggcagaaccaagagcgugagcagcagaaacggcuucgagaugaucugggaccccaacggcuggaccggcaccgacaacaacuucagcaucaagcaggacaucgugggcaucaacgaguggagcggcuacagcggcagcuucgugcagcaccccgagcugaccggccuggacugcaucagacccugcuucuggguggagcugaucagaggcagacccaaggagaacaccaucuggaccagcggcagcagcaucagcuucugcggcgugaacagcgacaccgugggcuggagcuggcccgacggcgccgagcugcccuucaccaucgacaaguga

SEQ ID NO: 178986 - RNA, 1410 nt, Artificial Sequence; identical to SEQ ID NO: 176798
  derived and/or modified CDS sequence (opt4) from neuraminidase__InfluenzaA__ADI52832

SEQ ID NO: 178987 - RNA, 1410 nt, Artificial Sequence
  derived and/or modified CDS sequence (opt4) from neuraminidase__InfluenzaA__ADI52833
augaaccccaaccagaagaucaucaccaucggcagcgugugcaugaccaucggcauggccaaccugauccugcagaucggcaacaucaucagcaucuggaucagccacagcauccagcugggcaaccagaaccagaucgagaccugcaaccagagcgugaucaccuacgagaacaacaccugggugaaccagaccuacgugaacaucagcaacaccaacuucgccgccggccagagcguggugagcgugaagcuggccggcaacagcagccugugccccgugagcggcugggccaucuacagcaaggacaacagcaucagaaucggcagcaagggcgacguguucgugaucagagagcccuucaucagcugcagcccccuggagugcagaaccuucuuccugacccagggcgcccugcugaacgacaagcacagcaacggcaccaucaaggacagaagccccuacagaacccugaugagcugccccaucggcgaggcccccagccccuacaacagcagauucgagagcguggccuggagcgccagcgccugccacgacggcaucaacuggcugaccaucggcaucagcggccccgacaacggcgccguggccgugcugaaguacaacggcaucaucaccgacaccaucaagagcuggagaaacaacauccugagaacccaggagagcgagugcgccugcgugaacggcagcugcuucaccgugaugaccgacggccccagcgacggccaggccagcuacaagaucuucagaaucgagaagggcaagaucgugaagagcguggagaugaacgcccccaacuaccacuacgaggagugcagcugcuaccccgacagcagcgagaucaccugcgugugcagagacaacuggcacggcagcaacagacccugggugagcuucaaccagaaccuggaguaccagaucggcuacaucugcagcggcaucuucggcgacaaccccagacccaacgacaagaccggcagcugcggccccgugagcagcaacggcgccaacggcgugaagggcuucagcuucaaguacggcaacggcguguggaucggcagaaccaagagcaucagcagcagaaacggcuucgagaugaucugggaccccaacggcuggaccggcaccgacaacaacuucagcaucaagcaggacaucgugggcaucaacgaguggagcggcuacagcggcagcuucgugcagcaccccgagcugaccggccuggacugcaucagacccugcuucuggguggagcugaucagaggcagacccaaggagaacaccaucuggaccagcggcagcagcaucagcuucugcggcgugaacagcgacaccgugggcuggagcuggcccgacggcgccgagcugcccuucaccaucgacaaguga

SEQ ID NO: 178988 - RNA, 1413 nt, Artificial Sequence; identical to SEQ ID NO: 177521
  derived and/or modified CDS sequence (opt4) from neuraminidase__InfluenzaA__ADI75821

SEQ ID NO: 178989 - RNA, 1410 nt, Artificial Sequence; identical to SEQ ID NO: 177965
  derived and/or modified CDS sequence (opt4) from neuraminidase__InfluenzaA__ADI75832

SEQ ID NO: 178990 - RNA, 1413 nt, Artificial Sequence
  derived and/or modified CDS sequence (opt4) from neuraminidase__InfluenzaA__ADI75854
augaaccccaaccagaagaucaucaccaucggcagcaucagcaucgccaucggcaucaucagccugaugcugcagaucggcagcaucaucagcaucugggccagccacagcauccagaccggcagccagaacaacaccggcaucugcaaccagagaaucaucaccuacgagaacagcaccugggugaaccacaccuacgugaacaucaacaacaccaacgugguggccggcgaggacaagaccagcgugacccuggccggcaacagcagccugugcagcaucagcggcugggccaucuacaccaaggacaacagcaucagaaucggcagcaagggcgacguguucgugaucagagagcccuucaucagcugcagccaccuggagugcagaaccuucuuccugacccagggcgcccugcugaacgacaagcacagcaacggcaccgugaaggacagaagccccuacagagcccugaugagcugcccccugggcgaggcccccagccccuacaacagcaaguucgagagcguggccuggagcgccagcgccugccacgacggcaugggcuggcugaccaucggcaucagcggccccgacaacggcgccguggccgugcugaaguacaacggcaucaucaccggcaccaucaagagcuggaagaagcagauccugagaacccaggagagcgagugcgugugcaugaacggcagcugcuucaccaucaugaccgacggccccagcaacaaggccgccagcuacaagaucuucaagaucgagaagggcaaggugaccaagagcaucgagcugaacgcccccaacuucuacuacgaggagugcagcugcuaccccgacaccggcaucgugaugugcgugugcagagacaacuggcacggcagcaacagacccugggugagcuucaaccagaaccuggacuaccagaucggcuacaucugcagcggcguguucggcgacaaccccagacccgaggacggcgagggcagcugcaaccccgugaccguggacggcgccaacggcgugaagggcuucagcuacaaguacggcaacggcguguggaucggcagaaccaagagcaacagacugagaaagggcuucgagaugaucugggaccccaacggcuggaccaacaccgacagcgacuucagcgugaagcaggacgugguggccaucaccgacuggagcggcuacagcggcagcuucgugcagcaccccgagcugaccggccuggacugcaucagacccugcuucuggguggagcuggugagaggccugcccagagagaacaccaccaucuggaccagcggcagcagcaucagcuucugcggcgugaacagcgacaccgccaacuggagcuggcccgacggcgccgagcugcccuucaccaucgacaaguga

SEQ ID NO: 178991 - RNA, 1410 nt, Artificial Sequence
  derived and/or modified CDS sequence (opt4) from neuraminidase__InfluenzaA__ADI75876
augaaccccaaccagaagaucaucaccaucggcagcgugagccugaccaucagcaccaucugcuucuucaugcagaucgccauccugaucaccaccgugacccugcacuucaagcaguacgaguucaacagcccccccaacaaccaggugaugcugugcgagcccaccaucaucgagagaaacaucaccgagaucguguaccugaccaacaccaccaucgagaaggaggugugccccaagcuggccgaguacagaaacuggagcaagccccagugcgacaucaccggcuucgcccccuucagcaaggacaacagcaucagacugagcgccggcggcgacaucugggugaccagagagcccuacgugagcugcgaccccgacaagugcuaccaguucgcccugggccagggcaccacccugaacaacgugcacagcaacaacaccgugagagacagaacccccuacagaacccugcugaugaacgagcugggcgugcccuuccaccugggcaccaagcaggugugcaucgccuggagcagcagcagcugccacgacggcaaggccuggcugcacgugugcaucaccggcgacgacaagaacgccaccgccagcuucaucuacaacggcagacugguggacagcguggugagcuggagcaaggagauccugagaacccaggagagcgagugcgugugcaucaacggcaccugcaccguggugaugaccgacggcagcgccagcggcaaggccgacaccaagauccuguucaucgaggagggcaagaucgugcacaccagcacccugagcggcagcgcccagcacguggaggagugcagcugcuaccccagauaccccggcgugagaugcgugugcagagacaacuggaagggcagcaacagacccaucguggacaucaacaucaaggaccacagcguggugagcagcuacgugugcagcggccuggugggcgacacccccagaaagaacgacagcagcagcagcagccacugccuggaccccaacaacgaggagggcggccacggcgugaagggcugggccuucgacgacggcaacgacguguggaugggcagaaccaucagcgagaagagcagacugggcuacgagaccuucaaggugaucgagggcuggagcaaccacaagagcaagcugcagaucaacagacaggugaucguggacagaggcaacagaagcggcuacagcggcaucuucagcguggagggcaagagcugcaucaacagaugcuucuacguggagcugaucagaggcagaaaggaggagaccgaggugcuguggaccagcaacagcaucgugguguucugcggcaccagcggcaccuacggcaccggcagcuggcccgacggcgccgaccugaaccugaugcccaucuga

SEQ ID NO: 178992 - RNA, 1410 nt, Artificial Sequence; identical to SEQ ID NO: 177965
  derived and/or modified CDS sequence (opt4) from neuraminidase__InfluenzaA__ADI75887

SEQ ID NO: 178993 - RNA, 1413 nt, Artificial Sequence; identical to SEQ ID NO: 177521
  derived and/or modified CDS sequence (opt4) from neuraminidase__InfluenzaA__ADI75909

SEQ ID NO: 178994 - RNA, 1410 nt, Artificial Sequence; identical to SEQ ID NO: 178544
  derived and/or modified CDS sequence (opt4) from neuraminidase__InfluenzaA__ADI75920

SEQ ID NO: 178995 - RNA, 1413 nt, Artificial Sequence; identical to SEQ ID NO: 177521
  derived and/or modified CDS sequence (opt4) from neuraminidase__InfluenzaA__ADI77352

SEQ ID NO: 178996 - RNA, 1410 nt, Artificial Sequence; identical to SEQ ID NO: 176798
  derived and/or modified CDS sequence (opt4) from neuraminidase__InfluenzaA__ADI77363

SEQ ID NO: 178997 - RNA, 1410 nt, Artificial Sequence; identical to SEQ ID NO: 177975
  derived and/or modified CDS sequence (opt4) from neuraminidase__InfluenzaA__ADI99500

SEQ ID NO: 178998 - RNA, 1410 nt, Artificial Sequence
  derived and/or modified CDS sequence (opt4) from neuraminidase__InfluenzaA__ADI99553
augaaccccaaccagaagaucaucaccaucggcagcgugugcaugaccaucggcauggccaaccugauccugcagaucggcaacaucaucagcaucuggaucagccacagcauccagcugggcaaccagaaccagaucgagaccugcaaccagagcgugaucaccuacgagaacaacaccugggugaaccagaccuacgugaacaucagcaacaccaacuucgccgccggccagagcguggacagcgugaagcuggccggcaacagcagccugugccccgugagcggcugggccaucuacagcaaggacaacagcaucagaaucggcagcaagggcgacguguucgugaucagagagcccuucaucagcugcagcccccuggagugcagaaccuucuuccugacccagggcgcccugcugaacgacaagcacagcaacggcaccaucaaggacagaagccccuacagaacccugaugagcugccccaucggcgaggugcccagccccuacaacagcagauucgagagcguggccuggagcgccagcgccugccacgacggcaucaacuggcugaccaucggcaucagcggccccgacaacggcgccguggccgugcugaaguacaacggcaucaucaccgacaccaucaagagcuggagaaacaacauccugagaacccaggagagcgagugcgccugcgugaacggcagcugcuucaccgugaugaccgacggccccagcgacggccaggccagcuacaagaucuucagaaucgagaagggcaagaucgugaagagcguggagaugaacgcccccaacuaccacuacgaggagugcagcugcuaccccgacagcagcgagaucaccugcgugugcagagacaacuggcacggcagcaacagacccugggugagcuucaaccagaaccuggaguaccagaucggcuacaucugcagcggcaucuucggcgacaaccccagacccaacgacaagaccggcagcugcggccccgugagcagcaacggcgccaacggcgugaagggcuucagcuucaaguacggcaacggcguguggaucggcagaaccaagagcaucagcagcagaaacggcuucgagaugaucugggaccccaacggcuggaccggcaccgacaacaacuucagcaucaagcaggacaucgugggcaucaacgaguggagcggcuacagcggcagcuucgugcagcaccccgagcugaccggccuggacugcaucagacccugcuucuggguggagcugaucagaggcagacccaaggagaacaccaucuggaccagcggcagcagcaucagcuucugcggcgugaacagcgacaccgugggcuggagcuggcccgacggcgccgagcugcccuucaccaucgacaaguga

SEQ ID NO: 178999 - RNA, 1410 nt, Artificial Sequence
  derived and/or modified CDS sequence (opt4) from neuraminidase__InfluenzaA__ADI99563
augaaccccaaccagaagaucaucaccaucggcagcgugugcaugaccaucggcauggccaaccugauccugcagaucggcaacaucaucagcaucuggaucagccacagcauccagcugggcaaccagaaccagaucgagaccugcaaccagagcgugaucaccuacgagaacaacaccugggugaaccagaccuacgugaacaucagcaacaccaacuucgccgccggccagagcguggugagcgugaagcuggccggcaacagcagccugugccccgugagcggcugggccaucuacagcaaggacaacagcaucagaaucggcagcaagggcgacguguucgugaucagagagcccuucaucagcugcagcccccuggagugcagaaccuucuuccugacccagggcgcccugcugaacgacaagcacagcaacggcaccaucaaggacagaagccccuacagaacccugaugagcugccccaucggcgaggugcccagccccuacaacagcagauucgagagcguggccuggagcgccagcgccugccacgacggcaucaacuggcugaccaucggcaucagcggccccgacaacggcgccguggccgugcugaaguacaacggcaucaucaccgacaccaucaagagcuggagaaacaacauccugagaacccaggagagcgagugcgccugcgugaacggcagcugcuucaccgugaugaccgacggccccagcgacggccaggccagcuacaagaucuucagaaucgagaagggcaagaucgugaagagcguggaggugaacgcccccaacuaccacuacgaggagugcagcugcuaccccgacagcagcgagaucaccugcgugugcagagacaacuggcacggcagcaacagacccugggugagcuucaaccagaaccuggaguaccagaucggcuacaucugcagcggcaucuucggcgacaaccccagacccaacgacaagaccggcagcugcggccccgugagcagcaacggcgccaacggcgugaagggcuucagcuucaaguacggcaacggcguguggaucggcagaaccaagagcaucagcagcagaaacggcuucgagaugaucugggaccccaacggcuggaccggcaccgacaacaacuucagcaucaagcaggacaucgugggcaucaacgaguggagcggcuacagcggcagcuucgugcagcaccccgagcugaccggccuggacugcaucagacccugcuucuggguggagcugaucagaggcagacccaaggagaacaccaucuggaccagcggcagcagcaucagcuucugcggcgugaacagcgacaccgugggcuggagcuggcccgacggcgccgagcugcccuucaccaucgacaaguga

SEQ ID NO: 179000 - RNA, 1410 nt, Artificial Sequence; identical to SEQ ID NO: 178999
  derived and/or modified CDS sequence (opt4) from neuraminidase__InfluenzaA__ADI99573

SEQ ID NO: 179001 - RNA, 1410 nt, Artificial Sequence; identical to SEQ ID NO: 178999
  derived and/or modified CDS sequence (opt4) from neuraminidase__InfluenzaA__ADI99583

SEQ ID NO: 179002 - RNA, 1410 nt, Artificial Sequence; identical to SEQ ID NO: 178149
  derived and/or modified CDS sequence (opt4) from neuraminidase__InfluenzaA__ADI99593

SEQ ID NO: 179003 - RNA, 1410 nt, Artificial Sequence
  derived and/or modified CDS sequence (opt4) from neuraminidase__InfluenzaA__ADI99613
augaaccccaaccagaagaucaucaccaucggcagcgugugcaugaccaucggcauggccaaccugauccugcagaucggcaacaucaucagcaucuggaucagccacagcauccagcugggcaaccagaaccagaucgagaccugcaaccagagcgugaucaccuacgagaacaacaccugggugaaccagaccuacgugaacaucagcaacaccaacuucgccgccggccagagcguggugagcgugaagcuggccggcaacagcagccugugccccgugagcggcugggccaucuacagcaaggacaacagcaucagaaucggcagcaagggcgacguguucgugaucagagagcccuucaucagcugcagcccccuggagugcagaaccuucuuccugacccagggcgcccugcugaacgacaagcacagcaacggcaccaucaaggacagaagccccuacagaacccugaugagcugccccaucggcgaggugcccagccccuacaacagcagauucgagagcguggccuggagcgccagcgccugccacgacggcaucaacuggcugaccaucggcaucagcggccccgacaacggcgccguggccgugcugaaguacaacggcaucaucaccgacaccaucaagagcuggagaaacaacauccugagaacccaggagagcgagugcgccugcgugaacggcagcugcuucaccgugaugaccgacggccccagcgacggccaggccagcuacaagaucuucagaaucgagaagggcaagaucgugaagagcguggagaugaacgcccccaacuaccacuacgaggagugcagcugcuaccccgacagcagcgagaucaccugcgugugcagagacaacuggcacggcagcaacagacccugggugagcuucaaccagaaccuggaguaccagaucggcuacaucugcagcggcaucuucggcgacaaccccagacccaacgacaagaccggcagcugcggccccgugagcagcaacggcgccaacggcgugaagggcuucagcuucaaguacggcaacggcguguggaucggcagaaccaagagcaucagcagcagaaacggcuucgagaugaucugggaccccaacggcuggaccggcaccgacaacaacuucagcaucaagcaggacaucgugggcaucaacgaguggagcggcuacagcggcagcuucgugcagcaccccgagcugaccggccuggacugcaucagacccugcuucuggguggagcugaucagaggcagacccaaggagaacaccaucuggaccagcggcagcaucaucagcuucugcggcgugaacagcgacaccgugggcuggagcuggcccgacggcgccgagcugcccuucaccaucgacaaguga

SEQ ID NO: 179004 - RNA, 1410 nt, Artificial Sequence
  derived and/or modified CDS sequence (opt4) from neuraminidase__InfluenzaA__ADI99623
augaaccccaaccagaagaucaucaccaucggcagcgugugcaugaccaucggcauggccaaccugauccugcagaucggcaacaucaucagcaucuggaucagccacagcauccagcugggcaaccagaaccagaucgagaccugcaaccagagcgugaucaccuacgagaacaacaccugggugaaccagaccuacgugaacaucagcaacaccaacuucgccgccggccagagcguggugagcaugaagcuggccggcaacagcagccugugccccgugagcggcugggccaucuacagcaaggacaacagcaucagaaucggcagcaagggcgacguguucgugaucagagagcccuucaucagcugcagcccccuggagugcagaaccuucuuccugacccagggcgcccugcugaacgacaagcacagcaacggcaccaucaaggacagaagccccuacagaacccugaugagcugccccaucggcgaggugcccagccccuacaacagcagauucgagagcguggccuggagcgccagcgccugccacgacggcaucaacuggcugaccaucggcaucagcggccccgacaacggcgccguggccgugcugaaguacaacggcaucaucaccgacaccaucaagagcuggagaaacaacauccugagaacccaggagagcgagugcgccugcgugaacggcagcugcuucaccgugaugaccgacggccccagcgacggccaggccagcuacaagaucuucagaaucgagaagggcaagaucgugaagagcguggagaugaacgcccccaacuaccacuacgaggagugcagcugcuaccccgacagcaacgagaucaccugcgugugcagagacaacuggcacggcagcaacagacccugggugagcuucaaccagaaccuggaguaccagaucggcuacaucugcagcggcaucuucggcgacaaccccagacccaacgacaagaccggcagcugcggccccgugagcagcaacggcgccaacggcgugaagggcuucagcuucaaguacggcaacggcguguggaucggcagaaccaagagcaucagcagcagaaacggcuucgagaugaucugggaccccaacggcuggaccggcaccgacaacaacuucagcaucaagcaggacaucgugggcaucaacgaguggagcggcuacagcggcagcuucgugcagcaccccgagcugaccggccuggacugcaucagacccugcuucuggguggagcugaucagaggcagacccaaggagaacaccaucuggaccagcggcagcagcaucagcuucugcggcgugaacagcgacaccgugggcuggagcuggcccgacggcgccgagcugcccuucaccaucgacaaguga

SEQ ID NO: 179005 - RNA, 1410 nt, Artificial Sequence; identical to SEQ ID NO: 178086
  derived and/or modified CDS sequence (opt4) from neuraminidase__InfluenzaA__ADI99633

SEQ ID NO: 179006 - RNA, 1410 nt, Artificial Sequence; identical to SEQ ID NO: 178149
  derived and/or modified CDS sequence (opt4) from neuraminidase__InfluenzaA__ADI99643

SEQ ID NO: 179007 - RNA, 1410 nt, Artificial Sequence; identical to SEQ ID NO: 176798
  derived and/or modified CDS sequence (opt4) from neuraminidase__InfluenzaA__ADI99653

SEQ ID NO: 179008 - RNA, 1410 nt, Artificial Sequence; identical to SEQ ID NO: 176798
  derived and/or modified CDS sequence (opt4) from neuraminidase__InfluenzaA__ADI99663

SEQ ID NO: 179009 - RNA, 1410 nt, Artificial Sequence; identical to SEQ ID NO: 176798
  derived and/or modified CDS sequence (opt4) from neuraminidase__InfluenzaA__ADI99673

SEQ ID NO: 179010 - RNA, 1410 nt, Artificial Sequence; identical to SEQ ID NO: 176798
  derived and/or modified CDS sequence (opt4) from neuraminidase__InfluenzaA__ADI99683

SEQ ID NO: 179011 - RNA, 1410 nt, Artificial Sequence; identical to SEQ ID NO: 178260
  derived and/or modified CDS sequence (opt4) from neuraminidase__InfluenzaA__ADI99703

SEQ ID NO: 179012 - RNA, 1410 nt, Artificial Sequence; identical to SEQ ID NO: 176798
  derived and/or modified CDS sequence (opt4) from neuraminidase__InfluenzaA__ADI99713

SEQ ID NO: 179013 - RNA, 1410 nt, Artificial Sequence; identical to SEQ ID NO: 176798
  derived and/or modified CDS sequence (opt4) from neuraminidase__InfluenzaA__ADI99723

SEQ ID NO: 179014 - RNA, 1410 nt, Artificial Sequence; identical to SEQ ID NO: 176798
  derived and/or modified CDS sequence (opt4) from neuraminidase__InfluenzaA__ADI99733

SEQ ID NO: 179015 - RNA, 1410 nt, Artificial Sequence; identical to SEQ ID NO: 176953
  derived and/or modified CDS sequence (opt4) from neuraminidase__InfluenzaA__ADJ00487

SEQ ID NO: 179016 - RNA, 1410 nt, Artificial Sequence; identical to SEQ ID NO: 176953
  derived and/or modified CDS sequence (opt4) from neuraminidase__InfluenzaA__ADJ00488

SEQ ID NO: 179017 - RNA, 1410 nt, Artificial Sequence; identical to SEQ ID NO: 176953
  derived and/or modified CDS sequence (opt4) from neuraminidase__InfluenzaA__ADJ00489

SEQ ID NO: 179018 - RNA, 1410 nt, Artificial Sequence; identical to SEQ ID NO: 176953
  derived and/or modified CDS sequence (opt4) from neuraminidase__InfluenzaA__ADJ00490

SEQ ID NO: 179019 - RNA, 1410 nt, Artificial Sequence; identical to SEQ ID NO: 176953
  derived and/or modified CDS sequence (opt4) from neuraminidase__InfluenzaA__ADJ00491

SEQ ID NO: 179020 - RNA, 1410 nt, Artificial Sequence; identical to SEQ ID NO: 176798
  derived and/or modified CDS sequence (opt4) from neuraminidase__InfluenzaA__ADJ18160

SEQ ID NO: 179021 - RNA, 1410 nt, Artificial Sequence; identical to SEQ ID NO: 176798
  derived and/or modified CDS sequence (opt4) from neuraminidase__InfluenzaA__ADJ18161

SEQ ID NO: 179022 - RNA, 1410 nt, Artificial Sequence
  derived and/or modified CDS sequence (opt4) from neuraminidase__InfluenzaA__ADJ18162
augauccccaaccagaagaucaucaccaucggcagcgugugcaugaccaucggcauggccaaccugauccugcagaucggcaacaucaucagcaucuggaucagccacagcauccagcugggcaaccagaaccagaucgagaccugcaaccagagcgugaucaccuacgagaacaacaccugggugaaccagaccuacgugaacaucagcaacaccaacuucgccgccggccagagcguggugagcgugaagcuggccggcaacagcagccugugccccgugagcggcugggccaucuacagcaaggacaacagcaucagaaucggcagcaagggcgacguguucgugaucagaaagcccuucaucagcugcagcccccuggagugcagaaccuucuuccugacccagggcgcccugcugaacgacaagcacagcaacggcaccaucaaggacagaagccccuacagaacccugaugagcugccccaucggcgaggugcccagccccuacaacagcagauucgagagcguggccuggagcgccagcgccugccacgacggcaucaacuggcugaccaucggcaucagcggccccgacaacggcgccguggccgugcugaaguacaacggcaucaucaccgacaccaucaagagcuggagaaacaacauccugagaacccaggagagcgagugcgccugcgugaacggcagcugcuucaccgugaugaccgacggccccagcgacggccaggccagcuacaagaucuucagaaucgagaagggcaagaucgugaagagcguggagaugaacgcccccaacuaccacuacgaggagugcagcugcuaccccgacagcagcgagaucaccugcgugugcagagacaacuggcacggcagcaacagacccugggugagcuucaaccagaaccuggaguaccagaucggcuacaucugcagcggcaucuucggcgacaaccccagacccaacgacaagaccggcagcugcggccccgugagcagcaacggcgccaacggcgugaagggcuucagcuucaaguacggcaacggcguguggaucggcagaaccaagagcaucagcagcagaaacggcuucgagaugaucugggaccccaacggcuggaccggcaccgacaacaacuucagcaucaagcaggacaucgugggcaucaacgaguggagcggcuacagcggcagcuucgugcagcaccccgagcugaccggccuggacugcaucagacccugcuucuggguggagcugaucagaggcagacccaaggagaacaccaucuggaccagcggcagcagcaucagcuucugcggcgugaacagcgacaccgugggcuggagcuggcccgacggcgccgagcugcccuucaccaucgacaaguga

SEQ ID NO: 179023 - RNA, 1410 nt, Artificial Sequence
  derived and/or modified CDS sequence (opt4) from neuraminidase__InfluenzaA__ADJ18164
augaaccccaagcagaagaucaucaccaucggcagcgugugcaugaccaucggcauggccaaccugauccugcagaucggcaacaucaucagcaucuggaucagccacagcauccagcugggcaaccagaaccagaucgagaccugcaaccagagcgugaucaccuacgagaacaacaccugggugaaccagaccuacgugaacaucagcaacaccaacuucgccgccggccagagcguggugagcgugaagcuggccggcaacagcagccugugcagcgugagcggcugggccaucuacagcaaggacaacagcaucagaaucggcagcaagggcgacguguucgugaucagagagcccuucaucagcugcagcccccuggagugcagaaccuucuuccugacccagggcgcccugcugaacgacaagcacagcaacggcaccaucaaggacagaagccccuacagaacccugaugagcugccccaucggcgaggugcccagccccuacaacagcagauucgagagcguggccuggagcgccagcgccugccacgacggcaucaacuggcugaccaucggcaucagcggccccgacaacggcgccguggccgugcugaaguacaacggcaucaucaccgacaccaucaagagcuggagaaacaacauccugagaacccaggagagcgagugcgccugcgugaacggcagcugcuucaccgugaugaccgacggccccagcgacggccaggccagcuacaagaucuucagaaucgagaagggcaagaucgugaagagcguggagaugaacgcccccaacuaccacuacgaggagugcagcugcuaccccgacagcagcgagaucaccugcgugugcagagacaacuggcacggcagcaacagacccugggugagcuucaaccagaaccuggaguaccagaucggcuacaucugcagcggcaucuucggcgacaaccccagacccaacgacaagaccggcagcugcggccccgugagcagcaacggcgccaacggcgugaagggcuucagcuucaaguacggcaacggcguguggaucggcagaaccaagagcaucagcagcagaaacggcuucgagaugaucugggaccccaacggcuggaccggcaccgacaacaacuucagcaucaagcaggacaucgugggcaucaacgaguggagcggcuacagcggcagcuucgugcagcaccccgagcugaccggccuggacugcaucagacccugcuucuggguggagcugaucagaggcagacccaaggagaacaccaucuggaccagcggcagcagcaucagcuucugcggcgugaacagcgacaccgugggcuggagcuggcccgacggcgccgagcugcccuucaccaucgacaaguga

SEQ ID NO: 179024 - RNA, 1410 nt, Artificial Sequence; identical to SEQ ID NO: 176798
  derived and/or modified CDS sequence (opt4) from neuraminidase__InfluenzaA__ADJ18166

SEQ ID NO: 179025 - RNA, 1410 nt, Artificial Sequence; identical to SEQ ID NO: 176798
  derived and/or modified CDS sequence (opt4) from neuraminidase__InfluenzaA__ADJ18168

SEQ ID NO: 179026 - RNA, 1410 nt, Artificial Sequence; identical to SEQ ID NO: 176798
  derived and/or modified CDS sequence (opt4) from neuraminidase__InfluenzaA__ADJ18170

SEQ ID NO: 179027 - RNA, 1410 nt, Artificial Sequence
  derived and/or modified CDS sequence (opt4) from neuraminidase__InfluenzaA__ADJ18172
augaaccccaaccagaagaucaucaccaucggcagcgugugcaugaccaucggcauggccaaccugauccugagaaucggcaacaucaucagcaucuggaucagccacagcauccagcugggcaaccagaaccagaucgagaccugcaaccagagcgugaucaccuacgagaacaacaccugggugaaccagaccuacgugaacaucagcaacaccaacuucgccgccggccagagcguggugagcgugaagcuggccggcaacagcagccugugccccgugagcggcugggccaucuacagaaaggacaacagcaucagaaucggcagcaagggcgacguguucgugaucagagagcccuucaucagcugcagcccccuggagugcagaaccuucuuccugacccagggcgcccugcugaacgacaagcacagcaacggcaccaucaaggacagaagccccuacagaacccugaugagcugccccaucggcgaggugcccagccccuacaacagcagauucgagagcguggccuggagcgccagcgccugccacgacggcaucaacuggcugaccaucggcaucagcggccccgacaacggcgccguggccgugcugaaguacaacggcaucaucaccgacaccaucaagagcuggagaaacaacauccugagaacccaggagagcgagugcgccugcgugaacggcagcugcuucaccgugaugaccgacggccccagcgacggccaggccagcuacaagaucuucagaaucgagaagggcaagaucgugaagagcguggagaugaacgcccccaacuaccacuacgaggagugcagcugcuaccccgacagcagcgagaucaccugcgugugcagagacaacuggcacggcagcaacagacccugggugagcuucaaccagaaccuggaguaccagaucggcuacaucugcagcggcaucuucggcgacaaccccagacccaacgacaagaccggcagcugcggccccgugagcagcaacggcgccaacggcgugaagggcuucagcuucaaguacggcaacggcguguggaucggcagaaccaagagcaucagcagcagaaacggcuucgagaugaucugggaccccaacggcuggaccggcaccgacaacaacuucagcaucaagcaggacaucgugggcaucaacgaguggagcggcuacagcggcagcuucgugcagcaccccgagcugaccggccuggacugcaucagacccugcuucuggguggagcugaucagaggcagacccaaggagaacaccaucuggaccagcggcagcagcaucagcuucugcggcgugaacagcgacaccgugggcuggagcuggcccgacggcgccgagcugcccuucaccaucgacaaguga

SEQ ID NO: 179028 - RNA, 1410 nt, Artificial Sequence; identical to SEQ ID NO: 176798
  derived and/or modified CDS sequence (opt4) from neuraminidase__InfluenzaA__ADJ18174

SEQ ID NO: 179029 - RNA, 1410 nt, Artificial Sequence
  derived and/or modified CDS sequence (opt4) from neuraminidase__InfluenzaA__ADJ18176
augaaccccaaccagaagaucaucaccaucggcagcgugugcaugaccaucggcauggccaaccugauccugcagaucggcaacaucaucagcaucuggaucagccugagcauccagcugggcaaccagaaccagaucgagaccugcaaccagagcgugaucaccuacgagaacaacaccugggugaaccagaccuacgugaacaucagcaacaccaacuucgccgccggccagagcguggugagcgugaagcuggccggcaacagcagccugugccccgugagcggcugggccaucuacagcaaggacaacagcaucagaaucggcagcaagggcgacguguucgugaucagagagcccuucaucagcugcagcccccuggagugcagaaccuucuuccugacccagggcgcccugcugaacgacaagcacagcaacggcaccaucaaggacagaagccccuacagaacccugaugagcugccccaucggcgaggugcccagccccuacaacagcagauucgagagcguggccuggagcgccagcgccugccacgacggcaucaacuggcugaccaucggcaucagcggccccgacaacggcgccguggccgugcugaaguacaacggcaucaucaccgacaccaucaagagcuggagaaacaacauccugagaacccaggagagcgagugcgccugcgugaacggcagcugcuucaccgugaugaccgacggccccagcgacggccaggccagcuacaagaucuucagaaucgagaagggcaagaucgugaagagcguggagaugaacgcccccaacuaccacuacgaggagugcagcugcuaccccgacagcagcgagaucaccugcgugugcagagacaacuggcacggcagcaacagacccugggugagcuucaaccagaaccuggaguaccagaucggcuacaucugcagcggcaucuucggcgacaaccccagacccaacgacaagaccggcagcugcggccccgugagcagcaacggcgccaacggcgugaagggcuucagcuucaaguacggcaacggcguguggaucggcagaaccaagagcaucagcagcagaaacggcuucgagaugaucugggaccccaacggcuggaccggcaccgacaacaacuucagcaucaagcaggacaucgugggcaucaacgaguggagcggcuacagcggcagcuucgugcagcaccccgagcugaccggccuggacugcaucagacccugcuucuggguggagcugaucagaggcagacccaaggagaacaccaucuggaccagcggcagcagcaucagcuucugcggcgugaacagcgacaccgugggcuggagcuggcccgacggcgccgagcugcccuucaccaucgacaaguga

SEQ ID NO: 179030 - RNA, 1410 nt, Artificial Sequence; identical to SEQ ID NO: 176571
  derived and/or modified CDS sequence (opt4) from neuraminidase__InfluenzaA__ADJ37250

SEQ ID NO: 179031 - RNA, 1410 nt, Artificial Sequence
  derived and/or modified CDS sequence (opt4) from neuraminidase__InfluenzaA__ADJ37252
augaaccccaaccagaagaucaucaccaucggcagcgugagccugaccaucagcaccaucugcuucuucaugcagaucgccauccuggugaccaccgugacccugcacuucaagcaguacgaguucaacagcccccccaacaaccaggugaugcugugcgagcccaccaucaucgagagaaacaucaccgagaucguguaccugaccaacaccaccaucgagaaggagaucugccccaagcuggccgaguacagaaacuggagcaagccccagugcgacaucaccggcuucgcccccuucagcaaggacaacagcaucagacugagcgccggcggcgacaucugggugaccagagagcccuacgugagcugcgaccccgacaagugcuaccaguucgcccugggccagggcaccacccugaacaacgugcacagcaacaacaucgugagagacagaacccccuacagaacccugcugaugaacgagcugggcgugcccuuccaccugggcaccaagcaggugugcaucgccuggagcagcagcagcugccacgacggcaaggccuggcugcacgugugcaucaccggcgacgacaagaacgccaccgccagcuucaucuacaacggcagacugguggacagcguggugagcuggagcaaggacauccugagaacccaggagagcgagugcgugugcaucaacggcaccugcaccguggugaugaccgacggcagcgccagcggcaaggccgacaccaagauccuguucaucgaggagggcaagaucgugcacaccagcacccugagcggcagcgcccagcacguggaggagugcagcugcuaccccagauaccccggcgugagaugcgugugcagagacaacuggaagggcagcaacagacccaucguggacaucaacaucaaggaccacagcaucgugagcagcuacgugugcagcggccuggugggcgacacccccagaaagaacgacagcagcagcagcagccacugccuggaccccaacaacgaggagggcggccacggcgugaagggcugggccuucgacgacggcaacgacguguggaugggcagaaccaucagcgagaagagcagacugggcuacgagaccuucaaggugaucgagggcuggagcaaccccaagagcaagcugcagaucaacagacaggugaucguggacagaggcaacagaagcggcuacagcggcaucuucagcguggagggcaagagcugcaucaacagaugcuucuacguggagcugaucagaggcagaaaggaggagaccgaggugcuguggaccagcaacagcaucgugguguucugcggcaccagcggcaccuacggcaccggcagcuggcccgacggcgccaacaucaaccugaugcccaucuga

SEQ ID NO: 179032 - RNA, 1410 nt, Artificial Sequence; identical to SEQ ID NO: 176798
  derived and/or modified CDS sequence (opt4) from neuraminidase__InfluenzaA__ADJ37263

SEQ ID NO: 179033 - RNA, 1410 nt, Artificial Sequence; identical to SEQ ID NO: 176788
  derived and/or modified CDS sequence (opt4) from neuraminidase__InfluenzaA__ADJ37273

SEQ ID NO: 179034 - RNA, 1410 nt, Artificial Sequence; identical to SEQ ID NO: 176798
  derived and/or modified CDS sequence (opt4) from neuraminidase__InfluenzaA__ADJ40447

SEQ ID NO: 179035 - RNA, 1410 nt, Artificial Sequence; identical to SEQ ID NO: 176798
  derived and/or modified CDS sequence (opt4) from neuraminidase__InfluenzaA__ADJ40457

SEQ ID NO: 179036 - RNA, 1410 nt, Artificial Sequence; identical to SEQ ID NO: 178149
  derived and/or modified CDS sequence (opt4) from neuraminidase__InfluenzaA__ADJ40467

SEQ ID NO: 179037 - RNA, 1410 nt, Artificial Sequence
  derived and/or modified CDS sequence (opt4) from neuraminidase__InfluenzaA__ADJ40477
augaaccccaaccagaagaucaucaccaucggcagcgugugcaugaccaucggcauggccaaccugauccugcagaucggcaacaucaucagcaucuggaucagccacagcauccagcugggcaaccagaaccagaucgagaccugcaaccagagcgugaucaccuacgagaacaacaccugggugaaccagaccuacgugaacaucagcaacaccaacuucgccgccggccagagcguggugagcgugaagcuggccggcaacagcagccugugccccgugagcggcugggccaucuacagcaaggacaacagcaucagaaucggcagcaagggcgacguguucgugaucagagagcccuucaucagcugcagcccccuggagugcagaaccuucuuccugacccagggcgcccugcugaacgacaagcacagcaacggcaccaucaaggacagaagccccuacagaacccugaugagcugccccaucggcgaggugcccagccccuacaacagcagauucgagagcguggccuggagcgccagcgccugccacgacggcaucaacuggcugaccaucggcaucagcggccccgacaacggcgccguggccgugcugaaguacaacggcaucaucaccgacaccaucaagagcuggagaaacaacauccugagaacccaggagagcgagugcgccugcgugaacggcagcugcuucaccgugaugaccgacggccccagcgacggccaggccagcuacaagaucuucagaaucgagaagggcaagaucgugaagagcguggagaugaacgcccccaacuacuacuacgaggagugcagcugcuaccccgacagcagcgagaucaccugcgugugcagagacaacuggcacggcagcaacagacccugggugagcuucaaccagaaccuggaguaccagaucggcuacaucugcagcggcaucuucggcgacaaccccagacccaacgacaagaccggcagcugcggccccgugagcagcaacggcgccaacggcgugaagggcuucagcuucaaguacggcaacggcguguggaucggcagaaccaagagcaucagcagcagaaacggcuucgagaugaucugggaccccaacggcuggaccggcaccgacaacaacuucagcaucaagcaggacaucgugggcaucaacgaguggagcggcuacagcggcagcuucgugcagcaccccgagcugaccggccuggacugcaucagacccugcuucuggguggagcugaucagaggcagacccaaggagaacaccaucuggaccagcggcagcagcaucagcuucugcggcgugaacagcgacaccaugggcuggagcuggcccgacggcgccgagcugcccuucaccaucgacaaguga

SEQ ID NO: 179038 - RNA, 1410 nt, Artificial Sequence; identical to SEQ ID NO: 176798
  derived and/or modified CDS sequence (opt4) from neuraminidase__InfluenzaA__ADJ40487

SEQ ID NO: 179039 - RNA, 1410 nt, Artificial Sequence; identical to SEQ ID NO: 176798
  derived and/or modified CDS sequence (opt4) from neuraminidase__InfluenzaA__ADJ40507

SEQ ID NO: 179040 - RNA, 1410 nt, Artificial Sequence; identical to SEQ ID NO: 176798
  derived and/or modified CDS sequence (opt4) from neuraminidase__InfluenzaA__ADJ40517

SEQ ID NO: 179041 - RNA, 1410 nt, Artificial Sequence; identical to SEQ ID NO: 176798
  derived and/or modified CDS sequence (opt4) from neuraminidase__InfluenzaA__ADJ40527

SEQ ID NO: 179042 - RNA, 1410 nt, Artificial Sequence
  derived and/or modified CDS sequence (opt4) from neuraminidase__InfluenzaA__ADJ40537
augaaccccaaccagaagaucaucaccaucggcagcgugugcaugaccaucggcauggccaaccugauccugcagaucggcaacaucaucagcaucuggaucagccacagcauccagcugggcaaccagaaccagaucgagaccugcaaccagagcgugaucaccuacgagaacaacaccugggugaaccagaccuacgugaacaucagcaacaccaacuucgccgccggccagagcggcgugagcgugaagcuggccggcaacagcagccugugccccgugagcggcugggccaucuacagcaaggacaacagcaucagaaucggcagcaagggcgacguguucgugaucagagagcccuucaucagcugcagcccccuggagugcagaaccuucuuccugacccagggcgcccugcugaacgacaagcacagcaacggcaccaucaaggacagaagccccuacagaacccugaugagcugccccaucggcgaggugcccagccccuacaacagcagauucgagagcguggccuggagcgccagcgccugccacgacggcaucaacuggcugaccaucggcaucagcggccccgacaacggcgccguggccgugcugaaguacaacggcaucaucaccgacaccaucaagagcuggagaaacaacauccugagaacccaggagagcgagugcgccugcgugaacggcagcugcuucaccgugaugaccgacggccccagcgacggccaggccagcuacaagaucuucagaaucgagaagggcaagaucgugaagagcguggagaugaacgcccccaacuaccacuacgaggagugcagcugcuaccccgacagcagcgagaucaccugcgugugcagagacaacuggcacggcagcaacagacccugggugagcuucaaccagaaccuggaguaccagaucggcuacaucugcagcggcaucuucggcgacaaccccagacccaacgacaagaccggcagcugcggccccgugagcagcaacggcgccaacggcgugaagggcuucagcuucaaguacggcaacggcguguggaucggcagaaccaagagcaucagcagcagaaacggcuucgagaugaucugggaccccaacggcuggaccggcaccgacaacaacuucagcaucaagcaggacaucgugggcaucaacgaguggagcggcuacagcggcagcuucgugcagcaccccgagcugaccggccuggacugcaucagacccugcuucuggguggagcugaucagaggcagacccaaggagaacaccaucuggaccagcggcagcagcaucagcuucugcggcgugaacagcgacaccgugggcuggagcuggcccgacggcgccgagcugcccuucaccaucgacaaguga

SEQ ID NO: 179043 - RNA, 1410 nt, Artificial Sequence
  derived and/or modified CDS sequence (opt4) from neuraminidase__InfluenzaA__ADJ40547
augaaccccaaccagaagaucaucaccaucggcagcgugugcaugaccaucggcauggccaaccugauccugcagaucggcaacaucaucagcaucuggaucagccacagcauccagcugggcaaccagaaccagaucgagaccugcaaccagagcgugaucaccuacgagaacaacaccugggugaaccagaccuacgugaacaucagcaacaccaacuucgccgccggccagagcguggugagcgugaagcuggccggcaacagcagccugugccccgugagcggcugggccaucuacagcaaggacaacagcaucagaaucggcagcaagggcgacguguucgugaucagagagcccuucaucagcugcagcccccuggagugcagaaccuucuuccugacccagggcgcccugcugaacgacaagcacagcaacggcaccaucaaggacagaagccccuacagaacccugaugagcugccccaucggcgaggugcccagccccuacaacagcagauucgagagcguggccuggagcgccagcgccugccacgacggcaucaacuggcugaccaucggcaucagcggccccgacaacggcgccguggccgugcugaaguacaacggcaucaucaccgacaccaucaagagcuggagaaacaacauccugagaacccaggagagcgagugcgccugcgugaacggcagcugcuucaccgugaugaccgacggccccagcgacggccaggccagcuacaagaucuucagaaucgagaagggcaagaucaucaagagcguggagaugaacgcccccaacuaccacuacgaggagugcagcugcuaccccgacagcagcgagaucaccugcgugugcagagacaacuggcacggcagcaacagacccugggugagcuucaaccagaaccuggaguaccagaucggcuacaucugcagcggcaucuucggcgacaaccccagacccaacgacaagaccggcagcugcggccccgugagcagcaacggcgccaacggcgugaagggcuucagcuucaaguacggcaacggcguguggaucggcagaaccaagagcaucagcagcagaaacggcuucgagaugaucugggaccccaacggcuggaccggcaccgacaacaacuucagcaucaagcaggacaucaucggcaucaacgaguggagcggcuacagcggcagcuucgugcagcaccccgagcugaccggccuggacugcaucagacccugcuucuggguggagcugaucagaggcagacccaaggagaacaccaucuggaccagcggcagcagcaucagcuucugcggcgugaacagcgacaccgugggcuggagcuggcccgacggcgccgagcugcccuucaccaucgacaaguga

SEQ ID NO: 179044 - RNA, 1410 nt, Artificial Sequence; identical to SEQ ID NO: 176798
  derived and/or modified CDS sequence (opt4) from neuraminidase__InfluenzaA__ADJ40557

SEQ ID NO: 179045 - RNA, 1410 nt, Artificial Sequence; identical to SEQ ID NO: 176798
  derived and/or modified CDS sequence (opt4) from neuraminidase__InfluenzaA__ADJ40577

SEQ ID NO: 179046 - RNA, 1410 nt, Artificial Sequence; identical to SEQ ID NO: 176798
  derived and/or modified CDS sequence (opt4) from neuraminidase__InfluenzaA__ADJ40587

SEQ ID NO: 179047 - RNA, 1410 nt, Artificial Sequence
  derived and/or modified CDS sequence (opt4) from neuraminidase__InfluenzaA__ADJ40597
augaaccccaaccagaagaucaucaccaucggcagcgugugcaugaccaucggcauggccaaccugauccugcagaucggcaacaucaucagcaucuggaucagccacagcauccagcugggcaaccagaaccagaucgagaccugcaaccagagcgugaucaccuacgagaacaacaccugggugaaccagaccuacgugaacaucagcaacaccaacuucgccgccggccagagcguggugagcgugaagcuggccggcaacagcagccugugccccgugagcggcugggccaucuacagcaaggacaacagcaucagaaucggcagcaagggcgacguguucgugaucagagagcccuucaucagcugcagcccccuggagugcagaaccuucuuccugacccagggcgcccugcugaacgacaagcacagcaacggcaccaucaaggacagaagccccuacagaacccugaugagcugccccaucggcgaggugcccagccccuacaacagcagauucgagagcguggccuggagcgccagcgccugccacgacggcaucaacuggcugaccaucggcaucagcggccccgacaacggcgccguggccgugcugaaguacaacggcaucaucaccgacaccaucaagagcuggagaaacaacauccugagaacccaggagagcgagugcgccugcgugaacggcagcugcuucaccgugaugaccgacggccccagcgacggccaggccagcuacaagaucuucagaaucgagaagggcaagaucgugaagagcguggagaugaacgcccccaacuaccacuacgaggagugcagcugcuaccccgacagcagcgagaucaccugcgugugcagagacaacuggcacggcagcaacagacccugggugagcuucaaccagaaccuggaguaccagaucggcuacaucugcagcggcaucuucggcgacaaccccagacccaacgacaagaccggcagcugcggccccgugagcagcaacggcgccaacggcgugaagggcuucagcuucaaguacggcaacggcguguggaucggcagaaccaagagcaucagcagcagaaacggcuucgagaugaucugggaccccaacggcuggaccggcaccgacaacaacuuccugaucaagcaggacaucgugggcaucaacgaguggagcggcuacagcggcagcuucgugcagcaccccgagcugaccggccuggacugcaucagacccugcuucuggguggagcugaucagaggcagacccaaggagaacaccaucuggaccagcggcagcagcaucagcuucugcggcgugaacagcgacaccgugggcuggagcuggcccgacggcgccgagcugcccuucaccaucgacaaguga

SEQ ID NO: 179048 - RNA, 1410 nt, Artificial Sequence; identical to SEQ ID NO: 176798
  derived and/or modified CDS sequence (opt4) from neuraminidase__InfluenzaA__ADJ40607

SEQ ID NO: 179049 - RNA, 1410 nt, Artificial Sequence; identical to SEQ ID NO: 176798
  derived and/or modified CDS sequence (opt4) from neuraminidase__InfluenzaA__ADJ40617

SEQ ID NO: 179050 - RNA, 1410 nt, Artificial Sequence; identical to SEQ ID NO: 177152
  derived and/or modified CDS sequence (opt4) from neuraminidase__InfluenzaA__ADJ40627

SEQ ID NO: 179051 - RNA, 1410 nt, Artificial Sequence; identical to SEQ ID NO: 176798
  derived and/or modified CDS sequence (opt4) from neuraminidase__InfluenzaA__ADJ40637

SEQ ID NO: 179052 - RNA, 1410 nt, Artificial Sequence; identical to SEQ ID NO: 176798
  derived and/or modified CDS sequence (opt4) from neuraminidase__InfluenzaA__ADJ40657

SEQ ID NO: 179053 - RNA, 1410 nt, Artificial Sequence; identical to SEQ ID NO: 176798
  derived and/or modified CDS sequence (opt4) from neuraminidase__InfluenzaA__ADJ40667

SEQ ID NO: 179054 - RNA, 1410 nt, Artificial Sequence; identical to SEQ ID NO: 176798
  derived and/or modified CDS sequence (opt4) from neuraminidase__InfluenzaA__ADJ40677

SEQ ID NO: 179055 - RNA, 1410 nt, Artificial Sequence
  derived and/or modified CDS sequence (opt4) from neuraminidase__InfluenzaA__ADJ41819
augaaccccaaccagaagaucaucaccaucggcagcgugagccugaccaucgccaccaucugcuuccugaugcagaucgccauccuggugaccaccgugacccugcacuucaagcaguacgagugcagcagcccccccaacaaccagguggugcccugcgagcccaucaucaucgagagaaacaucaccgagaucguguaccugaccaacaccaccaucgagaaggagaucugccccaagcugguggaguacagaaacuggagcaagccccagugcaagaucaccggcuucgcccccuucagcaaggacaacagcaucagacugagcgccggcggcgacaucugggugaccagagagcccuacgugagcugcgaccccggcaagugcuaccaguucgcccugggccagggcaccacccuggacaacaagcacagcaacgacaccauccacgacagaacccccuacagaacccugcugaugaacgagcugggcgugcccuuccaccugggcaccagacaggugugcaucgccuggagcagcagcagcugccacgacggcaaggccuggcugcacgugugcaucaccggcuacgacaagaacgccaccgccagcuucaucuacgacggcagacugguggacagcaucggcagcuggagcaagaacauccugagaacccaggagagcgagugcgugugcaucaacggcaccugcaccguggugaugaccgacggcagcgccagcgagagagccgacaccaagauccuguucaucgaggagggcaagaucgugcacaucagcccccugagcggcagcgcccagcacguggaggagugcagcugcuaccccagauaccccggcgugagaugcgugugcagagacaacuggaagggcagcaacagacccgugguggacaucaacgugaaggacuacagcaucgugagcagcuacgugugcagcggccuggugggcgacacccccagaaagaacgacagaagcagcagcagcuacugcagaaaccccaacaacgagaagggcaaccacggcgugaagggcugggccuucgacgacggcaacgacguguggaugggcagaaccaucagcgaggagagcagaagcggcuacgagaccuucaaggugaucggcggcuggagcacccccaacagcaagcugcagaucaacagacaggugaucguggacagcggcaacagaagcggcuacagcggcaucuucagcguggagggcaagagcugcaucaacagaugcuucuacguggagcugaucagaggcagagagcaggagaccagagugugguggaccagcaacagcaucgugguguucugcggcaccagcggcaccuacggcaccggcagcuggcccgacggcgccgacaucaaccugaugcccaucuga

SEQ ID NO: 179056 - RNA, 1410 nt, Artificial Sequence; identical to SEQ ID NO: 176798
  derived and/or modified CDS sequence (opt4) from neuraminidase__InfluenzaA__ADJ56642

SEQ ID NO: 179057 - RNA, 1410 nt, Artificial Sequence; identical to SEQ ID NO: 176798
  derived and/or modified CDS sequence (opt4) from neuraminidase__InfluenzaA__ADJ56652

SEQ ID NO: 179058 - RNA, 1410 nt, Artificial Sequence; identical to SEQ ID NO: 176798
  derived and/or modified CDS sequence (opt4) from neuraminidase__InfluenzaA__ADJ80637

SEQ ID NO: 179059 - RNA, 1410 nt, Artificial Sequence; identical to SEQ ID NO: 177816
  derived and/or modified CDS sequence (opt4) from neuraminidase__InfluenzaA__ADJ80647

SEQ ID NO: 179060 - RNA, 1410 nt, Artificial Sequence; identical to SEQ ID NO: 177816
  derived and/or modified CDS sequence (opt4) from neuraminidase__InfluenzaA__ADJ80657

SEQ ID NO: 179061 - RNA, 1410 nt, Artificial Sequence; identical to SEQ ID NO: 176798
  derived and/or modified CDS sequence (opt4) from neuraminidase__InfluenzaA__ADJ80667

SEQ ID NO: 179062 - RNA, 1410 nt, Artificial Sequence; identical to SEQ ID NO: 178711
  derived and/or modified CDS sequence (opt4) from neuraminidase__InfluenzaA__ADJ80677

SEQ ID NO: 179063 - RNA, 1410 nt, Artificial Sequence; identical to SEQ ID NO: 178086
  derived and/or modified CDS sequence (opt4) from neuraminidase__InfluenzaA__ADJ80687

SEQ ID NO: 179064 - RNA, 1410 nt, Artificial Sequence
  derived and/or modified CDS sequence (opt4) from neuraminidase__InfluenzaA__ADJ80697
augaaccccaaccagaagaucaucaccaucggcagcgugugcaugaccaucggcauggccaaccugauccugcagaucggcaacaucaucagcaucuggaucagccacagcauccagcugggcaaccagaaccagaucgagaccugcaaccagagcgugaucaccuacgagaacaacaccugggugaaccagaccuacgugaacaucagcaacaccaacuucgccgccggccagagcgugaucagcgugaagcuggccggcaacagcagccugugccccgugagcggcugggccaucuacagcaaggacaacagcgugagaaucggcagcaagggcgacguguucgugaucagagagcccuucaucagcugcagcccccuggagugcagaaccuucuuccugacccagggcgcccugcugaacgacaagcacagcaacggcaccaucaaggacagaagccccuacagaacccugaugagcugccccaucggcgaggugcccagccccuacaacagcagauucgagagcguggccuggagcgccagcgccugccacgacggcaucaacuggcugaccaucggcaucagcggccccgacaacggcgccguggccgugcugaaguacaacggcaucaucaccgacaccaucaagagcuggagaaacaacauccugagaacccaggagagcgagugcgccugcgugaacggcagcugcuucaccgugaugaccgacggccccagcgacggccaggccagcuacaagaucuucagaaucgagaagggcaagaucgugaagagcguggagaugaacgcccccaacuaccacuacgaggagugcagcugcuaccccgacagcagcgagaucaccugcgugugcagagacaacuggcacggcagcaacagacccugggugagcuucaaccagaaccuggaguaccagaucggcuacaucugcagcggcaucuucggcgacaaccccagacccaacgacaagaccggcagcugcggccccgugagcagcaacggcgccaacggcgugaagggcuucagcuucaaguacggcaacggcguguggaucggcagaaccaagagcaucagcagcagaaacggcuucgagaugaucugggaccccaacggcuggaccggcaccgacaacaacuucagcaucaagcaggacaucgugggcaucaacgaguggagcggcuacagcggcagcuucgugcagcaccccgagcugaccggccuggacugcaucagacccugcuucuggguggagcugaucagaggcagacccaaggagaacaccaucuggaccagcggcagcagcaucagcuucugcggcgugaacagcgacaccgugggcuggagcuggcccgacggcgccgagcugcccuucaccaucgacaaguga

SEQ ID NO: 179065 - RNA, 1410 nt, Artificial Sequence
  derived and/or modified CDS sequence (opt4) from neuraminidase__InfluenzaA__ADJ80717
augaaccccaaccagaagaucaucaccaucggcagcgugugcaugaccaucggcauggccaaccugauccugcagaucggcaacaucaucagcaucuggaucagccacagcauccagcugggcaaccagaaccagaucgagaccugcaaccagagcgugaucaccuacgagaacaacaccugggugaaccagaccuacgugaacaucagcaacaccaacuucgccgccggccagagcguggugagcgugaagcuggccggcaacagcagccugugccccgugagcggcugggccguguacagcaaggacaacagcaucagaaucggcagcaagggcgacguguucgugaucagagagcccuucaucagcugcagcccccuggagugcagaaccuucuuccugacccagggcgcccugcugaacgacaagcacagcaacggcaccaucaaggacagaagccccuacagaacccugaugagcugccccaucggcgaggugcccagccccuacaacagcagauucgagagcguggccuggagcgccagcgccugccacgacggcaucaacuggcugaccaucggcaucagcggccccgacaacggcgccguggccgugcugaaguacaacggcaucaucaccgacaccaucaagagcuggagaaacaacauccugagaacccaggagagcgagugcgccugcgugaacggcagcugcuucaccgugaugaccgacggccccagcgacggccaggccagcuacaagaucuucagaaucgagaagggcaagaucgugaagagcguggagaugaacgcccccaacuaccacuacgaggagugcagcugcuaccccgacagcagcgagaucaccugcgugugcagagacaacuggcacggcagcaacagacccugggugagcuucaaccagaaccuggaguaccagaucggcuacaucugcagcggcaucuucggcgacaaccccagacccaacgacaagaccggcagcugcggccccgugagcagcaacggcgccaacggcgugaagggcuucagcuucaaguacggcaacggcguguggaucggcagaaccaagagcaucagcagcagaaacggcuucgagaugaucugggaccccaacggcuggaccggcaccgacaacaacuucagcaucaagcaggacaucgugggcaucaacgaguggagcggcuacagcggcagcuucgugcagcaccccgagcugaccggccuggacugcaucagacccugcuucuggguggagcugaucagaggcagacccaaggagaacaccaucuggaccagcggcagcagcaucagcuucugcggcgugaacagcgacaccgugggcuggagcuggcccgacggcgccgagcugcccuucaccaucgacaaguga

SEQ ID NO: 179066 - RNA, 1410 nt, Artificial Sequence
  derived and/or modified CDS sequence (opt4) from neuraminidase__InfluenzaA__ADJ80727
augaaccccaaccagaagaucaucaccaucggcagcgugugcaugaccaucggcauggccaaccugauccugcagaucggcaacaucaucagcaucuggaucagccacagcauccagcugggcaaccagaaccagaucgagaccugcaaccagagcgugaucaccuacgagaacaacaccugggugaaccagaccuacgugaacaucagcaacaccaacuucgccgccggccagagcguggugagcgugaagcuggccggcaacagcagccugugccccgugagcggcugggugaucuacagcaaggacaacagcaucagaaucggcagcaagggcgacguguucgugaucagagagcccuucaucagcugcagcccccuggagugcagaaccuucuuccugacccagggcgcccugcugaacgacaagcacagcaacggcaccaucaaggacagaagccccuacagaacccugaugagcugccccaucggcgaggugcccagccccuacaacagcagauucgagagcguggccuggagcgccagcgccugccacgacggcaucaacuggcugaccaucggcaucagcggccccgacaacggcgccguggccgugcugaaguacaacggcaucaucaccgacaccaucaagagcuggagaaacaacauccugagaacccaggagagcgagugcgccugcgugaacggcagcugcuucaccgugaugaccgacggccccagcgacggccaggccagcuacaagaucuucagaaucgagaagggcaagaucgugaagagcguggagaugaacgcccccaacuaccacuacgaggagugcagcugcuaccccgacagcagcgagaucaccugcgugugcagagacaacuggcacggcagcaacagacccugggugagcuucaaccagaaccuggaguaccagaucggcuacaucugcagcggcaucuucggcgacaaccccagacccaacgacaagaccggcagcugcggccccgugagcagcaacggcgccaacggcgugaagggcuucagcuucaaguacggcaacggcguguggaucggcagaaccaagagcaucagcagcagaaacggcuucgagaugaucugggaccccaacggcuggaccggcaccgacaacaacuucagcaucaagcaggacaucgugggcaucaacgaguggagcggcuacagcggcagcuucgugcagcaccccgagcugaccggccuggacugcaucagacccugcuucuggguggagcugaucagaggcagacccaaggagaacaccaucuggaccagcggcagcagcaucagcuucugcggcgugaacagcgacaccgugggcuggagcuggcccgacggcgccgagcugcccuucaccaucgacaaguga

SEQ ID NO: 179067 - RNA, 1410 nt, Artificial Sequence; identical to SEQ ID NO: 177565
  derived and/or modified CDS sequence (opt4) from neuraminidase__InfluenzaA__ADJ80737

SEQ ID NO: 179068 - RNA, 1410 nt, Artificial Sequence
  derived and/or modified CDS sequence (opt4) from neuraminidase__InfluenzaA__ADJ80747
augaaccccaaccagaagaucaucaccaucggcagcgugugcaugaccaucggcauggccaaccugauccugcagaucggcaacaucaucagcaucuggaucagccacagcauccagcugggcaaccagaaccagaucgagaccugcaaccagagcgugaucaccuacgagaacaacaccugggugaaccagaccuacgugaacaucagcaacaccaacuucgccgccggccagagcguggugagcgugaagcuggccggcagcagcagccugugccccgugagcggcugggccaucuacagcaaggacaacagcaucagaaucggcagcaagggcgacguguucgugaucagagagcccuucaucagcugcagcccccuggagugcagaaccuucuuccugacccagggcgcccugcugaacgacaagcacagcaacggcaccaucaaggacagaagccccuacagaacccugaugagcugccccaucggcgaggugcccagccccuacaacagcagauucgagagcguggccuggagcgccagcgccugccacgacggcaucaacuggcugaccaucggcaucagcggccccgacaacggcgccguggccgugcugaaguacaacggcaucaucaccgacaccaucaagagcuggagaaacaacauccugagaacccaggagagcgagugcgccugcgugaacggcagcugcuucaccgugaugaccgacggccccagcgacggccaggccagcuacaagaucuucagaaucgagagaggcaagaucgugaagagcguggagaugaacgcccccaacuaccacuacgaggagugcagcugcuaccccgacagcagcgagaucaccugcgugugcagagacaacuggcacggcagcaacagacccugggugagcuucaaccagaaccuggaguaccagaucggcuacaucugcagcggcaucuucggcgacaaccccagacccaacgacaagaagggcagcugcggccccgugagcagcaacggcgccaacggcgugaagggcuucagcuucaaguacggcaacggcguguggaucggcagaaccaagagcaucagcagcagaaacggcuucgagaugaucugggaccccaacggcuggaccggcaccgacaacaacuucagcaucaagcaggacaucguggagaucaacgaguggagcggcuacagcggcagcuucgugcagcaccccgagcugaccggccuggacugcaucagacccugcuucuggguggagcugaucagaggcagacccaaggagaacaccaucuggaccagcggcagcagcaucagcuucugcggcgugaacagcgacaccgugggcuggagcuggcccgacggcgccgagcugcccuucaccaucgacaaguga

SEQ ID NO: 179069 - RNA, 1410 nt, Artificial Sequence; identical to SEQ ID NO: 176798
  derived and/or modified CDS sequence (opt4) from neuraminidase__InfluenzaA__ADJ80757

SEQ ID NO: 179070 - RNA, 1410 nt, Artificial Sequence; identical to SEQ ID NO: 176798
  derived and/or modified CDS sequence (opt4) from neuraminidase__InfluenzaA__ADJ80767

SEQ ID NO: 179071 - RNA, 1410 nt, Artificial Sequence; identical to SEQ ID NO: 177381
  derived and/or modified CDS sequence (opt4) from neuraminidase__InfluenzaA__ADJ80777

SEQ ID NO: 179072 - RNA, 1410 nt, Artificial Sequence; identical to SEQ ID NO: 176798
  derived and/or modified CDS sequence (opt4) from neuraminidase__InfluenzaA__ADJ80787

SEQ ID NO: 179073 - RNA, 1410 nt, Artificial Sequence
  derived and/or modified CDS sequence (opt4) from neuraminidase__InfluenzaA__ADJ80797
augaaccccaaccagaagaucaucaccaucggcagcgugugcaugaccaucggcauggccaaccugauccugcagaucggcaacaucaucagcaucuggaucagccacagcauccagcugggcaacaagaaccagaucgagaccugcaaccagagcgugaucaccuacgagaacaacaccugggugaaccagaccuacgugaacaucagcaacaccaacuucgccgccggccagagcguggugagcgugaagcuggccggcaacagcagccugugccccgugagcggcugggccaucuacagcaaggacaacagcaucagaaucggcagcaagggcgacguguucgugaucagagagcccuucaucagcugcagcccccuggagugcagaaccuucuuccugacccagggcgcccugcugaacgacaagcacagcaacggcaccaucaaggacagaagccccuacagaacccugaugagcugccccaucggcgaggugcccagccccuacaacagcagauucgagagcguggccuggagcgccagcgccugccacgacggcaucaacuggcugaccaucggcaucagcggccccgacaacggcgccguggccgugcugaaguacaacggcaucaucaccgacaccaucaagagcuggagaaacaacauccugagaacccaggagagcgagugcgccugcgugaacggcagcugcuucaccgugaugaccgacggccccagcgacggccaggccagcuacaagaucuucagaaucgagaagggcaagaucgugaagagcguggagaugaacgcccccaacuaccacuacgaggagugcagcugcuaccccgacagcagcgagaucaccugcgugugcagagacaacuggcacggcagcaacagacccugggugagcuucaaccagaaccuggaguaccagaucggcuacaucugcagcggcaucuucggcgacaaccccagacccaacgacaagaagggcagcugcggccccgugagcagcaacggcgccaacggcgugaagggcuucagcuucaaguacggcaacggcguguggaucggcagaaccaagagcaucagcagcagaaacggcuucgagaugaucugggaccccaacggcuggaccggcaccgacaacaacuucagcaucaagcaggacaucgugggcaucaacgaguggagcggcuacagcggcagcuucgugcagcaccccgagcugaccggccuggacugcaucagacccugcuucuggguggagcugaucagaggcagacccaaggagaacaccaucuggaccagcggcagcagcaucagcuucugcggcgugaacagcgacaccgugggcuggagcuggcccgacggcgccgagcugcccuucaccaucgacaaguga

SEQ ID NO: 179074 - RNA, 1410 nt, Artificial Sequence; identical to SEQ ID NO: 177816
  derived and/or modified CDS sequence (opt4) from neuraminidase__InfluenzaA__ADJ80807

SEQ ID NO: 179075 - RNA, 1410 nt, Artificial Sequence; identical to SEQ ID NO: 176798
  derived and/or modified CDS sequence (opt4) from neuraminidase__InfluenzaA__ADJ80817

SEQ ID NO: 179076 - RNA, 1410 nt, Artificial Sequence; identical to SEQ ID NO: 176798
  derived and/or modified CDS sequence (opt4) from neuraminidase__InfluenzaA__ADJ80827

SEQ ID NO: 179077 - RNA, 1410 nt, Artificial Sequence; identical to SEQ ID NO: 178311
  derived and/or modified CDS sequence (opt4) from neuraminidase__InfluenzaA__ADJ80837

SEQ ID NO: 179078 - RNA, 1410 nt, Artificial Sequence; identical to SEQ ID NO: 178809
  derived and/or modified CDS sequence (opt4) from neuraminidase__InfluenzaA__ADJ80851

SEQ ID NO: 179079 - RNA, 1410 nt, Artificial Sequence
  derived and/or modified CDS sequence (opt4) from neuraminidase__InfluenzaA__ADJ80861
augaaccccaaccagaagaucaucaccaucggcagcgugugcaugaccaucggcauggccaaccugauccugcagaucggcaacaucaucagcaucuggaucagccacagcauccagcugggcaaccagaaccagaucgagaccugcaaccagagcgugaucaccuacgagaacaacaccugggugaaccagaccuacgugaacaucagcaacaccaacuucgccgccggccagagcguggugagcgugaagcuggccggcaacagcagccugugccccgugagcggcugggccaucuacagcaaggacaacagcaucagaaucggcagcaagggcgacguguucgugaucagagagcccuucaucagcugcagcccccuggagugcagaaccuucuuccugacccagggcgcccugcugaacgacaagcacagcaacggcaccaucaaggacagaagccccuacagaacccugaugagcugccccaucggcgaggugcccagccccuacaacagcagauucgagagcguggccuggagcgccagcgccugccacgacggcaucaacuggcugaccaucggcaucagcggccccgacaacggcgccguggccgugcugaaguacaacggcaucaucaccgacaccaucaagagcuggagaaacaacauccugagaacccaggagagcgagugcgccugcgugaacggcagcugcuucaccgugaugaccgacggccccagcgacggccaggccagcuacaagaucuucagaaucgagaagggcaagaucgugaagagcguggagaugaacgcccccaacuaccacuacgaggagugcagcugcuaccccgacagcagcgagaucaccugcgugugcagagacaacuggcacggcagcaacagacccugggugagcuucaaccagaaccuggaguaccagaucggcuacaucugcagcggcaucuucggcgacaaccccagacccaacgacaagaccggcagcugcggccccgugagccccaacggcgccaacggcgugaagggcuucagcuucaaguacggcaacggcguguggaucggcagaaccaagagcaucagcagcagaaacggcuucgagaugaucugggaccccaacggcuggaccggcaccgacaacaacuucagcaucaagcaggacaucgugggcaucaacgaguggagcggcuacagcggcagcuucgugcagcaccccgagcugaccggccuggacugcaucagacccugcuucuggguggagcugaucagaggcagacccaaggagaacaccaucuggaccagcggcagcagcaucagcuucugcggcgugaacagcgacaccgugggcuggagcuggcccgacggcgccgagcugcccuucaccaucgacaaguga

SEQ ID NO: 179080 - RNA, 1410 nt, Artificial Sequence; identical to SEQ ID NO: 179073
  derived and/or modified CDS sequence (opt4) from neuraminidase__InfluenzaA__ADJ80871

SEQ ID NO: 179081 - RNA, 1410 nt, Artificial Sequence; identical to SEQ ID NO: 176798
  derived and/or modified CDS sequence (opt4) from neuraminidase__InfluenzaA__ADJ80886

SEQ ID NO: 179082 - RNA, 1410 nt, Artificial Sequence
  derived and/or modified CDS sequence (opt4) from neuraminidase__InfluenzaA__ADJ80896
augaaccccaaccagaagaucaucaccaucggcagcgugugcaugaccaucggcauggccaaccugauccugcagaucggcaacaucaucagcaucuggaucagccacagcauccagcugggcaaccagaaccagaucgagaccugcaaccagagcaucaucaccuacgagaacaacaccugggugaaccagaccuacgugaacaucagcaacaccaacuucgccgccggccagagcguggugagcgugaagcugaccggcaacagcagccugugccccgugagcggcugggccaucuacagcaaggacaacagcaucagaaucggcagcaagggcgacguguucgugaucagagagcccuucaucagcugcagcccccuggagugcagaaccuucuuccugacccagggcgcccugcugaacgacaagcacagcaacggcaccaucaaggacagaagccccuacagaacccugaugagcugccccaucggcgaggugcccagccccuacaacagcagauucgagagcguggccuggagcgccagcgccugccacgacggcaucaacuggcugaccaucggcaucagcggccccgacaacggcgccguggccgugcugaaguacaacggcaucaucaccgacaccaucaagagcuggagaaacaacauccugagaacccaggagagcgagugcgccugcgugaacggcagcugcuucaccgugaugaccgacggccccagcgacggccaggccagcuacaagaucuucagaaucgagaagggcaagaucgugaagagcguggagaugaacgcccccaacuaccacuacgaggagugcagcugcuaccccgacagcagcgagaucaccugcgugugcagagacaacuggcacggcagcaacagacccugggugagcuucaaccagaaccuggaguaccagaucggcuacaucugcagcggcaucuucggcgacaaccccagacccaacgacaagaccggcagcugcggccccgugagcagcaacggcgccaacggcgugaagggcuucagcuucaaguacggcaacggcguguggaucggcagaaccaagagcaucagcagcagaaacggcuucgagaugaucugggaccccaacggcuggaccggcaccgacaacaacuucagcaucaagcaggacaucgugggcaucaacgaguggagcggcuacagcggcagcuucgugcagcaccccgagcugaccggccuggacugcaucagacccugcuucuggguggagcugaucagaggcagacccaaggagaacaccaucuggaccagcggcagcagcaucagcuucugcggcgugaacagcgacaccgugggcuggagcuggcccgacggcgccgagcugcccuucaccaucgacaaguga

SEQ ID NO: 179083 - RNA, 1410 nt, Artificial Sequence
  derived and/or modified CDS sequence (opt4) from neuraminidase__InfluenzaA__ADJ80913
augaaccccaaccagaagaucaucaccaucggcagcgugugcaugaccaucggcauggccaaccugauccugcagaucggcaacaucaucagcaucuggaucagccacagcauccagcugggcaaccagaaccagaucgagaccugcaaccagagcgugaucaccuacgagaacaacaccugggugaaccagaccuacgugaacaucagcaacaccaacuucgccgccggccagagcguggugagcgugaagcuggccggcagcagcagccugugccccgugagcggcugggccaucuacagcaaggacaacagcaucagaaucggcagcaagggcgacguguucgugaucagagagcccuucaucagcugcagcccccuggagugcagaaccuucuuccugacccagggcgcccugcugaacgacaagcacagcaacggcaccaucaaggacagaagccccuacagaacccugaugagcugccccaucggcgaggugcccagccccuacaacagcagauucgagagcguggccuggagcgccagcgccugccacgacggcaucaacuggcugaccaucggcaucagcggccccgacaacggcgccguggccgugcugaaguacaacggcaucaucaccgacaccaucaagagcuggagaaacaacauccugagaacccaggagagcgagugcgccugcgugaacggcagcugcuucaccgugaugaccgacggccccagcgacggccaggccagcuacaagaucuucagaaucgagaagggcaagaucgugaagagcguggagaugaacgcccccaacuaccacuacgaggagugcagcugcuaccccgacagcagcgagaucaccugcgugugcagagacaacuggcacggcagcaacagacccugggugagcuucaaccagaaccuggaguaccagaucggcuacaucugcagcggcaucuucggcgacaaccccagacccaacgacaagaagggcagcugcggccccgugagcagcaacggcgccaacggcgugaagggcuucagcuucaaguacggcaacggcguguggaucggcagaaccaagagcaucagcagcagaagcggcuucgagaugaucugggaccccaacggcuggaccggcaccgacaacaacuucagcaucaagcaggacaucgugggcaucaacgaguggagcggcuacagcggcagcuucgugcagcaccccgagcugaccggccuggacugcaucagacccugcuucuggguggagcugaucagaggcagacccaaggagaacaccaucuggaccagcggcagcagcaucagcuucugcggcgugaacagcgacaccgugggcuggagcuggcccgacggcgccgagcugcccuucaccaucgacaaguga

SEQ ID NO: 179084 - RNA, 1410 nt, Artificial Sequence; identical to SEQ ID NO: 176798
  derived and/or modified CDS sequence (opt4) from neuraminidase__InfluenzaA__ADJ80930

SEQ ID NO: 179085 - RNA, 1410 nt, Artificial Sequence; identical to SEQ ID NO: 176798
  derived and/or modified CDS sequence (opt4) from neuraminidase__InfluenzaA__ADJ80950

SEQ ID NO: 179086 - RNA, 1410 nt, Artificial Sequence; identical to SEQ ID NO: 178086
  derived and/or modified CDS sequence (opt4) from neuraminidase__InfluenzaA__ADJ80960

SEQ ID NO: 179087 - RNA, 1410 nt, Artificial Sequence; identical to SEQ ID NO: 179073
  derived and/or modified CDS sequence (opt4) from neuraminidase__InfluenzaA__ADJ80970

SEQ ID NO: 179088 - RNA, 1410 nt, Artificial Sequence; identical to SEQ ID NO: 176798
  derived and/or modified CDS sequence (opt4) from neuraminidase__InfluenzaA__ADJ80980

SEQ ID NO: 179089 - RNA, 1410 nt, Artificial Sequence; identical to SEQ ID NO: 179073
  derived and/or modified CDS sequence (opt4) from neuraminidase__InfluenzaA__ADJ80996

SEQ ID NO: 179090 - RNA, 1410 nt, Artificial Sequence
  derived and/or modified CDS sequence (opt4) from neuraminidase__InfluenzaA__ADJ81006
augaaccccaaccagaagaucaucaccaucggcagcgugugcaugaccaucggcauggccaaccugauccugcaggugggcaacaucaucagcaucuggaucagccacagcauccagcugggcaaccagaaccagaucgagaccugcaaccagagcaucaucaccuacgagaacaacaccugggugaaccagaccuacgugaacaucagcaacaccaacuucgccgccggccagagcguggugagcgugaagcuggccggcaacagcagccugugccccgugagcggcugggccaucuacagcaaggacaacagcaucagaaucggcagcaagggcgacguguucgugaucagagagcccuucaucagcugcagcccccuggagugcagaaccuucuuccugacccagggcgcccugcugaacgacaagcacagcaacggcaccaucaaggacagaagccccuacagaacccugaugagcugccccaucggcgaggugcccagccccuacaacagcagauucgagagcguggccuggagcgccagcgccugccacgacggcaucaacuggcugaccaucggcaucagcggccccgacaacggcgccguggccgugcugaaguacaacggcaucaucaccgacaccaucaagagcuggagaaacaacauccugagaacccaggagagcgagugcgccugcgugaacggcagcugcuucaccgugaugaccgacggccccagcgacggccaggccagcuacaagaucuucagaaucgagaagggcaagaucgugaagagcguggagaugaacgcccccaacuaccacuacgaggagugcagcugcuaccccgacagcagcgagaucaccugcgugugcagagacaacuggcacggcagcaacagacccugggugagcuucaaccagaaccuggaguaccagaucggcuacaucugcagcggcaucuucggcgacaaccccagacccaacgacaagaccggcagcugcggccccgugagcagcaacggcgccaacggcgugaagggcuucagcuucaaguacggcaacggcguguggaucggcagaaccaagagcaccagcagcagaaacggcuucgagaugaucugggaccccaacggcuggaccggcaccgacaacaacuucagcaucaagcaggacaucgugggcaucaacgaguggagcggcuacagcggcagcuucgugcagcaccccgagcugaccggccuggacugcaucagacccugcuucuggguggagcugaucagaggcagacccaaggagaacaccaucuggaccagcggcagcagcaucagcuucugcggcgugaacagcgacaccgugggcuggagcuggcccgacggcgccgagcugcccuucaccaucgacaaguga

SEQ ID NO: 179091 - RNA, 1410 nt, Artificial Sequence; identical to SEQ ID NO: 178809
  derived and/or modified CDS sequence (opt4) from neuraminidase__InfluenzaA__ADJ81016

SEQ ID NO: 179092 - RNA, 1410 nt, Artificial Sequence; identical to SEQ ID NO: 178998
  derived and/or modified CDS sequence (opt4) from neuraminidase__InfluenzaA__ADJ81026

SEQ ID NO: 179093 - RNA, 1410 nt, Artificial Sequence; identical to SEQ ID NO: 176798
  derived and/or modified CDS sequence (opt4) from neuraminidase__InfluenzaA__ADJ81036

SEQ ID NO: 179094 - RNA, 1410 nt, Artificial Sequence
  derived and/or modified CDS sequence (opt4) from neuraminidase__InfluenzaA__ADJ81046
augaaccccaaccagaagaucaucaccaucggcagcgugugcaugaccgugggcauggccaaccugauccugcagaucggcaacaucaucagcaucuggaucagccacagcauccagcugggcaaccagaaccagaucgagaccugcaaccagagcgugaucaccuacgagaacaacaccugggugaaccagaccuacgugaacaucagcaacaccaacuucgccgccggccagagcguggugagcgugaagcuggccggcaacagcagccugugccccgugagcggcugggccaucuacagcaaggacaacagcaucagaaucggcagcaagggcgacguguucgugaucagagagcccuucaucagcugcagcccccuggagugcagaaccuucuuccugacccagggcgcccugcugaacgacaagcacagcaacggcaccaucaaggacagaagccccuacagaacccugaugagcugccccaucggcgaggugcccagccccuacaacagcagauucgagagcguggccuggagcgccagcgccugccacgacggcaucaacuggcugaccaucggcaucagcggccccgacaacggcgccguggccgugcugaaguacaacggcaucaucaccgacaccaucaagagcuggagaaacaacauccugagaacccaggagagcgagugcgccugcgugaacggcagcugcuucaccgugaugaccgacggccccagcgacggccaggccagcuacaagaucuucagaaucgagaagggcaagaucgugaagagcguggagaugaacgcccccaacuaccacuacgaggagugcagcugcuaccccgacagcagcgagaucaccugcgugugcagagacaacuggcacggcagcaacagacccugggugagcuucaaccagaaccuggaguaccagaucggcuacaucugcagcggcaucuucggcgacaaccccagacccaacgacaagaccggcagcugcggccccgugagcagcaacggcgccaacggcgugaagggcuucagcuucaaguacggcaacggcguguggaucggcagaaccaagagcaucaacagcagaaacggcuucgagaugaucugggaccccaacggcuggaccggcaccgacaacaacuucagcaucaagcaggacaucgugggcaccaacgaguggagcggcuacagcggcagcuucgugcagcaccccgagcugaccggccuggacugcaucagacccugcuucuggguggagcugaucagaggcagacccaaggagaacaccaucuggaccagcggcagcagcaucagcuucugcggcgugaacagcgacaccgugggcuggagcuggcccgacggcgccgagcugcccuucaccaucgacaaguga

SEQ ID NO: 179095 - RNA, 1410 nt, Artificial Sequence
  derived and/or modified CDS sequence (opt4) from neuraminidase__InfluenzaA__ADJ81056
augaaccccaaccagaagaucaucaccaucggcagcgugugcaugaccaucggcauggccaaccugauccugcagaucggcaacaucaucagcaucuggaucagccacagcauccagcugggcaaccagaaccagaucgagaccugcaaccagagcgugaucaccuacgagaacaacaccugggugaaccagaccuacgugaacaucagcaacaccaacuucgccgccggccagagcguggugcccgugaagcuggccggcagcagcagccugugccccgugagcggcugggccaucuacagcaaggacaacagcaucagaaucggcagcaagggcgacguguucgugaucagagagcccuucaucagcugcagcccccuggagugcagaaccuucuuccugacccagggcgcccugcugaacgacaagcacagcaacggcaccaucaaggacagaagccccuacagaacccugaugagcugccccaucggcgaggugcccagccccuacaacagcagauucgagagcguggccuggagcgccagcgccugccacgacggcaucaacuggcugaccaucggcaucagcggccccgacaacggcgccguggccgugcugaaguacaacggcaucaucaccgacaccaucaagagcuggagaaacaacauccugagaacccaggagagcgagugcgccugcgugaacggcagcugcuucaccgugaugaccgacggccccagcgacggccaggccagcuacaagaucuucagaaucgagaagggcaagaucgugaagagcguggagaugaacgcccccaacuaccacuacgaggagugcagcugcuaccccgacagcagcgagaucaccugcgugugcagagacaacuggcacggcagcaacagacccugggugagcuucaaccagaaccuggaguaccagaucggcuacaucugcagcggcaucuucggcgacaaccccagacccaacgacaagaagggcagcugcggccccgugagcagcaacggcgccaacggcgugaagggcuucagcuucaaguacggcaacggcguguggaucggcagaaccaagagcaucaacagcagaaacggcuucgagaugaucugggaccccaacggcuggaccggcaccgacaacaacuucagcaucaagcaggacaucgugggcaucaacgaguggagcggcuacagcggcagcuucgugcagcaccccgagcugaccggccuggacugcaucagacccugcuucuggguggagcugaucagaggcagacccaaggagaacaccaucuggaccagcggcagcagcaucagcuucugcggcgugaacagcgacaccgugggcuggagcuggcccgacggcgccgagcugcccuucaccaucgacaaguga

SEQ ID NO: 179096 - RNA, 1410 nt, Artificial Sequence; identical to SEQ ID NO: 178086
  derived and/or modified CDS sequence (opt4) from neuraminidase__InfluenzaA__ADJ81066

SEQ ID NO: 179097 - RNA, 1410 nt, Artificial Sequence; identical to SEQ ID NO: 176659
  derived and/or modified CDS sequence (opt4) from neuraminidase__InfluenzaA__ADJ84775

SEQ ID NO: 179098 - RNA, 1410 nt, Artificial Sequence
  derived and/or modified CDS sequence (opt4) from neuraminidase__InfluenzaA__ADJ88785
augaaccccaaccagaagaucaucaccaucggcagcgugagccugaccaucagcaccaucugcuucuucaugcagaucgccauccugaucaccaccgugacccugcacuucaagcaguacgaguucaacagcccccccaacaaccaggugaugcugugcgagcccaccaucaucgagagaaacaucaccgagaucguguaccugaccaacaccaccaucgagaaggagaucugccccaagcuggccgaguacagaaacuggagcaagccccagugcgacaucaccggcuucgcccccuucagcaaggacaacagcaucagacugagcgccggcggcgacaucugggugaccagagagcccuacgugagcugcgaccccgacaagugcuaccaguucgcccugggccagggcaccacccugaacaacgugcacagcaacaacaccgugagagacagaacccccuacagaacccugcugaugaacgagcugggcgugcccuuccaccugggcaccaagcaggugugcaucgccuggagcagcagcagcugccacgacggcaaggccuggcugcacgugugcaucaccggcgacgacaagaacgccaccgccagcuucaucuacaacggcagacugguggacagcguggugagcuggagcaaggagauccugagaacccaggagagcgagugcgugugcaucaacggcaccugcaccguggugaugaccgacggcagcgccagcggcaaggccgacaccaagauccuguucaucgaggagggcaagaucgugcacaccagcacccugagcggcagcgcccagcacguggaggagugcagcugcuaccccagauaccccggcgugagaugcgugugcagagacaacuggaagggcagcaacagacccaucguggacaucaacaucaaggaccacagcguggugagcagcuacgugugcagcggccuggugggcgacacccccagaaagaacgacagcagcagcagcagccacugccuggaccccaacaacgaggagggcggccacggcgugaagggcugggccuucgacgacggcaacgacguguggaugggcagaaccaucagcgagaagagcagacugggcuacgagaccuucaaggugaucgagggcuggagcaaccacaagagcaagcugcagaucaacagacaggugaucguggacagaggcaacagaagcggcuacagcggcaucuucagcguggagggcaagagcugcaucaacagaugcuucuacguggagcugaucagaggcagaaaggaggagaccgaggugcuguggaccagcaacagcaucgugguguucugcggcaccagcggcaccuacggcaccggcagcuggcccgacggcgccgaccugaaccugaugcccaucuga

SEQ ID NO: 179099 - RNA, 1410 nt, Artificial Sequence; identical to SEQ ID NO: 176798
  derived and/or modified CDS sequence (opt4) from neuraminidase__InfluenzaA__ADK21716

SEQ ID NO: 179100 - RNA, 1410 nt, Artificial Sequence; identical to SEQ ID NO: 176798
  derived and/or modified CDS sequence (opt4) from neuraminidase__InfluenzaA__ADK21726

SEQ ID NO: 179101 - RNA, 1410 nt, Artificial Sequence; identical to SEQ ID NO: 176798
  derived and/or modified CDS sequence (opt4) from neuraminidase__InfluenzaA__ADK21736

SEQ ID NO: 179102 - RNA, 1410 nt, Artificial Sequence
  derived and/or modified CDS sequence (opt4) from neuraminidase__InfluenzaA__ADK21746
augaaccccaaccagaagaucaucaccaucggcagcgugugcaugaccaucggcauggccaaccugauccugcagaucggcaacaucaucagcaucuggaucagccacagcauccagcugggcaaccagaaccagaucgagaccugcaaccagagcaucaucaccuacgagcacaacaccugggugaaccagaccuacgugaacaucagcaacaccaacuucgccgccggccagagcguggugagcgugaagcuggccggcaacagcagccugugccccgugagcggcugggccaucuacagcaaggacaacagcaucagaaucggcagcaagggcgacguguucgugaucagagagcccuucaucagcugcagcccccuggagugcagaaccuucuuccugacccagggcgcccugcugaacgacaagcacagcaacggcaccaucaaggacagaagccccuacagaacccugaugagcugccccaucggcgaggugcccagccccuacaacagcagauucgagagcguggccuggagcgccagcgccugccacgacggcaucaacuggcugaccaucggcaucagcggccccgacaacggcgccguggccgugcugaaguacaacggcaucaucaccgacaccaucaagagcuggagaaacaacauccugagaacccaggagagcgagugcgccugcgugaacggcagcugcuucaccgugaugaccgacggccccagcgacggccaggccagcuacaagaucuucagaaucgagaagggcaagaucgugaagagcguggagaugaacgcccccaacuaccacuacgaggagugcagcugcuaccccgacagcagcgagaucaccugcgugugcagagacaacuggcacggcagcaacagacccugggugagcuucaaccagaaccuggaguaccagaucggcuacaucugcagcggcaucuucggcgacaaccccagacccaacgacaagaccggcagcugcggccccgugagcagcaacggcgccaacggcgugaagggcuucagcuucaaguacggcaacggcguguggaucggcagaaccaagagcaucagcagcagaagcggcuucgagaugaucugggaccccaacggcuggaccggcaccgacaacaacuucagcaucaagcaggacaucgugggcaucaacgaguggagcggcuacagcggcagcuucgugcagcaccccgagcugaccggccuggacugcaucagacccugcuucuggguggagcugaucagaggcagacccgaggagaacaccaucuggaccagcggcagcagcaucagcuucugcggcgugaacagcgacaccgugggcuggagcuggcccgacggcgccgagcugcccuucaccaucgacaaguga

SEQ ID NO: 179103 - RNA, 1410 nt, Artificial Sequence; identical to SEQ ID NO: 176798
  derived and/or modified CDS sequence (opt4) from neuraminidase__InfluenzaA__ADK21756

SEQ ID NO: 179104 - RNA, 1410 nt, Artificial Sequence; identical to SEQ ID NO: 176798
  derived and/or modified CDS sequence (opt4) from neuraminidase__InfluenzaA__ADK21766

SEQ ID NO: 179105 - RNA, 1410 nt, Artificial Sequence; identical to SEQ ID NO: 178229
  derived and/or modified CDS sequence (opt4) from neuraminidase__InfluenzaA__ADK21776

SEQ ID NO: 179106 - RNA, 1410 nt, Artificial Sequence; identical to SEQ ID NO: 176798
  derived and/or modified CDS sequence (opt4) from neuraminidase__InfluenzaA__ADK21786

SEQ ID NO: 179107 - RNA, 1410 nt, Artificial Sequence; identical to SEQ ID NO: 176798
  derived and/or modified CDS sequence (opt4) from neuraminidase__InfluenzaA__ADK21796

SEQ ID NO: 179108 - RNA, 1410 nt, Artificial Sequence; identical to SEQ ID NO: 176798
  derived and/or modified CDS sequence (opt4) from neuraminidase__InfluenzaA__ADK21806

SEQ ID NO: 179109 - RNA, 1410 nt, Artificial Sequence; identical to SEQ ID NO: 176798
  derived and/or modified CDS sequence (opt4) from neuraminidase__InfluenzaA__ADK21816

SEQ ID NO: 179110 - RNA, 1410 nt, Artificial Sequence; identical to SEQ ID NO: 178776
  derived and/or modified CDS sequence (opt4) from neuraminidase__InfluenzaA__ADK21826

SEQ ID NO: 179111 - RNA, 1410 nt, Artificial Sequence; identical to SEQ ID NO: 178689
  derived and/or modified CDS sequence (opt4) from neuraminidase__InfluenzaA__ADK21836

SEQ ID NO: 179112 - RNA, 1410 nt, Artificial Sequence
  derived and/or modified CDS sequence (opt4) from neuraminidase__InfluenzaA__ADK21846
augaaccccaaccagaagaucaucaccaucggcagcgugugcaugaccaucggcauggccaaccugauccugcagaucggcaacaucaucagcaucuggaucagccacagcauccagcugggcaaccagaaccagaucgagaccugcaaccagagcgugaucaccuacgagaacaacaccugggugaaccagaccuacgugaacaucagcaacaccaacuucgccgccggccagagcguggugagcgugaagcuggccggcaacagcagccugugccccgugagcggcugggccaucuacagcaaggacaacagcaucagaaucggcagcaagggcgacguguucgugaucagagagcccuucaucagcugcagcccccuggagugcagaaccuucuuccugacccagggcgcccugcugaacgacaagcacagcaacggcaccaucaaggacagaagccccuacagaacccugaugagcugccccaucggcgaggugcccagccccuacaacagcagauucgagagcguggccuggagcgccagcgccugccacgacggcaucaacuggcugaccaucggcaucagcggccccgacaacggcgccguggccgugcugaaguacaacggcaucaucaccgacaccaucaagagcuggagaaacaacauccugagaacccaggagagcgagugcgccugcgugaacggcagcugcuucaccgugaugaccgacggccccagcgacggccaggccagcuacaagaucuucagaaucgagaagggcaagaucgugaagagcguggagaugaacgcccccaacuaccacuacgaggagugcagcugcuaccccgacagcagcgagaucaccugcgugugcagagacaacuggcacggcagcaacagacccugggugagcuucaaccagaaccuggaguaccagaucggcuacaucugcagcggcaucuucggcgacaaccccagacccaacgacaagaccggcagcugcggccccgugagcagcaacggcgccaacggcgugaagggcuucagcuucaaguacggcaacggcguguggaucggcagaaccaagagcaucagcagcagaaacggcuucgagaugaucugggaccccaacggcuggaccggcaccgacaacaacuucagcaugaagcaggacaucgugggcaucaacgaguggagcggcuacagcggcagcuucgugcagcaccccgagcugaccggccuggacugcaucagacccugcuucuggguggagcugaucagaggcagacccaaggagaacaccaucugggccagcggcagcagcaucagcuucugcggcgugaacagcgacaccgugggcuggagcuggcccgacggcgccgagcugcccuucaccaucgacaaguga

SEQ ID NO: 179113 - RNA, 1410 nt, Artificial Sequence; identical to SEQ ID NO: 176798
  derived and/or modified CDS sequence (opt4) from neuraminidase__InfluenzaA__ADK21856

SEQ ID NO: 179114 - RNA, 1410 nt, Artificial Sequence; identical to SEQ ID NO: 176798
  derived and/or modified CDS sequence (opt4) from neuraminidase__InfluenzaA__ADK21866

SEQ ID NO: 179115 - RNA, 1410 nt, Artificial Sequence; identical to SEQ ID NO: 176798
  derived and/or modified CDS sequence (opt4) from neuraminidase__InfluenzaA__ADK21876

SEQ ID NO: 179116 - RNA, 1410 nt, Artificial Sequence; identical to SEQ ID NO: 176798
  derived and/or modified CDS sequence (opt4) from neuraminidase__InfluenzaA__ADK21886

SEQ ID NO: 179117 - RNA, 1410 nt, Artificial Sequence
  derived and/or modified CDS sequence (opt4) from neuraminidase__InfluenzaA__ADK21896
augaaccccaaccagaagaucaucaccaucggcagcgugugcaugaccaucggcauggccaaccugauccugcagaucggcaacaucaucagcaucuggaucagccacagcauccagcugggcaaccagaaccagaucgagaccugcaaccagagcgugaucaccuacgagaacaacaccugggugaaccagaccuacgugaacaucagcaacaccaacuucgccgccggccagagcguggugagcgugaagcuggccggcaacagcagccugugccccgugagcggcugggccaucuacagcaaggacaacagcaucagaaucggcagcaagggcgacguguucgugaucagagagcccuucaucagcugcagcccccuggagugcagaaccuucuuccugacccagggcgcccugcugaacgacaagcacagcaacggcaccaucaaggacagaagccccuacagaacccugaugagcugccccaucggcgaggugcccagccccuacaacagcagauucgagagcguggccuggagcgccagcgccugccacgacggcaucaacuggcugaccaucggcaucagcggccccgacaacggcgccguggccgugcugaaguacaacggcaucaucaccgacaccaucaagagcuggagaaacaacauccugagaacccaggagagcgagugcgccugcgugaacggcagcugcuucaccgugaugaccgacggccccagcgacggccaggccagcuacaagaucuucagaaucgagaagggcaagaucgugaagagcguggagaugaacgcccccaacuaccacuacgaggagugcagcugcuaccccgacagcagcgagaucaccugcgugugcagagacaacuggcacggcagcaacagacccugggugagcuucaaccagaaccuggaguaccagaucggcuacaucugcagcggcaucuucggcgacaaccccagacccaacgacaagaccggcagcugcggccccgugagcagcaacggcgccaacggcgugaagggcuucagcuucaaguacggcaacggcguguggaucggcagaaccaagagcaucagcagcagaaacggcuucgagaugaucugggaccccaacggcuggaccggcaccgacaacaacuucagcaucaagcaggacaucgugggcaccaacgaguggagcggcuacagcggcagcuucgugcagcaccccgagcugaccggccuggacugcaucagacccugcuucuggguggagcugaucagaggcagacccaaggagaacaccaucuggaccagcggcagcagcaucagcuucugcggcgugagcagcgacaccgugggcuggagcuggcccgacggcgccgagcugcccuucaccaucgacaaguga

SEQ ID NO: 179118 - RNA, 1410 nt, Artificial Sequence
  derived and/or modified CDS sequence (opt4) from neuraminidase__InfluenzaA__ADK21906
augaaccccaaccagaagaucaucaccaucggcagcgugugcaugaccaucggcauggccaaccugauccugcagaucggcaacaucaucagcaucuggaucagccacagcauccagcugggcaaccagaaccagaucgagaccugcaaccagagcgugaucaccuacgagaacaacaccugggugaaccagaccuacgugaacaucagcaacaccaacuucgccgccggccagagcguggugagcgugaagcuggccggcaacagcagccugugccccgugagcggcugggccaucuacagcaaggacaacagcaucagaaucggcagcaagggcgacguguucgugaucagagagcccuucaucagcugcagcccccuggagugcagaaccuucuuccugacccagggcgcccugcugaacgacaagcacagcaacggcaccaucaaggacagaagccccuacagaacccugaugagcugccccaucggcgaggugcccagccccuacaacagcagauucgagagcguggccuggagcgccagcgccugccacgacggcaucaacuggcugaccaucggcaucagcggccccgacaacggcgccguggccgugcugaaguacaacggcaucaucaccgacaccaucaagagcuggagaaacaacauccugagaacccaggagagcgagugcgccugcgugaacggcagcugcuucaccgugaugaccgacggccccagcgacggccaggccagcuacaagaucuucagaaucgagaagggcaagaucgugaagagcguggagaugaacgcccccaacuaccacuacgaggagugcagcugcuaccccgacagcagcgagaucaccugcgugugcagagacaacuggcacggcagcaacagacccuggaucagcuucaaccagaaccuggaguaccagaucggcuacaucugcagcggcaucuucggcgacaaccccagacccaacgacaagaccggcagcugcggccccgugagcagcaacggcgccaacggcgugaagggcuucagcuucaaguacggcaacggcguguggaucggcagaaccaagagcaucggcagcagaaacggcuucgagaugaucugggaccccaacggcuggaccggcaccgacaacaacuucagcaucaagcaggacaucgugggcaucaacgaguggagcggcuacagcggcagcuucgugcagcaccccgagcugaccggccuggacugcaucagacccugcuucuggguggagcugaucagaggcagacccaaggagaacaccaucuggaccagcggcagcagcaucagcuucugcggcgugaacagcgacaccgugggcuggagcuggcccgacggcgccgagcugcccuucaccaucgacaaguga

SEQ ID NO: 179119 - RNA, 1410 nt, Artificial Sequence; identical to SEQ ID NO: 176798
  derived and/or modified CDS sequence (opt4) from neuraminidase__InfluenzaA__ADK21916

SEQ ID NO: 179120 - RNA, 1410 nt, Artificial Sequence; identical to SEQ ID NO: 176798
  derived and/or modified CDS sequence (opt4) from neuraminidase__InfluenzaA__ADK21926

SEQ ID NO: 179121 - RNA, 1410 nt, Artificial Sequence; identical to SEQ ID NO: 176798
  derived and/or modified CDS sequence (opt4) from neuraminidase__InfluenzaA__ADK21936

SEQ ID NO: 179122 - RNA, 1410 nt, Artificial Sequence
  derived and/or modified CDS sequence (opt4) from neuraminidase__InfluenzaA__ADK21946
augaaccccaaccagaagaucaucaccaucggcagcgugugcaugaccaucggcauggccaaccugauccugcagaucggcaacaucaucagcaucuggaucagccacagcauccagcugggcaaccagaaccagaucgagaccugcaaccagagcgugaucaccuacgagaacaacaccugggugaaccagaccuacgugaacaucagcaacaccaacuucgccgccggccagagcguggugagcgugaagcuggccggcaacagcagccugugccccgugagcggcugggccaucuacagcaaggacaacagcaucagaaucggcagcaagggcgacguguucgugaucagagagcccuucaucagcugcagcccccuggagugcagaaccuucuuccugacccagggcgcccugcugaacgacaagcacagcaacggcaccaucaaggacagaagccccuacagaacccugaugagcugccccaucggcgaggugcccagccccuacaacagcagauucgagagcguggccuggagcgccagcgccugccacgacggcaucaacuggcugaccaucggcaucagcggccccgacaacggcgccguggccgugcugaaguacaacggcaucaucaccgacaccaucaagagcuggagaaacaacauccugagaacccaggagagcgagugcgccugcgugaacggcagcugcuucaccgugaugaccgacggccccagcgacggccaggccagcuacaagaucuucagaaucgagaagggcaagaucgugaagagcguggagaugaacgcccccaacuaccacuacgaggagugcagcugcuaccccgacagcagcgagaucaccugcgugugcagagacaacuggcacggcagcaacagacccugggugagcuucaaccagaaccuggaguaccagaucggcuacaucugcagcggcaucuucggcgacaaccccagacccaacgacaagaccggcagcugcggccccgugagcagcaacggcgccaacggcgugaagggcuucagcuucaaguacggcaacggcguguggaucggcagaaccaagagcaucagcagcagaaacggcuucgagaugaucugggaccccaacggcuggaccggcaccgacaacaacuucagcaucaagcaggacaucgugggcaucaacgaguggagcggcuacagcggcagcuucgugcagcaccccgagcugaccggcauggacugcaucagacccugcuucuggguggagcugaucagaggcagacccaaggagaacaccaucuggaccagcggcagcagcaucagcuucugcggcgugaacagcgacaccgugggcuggagcuggcccgacggcgccgagcugcccuucaccaucgacaaguga

SEQ ID NO: 179123 - RNA, 1410 nt, Artificial Sequence
  derived and/or modified CDS sequence (opt4) from neuraminidase__InfluenzaA__ADK21956
augaaccccaaccagaagaucaucaccaucggcagcgugugcaugaccaucggcauggccaaccugauccugcagaucggcaacaucaucagcaucuggaucagccacagcauccagcugggcaaccagaaccagaucgagaccugcaaccagagcgugaucaccuacgagaacaacaccugggugaaccagaccuacgugaacaucagcaacaccaacuucgccgccggccagagcguggugagcgugaagcuggccggcaacagcagccugugccccgugagcggcugggccaucuacagcaaggacaacagcaucagaaucggcagcaagggcgacguguucgugaucagagagcccuucaucagcugcagcccccuggagugcagaaccuucuuccugacccagggcgcccugcugaacgacaagcacagcaacggcaccaucaaggacagaagccccuacagaacccugaugagcugccccaucggcgaggugcccagccccuacaacagcagauucgagagcguggccuggagcgccagcgccugccacgacggcaucaacuggcugaccaucggcaucagcggccccgacaacggcgccguggccgugcugaaguacaacggcaucaucaccgacaccaucaagagcuggagaaacaacauccugagaacccaggagagcgagugcgccugcgugaacggcagcugcuucaccgugaugaccgacggccccagcgacggccaggccagcuacaagaucuucaagaucgagaagggcaagaucgugaagagcguggagaugaacgcccccaacuaccacuacgaggagugcagcugcuaccccgacagcagcgagaucaccugcgugugcagagacaacuggcacggcagcaacagacccugggugagcuucaaccagaaccuggaguaccagaucggcuacaucugcagcggcaucuucggcgacaaccccagacccaacgacaagaccggcagcugcggccccgugagcagcaacggcgccaacggcgugaagggcuucagcuucaaguacggcaacggcguguggaucggcagaaccaagagcaucagcagcagaaacggcuucgagaugaucugggaccccaacggcuggaccggcaccgacaacaacuucagcaucaagcaggacaucgugggcaucaacgaguggagcggcuacagcggcagcuucgugcagcaccccgagcugaccggccuggacugcaucagacccugcuucuggguggagcugaucagaggcagacccaaggagaacaccaucuggaccagcggcagcagcaucagcuucugcggcgugaacagcaacaccgugggcuggagcuggcccgacggcgccgagcugcccuucaccaucgacaaguga

SEQ ID NO: 179124 - RNA, 1410 nt, Artificial Sequence; identical to SEQ ID NO: 176798
  derived and/or modified CDS sequence (opt4) from neuraminidase__InfluenzaA__ADK32393

SEQ ID NO: 179125 - RNA, 1410 nt, Artificial Sequence; identical to SEQ ID NO: 176798
  derived and/or modified CDS sequence (opt4) from neuraminidase__InfluenzaA__ADK32403

SEQ ID NO: 179126 - RNA, 1410 nt, Artificial Sequence; identical to SEQ ID NO: 176798
  derived and/or modified CDS sequence (opt4) from neuraminidase__InfluenzaA__ADK32413

SEQ ID NO: 179127 - RNA, 1410 nt, Artificial Sequence
  derived and/or modified CDS sequence (opt4) from neuraminidase__InfluenzaA__ADK32423
augaaccccaaccagaagaucaucaccaucggcagcgugugcaugaccaucggcaugaccaaccugauccugcagaucggcaacaucaucagcaucuggaucagccacagcauccagcugggcaaccagaaccagaucgagaccugcaaccagagcgugaucaccuacgagaacaacaccugggugaaccagaccuacgugaacaucagcaacaccaacuucgccgccggccagagcguggugagcgugaagcuggccggcaacagcagccugugccccgugagcggcugggccaucuacagcaaggacaacagcaucagaaucggcagcaagggcgacguguucgugaucagagagcccuucaucagcugcagcccccuggagugcagaaccuucuuccugacccagggcgcccugcugaacgacaagcacagcaacggcaccaucaaggacagaagccccuacagaacccugaugagcugccccaucggcgaggugcccagccccuacaacagcagauucgagagcguggccuggagcgccagcgccugccacgacggcaucaacuggcugaccaucggcaucagcggccccgacaacggcgccguggccgugcugaaguacaacggcaucaucaccgacaccaucaagagcuggagaaacaacauccugagaacccaggagagcgagugcgccugcgugaacggcagcugcuucaccgugaugaccgacggccccagcgacggccaggccagcuacaagaucuucagaaucgagaagggcaagaucgugaagagcguggagaugaacgcccccaacuaccacuacgaggagugcagcugcuaccccgacagcagcgagaucaccugcgugugcagagacaacuggcacggcagcaacagacccugggugagcuucaaccagaaccuggaguaccagaucggcuacaucugcagcggcaucuucggcgacaaccccagacccaacgacaagaccggcagcugcggccccgugagcagcaacggcgccaacggcgugaagggcuucagcuucaaguacggcaacggcguguggaucggcagaaccaagagcaucagcagcagaaacggcuucgagaugaucugggaccccaacggcuggaccggcaccgacaacaacuucagcaucaagcaggacaucgugggcaucaacgaguggagcggcuacagcggcagcuucgugcagcaccccgagcugaccggccuggacugcaucagacccugcuucuggguggagcugaucagaggcagacccaaggagaacaccaucuggaccagcggcagcagcaucagcuucugcggcgugaacagcgacaccgugggcuggagcuggcccgacggcgccgagcugcccuucaccaucgacaaguga

SEQ ID NO: 179128 - RNA, 1410 nt, Artificial Sequence; identical to SEQ ID NO: 176798
  derived and/or modified CDS sequence (opt4) from neuraminidase__InfluenzaA__ADK32433

SEQ ID NO: 179129 - RNA, 1410 nt, Artificial Sequence; identical to SEQ ID NO: 176798
  derived and/or modified CDS sequence (opt4) from neuraminidase__InfluenzaA__ADK32443

SEQ ID NO: 179130 - RNA, 1410 nt, Artificial Sequence
  derived and/or modified CDS sequence (opt4) from neuraminidase__InfluenzaA__ADK32453
augaaccccaaccagaagaucaucaccaucggcagcgugugcaugaccaucggcauggccaaccugauccugcagaucggcaacaucaucagcaucuggaucagccacagcauccagcugggcaaccagaaccagaucgagaccugcaaccagagcgugaucaccuacgagaacaacaccugggugaaccagaccuacgugaacaucagcaacaccaacuucgccgccggccagagcguggugagcgugaagcugagcggcaacagcagccugugccccgugagcggcugggccaucuacagcaaggacaacagcgugagaaucggcagcaagggcgacguguucgugaucagagagcccuucaucagcugcagcccccuggagugcagaaccuucuuccugacccagggcgcccugcugaacgacaagcacagcaacggcaccaucaaggacagaagccccuacagaacccugaugagcugccccaucggcgaggugcccagccccuacaacagcagauucgagagcguggccuggagcgccagcgccugccacgacggcaucaacuggcugaccaucggcaucagcggccccgacaacggcgccguggccgugcugaaguacaacggcaucaucaccgacaccaucaagagcuggagaaacaacauccugagaacccaggagagcgagugcgccugcgugaacggcagcugcuucaccgugaugaccgacggccccagcgacggccaggccagcuacaagaucuucagaaucgagaagggcaagaucgugaagagcguggagaugaacgcccccaacuaccacuacgaggagugcagcugcuaccccgacagcagcgagaucaccugcgugugcagagacaacuggcacggcagcaacagacccugggugagcuucaaccagaaccuggaguaccagaucggcuacaucugcagcggcaucuucggcgacaaccccagacccaacgacaagaccggcagcugcggccccgugagcagcaacggcgccaacggcgugaagggcuucagcuucaaguacggcaacggcguguggaucggcagaaccaagagcaucagcagcagaaacggcuucgagaugaucugggaccccaacggcuggaccggcaccgacaacaacuucagcaucaagcaggacaucgugggcaucaacgaguggagcggcuacagcggcagcuucgugcagcaccccgagcugaccggccuggacugcaucagacccugcuucuggguggagcugaucagaggcagacccaaggagaacaccaucuggaccagcggcagcagcaucagcuucugcggcgugaacagcgacaccgugggcuggagcuggcccgacggcgccgagcugcccuucaccaucgacaaguga

SEQ ID NO: 179131 - RNA, 1410 nt, Artificial Sequence
  derived and/or modified CDS sequence (opt4) from neuraminidase__InfluenzaA__ADK32463
augaaccccaaccagaagaucaucaccaucggcagcgugugcaugaccaucggcauggccaaccugauccugcagaucggcaacaucaucagcaucuggaucagccacagcauccagcugggcaaccagaaccagaucgagaccugcaaccagagcgugaucaccuacgagaacaacaccugggugaaccagaccuacgugaacaucagcaacaccaacuucgccgccggccagagcguggugagcgugaagcuggccggcaacagcagccugugccccgugagcggcugggccaucuacagcaaggacaacagcaucagaaucggcagcaagggcgacguguucgugaucagagagcccuucaucagcugcagcccccuggagugcagaaccuucuuccugacccagggcgcccugaucaacgacaagcacagcaacggcaccaucaaggacagaagccccuacagaacccugaugagcugccccaucggcgaggugcccagccccuacaacagcagauucgagagcguggccuggagcgccagcgccugccacgacggcaucaacuggcugaccaucggcaucagcggccccgacaacggcgccguggccgugcugaaguacaacggcaucaucaccgacaccaucaagagcuggagaaacaacauccugagaacccaggagagcgagugcgccugcgugaacggcagcugcuucaccgugaugaccgacggccccagcgacggccaggccagcuacaagaucuucagaaucgagaagggcaagaucgugaagagcguggagaugaacgcccccaacuaccacuacgaggagugcagcugcuaccccgacagcagcgagaucaccugcgugugcagagacaacuggcacggcagcaacagacccugggugagcuucaaccagaaccuggaguaccagaucggcuacaucugcagcggcaucuucggcgacaaccccagacccaacgacaagaccggcagcugcggccccgugagcagcaacggcgccaacggcgugaagggcuucagcuucaaguacggcaacggcguguggaucggcagaaccaagagcaucagcagcagaaacggcuucgagaugaucugggaccccaacggcuggaccggcaccgacaacaacuucagcaucaagcaggacaucgugggcaucaacgaguggagcggcuacagcggcagcuucgugcagcaccccgagcugaccggccuggacugcaucagacccugcuucuggguggagcugaucagaggcagacccaaggagaacaccaucuggaccagcggcagcagcaucagcuucugcggcgugaacagcgacaccgugggcuggagcuggcccgacggcgccgagcugcccuucaccaucgacaaguga

SEQ ID NO: 179132 - RNA, 1410 nt, Artificial Sequence; identical to SEQ ID NO: 176798
  derived and/or modified CDS sequence (opt4) from neuraminidase__InfluenzaA__ADK32473

SEQ ID NO: 179133 - RNA, 1410 nt, Artificial Sequence; identical to SEQ ID NO: 176798
  derived and/or modified CDS sequence (opt4) from neuraminidase__InfluenzaA__ADK32483

SEQ ID NO: 179134 - RNA, 1410 nt, Artificial Sequence; identical to SEQ ID NO: 176798
  derived and/or modified CDS sequence (opt4) from neuraminidase__InfluenzaA__ADK32493

SEQ ID NO: 179135 - RNA, 1410 nt, Artificial Sequence; identical to SEQ ID NO: 178711
  derived and/or modified CDS sequence (opt4) from neuraminidase__InfluenzaA__ADK32505

SEQ ID NO: 179136 - RNA, 1410 nt, Artificial Sequence
  derived and/or modified CDS sequence (opt4) from neuraminidase__InfluenzaA__ADK32640
augaaccccaaccagaagaucaucaccaucggcagcgugugcaugaccaucggcauggccaaccugauccugcagaucggcaacaucaucagcaucuggaucagccacagcauccagcugggcaaccagaaccagaucgagaccugcaaccagagcgugaucaccuacgagaacaacaccugggugaaccagaccuacgugaacaucagcaacaccaacuucgccgccggccagagcguggccagcgugaagcuggccggcaacagcagccugugccccgugagcggcugggccaucuacagcaaggacaacagcaucagaaucggcagcaagggcgacguguucgugaucagagagcccuucaucagcugcagcccccuggagugcagaaccuucuuccugacccagggcgcccugcugaacgacaagcacagcaacggcaccaucaaggacagaagccccuacagaacccugaugagcugccccaucggcgaggugcccagccccuacaacagcagauucgagagcguggccuggagcgccagcgccugccacgacggcaucaacuggcugaccaucggcaucagcggccccgacaacggcgccguggccgugcugaaguacaacggcaucaucaccgacaccaucaagagcuggagaaacaacauccugagaacccaggagagcgagugcgccugcgugaacggcagcugcuucaccgugaugaccgacggccccagcgacggccaggccagcuacaagaucuucagaaucgagaagggcaagaucgugaagagcguggagaugaacgcccccaacuaccacuacgaggagugcagcugcuaccccgacagcagcgagaucaccugcgugugcagagacaacuggcacggcagcaacagacccugggugagcuucaaccagaaccuggaguaccagaucggcuacaucugcagcggcaucuucggcgacaaccccagacccaacgacaagaccggcagcugcggccccgugagcagcaacggcgccaacggcgugaagggcuucagcuucaaguacggcaacggcguguggaucggcagaaccaagagcaucagcagcagaaacggcuucgagaugaucugggaccccaacggcuggaccggcaccgacaacaacuucagcaucaagcaggacaucgugggcaucaacgaguggagcggcuacagcggcagcuucgugcagcaccccgagcugaccggccuggacugcaucagacccugcuucuggguggagcugaucagaggcagacccaaggagaacaccaucuggaccagcggcagcagcaucagcuucugcggcgugaacagcgacaccgugggcuggagcuggcccgacggcgccgagcugcccuucaccaucgacaaguga

SEQ ID NO: 179137 - RNA, 1410 nt, Artificial Sequence; identical to SEQ ID NO: 176798
  derived and/or modified CDS sequence (opt4) from neuraminidase__InfluenzaA__ADK32650

SEQ ID NO: 179138 - RNA, 1410 nt, Artificial Sequence; identical to SEQ ID NO: 176798
  derived and/or modified CDS sequence (opt4) from neuraminidase__InfluenzaA__ADK32660

SEQ ID NO: 179139 - RNA, 1410 nt, Artificial Sequence; identical to SEQ ID NO: 176798
  derived and/or modified CDS sequence (opt4) from neuraminidase__InfluenzaA__ADK32670

SEQ ID NO: 179140 - RNA, 1410 nt, Artificial Sequence
  derived and/or modified CDS sequence (opt4) from neuraminidase__InfluenzaA__ADK32680
augaaccccaaccagaagaucaucaccaucggcagcgugugcaugaccaucggcauggccaaccugauccugcagaucggcaacaucaucagcaucuggaucagccacagcauccagcugggcaaccagaaccagaucgagaccugcaaccagagcgugaucaccuacaagaacaacaccugggugaaccagaccuacgugaacaucagcaacaccaacuucgccgccggccagagcguggugagcgugaagcuggccggcaacagcagccugugccccgugagcggcugggccaucuacagcaaggacaacagcaucagaaucggcagcaagggcgacguguucgugaucagagagcccuucaucagcugcagcccccuggagugcagaaccuucuuccugacccagggcgcccugcugaacgacaagcacagcaacggcaccaucaaggacagaagccccuacagaacccugaugagcugccccaucggcgaggugcccagccccuacaacagcagauucgagagcguggccuggagcgccagcgccugccacgacggcaucaacuggcugaccaucggcaucagcggccccgacaacggcgccguggccgugcugaaguacaacggcaucaucaccgacaccaucaagagcuggagaaacaacauccugagaacccaggagagcgagugcgccugcgugaacggcagcugcuucaccgugaugaccgacggccccagcgacggccaggccagcuacaagaucuucagaaucgagaagggcaagaucgugaagagcguggagaugaacgcccccaacuaccacuacgaggagugcagcugcuaccccgacagcagcgagaucaccugcgugugcagagacaacuggcacggcagcaacagacccugggugagcuucaaccagaaccuggaguaccagaucggcuacaucugcagcggcaucuucggcgacaaccccagacccaacgacaagaccggcagcugcggccccgugagcagcaacggcgccaacggcgugaagggcuucagcuucaaguacggcaacggcguguggaucggcagaaccaagagcaucagcagcagaaacggcuucgagaugaucugggaccccaacggcuggaccggcaccgacaacaacuucagcaucaagcaggacaucgugggcaucaacgaguggagcggcuacagcggcagcuucgugcagcaccccgagcugaccggccuggacugcaucagacccugcuucuggguggagcugaucagaggcagacccaaggagaacaccaucuggaccagcggcagcagcaucagcuucugcggcgugaacagcgacaccgugggcuggagcuggcccgacggcgccgagcugcccuucaccaucgacaaguga

SEQ ID NO: 179141 - RNA, 1410 nt, Artificial Sequence; identical to SEQ ID NO: 176798
  derived and/or modified CDS sequence (opt4) from neuraminidase__InfluenzaA__ADK32690

SEQ ID NO: 179142 - RNA, 1410 nt, Artificial Sequence; identical to SEQ ID NO: 176798
  derived and/or modified CDS sequence (opt4) from neuraminidase__InfluenzaA__ADK32700

SEQ ID NO: 179143 - RNA, 1410 nt, Artificial Sequence; identical to SEQ ID NO: 176798
  derived and/or modified CDS sequence (opt4) from neuraminidase__InfluenzaA__ADK32779

SEQ ID NO: 179144 - RNA, 1410 nt, Artificial Sequence; identical to SEQ ID NO: 176798
  derived and/or modified CDS sequence (opt4) from neuraminidase__InfluenzaA__ADK33614

SEQ ID NO: 179145 - RNA, 1410 nt, Artificial Sequence; identical to SEQ ID NO: 176798
  derived and/or modified CDS sequence (opt4) from neuraminidase__InfluenzaA__ADK33624

SEQ ID NO: 179146 - RNA, 1410 nt, Artificial Sequence; identical to SEQ ID NO: 176798
  derived and/or modified CDS sequence (opt4) from neuraminidase__InfluenzaA__ADK33634

SEQ ID NO: 179147 - RNA, 1410 nt, Artificial Sequence
  derived and/or modified CDS sequence (opt4) from neuraminidase__InfluenzaA__ADK33644
augaaccccaaccagaagaucaucaccaucggcagcgugugcaugaccaucggcauggccaaccugauccugcagaucggcaacaucaucagcaucuggaucagccacagcauccagcugggcaaccagaaccagaucgagaccugcaaccagagcgugaucaccuacgagaacaacaccugggugaaccagaccuacgugaacaucagcaacaccaacuucgccgccggccagagcguggugagcgugaagcuggccggcaacagcagccugugccccgugagcggcugggccaucuacagcaaggacaacagcaucagaaucggcagcaagggcgacguguucgugaucagagagcccuucaucagcugcagcccccuggagugcagaaccuucuuccugacccagggcgcccugcugaacgacaagcacagcaacggcaccaucaaggacagaagccccuacagaacccugaugagcugccccaucggcgaggugcccagccccuacaacagcagauucgagagcguggccuggagcgccagcgccugccacgacggcaucaacuggcugaccaucggcaucagcggcagcgacaacggcgccguggccgugcugaaguacaacggcaucaucaccgacaccaucaagagcuggagaaacaacauccugagaacccaggagagcgagugcgccugcgugaacggcagcugcuucaccgugaugaccgacggccccagcgacggccaggccagcuacaagaucuucagaaucgagaagggcaagaucgugaagagcguggagaugaacgcccccaacuaccacuacgaggagugcagcugcuaccccgacagcagcgagaucaccugcgugugcagagacaacuggcacggcagcaacagacccugggugagcuucaaccagaaccuggaguaccagaucggcuacaucugcagcggcaucuucggcgacaaccccagacccaacgacaagaccggcagcugcggccccgugagcagcaacggcgccaacggcgugaagggcuucagcuucaaguacggcaacggcguguggaucggcagaaccaagagcaucagcagcagaaacggcuucgagaugaucugggaccccaacggcuggaccggcaccgacaacaacuucagcaucaagcaggacaucgugggcaucaacgaguggagcggcuacagcggcagcuucgugcagcaccccgagcugaccggccuggacugcaucagacccugcuucuggguggagcugaucagaggcagacccaaggagaacaccaucuggaccagcggcagcagcaucagcuucugcggcgugaacagcgacaccgugggcuggagcuggcccgacggcgccgagcugcccuucaccaucgacaaguga

SEQ ID NO: 179148 - RNA, 1410 nt, Artificial Sequence; identical to SEQ ID NO: 178529
  derived and/or modified CDS sequence (opt4) from neuraminidase__InfluenzaA__ADK33654

SEQ ID NO: 179149 - RNA, 1410 nt, Artificial Sequence; identical to SEQ ID NO: 178529
  derived and/or modified CDS sequence (opt4) from neuraminidase__InfluenzaA__ADK33664

SEQ ID NO: 179150 - RNA, 1410 nt, Artificial Sequence; identical to SEQ ID NO: 176798
  derived and/or modified CDS sequence (opt4) from neuraminidase__InfluenzaA__ADK33674

SEQ ID NO: 179151 - RNA, 1410 nt, Artificial Sequence; identical to SEQ ID NO: 176798
  derived and/or modified CDS sequence (opt4) from neuraminidase__InfluenzaA__ADK33684

SEQ ID NO: 179152 - RNA, 1410 nt, Artificial Sequence; identical to SEQ ID NO: 178149
  derived and/or modified CDS sequence (opt4) from neuraminidase__InfluenzaA__ADK33694

SEQ ID NO: 179153 - RNA, 1410 nt, Artificial Sequence; identical to SEQ ID NO: 176798
  derived and/or modified CDS sequence (opt4) from neuraminidase__InfluenzaA__ADK33704

SEQ ID NO: 179154 - RNA, 1410 nt, Artificial Sequence; identical to SEQ ID NO: 176798
  derived and/or modified CDS sequence (opt4) from neuraminidase__InfluenzaA__ADK33714

SEQ ID NO: 179155 - RNA, 1410 nt, Artificial Sequence; identical to SEQ ID NO: 176798
  derived and/or modified CDS sequence (opt4) from neuraminidase__InfluenzaA__ADK33744

SEQ ID NO: 179156 - RNA, 1410 nt, Artificial Sequence
  derived and/or modified CDS sequence (opt4) from neuraminidase__InfluenzaA__ADK33754
augaaccccaaccagaagaucaucaccaucggcagcgugugcaugaccaucggcauggccaacuucauccugcagaucggcaacaucaucagcaucuggaucagccacagcauccagcugggcaaccagaaccagaucgagaccugcaaccagagcgugaucaccuacgagaacaacaccugggugaaccagaccuacgugaacaucagcaacaccaacuucgccgccggccagagcguggugagcgugaagcuggccggcaacagcagccugugccccgugagcggcugggccaucuacagcaaggacaacagcaucagaaucggcagcaagggcgacguguucgugaucagagagcccuucaucagcugcagcccccuggagugcagaaccuucuuccugacccagggcgcccugcugaacgacaagcacagcaacggcaccaucaaggacagaagccccuacagaacccugaugagcugccccaucggcgaggugcccagccccuacaacagcagauucgagagcguggccuggagcgccagcgccugccacgacggcaucaacuggcugaccaucggcaucagcggccccgacaacggcgccguggccgugcugaaguacaacggcaucaucaccgacaccaucaagagcuggagaaacaacauccugagaacccaggagagcgagugcgccugcgugaacggcagcugcuucaccgugaugaccgacggccccagcgacggccaggccagcuacaagaucuucagaaucgagaagggcaagaucgugaagagcguggagaugaacgcccccaacuaccacuacgaggagugcagcugcuaccccgacagcagcgagaucaccugcgugugcagagacaacuggcacggcagcaacagacccugggugagcuucaaccagaaccuggaguaccagaucggcuacaucugcagcggcaucuucggcgacaaccccagacccaacgacaagaccggcagcugcggccccgugagcagcaacggcgccaacggcgugaagggcuucagcuucaaguacggcaacggcguguggaucggcagaaccaagagcaucagcagcagaaacggcuucgagaugaucugggaccccaacggcuggaccggcaccgacaacaacuucagcaucaagcaggacaucgugggcaucaacgaguggagcggcuacagcggcagcuucgugcagcaccccgagcugaccggccuggacugcaucagacccugcuucuggguggagcugaucagaggcagacccaaggagaacaccaucuggaccagcggcagcagcaucagcuucugcggcgugaacagcgacaccgugggcuggagcuggcccgacggcgccgagcugcccuucaccaucgacaaguga

SEQ ID NO: 179157 - RNA, 1410 nt, Artificial Sequence
  derived and/or modified CDS sequence (opt4) from neuraminidase__InfluenzaA__ADK33764
augaaccccaaccagaagaucaucaccaucggcagcgugugcaugaccaucggcauggccaacuucauccugcagaucggcaacaucaucagcaucuggaucagccacagcauccagcugggcaaccagaaccagaucgagaccugcaaccagagcgugaucaccuacgagaacaacaccugggugaaccagaccuacgugaacaucagcaacaccaacuucgccgccggccagagcguggugagcgugaagcuggccggcaacagcagccugugccccgugagcggcugggccaucuacagcaaggacaacagcaucagaaucggcagcaagggcgacguguucgugaucagagagcccuucaucagcugcagcccccuggagugcagaaccuucuuccugacccagggcgcccugcugaacgacaagcacagcaacggcaccaucaaggacagaagccccuacagaacccugaugagcugccccaucggcgaggugcccagccccuacaacagcagauucgagagcguggccuggagcgccagcgccugccacgacggcaucaacuggcugaccaucggcaucagcggccccgacaacggcgccguggccgugcugaaguacaacggcaucaucaccgacaccaucaagagcuggagaaacaacauccugagaacccaggagagcgagugcgccugcgugaacggcagcugcuucaccgugaugaccgacggccccagcgacggccaggccagcuacaagaucuucagaaucgagaagggcaagaucgugaagagcguggagaugaacgcccccaacuaccacuacgaggagugcagcugcuaccccgacagcagcgagaucaccugcgugugcagagacaacuggcacggcagcaacagacccugggugagcuucaaccagaaccuggaguaccagaugggcuacaucugcagcggcaucuucggcgacaaccccagacccaacgacaagaccggcagcugcggccccgugagcagcaacggcgccaacggcgugaagggcuucagcuucaaguacggcaacggcguguggaucggcagaaccaagagcaucagcagcagaaacggcuucgagaugaucugggaccccaacggcuggaccggcaccgacaacaacuucagcaucaagcaggacaucgugggcaucaacgaguggagcggcuacagcggcagcuucgugcagcaccccgagcugaccggccuggacugcaucagacccugcuucuggguggagcugaucagaggcagacccaaggagaacaccaucuggaccagcggcagcagcaucagcuucugcggcgugaacagcgacaccgugggcuggagcuggcccgacggcgccgagcugcccuucaccaucgacaaguga

SEQ ID NO: 179158 - RNA, 1410 nt, Artificial Sequence
  derived and/or modified CDS sequence (opt4) from neuraminidase__InfluenzaA__ADK33774
augaaccccaaccagaagaucaucaccaucggcagcgugugcaugaccaucggcauggccaaccugauccugcagaucggcaacaucaucagcaucuggaucagccacagcauccagcugggcaaccagaaccagaucgagaccugcaaccagagcgugaucaccuacgagaacaacaccugggugaaccagaccuacgugaacaucagcaacaccaacuucgccgccggccagagcguggugagcgugaagcuggugggcaacagcagccugugccccgugagcggcugggccaucuacagcaaggacaacagcaucagaaucggcagcaagggcgacguguucgugaucagagagcccuucaucagcugcagcccccuggagugcagaaccuucuuccugacccagggcgcccugcugaacgacaagcacagcaacggcaccaucaaggacagaagccccuacagaacccugaugagcugccccaucggcgaggugcccagccccuacaacagcagauucgagagcguggccuggagcgccagcgccugccacgacggcaucaacuggcugaccaucggcaucagcggccccgacaacggcgccguggccgugcugaaguacaacggcaucaucaccgacaccaucaagagcuggagaaacaacauccugagaacccaggagagcgagugcgccugcgugaacggcagcugcuucaccgugaugaccgacggccccagcgacggccaggccagcuacaagaucuucagaaucgagaagggcaagaucgugaagagcguggagaugaacgcccccaacuaccacuacgaggagugcagcugcuaccccgacagcagcgagaucaccugcgugugcagagacaacuggcacggcagcaacagacccugggugagcuucaaccagaaccuggaguaccagaugggcuacaucugcagcggcaucuucggcgacaaccccagacccaacgacaagaccggcagcugcggccccgugagcagcaacggcgccaacggcgugaagggcuucagcuucaaguacggcaacggcguguggaucggcagaaccaagagcaucagcagcagaaacggcuucgagaugaucugggaccccaacggcuggaccggcaccgacaacaacuucagcaucaagcaggacaucgugggcaucaacgaguggagcggcuacagcggcagcuucgugcagcaccccgagcugaccggccuggacugcaucagacccugcuucuggguggagcugaucagaggcagacccaaggagaacaccaucuggaccagcggcagcagcaucagcuucugcggcgugaacagcgacaccgugggcuggagcuggcccgacggcgccgagcugcccuucaccaucgacaaguga

SEQ ID NO: 179159 - RNA, 1410 nt, Artificial Sequence; identical to SEQ ID NO: 177772
  derived and/or modified CDS sequence (opt4) from neuraminidase__InfluenzaA__ADK33784

SEQ ID NO: 179160 - RNA, 1410 nt, Artificial Sequence; identical to SEQ ID NO: 176798
  derived and/or modified CDS sequence (opt4) from neuraminidase__InfluenzaA__ADK33794

SEQ ID NO: 179161 - RNA, 1410 nt, Artificial Sequence; identical to SEQ ID NO: 176798
  derived and/or modified CDS sequence (opt4) from neuraminidase__InfluenzaA__ADK33804

SEQ ID NO: 179162 - RNA, 1410 nt, Artificial Sequence
  derived and/or modified CDS sequence (opt4) from neuraminidase__InfluenzaA__ADK33814
augaaccccaaccagaagaucaucaccaucggcagcgugugcaugaccaucggcauggccaaccugauccugcagaucggcaacaucaucagcaucuggaucagccacagcauccagcugggcaaccagaaccagaucgagaccugcaaccagagcgugaucaccuacgagaacaacaccugggugaacaagaccuacgugaacaucagcaacaccaacuucgccgccggccagagcguggugagcgugaagcuggccggcaacagcagccugugccccgugagcggcugggccaucuacagcaaggacaacagcaucagaaucggcagcaagggcgacguguucgugaucagagagcccuucaucagcugcagcccccuggagugcagaaccuucuuccugacccagggcgcccugcugaacgacaagcacagcaacggcaccaucaaggacagaagccccuacagaacccugaugagcugccccaucggcgaggugcccagccccuacaacagcagauucgagagcguggccuggagcgccagcgccugccacgacggcaucaacuggcugaccaucggcaucagcggccccgacaacggcgccguggccgugcugaaguacaacggcaucaucaccgacaccaucaagagcuggagaaacaacauccugagaacccaggagagcgagugcgccugcgugaacggcagcugcuucaccgugaugaccgacggccccagcgacggccaggccagcuacaagaucuucagaaucgagaagggcaagaucgugaagagcguggagaugaacgcccccaacuaccacuacgaggagugcagcugcuaccccgacagcagcgagaucaccugcgugugcagagacaacuggcacggcagcaacagacccugggugagcuucaaccagaaccuggaguaccagaugggcuacaucugcagcggcaucuucggcgacaaccccagacccaacgacaagaccggcagcugcggccccgugagcagcaacggcgccaacggcgugaagggcuucagcuucaaguacggcaacggcguguggaucggcagaaccaagagcaucagcagcagaaacggcuucgagaugaucugggaccccaacggcuggaccggcaccgacaacaacuucagcaucaagcaggacaucgugggcaucaacgaguggagcggcuacagcggcagcuucgugcagcaccccgagcugaccggccuggacugcaucagacccugcuucuggguggagcugaucagaggcagacccaaggagaacaccaucuggaccagcggcagcagcaucagcuucugcggcgugaacagcgacaccgugggcuggagcuggcccgacggcgccgagcugcccuucaccaucgacaaguga

SEQ ID NO: 179163 - RNA, 1410 nt, Artificial Sequence
  derived and/or modified CDS sequence (opt4) from neuraminidase__InfluenzaA__ADK33824
augaaccccaaccagaagaucaucaccaucggcagcgugugcaugaccaucggcauggccaaccugauccugcagaucggcaacaucaucagcaucuggaucagccacagcauccagcugggcaaccagaaccagaucgagaccugcaaccagagcgugaucaccuacgagaacaacaccugggugaaccagaccuacaucaacaucagcaacaccaacuucgccgccggccagagcguggugagcgugaagcuggccggcaacagcagccugugccccgugagcggcugggccaucuacagcaaggacaacagcaucagaaucggcagcaagggcgacguguucgugaucagagagcccuucaucagcugcagcccccuggagugcagaaccuucuuccugacccagggcgcccugcugaacgacaagcacagcaacggcaccaucaaggacagaagccccuacagaacccugaugagcugccccaucggcgaggugcccagccccuacaacagcagauucgagagcguggccuggagcgccagcgccugccacgacggcaucaacuggcugaccaucggcaucagcggccccgacaacggcgccguggccgugcugaaguacaacggcaucaucaccgacaccaucaagagcuggagaaacaacauccugagaacccaggagagcgagugcgccugcgugaacggcagcugcuucaccgugaugaccgacggccccagcgacggccaggccagcuacaagaucuucagaaucgagaagggcaagaucgugaagagcguggagaugaacgcccccaacuaccacuacgaggagugcagcugcuaccccgacagcagcgagaucaccugcgugugcagagacaacuggcacggcagcaacagacccugggugagcuucaaccagaaccuggaguaccagaucggcuacaucugcagcggcaucuucggcgacaaccccagacccaacgacaagaccggcagcugcggccccgugagcagcaacggcgccaacggcgugaagggcuucagcuucaaguacggcaacggcguguggaucggcagaaccaagagcaucagcagcagaaacggcuucgagaugaucugggaccccaacggcuggaccggcaccgacaacaacuucagcaucaagcaggacaucgugggcaucaacgaguggagcggcuacagcggcagcuucgugcagcaccccgagcugaccggccuggacugcaucagacccugcuucuggguggagcugaucagaggcagacccaaggagaacaccaucuggaccagcggcagcagcaucagcuucugcggcgugaacagcgacaccgugggcuggagcuggcccgacggcgccgagcugcccuucaccaucgacaaguga

SEQ ID NO: 179164 - RNA, 1410 nt, Artificial Sequence; identical to SEQ ID NO: 177975
  derived and/or modified CDS sequence (opt4) from neuraminidase__InfluenzaA__ADK33834

SEQ ID NO: 179165 - RNA, 1410 nt, Artificial Sequence
  derived and/or modified CDS sequence (opt4) from neuraminidase__InfluenzaA__ADK33844
augaaccccaaccagaagaucaucaccaucggcagcgugugcaugaccaucggcauggccaaccugauccugcagaucggcaacaucaucagcaucuggaucagccacagcauccagcugggcaaccagaaccagaucgagaccugcaaccagagcgugaucaccuacgagaacaacaccugggugaaccagaccuacgugaacaucagcaacaccaacuucgccgccggccagagcguggugagcgccaagcuggccggcaacagcccccugugccccgugagcggcugggccaucuacagcaaggacaacagcaucagaaucggcagcaagggcgacguguucgugaucagagagcccuucaucagcugcagcccccuggagugcagaaccuucuuccugacccagggcgcccugcugaacgacaagcacagcaacggcaccaucaaggacagaagccccuacagaacccugaugagcugccccaucggcgaggugcccagccccuacaacagcagauucgagagcguggccuggagcgccagcgccugccacgacggcaucaacuggcugaccaucggcaucagcggccccgacaacggcgccguggccgugcugaaguacaacggcaucaucaccgacaccaucaagagcuggagaaacaacauccugagaacccaggagagcgagugcgccugcgugaacggcagcugcuucaccgugaugaccgacggccccagcgacggccaggccagcuacaagaucuucagaaucgagaagggcaagaucgugaagagcguggagaugaacgcccccaacuaccacuacgaggagugcagcugcuaccccgacagcagcgagaucaccugcgugugcagagacaacuggcacggcagcaacagacccugggugagcuucaaccagaaccuggaguaccagaucggcuacaucugcagcggcaucuucggcgacaaccccagacccaacgacaagaccggcagcugcggccccgugagcagcaacggcgccaacggcgugaagggcuucagcuucaaguacggcaacggcguguggaucggcagaaccaagagcaucagcagcagaaacggcuucgagaugaucugggaccccaacggcuggaccggcaccgacaacaacuucagcaucaagcaggacaucgugggcaucaacgaguggagcggcuacagcggcagcuucgugcagcaccccgagcugaccggccuggacugcaucagacccugcuucuggguggagcugaucagaggcagacccaaggagaacaccaucuggaccagcggcagcagcaucagcuucugcggcgugaacagcgacaccgugggcuggagcuggcccgacggcgccgagcugcccuucaccaucgacaaguga

SEQ ID NO: 179166 - RNA, 1410 nt, Artificial Sequence; identical to SEQ ID NO: 177975
  derived and/or modified CDS sequence (opt4) from neuraminidase__InfluenzaA__ADK33854

SEQ ID NO: 179167 - RNA, 1410 nt, Artificial Sequence; identical to SEQ ID NO: 178689
  derived and/or modified CDS sequence (opt4) from neuraminidase__InfluenzaA__ADK33864

SEQ ID NO: 179168 - RNA, 1410 nt, Artificial Sequence
  derived and/or modified CDS sequence (opt4) from neuraminidase__InfluenzaA__ADK33874
augaaccccaaccagaagaucaucaccaucggcagcgugugcaugaccaucggcauggccaaccugauccugcagaucggcaacaucaucagcaucuggaucagccacagcauccagcugggcaaccagaaccagaucgagaccugcaaccagagcgugaucaccuacgagaacaacaccugggugaaccagaccuacgugaacaucagcaacaccaacuucgccgccggccagagcguggugagcgugaagcuggccggcaacagcagccugugccccgugagcggcugggccaucuacagcaaggacaacagcaucagaaucggcagcaagggcgacguguucgugaucagagagcccuucaucagcugcagcccccuggagugcagaaccuucuuccugacccagggcgcccugcugaacgacaagcacagcaacggcaccaucaaggacagaagccccuacagaacccugaugagcugccccaucggcgaggugcccagccccuacaacagcagauucgagagcguggccuggagcgccagcgccugccacgacggcaucaacuggcugaccaucggcaucagcggccccgacaacggcgccguggccgugcugaaguacaacggcaucaucaccgacaccaucaagagcuggagaaacaacauccugagaacccaggagagcgagugcgccugcgugaacggcagcugcuucaccgugaugaccgacggccccagcgacggccaggccagcuacaagaucuucagaaucgagaagggcaagaucgugaagagcguggagaugaacgcccccaacuaccacuacgaggagugcagcugcuaccccgacagcagcgagaucaccugcgugugcagagacaacuggcacggcagcaacagacccugggugagcuucaaccagaaccuggaguaccagaucggcuaccugugcagcggcaucuucggcgacaaccccagacccaacgacaagaccggcagcugcggccccgugagcagcaacggcgccaacggcgugaagggcuucagcuucaaguacggcaacggcguguggaucggcagaaccaagagcaucagcagcagaaacggcuucgagaugaucugggaccccaacggcuggaccggcaccgacaacaacuucagcaucaagcaggacaucgugggcaucaacgaguggagcggcuacagcggcagcuucgugcagcaccccgagcugaccggccuggacugcaucagacccugcuucuggguggagcugaucagaggcagacccaaggagaacaccaucuggaccagcggcagcagcaucagcuucugcggcgugaacagcgacaccgugggcuggagcuggcccgacggcgccgagcugcccuucaccaucgacaaguga

SEQ ID NO: 179169 - RNA, 1410 nt, Artificial Sequence; identical to SEQ ID NO: 176798
  derived and/or modified CDS sequence (opt4) from neuraminidase__InfluenzaA__ADK33884

SEQ ID NO: 179170 - RNA, 1410 nt, Artificial Sequence; identical to SEQ ID NO: 177975
  derived and/or modified CDS sequence (opt4) from neuraminidase__InfluenzaA__ADK33894

SEQ ID NO: 179171 - RNA, 1410 nt, Artificial Sequence; identical to SEQ ID NO: 177975
  derived and/or modified CDS sequence (opt4) from neuraminidase__InfluenzaA__ADK33904

SEQ ID NO: 179172 - RNA, 1410 nt, Artificial Sequence; identical to SEQ ID NO: 178755
  derived and/or modified CDS sequence (opt4) from neuraminidase__InfluenzaA__ADK33914

SEQ ID NO: 179173 - RNA, 1410 nt, Artificial Sequence
  derived and/or modified CDS sequence (opt4) from neuraminidase__InfluenzaA__ADK33924
augaaccccaaccagaagaucaucaccaucggcagcgugugcaugaccaucggcauggccaaccugauccugcagaucggcaacaucaucagcaucuggaucagccacagcauccagcugggcaaccagaaccagaucgagaccugcaaccagagcgugaucaccuacgagaacaacaccugggugaaccagaccuacgugaacaucagcaacaccaacuucgccgccggccagagcguggugagcgugaagcuggccggcaacagcagccugugccccgugagcggcugggccaucuacagcaaggacaacagcaucagaaucggcagcaagggcgacguguucgugaucagagagcccuucaucagcugcagcccccuggagugcagaaccuucuuccugacccagggcgcccugcugaacgacaagcacagcaacggcaccaucaaggacagaagccccuacagaacccugaugagcugccccaucggcgaggugcccagccccuacaacagcagauucgagagcguggccuggagcgccagcgccugccacgacggcaucaacuggcugaccaucggcaucagcggccccgacaacggcgccguggccgugcugaaguacaacggcaucaucaccgacaccaucaagagcuggagaaacaacauccugagaacccaggagagcgagugcgccugcgugaacggcagcugcuucaccgugaugaccgacggccccagcgacggccaggccagcuacaagaucuucagaaucgagaagggcaagaucgugaagagcguggagaugaacgcccccaacuaccacuacgaggagugcagcugcuaccccgacagcagcgagaucaccugcgugugcagagacaacuggcacggcagcaacagacccugggugagcuucaaccagaaccuggaguaccagaucggcuacaucugcagcggcaucuucggcgacaaccccagacccaacgacaagaccggcagcugcggccccgugagcagcaacggcgccaacggcgugaagggcuucagcuucaaguacggcaacggcguguggaucggcagaaccaagagcaucagcagcagaaacggcuucgagaugaucugggaccccaacggcuggaccggcaccgacaacaacuucagcaucaagcaggacaucgugggcaucaacgaguggagcggcuacagcggcagcuucgugcagcaccccgagcugaccggccuggacugcaucagacccugcuucuggguggagcugaucagaggcagacccaaggagaacaccaucuggaccagcggcagcagcaucagcuucugcggcgugaacagcaacaccgugggcuggagcuggcccgacggcgccgagcugcccuucaccaucgacaaguga

SEQ ID NO: 179174 - RNA, 1410 nt, Artificial Sequence; identical to SEQ ID NO: 176798
  derived and/or modified CDS sequence (opt4) from neuraminidase__InfluenzaA__ADK33934

SEQ ID NO: 179175 - RNA, 1410 nt, Artificial Sequence; identical to SEQ ID NO: 176798
  derived and/or modified CDS sequence (opt4) from neuraminidase__InfluenzaA__ADK33944

SEQ ID NO: 179176 - RNA, 1410 nt, Artificial Sequence; identical to SEQ ID NO: 178755
  derived and/or modified CDS sequence (opt4) from neuraminidase__InfluenzaA__ADK33954

SEQ ID NO: 179177 - RNA, 1410 nt, Artificial Sequence; identical to SEQ ID NO: 176798
  derived and/or modified CDS sequence (opt4) from neuraminidase__InfluenzaA__ADK33964

SEQ ID NO: 179178 - RNA, 1410 nt, Artificial Sequence; identical to SEQ ID NO: 177905
  derived and/or modified CDS sequence (opt4) from neuraminidase__InfluenzaA__ADK33974

SEQ ID NO: 179179 - RNA, 1410 nt, Artificial Sequence; identical to SEQ ID NO: 176798
  derived and/or modified CDS sequence (opt4) from neuraminidase__InfluenzaA__ADK33984

SEQ ID NO: 179180 - RNA, 1410 nt, Artificial Sequence
  derived and/or modified CDS sequence (opt4) from neuraminidase__InfluenzaA__ADK39016
augaaccccaaccagaagaucaucaccaucggcagcgugugcaucaccaucggcauggccaaccugauccugcagaucggcaacaucaucagcaucuggaucagccacagcauccagcugggcaaccagaaccagaucgagaccugcaaccagagcgugaucaccuacgagaacaacaccugggugaaccagaccuacgugaacaucagcaacaccaacuucgccgccggccagagcguggugagcgugaagcuggccggcaacagcagccugugccccgugagcggcugggccaucuacagcaaggacaacagcaucagaaucggcagcaagggcgacguguucgugaucagagagcccuucaucagcugcagcccccuggagugcagaaccuucuuccugacccagggcgcccugcugaacgacaagcacagcaacggcaccaucaaggacagaagccccuacagaacccugaugagcugccccaucggcgaggugcccagccccuacaacagcagauucgagagcguggccuggagcgccagcgccugccacgacggcaucagcuggcugaccaucggcaucagcggccccgacaacggcgccguggccgugcugaaguacaacggcaucaucaccgacaccaucaagagcuggagaaacaacauccugagaacccaggagagcgagugcgccugcgugaacggcagcugcuucaccgugaugaccgacggccccagcgacggccaggccagcuacaagaucuucagaaucgagaagggcaagaucgugaagagcguggagaugaacgcccccaacuaccacuacgaggagugcagcugcuaccccgacagcagcgagaucaccugcgugugcagagacaacuggcacggcagcaacagacccugggugagcuucaaccagaaccuggaguaccagaucggcuacaucugcagcggcaucuucggcgacaaccccagacccaacgacaagaccggcagcugcggccccgugagcagcaacggcgccaacggcgugaagggcuucagcuucaaguacggcaacggcguguggaucggcagaaccaagagcaucagcagcagaaacggcuucgagaugaucugggaccccgacggcuggaccggcaccgacaacaacuucagcaucaagcaggacaucgugggcaucaacgaguggagcggcuacagcggcagcuucgugcagcaccccgagcugaccggccuggacugcaucagacccugcuucuggguggagcugaucagaggcagacccaaggagaacaccaucuggaccagcggcagcagcaucagcuucugcggcgugaacagcgacaccgugggcuggagcuggcccgacggcgccgagcugcccuucaccaucgacaaguga

SEQ ID NO: 179181 - RNA, 1410 nt, Artificial Sequence; identical to SEQ ID NO: 176659
  derived and/or modified CDS sequence (opt4) from neuraminidase__InfluenzaA__ADK45315

SEQ ID NO: 179182 - RNA, 1410 nt, Artificial Sequence
  derived and/or modified CDS sequence (opt4) from neuraminidase__InfluenzaA__ADK45413
augaaccccaaccagaagaucaucaccaucggcagcgugagccugaccaucagcaccaucugcuucuucaugcagaucgccauccugaucaccaccgugacccugcacuucaagcaguacgaguucaacagcccccccaacaaccaggugaugcuguacgagcccaccaucaucgagagaaacaucaccgagaucguguaccugaccaacaccaccaucgagaaggagaucugccccaagcuggccgaguacagaaacuggagcaagccccagugcgacaucaccggcuucgcccccuucagcaaggacaacagcaucagacugagcgccggcggcgacaucugggugaccagagagcccuacgugagcugcgaccccgacaagugcuaccaguucgcccugggccagggcaccacccugaacaacgugcacagcaacaacaccgugagagacagaacccccuacagaacccugcugaugaacgagcugggcgugcccuuccaccugggcaccaagcaggugugcaucgccuggagcagcagcagcugccacgacggcaaggccuggcugcacgugugcaucaccggcgacgacaagaacgccaccgccagcuucaucuacaacggcagacugguggacagcguggugagcuggagcaaggacauccugagaacccaggagagcgagugcgugugcaucaacggcaccugcaccguggugaugaccgacggcagcgccagcggcaaggccgacaccaagauccuguucaucgaggagggcaagaucgugcacaccagcacccugagcggcagcgcccagcacguggaggagugcagcugcuaccccagauaccccggcgugagaugcgugugcagagacaacuggaagggcagcaacagacccaucguggacaucaacaucaaggaccacagcaucgccagcagcuacgugugcagcggccuggugggcgacacccccagaaagaacgacagcagcagcagcagccacugccuggaccccaacaacgaggagggcggccacggcgugaagggcugggccuucgacgacggcaacgacguguggaugggcagaaccaucagcgagaagagcagacugggcuacgagaccuucaaggugaucgagggcuggagcaaccccaagagcaagcugcagaucaacagacaggugaucguggacagaggcaacagaagcggcuacagcggcaucuucagcguggagggcaagagcugcaucaacagaugcuucuacguggagcugaucagaggcagaaaggaggagaccgaggugcuguggaccagcaacagcaucgugguguucugcggcaccagcggcaccuacggcaccggcagcuggcccgacggcgccaacaucaaccugaugcccaucuga

SEQ ID NO: 179183 - RNA, 1410 nt, Artificial Sequence
  derived and/or modified CDS sequence (opt4) from neuraminidase__InfluenzaA__ADK45424
augaaccccaaccagaagaucaucaccaucggcagcgugagccugaccaucagcaccaucugcuucuucaugcagaucgccauccugaucaccaccgugacccugcacuucaagcaguacgaguucaacagcccccccaacaaccaggugaugcugugcgagcccaccaucaucgagagaaacaucaccgagaucguguaccugaccaacaccaccaucgagaaggagaucugccccaagcuggccgaguacagaaacuggagcaagccccagugcgacaucaccggcuucgcccccuucagcaaggacaacagcaucagacugagcgccggcggcgacaucugggugaccagagagcccuacgugagcugcgaccccgacaagugcuaccaguucgcccugggccagggcaccacccugaacaacgugcacagcaacaacaccgugagagacagaacccccuacagaacccugcugaugaacgagcugggcgugcccuuccaccugggcaccaagcaggugugcaucgccuggagcagcagcagcugccacgacggcaaggccuggcugcacgugugcaucaccggcgacgacaagaacgccaccgccagcuucaucuacaacggcagacugguggacagcguggugagcuggagcaaggagauccugagaacccaggagagcgagugcgugugcaucaacggcaccugcaccguggugaugaccgacggcagcgccagcggcaaggccgacaccaagauccuguucaucgaggagggcaagaucgugcacaccagcacccugagcggcagcgcccagcacguggaggagugcagcugcuaccccagauaccccggcgugagaugcgugugcagagacaacuggaagggcagcaacagacccaucguggacaucaacaucaaggaccacagcaucgugagcagcuaccugugcagcggccuggugggcgacacccccagaaagaacgacagcagcagcagcagccacugccuggaccccaacaacgaggagggcggccacggcgugaagggcugggccuucgacgacggcaacgacguguggaugggcagaaccaucagcgagaagagcagacugggcuacgagaccuucaaggugaucgagggcuggagcaaccccaagagcaagcugcagaucaacagacaggugaucguggacagaggcaacagaagcggcuacagcggcaucuucagcguggagggcaagagcugcaucaacagaugcuucuacguggagcugaucagaggcagaaaggaggagaccgaggugcuguggaccagcaacagcaucgugguguucugcggcaccagcggcaccuacggcaccggcagcuggcccgacggcgccgacaucaaccugaugcccaucuga

SEQ ID NO: 179184 - RNA, 1410 nt, Artificial Sequence; identical to SEQ ID NO: 177965
  derived and/or modified CDS sequence (opt4) from neuraminidase__InfluenzaA__ADK45446

SEQ ID NO: 179185 - RNA, 1410 nt, Artificial Sequence
  derived and/or modified CDS sequence (opt4) from neuraminidase__InfluenzaA__ADK45457
augaaccccaaccagaagaucaucaccaucggcagcgugagccugaccaucagcaccaucugcuucuucaugcagaucgccauccugaucaccaccgugacccugcacuucaagcaguacgaguucaacagcccccccaacaaccaggugaugcugugcgagcccaccaucaucgagagaaacaucaccgagaucguguaccugaccaacaccaccaucgagaaggagaucugccccaagcuggccgaguacagaaacuggagcaagccccagugcgacaucaccggcuucgcccccuucagcaaggacaacagcaucagacugagcgccggcggcgacaucugggugaccagagagcccuacgugagcugcgaccccgacaagugcuaccaguucgcccugggccagggcaccacccugaacaacgugcacagcaacaacaccgugagagacagaacccccuacagaacccugcugaugaacgagcugggcgugcccuuccaccugggcaccaagcaggugugcaucgccuggagcagcagcagcugccacgacggcaaggccuggcugcacgugugcaucaccggcgacgacaagaacgccaccgccagcuucaucuacaacggcagacugguggacagcguggugagcuggagcaaggagauccugagaacccaggagagcgagugcgugugcaucaacggcaccugcaccguggugaugaccgacggcagcgccagcggcaaggccgacaccaagauccuguucaucgaggagggcaagaucgugcacaccagcacccugagcggcagcgcccagcacguggaggagugcagcugcuaccccagauaccccggcgugagaugcgugugcagagacaacuggaagggcagcaacagacccaucguggacaucaacaucaaggaccacagcaucgugagcagcuacgugugcagcggccuggugggcgacacccccagaaagaacgacagcagcggcagcagccacugccuggaccccaacaacgaggagggcggccacggcgugaagggcugggccuucgacgacggcaacgacguguggaugggcagaaccaucagcgagaagagcagacugggcuacgagaccuucaaggugaucgagggcuggagcaaccccaagagcaagcugcagaucaacagacaggugaucguggacagaggcaacagaagcggcuacagcggcaucuucagcguggagggcaagagcugcaucaacagaugcuucuacguggagcugaucagaggcagaaaggaggagaccgaggugcuguggaccagcaacagcaucgugguguucugcggcaccagcggcaccuacggcaccggcagcuggcccgacggcgccgacaucaaccugaugcccaucuga

SEQ ID NO: 179186 - RNA, 1410 nt, Artificial Sequence
  derived and/or modified CDS sequence (opt4) from neuraminidase__InfluenzaA__ADK45479
augaaccccaaccagaagaucaucaccaucggcagcgugagccugaccaucagcaccaucugcuucuucaugcagaucgccauccugaucaccaccgugacccugcacuucaagcaguacgaguucaacagcccccccaacaaccaggugaugcugugcgagcccaccaucaucgagagaaacaucaccgagaucguguaccugaccaacaccaccaucgagaaggagaucugccccaagcuggccgaguacagaaacuggagcaagccccagugcgacaucaccggcuucgcccccuucagcaaggacaacagcaucagacugagcgccggcggcgacaucugggugaccagagagcccuacgugagcugcgaccccgacaagugcuaccaguucgcccugggccagggcaccacccugaacaacgugcacagcaacaacaccgugagagacagaacccccuacagaacccugcugaugaacgagcugggcgugcccuuccaccugggcaccaagcaggugugcaucgccuggagcagcagcagcugccacgacggcaaggccuggcugcacgugugcaucaccggcgacgacaagaacgccaccgccagcuucaucuacaacggcagacugguggacagcguggugagcuggagcaaggacauccugagaacccaggagagcgagugcgugugcaucaacggcaccugcaccguggugaugaccgacggcagcgccagcggcaaggccgacaccaagauccuguucaucgaggagggcaagguggugcacaccagcacccugagcggcagcgcccagcacguggaggagugcagcugcuaccccagauaccccggcgugagaugcgugugcagagacaacuggaagggcagcaacagacccaucguggacaucaacaucaaggaccacagcaucgugagcagcuacgugugcagcggccuggugggcgacacccccagaaagaacgacagcagcagcagcagccacugccuggaccccaacaacgaggagggcggccacggcgugaagggcugggccuucgacgacggcaacgacguguggaugggcagaaccaucagcgagaagagcagacugggcuacgagaccuucaaggugaucgagggcuggagcaaccacaagagcaagcugcagaucaacagacaggugaucguggacagaggcaacagaagcggcuacagcggcaucuucagcguggagggcaagagcugcaucaacagaugcuucuacguggagcugaucagaggcagaaaggaggaggccgaggugcuguggaccagcaacagcaucgugguguucugcggcaccagcggcaccuacggcaccggcagcuggcccgacggcgccgaccugaaccugaugcccaucuga

SEQ ID NO: 179187 - RNA, 1410 nt, Artificial Sequence; identical to SEQ ID NO: 176798
  derived and/or modified CDS sequence (opt4) from neuraminidase__InfluenzaA__ADK48799

SEQ ID NO: 179188 - RNA, 1410 nt, Artificial Sequence; identical to SEQ ID NO: 178711
  derived and/or modified CDS sequence (opt4) from neuraminidase__InfluenzaA__ADK62686

SEQ ID NO: 179189 - RNA, 1410 nt, Artificial Sequence; identical to SEQ ID NO: 178149
  derived and/or modified CDS sequence (opt4) from neuraminidase__InfluenzaA__ADK62696

SEQ ID NO: 179190 - RNA, 1410 nt, Artificial Sequence; identical to SEQ ID NO: 177381
  derived and/or modified CDS sequence (opt4) from neuraminidase__InfluenzaA__ADK64994

SEQ ID NO: 179191 - RNA, 1410 nt, Artificial Sequence
  derived and/or modified CDS sequence (opt4) from neuraminidase__InfluenzaA__ADK65002
augaaccccaaccagaagaucaucaccaucggcagcgugugcaugaccaucggcauggccaaccugauccugcagaucggcaacaucaucagcaucuggaucagccacagcauccagcugggcaaccagaaccagaucgagaccugcaaccagagcgugaucaccuacgagaacaacaccugggugaaccagaccuacgugaacaucagcaacaccaacuucgccgccggccagagcguggugagcgugaagcuggccggcaacagcagccugugccccgugagcggcugggccaucuacagcaaggacaacagcaucagaaccggcagcaagggcgacguguucgugaucagagagcccuucaucagcugcagcccccuggagugcagaaccuucuuccugacccagggcgcccugcugaacgacaagcacagcaacggcaccaucaaggacagaagccccuacagaacccugaugagcugccccaucggcgaggugcccagccccuacaacagcagauucgagagcguggccuggagcgccagcgccugccacgacggcaucaacuggcugaccaucggcaucagcggccccgacaacggcgccguggccggccugaaguacaacggcaucaucaccgacaccaucaagagcuggagaaacaacauccugagaacccaggagagcgagugcgccugcgugaacggcagcugcuucaccgugaugaccgacggccccagcgacggccaggccagcuacaagaucuucagaaucgagaagggcaagaucgugaagagcguggagaugaacgcccccaacuaccacuacgaggagugcagcugcuaccccgacagcagcgagaucaccugcgugugcagagacaacuggcacggcagcaacagacccugggugagcuucaaccagaaccuggaguaccagaucggcuacaucugcagcggcaucuucggcgacaaccccagacccaacgacaagaccggcagcugcggccccgugagcagcaacggcgccaacggcgugaagggcuucagcuucaaguacggcaacggcguguggaucggcagaaccaagagcaucagcagcagaaacggcuucgagaugaucugggaccccaacggcuggaccggcaccgacaacaacuucagcaucaagcaggacaucgugggcaucaacgaguggagcggcuacagcggcagcuucgugcagcaccccgagcugaccggccuggacugcaucagacccugcuucuggguggagcugaucagaggcagacccaaggagaacaccaucuggaccagcggcagcagcaucagcuucugcggcgugaacagcgacaccgugggcuggagcuggcccgacggcgccgagcugcccuucaccaucgacaaguga

SEQ ID NO: 179192 - RNA, 1410 nt, Artificial Sequence; identical to SEQ ID NO: 176798
  derived and/or modified CDS sequence (opt4) from neuraminidase__InfluenzaA__ADK65010

SEQ ID NO: 179193 - RNA, 1410 nt, Artificial Sequence
  derived and/or modified CDS sequence (opt4) from neuraminidase__InfluenzaA__ADK65018
augaaccccaaccagaagaucaucaccaucggcagcgugugcaugaccaucggcauggccaaccugauccugcagaucggcaacaucaucagcaucuggaucagccacagcauccagcugggcaaccagaaccagaucgagaccugcaaccagagcgugaucaccuacgagaacaacaccugggugaaccagaccuacgugaacaucagcaacaccaacuucgccgccggccagagcguggugagcgugaagcuggccggcaacagcagccugugccccgugagcggcugggccaucuacagcaaggacaacagcaucagaaucggcagcaagggcgacguguucgugaucagagagcccuucaucagcugcagcccccuggagugcagaaccuucuuccugacccagggcgcccugcugaacgacaagcacagcaacggcaccaucaaggacagaagccccuacagaacccugaugagcugccccaucggcgaggugcccagccccuacaacagcagauucgagagcguggccuggcccgccagcgccugccacgacggcaucaacuggcugaccaucggcaucagcggccccgacaacggcgccguggccgugcugaaguacaacggcaucaucaccgacaccaucaagagcuggagaaacaacauccugagaacccaggagagcgagugcgccugcgugaacggcagcugcuucaccaucaugaccgacggccccagcgacggccaggccagcuacaagaucuucagaaucgagaagggcaagaucgugaagagcaucgagaugaacgcccccaacuaccacuacgaggagugcagcugcuaccccgacagcagcgagaucaccugcgugugcagagacaacuggcacggcagcaacagacccugggugagcuucaaccagaaccuggaguaccagaucggcuacaucugcagcggcaucuucggcgacaaccccagacccaacgacaagaccggcagcugcggccccgugagcagcaacggcgccaacggcgugaagggcuucagcuucaaguacggcaacggcguguggaucggcagaaccaagagcaucagcagcagaaacggcuucgagaugaucugggaccccaacggcuggaccggcaccgacaacaacuucagcaucaagcaggacaucgugggcaucaacgaguggagcggcuacagcggcagcuucgugcagcaccccgagcugaccggccuggacugcaucagacccugcuucuggguggagcugaucagaggcagacccaaggagaacaccaucuggaccagcggcagcagcaucagcuucugcggcgugaacagcgacaccgugggcuggagcuggcccgacggcgccgagcugcccuucaccaucgacaaguga

SEQ ID NO: 179194 - RNA, 1410 nt, Artificial Sequence
  derived and/or modified CDS sequence (opt4) from neuraminidase__InfluenzaA__ADK87290
augaaccccaaccagaagaucaucaccaucggcagcgugagccugaccaucagcaccaucugcuucuucaugcagaucgccauccugaucaccaccgugacccugcacuucaagcaguacgaguucaacagcccccccaacaaccaggugaugcugugcgagcccaccaucaucgagagaaacaucaccgagaucguguaccugaccaacaccaccaucgagaaggagaucugccccaagcuggccgaguacagaaacuggagcaagccccagugcgacaucaccggcuucgcccccuucagcaaggacaacagcaucagacugagcgccggcggcgacaucugggugaccagagagcccuacgugagcugcgaccccgacaagugcuaccaguucgcccugggccagggcaccacccugaacaacgugcacagcaacaacaccgugagagacagaacccccuacagaacccugcugaugaacgagcugggcgugcccuuccaccugggcaccaagcaggugugcaucgccuggagcagcagcagcugccacgacggcaaggccuggcugcacgugugcaucaccggcgacgacaagaacgccaccgccagcuucaucuacaacggcagacugguggacagcguggugagcuggagcaaggagauccugagaacccaggagagcgagugcgugugcaucaacggcaccugcaccguggugaugaccgacggcagcgccagcggcaaggccuacaccaagauccuguucaucgaggagggcaagaucgugcacaccagcacccugagcggcagcgcccagcacguggaggagugcagcugcuaccccagauaccccggcgugagaugcgugugcagagacaacuggaagggcagcaacagacccaucguggacaucaacaucaaggaccacagcaucgugagcagcuacgugugcagcggccuggugggcgacacccccagaaagaacgacagcagcagcagcagccacugccuggaccccaacaacgaggagggcggccacggcgugaagggcugggccuucgacgacggcaacgacguguggaugggcagaaccaucagcgagaagagcagacugggcuacgagaccuucaaggugaucgagggcuggagcaaccccaagagcaagcugcagaucaacagacaggugaucguggacagaggcaacagaagcggcuacagcggcaucuucagcguggagggcaagagcugcaucaacagaugcuucuacguggagcugaucagaggcagaaaggaggagaccgaggugcuguggaccagcaacagcaucgugguguucugcggcaccagcggcaccuacggcaccggcagcuggcccgacggcgccgacaucaaccugaugcccguguga

SEQ ID NO: 179195 - RNA, 1410 nt, Artificial Sequence
  derived and/or modified CDS sequence (opt4) from neuraminidase__InfluenzaA__ADK87292
augaaccccaaccagaagaucaucaccaucggcagcgugagccugaccaucagcaccaucugcuucuucaugcagaucgccauccugaucaccaccgugacccugcacuucaagcaguacgaguucaacagcccccccaacaaccaggugaugcugugcgagcccaccaucaucgagagaaacaucaccgagaucguguaccugaccaacaccaccaucgagaaggagaucugccccaagcuggccgaguacagaaacuggagcaagccccagugcgacaucaccggcuucgcccccuucagcaaggacaacagcaucagacugagcgccggcggcgacaucugggugaccagagagcccuacgugagcugcgaccccgacaagugcuaccaguucgcccugggccagggcaccacccugaacaacgugcacagcaacaacaccgugagagacagaacccccuacagaacccugcugaugaacgagcugggcgugcccuuccaccugggcaccaagcaggugugcaucgccuggagcagcagcagcugccacgacggcaaggccuggcugcacgugugcaucaccggcgacgacaagaacgccaccgccagcuucaucuacaacggcagacugguggacagcguggugagcuggagcaaggagauccugagaacccaggagagcgagugcgugugcaucaacggcaccugcaccguggugaugaccgacggcagcgccagcggcaaggccgacaccaagauccuguucaucgaggagggcaagaucgugcacaccagcacccugagcggcagcgcccagcacguggaggagugcagcugcuaccccagauaccccggcgugagaugcgugugcagagacaacuggaagggcagcaacagacccaucguggacaucaacaucaaggaccacagcaucgugagcagcuacgccugcagcggccuggugggcgacacccccagaaagaacgacagcagcagcagcagccacugccuggaccccaacaacgaggagggcggccacggcgugaagggcugggccuucgacgacggcaacgacguguggaugggcagaaccaucagcgagaagagcagacugggcuacgagaccuucaaggugaucgagggcuggagcaaccccaagagcaagcugcagaucaacagacaggugaucguggacagaggcaacagaagcggcuacagcggcaucuucagcguggagggcaagagcugcaucaacagaugcuucuacguggagcugaucagaggcagaaaggaggagaccgaggugcuguggaccagcaacagcaucgugguguucugcggcaccagcggcaccuacggcaccggcagcuggcccgacggcgccgacaucaaccugaugcccguguga

SEQ ID NO: 179196 - RNA, 1410 nt, Artificial Sequence
  derived and/or modified CDS sequence (opt4) from neuraminidase__InfluenzaA__ADK87294
augaaccccaaccagaagaucaucgccaucggcagcgugagccugaccaucagcaccaucugcuucuuccugcagaucgccauccugaucaccaccgugacccugcacuucaagcaguacgaguucaacagcccccccaacaaccaggugaugcugugcgagcccaccaucaucgagagaaacaucaccgagaucguguaccugaccaacaccaccaucgagaaggagaucugccccaagcuggccgaguacagaaacuggagcaagccccagugcgacaucaccggcuucgcccccuucagcaaggacaacagcaucagacugagcgccggcggcgacaucugggugaccagagagcccuacgugagcugcgaccccgacaagugcuaccaguucgcccugggccagggcaccacccugaacaacgugcacagcaacaacaccgugagagacagaacccccuacagaacccugcugaugaacgagcugggcgugcccuuccaccugggcaccaagcaggugugcaucgccuggagcagcagcagcugcagagacggcaaggccuggcugcacgugugcaucaccggcgacgacaagaacgccaccgccagcuucaucuacaacggcagacugguggacagcguggugagcuggagcaaggagauccugagaacccaggagagcgagugcgugugcaucaacggcaccugcaccguggugaugaccgacggcagcgccagcggcaaggccgacaccaagauccuguucaucgaggagggcaagaucgugcacaccagcacccugagcggcagcgcccagcacguggaggagugcagcugcuaccccagauaccccggcgugagaugcgugugcagagacaccggcaagggcagcaacagacccaucguggacaucaacaucaaggaccacagcaucgugagcagcuacgugugcagcggccuggugggcgacacccccagaaagaacgacagcagcagcagcagccacugccuggaccccaacaacgaggagggcggccacggcgugaagggcugggccuucgacgacggcaacgacguguggaugggcagaaccaucagcgagaagagcagacugggcuacgagaccuucaaggugaucgagggcuggagcaaccccaagagcaagcugcagaucaacagacaggugaucguggacagaggcaacagaagcggcuacagcggcaucuucagcguggagggcaagagcugcaucaacagaugcuucuacguggagcugaucagaggcagaaaggaggagaccgaggugcuguggaccagcaacaacaucgugguguucugcggcaccagcggcaccuacggcaccggcagcuggcccgacggcgccgacaucaaccugaugcccguguga

SEQ ID NO: 179197 - RNA, 1410 nt, Artificial Sequence
  derived and/or modified CDS sequence (opt4) from neuraminidase__InfluenzaA__ADK87297
augaaccccaaccagaagaucaucaccaucggcagcgugugcaugaccaucggcauggccaaccugauccugcagaucggcaacaucaucagcaucuggaucagccacagcauccagcugggcaaccagaaccagaucgagaccugcaaccagagcgugaucaccuacgagaacaacaccugggugaaccagaccuacgugaacaucagcaacaccaacuucgccgccggccagagcguggugagcgugaagcuggccggcaacagcagccugugccccgugagcggcugggccaucuacagcaaggacaacagcaucagaaucggcagcaagggcgacguguucgugaucagagagcccuucaucagcugcagcccccuggagugcagaaccuucuuccugacccagggcgcccugcugaacgacaagcacagcaacggcaccaucaagaacagaagccccuacagaacccugaugagcugccccaucggcgaggugcccagccccuacaacagcagauucgagagcguggccuggagcgccagcgccugccacgacggcaucaacuggcugaccaucggcaucagcggccccgacaacggcgccguggccgugcugaaguacaacggcaucaucaccgacaccaucaagagcuggagaaacaacauccugagaacccaggagagcgagugcgccugcgugaacggcagcugcuucaccgugaugaccgacggccccagcgacggccaggccagcuacaagaucuucagaaucgagaagggcaagaucgugaagagcguggagaugaacgcccccaacuaccacuacgaggagugcagcugcuaccccgacagcagcgagaucaccugcgugugcagagacaacuggcacggcagcaacagacccugggugagcuucaaccagaaccuggaguaccagaucggcuacaucugcagcggcaucuucggcgacaaccccagacccaacgacaagaccggcagcugcggccccgugagcagcaacggcgccaacggcgugaagggcuucagcuucaaguacggcaacggcguguggaucggcagaaccaagagcaucagcagcagaaacggcuucgagaugaucugggaccccaacggcuggaccggcaccgacaacaacuucagcaucaagcaggacaucgugggcaucaacgaguggagcggcuacagcggcagcuucgugcagcaccccgagcugaccggccuggacugcaucagacccugcuucuggguggagcugaucagaggcagacccaaggagaacaccaucuggaccagcggcagcagcaucagcuucugcggcgugaacagcgacaccgugggcuggagcuggcccgacggcgccgagcugcccuucaccaucgacaaguga

SEQ ID NO: 179198 - RNA, 1410 nt, Artificial Sequence
  derived and/or modified CDS sequence (opt4) from neuraminidase__InfluenzaA__ADK87299
augaaccccaaccagaagaucaucaccaucggcagcgugugcaugaccaucggcauggccaaccugauccugcagaucggcaacaucaucagcaucuggaucagccacagcauccagcugggcaaccagaaccagaucgagaccugcaaccagagcgugaucaccuacgagaacaacaccugggugaaccagaccuacgugaacaucagcaacaccaacuucgccgccggccagagcguggugagcgugaagcuggccggcaacagcagccugugccccgugagcggcugggccaucuacagcaaggacaacagcaucagaaucggcagcaagggcgacguguucgugaucagagagcccuucaucagcugcagcccccuggagugcagaaccuucuuccugacccagggcgcccugcugaacgacaagcacagcaacggcaccaucaaggacagaagccccuacagaacccugaugagcugccccaucggcgaggugcccagccccuacaacagcagauucgagagcguggccuggagcgccagcgccugccacgacggcaucaacuggcugaccaucggcaucagcggccccgacaacggcgccguggccgugcugaaguacaacggcaucaucaccgacaccaucaagagcuggagaaacaacauccugagaacccaggagagcgagugcgccugcgugaacggcagcugcuucaccgugaugaccgacggccccagcgacggccaggccagcuucaagaucuucagaaucgagaagggcaagaucgugaagagcguggagaugaacgcccccaacuaccacuacgaggagugcagcugcuaccccgacagcagcgagaucaccugcgugugcagagacaacuggcacggcagcaacagacccugggugagcuucaaccagaaccuggaguaccagaucggcuacaucugcagcggcaucuucggcgacaaccccagacccaacgacaagaccggcagcugcggccccgugagcagcaacggcgccaacggcgugaagggcuucagcuucaaguacggcaacggcguguggaucggcagaaccaagagcaucagcagcagaaacggcuucgagaugaucugggaccccaacggcuggaccggcaccgacaacaacuucagcaucaagcaggacaucgugggcaucaacgaguggagcggcuacagcggcagcuucgugcagcaccccgagcugaccggccuggacugcaucagacccugcuucuggguggagcugaucagaggcagacccaaggagaacaccaucuggaccagcggcagcagcaucagcuucugcggcgugaacagcgacaccgugggcuggagcuggcccgacggcgccgagcugcccuucaccaucgacaaguga

SEQ ID NO: 179199 - RNA, 1410 nt, Artificial Sequence
  derived and/or modified CDS sequence (opt4) from neuraminidase__InfluenzaA__ADK87301
augaaccccaaccagaagaucaucaccaucggcagcgugagccugaccaucagcaccaucugcuucuucaugcagaucgccauccugaucaccaccgugacccugcacuucaagcaguacgaguucaacagcccccccaacaaccaggugaugcugugcgagcccaccaucaucgagagaaacaucaccgagaucguguaccugaccaacaccaccaucgagaaggagaucugccccaagcuggccgaguacagaaacuggagcaagccccagugcgacaucaccggcuucgcccccuucagcaaggacaacagcaucagacugagcgccggcggcgacaucugggugaccagagagcccuacgugagcugcgaccccgacaagugcuaccaguucgcccugggccagggcaccacccugaacaacgugcacagcaacaacaccgugagagacagaacccccuacagaacccugcugaugaacgagcugggcgugcccuuccaccugggcaccaagcaggugugcaucgccuggagcagcagcagcugccacgacggcaaggccuggcugcacgugugcaucaccggcgacgacaagaacgccaccgccagcuucaucuacaacggcagacugguggacagcguggugagcuggagcaaggagauccugagaacccaggagagcgagugcgugugcaucaacggcaccugcaccguggccaugaccgacggcagcgccagcggcaaggccgacaccaagauccuguucaucgaggagggcaagaucgugcacaccagcacccugagcggcagcgcccagcacguggaggagugcagcugcuaccccagauaccccggcgugagaugcgugugcagagacaacuggaagggcagcaacagacccaucguggacaucaacaucaaggaccacagcaucgugagcagcuacgugugcagcggccuggugggcgacacccccagaaagaacgacagcagcagcagcagccacugccuggaccccaacaacgaggagggcggccacggcgugaagggcugggccuucgacgacggcaacgacguguggaugggcagaaccaucagcgagaagagcagacugggcuacgagaccuucaaggugaucgagggcuggagcaaccccaagagcaagcugcagaucaacagacaggugaucguggacagaggcaacagaagcggcuacagcggcaucuucagcguggagggcaagagcugcaucaacagaugcuucuacguggagcugaucagaggcagaaaggaggagaccgaggugcuguggaccagcaacagcaucgugguguucugcggcaccagcggcaccuacggcaccggcagcuggcccgacggcgccgacaucaaccugaugcccaucuga

SEQ ID NO: 179200 - RNA, 1410 nt, Artificial Sequence; identical to SEQ ID NO: 176659
  derived and/or modified CDS sequence (opt4) from neuraminidase__InfluenzaA__ADK87303

SEQ ID NO: 179201 - RNA, 1410 nt, Artificial Sequence
  derived and/or modified CDS sequence (opt4) from neuraminidase__InfluenzaA__ADK87305
augaaccccaaccagaagaucaucaccaucggcagcgugagccugaccaucagcaccaucugcuucuucaugcagaucgccauccugaucaccaccgugacccugcacuucaagcaguacgaguucaacagcccccccaacaaccaggugaugcugugcgagcccaccaucaucgagagaaacaucaccgagaucguguaccugaccaacaccaccaucgagaaggagaucugccccaagcuggccgaguacagaaacuggagcaagccccagugcgacaucaccggcuucgcccccuucagcaaggacaacagcaucagacugagcgccggcggcgacaucugggugaccagagagcccuacgugagcugcgaccccgacaagugcuaccaguucgcccugggccagggcaccacccugaacaacgugcacagcaacaacaccgugagagacagaacccccuacagaacccugcugaugaacgagcugggcgugcccuuccaccugggcaccaagcaggugugcaucgccuggagcagcagcagcugccacgacggcaaggccuggcugcacgugugcaucaccggcgacgacaagaacgccaccgccagcuucaucuacaacggcagacugguggacagcguggugagcuggagcaaggagauccugagaacccaggagagcgagugcgugugcaucaacggcaccugcaccguggugaugaccgacggcagcgccagcggcaaggccgacaccaagauccuguucaucgaggagggcaagaucgugcacaccagcacccugagcggcagcgcccagcacguggaggagugcagcugcuaccccagauaccccggcgugagaugcgugugcagagacaacuggaagggcagcaacagacccaucguggacaucaacaucaaggaccacagcaucgugagcagcuacgugugcagcggccuggugggcgacacccccagaaagaacgacagcagcagcagcagccacugccuggaccccaacaacgaggagggcggccacggcgugaagggcugggccuucgacgacggcaacgacguguggaugggcagaaccaucagcgagaagagcagacugggcuacgagaccuucaaggugaucgagggcuggagcaaccccaagagcaagcugcagaucaacagacaggugaucgugggcagaggcaacagaagcggcuacagcggcaucuucagcguggagggcaagagcugcaucaacagaugcuucuacguggagcugaucagaggcagaaaggaggagaccgaggugcuguggaccagcaacagcaucgugguguucugcggcaccagcggcaccuacggcaccggcagcuggcccgacggcgccgacaucaaccugaugcccguguga

SEQ ID NO: 179202 - RNA, 1410 nt, Artificial Sequence
  derived and/or modified CDS sequence (opt4) from neuraminidase__InfluenzaA__ADK87307
augaaccccaaccagaaggugaucaccaucggcagcgugagccugaccaucagcaccaucugcuucuucaugcagaucgccauccugaucaccaccgugacccugcacuucaagcaguacgaguucaacagcccccccaacaaccaggugaugcugugcgagcccaccaucaucgagagaaacaucaccgagaucguguaccugaccaacaccaccaucgagaaggagaucugccccaagcuggccgaguacagaaacuggagcaagccccagugcgacaucaccggcuucgcccccuucagcaaggacaacagcaucagacugagcgccggcggcgacaucugggugaccagagagcccuacgugagcugcgaccccgacaagugcuaccaguucgcccugggccagggcaccacccugaacaacgugcacagcaacaacaccgugagagacagaacccccuacagaacccugcugaugaacgagcugggcgugcccuuccaccugggcaccaagcaggugugcaucgccuggagcagcagcagcugccacgacggcaaggccuggcugcacgugugcaucaccggcgacgacaagaacgccaccgccagcuucaucuacaacggcagacugguggacagcguggugagcuggagcaaggagauccugagaacccaggagagcgagugcgugugcaucaacggcaccugcaccguggugaugaccgacggcagcgccagcggcaaggccgacaccaagauccuguucaucgaggagggcaagaucgugcacaccagcacccugagcggcagcgcccagcacguggaggagugcagcugcuaccccagauaccccggcgugagaugcgugugcagagacaacuggaagggcagcaacagacccaucguggacaucaacaucaaggaccacagcaucgugagcagcuacgugugcagcggccuggugggcgacacccccagaaagaacgacagcagcagcagcagccacugccuggaccccaacaacgaggagggcggccacggcgugaagggcugggccuucgacgacggcaacgacguguggaugggcagaaccaucagcgagaagagcagacugggcuacgagaccuucaaggugaucgagggcuggagcaaccccaagagcaagcugcagaucaacagacaggugaucgugggcagaggcaacagaagcggcuacagcggcaucuucagcguggagggcaagagcugcaucaacagaugcuucuacguggagcugaucggcggcagaaaggaggagaccgaggugcuguggaccagcaacagcaucgugguguucugcggcaccagcggcaccuacggcaccggcagcuggcccgacggcgccgacaucaaccugaugcccguguga

SEQ ID NO: 179203 - RNA, 1410 nt, Artificial Sequence
  derived and/or modified CDS sequence (opt4) from neuraminidase__InfluenzaA__ADK87312
augaaccccaaccagaccaucaucaccaucggcagcgugugcaugaccaucggcauggccaaccugauccugcagaucggcaacaucaucagcaucuggaucagccacagcauccagcugggcaaccagaaccagaucgagaccugcaaccagagcgugaucaccuacgagaacaacaccugggugaaccagaccuacgugaacaucagcaacaccaacuucgccgccggccagagcgugaucagcgugaagcuggccggcaacagcagccugugccccgugagcggcugggccaucuacagcaaggacaacaacaucagaaucggcagcaagggcgacguguucgugaucagagagcccuucaucagcugcagcccccuggagugcagaaccuucuuccugacccagggcgcccugcugaacgacaagcacagcaacggcaccaucaaggacagaagccccuacagaacccugaugagcugccccaucggcgaggugcccagccccuacaacagcagauucgagagcguggccuggagcgccagcgccugccacgacggcaucaacuggcugaccaucggcaucagcggccccgacaacggcgccguggccgugcugaaguacaacggcaucaucaccgacaccaucaagagcuggagaaacaacauccugagaacccaggagagcgagugcgccugcgugaacggcagcugcuucaccgugaugaccgacggccccagcgacggccaggccagcuacaagaucuucagaaucgagaagggcaagaucgugaagagcguggagaugaacgcccccaacuaccacuacgaggagugcagcugcuaccccgacagcagcgagaucaccugcgugugcagagacaacuggcacggcagcaacagacccugggugagcuucaaccagaaccuggaguaccagaucggcuacaucugcagcggcaucuucggcgacaaccccagacccaacgacaagaccggcagcugcggccccgugagcagcaacggcgccaacggcgugaagggcuucagcuucaaguacggcaacggcguguggaucggcagaaccaagagcaucagcagcagaaacggcuucgagaugaucugggaccccaacggcuggaccggcaccgacaacaacuucagcaucaagcaggacaucgugggcaucaacgaguggagcggcuacagcggcagcuucgugcagcaccccgagcugaccggccuggacugcaucagacccugcuucuggguggagcugaucagaggcagacccaaggagaacaccaucuggaccagcggcagcagcaucagcuucugcggcgugaacagcgacaccgugggcuggagcuggcccgacggcgccgagcugcccuucaccaucgacaaguga

SEQ ID NO: 179204 - RNA, 1410 nt, Artificial Sequence
  derived and/or modified CDS sequence (opt4) from neuraminidase__InfluenzaA__ADK87314
augaaccccaaccagaagaucaucaccaucggcagcgugagccugaccaucagcaccaucugcuucuucaugcagaucgccauccugaucaccaccgugacccugcacuucaagcaguacgaguucaacagcccccccaacaaccaggugaugcugugcgagcccaccaucaucgagggcaacaucaccgagaucguguaccugaccaacaccaccaucgagaaggagaugugccccaagcuggccgaguacagaaacuggagcaagccccagugcgacaucaccggcuucgcccccuucagcaaggacaacagcaucagacugagcgccggcggcgacaucugggugaccagagagcccuacgugagcugcgaccccgacaagugcuaccaguucgcccugggccagggcaccacccugaacaacgugcacagcaacaacaccgugagagacagaacccccuacagaacccugcugaugaacgagcugggcgugcccuuccaccugggcaccaagcaggugugcaucgccuggagcagcagcagcugccacgacggcaaggccuggcugcacgugugcaucaccggcgacgacaagaacgccaccgccagcuucaucuacaacggcagacugguggacagcguggugagcuggagcaaggagauccugagaacccaggagagcgagugcgugugcaucaacggcaccugcaccguggugaugaccgacggcagcgccagcggcaaggccgacaccaagauccuguucaucgaggagggcaagaucgugcacaccagcaccagcagcggcagcgcccagcacguggaggagugcagcugcuaccccagauaccccggcgugagaugcgugugcagagacaacuggaagggcagcaacagacccaucguggacaucaacaucaaggaccacagcaucgugagcagcuacgugugcagcggccuggugggcgacacccccagaaagaacgacagcagcagcagcagccacugccuggaccccaacaacgaggagggcggccacggcgugaagggcugggccuucgacgacggcaacgacguguggaugggcagaaccaucagcgagaagagcagacugggcuacgagaccuucaaggugaucgagggcuggagcaaccccaagagcaagcugcagaucaacagacaggugaucguggacagaggcaacagaagcggcuacagcggcaucuucagcguggagggcaagagcugcaucaacagaugcuucuacguggagcugaucagaggcagaaaggaggagaccgaggugcuguggaccagcaacagcaucgugguguucugcggcaccagcggcaccuacggcaccggcagcuggcccgacggcgccgacaucaaccugaugcccguguga

SEQ ID NO: 179205 - RNA, 1410 nt, Artificial Sequence
  derived and/or modified CDS sequence (opt4) from neuraminidase__InfluenzaA__ADK87316
augaaccccaaccagaagaucaucaccaucggcagcgugugcaugaccaucggcauggccaaccugauccugcagaucggcaacaucaucagcaucuggaucagccacagcauccagcugggcaaccagaaccagaucgagaccugcaaccagagcgugaucaccuacgagaacaacaccugggugaaccagaccuacgugaacaucagcaacaccaacuucgccgccggccagagcguggugagcgugaagcuggccggcaacagcagccugugccccgugagcggcugggccaucuacagcaaggacaacagcaucagaaucggcagcaagggcgacguguucgugaucagagagcccuucaucagcugcagcccccuggagugcagaaccuucuuccugacccagggcgcccugcugaacgacaagcacagcaacggcaccaucaaggacagaagccccuacagaacccugaugagcugccccaucggcgaggugcccagccccuacaacagcagauucgagagcguggccuggagcgccagcgccugccacgacggcaucaacuggcugaccaucggcaucagcggccccgacaacggcgccguggccgugcugaaguacaacggcaucaucaccgacaccaucaagagcuggagaaacaacauccugagaacccaggagagcgagugcgccugcgugaacggcagcugcuucaccgugaugaccgacggccccagcgacggccaggccagcuacaagaucuucagaaucgagaagggcaagaucgugaagagcguggagaugaacgcccccaacuaccacuacgaggagugcagcugcuaccccgacagcagcgagaucaccugcgugugcagagacaacuggcacggcagcaacagacccugggugagcuucaaccagaaccuggaguaccagaucggcuacaucugcagcggcaucuucggcgacaaccccagacccaacgacaagaccggcagcugcggccccgugagcagcaacggcgccaacggcgugaagggcuucagcuucaaguacggcaacggcguguggaucggcagaaccaagagcaucagcagcagaaacggcuucgagaugaucugggaccccaacggcuggaccggcaccgacaacaacuucagcaucaagcaggacaucgugggcaucaacgaguggagcggcuacagcggcagcuucgugcagcaccccgagaucaccggccuggacugcaucagacccugcuucuggguggagcugaucagaggcagacccaaggagaacaccaucuggaccagcggcagcagcaucagcuucugcggcgugaacagcgacaccgugggcuggagcuggcccgacggcgccgagcugcccuucaccaucgacaaguga

SEQ ID NO: 179206 - RNA, 1410 nt, Artificial Sequence
  derived and/or modified CDS sequence (opt4) from neuraminidase__InfluenzaA__ADK87318
augaaccccaaccagaagaucaucaccaucggcagcgugugcaugaccaucggcauggccaaccugauccugcagaucggcaacaucaucagcaucuggaucagccacagcauccagcugggcaaccagaaccagaucgagaccugcaaccagagcgugaucaccuacgagaacaacaccugggugaaccagaccuacgugaacaucagcaacaccaacuucgccgccggccagagcguggugagcgugaagcuggccggcaacagcagccugugccccgugagcggcugggccaucuacagcaaggacaacagcaucagaaucggcagcaagggcgacguguucgugaucagagagcccuucaucagcugcagcccccuggagugcagaaccuucuuccugacccagggcgcccugcugaacgacaagcacagcaacggcaccaucaaggacagaagccccuacagaacccugaugagcugccccaucggcgaggugcccagccccuacaacagcagauucgagagcguggccuggagcgccagcgccugccacgacggcaucaacuggcugaccaucggcaucagcggccccgacaacggcgccguggccgugcugaaguacaacggcaucaucaccgacaccaucaagagcuggagaaacaacauccugagaacccaggagagcgagugcgccugcgugaacggcagcugcuucaccgugaugaccgacggccccagcgacggccaggccagcuacaagaucuucagaaucgagaagggcaagaucgugaagagcguggagaugaacgcccccaacuaccacuacgaggagugcagcugcuaccccgacagcagcgagaucaccugcgugugcagagacaacuggcacggcagcaacagacccugggugagcuucaaccagaaccuggaguaccagaucggcuacaucugcagcggcaucuucggcgacaaccccagacccaacgacaagaccggcagcugcggccccgugagcagcaacggcgccaacggcgugaagggcuucagcuucaaguacggcaacggcguguggaucggcagaaccaagagcaucagcagcagaaacggcuucgagaugaucugggaccccaacggcuggaccggcaccgacaacaacuucagcaucaagcaggacaucgugggcaucaacgaguggagcggcuacagcggcagcuucgugcagcaccccgagcugaccggccuggacugcaucagacccugcagcuggguggagcugaucagaggcagacccaaggagaacaccaucuggaccagcggcagcagcaccagcuucugcggcgugaacagcgacaccgugggcuggagcuggcccgacggcgccgagcugcccuucaccaucgacaaguga

SEQ ID NO: 179207 - RNA, 1410 nt, Artificial Sequence
  derived and/or modified CDS sequence (opt4) from neuraminidase__InfluenzaA__ADK87320
augaaccccaaccagaagaucaucaccaucggcagcgugugcaugaccaucggcauggccaaccugauccugcagaucggcaacaucaucagcaucuggaucagccacagcauccagcugggcaaccagaaccagaucgagaccugcaaccagagcgugaucaccuacgagaacaacaccugggugcaccagaccuacgugaacaucagcaacaccaacuucgccgccggccagagcguggugagcgugaagcuggccggcaacagcagccugugccccgugagcggcugggccaucuacagcaaggacaacagcaucagaaucggcagcaagggcgacguguucgugaucagagagcccuucaucagcugcagcccccuggagugcagaaccuucuuccugacccagggcgcccugcugaacgacaagcacagcaacggcaccaucaaggacagaagccccuacagaacccugaugagcugccccaucggcgaggugcccagccccuacaacagcagauucgagagcguggccuggagcgccagcgccugccacgacggcaucaacuggcugaccaucggcaucagcggccccgacaacggcgccguggccgugcugaaguacaacggcaucaucaccgacaccaucaagagcuggagaaacaacauccugagaacccaggagagcgagugcgccugcgugaacggcagcugcuucaccgugaugaccgacggccccagcgacggccaggccagcuacaagaucuucagaaucgagaagggcaagaucgugaagagcguggagaugaacgcccccaacuaccacuacgaggagugcagcugcuaccccgacagcagcgagaucaccugcgugugcagagacaacuggcacggcagcaacagacccugggugagcuucaaccagaaccuggaguaccagaucggcuacaucugcagcggcaucuucggcgacaaccccagacccaacgacaagaccggcagcugcggccccgugagcagcaacggcgccaacggcgugaagggcuucagcuucaaguacggcaacggcguguggaucggcagaaccaagagcaucagcagcagaaacggcuucgagaugaucugggaccccaacggcuggaccggcaccgacaacaacuucagcaucaagcaggacaucgugggcaucaacgaguggagcggcuacagcggcagcuucgugcagcaccccgagcugaccggccugaacugcaucagacccugcuucuggguggagcugaucagaggcagacccaaggagaacaccaucuggaccagcggcagcagcaucagcuucugcggcgugaacagcgacaccgugggcuggagcuggcccgacggcgccgagcugcccuucaccaucgacaaguga

SEQ ID NO: 179208 - RNA, 1410 nt, Artificial Sequence
  derived and/or modified CDS sequence (opt4) from neuraminidase__InfluenzaA__ADK87324
augaaccccaaccagaagaucaucaccaucggcagcgugagccugaccaucagcaccaucugcuuccugaugcagaucgccauccugaucaccaccgugacccugcacuucaagcaguacgaguucaacagcccccccaacaaccaggugaugcugugcgagcccaccaucaucgagagaaacaucaccgagaucguguaccugaccaacaccaccaucgagaaggagaucugccccaagcuggccgaguacagaaacuggagcaagccccagugcgacaucaccggcuucgcccccuucagcaaggacaacagcaucagacugagcgccggcggcgacaucugggugaccagagagcccuacgugagcugcgaccccggcaagugcuaccaguucgcccugggccagggcaccacccugaacaacgugcacagcaacaacaccgugagagacagaacccccuacagaacccugcugaugaacgagcugggcgugcccuuccaccugggcaccaagcaggugugcaucgccuggagcagcagcagcugccacgacggcaaggccuggcugcacgugugcaucaccggcgacgacgagaacgccaccgccagcuucaucuacaacggcagacugguggacagcguggugagcuggagcaaggagauccugagaacccaggagagcgagugcgugugcaucaacggcaccugcaccguggugaugaccgacggcagcgccagcggcaaggccgacaccaagauccuguucaucgaggagggcaagaucgugcacaccagcacccugagcggcagcgcccagcacguggaggagugcagcugcuaccccagauaccccggcgugagaugcgugugcagagacaacuggaagggcagcaacagacccaucguggacaucaacaucaaggaccacagcaucgugagcagcuacgugugcagcggccuggugggcgacacccccagaaagaacgacagcagcagcagcagccacugccuggaccccaacaacgaggagggcggccacggcgugaagggcugggccuucgacgacggcaacgacguguggaugggcagaaccaucagcgagaagagcagacugggcuacgagaccuucaaggugaucgagggcuggagcaaccccaagagcaagcugcagaucaacagacaggugaucguggacagaggcaacagaagcggcuacagcggcaucuucagcguggagggcaagagcugcaucaacagaugcuucuacguggagcugaucagaggcagaaaggaggagaccgaggugcuguggaccagcaacagcaucgugguguucugcggcaccagcggcaccuacggcaccggcagcuggcccgacggcgccgacaucaaccugaugcccguguga

SEQ ID NO: 179209 - RNA, 1410 nt, Artificial Sequence
  derived and/or modified CDS sequence (opt4) from neuraminidase__InfluenzaA__ADK87327
augaaccccaaccagaagaucaugaccaucggcagcgugagccugaccaucagcaccaucugcuucuucaugcagaucgccauccugaucaccaccgugacccugcacuucaagcaguacgaguucaacagcccccccaacaaccaggugaugcugugcgagcccaccaucaucgagagaaacaucaccgagaucguguaccugaccaacaccaccaucgagaaggagaucugccccaagcuggccgaguacagaaacuggagcaagccccagugcgacaucaccggcuucgcccccuucagcaaggacaacagcaucagacugagcgccggcggcgacaucugggugaccagagagcccuacgugagcugcgaccccgacaagugcuaccaguucgcccugggccagggcaccacccugaacaacgugcacagcaacaacaccgugagagacagaacccccuacagaacccugcugaugaacgagcugggcgugcccuuccaccugggcaccaagcaggugugcaucgccuggagcagcagcagcugccacgacggcaaggccuggcugcacgugugcaucaccggcgacgacaagaacgccaccgccagcuucaucuacaacggcagacugguggacagcguggugagcuggagcaaggagauccugagaacccaggagagcgagugcgugugcaucaacggcaccugcaccguggugaugaccgacggcagcgccagcggcaaggccgacaccaagauccuguucaucgaggagggcaagaucgugcacaccagcacccugagcggcagcgcccagcacguggaggagugcagcugcuaccccagauaccccggcgugagaugcgugugcagagacaacuggaagggcagcaacagacccaucguggacaucaacaucaaggaccacagcaucgugagcagcuacgugugcagcggccuggugggcgacacccccagaaagaacgacagcagcagcagcagccacugccuggaccccaacaacgaggagggcggccacggcgugaagggcugggccuucgacgacggcaacgacguguggaugggcagaaccaucagcgagagaagcagacugggcuacgagaccuucaaggugaucgagggcuggagcaaccccaagagcaagcugcagaucaacagacaggugaucguggacagaggcaacagaagcggcuacagcggcaucuucagcguggagggcaagagcugcaucaacagaugcuucuacguggagcugaucagaggcagaaaggaggagaccgaggugcuguggaccagcaacagcaucgugguguucugcggcaccagcggcaccuacggcaccggcagcuggcccgacggcgccgacaucaaccugaugcccguguga

SEQ ID NO: 179210 - RNA, 1410 nt, Artificial Sequence; identical to SEQ ID NO: 176798
  derived and/or modified CDS sequence (opt4) from neuraminidase__InfluenzaA__ADK87329

SEQ ID NO: 179211 - RNA, 1410 nt, Artificial Sequence
  derived and/or modified CDS sequence (opt4) from neuraminidase__InfluenzaA__ADK87330
augaaccccaaccagaagaucaucaccaucggcagcgugugcaugaccaucggcauggccaaccugauccugcagaucggcaacaucaucagcaucuggaucagccacagcauccagcugggcaaccagaaccagaucgagaccugcaaccagagcgugaucaccuacgagaacaacaccugggugaaccagaccuacgugaacaucagcaacaccaacuucgccgccggccagagcguggugagcgugaagcuggccggcaacagcagccugugccccgugagcggcugggccaucuacagcaaggacaacagcaucagaaucggcagcaagggcgacguguucgugaucagagagcccuucaucagcugcagcccccuggagugcagaaccuucuuccugacccagggcgcccugcugaacgacaagcacagcaacggcaccaucaaggacagaagccccuacagaacccugaugagcugccccaucggcgaggugcccagccccuacaacagcagauucgagagcguggccuggagcgccagcgccugccacgacggcaucaacuggcugaccaucggcaucagcggccccgacaacggcgccguggccgugcugaaguacaacggcaucaucaccgacaccaucaagagcuggagaaacaacauccugagaacccaggagagcgagugcgccugcgugaacggcagcugcuucaccgugaugaccgacggccccagcgacggccaggccagcuacaagaucuucagaaucgagaagggcaagaucgugaagagcguggagaugaacgcccccaacuaccacuacgaggagugcagcugcuaccccgacagcagcgagaucaccugcgugugcagagacaacuggcacggcagcaacagacccugggugagcuucaaccagaaccuggaguaccagaucggcuacaucugcagcggcaucuucggcgacaaccccagacccaacgacaagaccggcagcugcggccccgugagcagcaacggcgccaacggcgugaagggcuucagcuucaaguacggcaacggcguguggaucggcagaaccaagagcaucagcagcagaaacggcuucgagaugaucugggaccccaacggcuggaccggcaccgacaacaacuucagcaucaagcaggacaucgugggcaucaacgaguggagcggcuacagcggcagcuucgugcagcaccccgagcugaccggccuggacugcaucagacccugcuucuggguggagcugaucagaggcagacccaaggagaacaccaucugggccagcggcagcagcaucagcuucugcggcgugaacagcgacaccgugggcuggagcuggcccgacggcgccgagcugcccuucaccaucgacaaguga

SEQ ID NO: 179212 - RNA, 1410 nt, Artificial Sequence; identical to SEQ ID NO: 176798
  derived and/or modified CDS sequence (opt4) from neuraminidase__InfluenzaA__ADK87331

SEQ ID NO: 179213 - RNA, 1410 nt, Artificial Sequence
  derived and/or modified CDS sequence (opt4) from neuraminidase__InfluenzaA__ADK87332
augaaccccaaccagaagaucaucaccaucggcagcgugugcaugaccaucggcauggccaaccugauccugcagaucggcaacaucaucagcaucuggaucagccacagcauccagcugggcaaccagaaccagaucgagaccugcaaccagagcgugaucaccuacgagaacaacaccugggugaaccagaccuacgugaacaucagcaacaccaacuucgccgccggccagagcguggugagcgugaagcuggccggcaacagcagccugugccccgugagcggcugggccaucuacagcaaggacaacagcaucagaaucggcagcaagggcgacguguucgugaucagagagcccuucaucagcugcagcccccuggagugcagaaccuucuuccugacccagggcgcccugcugaacgacaagcacagcaacggcaccaucaaggacagaagccccuacagaacccugaugagcugccccaucggcgaggugcccagccccuacaacagcagauucgagagcguggccuggagcgccagcgccugccacgacggcaucaacuggcugaccaucggcaucagcggccccgacaacggcgccguggccgugcugaagcacaacggcaucaucaccgacaccaucaagagcuggagaaacaacauccugagaacccaggagagcgagugcgccugcgugaacggcagcugcuucaccgugaugaccgacggccccagcgacggccaggccagcuacaagaucuucagaaucgagaagggcaagaucgugaagagcguggagaugaacgcccccaacuaccacuacgaggagugcagcugcuaccccgacagcagcgagaucaccugcgugugcagagacaacuggcacggcagcaacagacccugggugagcuucaaccagaaccuggaguaccagaucggcuacaucugcagcggcaucuucggcgacaaccccagacccaacgacaagaccggcagcugcggccccgugagcagcaacggcgccaacggcgugaagggcuucagcuucaaguacggcaacggcguguggaucggcagaaccaagagcaucagcagcagaaacggcuucgagaugaucugggaccccaacggcuggaccggcaccgacaacaacuucagcaucaagcaggacaucgugggcaucaacgaguggagcggcuacagcggcagcuucgugcagcaccccgagcugaccggccuggacugcaucagacccugcuucuggguggagcugaucagaggcagacccaaggagaacaccaucuggaccagcggcagcagcaucagcuucugcggcgugaacagcgacaccgugggcuggagcuggcccgacggcgccgagcugcccuucaccaucgacaaguga

SEQ ID NO: 179214 - RNA, 1410 nt, Artificial Sequence
  derived and/or modified CDS sequence (opt4) from neuraminidase__InfluenzaA__ADK87333
augaaccccaaccagaagaucaucaccaucggcagcgugugcaugaccaucggcauggccaaccugauccugcagaucggcaacaucaucagcaucuggaucagccacagcauccagcugggcaaccagaaccagaucgagaccugcaaccagagcgugaucaccuacgagaacaacaccugggugaaccagaccuacgugaacaucagcaacaccaacuucgccgccggccagagcguggugagcgugaagcuggccggcaacagcagccugugccccgugagcggcugggccaucuacagcaaggacaacagcaucagaaucggcagcaagggcgacguguucgugaucagagagcccuucaucagcugcagcccccuggagugcagaaccuucuuccugacccagggcgcccugcugaacgacaagcacagcaacggcaccaucaaggacagaagccccuacagaacccugaugagcugccccaucggcgaggugcccagccccuacaacagcagauucgagagcguggccuggagcgccagcgccugccacgacggcaucaacuggcugaccaucggcaucagcggccccgacaacggcgccguggccgugcugaaguacaacggcaucaucaccgacaccaucaagagcuggagaaacaacauccugagaacccaggagagcgagugcgccugcgugaacggcagcugcuucaccgugaugaccgacggccccagcgacggccaggccagcuacaagaucuucagaaucgagaagggcaagaucgugaagagcguggagaugaacgcccccaacuaccacuacgaggagugcagcugcuaccccuacagcagcgagaucaccugcgugugcagagacaacuggcacggcagcaacagacccugggugagcuucaaccagaaccuggaguaccagaucggcuacaucugcagcggcaucuucggcgacaaccccagacccaacgacaagaccggcagcugcggccccgugagcagcaacggcgccaacggcgugaagggcuucagcuucaaguacggcaacggcguguggaucggcagaaccaagagcaucagcagcagaaacggcuucgagaugaucugggaccccaacggcuggaccggcaccgacaacaacuucagcaucaagcaggacaucgugggcaucaacgaguggagcggcuacagcggcagcuucgugcagcaccccgagcugaccggccuggacugcaucagacccugcuucuggguggagcugaucagaggcagacccaaggagaacaccaucuggaccagcggcagcagcaucagcuucugcggcgugaacagcgacaccgugggcuggagcuggcccgacggcgccgagcugcccuucaccaucgacaaguga

SEQ ID NO: 179215 - RNA, 1410 nt, Artificial Sequence
  derived and/or modified CDS sequence (opt4) from neuraminidase__InfluenzaA__ADK87335
augaaccccaaccagaagaucaucaccaucggcagcgugagccugaccaucagcaccaucugcuucuucaugcagaucgccauccugaucaccaccgugacccugcacuucaagcaguacgaguucaacagcccccccaacaaccaggugaugcugugcgagcccaccaucaucgagagaaacaucaccgagaucguguaccugaccaacaccaccaucgagaaggagaucugccccaagcuggccgaguacagaaacuggagcaagccccagugcgacaucaccggcuucgcccccuucagcaaggacaacagcaucagacugagcgccggcggcgacaucugggugaccagagagcccuacgugagcugcgaccccgacagaagauaccaguucgcccugggccagggcaccacccugaacaacgugcacagcgacaacaccgugagagacagaacccccuacagaacccugcugaugaacgagcugggcgugcccuuccaccugggcaccaagcaggugugcaucgccuggagcagcagcagcugccacgacggcaaggccuggcugcacgugugcaucaccggcgacgacaagaacgccaccgccagcuucaucuacaacggcagacugguggacagcguggugagcuggagcaaggagauccugagaacccaggagagcgagugcgugugcaucaacggcaccugcaccguggugaugaccgacggcagcgccagcggcaaggccgacaccaagauccuguucaucgaggagggcaagaucgugcacaccagcacccugagcggcaacgcccagcacguggaggagugcagcugcuaccccagauaccccggcgugagaugcgugugcagagacaacuggaagggcagcaacagacccaucguggacaucaacaucaaggaccacagcaucgugagcagcuacgugugcagcggccuggugggcgacacccccagaaagaacgacagcagcagcagcagccacugccuggaccccaacaacgaggagggcggccacggcgugaagggcugggccuucgacgacggcaacgacguguggaugggcagaaccaucagcgagaagagcagacugggcuacgagaccuucaaggugaucgagggcuggagcaaccccaagagcaagcugcagaucaacagacaggugaucguggacagaggcaacagaagcggcuacagcggcaucuucagcguggagggcaagagcugcaucaacagaugcuucuacguggagcugaucagaggcagaaaggaggagaccgaggugcuguggaccagcaacagcaucgugguguucugcggcaccagcggcaccuacggcaccggcagcuggcccgacggcgccgacaucaaccugaugcccaucuga

SEQ ID NO: 179216 - RNA, 1410 nt, Artificial Sequence
  derived and/or modified CDS sequence (opt4) from neuraminidase__InfluenzaA__ADK87337
augaaccccaaccagaagaucaucaccaucggcagcgugagccugaccaucagcaccaucugcuucuucaugcagaucgccauccugaucaccaccgugacccugcacuucaagcaguacgaguucaacagcccccccaacaaccaggugaugcugugcgagcccaccaucaucgagagaaacaucaccgagaucguguaccugaccaacaccaccaucgagaaggagaucugccccaagcuggccgaguacagaaacuggagcaagccccagugcgacaucaccggcuucgcccccuucagcaaggacaacagcaucagacugagcgccggcggcgacaucugggugaccagagagcccuacgugagcugcgaccccgacaagugcuaccaguucgcccugggccagggcaccacccugaacaacgugcacagcaacaacgccgugagagacagaacccccuacagaacccugcugaugaacgagcugggcgugcccuuccaccugggcaccaagcaggugugcaucgccuggagcagcagcagcugccacgacggcaaggccuggcugcacgugugcaucaccggcgacgacaagaacgccaccgccagcuucaucuacaacggcagacugguggacagcguggugagcuggagcaaggagauccugagaacccaggagagcgagugcgugugcaucaacggcaccugcaccguggugaugaccgacggcagcgccagcggcaaggccgacaccaagauccuguucaucgaggagggcaagaucgugcacaccagcacccugagcggcaacgcccagcacguggaggagugcagcugcuaccccagauaccccggcgugagaugcgugugcagagacaacuggaagggcagcaacagacccaucguggacaucaacaucaaggaccacagcaucgugagcagcuacgugugcagcggccuggugggcgacacccccagaaagaacgacagcagcagcagcagccacugccuggaccccaacaacgaggagggcggccacggcgugaagggcugggccuucgacgacggcaacgacguguggaugggcagaaccaucagcgagaagagcagacugggcuacgagaccuucaaggugaucgagggcuggagcaaccccaagagcaagcugcagaucaacagacaggugaucguggacagaggcaacagaagcggcuacagcggcaucuucagcguggagggcaagagcugcaucaacagaugcuucuacguggagcugaucagaggcagaaaggaggagaccgaggugcuguggaccagcaacagcaucgugguguucugcggcaccagcggcaccuacggcaccggcagcuggcccgacggcgccgacaucaaccugaugcccaucuga

SEQ ID NO: 179217 - RNA, 1410 nt, Artificial Sequence
  derived and/or modified CDS sequence (opt4) from neuraminidase__InfluenzaA__ADK87339
augaaccccaaccagaagaucaucaccaucggcagcaucugcaugaccaucggcauggccaaccugauccugcagaucggcaacaucaucagcaucuggaucagccacagcauccagcugggcaaccagaaccagaucgagaccugcaaccagagcgugaucaccuacgagaacaacaccugggugaaccagaccuacgugaacaucagcaacaccaacuucgccgccggccagagcguggugagcgugaagcuggccggcaacagcagccugugccccgugagcggcugggccaucuacagcaaggacaacagcaucagaaucggcagcaagggcgacguguucgugaucagagagcccuucaucagcugcagcccccuggagugcagaaccuucuuccugacccagggcgcccugcugaacgacaagcacagcaacggcaccaucaaggacagaagccccuacagaacccugaugagcugccccaucggcgaggugcccagccccuacaacagcagauucgagagcguggccuggagcgccagcgccugccacgacggcaucaacuggcugaccaucggcaucagcggccccgacaacggcgccguggccgugcugaaguacaacggcaucaucaccgacaccaucaagagcuggagaaacaacauccugagaacccaggagagcgagugcgccugcgugaacggcagcugcuucaccgugaugaccgacggccccagcgacggccaggccagcuacaagaucuucagaaucgagaagggcaagaucgugaagagcguggagaugaacgcccccaacuaccacuacgaggagugcagcugcuaccccgacagcagcgagaucaccugcgugugcagagacaacuggcacggcagcaacagacccugggugagcuucaaccagaaccuggaguaccagaucggcuacaucugcagcggcaucuucggcgacaaccccagacccaacgacaagaccggcagcugcggccccgugagcagcaacggcgccaacggcgugaagggcuucagcuucaaguacggcaacggcguguggaucggcagaaccaagagcaucagcagcagaaacggcuucgagaugaucugggaccccaacggcuggaccggcaccgacaacaacuucagcaucaagcaggacaucgugggcaucaacgaguggagcggcuacagcggcagcuucgugcagcaccccgagcugaccggccuggacugcaucagacccugcuucuggguggagcugaucagaggcagacccaaggagaacaccaucuggaccagcggcagcagcaucagcuucugcggcgugaacagcgacaccgugggcuggagcuggcccgacggcgccgagcugcccuucaccaucgacaaguga

SEQ ID NO: 179218 - RNA, 1410 nt, Artificial Sequence; identical to SEQ ID NO: 176798
  derived and/or modified CDS sequence (opt4) from neuraminidase__InfluenzaA__ADK90209

SEQ ID NO: 179219 - RNA, 1410 nt, Artificial Sequence; identical to SEQ ID NO: 176798
  derived and/or modified CDS sequence (opt4) from neuraminidase__InfluenzaA__ADK90213

SEQ ID NO: 179220 - RNA, 1410 nt, Artificial Sequence; identical to SEQ ID NO: 176798
  derived and/or modified CDS sequence (opt4) from neuraminidase__InfluenzaA__ADK90217

SEQ ID NO: 179221 - RNA, 1410 nt, Artificial Sequence; identical to SEQ ID NO: 178777
  derived and/or modified CDS sequence (opt4) from neuraminidase__InfluenzaA__ADK90221

SEQ ID NO: 179222 - RNA, 1410 nt, Artificial Sequence; identical to SEQ ID NO: 178777
  derived and/or modified CDS sequence (opt4) from neuraminidase__InfluenzaA__ADK90225

SEQ ID NO: 179223 - RNA, 1410 nt, Artificial Sequence; identical to SEQ ID NO: 176798
  derived and/or modified CDS sequence (opt4) from neuraminidase__InfluenzaA__ADK90229

SEQ ID NO: 179224 - RNA, 1410 nt, Artificial Sequence; identical to SEQ ID NO: 176798
  derived and/or modified CDS sequence (opt4) from neuraminidase__InfluenzaA__ADK90233

SEQ ID NO: 179225 - RNA, 1410 nt, Artificial Sequence
  derived and/or modified CDS sequence (opt4) from neuraminidase__InfluenzaA__ADK90241
augaaccccaaccagaagaucaucaccaucggcagcgugugcaugaccaucggcauggccaaccugauccugcagaucggcaacaucaucagcaucuggaucagccacagcauccagcugggcaaccagaaccagaucgagaccugcaaccagagcgugaucaccuacgagaacaacaccugggugaaccagaccuacgugaacaucagcaacgccaacuucgccgccggccagagcguggugagcgugaagcuggccggcaacagcagccugugccccgugagcggcugggccaucuacagcaaggacaacagcaucagaaucggcagcaagggcgacguguucgugaucagagagcccuucaucagcugcagcccccuggagugcagaaccuucuuccugacccagggcgcccugcugaacgacaagcacagcaacggcaccaucaaggacagaagcccccacagaacccugaugagcugccccaucggcgaggugcccagccccuacaacagcagauucgagagcguggccuggagcgccagcgccugccacgacggcaucaacuggcugaccaucggcaucagcggccccgacaacggcgccguggccgugcugaaguacaacggcaucaucaccgacaccaucaagagcuggagaaacaacauccugagaacccaggagagcgagugcgccugcgugaacggcagcugcuucaccgugaugaccgacggccccagcgacggccaggccagcuacaagaucuucagaaucgagaagggcaagaucgugaagagcguggagaugaacgcccccaacuaccacuacgaggagugcagcugcuaccccgacagcagcgagaucaccugcgugugcagagacaacuggcacggcagcaacagacccugggugagcuucaaccagaaccuggaguaccagaucggcuacaucugcagcggcaucuucggcgacaaccccagacccaacgacaagaccggcagcugcggccccgugagcagcaacggcgccaacggcgugaagggcuucagcuucaaguacggcaacggcguguggaucggcagaaccaagagcaucagcagcagaaacggcuucgagaugaucugggaccccaacggcuggaccggcaccgacaacaacuucagcaucaagcaggacaucgugggcaucaacgaguggagcggcuacagcggcagcuucgugcagcaccccgagcugaccggccuggacugcaucagacccugcuucuggguggagcugaucagaggcagacccaaggagaacaccaucuggaccagcggcagcagcaucagcuucugcggcgugaacagcgacaccgugggcuggagcuggcccgacggcgccgagcugcccuucaccaucgacaaguga

SEQ ID NO: 179226 - RNA, 1410 nt, Artificial Sequence; identical to SEQ ID NO: 178777
  derived and/or modified CDS sequence (opt4) from neuraminidase__InfluenzaA__ADK90245

SEQ ID NO: 179227 - RNA, 1410 nt, Artificial Sequence
  derived and/or modified CDS sequence (opt4) from neuraminidase__InfluenzaA__ADK90249
augaaccccaaccagaagaucaucaccaucggcagcgugugcaugaccaucggcauggccaaccugauccugcagaucggcaacaucaucagcaucuggaucagccacagcauccagcugggcaaccagaaccagaucgagaccugcaaccagagcgugaucaccuacgagaacaacaccugggugaaccagaccuacgugaacaucagcaacaccaacuucgccgccggccagagcguggugagcgugaagcuggccggcaacagcagccugugccccgugagcggcugggccaucuacagcaaggacaacagcaucagaaucggcagcaagggcgacguguucgugaucagagagcccuucaucagcugcagcccccuggagugcagaaccuucuuccugacccagggcgcccugcugaacgacaagcacagcaacggcaccaucaaggacagaagccccuacagaacccugaugagcugccccaucggcgaggugcccagccccuacaacagcagauucgagagcguggccuggagcgccagcgccugccacgacggcaucaacuggcugaccaucggcaucagcggccccgacaacggcgccguggccgugcugaaguacaacggcaucaucaccgacaccaucaagagcuggagaaacaacauccugagaacccaggagagcgagugcgccugcgugaacggcagcugcuucaccgugaugaccgacggccccagcgacggccaggccagcuacaagaucuucagaaucgagaagggcaagaucgugaagagcguggagaugaacgcccccaacuaccacuacgaggagugcagcugcuaccccgacagcagcgagaucaccugcgugugcagagacaacuggcacggcagcaacagacccugggugagcuucaaccagaaccuggaguaccagaucggcuacaucugcagcggcaucuucggcgacaaccccagacccaacgacaagaccggcagcugcggccccgugagcagcaacggcgccaacggcgugaagggcuucagcuucaaguacggcaacggcguguggaucggcagaaccaagagcaucagcagcagaaacggcuucgagaugaucugggaccccaacggcuggaccggcaccgacaacaacuucagcaugaagcaggacaucgugggcaucaacgaguggagcggcuacagcggcagcuucgugcagcaccccgagcugaccggccuggacugcaucagacccugcuucuggguggagcugaucagaggcagacccaaggagaacaccaucuggaccagcggcagcagcaucagcuucugcggcgugaacagcgacaccgugggcuggagcuggcccgacggcgccgagcugcccuucaccaucgacaaguga

SEQ ID NO: 179228 - RNA, 1410 nt, Artificial Sequence; identical to SEQ ID NO: 179227
  derived and/or modified CDS sequence (opt4) from neuraminidase__InfluenzaA__ADK90253

SEQ ID NO: 179229 - RNA, 1410 nt, Artificial Sequence
  derived and/or modified CDS sequence (opt4) from neuraminidase__InfluenzaA__ADK90257
augaaccccaaccagaagaucaucaucaucggcagcgugugcaugaccaucggcauggccaaccugauccugcagaucggcaacaucaucagcaucuggaucagccacagcauccagcugggcaaccagaaccagaucgagaccugcaaccagagcgugaucaccuacgagaacaacaccugggugaaccagaccuacgugaacaucagcaacaccaacuucgccgccggccagagcguggugagcgugaagcuggccggcaacagcagccugugccccgugagcggcugggccaucuacagcaaggacaacagcaucagaaucggcagcaagggcgacguguucgugaucagagagcccuucaucagcugcagcccccuggagugcagaaccuucuuccugacccagggcgcccugcugaacgacaagcacagcaacggcaccaucaaggacagaagcccccacagaacccugaugagcugccccaucggcgaggugcccagccccuacaacagcagauucgagagcguggccuggagcgccagcgccugccacgacggcaucaacuggcugaccaucggcaucagcggccccgacaacggcgccguggccgugcugaaguacaacggcaucaucaccgacaccaucaagagcuggagaaacaacauccugagaacccaggagagcgagugcgccugcgugaacggcagcugcuucaccgugaugaccgacggccccagcgacggccaggccagcuacaagaucuucagaaucgagaagggcaagaucgugaagagcguggagaugaacgcccccaacuaccacuacgaggagugcagcugcuaccccgacagcagcgagaucaccugcgugugcagagacaacuggcacggcagcaacagacccugggugagcuucaaccagaaccuggaguaccagaucggcuacaucugcagcggcaucuucggcgacaaccccagacccaacgacaagaccggcagcugcggccccgugagcagcaacggcgccaacggcgugaagggcuucagcuucaaguacggcaacggcguguggaucggcagaaccaagagcaucagcagcagaaacggcuucgagaugaucugggaccccaacggcuggaccggcaccgacaacaacuucagcaucaagcaggacaucgugggcaucaacgaguggagcggcuacagcggcagcuucgugcagcaccccgagcugaccggccuggacugcaucagacccugcuucuggguggagcugaucagaggcagacccaaggagaacaccaucuggaccagcggcagcagcaucagcuucugcggcgugaacagcgacaccgugggcuggagcuggcccgacggcgccgagcugcccuucaccaucgacaaguga

SEQ ID NO: 179230 - RNA, 1410 nt, Artificial Sequence; identical to SEQ ID NO: 177152
  derived and/or modified CDS sequence (opt4) from neuraminidase__InfluenzaA__ADK90261

SEQ ID NO: 179231 - RNA, 1410 nt, Artificial Sequence
  derived and/or modified CDS sequence (opt4) from neuraminidase__InfluenzaA__ADK90265
augaaccccaaccagaagaucaucaccaucggcagcgugugcaugaccaucggcauggccaaccugauccugcagaucggcaacaucaucagcaucuggaucagccacagcauccagcugggcaaccagaaccagaucgagaccugcaaccagagcgugaucaccuacgagaacaacaccugggugaaccagaccuacgugaacaucagcaacaccaacuucgccgccggccagagcguggugagcgugaagcuggccggcaacagcagccugugccccgugagcggcugggccaucuacagcaaggacaacagcaucagaaucggcagcaagggcgacguguucgugaucagagagcccuucaucagcugcagcccccuggagugcagaaccuucuuccugacccagggcgcccugcugaacgacaagcacagcaacggcaccaucaaggacagaagccccuacagaacccugaugagcugccccaucggcgaggugcccagccccuacaacagcagauucgagagcguggccuggagcgccagcgccugccacgacggcaucaacuggcugaccaucggcaucagcggccccgacaacggcgccguggccgugcugaaguacaacggcaucaucaccgacaccaucaagagcuggagaaacaacauccugagaacccaggagagcgagugcgccugcgugaacggcagcugcuucaccgugaugaccgacggccccagcgacggccaggccagcuacaagaucuucagaaucgagaagggcaagaucgugaagagcguggagaugaacgcccccaacuaccacuacgaggagugcagcugcuaccccgacagcagcgagaucaccugcgugugcagagacaacuggcacggcagcaacagacccugggugagcuucaaccagaaccuggaguaccagaugggcuacaucugcagcggcaucuucggcgacaaccccagacccaacgacaagaccggcagcugcggccccgugagcagcaacggcgccaacggcgugaagggcuucagcuucaaguacggcaacggcguguggaucggcagaaccaagagcaucagcagcagaaacggcuucgagaugaucugggaccccaacggcuggaccggcaccgacaacaacuucagcaucaagcaggacaucgugggcaucaacgaguggagcggcuacagcggcagcuucgugcagcaccccgagcugaccggccuggacugcaucagacccugcuucuggguggagcugaucagaggcagacccaaggagaacaccaucuggaccagcggcagcagcaucagcuucugcggcgugaacagcgacaccgugggcuggagcuggcccgacggcgccgagcugcccuucaccaucgacaaguga

SEQ ID NO: 179232 - RNA, 1410 nt, Artificial Sequence
  derived and/or modified CDS sequence (opt4) from neuraminidase__InfluenzaA__ADK90269
augaaccccaaccagaagaucaucaccaucggcagcgugugcaugaccaucggcauggccaaccugauccugcagaucggcaacaucaucagcaucuggaucagccacagcauccagcugggcaaccagaaccagaucgagaagugcaaccagagcgugaucaccuacgagaacaacaccugggugaaccagaccuacgugaacaucagcaacaccaacuucgccgccggccagagcguggugagcgugaagcuggccggcaacagcagccugugccccgugagcggcugggccaucuacagcaaggacaacagcaucagaaucggcagcaagggcgacguguucgugaucagagagcccuucaucagcugcagcccccuggagugcagaaccuucuuccugacccagggcgcccugcugaacgacaagcacagcaacggcaccaucaaggacagaagccccuacagaacccugaugagcugccccaucggcgaggugcccagccccuacaacagcagauucgagagcguggccuggagcgccagcgccugccacgacggcaucaacuggcugaccaucggcaucagcggccccgacaacggcgccguggccgugcugaaguacaacggcaucaucaccgacaccaucaagagcuggagaaacaacauccugagaacccaggagagcgagugcgccugcgugaacggcagcugcuucaccgugaugaccgacggccccagcgacggccaggccagcuacaagaucuucagaaucgagaagggcaagaucgugaagagcaucgagaugaacgcccccaacuaccacuacgaggagugcagcugcuaccccgacagcagcgagaucaccugcgugugcagagacaacuggcacggcagcaacagacccugggugagcuucaaccagaaccuggaguaccagaucggcuacaucugcagcggcaucuucggcgacaaccccagacccaacgacaagaccggcagcugcggccccgugagcagcaacggcgccaacggcgugaagggcuucagcuucaaguacggcaacggcguguggaucggcagaaccaagagcaucagcagcagaaacggcuucgagaugaucugggaccccaacggcuggaccggcaccgacaacaacuucagcaucaagcaggacaucgugggcaucaacgaguggagcggcuacagcggcagcuucgugcagcaccccgagcugaccggccuggacugcaucagacccugcuucuggguggagcugaucagaggcagacccaaggagaacaccaucuggaccagcggcagcaucaucagcuucugcggcgugaacagcgacaccgugggcuggagcuggcccgacggcgccgagcugcccuucaccaucgacaaguga

SEQ ID NO: 179233 - RNA, 1410 nt, Artificial Sequence; identical to SEQ ID NO: 176798
  derived and/or modified CDS sequence (opt4) from neuraminidase__InfluenzaA__ADK90273

SEQ ID NO: 179234 - RNA, 1410 nt, Artificial Sequence; identical to SEQ ID NO: 176798
  derived and/or modified CDS sequence (opt4) from neuraminidase__InfluenzaA__ADK90277

SEQ ID NO: 179235 - RNA, 1410 nt, Artificial Sequence; identical to SEQ ID NO: 176798
  derived and/or modified CDS sequence (opt4) from neuraminidase__InfluenzaA__ADK90281

SEQ ID NO: 179236 - RNA, 1410 nt, Artificial Sequence
  derived and/or modified CDS sequence (opt4) from neuraminidase__InfluenzaA__ADK90289
augaaccccaaccagaagaucaucaccaucggcagcgugugcaugaccaucggcauggccaaccugauccugcagaucggcaacaucaucagcaucuggaucagccacagcauccagcugggcaaccagaaccugaucgagaccugcaaccagagcgugaucaccuacgagaacaacaccugggugaaccagaccuacgugaacaucagcaacaccaacuucgccgccggccagagcguggugagcgugaagcuggccggcaacagcagccugugccccgugagcggcugggccaucuacagcaaggacaacagcaucagaaucggcagcaagggcgacguguucgugaucagagagcccuucaucagcugcagcccccuggagugcagaaccuucuuccugacccagggcgcccugcugaacgacaagcacagcaacggcaccaucaaggacagaagccccuacagaacccugaugagcugccccaucggcgaggugcccagccccuacaacagcagauucgagagcguggccuggagcgccagcgccugccacgacggcaucaacuggcugaccaucggcaucagcggccccgacaacggcgccguggccgugcugaaguacaacggcaucaucaccgacaccaucaagagcuggagaaacaacauccugagaacccaggagagcgagugcgccugcgugaacggcagcugcuucaccgugaugaccgacggccccagcgacggccaggccagcuacaagaucuucagaaucgagaagggcaagaucgugaagagcguggagaugaacgcccccaacuaccacuacgaggagugcagcugcuaccccgacagcagcgagaucaccugcgugugcagagacaacuggcacggcagcaacagacccugggugagcuucaaccagaaccuggaguaccagaucggcuacaucugcagcggcaucuucggcgacaaccccagacccaacgacaagaccggcagcugcggccccgugagcagcaacggcgccaacggcgugaagggcuucagcuucaaguacggcaacggcguguggaucggcagaaccaagagcaucagcagcagaaacggcuucgagaugaucugggaccccaacggcuggaccggcaccgacaacaacuucagcaucaagcaggacaucgugggcaucaacgaguggagcggcuacagcggcagcuucgugcagcaccccgagcugaccggccuggacugcaucagacccugcuucuggguggagcugaucagaggcagacccaaggagaacaccaucuggaccagcggcagcagcaucagcuucugcggcgugaacagcgacaccgugggcuggagcuggcccgacggcgccgagcugcccuucaccaucgacaaguga

SEQ ID NO: 179237 - RNA, 1410 nt, Artificial Sequence; identical to SEQ ID NO: 178777
  derived and/or modified CDS sequence (opt4) from neuraminidase__InfluenzaA__ADK90293

SEQ ID NO: 179238 - RNA, 1410 nt, Artificial Sequence; identical to SEQ ID NO: 178689
  derived and/or modified CDS sequence (opt4) from neuraminidase__InfluenzaA__ADK90297

SEQ ID NO: 179239 - RNA, 1410 nt, Artificial Sequence; identical to SEQ ID NO: 176798
  derived and/or modified CDS sequence (opt4) from neuraminidase__InfluenzaA__ADK90301

SEQ ID NO: 179240 - RNA, 1410 nt, Artificial Sequence; identical to SEQ ID NO: 178689
  derived and/or modified CDS sequence (opt4) from neuraminidase__InfluenzaA__ADK90305

SEQ ID NO: 179241 - RNA, 1410 nt, Artificial Sequence; identical to SEQ ID NO: 176798
  derived and/or modified CDS sequence (opt4) from neuraminidase__InfluenzaA__ADK90309

SEQ ID NO: 179242 - RNA, 1410 nt, Artificial Sequence
  derived and/or modified CDS sequence (opt4) from neuraminidase__InfluenzaA__ADK90313
augaaccccaaccacaagaucaucaccaucggcagcgugugcaugaccaucggcauggccaaccugauccugcagaucggcaacaucaucagcaucuggaucagccacagcauccagcugggcaaccagaaccagaucgagaccugcaaccagagcgugaucaccuacgagaacaacaccugggugaaccagaccuacgugaacaucagcaacaccaacuucgccgccggccagagcguggugagcgugaagcuggccggcaacagcagccugugccccgugagcggcugggccaucuacagcaaggacaacagcaucagaaucggcagcaagggcgacguguucgugaucagagagcccuucaucagcugcagcccccuggagugcagaaccuucuuccugacccagggcgcccugcugaacgacaagcacagcaacggcaccaucaaggacagaagcccccacagaacccugaugagcugccccaucggcgaggugcccagccccuacaacagcagauucgagagcguggccuggagcgccagcgccugccacgacggcaucaacuggcugaccaucggcaucagcggccccgacaacggcgccguggccgugcugaaguacaacggcaucaucaccgacaccaucaagagcuggagaaacaacauccugagaacccaggagagcgagugcgccugcgugaacggcagcugcuucaccgugaugaccgacggccccagcgacggccaggccagcuacaagaucuucagaaucgagaagggcaagaucgugaagagcguggagaugaacgcccccaacuaccacuacgaggagugcagcugcuaccccgacagcagcgagaucaccugcgugugcagagacaacuggcacggcagcaacagacccugggugagcuucaaccagaaccuggaguaccagaucggcuacaucugcagcggcaucuucggcgacaaccccagacccaacgacaagaccggcagcugcggccccgugagcagcaacggcgccaacggcgugaagggcuucagcuucaaguacggcaacggcguguggaucggcagaaccaagagcaucagcagcagaaacggcuucgagaugaucugggaccccaacggcuggaccggcaccgacaacaacuucagcaucaagcaggacaucgugggcaucaacgaguggagcggcuacagcggcagcuucgugcagcaccccgagcugaccggccuggacugcaucagacccugcuucuggguggagcugaucagaggcagacccaaggagaacaccaucuggaccagcggcagcagcaucagcuucugcggcgugaacagcgacaccgugggcuggagcuggcccgacggcgccgagcugcccuucaccaucgacaaguga

SEQ ID NO: 179243 - RNA, 1410 nt, Artificial Sequence; identical to SEQ ID NO: 176798
  derived and/or modified CDS sequence (opt4) from neuraminidase__InfluenzaA__ADK90317

SEQ ID NO: 179244 - RNA, 1410 nt, Artificial Sequence; identical to SEQ ID NO: 178777
  derived and/or modified CDS sequence (opt4) from neuraminidase__InfluenzaA__ADK90321

SEQ ID NO: 179245 - RNA, 1410 nt, Artificial Sequence; identical to SEQ ID NO: 176798
  derived and/or modified CDS sequence (opt4) from neuraminidase__InfluenzaA__ADK90325

SEQ ID NO: 179246 - RNA, 1410 nt, Artificial Sequence
  derived and/or modified CDS sequence (opt4) from neuraminidase__InfluenzaA__ADK90329
augaaccccaaccagaagaucaucaccaucggcagcgugugcaugaccaucggcauggccaaccugauccugcagaucggcaacaucaucagcaucuggaucagccacagcauccagcugggcaaccagaaccagaucgagaccugcaacagaagcgugaucaccuacgagaacaacaccugggugaaccagaccuacgugaacaucagcaacaccaacuucgccgccggccagagcguggugagcgugaagcuggccggcaacagcagccugugccccgugagcggcugggccaucuacagcaaggacaacagcaucagaaucggcagcaagggcgacguguucgugaucagagagcccuucaucagcugcagcccccuggagugcagaaccuucuuccugacccagggcgcccugcugaacgacaagcacagcaacggcaccaucaaggacagaagccccuacagaacccugaugagcugccccaucggcgaggugcccagccccuacaacagcagauucgagagcguggccuggagcgccagcgccugccacgacggcaucaacuggcugaccaucggcaucagcggccccgacaacgaggccguggccgugcugaaguacaacggcaucaucaccgacaccaucaagagcuggagaaacaacauccugagaacccaggagagcgagugcgccugcgugaacggcagcugcuucaccgugaugaccgacggccccagcgacggccaggccagcuacaagaucuucagaaucgagaagggcaagaucgugaagagcguggagaugaacgcccccaacuaccacuacgaggagugcagcugcuaccccgacagcagcgagaucaccugcgugugcagagacaacuggcacggcagcaacagacccugggugagcuucaaccagaaccuggaguaccagaucggcuacaucugcagcggcaucuucggcgacaaccccagacccaacgacaagaccggcagcugcggccccgugagcagcaacggcgccaacggcgugaagggcuucagcuucaaguacggcaacggcguguggaucggcagaaccaagagcaucagcagcagaaacggcuucgagaugaucugggaccccaacggcuggaccggcaccgacaacaacuucagcaucaagcaggacaucgugggcaucaacgaguggagcggcuacagcggcagcuucgugcagcaccccgagcugaccggccuggacugcaucagacccugcuucuggguggagcugaucagaggcagacccaaggagaacaccaucuggaccagcggcagcagcaucagcuucugcggcgugaacagcgacaccgugggcuggagcuggcccgacggcgccgagcugcccuucaccaucgacaaguga

SEQ ID NO: 179247 - RNA, 1410 nt, Artificial Sequence
  derived and/or modified CDS sequence (opt4) from neuraminidase__InfluenzaA__ADK90333
augaaccccaaccagaagaucaucaccaucggcagcgugugcaugaccaucggcauggccaaccugauccugcagaucggcaacaucaucagcaucuggaucagccacagcauccagcugggcaacaagaaccagaucgagaccugcaaccagagcgugaucaccuacgagaacaacaccugggugaaccagaccuacgugaacaucagcaacaccaacuucgccgccggccagagcguggugagcgugaagcuggccggcaacagcagccugugccccgugagcggcugggccaucuacagcaaggacaacagcaucagaaucggcagcaagggcgacguguucgugaucagagagcccuucaucagcugcagcccccuggagugcagaaccuucuuccugacccagggcgcccugcugaacgacaagcacagcaacggcaccaucaaggacagaagccccuacagaacccugaugagcugccccaucggcgaggugcccagccccuacaacagcagauucgagagcguggccuggagcgccagcgccugccacgacggcaucaacuggcugaccaucggcaucagcggccccgacaacggcgccguggccgugcugaaguacaacggcaucaucaccgacaccaucaagagcuggagaaacaacauccugagaacccaggagagcgagugcgccugcgugaacggcagcugcuucaccgugaugaccgacggccccagcgacggccaggccagcuacaagaucuucagaaucgagaagggcaagaucgugaagagcguggagaugaacgcccccaacuaccacuacgaggagugcagcugcuaccccgacagcagcgagaucaccugcgugugcagagacaacuggcacggcagcaacagacccugggugagcuucaaccagaaccuggaguaccagaucggcuacaucugcagcggcaucuucggcgacaaccccagacccaacgacaagaccggcagcugcggccccgugagcagcaacggcgccaacggcgugaagggcuucagcuucaaguacggcaacggcguguggaucggcagaaccaagagcaucagcagcagaaacggcuucgagaugaucugggaccccaacggcuggaccggcaccgacaacaacuucagcaucaagcaggacaucgugggcaucaacgaguggagcggcuacagcggcagcuucgugcagcaccccgagcugaccggccuggacugcaucagacccugcuucuggguggagcugaucagaggcagacccaaggagaacaccaucuggaccagcggcagcagcaucagcuucugcggcgugaacagcgacaccgugggcuggagcuggcccgacggcgccgagcugcccuucaccaucgacaaguga

SEQ ID NO: 179248 - RNA, 1410 nt, Artificial Sequence; identical to SEQ ID NO: 178777
  derived and/or modified CDS sequence (opt4) from neuraminidase__InfluenzaA__ADK90337

SEQ ID NO: 179249 - RNA, 1410 nt, Artificial Sequence; identical to SEQ ID NO: 177857
  derived and/or modified CDS sequence (opt4) from neuraminidase__InfluenzaA__ADK90341

SEQ ID NO: 179250 - RNA, 1410 nt, Artificial Sequence; identical to SEQ ID NO: 177857
  derived and/or modified CDS sequence (opt4) from neuraminidase__InfluenzaA__ADK90345

SEQ ID NO: 179251 - RNA, 1410 nt, Artificial Sequence; identical to SEQ ID NO: 177857
  derived and/or modified CDS sequence (opt4) from neuraminidase__InfluenzaA__ADK90349

SEQ ID NO: 179252 - RNA, 1410 nt, Artificial Sequence; identical to SEQ ID NO: 178777
  derived and/or modified CDS sequence (opt4) from neuraminidase__InfluenzaA__ADK90353

SEQ ID NO: 179253 - RNA, 1410 nt, Artificial Sequence; identical to SEQ ID NO: 176798
  derived and/or modified CDS sequence (opt4) from neuraminidase__InfluenzaA__ADK90357

SEQ ID NO: 179254 - RNA, 1410 nt, Artificial Sequence; identical to SEQ ID NO: 178777
  derived and/or modified CDS sequence (opt4) from neuraminidase__InfluenzaA__ADK90361

SEQ ID NO: 179255 - RNA, 1410 nt, Artificial Sequence; identical to SEQ ID NO: 177772
  derived and/or modified CDS sequence (opt4) from neuraminidase__InfluenzaA__ADK90365

SEQ ID NO: 179256 - RNA, 1410 nt, Artificial Sequence; identical to SEQ ID NO: 176798
  derived and/or modified CDS sequence (opt4) from neuraminidase__InfluenzaA__ADK90369

SEQ ID NO: 179257 - RNA, 1410 nt, Artificial Sequence; identical to SEQ ID NO: 176798
  derived and/or modified CDS sequence (opt4) from neuraminidase__InfluenzaA__ADK90373

SEQ ID NO: 179258 - RNA, 1410 nt, Artificial Sequence
  derived and/or modified CDS sequence (opt4) from neuraminidase__InfluenzaA__ADK90377
augaaccccaaccagaagaucaucaccaucggcagcgugugcaugaccaucggcaugaccaaccugauccugcagaucggcaacaucaucagcaucuggaucagccacagcauccagcugggcaaccagaaccagaucgagaccugcaaccagagcgugaucaccuacgagaacaacaccugggugaaccagaccuacgugaacaucagcaacaccaacuucgccgccggccagagcguggugagcgugaagcuggccggcaacagcagccugugccccgugagcggcugggccaucuacagcaaggacaacagcaucagaaucggcagcaagggcgacguguucgugaucagagagcccuucaucagcugcagcccccuggagugcagaaccuucuuccugacccagggcgcccugcugaacgacaagcacagcaacggcaccaucaaggacagaagcccccacagaacccugaugagcugccccaucggcgaggugcccagccccuacaacagcagauucgagagcguggccuggagcgccagcgccugccacgacggcaucaacuggcugaccaucggcaucagcggccccgacaacggcgccguggccgugcugaaguacaacggcaucaucaccgacaccaucaagagcuggagaaacaacauccugagaacccaggagagcgagugcgccugcgugaacggcagcugcuucaccgugaugaccgacggccccagcgacggccaggccagcuacaagaucuucagaaucgagaagggcaagaucgugaagagcguggagauggacgcccccaacuaccacuacgaggagugcagcugcuaccccgacagcagcgagaucaucugcgugugcagagacaacuggcacggcagcaacagacccugggugagcuucaaccagaaccuggaguaccagaucggcuacaucugcagcggcaucuucggcgacaaccccagacccaacgacaagaccggcagcugcggccccgugagcagcaacggcgccaacggcgugaagggcuucagcuucaaguacggcaacggcguguggaucggcagaaccaagagcaucagcagcagaaacggcuucgagaugaucugggaccccaacggcuggaccggcaccgacaacaacuucagcaucaagcaggacaucgugggcaucaacgaguggagcggcuacagcggcagcuucgugcagcaccccgagcugaccggccuggacugcaucagacccugcuucuggguggagcugaucagaggcagacccaaggagaacaccaucuggaccagcggcagcagcaucagcuucugcggcgugaacagcgacaccgugggcuggagcuggcccgacggcgccgagcugcccuucaccaucgacaaguga

SEQ ID NO: 179259 - RNA, 1410 nt, Artificial Sequence; identical to SEQ ID NO: 178777
  derived and/or modified CDS sequence (opt4) from neuraminidase__InfluenzaA__ADK90381

SEQ ID NO: 179260 - RNA, 1410 nt, Artificial Sequence
  derived and/or modified CDS sequence (opt4) from neuraminidase__InfluenzaA__ADK90385
augaaccccaaccagaagaucaucaccaucggcagcgugugcaugaccaucggcauggccaaccugauccugcagaucggcaacaucaucagcaucuggaucagccacagcauccagcugggcaaccagaaccagaucgagaccugcaaccagagcgugaucaccuacgagaacaacaccugggugaaccagaccuacgugaacaucagcaacaccaacuucgccgccggccagagcguggugagcgugaagcugagcggcaacagcagccugugccccgugagcggcugggccaucuacagcaaggacaacagcaucagaaucggcagcaagggcgacguguucgugaucagagagcccuucaucagcugcagcccccuggagugcagaaccuucuuccugacccagggcgcccugcugaacgacaagcacagcaacggcaccaucaaggacagaagcccccacagaacccugaugagcugccccaucggcgaggugcccagccccuacaacagcagauucgagagcguggccuggagcgccagcgccugccacgacggcaucaacuggcugaccaucggcaucagcggccccgacaacggcgccguggccgugcugaaguacaacggcaucaucaccgacaccaucaagagcuggagaaacaacauccugagaacccaggagagcgagugcaccugcgugaacggcagcugcuucaccgugaugaccgacggccccagcgacggccaggccagcuacaagaucuucagaaucgagaagggcaagaucgugaagagcguggagaugaacgcccccaacuaccacuacgaggagugcagcugcuaccccgacagcagcgagaucaccugcgugugcagagacaacuggcacggcagcaacagacccugggugagcuucaaccagaaccuggaguaccagaucggcuacaucugcagcggcaucuucggcgacaaccccagacccaacgacaagaccggcagcugcggccccgugagcagcaacggcgccaacggcgugaagggcuucagcuucaaguacggcaacggcguguggaucggcagaaccaagagcaucagcagcagaaacggcuucgagaugaucugggaccccaacggcuggaccggcaccgacaacaacuucagcaucaagcaggacaucgugggcaucaacgaguggagcggcuacagcggcagcuucgugcagcaccccgagcugaccggccuggacugcaucagacccugcuucuggguggagcugaucagaggcagacccaaggagaacaccaucuggaccagcggcagcagcaucagcuucugcggcgugaacagcgacaccgugggcuggagcuggcccgacggcgccgagcugcccuucaccaucgacaaguga

SEQ ID NO: 179261 - RNA, 1410 nt, Artificial Sequence; identical to SEQ ID NO: 176798
  derived and/or modified CDS sequence (opt4) from neuraminidase__InfluenzaA__ADK90389

SEQ ID NO: 179262 - RNA, 1410 nt, Artificial Sequence; identical to SEQ ID NO: 178777
  derived and/or modified CDS sequence (opt4) from neuraminidase__InfluenzaA__ADK90393

SEQ ID NO: 179263 - RNA, 1410 nt, Artificial Sequence; identical to SEQ ID NO: 178689
  derived and/or modified CDS sequence (opt4) from neuraminidase__InfluenzaA__ADK90397

SEQ ID NO: 179264 - RNA, 1410 nt, Artificial Sequence; identical to SEQ ID NO: 176798
  derived and/or modified CDS sequence (opt4) from neuraminidase__InfluenzaA__ADK90401

SEQ ID NO: 179265 - RNA, 1410 nt, Artificial Sequence
  derived and/or modified CDS sequence (opt4) from neuraminidase__InfluenzaA__ADK90405
augaaccccaaccagaagaucaucaccaucggcagcgugugcaugaccaucggcauggccaaccugauccugcagaucggcaacaucaucagcaucuggaucagccacagcauccagcugggcaaccagaaccagaucgagaccugcaaccagagcgugaucaccuacgagaacaacaccugggugaaccagaccuacgugaacaucagcaacaccaacuucgccgccggccagagcguggugagcgugaagcuggccggcaacagcagccugugccccgugagcggcugggccaucuacagcaaggacaacagcaucagaaucggcagcaagggcgacguguucgugaucagagagcccuucaucagcugcagcccccuggagugcagaaccuucuuccugacccagggcgcccugcugaacgacaagcacagcaacggcaccaucaaggacagaagcccccacagaacccugaugagcugccccaucggcgaggugcccagccccuacaacagcagauucgagagcguggccuggagcgccagcgccugccacgacggcaucaacuggcugaccaucggcaucagcggccccgacaacggcgccguggccgugcugaaguacaacggcaucaucaccgacaccaucaagagcuggagaaacaacauccugagaacccaggagagcgagugcaccugcgugaacggcagcugcuucaccgugaugaccgacggccccagcgacggccaggccagcuacaagaucuucagaaucgagaagggcaagaucgugaagagcguggagaugaacgcccccaacuaccacuacgaggagugcagcugcuaccccgacagcagcgagaucaccugcgugugcagagacaacuggcacggcagcaacagacccugggugagcuucaaccagaaccuggaguaccagaucggcuacaucugcagcggcaucuucggcgacaaccccagacccaacgacaagaccggcagcugcggccccgugagcagcaacggcgccaacggcgugaagggcuucagcuucaaguacggcaacggcguguggaucggcagaaccaagagcaucagcagcagaaacggcuucgagaugaucugggaccccaacggcuggaccggcaccgacaacaacuucagcaucaagcaggacaucgugggcaucaacgaguggagcggcuacagcggcagcuucgugcagcaccccgagcugaccggccuggacugcaucagacccugcuucuggguggagcugaucagaggcagacccaaggagaacaccaucuggaccagcggcagcagcaucagcuucugcggcgugaacagcgacaccgugggcuggagcuggcccgacggcgccgagcugcccuucaccaucgacaaguga

SEQ ID NO: 179266 - RNA, 1410 nt, Artificial Sequence; identical to SEQ ID NO: 176798
  derived and/or modified CDS sequence (opt4) from neuraminidase__InfluenzaA__ADK90409

SEQ ID NO: 179267 - RNA, 1410 nt, Artificial Sequence
  derived and/or modified CDS sequence (opt4) from neuraminidase__InfluenzaA__ADK90413
augaaccccaaccagaagaucaucaccaucggcagcgugugcaugaccaucggcauggccaaccugauccugcagaucggcaacaucaucagcaucuggaucagccacagcauccagcugggcaaccagaaccagaucgagaccugcaaccagagcgugaucaccuacgagaacaacaccugggugaaccagaccuacgugaacaucagcaacaccaacuucgccgccggccagagcguggugagcgugaagcuggccggcaacagcagccugugccccgugagcggcugggccaucuacagcaaggacaacagcaucagaaucggcagcaagggcgacguguucgugaucagagagcccuucaucagcugcagcccccuggagugcagaaccuucuuccugacccagggcgcccugcugaacgacaagcacagcaacggcaccaucaaggacagaagcccccacagaacccugaugagcugccccaucggcgaggugcccagccccuacaacagcagauucgagagcguggccuggagcgccagcgccugccacgacggcaucaacuggcugaccaucggcaucagcggccccgacaacggcgccauggccgugcugaaguacaacggcaucaucaccgacaccaucaagagcuggagaaacaacauccugagaacccaggagagcgagugcgccugcgugaacggcagcugcuucaccgugaugaccgacggccccagcgacggccaggccagcuacaagaucuucagaaucgagaagggcaagaucgugaagagcguggagaugaacgcccccaacuaccacuacgaggagugcagcugcuaccccgacagcagcgagaucaccugcgugugcagagacaacuggcacggcagcaacagacccugggugagcuucaaccagaaccuggaguaccagaucggcuacaucugcagcggcaucuucggcgacaaccccagacccaacgacaagaccggcagcugcggccccgugagcagcaacggcgccaacggcgugaagggcuucagcuucaaguacggcaacggcguguggaucggcagaaccaagagcaucagcagcagaaacggcuucgagaugaucugggaccccaacggcuggaccggcaccgacaacaacuucagcaucaagcaggacaucgugggcaucaacgaguggagcggcuacagcggcagcuucgugcagcaccccgagcugaccggccuggacugcaucagacccugcuucuggguggagcugaucagaggcagacccaaggagaacaccaucuggaccagcggcagcagcaucagcuucugcggcgugaacagcgacaccgugggcuggagcuggcccgacggcgccgagcugcccuucaccaucgacaaguga

SEQ ID NO: 179268 - RNA, 1410 nt, Artificial Sequence; identical to SEQ ID NO: 176798
  derived and/or modified CDS sequence (opt4) from neuraminidase__InfluenzaA__ADK90417

SEQ ID NO: 179269 - RNA, 1410 nt, Artificial Sequence; identical to SEQ ID NO: 176798
  derived and/or modified CDS sequence (opt4) from neuraminidase__InfluenzaA__ADK90421

SEQ ID NO: 179270 - RNA, 1410 nt, Artificial Sequence; identical to SEQ ID NO: 176798
  derived and/or modified CDS sequence (opt4) from neuraminidase__InfluenzaA__ADK90425

SEQ ID NO: 179271 - RNA, 1410 nt, Artificial Sequence; identical to SEQ ID NO: 176798
  derived and/or modified CDS sequence (opt4) from neuraminidase__InfluenzaA__ADK90429

SEQ ID NO: 179272 - RNA, 1410 nt, Artificial Sequence; identical to SEQ ID NO: 176659
  derived and/or modified CDS sequence (opt4) from neuraminidase__InfluenzaA__ADK94194

SEQ ID NO: 179273 - RNA, 1410 nt, Artificial Sequence; identical to SEQ ID NO: 176659
  derived and/or modified CDS sequence (opt4) from neuraminidase__InfluenzaA__ADK94205

SEQ ID NO: 179274 - RNA, 1410 nt, Artificial Sequence; identical to SEQ ID NO: 177965
  derived and/or modified CDS sequence (opt4) from neuraminidase__InfluenzaA__ADK94216

SEQ ID NO: 179275 - RNA, 1410 nt, Artificial Sequence; identical to SEQ ID NO: 176659
  derived and/or modified CDS sequence (opt4) from neuraminidase__InfluenzaA__ADK94227

SEQ ID NO: 179276 - RNA, 1410 nt, Artificial Sequence; identical to SEQ ID NO: 176659
  derived and/or modified CDS sequence (opt4) from neuraminidase__InfluenzaA__ADK94238

SEQ ID NO: 179277 - RNA, 1410 nt, Artificial Sequence; identical to SEQ ID NO: 179183
  derived and/or modified CDS sequence (opt4) from neuraminidase__InfluenzaA__ADK94260

SEQ ID NO: 179278 - RNA, 1410 nt, Artificial Sequence; identical to SEQ ID NO: 179183
  derived and/or modified CDS sequence (opt4) from neuraminidase__InfluenzaA__ADK94271

SEQ ID NO: 179279 - RNA, 1410 nt, Artificial Sequence; identical to SEQ ID NO: 176659
  derived and/or modified CDS sequence (opt4) from neuraminidase__InfluenzaA__ADK94293

SEQ ID NO: 179280 - RNA, 1410 nt, Artificial Sequence; identical to SEQ ID NO: 176659
  derived and/or modified CDS sequence (opt4) from neuraminidase__InfluenzaA__ADK94304

SEQ ID NO: 179281 - RNA, 1410 nt, Artificial Sequence
  derived and/or modified CDS sequence (opt4) from neuraminidase__InfluenzaA__ADK94326
augaaccccaaccagaagaucaucaccaucggcagcgugagccugaccaucagcaccaucugcuucuucaugcagaucgccauccugaucaccaccgugacccugcacuucaagcaguacgaguucaacagcccccccaacaaccaggugaugcugugcgagcccaccaucaucgagagaaacaucaccgagaucguguaccugaccaacaccaccaucgagaaggagaucugccccaagcuggccgaguacagaaacuggagcaagccccagugcgacaucaccggcuucgcccccuucagcaaggacaacagcaucagacugagcgccggcggcgacaucugggugaccagagagcccuacgugagcugcgaccccgacaagugcuaccaguucgcccugggccagggcaccacccugaacaacauccacagcaacaacaccgugagagacagaacccccuacagaacccugcugaugaacgagcugggcgugcccuuccaccugggcaccaagcaggugugcaucgccuggagcagcagcagcugccacgacggcaaggccuggcugcacgugugcaucaccggcgacgacaagaacgccaccgccagcuucaucuacaacggcagacugguggacagcguggugagcuggagcaaggagauccugagaacccaggagagcgagugcgugugcaucaacggcaccugcaccguggugaugaccgacggcagcgccagcggcaaggccgacaccaagauccuguucaucgaggagggcaagaucgugcacaccagcacccugagcggcagcgcccagcacguggaggagugcagcugcuaccccagauaccccggcgugagaugcgugugcagagacaacuggaagggcagcaacagacccaucguggacaucaacaucaaggaccacagcaucgugagcagcuacgugugcagcggccuggugggcgacacccccagaaagaacgacagcagcagcagcagccacugccuggaccccaacaacgaggagggcggccacggcgugaagggcugggccuucgacgacggcaacgacguguggaugggcagaaccaucagcgagaagagcagacugggcuacgagaccuucaaggugaucgagggcuggagcaaccccaagagcaagcugcagaucaacagacaggugaucguggacagaggcaacagaagcggcuacagcggcaucuucagcguggagggcaagagcugcaucaacagaugcuucuacguggagcugaucagaggcagaaaggaggagaccgaggugcuguggaccagcaacagcaucgugguguucugcggcaccagcggcaccuacggcaccggcagcuggcccgacggcgccgacaucaaccugaugcccaucuga

SEQ ID NO: 179282 - RNA, 1410 nt, Artificial Sequence; identical to SEQ ID NO: 177965
  derived and/or modified CDS sequence (opt4) from neuraminidase__InfluenzaA__ADK94337

SEQ ID NO: 179283 - RNA, 1410 nt, Artificial Sequence; identical to SEQ ID NO: 176659
  derived and/or modified CDS sequence (opt4) from neuraminidase__InfluenzaA__ADK94444

SEQ ID NO: 179284 - RNA, 1410 nt, Artificial Sequence
  derived and/or modified CDS sequence (opt4) from neuraminidase__InfluenzaA__ADK94479
augaaccccaaccagaagaucaucaccaucggcagcgugagccugaccaucagcaccaucugcuuccugaugcagaucgccauccugaccaccaccgugacccugcacuucaagcaguacgaguucaacagcccccccaacaaccaggugaugcugugcgagcccaccaccaucgagagaaacaucaccgagaucguguaccugaccaacaccaccaucgagaaggagaucugccccaagcuggccgaguacagaaacuggagcaagccccagugcgacaucaccggcuucgcccccuucagcaaggacaacagcaucagacugagcgccggcggcgacaucugggugaccagagagcccuacgugagcugcgaccccgacaagugcuaccaguucgcccugggccagggcaccacccugaacaacgugcacagcaacaacaccgugagagacagaacccccuacagaacccugcugaugaacgagcugggcgugcccuuccaccugggcaccaagcaggugugcaucgccuggagcagcagcagcugccacgacggcaaggccuggcugcacgugugcaucaccggcgacgacaagaacgccaccgccagcuucaucuacaacggcaagcugguggacagcguggugagcuggagcaaggagauccugagaacccaggagagcgagugcgugugcaucaacggcaccugcaccguggugaugaccgacggcagcgccagcggcaaggccgacaccaagauccuguucaucgaggagggcaagaucgugcacaccagcacccugagcggcagcgcccagcacguggaggagugcagcugcuaccccagauaccccggcgugagaugcgugugcagagacaacuggaagggcagcaacagacccaucguggacaucaacaucaaggaccacagcaucgugagcagcuaccugugcagcggccuggugggcgacacccccagaaagaacgacagcagcagcagcagccacugccuggaccccaacaacgaggagggcggccacggcgugaagggcugggccuucgacgacggcaacgacguguggaugggcagaaccaucagcgagaagagcagacugggcuacgagaccuucaaggugaucgagggcuggagcaaccccaagagcaagcugcagaucaacagacaggugaucguggacagaggcaacagaagcggcuacagcggcaucuucagcguggagggcaagagcugcaucaacagaugcuucuacguggagcugaucagaggcagaaaggaggagaccggcgugcuguggaccagcaacagcaucgugguguucugcggcaccagcggcaccuacggcaccggcagcuggcccgacggcgccgacaucaaccugaugcccaucuga

SEQ ID NO: 179285 - RNA, 1410 nt, Artificial Sequence; identical to SEQ ID NO: 176659
  derived and/or modified CDS sequence (opt4) from neuraminidase__InfluenzaA__ADK94490

SEQ ID NO: 179286 - RNA, 1410 nt, Artificial Sequence; identical to SEQ ID NO: 176659
  derived and/or modified CDS sequence (opt4) from neuraminidase__InfluenzaA__ADK94501

SEQ ID NO: 179287 - RNA, 1410 nt, Artificial Sequence
  derived and/or modified CDS sequence (opt4) from neuraminidase__InfluenzaA__ADK94512
augaaccccaaccagaagaucaucaccaucggcagcgugagccugaccaucagcaccaucugcuucuucaugcagaucgccauccugaucaccaccgugacccugcacuucaagcaguacgaguucaacagcccccccaacaaccaggugaugcugugcgagcccaccaucaucgagagaaacaucaccgagaucguguaccugaccaacaccaccaucgagaaggagaucugccccaagcuggccgaguacagaaacuggagcaagccccagugcgacaucaccggcuucgcccccuucagcaaggacaacagcaucagacugagcgccggcggcgacaucugggugaccagagagcccuacgugagcugcgaccccgacaagugcuaccaguucgcccugggccagggcaccacccugaacaacgugcacagcaacaacaccgugagagacagaacccccuacagaacccugcugaugaacgagcugggcgugcccuuccaccugggcaccaagcaggugugcaucgccuggagcagcagcagcugccacgacggcaaggccuggcugcacgugugcaucaccggcgacgacaagaacgccaccgccagcuucaucuacaacggcagacugguggacagcguggugagcuggagcaaggagauccugagaacccaggagagcgagugcgugugcaucaacggcaccugcaccguggugaugaccgacggcagcgccagcggcaaggccgacaccaagauccuguucaucgaggagggcagaaucgugcacaccagcacccugagcggcagcgcccagcacguggaggagugcagcugcuaccccagauaccccggcgugagaugcgugugcagagacaacuggaagggcagcaacagacccaucguggacaucaacaucaaggaccacagcaucgugagcagcuacgugugcagcggccuggugggcgacacccccagaaagaacgacagcagcagcagcagccacugccuggaccccaacaacgaggagggcggccacggcgugaagggcugggccuucgacgacggcaacgacguguggaugggcagaaccaucagcgagaagagcagacugggcuacgagaccuucaaggugaucgagggcuggagcaaccccaagagcaagcugcagaucaacagacaggugaucguggacagaggcaacagaagcggcuacagcggcaucuucagcguggagggcaagagcugcaucaacagaugcuucuacguggagcugaucagaggcagaaaggaggagaccgaggugcuguggaccagcaacagcaucgugguguucugcggcaccagcggcaccuacggcaccggcagcuggcccgacggcgccgacaucaaccugaugcccaucuga

SEQ ID NO: 179288 - RNA, 1410 nt, Artificial Sequence; identical to SEQ ID NO: 176659
  derived and/or modified CDS sequence (opt4) from neuraminidase__InfluenzaA__ADK94534

SEQ ID NO: 179289 - RNA, 1410 nt, Artificial Sequence; identical to SEQ ID NO: 179183
  derived and/or modified CDS sequence (opt4) from neuraminidase__InfluenzaA__ADK94556

SEQ ID NO: 179290 - RNA, 1410 nt, Artificial Sequence; identical to SEQ ID NO: 176659
  derived and/or modified CDS sequence (opt4) from neuraminidase__InfluenzaA__ADK94567

SEQ ID NO: 179291 - RNA, 1410 nt, Artificial Sequence; identical to SEQ ID NO: 176659
  derived and/or modified CDS sequence (opt4) from neuraminidase__InfluenzaA__ADK94578

SEQ ID NO: 179292 - RNA, 1410 nt, Artificial Sequence; identical to SEQ ID NO: 176659
  derived and/or modified CDS sequence (opt4) from neuraminidase__InfluenzaA__ADK94589

SEQ ID NO: 179293 - RNA, 1410 nt, Artificial Sequence; identical to SEQ ID NO: 178349
  derived and/or modified CDS sequence (opt4) from neuraminidase__InfluenzaA__ADK98504

SEQ ID NO: 179294 - RNA, 1410 nt, Artificial Sequence
  derived and/or modified CDS sequence (opt4) from neuraminidase__InfluenzaA__ADK98506
augaaccccaaccagaagaucaucaccaucggcagcgugugcaugaccaucggcauggccaaccugauccugcagaucggcaacaucaucagcaucuggaucagccacagcauccagcugggcaaccagaaccagaucgagaccugcaaccagaacgugaucaccuacgagaacaacaccugggugaaccagaccuacgugaacaucagcaacaccaacuucgccgccggccagagcguggugagcgugaagcuggccggcaacagcagccugugccccgugagcggcugggccaucuacagcaaggacaacagcaucagaaucggcagcaagggcgacguguucgugaucagagagcccuucaucagcugcagcccccuggagugcagaaccuucuuccugacccagggcgcccugcugaacgacaagcacagcaacggcaccaucaaggacagaagccccuacagaacccugaugagcugccccaucggcgaggugcccagccccuacaacagcagauucgagagcguggccuggagcgccagcgccugccacgacggcaucaacuggcugaccaucggcaucagcggccccgacaacggcgccguggccgugcugaaguacaacggcaucaucaccgacaccaucaagagcuggagaaacaacauccugagaacccaggagagcgagugcgccugcgugaacggcagcugcuucaccgugaugaccgacggccccagcgacggccaggccagcuacaagaucuucagaaucgagaagggcaagaucgugaagagcguggagaugaacgcccccaacuaccacuacgaggagugcagcugcuaccccgacagcagcgagaucaccugcgugugcagagacaacuggcacggcagcaacagacccugggugagcuucaaccagaaccuggaguaccagaucggcuacaucugcagcggcaucuucggcgacaaccccagacccaacgacaagaccggcagcugcggccccgugagcagcaacggcgccaacggcgugaagggcuucagcuucaaguacggcaacggcguguggaucggcagaaccaagagcaucagcagcagaaacggcuucgagaugaucugggaccccaacggcuggaccggcaccgacaacaacuucagcaucaagcaggacaucgugggcaucaacgaguggagcggcuacagcggcagcuucgugcagcaccccgagcugaccggccuggacugcaucagacccugcuucuggguggagcugaucagaggcagacccaaggagaacaccaucuggaccagcggcagcagcaucagcuucugcggcgugaacagcgacaccgugggcuggagcuggcccgacggcgccgagcugcccuucaccaucgacaaguga

SEQ ID NO: 179295 - RNA, 1410 nt, Artificial Sequence
  derived and/or modified CDS sequence (opt4) from neuraminidase__InfluenzaA__ADK98626
augaaccccaaccagaagaucaucaccaucggcagcgugagccugaccaucagcaccaucugcuucuucaugcagaucgccauccugaucaccaccgugacccugcacuucaagcaguacgaguucaacagcccccccaacaaccaggugaugcugugcgagcccaccaugaucgagagaaacaucaccgagaucguguaccugaccaacaccaccaucgagaaggagaucugccccaagcuggccgaguacagaaacuggagcaagccccagugcgacaucaccggcuucgcccccuucagcaaggacaacagcaucagacugagcgccggcggcgacaucugggugaccagagagcccuacgugagcugcgaccccgacaagugcuaccaguucgcccugggccagggcaccacccugaacaacgugcacagcaacaacaccgugagagacagaacccccuacagaacccugcugaugaacgagcugggcgugcccuuccaccugggcaccaagcaggugugcaucgccuggagcagcagcagcugccacgacggcaaggccuggcugcacgugugcaucaccggcgacgacaagaacgccaccgccagcuucaucuacaacggcagacugguggacagcguggugagcuggagcaaggagauccugagaacccaggagagcgagugcgugugcaucaacggcaccugcaccguggugaugaccgacggcagcgccagcggcaaggccgacaccaagauccuguucaucgaggagggcaagaucgugcacaccagcacccugagcggcagcgcccagcacguggaggagugcagcugcuaccccagauaccccggcgugagaugcgugugcagagacaacuggaagggcagcaacagacccaucguggacaucaacaucaaggaccacagcaucgugagcagcuaccugugcagcggccuggugggcgacacccccagaaagaacgacagcagcagcagcagccacugccuggaccccaacaacgaggagggcggccacggcgugaagggcugggccuucgacgacggcaacgacguguggaugggcagaaccaucagcgagaagagcagacugggcuacgagaccuucaaggugaucgagggcuggagcaaccccaagagcaagcugcagaucaacagacaggugaucguggacagaggcaacagaagcggcuacagcggcaucuucagcguggagggcaagagcugcaucaacagaugcuucuacguggagcugaucagaggcagaaaggaggagaccgaggugcuguggaccagcaacagcaucgugguguucugcggcaccagcggcaccuacggcaccggcagcuggcccgacggcgccgacaucaaccugaugcccaucuga

SEQ ID NO: 179296 - RNA, 1410 nt, Artificial Sequence; identical to SEQ ID NO: 177965
  derived and/or modified CDS sequence (opt4) from neuraminidase__InfluenzaA__ADK98637

SEQ ID NO: 179297 - RNA, 1410 nt, Artificial Sequence
  derived and/or modified CDS sequence (opt4) from neuraminidase__InfluenzaA__ADK98648
augaaccccaaccagaagaucaucaccaucggcagcgugagccugaccaucagcaccaucugcuucuucaugcagaucgccauccuggugaccaccgugacccugcacuucaagcaguacgaguucaacagcccccccaacaaccaggugaugcugugcgagcccaccaucaucgagagaaacaucaccgagaucguguaccugaccaacaccaccaucgagaaggagaucugccccaagcuggccgaguacagaaacuggagcaagccccagugcgacaucaccggcuucgcccccuucagcaaggacaacagcaucagacugagcgccggcggcgacaucugggugaccagagagcccuacgugagcugcgaccccgacaagugcuaccaguucgcccugggccagggcaccacccugaacaacgugcacagcaacaacaccgugagagacagaacccccuacagaacccugcugaugaacgagcugggcgugcccuuccaccugggcaccaagcaggugugcaucgccuggagcagcagcagcugccacgacggcaaggccuggcugcacgugugcaucaccggcgacgacaagaacgccaccgccagcuucaucuacaacggcagacugguggacagcguggugagcuggagcaaggacauccugagaacccaggagagcgagugcgugugcaucaacggcaccugcaccguggugaugaccgacggcagcgccagcggcaaggccgacaccaagauccuguucaucgaggagggcaagaucgugcacaccagcacccugagcggcagcgcccagcacguggaggagugcagcugcuaccccagauaccccggcgugagaugcgugugcagagacaacuggaagggcagcaacagacccaucguggacaucaacaucaaggaccacagcaucgugagcagcuacgugugcagcggccuggugggcgacacccccagaaagaacgacagcagcagcagcagccacugccuggaccccaacaacgaggagggcggcagaggcgugaagggcugggccuucgacgacggcaacgacguguggaugggcagaaccaucagcgagaagagcagacugggcuacgagaccuucaaggugaucgagggcuggagcaaccccaagagcaagcugcagaucaacagacaggugaucguggacagaggcaacagaagcggcuacagcggcaucuucagcguggagggcaagagcugcaucaacagaugcuucuacguggagcugaucagaggcagaaaggaggagaccgaggugcuguggaccagcaacagcaucgugguguucugcggcaccagcggcaccuacggcaccggcagcuggcccgacggcgccaacaucaaccugaugcccaucuga

SEQ ID NO: 179298 - RNA, 1410 nt, Artificial Sequence
  derived and/or modified CDS sequence (opt4) from neuraminidase__InfluenzaA__ADK98659
augaaccccaaccagaagaucaucaccaucggcagcgugagccugaccaucagcaccaucugcuucuucaugcagaucgccauccugaucaccaccgugacccugcacuucaagcaguacgaguucaacagcccccccaacaaccaggugaugcugugcgagcccaccaucaucgagagaaacaucaccgagaucguguaccugaccaacaccaccaucgagaaggagaucugccccaagcuggccgaguacagaaacuggagcaagccccagugcgacaucaccggcuucgcccccuucagcaaggacaacagcaucagacugagcgccggcggcgacaucugggugaccagagagcccuacgugagcugcgaccccgacaagugcuaccaguucgcccugggccagggcaccacccugaacaacgugcacagcaacaacaccgugagagacagaacccccuacagaacccugcugaugaacgagcugggcgugcccuuccaccugggcaccaagcaggugugcaucgccuggagcagcagcagcugccacgacggcaaggccuggcugcacgugugcaucaccggcgacgacaagaacgccaccgccagcuucaucuacaacggcagacugguggacagcguggugagcuggagcaaggagauccugagaacccaggagagcgagugcgugugcaucaacggcaccugcaccguggugaugaccgacggcagcgccagcggcaaggccgacaccaagauccuguucaucgaggagggcaagaucgugcacaccagcacccugagcggcagcgcccagcacguggaggagugcagcugcuaccccagauaccccggcgugagaugcgugugcagagacaacuggaagggcagcaacagacccaucguggacaucaacaucaaggaccacagcaucgugagcagcuacgugugcagcggccuggugggcgacacccccagaaagaacgacagcagcagcagcggccacugccuggaccccaacaacgaggagggcggccacggcgugaagggcugggccuucgacgacggcaacgacguguggaugggcagaaccaucagcgagaagagcagacugggcuacgagaccuucaaggugaucgagggcuggagcaaccacaagagcaagcugcagaucaacagacaggugaucguggacagaggcaacagaagcggcuacagcggcaucuucagcguggagggcaagagcugcaucaacagaugcuucuacguggagcugaucagaggcagaaaggaggagaccgaggugcuguggaccagcaacagcaucgugguguucugcggcaccagcggcaccuacggcaccggcagcuggcccgacggcgccgaccugaaccugaugcccaucuga

SEQ ID NO: 179299 - RNA, 1410 nt, Artificial Sequence; identical to SEQ ID NO: 179183
  derived and/or modified CDS sequence (opt4) from neuraminidase__InfluenzaA__ADK98670

SEQ ID NO: 179300 - RNA, 1410 nt, Artificial Sequence
  derived and/or modified CDS sequence (opt4) from neuraminidase__InfluenzaA__ADK98681
augaaccccaaccagaagaucaucaccaucggcagcgugagccugaccaucagcaccaucugcuucuucaugcagaucgccauccugaucaccaccgugacccugcacuucaagcaguacgaguucaacagcccccccaacaaccaggugaugcugugcgagcccaccaucaucgagagaaacaucaccgagaucguguaccugaccaacaccaccaucgagaaggagaucugccccaagcuggccgaguacagaaacuggagcaagccccagugcgacaucaccggcuucgcccccuucagcaaggacaacagcaucagacugagcgccggcggcgacaucugggugaccagagagcccuacgugagcugcgaccccgacaagugcuaccaguucgcccugggccagggcaccacccugaacaacgugcacagcaacaacaccgugagagacagaacccccuacagaacccugcugaugaacgagcugggcgugcccuuccaccugggcaccaagcaggugugcaucgccuggagcagcagcagcugccacgacggcaaggccuggcugcacgugugcaucaccggcgacgacaagaacgccaccgccagcuucaucuacaacggcagacugguggacagcguggugagcuggagcaaggagauccugagaacccaggagagcgagugcgugugcaucaacggcaccugcaccguggugaugaccgacggcagcgccagcggcgaggccgacaccaagauccuguucaucgaggagggcaagaucgugcacaccagcacccugagcggcagcgcccagcacguggaggagugcagcugcuaccccagauaccccggcgugagaugcgugugcagagacaacuggaagggcagcaacagacccaucguggacaucaacaucaaggaccacagcaucgugagcagcuacgugugcagcggccuggugggcgacacccccagaaagaacgacagcagcagcagcagccacugccuggaccccaacaacgaggagggcggccacggcgugaagggcugggccuucgacgacggcaacgacguguggaugggcagaaccaucagcgagaagagcagacugggcuacgagaccuucaaggugaucgagggcuggagcaaccccaagagcaagcugcagaccaacagacaggugaucguggacagaggcaacagaagcggcuacagcggcaucuucagcguggagggcaagaacugcaucaacagaugcuucuacguggagcugaucagaggcagaaaggaggagaccgaggugcuguggaccagcaacagcaucgugguguucugcggcaccagcggcaccuacggcaccggcagcuggcccgacggcgccgacaucaaccugaugcccaucuga

SEQ ID NO: 179301 - RNA, 1410 nt, Artificial Sequence
  derived and/or modified CDS sequence (opt4) from neuraminidase__InfluenzaA__ADK98703
augaaccccaaccagaagaucaucaccaucggcagcgugagccugaccaucagcaccaucugcuucuucaugcagaccgccauccugaucaccaccgugacccugcacuucaagcaguacgaguucaacagcccccccaacaaccaggugaugcugugcgagcccaccaucaucgagagaaacaucaccgagaucguguaccugaccaacaccaccaucgagaaggagaucugccccaagcuggccgaguacagaaacuggagcaagccccagugcgacaucaccggcuucgcccccuucagcaaggacaacagcaucagacugagcgccggcggcgacaucugggugaccagagagcccuacgugagcugcgaccccgacaagugcuaccaguucgcccugggccagggcaccacccugaacaacgugcacagcaacaacaccgugagagacagaacccccuacagaacccugcugaugaacgagcugggcgugcccuuccaccugggcaccaagcaggugugcaucgccuggagcagcagcagcugccacgacggcaaggccuggcugcacgugugcaucaccggcgacgacaagaacgccaccgccagcuucaucuacaacggcagacugguggacagcguggugagcuggagcaaggagauccugagaacccaggagagcgagugcgugugcaucaacggcaccugcaccguggugaugaccgacggcagcgccagcggcgaggccgacaccaagauccuguucaucgaggagggcaagaucgugcacaccagcacccugagcggcagcgcccagcacguggaggagugcagcugcuaccccagauaccccggcgugagaugcgugugcagagacaacuggaagggcagcaacagacccaucguggacaucaacaucaaggaccacagcaucgugagcagcuacgugugcagcggccuggugggcgacacccccagaaagaacgacagcagcagcagcagccacugccuggaccccaacaacgaggagggcggccacggcgugaagggcugggccuucgacgacggcaacgacguguggaugggcagaaccaucagcgagaagagcagacugggcuacgagaccuucaaggugaucgagggcuggagcaaccccaagagcaagcugcagaccaacagacaggugaucguggacagaggcaacagaagcggcuacagcggcaucuucagcguggagggcaagaacugcaucaacagaugcuucuacguggagcugaucagaggcagaaaggaggagaccgaggugcuguggaccagcaacagcaucgugguguucugcggcaccagcggcaccuacggcaccggcagcuggcccgacggcgccgacaucaaccugaugcccaucuga

SEQ ID NO: 179302 - RNA, 1410 nt, Artificial Sequence; identical to SEQ ID NO: 178544
  derived and/or modified CDS sequence (opt4) from neuraminidase__InfluenzaA__ADK98725

SEQ ID NO: 179303 - RNA, 1410 nt, Artificial Sequence; identical to SEQ ID NO: 179183
  derived and/or modified CDS sequence (opt4) from neuraminidase__InfluenzaA__ADK98736

SEQ ID NO: 179304 - RNA, 1410 nt, Artificial Sequence
  derived and/or modified CDS sequence (opt4) from neuraminidase__InfluenzaA__ADK98747
augaaccccaaccagaagaucaucaccaucggcagcgugagccugaccaucagcaccaucugcuucuucaugcagaucgccauccuggugaccaccgugacccugcacuucaagcaguacgaguucaacagcccccccaacaaccaggugaugcugugcgagcccaccaucaucgagagaaacaucaccgagaucguguaccugaccaacaccaccaucgagaaggagaucugccccaagcuggccgaguacagaaacuggagcaagccccagugcgacaucaccggcuucgcccccuucagcaaggacaacagcaucagacugagcgccggcggcgacaucugggugaccagagagcccuacgugagcugcgaccccgacaagugcuaccaguucgcccugggccagggcaccacccugaacaacgugcacagcaacaacaccgugagagacagaacccccuacagaacccugcugaugaacgagcugggcgugcccuuccaccugggcaccaagcaggugugcaucgccuggagcagcagcagcugccacgacggcaaggccuggcugcacgugugcaucaccggcgacgacaagaacgccaccgccagcuucaucuacaacggcagacugguggacagcguggugagcuggagcaaggacauccugagaacccaggagagcgagugcgugugcaucaacggcaccugcaccguggugaugaccgacggcagcgccagcggcaaggccgacaccaagauccuguucaucgaggagggcaagaucgugcacaccagcacccugagcggcagcgcccagcacguggaggagugcagcugcuaccccagauaccccggcgugagaugcgugugcagagacaacuggaagggcagcaacagacccaucguggacaucaacaugaaggaccacagcaucgugagcagcuacgugugcagcggccuggugggcgacacccccagaaagaacgacagcagcagcagcagccacugccuggaccccaacaacgaggagggcggccacggcgugaagggcugggccuucgacgacggcaacgacguguggaugggcagaaccaucagcgagaagagcagacugggcuacgagaccuucaaggugaucgagggcuggagcaaccccaagagcaagcugcagaucaacagacaggugaucguggacagaggcaacagaagcggcuacagcggcaucuucagcguggagggcaagagcugcaucaacagaugcuucuacguggagcugaucagaggcagaaaggaggagaccgaggugcuguggaccagcaacagcaucgugguguucugcggcaccagcggcaccuacggcaccggcagcuggcccgacggcgccaacaucaaccugaugcccaucuga

SEQ ID NO: 179305 - RNA, 1410 nt, Artificial Sequence
  derived and/or modified CDS sequence (opt4) from neuraminidase__InfluenzaA__ADK98758
augaaccccaaccagaagaucaucaccaucggcagcgugagccugaccaucagcaccaucugcuucuucaugcagaucgccauccuggugaccaccgugacccugcacuucaagcaguacgaguucaacagcccccccaacaaccaggugaugcugugcgagcccaccaucaucgagagaaacaucaccgagaucguguaccugaccaacaccaccaucgagaaggagaucugccccaagcuggccgaguacagaaacuggagcaagccccagugcgacaucaccggcuucgcccccuucagcaaggacaacagcaucagacugagcgccggcggcgacaucugggugaccagagagcccuacgugagcugcgaccccgacaagugcuaccaguucgcccugggccagggcaccacccugaacaacgugcacagcaacaacaccgugagagacagaacccccuacagaacccugcugaugaacgagcugggcgugcccuuccaccugggcaccaagcaggugugcaucgccuggagcagcagcagcugccacgacggcaaggccuggcugcacgugugcaucaccggcgacgacaagaacgccaccgccagcuucaucuacaacggcagacugguggacagcguggugagcuggagcaaggacauccugagaacccaggagagcgagugcgugugcaucaacggcaccugcaccguggugaugaccgacggcagcgccagcggcaaggccaacaccaagauccuguucaucgaggagggcaagaucgugcacaccagcacccugagcggcagcgcccagcacguggaggagugcagcugcuaccccagauaccccggcgugagaugcgugugcagagacaacuggaagggcagcaacagacccaucguggacaucaacaucaaggaccacagcaucgugagcagcuacgugugcagcggccuggugggcgacacccccagaaagaacgacagcagcagcagcagccacugccuggaccccaacaacgaggagggcggccacggcgugaagggcugggccuucgacgacggcaacgacguguggaugggcagaaccaucagcgagaagagcagacugggcuacgagaccuucaaggugaucgagggcuggagcaaccccaagagcaagcugcagaucaacagacaggugaucguggacagaggcaacagaagcggcuacagcggcaucuucagcguggagggcaagagcugcaucaacagaugcuucuacguggagcugaucagaggcagaaaggaggagaccgaggugcuguggaccagcaacagcaucgugguguucugcggcaccagcggcaccuacggcaccggcagcuggcccgacggcgccaacaucaaccugaugcccaucuga

SEQ ID NO: 179306 - RNA, 1410 nt, Artificial Sequence; identical to SEQ ID NO: 178544
  derived and/or modified CDS sequence (opt4) from neuraminidase__InfluenzaA__ADK98769

SEQ ID NO: 179307 - RNA, 1410 nt, Artificial Sequence; identical to SEQ ID NO: 179098
  derived and/or modified CDS sequence (opt4) from neuraminidase__InfluenzaA__ADK98780

SEQ ID NO: 179308 - RNA, 1410 nt, Artificial Sequence; identical to SEQ ID NO: 178544
  derived and/or modified CDS sequence (opt4) from neuraminidase__InfluenzaA__ADK98791

SEQ ID NO: 179309 - RNA, 1410 nt, Artificial Sequence; identical to SEQ ID NO: 176659
  derived and/or modified CDS sequence (opt4) from neuraminidase__InfluenzaA__ADK98802

SEQ ID NO: 179310 - RNA, 1410 nt, Artificial Sequence
  derived and/or modified CDS sequence (opt4) from neuraminidase__InfluenzaA__ADK98813
augaaccccaaccagaagaucaucaccaucggcagcgugagccugaccaucagcaccaucugcuucuucaugcagaucgccauccugaucaccaccgugacccugcacuucaagcaguacgaguucaacagcccccccaacaaccaggugaugcugugcgagcccgccaucaucgagagaaacaucaccgagaucguguaccugaccaacaccaccaucgagaaggagaucugccccaagcuggccgaguacagaaacuggagcaagccccagugcgacaucaccggcuucgcccccuucagcaaggacaacagcaucagacugagcgccggcggcgacaucugggugaccagagagcccuacgugagcugcgaccccgacaagugcuaccaguucgcccugggccagggcaccacccugaacaacgugcacagcaacaacaccgugagagacagaacccccuacagaacccugcugaugaacgagcugggcgugcccuuccaccugggcaccaagcaggugugcaucgccuggagcagcagcagcugccacgacggcaaggccuggcugcacgugugcaucaccggcgacgacaagaacgccaccgccagcuucaucuacaacggcagacugguggacagcguggugagcuggagcaaggagauccugagaacccaggagagcgagugcgugugcaucaacggcaccugcaccguggugaugaccgacggcagcgccagcggcaaggccgacaccaagauccuguucaucgaggagggcaagaucgugcacaccagcacccugagcggcagcgcccagcacguggaggagugcagcugcuaccccagauaccccggcgugagaugcgugugcagagacaacuggaagggcagcaacagacccaucguggacaucaacaucaaggaccacagcaucgugagcagcuacgugugcagcggccuggugggcgacacccccagaaagaacgacagcagcagcagcagccacugccuggaccccaacaacgaggagggcggccacggcgugaagggcugggccuucgacgacggcaacgacguguggaugggcagaaccaucagcgagaagagcagacugggcuacgagaccuucaaggugaucgagggcuggagcaaccacaagagcaagcugcagaucaacagacaggugaucguggacagaggcaacagaagcggcuacagcggcaucuucagcguggagggcaagagcugcaucaacagaugcuucuacguggagcugaucagaggcagaaaggaggagaccgaggugcuguggaccagcaacagcaucgugguguucugcggcaccagcggcaccuacggcaccggcagcuggcccgacggcgccgaccugaaccugaugcccaucuga

SEQ ID NO: 179311 - RNA, 1410 nt, Artificial Sequence; identical to SEQ ID NO: 176659
  derived and/or modified CDS sequence (opt4) from neuraminidase__InfluenzaA__ADK98824

SEQ ID NO: 179312 - RNA, 1410 nt, Artificial Sequence; identical to SEQ ID NO: 178544
  derived and/or modified CDS sequence (opt4) from neuraminidase__InfluenzaA__ADK98835

SEQ ID NO: 179313 - RNA, 1410 nt, Artificial Sequence; identical to SEQ ID NO: 179183
  derived and/or modified CDS sequence (opt4) from neuraminidase__InfluenzaA__ADK98846

SEQ ID NO: 179314 - RNA, 1410 nt, Artificial Sequence
  derived and/or modified CDS sequence (opt4) from neuraminidase__InfluenzaA__ADK98857
augaaccccaaccagaagaucaucaccaucggcagcgugagccugaccaucagcaccaucugcuucuucaugcagaucgccauccuggugaccaccgugacccugcacuucaagcaguacgaguucaacagcccccccaacaaccaggugaugcugugcgagcccaccaucaucgagagaaacaucaccgagaucguguaccugaccaacaccaccaucgagaaggagaucugccccaagcuggccgaguacagaaacuggagcaagccccagugcgacaucaccggcuucgcccccuucagcaaggacaacagcaucagacugagcgccggcggcgacaucugggugaccagagagcccuacgugagcugcgaccccgacaagugcuaccaguucgcccugggccagggcaccacccugaacaacgugcacagcaacaacaccgugagagacagaacccccuacagaacccugcugaugaacgagcugggcgugcccuuccaccugggcaccaagcaggugugcaucgccuggagcagcagcagcugccacgacggcaaggccuggcugcacgugugcaucaccggcgacgacaagaacgccaccgccagcuucaucuacaacggcagacugguggacagcguggugagcuggagcaaggacauccugagaacccaggagagcgagugcgugugcaucaacggcaccugcaccguggugaugaccgacggcagcgccagcggcaaggccgacaccaagauccuguucaucgaggagggcaagaucgugcacaccagcacccugagcggcagcgcccagcacguggaggagugcagcugcuaccccagauaccccggcgugagaugcgugugcagagacaacuggaagggcagcaacagacccaucguggacaucaacaucaaggaccacagcaucgugagcagcuacgugugcagcggccuggugggcgacacccccagaaagaacgacagcagcagcagcagccacugccuggaccccaacaacgaggagggcggccacggcgugaagggcugggccuucgacgacggcaacgacguguggaugggcagaaccaucagcgagaagagcagacugggcuacgagaccuucaaggugaucgagggcuggagcaaccacaagagcaagcugcagaucaacagacaggugaucguggacagaggcaacagaagcggcuacagcggcaucuucagcguggagggcaagagcugcaucaacagaugcuucuacguggagcugaucagaggcagaaaggaggagaccgaggugcuguggaccagcaacagcaucgugguguucugcggcaccagcggcaccuacggcaccggcagcuggcccgacggcgccaacaucaaccugaugcccaucuga

SEQ ID NO: 179315 - RNA, 1410 nt, Artificial Sequence
  derived and/or modified CDS sequence (opt4) from neuraminidase__InfluenzaA__ADK98868
augaaccccaaccagaagaucaucaccaucggcagcgugagccugaccaucagcaccaucugcuucuucaugcagaucgccauccugaucaccaccgugacccugcacuucaagcaguacgaguucaacagcccccccaacaaccaggugaugcugugcgagcccaccaucaucgagagaaacaucaccgagaucguguaccugaccaacaccaccaucgagaaggagaucugccccaagcuggccgaguacagaaacuggagcaagccccagugcgacaucaccggcuucgcccccuucagcaaggacaacagcaucagacugagcgccggcggcgacaucugggugaccagagagcccuacgugagcugcgaccccgacaagugcuaccaguucgcccugggccagggcaccacccugaacaacgugcacagcaacaacaccgugagagacagaacccccuacagaacccugcugaugaacgagcugggcgugcccuuccaccugggcaccaagcaggugugcaucgccuggagcagcagcagcugccacgacggcaaggccuggcugcacgugugcaucaccggcgacgacaagaacgccaccgccagcuucaucuacaacggcagacugguggacagcguggugagcuggagcaaggagauccugagaacccaggagagcgagugcgugugcaucaacggcaccugcaccguggugaugaccgacggcagcgccagcggcaaggccgacaccaagauccuguucaucgaggagggcaagaucgugcacaccagcacccugagcggcagcgcccagcacguggaggagugcagcugcuaccccagauaccccggcgugagaugcgugugcagagacaacuggaagggcagcaacagacccaucguggacaucaacaucaaggaccacagcaucgugagcagcuacgugugcagcggccuggugggcgacacccccagaaagaacgacagcagcagcagcagccacugccuggaccccaacaacgaggagggcggccacggcgugaagggcugggccuucgacgacggcaacgacguguggaugggcagaaccaucagcgagaagagcagacugggcuacgagaccuucaaggugaucgagggcuggagcaaccccaagagcaagcugcagaucaacagacaggugaucguggacagaggcaacagaagcggcuacagcggcaucuucagcguggagggcaagagcugcaucaacagaugcuucuacguggagcugaucagaggcagaaaggaggagaacgaggugcuguggaccagcaacagcaucgugguguucugcggcaccagcggcaccuacggcaccggcagcuggcccgacggcgccgacaucaaccugaugcccaucuga

SEQ ID NO: 179316 - RNA, 1410 nt, Artificial Sequence
  derived and/or modified CDS sequence (opt4) from neuraminidase__InfluenzaA__ADK98879
augaaccccaaccagaagaucaucaccaucggcagcgugagccugaccaucagcaccaucugcuucuucaugcagaucgccauccugaucaccaccgugacccugcacuucaagcaguacgaguucaacagcccccccaacaaccaggccaugcugugcgagcccaccaucaucgagagaaacaucaccgagaucguguaccugaccaacaccaccaucgagaaggagaucugccccaagcuggccgaguacagaaacuggagcaagccccagugcgacaucaccggcuucgcccccuucagcaaggacaacagcaucagacugagcgccggcggcgacaucugggugaccagagagcccuacgugagcugcgaccccgacaagugcuaccaguucgcccugggccagggcaccacccugaacaacgugcacagcaacaacaccgugagagacagaacccccuacagaacccugcugaugaacgagcugggcgugcccuuccaccugggcaccaagcaggugugcaucgccuggagcagcagcagcugccacgacggcaaggccuggcugcacgugugcaucaccggcgacgacaagaacgccaccgccagcuucaucuacaacggcagacugguggacagcguggugagcuggagcaaggagauccugagaacccaggagagcgagugcgugugcaucaacggcaccugcaccguggugaugaccgacggcagcgccagcggcaaggccgacaccaagauccuguucaucgaggagggcaagaucgugcacaccagcacccugagcggcagcgcccagcacguggaggagugcagcugcuaccccagauaccccggcgugagaugcgugugcagagacaacuggaagggcagcaacagacccaucguggacaucaacaucaaggaccacagcaucgugagcagcuacgugugcagcggccuggugggcgacacccccagaaagaacgacagcagcagcagcagccacugccuggaccccaacaacgaggagggcggccacggcgugaagggcugggccuucgacgacggcaacgacguguggaugggcagaaccaucagcgagaagagcagacugggcuacgagaccuucaaggugaucgagggcuggagcaaccccaagagcaagcugcagaucaacagacaggugaucguggacagaggcaacagaagcggcuacagcggcaucuucagcguggagggcaagagcugcaucaacagaugcuucuacguggagcugaucagaggcagaaaggaggagaccgaggugcuguggaccagcaacagcaucgugguguucugcggcaccagcggcaccuacggcaccggcagcuggcccgacggcgccgacaucaaccugaugcccaucuga

SEQ ID NO: 179317 - RNA, 1410 nt, Artificial Sequence; identical to SEQ ID NO: 179183
  derived and/or modified CDS sequence (opt4) from neuraminidase__InfluenzaA__ADK98890

SEQ ID NO: 179318 - RNA, 1410 nt, Artificial Sequence; identical to SEQ ID NO: 178544
  derived and/or modified CDS sequence (opt4) from neuraminidase__InfluenzaA__ADK98901

SEQ ID NO: 179319 - RNA, 1410 nt, Artificial Sequence; identical to SEQ ID NO: 179098
  derived and/or modified CDS sequence (opt4) from neuraminidase__InfluenzaA__ADK98912

SEQ ID NO: 179320 - RNA, 1410 nt, Artificial Sequence; identical to SEQ ID NO: 179183
  derived and/or modified CDS sequence (opt4) from neuraminidase__InfluenzaA__ADK98923

SEQ ID NO: 179321 - RNA, 1410 nt, Artificial Sequence; identical to SEQ ID NO: 177965
  derived and/or modified CDS sequence (opt4) from neuraminidase__InfluenzaA__ADK98945

SEQ ID NO: 179322 - RNA, 1410 nt, Artificial Sequence
  derived and/or modified CDS sequence (opt4) from neuraminidase__InfluenzaA__ADK98956
augaaccccaaccagaagaucaucaccaucggcagcgugagccugaccaucagcaccaucugcuucuucaugcagaucgccauccugaucaccaccgugacccugcacuucaagcaguacgaguucaacagcccccccaacaaccaggugaugcugugcgagcccaccaucaucgagagaaacaucaccgagaucguguaccugaccaacaccaccaucgagaaggagaucugccccaagcuggccgaguacagaaacuggagcaagccccagugcgacaucaccggcuucgcccccuucagcaaggacaacagcaucagacugagcgccggcggcgacaucugggugaccagagagcccuacgugagcugcgaccccgacaagugcuaccaguucgcccugggccagggcaccacccugaacaacgugcacagcaacaacaccgugagagacagaacccccuacagaacccugcugaugaacgagcugggcgugcccuuccaccugggcaccaagcaggugugcaucgccuggagcagcagcagcugccacgacggcaaggccuggcugcacgugugcaucaccggcgacgacaagaacgccaccgccagcuucaucuacaacggcagacugguggacagcguggugagcuggagcaaggagauccugagaacccaggagagcgagugcgugugcaucaacggcaccugcaccguggugaugaccgacggcagcgccagcggcaaggccgacaccaagauccuguucaucgaggagggcaagaucgugcacaccagcacccugagcggcagcgcccagcacguggaggagugcagcugcuaccccagauaccccggcgugagaugcgugugcagagacaacuggaagggcagcaacagacccaucguggacaucaacaucaaggaccacagcguggugagcagcuacgugugcagcggccuggugggcgacacccccagaaagagcgacagcagcagcagcagccacugccuggaccccaacaacgaggagggcggccacggcgugaagggcugggccuucgacgacggcaacgacguguggaugggcagaaccaucagcgagaagagcagacugggcuacgagaccuucaaggugaucgagggcuggagcaaccacaagagcaagcugcagaucaacagacaggugaucguggacagaggcaacagaagcggcuacagcggcaucuucagcguggagggcaagagcugcaucaacagaugcuucuacguggagcugaucagaggcagaaaggaggagaccgaggugcuguggaccagcaacagcaucgugguguucugcggcaccagcggcaccuacggcaccggcagcuggcccgacggcgccgaccugaaccugaugcccaucuga

SEQ ID NO: 179323 - RNA, 1410 nt, Artificial Sequence; identical to SEQ ID NO: 178544
  derived and/or modified CDS sequence (opt4) from neuraminidase__InfluenzaA__ADK98967

SEQ ID NO: 179324 - RNA, 1410 nt, Artificial Sequence; identical to SEQ ID NO: 179183
  derived and/or modified CDS sequence (opt4) from neuraminidase__InfluenzaA__ADK98978

SEQ ID NO: 179325 - RNA, 1410 nt, Artificial Sequence; identical to SEQ ID NO: 179322
  derived and/or modified CDS sequence (opt4) from neuraminidase__InfluenzaA__ADK98989

SEQ ID NO: 179326 - RNA, 1410 nt, Artificial Sequence; identical to SEQ ID NO: 176659
  derived and/or modified CDS sequence (opt4) from neuraminidase__InfluenzaA__ADK99000

SEQ ID NO: 179327 - RNA, 1410 nt, Artificial Sequence; identical to SEQ ID NO: 179322
  derived and/or modified CDS sequence (opt4) from neuraminidase__InfluenzaA__ADK99011

SEQ ID NO: 179328 - RNA, 1410 nt, Artificial Sequence
  derived and/or modified CDS sequence (opt4) from neuraminidase__InfluenzaA__ADK99022
augaaccccaaccagaagaucaucaccaucggcagcgugagccugaccaucagcaccaucugcuucuucaugcagaucgccauccuggugaccaccgugacccugcacuucaagcaguacgaguucaacagcccccccaacaaccaggugaugcugugcgaccccaccaucaucgagagaaacaucaccgagaucguguaccugaccaacaccaccaucgagaaggagaucugccccaagcuggccgaguacagaaacuggagcaagccccagugcgacaucaccggcuucgcccccuucagcaaggacaacagcaucagacugagcgccggcggcgacaucugggugaccagagagcccuacgugagcugcgaccccgacaagugcuaccaguucgcccugggccagggcaccacccugaacaacgugcacagcaacaacaccgugagagacagaacccccuacagaacccugcugaugaacgagcugggcgugcccuuccaccugggcaccaagcaggugugcaucgccuggagcagcagcagcugccacgacggcaaggccuggcugcacgugugcaucaccggcgacgacaagaacgccaccgccagcuucaucuacaacggcagacugguggacagcguggugagcuggagcaaggacauccugagaacccaggagagcgagugcgugugcaucaacggcaccugcaccguggugaugaccgacggcagcgccagcggcaaggccgacaccaagauccuguucaucgaggagggcaagaucgugcacaccagcacccugagcggcagcgcccagcacguggaggagugcagcugcuaccccagauaccccggcgugagaugcgugugcagagacaacuggaagggcagcaacagacccaucguggacaucaacaucaaggaccacagcaucgugagcagcuacgugugcagcggccuggugggcgacacccccagaaagaacgacagcagcagcagcagccacugccuggaccccaacaacgaggagggcggccacggcgugaagggcugggccuucgacgacggcaacgacguguggaugggcagaaccaucagcgagaagagcagacugggcuacgagaccuucaaggugaucgagggcuggagcaaccccaagagcaagcugcagaucaacagacaggugaucguggacagaggcaacagaagcggcuacagcggcaucuucagcguggagggcaagagcugcaucaacagaugcuucuacguggagcugaucagaggcagaaaggaggagaccgaggugcuguggaccagcaacagcaucgugguguucugcggcaccagcggcaccuacggcaccggcagcuggcccgacggcgccaacaucaaccugaugcccaucuga

SEQ ID NO: 179329 - RNA, 1410 nt, Artificial Sequence; identical to SEQ ID NO: 176659
  derived and/or modified CDS sequence (opt4) from neuraminidase__InfluenzaA__ADK99033

SEQ ID NO: 179330 - RNA, 1410 nt, Artificial Sequence
  derived and/or modified CDS sequence (opt4) from neuraminidase__InfluenzaA__ADK99044
augaaccccaaccagaagaucaucaccaucggcagcgugagccugaccaucagcaccaucugcuucuucaugcagaucgccauccugaucaccaccgugacccugcacuucaagcaguacgaguucaacagcccccccaacaaccaggugaugcugugcgagcccaccaucaucgagagaaacaagaccgagaucguguaccugaccaacaccaccaucgagaaggagaucugccccaagcuggccgaguacagaaacuggagcaagccccagugcgacaucaccggcuucgcccccuucagcaaggacaacagcaucagacugagcgccggcggcgacaucugggugaccagagagcccuacgugagcugcgaccccgacaagugcuaccaguucgcccugggccagggcaccacccugaacaacggccacagcaacaacaccgugagagacagaacccccuacagaacccugcugaugaacgagcugggcgugcccuuccaccugggcaccaagcaggugugcaucgccuggagcagcagcagcugccacgacggcaaggccuggcugcacgugugcaucaccggcgacgacaagaacgccaccgccagcuucaucuacaacggcaagcugguggacagcguggugagcuggagcaaggagauccugagaacccaggagagcgagugcgugugcaucaacggcaccugcaccguggugaugaccgacggcagcgccagcggcaaggccgacaccaagauccuguucaucgaggagggcaagaucgugcacaccagcacccugagcggcagcgcccagcacguggaggagugcagcugcuaccccagauaccccggcgugagaugcgugugcagagacaacuggaagggcagcaacagacccaucguggacaucaacaucaaggaccacagcaucgugagcagcuacgugugcagcggccuggugggcgacacccccagaaagaacgacagcagcagcagcagccacugccuggaccccaacaacgaggagggcggccacggcgugaagggcugggccuucgacgacggcaacgacguguggaugggcagaaccaucagcgagaagagcagacugggcuacgagaccuucaaggugaucgagggcuggagcaaccacaagagcaagcugcagaucaacagacaggugaucguggacagaggcaacagaagcggcuacagcggcaucuucagcguggagggcaagagcugcaucaacagaugcuucuacguggagcugaucagaggcagaaaggaggagaccgaggugcuguggaccagcaacagcaucgugguguucugcggcaccagcggcaccuacggcaccggcagcuggcccgacggcgccgaccugaaccugaugcccaucuga

SEQ ID NO: 179331 - RNA, 1410 nt, Artificial Sequence
  derived and/or modified CDS sequence (opt4) from neuraminidase__InfluenzaA__ADK99055
augaaccccaaccagaagaucaucaccaucggcagcgugagccugaccaucagcaccaucugcuucuucaugcagaucgccauccugaucaccaccgugacccugcacuucaagcaguacgaguucaacagcccccccaacaaccaggugaugcugugcgagcccaccaucaucgagagaaacaucaccgagaucguguaccugaccaacaccaccaucgagaaggagaucugccccaagcuggccgaguacagaaacuggagcaagccccagugcgacaucaccggcuucgcccccuucagcaaggacaacagcaucagacugagcgccggcggcgacaucugggugaccagagagcccuacgugagcugcgaccccgacaagugcuaccaguucgcccugggccagggcaccacccugaacaacgugcacagcaacaacaccgugagagacagaacccccuacagaacccugcugaugaacgagcugggcgugcccuuccaccugggcaccaagcaggugugcaucgccuggagcagcagcagcugccacgacggcaaggccuggcugcacgugugcaucaccggcgacgacaagaacgccaccgccagcuucaucuacaacggcagacugguggacagcguggugagcuggagcaaggagauccugagaacccaggagagcgagugcgugugcaucaacggcaccugcaccguggugaugaccgacggcagcgccagcggcaaggccgacaccaagauccuguucaucgaggagggcaagaucgugcacaccagcacccugagcggcagcgcccagcacguggaggagugcagcugcuaccccagauaccccggcgugagaugcgugugcagagacaacuggaagggcagcaacagacccaucguggacaucaacaugaaggaccacagcaucgugagcagcuacgugugcagcggccuggugggcgacacccccagaaagaacgacagcagcagcagcagccacugccuggaccccaacaacgaggagggcggccacggcgugaagggcugggccuucgacgacggcaacgacguguggaugggcagaaccaucagcgagaagagcagacugggcuacgagaccuucaaggugaucgagggcuggagcaaccccaagagcaagcugcagaucaacagacaggugaucguggacagaggcaacagaagcggcuacagcggcaucuucagcguggagggcaagagcugcaucaacagaugcuucuacguggagcugaucagaggcagaaaggaggagaccgaggugcuguggaccagcaacagcaucgugguguucugcggcaccagcggcaccuacggcaccggcagcuggcccgacggcgccgacaucaaccugaugcccaucuga

SEQ ID NO: 179332 - RNA, 1410 nt, Artificial Sequence
  derived and/or modified CDS sequence (opt4) from neuraminidase__InfluenzaA__ADK99066
augaaccccaaccagaagaucaucaccaucggcagcgugagccugaccaucagcaccaucugcuucuucaugcagaucgccauccugaucaccaccgugacccugcacuucaagcagugcgaguucaacagcccccccaacaaccaggugaugcugugcgagcccaccaucaucgagagaaacaucaccgagaucguguaccugaccaacaccaccaucgagaagaagaucugccccaagcuggccgaguacagaaacuggagcaagccccagugcgacaucaccggcuucgcccccuucagcaaggacaacagcaucagacugagcgccggcggcgacaucugggugaccagagagcccuacgugagcugcgaccccgacaagugcuaccaguucgcccugggccagggcaccacccugaacaacgugcacagcaacaacaccgugagagacagaacccccuacagaacccugcugaugaacgagcugggcgugcccuuccaccugggcaccaagcaggugugcaucgccuggagcagcagcagcugccacgacggcaaggccuggcugcacgugugcaucaccggcgacgacaagaacgccaccgccagcuucaucuacaacggcagacugguggacagcguggugagcuggagcaaggagauccugagaacccaggagagcgagugcgugugcaucaacggcaccugcaccguggugaugaccgacggcagcgccagcggcaaggccgacaccaagauccuguucaucgaggagggcaagaucgugcacaccagcacccugagcggcagcgcccagcacguggaggagugcagcugcuaccccagauaccccggcgugagaugcgugugcagagacaacuggaagggcagcaacagacccaucguggacaucaacaucaaggaccacagcaucgugagcagcuaccugugcagcggccuggugggcgacacccccagaaagaacgacagcagcagcagcagccacugccuggaccccaacaacgaggagggcggccacggcgugaagggcugggccuucgacgacggcaacgacguguggaugggcagaaccaucagcgagaagagcagacugggcuacgagaccuucaaggugaucgagggcuggagcaaccccaagagcaagcugcagaucaacagacaggugaucguggacagaggcaacagaagcggcuacagcggcaucuucagcguggagggcaagagcugcaucaacagaugcuucuacguggagcugaucagaggcagaaaggaggagaccgaggugcuguggaccagcaacagcaucgugguguucugcggcaccagcggcaccuacggcaccggcagcuggcccgacggcgccaacaucaaccugaugcccaucuga

SEQ ID NO: 179333 - RNA, 1410 nt, Artificial Sequence
  derived and/or modified CDS sequence (opt4) from neuraminidase__InfluenzaA__ADK99077
augaaccccaaccagaagaucaucaccaucggcagcgugagccugaccaucagcaccaucugcuucuucaugcagaucgccauccugaucaccaccgugacccugcacuucaagcaguacgaguucaacagcccccccaacaaccaggugaugcugugcgagcccaccaucaucgagagaaacaucaccgagaucguguaccugaccaacaccaccaucgagaaggagaucugccccaagcuggccgaguacagaaacuggagcaagccccagugcgacaucaccggcuucgcccccuucagcaaggacaacagcaucagacugagcgccggcggcgacaucugggugaccagagagcccuacgugagcugcgaccccgacaagugcuaccaguucgcccugggccagggcaccacccugaacaacgugcacagcaacaacaccgugagagacagaacccccuacagaacccugcugaugaacgagcugggcgugcccuuccaccugggcaccaagcaggugugcaucgccuggagcagcagcagcugccacgacggcaaggccuggcugcacgugugcaucaccggcgacgacaagaacgccaccgccagcuucaucuacaacggcagacugguggacagcguggugagcuggagcaaggacauccugagaacccaggagagcgagugcgugugcaucaacggcaccugcaccguggugaugaccgacggcagcgccagcggcaaggccgacaccaagauccuguucaucgaggagggcaagguggugcacaccagcacccugagcggcagcgcccagcacguggaggagugcagcugcuaccccagauaccccggcgugagaugcgugugcagagacaacuggaagggcagcaacagacccaucguggacaucaacaucaaggaccacagcaucgugagcagcuacgugugcagcggccuggugggcgacacccccagaaagaacgacagcagcagcagcagccacugccuggaccccaacaacgaggagggcggccacggcgugaagggcugggccuucgacgacggcaacgacguguggaugggcagaaccaucagcgagaagagcagacugggcuacgagaccuucaaggugaucgagggcuggagcaaccacaagagcaagcugcagaucaacagacaggugaucguggacagaggcaacagaagcggcuacagcggcaucuucagcguggagggcaagagcugcaucaacagaugcuucuacguggagcugaucagaggcagaaaggaggagaccgaggugcuguggaccagcaacagcaucgugguguucugcggcaccagcggcaccuacggcaccggcagcuggcccgacggcgccgaccugaaccugaugcccaucuga

SEQ ID NO: 179334 - RNA, 1410 nt, Artificial Sequence; identical to SEQ ID NO: 179098
  derived and/or modified CDS sequence (opt4) from neuraminidase__InfluenzaA__ADK99088

SEQ ID NO: 179335 - RNA, 1410 nt, Artificial Sequence; identical to SEQ ID NO: 178544
  derived and/or modified CDS sequence (opt4) from neuraminidase__InfluenzaA__ADK99099

SEQ ID NO: 179336 - RNA, 1410 nt, Artificial Sequence
  derived and/or modified CDS sequence (opt4) from neuraminidase__InfluenzaA__ADK99110
augaaccccaaccagaagaucaucaccaucggcagcgugagccugaccaucagcaccaucugcuucuucaugcagaucgccauccuggugaccaccgugacccugcacuucaagcaguacgaguucaaccccccccccaacaaccaggugaugcugugcgagcccaccaucaucgagagaaacaucaccgagaucguguaccugaccaacaccaccaucgagaaggagaucugccccaagcuggccgaguacagaaacuggagcaagccccagugcgacaucaccggcuucgcccccuucagcaaggacaacagcaucagacugagcgccggcggcgacaucugggugaccagagagcccuacgugagcugcgaccccgacaagugcuaccaguucgcccugggccagggcaccacccugaacaacgugcacagcaacaacaccgugagagacagaacccccuacagaacccugcugaugaacgagcugggcgugcccuuccaccugggcaccaagcaggugugcaucgccuggagcagcagcagcugccacgacggcaaggccuggcugcacgugugcaucaccggcgacgacaagaacgccaccgccagcuucaucuacaacggcagacugguggacagcguggugagcuggagcaaggacauccugagaacccaggagagcgagugcgugugcaucaacggcaccugcaccguggugaugaccgacggcagcgccagcggcaaggccgacaccaagauccuguucaucgaggagggcaagaucgugcacaccagcacccugagcggcagcgcccagcacguggaggagugcagcugcuaccccagauaccccggcgugagaugcgugugcagagacaacuggaagggcagcaacagacccaucguggacaucaacaucaaggaccacagcaucgugagcagcuacgugugcagcggccuggugggcgacacccccagaaagaacgacagcagcagcagcagccacugccuggaccccaacaacgaggagggcggccacggcgugaagggcugggccuucgacgacggcaacgacguguggaugggcagaaccaucagcgagaagagcagacugggcuacgagaccuucaaggugaucgagggcuggagcaaccccaagagcaagcugcagaucaacagacaggugaucguggacagaggcaacagaagcggcuacagcggcaucuucagcguggagggcaagagcugcaucaacagaugcuucuacguggagcugaucagaggcagaaaggaggagaccgaggugcuguggaccagcaacagcaucgugguguucugcggcaccagcggcaccuacggcaccggcagcuggcccgacggcgccaacaucaaccugaugcccaucuga

SEQ ID NO: 179337 - RNA, 1410 nt, Artificial Sequence; identical to SEQ ID NO: 179183
  derived and/or modified CDS sequence (opt4) from neuraminidase__InfluenzaA__ADK99121

SEQ ID NO: 179338 - RNA, 1410 nt, Artificial Sequence
  derived and/or modified CDS sequence (opt4) from neuraminidase__InfluenzaA__ADK99132
augaaccccaaccagaagaucaucaccaucggcagcgugagccugaccaucagcaccaucugcuucuucaugcagaucgccauccugaucaccaccgugacccugcacuucaagcaguacgaguucaacagcccccccaacaaccaggugaugcugugcgagcccaccaucaucgagagaaacaucaccgagaucguguaccugaccaacaccaccguggagaaggagaucugccccaagcuggccgaguacagaaacuggagcaagccccagugcgacaucaccggcuucgcccccuucagcaaggacaacagcaucagacugagcgccggcggcgacaucugggugaccagagagcccuacgugagcugcgaccccgacaagugcuaccaguucgcccugggccagggcaccacccugaacaacgugcacagcaacaacaccgugagagacagaacccccuacagaacccugcugaugaacgagcugggcgugcccuuccaccugggcaccaagcaggugugcaucgccuggagcagcagcagcugccacgacggcaaggccuggcugcacgugugcaucaccggcgacgacaagaacgccaccgccagcuucaucuacaacggcagacugguggacagcguggugagcuggagcaaggagauccugagaacccaggagagcgagugcgugugcaucaacggcaccugcaccguggugaugaccgacggcagcgccagcggcaaggccgacaccaagauccuguucaucgaggagggcaagaucgugcacaccagcacccugagcggcagcgcccagcacguggaggagugcagcugcuaccccagauaccccggcgugagaugcgugugcagagacaacuggaagggcagcaacagacccaucguggacaucaacaucaaggaccacagcaucgugagcagcuaccugugcagcggccuggugggcgacacccccagaaagaacgacagcagcagcagcagccacugccuggaccccaacaacgaggagggcggccacggcgugaagggcugggccuucgacgacggcaacgacguguggaugggcagaaccaucagcgagaagagcagacugggcuacgagaccuucaaggugaucgagggcuggagcaaccccaagagcaagcugcagaucaacagacaggugaucguggacagaggcaacagaagcggcuacagcggcaucuucagcguggagggcaagagcugcaucaacagaugcuucuacguggagcugaucagaggcagaaaggaggagaccgaggugcuguggaccagcaacagcaucgugguguucugcggcaccagcggcaccuacggcaccggcagcuggcccgacggcgccgacaucaaccugaugcccaucuga

SEQ ID NO: 179339 - RNA, 1410 nt, Artificial Sequence; identical to SEQ ID NO: 179183
  derived and/or modified CDS sequence (opt4) from neuraminidase__InfluenzaA__ADK99143

SEQ ID NO: 179340 - RNA, 1410 nt, Artificial Sequence; identical to SEQ ID NO: 176659
  derived and/or modified CDS sequence (opt4) from neuraminidase__InfluenzaA__ADK99154

SEQ ID NO: 179341 - RNA, 1410 nt, Artificial Sequence
  derived and/or modified CDS sequence (opt4) from neuraminidase__InfluenzaA__ADK99176
augaaccccaaccagaagaucaucaccaucggcagcgugagccugaccaucagcaccaucugcuucuucaugcagaucgccauccuggugaccaccgugacccugcacuucaagcaguacgaguucaacagcccccccaacaaccaggugaugcugugcgagcccaccaucaucgagagaaacaucaccgagaucguguaccugaccaacaccaccaucgagaaggagaucugccugaagcuggccgaguacagaaacuggagcaagccccagugcgacaucaccggcuucgcccccuucagcaaggacaacagcaucagacugagcgccggcggcgacaucugggugaccagagagcccuacgugagcugcgaccccgacaagugcuaccaguucgcccugggccagggcaccacccugaacaacgugcacagcaacaacaccgugagagacagaacccccuacagaacccugcugaugaacgagcugggcgugcccuuccaccugggcaccaagcaggugugcaucgccuggagcagcagcagcugccacgacggcaaggccuggcugcacgugugcaucaccggcgacgacaagaacgccaccgccagcuucaucuacaacggcagacugguggacagcguggugagcuggagcaaggacauccugagaacccaggagagcgagugcgugugcaucaacggcaccugcaccguggugaugaccgacggcagcgccagcggcaaggccgacaccaagauccuguucaucgaggagggcaagaucgugcacaccagcacccugagcggcagcgcccagcacguggaggagugcagcugcuaccccagauaccccggcgugagaugcgugugcagagacaacuggaagggcagcaacagacccaucguggacaucaacaucaaggaccacagcaucgugagcagcuacgugugcagcggccuggugggcgacacccccagaaagaacgacagcagcagcagcagccacugccuggaccccaacaacgaggagggcggccacggcgugaagggcugggccuucgacgacggcaacgacguguggaugggcagaaccaucagcgagaagagcagacugggcuacgagaccuucaaggugaucgagggcuggagcaaccccaagagcaagcugcagaucaacagacaggugaucguggacagaggcaacagaagcggcuacagcggcaucuucagcguggagggcaagagcugcaucaacagaugcuucuacguggagcugaucagaggcagaaaggaggagaccgaggugcuguggaccagcaacagcaucgugguguucugcggcaccagcggcaccuacggcaccggcagcuggcccgacggcgccaacaucaaccugaugcccaucuga

SEQ ID NO: 179342 - RNA, 1410 nt, Artificial Sequence; identical to SEQ ID NO: 179333
  derived and/or modified CDS sequence (opt4) from neuraminidase__InfluenzaA__ADK99187

SEQ ID NO: 179343 - RNA, 1410 nt, Artificial Sequence; identical to SEQ ID NO: 178544
  derived and/or modified CDS sequence (opt4) from neuraminidase__InfluenzaA__ADK99198

SEQ ID NO: 179344 - RNA, 1410 nt, Artificial Sequence; identical to SEQ ID NO: 179183
  derived and/or modified CDS sequence (opt4) from neuraminidase__InfluenzaA__ADK99220

SEQ ID NO: 179345 - RNA, 1410 nt, Artificial Sequence
  derived and/or modified CDS sequence (opt4) from neuraminidase__InfluenzaA__ADK99231
augaaccccaaccagaagaucaucaccaucggcagcgugagccugaccaucagcaccaucugcuucuucaugcagaucgccauccugaucaccaccgugacccugcacuucaagcaguacgaguucaacagcccccccaacaaccaggugaugcugugcgagcccaccaucaucgagagaaacaucaccgagaucguguaccugaccaacaccaccaucgagaaggagaucugccccaagcuggccgaguacagaaacuggagcaagccccagugcgacaucaccggcuucgcccccuucagcaaggacaacagcaucagacugagcgccggcggcgacaucugggugaccagagagcccuacgugagcugcgaccccgacaacugcuaccaguucgcccugggccagggcaccacccugaacaacgugcacagcaacaacaccgugagagacagaacccccuacagaacccugcugaugaacgagcugggcgugcccuuccaccugggcaccaagcaggugugcaucgccuggagcagcagcagcugccacgacggcaaggccuggcugcacgugugcaucaccggcgacgacaagaacgccaccgccagcuucaucuacaacggcagacugguggacagcguggugagcuggagcaaggagauccugagaacccaggagagcgagugcgugugcaucaacggcaccugcaccguggugaugaccgacggcagcgccagcggcaaggccgacaccaagauccuguucaucgaggagggcaagaucgugcacaccagcacccugagcggcagcgcccagcacguggaggagugcagcugcuaccccagauaccccggcgugagaugcgugugcagagacaacuggaagggcagcaacagacccaucguggacaucaacaucaaggaccacagcaucgugagcagcuaccugugcagcggccuggugggcgacacccccagaaagaacgacagcagcagcagcagccacugccuggaccccaacaacgaggagggcggccacggcgugaagggcugggccuucgacgacggcaacgacguguggaugggcagaaccaucagcgagaagagcagacugggcuacgagaccuucaaggugaucgagggcuggagcaaccccaagagcaagcugcagaucaacagacaggugaucguggacagaggcaacagaagcggcuacagcggcaucuucagcguggagggcaagagcugcaucaacagaugcuucuacguggagcugaucagaggcagaaaggaggagaccgaggugcuguggaccagcaacagcaucgugguguucugcggcaccagcggcaccuacggcaccggcagcuggcccgacggcgccgacaucaaccugaugcccaucuga

SEQ ID NO: 179346 - RNA, 1410 nt, Artificial Sequence
  derived and/or modified CDS sequence (opt4) from neuraminidase__InfluenzaA__ADK99242
augaaccccaaccagaagaucaucaccaucggcagcgugagccugaccaucagcaccaucugcuucuucaugcagaucgccauccugaucaccaccgugacccugcacuucaagcaguacgaguucaacagcccccccaacaaccaggugaugcugugcgagcccaccaucaucgagagaaacaucaccgagaucguguaccugaccaacaccaccaucgagaaggagaucugccccaagcuggccgaguacagaaacuggagcaagccccagugcgacaucaccggcuucgcccccuucagcaaggacaacagcaucagacugagcgccggcggcgacaucugggugaccagagagcccuacgugagcugcgaccccgacaagugcuaccaguucgcccugggccagggcaccacccugaacaacgugcacagcaacaacaccgugagagacagaacccccuacagaacccugcugaugaacgagcugggcgugcccuuccaccugggcaccaagcaggugugcaucgccuggagcagcagcagcugccacgacggcaaggccuggcugcacgugugcaucaccggcgacgacaagaacgccaccgccagcuucaucuacaacggcagacugguggacagcguggugagcuggagcaaggacauccugagaacccaggagagcgagugcgugugcaucaacggcaccugcaccguggugaugaccgacggcagcgccagcggcaaggccgacaccaagauccuguucaucgaggagggcaagaucgugcacaccagcacccugagcggcagcgcccagcacguggaggagugcagcugcuaccccagauaccccggcgugagaugcgugugcagagacaacuggaagggcagcaacagacccaucguggacaucaacaucaaggaccacagcaucgugagcagcuacgugugcagcggccuggugggcgacacccccagaaagaacgacagcagcagcagcagccacugccuggaccccaacaacgaggagggcggccacggcgugaagggcugggccuucgacgacggcaacgacguguggaugggcagaaccaucagcgagaagagcagacugggcuacgagaccuucaaggugaucgagggcuggagcaaccccaagagcaagcugcagaucaacagacaggugaucguggacagaggcaacagaagcggcuacagcggcaucuucagcguggagggcaagagcugcaucaacagaugcuucuacguggagcugaucagaggcagaaaggaggagaccgaggugcuguggaccagcaacagcaucaucguguucugcggcaccagcggcaccuacggcaccggcagcuggcccgacggcgccgacaucaaccugaugcccaucuga

SEQ ID NO: 179347 - RNA, 1410 nt, Artificial Sequence
  derived and/or modified CDS sequence (opt4) from neuraminidase__InfluenzaA__ADK99253
augaaccccaaccagaagaucaucaccaucggcagcgugagccugaccaucagcaccaucugcuucuucaugcagaucgccauccugaucaccaccgugacccugcacuucaagcaguacgaguucaacagcccccccaacaaccaggugaugcugugcgagcccaccaucaucgagagaaacaucaccgagaucguguaccugaccaacaccaccaucgagaaggagaucugccccaagcuggccgaguacagaaacuggagcaagccccagugcgacaucaccggcuucgcccccuucagcaaggacaacagcaucagacugagcgccggcggcgacaucugggugaccagagagcccuacgugagcugcgaccccgacaagugcuaccaguucgcccugggccagggcaccacccugaacaacgugcacagcaacaacaccgugagagacagaacccccuacagaacccugcugaugaacgagcugggcgugcccuuccaccugggcaccaagcaggugugcaucgccuggagcagcagcagcugccacgacggcaaggccuggcugcacgugugcaucaccggcgacgacaagaacgccaccgccagcuucaucuacaacggcagacugguggacagcguggugagcuggagcaaggagauccugagaacccaggagagcgagugcgugugcaucaacggcaccugcaccguggugaugaccgacggcagcgccagcggcaaggccgacaccaagauccuguucaucgaggagggcaagaucgugcacaccagcacccugagcggcagcgcccagcacguggaggagugcagcugcuaccccagauaccccggcgugagaugcgugugcagagacaacuggaagggcagcaacagacccaucguggacaucaacaucaaggaccacagcaucgugagcagcuacgugugcagcggccuggugggcgacacccccagaaagaacgacagcagcagcagcagccacugccuggaccccaacaacgaggagggcggccacggcgugaagggcugggccuucgacgacggcaacgacguguggaugggcagaaccaucagcgagaagagcagacugggcuacgagaccuucaaggugaucgagggcuggagcaaccacaagagcaagcugcagaucaacagacaggugaucguggacagaggccacagaagcggcuacagcggcaucuucagcguggagggcaagagcugcaucaacagaugcuucuacguggagcugaucagaggcagaaaggaggagaccgaggugcuguggaccagcaacagcaucgugguguucugcggcaccagcggcaccuacggcaccggcagcuggcccgacggcgccgaccugacccugaugcccaucuga

SEQ ID NO: 179348 - RNA, 1410 nt, Artificial Sequence
  derived and/or modified CDS sequence (opt4) from neuraminidase__InfluenzaA__ADK99264
augaaccccaaccagaagaucaucaccaucggcagcgugagccugaccaucagcaccaucugcuucuucaugcagaucgccauccugaucaccaccgugacccugcacuucaagcaguacgaguucaacagcccccccaacaaccaggugaugcugugcgagcccaccaucaucgagagaaacaucaccgagaucguguaccugaccaacaccaccaucgagaaggagaucugccccaagcuggccgaguacagaaacuggagcaagccccagugcgacaucaccggcuucgcccccuucagcaaggacaacagcaucagacugagcgccggcggcgacaucugggugaccagagagcccuacgugagcugcgaccccgacaagugcuaccaguucgcccugggccagggcaccacccugaacaacgugcacagcaacaacaccgugagagacagaacccccuacagaacccugcugaugaacgagcugggcgugcccuuccaccugggcaccaagcaggugugcaucgccuggagcagcagcagcugccacgacggcaaggccuggcugcacgugugcaucaccggcgacgacaagaacgccaccgccagcuucaucuacaacggcagacugguggacagcguggugagcuggagcaaggagauccugagaacccaggagagcgagugcgugugcaucaacggcaccugcaccguggugaugaccgacggcagcgccagcggcaaggccgacaccaagauccuguucaucgaggagggcaagaucgugcacaccagcacccugagcggcagcgcccagcacguggaggagugcagcugcuaccccagauaccccggcgugagaugcgugugcagagacaacuggaagggcagcaacagacccaucguggacaucaacaucaaggaccacagcaucgugagcagcuaccugugcagcggccuggugggcgacacccccagaaagaacgacagcagcagcagcagccacugccuggaccccaacaacgaggagggcggccacggcgugaagggcugggccuucgacgacggcaacgacguguggaugggcagaaccaucagcgagaagagcagacugggcuacgagaccuucaaggugaucgagggcuggagcaaccccaagagcaagcugcacaucaacagacaggugaucguggacagaggcaacagaagcggcuacagcggcaucuucagcguggagggcaagagcugcaucaacagaugcuucuacguggagcugaucagaggcagaaaggaggagaccgaggugcuguggaccagcaacagcaucgugguguucugcggcaccagcggcaccuacggcaccggcagcuggcccgacggcgccgacaucaaccugaugcccaucuga

SEQ ID NO: 179349 - RNA, 1410 nt, Artificial Sequence
  derived and/or modified CDS sequence (opt4) from neuraminidase__InfluenzaA__ADK99275
augaaccccaaccagaagaucaucaccaucggcagcgugagccugaccaucagcaccaucugcuucuucaugcagaucgccgugcugaucaccaccgugacccugcacuucaagcaguacgaguucaacagcccccccaacaaccaggugaugcugugcgagcccaccaucaucgagagaaacaucaccgagaucguguaccugaccaacaccaccaucgagaaggagaucugccccaagcuggccggcuacagaaacuggagcaagccccagugcgacaucaccggcuucgcccccuucagcaaggacaacagcaucagacugagcgccggcggcgacaucugggugaccagagagcccuacgugagcugcgaccccgacaagugcuaccaguucgcccugggccagggcaccacccugaacaacgugcacagcaacgacaccgugagagacagaacccccuacagaacccugcugaugaacgagcugggcgugcccuuccaccugggcaccaagcaggugugcaucgccuggagcagcagcagcugccacgacggcaaggccuggcugcacgugugcaucaccggcgacgacaagaacgccaccgccagcuucaucuacaacggcagacugguggacagcguggugagcuggagcaaggagauccugagaacccaggagagcgagugcgugugcaucaacggcaccugcaccguggugaugaccgacggcagcgccagcggcaaggccgacaccaagauccuguucaucgaggagggcaagaucgugcacaccagcacccugagcggcagcgcccagcacguggaggagugcagcugcuaccccagauaccccggcgugagaugcgugugcagagacaacuggaagggcagcaacagacccaucguggacaucaacaucaaggaccacagcaucgugagcagcuacgugugcagcggccuggugggcgacacccccagaaagaacgacagcagcagcagcagccacugccuggaccccaacaacgaggagggcggccacggcgugaagggcugggccuucgacgacggcaacgacguguggaugggcagaaccaucaacgagaccagcagacugggcuacgagaccuucaaggugaucgagggcuggagcaaccccaagagcaagcugcagaucaacagacaggugaucguggacagaggcaacagaagcggcuacagcggcaucuucagcguggagggcaagagcugcaucaacagaugcuucuacguggagcugaucagaggcagaaaggaggagaccgaggugcuguggaccagcaacagcaucgugguguucugcggcaccagcggcaccuacggcaccggcagcuggcccgacggcgccgaccugaaccugaugcccaucuga

SEQ ID NO: 179350 - RNA, 1410 nt, Artificial Sequence
  derived and/or modified CDS sequence (opt4) from neuraminidase__InfluenzaA__ADK99286
augaaccccaaccagaagaucaucaccaucggcagcgugagccugaccaucagcaccaucugcuucuucaugcagaucgccauccugaucaccaccgugacccugcacuucaagcaguacgaguucaaccccccccccaacaaccaggugacccccagagagcccaccaucaucgagagaaacaucaccgagaucguguaccugaccaacaccaccaucgagaaggagaucugccccaagcuggccgaguacagaaacuggagcaagccccagugcgacaucaccggcuucgcccccuucagcaaggacaacagcaucagacugagcgccggcggcgacaucugggugaccagagagcccuacgugagcugcgaccccgacaagugcuaccaguucgcccugggccagggcaccacccugaacaacauccacagcaacaacaccgugagagacagaacccccuacagaacccugcugaugaacgagcugggcgugcccuuccaccugggcaccaagcaggugugcaucgccuggagcagcagcagcugccacgacggcaaggccuggcugcacgugugcaucaccggcgacgacaagaacgccaccgccagcuucaucuacaacggcagacugguggacagcguggugagcuggagcaaggagauccugagaacccaggagagcgagugcgugugcaucaacggcaccugcaccguggugaugaccgacggcagcgccagcggcaaggccgacaccaagauccuguucaucgaggagggcaagaucgugcacaccagcacccugagcggcagcgcccagcacguggaggagugcagcugcuaccccagauaccccggcgugagaugcgugugcagagacaacuggaagggcagcaacagacccaucguggacaucaacaucaaggaccacagcaucgugagcagcuacgugugcagcggccuggugggcgacacccccagaaagaacgacagcagcagcagcagccacugccuggaccccaacaacgaggagggcggccacggcgugaagggcugggccuucgacgacggcaacgacguguggaugggcagaaccaucagcgagaagagcagacugggcuacgagaccuucaaggugaucgagggcuggagcaaccccaagagcaagcugcagaucaacagacaggugaucguggacagaggcaacagaagcggcuacagcggcaucuucagcguggagggcaagagcugcaucaacagaugcuucuacguggagcugaucagaggcagaaaggaggagaccgaggugcuguggaccagcaacagcaucgugguguucugcggcaccagcggcaccuacggcaccggcagcuggcccgacggcgccgacaucaaccugaugcccaucuga

SEQ ID NO: 179351 - RNA, 1410 nt, Artificial Sequence; identical to SEQ ID NO: 177652
  derived and/or modified CDS sequence (opt4) from neuraminidase__InfluenzaA__ADK99297

SEQ ID NO: 179352 - RNA, 1410 nt, Artificial Sequence
  derived and/or modified CDS sequence (opt4) from neuraminidase__InfluenzaA__ADK99308
augaaccccaaccagaagaucaucaccaucggcagcgugagccugaccaucagcaccaucugcuucuucaugcagaucgccauccuggugaccaccgugacccugcacuucaagcaguacgaguucaacagcccccccaacaaccaggugaugcugugcgagcccaccaucaucgagagaaacaucaccgagaucguguaccugaccaacaccaccaucgagaaggagaucugccccaagcuggccgaguacagaaacuggagcaagccccagugcgacaucaccggcuucgcccccuucagcaaggacaacagcaucagacugagcgccggcggcgacaucugggugaccagagagcccuacgugagcugcgaccccgacaagugcuaccaguucgcccugggccagggcaccacccugaacaacgugcacagcaacaacaccgugagagacagaacccccuacagaacccugcugaugaacgagcugggcauccccuuccaccugggcaccaagcaggugugcaucgccuggagcagcagcagcugccacgacggcaaggccuggcugcacgugugcaucaccggcgacgacaagaacgccaccgccagcuucaucuacaacggcagacugguggacagcguggugagcuggagcaaggacauccugagaacccaggagagcgagugcgugugcaucaacggcaccugcaccguggugaugaccgacggcagcgccagcggcaaggccgacaccaagauccuguucaucgaggagggcaagaucgugcacaccagcacccugagcggcagcgcccagcacguggaggagugcagcugcuaccccagauaccccggcgugagaugcgugugcagagacaacuggaagggcagcaacagacccaucguggacaucaacaucaaggaccacagcaucgugagcagcuacgugugcagcggccuggugggcgacacccccagaaagaacgacagcagcagcagcagccacugccuggaccccaacaacgaggagggcggccacggcgugaagggcugggccuucgacgacggcaacgacguguggaugggcagaaccaucagcgagaagagcagacugggcuacgagaccuucaaggugaucgagggcuggagcaaccccaagagcaagcugcagaucaacagacaggugaucguggacagaggcaacagaagcggcuacagcggcaucuucagcguggagggcaagagcugcaucaacagaugcuucuacguggagcugaucagaggcagaaaggaggagaccgaggugcuguggaccagcaacagcaucgugguguucugcggcaccagcggcaccuacggcaccggcagcuggcccgacggcgccaacaucaaccugaugcccaucuga

SEQ ID NO: 179353 - RNA, 1413 nt, Artificial Sequence; identical to SEQ ID NO: 177521
  derived and/or modified CDS sequence (opt4) from neuraminidase__InfluenzaA__ADL14590

SEQ ID NO: 179354 - RNA, 1410 nt, Artificial Sequence; identical to SEQ ID NO: 178544
  derived and/or modified CDS sequence (opt4) from neuraminidase__InfluenzaA__ADL27992

SEQ ID NO: 179355 - RNA, 1410 nt, Artificial Sequence; identical to SEQ ID NO: 179183
  derived and/or modified CDS sequence (opt4) from neuraminidase__InfluenzaA__ADL28003

SEQ ID NO: 179356 - RNA, 1410 nt, Artificial Sequence; identical to SEQ ID NO: 179328
  derived and/or modified CDS sequence (opt4) from neuraminidase__InfluenzaA__ADL28014

SEQ ID NO: 179357 - RNA, 1410 nt, Artificial Sequence
  derived and/or modified CDS sequence (opt4) from neuraminidase__InfluenzaA__ADL28025
augaaccccaaccagaagaucaucaccaucggcagcgugagccugaccaucagcaccaucugcuucuucaugcagaucgccauccugaucaccaccgugacccugcacuucaagcaguacgaguucaacagcccccccaacaaccaggugaugcugugcgagcccaccaucaucgagagaaacaucaccgagaucguguaccugaccaacaccaccaucgagaagaagaucugccccaagcuggccgaguacagaaacuggagcaagccccagugcgacaucaccggcuucgcccccuucagcaaggacaacagcaucagacugagcgccggcggcgacaucugggugaccagagagcccuacgugagcugcgaccccgacaagugcuaccaguucgcccugggccagggcaccacccugaacaacgugcacagcaacaacaccgugagagacagaacccccuacagaacccugcugaugaacgagcugggcgugcccuuccaccugggcaccaagcaggugugcaucgccuggagcagcagcagcugccacgacggcaaggccuggcugcacgugugcaucaccggcgacgacaagaacgccaccgccagcuucaucuacaacggcagacugguggacagcguggugagcuggagcaaggagauccugagaacccaggagagcgagugcgugugcaucaacggcaccugcaccguggugaugaccgacggcagcgccagcggcaaggccgacaccaagauccuguucaucgaggagggcaagaucgugcacaccagcacccugagcggcagcgcccagcacguggaggagugcagcugcuaccccagauaccccggcgugagaugcgugugcagagacaacuggaagggcagcaacagacccaucguggacaucaacaucaaggaccacagcaucgugagcagcuaccugugcagcggccuggugggcgacacccccagaaagaacgacagcagcagcagcagccacugccuggaccccaacaacgaggagggcggccacggcgugaagggcugggccuucgacgacggcaacgacguguggaugggcagaaccaucagcgagaagagcagacugggcuacgagaccuucaaggugaucgagggcuggagcaaccccaagagcaagcugcagaucaacagacaggugaucguggacagaggcaacagaagcggcuacagcggcaucuucagcguggagggcaagagcugcaucaacagaugcuucuacguggagcugaucagaggcagaaaggaggagaccgaggugcuguggaccagcaacagcaucgugguguucugcggcaccagcggcaccuacggcaccggcagcuggcccgacggcgccgacaucaaccugaugcccaucuga

SEQ ID NO: 179358 - RNA, 1410 nt, Artificial Sequence; identical to SEQ ID NO: 178544
  derived and/or modified CDS sequence (opt4) from neuraminidase__InfluenzaA__ADL28036

SEQ ID NO: 179359 - RNA, 1410 nt, Artificial Sequence; identical to SEQ ID NO: 176659
  derived and/or modified CDS sequence (opt4) from neuraminidase__InfluenzaA__ADL28047

SEQ ID NO: 179360 - RNA, 1410 nt, Artificial Sequence; identical to SEQ ID NO: 177965
  derived and/or modified CDS sequence (opt4) from neuraminidase__InfluenzaA__ADL28058

SEQ ID NO: 179361 - RNA, 1410 nt, Artificial Sequence; identical to SEQ ID NO: 179336
  derived and/or modified CDS sequence (opt4) from neuraminidase__InfluenzaA__ADL28069

SEQ ID NO: 179362 - RNA, 1410 nt, Artificial Sequence; identical to SEQ ID NO: 179183
  derived and/or modified CDS sequence (opt4) from neuraminidase__InfluenzaA__ADL28080

SEQ ID NO: 179363 - RNA, 1410 nt, Artificial Sequence; identical to SEQ ID NO: 178544
  derived and/or modified CDS sequence (opt4) from neuraminidase__InfluenzaA__ADL28091

SEQ ID NO: 179364 - RNA, 1410 nt, Artificial Sequence
  derived and/or modified CDS sequence (opt4) from neuraminidase__InfluenzaA__ADL28102
augaaccccaaccagaagaucaucaccaucggcagcgugagccugaccaucagcaccaucugcuucuucaugcagaucgccauccugaucaccaccgugacccugcacuucaagcaguacgaguucaacagcccccccaacaaccaggugaugcugugcgagcccaccaucaucgagagaaacaucaccgagaucguguaccugaccaacaccaccaucgagaaggagaucugccccaagcuggccgaguacagaaacuggagcaagccccagugcgacaucaccggcuucgcccccuucagcaaggacaacagcaucagacugagcgccggcggcgacaucugggugaccagagagcccuacgugagcugcgaccccgacaagugcuaccaguucgcccugggccagggcaccacccugaacaacgugcacagcaacaacaccgugagagacagaacccccuacagaacccugcugaugaacgagcugggcgugcccuuccaccugggcaccaagcaggugugcaucgccuggagcagcagcagcugccacgacggcaaggccuggcugcacgugugcaucaccggcgacgacaagaacgccaccgccagcuucaucuacaacggcagacugguggacagcguggugagcuggagcaaggacauccugagaacccaggagagcgagugcgugugcaucaacggcaccugcaccguggugaugaccgacggcagcgccagcggcaaggccgacaccaagauccuguucaucgaggagggcaagaucgugcacaccagcacccugagcggcagcgcccagcacguggaggagugcagcugcuaccccagauaccccggcgugagaugcgugugcagagacaacuggaagggcagcaacagacccaucguggacaucaacaucaaggaccacagcaucgugagcagcuacgugugcagcggccuggugggcgacacccccagaaagaacgacagcagcagcagcagccacugccuggaccccaacaacgaggagggcggccacggcgugaagggcugggccuucgacgacggcaacgacguguggaugggcagaaccaucagcgagaagagcagacugggcuacgagaccuucaaggugaucgagggcuggagcaaccccaagagcaagcugcagaucaacagacaggugaucguggacagaggcaacagaagcggcuacagcggcaucuucagcguggagggcaagagcugcaucaacagaugcuucuacguggagcugaucagaggcagaaaggaggagaccgaggugcuguggaccagcaacagcaucgugguguucugcggcaccagcggcaccuacggcaccggcagcuggcccgacggcgccgacaucaaccugaugcccaucuga

SEQ ID NO: 179365 - RNA, 1410 nt, Artificial Sequence; identical to SEQ ID NO: 176659
  derived and/or modified CDS sequence (opt4) from neuraminidase__InfluenzaA__ADL28113

SEQ ID NO: 179366 - RNA, 1410 nt, Artificial Sequence
  derived and/or modified CDS sequence (opt4) from neuraminidase__InfluenzaA__ADL28129
augaaccccaaccagaagaucaucaccaucggcagcgugagccugaccaucagcaccaucugcuucuucaugcagaucgccauccuggugaccaccgugacccugcacuucaagcaguacgaguucaacagcccccccaacaaccaggugaugcugugcgagcccaccaucaucgagagaaacaucaccgagaucguguaccugaccaacaccaccaucgagaaggagaucugccccaagcuggccgaguacagaaacuggagcaagccccagugcgacaucaccggcuucgcccccuucagcaaggacaacagcaucagacugagcgccggcggcgacaucugggugaccagagagcccuacgugagcugcgaccccgacaagugcuaccaguucgcccugggccagggcaccacccugaacaacgugcacagcaacaacaccgugagagacagaacccccuacagaacccugcugaugaacgagcugggcgugcccuuccaccugggcaccaagcaggugugcaucgccuggagcagcagcagcugccacgacggcaaggccuggcugcacgugugcaucaccggcgacgacaagaacgccaccgccagcuucaucuacaacggcagacugguggacagcguggugagcuggagcaaggacauccugagaacccaggagagcgagugcgugugcaucaacggcaccugcaccguggugaugaccgacggcagcgccagcggcaaggccgacaccaagauccuguucaucgaggagggcaagaucgugcacaccagcacccugagcggcagcgcccagcacguggaggagugcagcugcuaccccagauaccccggcgugagaugcgugugcagagacaacuggaagggcagcaacagacccaucguggacaucaacaucaaggaccacagcaucgugagcagcuacgugugcagcggccuggugggcgacacccccagaaagaacgacagcagcagcagcagccacugccuggaccccaacaacgaggagggcggccacggcgugaagggcugggccuucgacgacggcaacgacguguggaugggcagaaccaucagcgagaagagcagacugggcuacgagaccuucaaggugaucgagggcuggagcaaccccaagagcaagcugcagaucaacagacaggugaucguggacagaggcaacagaagcggcuacagcggcaucuucagcguggagggcaagagcugcaucaacagaugcuucuacguggagcugaucagaggcagaaaggaggagaccgagauccuguggaccagcaacagcaucgugguguucugcggcaccagcggcaccuacggcaccggcagcuggcccgacggcgccaacaucaaccugaugcccaucuga

SEQ ID NO: 179367 - RNA, 1410 nt, Artificial Sequence
  derived and/or modified CDS sequence (opt4) from neuraminidase__InfluenzaA__ADL28140
augaaccccaaccagaagaucaucaccaucggcagcgugagccugaccaucagcaccaucugcuucuucaugcagaucgccauccugaucaccaccgugacccugcacuucaagcaguacgaguucaacagcccccccaacaaccaggugaugcugugcgagcccaccaucaucgagagaaacaucaccgagaucguguaccugaccaacaccaccaucgagaaggagaucugccccaagcuggccgaguacagaaacuggagcaagccccagugcgacaucaccggcuucgcccccuucagcaaggacaacagcaucagacugagcgccggcggcgacaucugggugaccagagagcccuacgugagcugcgaccccgacaagugcuaccaguucgcccugggccagggcaccacccugaacaacgugcacagcaacaacaccgugagagacagaacccccuacagaacccugcugaugaacgagcugggcgugcccuuccaccugggcaccaagcaggugugcaucgccuggagcagcagcagcugccacgacggcaaggccuggcugcacgugugcaucaccggcgacgacaagaacgccaccgccagcuucaucuacaacggcaagcugguggacagcguggugagcuggagcaaggagauccugagaacccaggagagcgagugcgugugcaucaacggcaccugcaccguggugaugaccgacggcagcgccagcggcaaggccgacaccaagauccuguucaucgaggagggcaagaucgugcacaccagcacccugagcggcagcgcccagcacguggaggagugcagcugcuaccccagauaccccggcgugagaugcgugugcagagacaacuggaagggcagcaacagacccaucguggacaucaacaucaaggaccacagcaucgugagcagcuacgugugcagcggccuggugggcgacacccccagaaagaacgacagcagcagcagcagccacugccuggaccccaacaacgaggagggcggccacggcgugaagggcugggccuucgacgacggcaacgacguguggaugggcagaaccaucagcgagaagagcagacugggcuacgagaccuucaaggugaucgagggcuggagcaaccccaagagcaagcugcagaucaacagacaggugaucguggacagaggcaacagaagcggcuacagcggcaucuucagcguggagggcaagagcugcaucaacagaugcuucuacguggagcugaucagaggcagaaaggaggagaccgaggugcuguggaccagcaacagcaucgugguguucugcggcaccagcggcaccuacggcaccggcagcuggcccgacggcgccaacaucaaccugaugcccaucuga

SEQ ID NO: 179368 - RNA, 1410 nt, Artificial Sequence; identical to SEQ ID NO: 178544
  derived and/or modified CDS sequence (opt4) from neuraminidase__InfluenzaA__ADL28151

SEQ ID NO: 179369 - RNA, 1410 nt, Artificial Sequence; identical to SEQ ID NO: 177965
  derived and/or modified CDS sequence (opt4) from neuraminidase__InfluenzaA__ADL28162

SEQ ID NO: 179370 - RNA, 1410 nt, Artificial Sequence; identical to SEQ ID NO: 179183
  derived and/or modified CDS sequence (opt4) from neuraminidase__InfluenzaA__ADL28173

SEQ ID NO: 179371 - RNA, 1410 nt, Artificial Sequence; identical to SEQ ID NO: 178544
  derived and/or modified CDS sequence (opt4) from neuraminidase__InfluenzaA__ADL28184

SEQ ID NO: 179372 - RNA, 1410 nt, Artificial Sequence
  derived and/or modified CDS sequence (opt4) from neuraminidase__InfluenzaA__ADL28195
augaaccccaaccagaagaucaucaccaucggcagcgugagccugaccaucagcaccaucugcuucuucaugcagaucgccauccugaucaccaccgugacccugcacuucaagcaguacgaguucaacagcccccccaacaaccaggugaugcugugcgagcccaccaucaucgagagaaacaucaccgagaucguguaccugaccaacaccaccaucgagaaggagaucugccccaagcuggccgaguacagaaacuggagcaagccccagugcgacaucaccggcuucgcccccuucagcaaggacaacagcaucagacugagcgccggcggcgacaucugggugaccagagagcccuacgugagcugcgaccccgacaagugcuaccaguucgcccugggccagggcaccacccugaacaacgugcacagcaacaacaccgugagagacagaacccccuacagaacccugcugaugaacgagcugggcgugcccuuccaccugggcaccaagcaggugugcaucgccuggagcagcagcagcugccacgacggcaaggccuggcugcacgugugcaucaccggcgacgacaagaacgccaccgccagcuucaucuacaacggcagacugguggacagcguggugagcuggagcaaggagauccugagaacccaggagagcgagugcgugugcgugaacggcaccugcaccguggugaugaccgacggcagcgccagcggcaaggccgacaccaagauccuguucaucgaggagggcaagaucgugcacaccagcacccugagcggcagcgcccagcacguggaggagugcagcugcuaccccagauaccccggcgugagaugcgugugcagagacaacuggaagggcagcaacagacccaucguggacaucaacaucaaggaccacagcaucgugagcagcuacgugugcagcggccuggugggcgacacccccagaaagaacgacagcagcagcagcagccacugccuggaccccaacaacgaggagggcggccacggcgugaagggcugggccuucgacgacggcaacgacguguggaugggcagaaccaucagcgagaagagcagacugggcuacgagaccuucaaggugaucgagggcuggagcaaccccaagagcaagcugcagaucaacagacaggugaucguggacagaggcaacagaagcggcuacagcggcaucuucagcguggagggcaagagcugcaucaacagaugcuucuacguggagcugaucagaggcagaaaggaggagaccgaggugcuguggaccagcaacagcaucgugguguucugcggcaccagcggcaccuacggcaccggcagcuggcccgacggcgccgacaucaaccugaugcccaucuga

SEQ ID NO: 179373 - RNA, 1410 nt, Artificial Sequence; identical to SEQ ID NO: 179333
  derived and/or modified CDS sequence (opt4) from neuraminidase__InfluenzaA__ADL28206

SEQ ID NO: 179374 - RNA, 1410 nt, Artificial Sequence; identical to SEQ ID NO: 177652
  derived and/or modified CDS sequence (opt4) from neuraminidase__InfluenzaA__ADL28217

SEQ ID NO: 179375 - RNA, 1410 nt, Artificial Sequence; identical to SEQ ID NO: 178544
  derived and/or modified CDS sequence (opt4) from neuraminidase__InfluenzaA__ADL28228

SEQ ID NO: 179376 - RNA, 1410 nt, Artificial Sequence; identical to SEQ ID NO: 179183
  derived and/or modified CDS sequence (opt4) from neuraminidase__InfluenzaA__ADL28239

SEQ ID NO: 179377 - RNA, 1410 nt, Artificial Sequence; identical to SEQ ID NO: 177965
  derived and/or modified CDS sequence (opt4) from neuraminidase__InfluenzaA__ADL28250

SEQ ID NO: 179378 - RNA, 1410 nt, Artificial Sequence; identical to SEQ ID NO: 179183
  derived and/or modified CDS sequence (opt4) from neuraminidase__InfluenzaA__ADL28261

SEQ ID NO: 179379 - RNA, 1410 nt, Artificial Sequence; identical to SEQ ID NO: 178544
  derived and/or modified CDS sequence (opt4) from neuraminidase__InfluenzaA__ADL28373

SEQ ID NO: 179380 - RNA, 1410 nt, Artificial Sequence; identical to SEQ ID NO: 176663
  derived and/or modified CDS sequence (opt4) from neuraminidase__InfluenzaA__ADL28387

SEQ ID NO: 179381 - RNA, 1410 nt, Artificial Sequence
  derived and/or modified CDS sequence (opt4) from neuraminidase__InfluenzaA__ADL28391
augaaccccaaccagaagaucaucaccaucggcagcgugagccugaccaucagcaccaucugcuucuucaugcagaucgccauccugaucaccaccgugacccugcacuucaagcaguacgaguucaacagcagccccaacaaccaggugaugcugugcgagcccaccaucaucgagagaaacaucaccgagaucguguaccugaccaacaccaccaucgagaaggagaucugccccaagcuggccgaguacagaaacuggagcaagccccagugcgacaucaccggcuucgcccccuucagcaaggacaacagcaucagacugagcgccggcggcgacaucugggugaccagagugcccuacgugagcugcgaccccgacaagugcuaccaguucgcccugggccagggcaccacccugaacaacgugcacagcaacaacaccgugagagacagaacccccuacagaacccugcugaugaacgagcugggcgugcccuuccaccugggcaccaagcaggugugcaucgccuggagcagcagcagcugccacgacggcaaggccuggcugcacgugugcaucaccggcgacgacaagaacgccaccgccagcuucaucuacaacggcagacugguggacagcaucgugagcuggagcaaggagauccugagaacccaggagagcgagugcgugugcaucaacggcaccugcaccguggugaugaccgacggcagcgccagcggcaaggccgacaccaagauccuguucaucgaggagggcaagaucgugcacaccagcacccugagcggcagcgcccagcacguggaggagugcagcugcuaccccagauaccccggcgugagaugcgugugcagagacaacuggaagggcagcaacagacccaucguggacaucaacaucaaggaccacagcaucgugagcagcuacgugugcagcggccuggugggcgacacccccagaaagaacgacagcagcagcagcagccacugccuggaccccaacaacgaggagggcggccacggcgugaagggcugggccuucgacgacggcaacgacguguggaugggcagaaccaucagcgagaagagcagacugggcuacgagaccuucaaggugaucgagggcuggagcaaccccaagagcaagcugcagaucaacagacaggugaucguggacagaggcaacagaagcggcuacagcggcaucuucagcguggagggcaagagcugcaucaacagaugcuucuacguggagcugaucagaggcagaaaggaggagaccgaggugcuguggaccagcaacagcaucgugguguucugcggcaccagcggcaccuacggcaccggcagcuggcccgacggcgccgacaucaaccugaugcccaucuga

SEQ ID NO: 179382 - RNA, 1410 nt, Artificial Sequence
  derived and/or modified CDS sequence (opt4) from neuraminidase__InfluenzaA__ADL28395
augaaccccaaccagaagaucaucaccaucggcagcgugagccugaccaucgccaccaucugcuuccugaugcagaucgccauccuggugaccaccgugacccugcacuucaagcaguacgagugcaacagcccccccaacaaccaggugaugcugugcgagcccgccaucaucgagagaaacaucaccgagaucguguaccugaccaacaccaccaucgagaaggagaucugccccaagcuggccgaguacagaaacuggagcaagccccagugcaacaucaccggcuucgcccccuucagcaaggacaacagcaucagacugagcgccggcggcgacaucugggugaccagagugcccuacgugagcugcgaccccgacaagugcuaccaguucgcccugggccagggcaccacccugaacaacggccacagcaacgacaccgugcacgacagaacccccuacagaacccugcugaugaacgagcugggcgugcccuuccaccugggcaccagacaggugugcaucgccuggagcagcagcagcugccacgacggcaaggccuggcugcacgugugcgugaccggcgacgacgagaacgccaccgccagcuucaucuacaacggcagacugguggacagcaucggcagcuggagcaagaagauccugagaacccaggagagcgagugcgugugcaucaacggcaccugcaccguggugaugaccgacggcagcgccagcggcaaggccgacaccaagauccuguucaucgaggagggcaagaucgugaacaucagcacccugagcggcagcgcccagcacguggaggagugcagcugcuaccccagauaccccggcgugagaugcgugugcagagacaacuggaagggcagcaacagacccaucguggacaucaacgugaaggacuacagcaucgugagcagcuacgugugcagcggccuggugggcgacacccccagaaagaacgacagcuucagcagcagccacugccuggaccccaacaacgaggagggcggccacggcgugaagggcugggccuucgacgacggcaacgacguguggaugggcagaaccaucagcgagaaguucagaagcggcuacgagaccuucaaggugaucgagggcuggagcaagcccaacagcaagcugcagaucaacagacaggugaucguggagagaggcaacagaagcggcuacagcggcaucuucagcguggagggcaagagcugcaucaacagaugcuucuacguggagcugaucagaggcagaaaggaggagaccgaggugugguggaccagcaacagcaucgugguguucugcggcaccagcggcaccuacggcaccggcagcuggcccgacggcgccgacaucaaccugaugcccaucuga

SEQ ID NO: 179383 - RNA, 1410 nt, Artificial Sequence; identical to SEQ ID NO: 176798
  derived and/or modified CDS sequence (opt4) from neuraminidase__InfluenzaA__ADL29675

SEQ ID NO: 179384 - RNA, 1410 nt, Artificial Sequence; identical to SEQ ID NO: 176798
  derived and/or modified CDS sequence (opt4) from neuraminidase__InfluenzaA__ADL29685

SEQ ID NO: 179385 - RNA, 1410 nt, Artificial Sequence
  derived and/or modified CDS sequence (opt4) from neuraminidase__InfluenzaA__ADL29695
augaaccccaaccagaagaucaucaccaucggcagcgugugcaugaccaucggcauggccaaccugauccugcagaucggcaacaucaucagcaucuggaucagccacagcauccagcugggcaaccagaaccagaucgagaccugcaaccagagcgugaucaccuacgagaacaacaccugggugaaccagaccuacgugaacaucagcaacaccaacuucgccgccggccagagcguggugagcgugaagcuggccggcaacagcagccugugccccgugagcggcugggccaucuacagcaaggacaacagcaucagaaucggcagcaagggcgacguguucgugaucagagagcccuucaucagcugcagcccccuggagugcagaaccuucuuccugacccagggcgcccugcugaacgacaagcacagcaacggcaccaucaaggacagaagccccuacagaacccugaugagcugccccaucggcgaggugcccagccccuacaacagcagauucgagagcguggccuggagcgccagcgccugccacgacggcaucaacuggcugaccaucggcaucagcggccccgacaacggcgccguggccgugcugaaguacaacggcaucaucaccgacaccaucaagagcuggagaaacaacauccugagaacccaggagagcgagugcgccugcgugaacggcagcugcuucaccgugaugaccgacggccccagcgacggccaggccagcuacaagaucuucagaaucgagaagggcaagaucgugaagagcguggagaugaacgcccccaacuaccacuacgaggagugcagcugcuaccccgacagcagcgagaucaccugcgugugcagagacaacuggcacggcagcaacagacccugggugagcuucaaccagaaccuggaguaccagaucggcuacaucugcagcggcaucuucggcgacaaccccagacccaacgacaagaccggcagcugcggccccgugagcagcaacggcgccaacggcgugaagggcuucagcuucaaguacggcaacggcguguggaucggcagaaccaagagcaucagcagcagaaacggcuucgagaugaucugggaccccaacggcuggaccggcaccgacaacaacuucagcaucaagcaggacaucgugggcaucaacgaguggagcggcuacagcggcagcuucgugcagcaccccgagcugaccggccuggacugcaucagacccugcuucuggguggagcugaucagaggcagacccaaggagaacaccaucuggaccagcggcagcagcaucagcuucugcggcgugaacagcgacaucgugggcuggagcuggcccgacggcgccgagcugcccuucaccaucgacaaguga

SEQ ID NO: 179386 - RNA, 1410 nt, Artificial Sequence; identical to SEQ ID NO: 176798
  derived and/or modified CDS sequence (opt4) from neuraminidase__InfluenzaA__ADL29705

SEQ ID NO: 179387 - RNA, 1410 nt, Artificial Sequence; identical to SEQ ID NO: 179385
  derived and/or modified CDS sequence (opt4) from neuraminidase__InfluenzaA__ADL29733

SEQ ID NO: 179388 - RNA, 1410 nt, Artificial Sequence; identical to SEQ ID NO: 176798
  derived and/or modified CDS sequence (opt4) from neuraminidase__InfluenzaA__ADL29743

SEQ ID NO: 179389 - RNA, 1410 nt, Artificial Sequence
  derived and/or modified CDS sequence (opt4) from neuraminidase__InfluenzaA__ADL29753
augaaccccaaccagaagaucaucaccaucggcagcgugugcauggccaucggcauggccaaccugauccugcagaucggcaacaucaucagcaucuggaucagccacagcauccagcugggcaaccagaaccagaucgagaccugcaaccagagcgugaucaccuacgagaacaacaccugggugaaccagaccuacgugaacaucagcaacaccaacuucgccgccggccagagcguggugagcgugaagcuggccggcaacagcagccugugccccgugagcggcugggccaucuacagcaaggacaacagcaucagaaucggcagcaagggcgacguguucgugaucagagagcccuucaucagcugcagcccccuggagugcagaaccuucuuccugacccagggcgcccugcugaacgacaagcacagcaacggcaccaucaaggacagaagccccuacagaacccugaugagcugccccaucggcgaggugcccagccccuacaacagcagauucgagagcguggccuggagcgccagcgccugccacgacggcaucaacuggcugaccaucggcaucagcggccccgacaacggcgccguggccgugcugaaguacaacggcaucaucaccgacaccaucaagagcuggagaaacaacauccugagaacccaggagagcgagugcgccugcgugaacggcagcugcuucaccgugaugaccgacggccccagcgacggccaggccagcuacaagaucuucagaaucgagaagggcaagaucgugaagagcguggagaugaacgcccccaacuaccacuacgaggagugcagcugcuaccccgacagcagcgagaucaccugcgugugcagagacaacuggcacggcagcaacagacccugggugagcuucaaccagaaccuggaguaccagaucggcuacaucugcagcggcaucuucggcgacaaccccagacccaacgacaagaccggcagcugcggccccgugagcagcaacggcgccaacggcgugaagggcuucagcuucaaguacggcaacggcguguggaucggcagaaccaagagcaucagcagcagaaacggcuucgagaugaucugggaccccaacggcuggaccggcaccgacaacaacuucagcaucaagcaggacaucgugggcaucaacgaguggagcggcuacagcggcagcuucgugcagcaccccgagcugaccggccuggacugcaucagacccugcuucuggguggagcugaucagaggcagacccaaggagaacaccaucuggaccagcggcagcagcaucagcuucugcggcgugaacagcgacaucgugggcuggagcuggcccgacggcgccgagcugcccuucaccaucgacaaguga

SEQ ID NO: 179390 - RNA, 1410 nt, Artificial Sequence; identical to SEQ ID NO: 176798
  derived and/or modified CDS sequence (opt4) from neuraminidase__InfluenzaA__ADL29763

SEQ ID NO: 179391 - RNA, 1410 nt, Artificial Sequence; identical to SEQ ID NO: 179385
  derived and/or modified CDS sequence (opt4) from neuraminidase__InfluenzaA__ADL29773

SEQ ID NO: 179392 - RNA, 1410 nt, Artificial Sequence; identical to SEQ ID NO: 176798
  derived and/or modified CDS sequence (opt4) from neuraminidase__InfluenzaA__ADL29783

SEQ ID NO: 179393 - RNA, 1410 nt, Artificial Sequence; identical to SEQ ID NO: 179385
  derived and/or modified CDS sequence (opt4) from neuraminidase__InfluenzaA__ADL29882

SEQ ID NO: 179394 - RNA, 1410 nt, Artificial Sequence
  derived and/or modified CDS sequence (opt4) from neuraminidase__InfluenzaA__ADL32020
augaaccccaaccagaagaucaucaccaucggcagcgugugcaugaccaucggcauggccaaccugauccugcagaucggcaacaucaucagcaccuggaucagccacagcauccagcugggcaaccagaaccagaucgagaccugcaaccagagcgugaucaccuacgagaacaacaccugggugaaccagaccuacgugaacaucagcaacaccaacuucgccgccggccagagcguggugagcgugaagcuggccggcaacagcagccugugccccgugagcggcugggccaucuacagcaaggacaacagcaucagaaucggcagcaagggcgacguguucgugaucagagagcccuucaucagcugcagcccccuggagugcagaaccuucuuccugacccagggcgcccugcugaacgacaagcacagcaacggcaccaucaaggacagaagccccuacagaacccugaugagcugccccaucggcgaggugcccagccccuacaacagcagauucgagagcguggccuggagcgccagcgccugccacgacggcaucaacuggcugaccaucggcaucagcggccccgacaacggcgccguggccgugcugaaguacaacggcaucaucaccgacaccaucaagagcuggagaaacaacauccugagaacccaggagagcgagugcgccugcgugaacggcagcugcuucaccgugaugaccgacggccccagcgacggccaggccagcuacaagaucuucagaaucgagaagggcaagaucgugaagagcguggagaugaacgcccccaacuaccacuacgaggagugcagcugcuaccccgacagcagcgagaucaccugcgugugcagagacaacuggcacggcagcaacagacccugggugagcuucaaccagaaccuggaguaccagaucggcuacaucugcagcggcaucuucggcgacaaccccagacccaacgacaagaccggcagcugcggccccgugagcagcaacggcgccaacggcgugaagggcuucagcuucaaguacggcaacggcguguggaucggcagaaccaagagcaucagcagcagaaacggcuucgagaugaucugggaccccaacggcuggaccggcaccgacaacaacuucagcaucaagcaggacaucgugggcaucaacgaguggagcggcuacagcggcagcuucgugcagcaccccgagcugaccggccuggacugcaucagacccugcuucuggguggagcugaucagaggcagacccaaggagaacaccaucuggaccagcggcagcagcaucagcuucugcggcgugaacagcgacaccgugggcuggagcuggcccgacggcgccgagcugcccuucaccaucgacaaguga

SEQ ID NO: 179395 - RNA, 1410 nt, Artificial Sequence; identical to SEQ ID NO: 179385
  derived and/or modified CDS sequence (opt4) from neuraminidase__InfluenzaA__ADL32030

SEQ ID NO: 179396 - RNA, 1410 nt, Artificial Sequence; identical to SEQ ID NO: 176798
  derived and/or modified CDS sequence (opt4) from neuraminidase__InfluenzaA__ADL32040

SEQ ID NO: 179397 - RNA, 1410 nt, Artificial Sequence; identical to SEQ ID NO: 176798
  derived and/or modified CDS sequence (opt4) from neuraminidase__InfluenzaA__ADL32050

SEQ ID NO: 179398 - RNA, 1410 nt, Artificial Sequence; identical to SEQ ID NO: 176798
  derived and/or modified CDS sequence (opt4) from neuraminidase__InfluenzaA__ADL32060

SEQ ID NO: 179399 - RNA, 1410 nt, Artificial Sequence; identical to SEQ ID NO: 176798
  derived and/or modified CDS sequence (opt4) from neuraminidase__InfluenzaA__ADL32093

SEQ ID NO: 179400 - RNA, 1410 nt, Artificial Sequence; identical to SEQ ID NO: 176798
  derived and/or modified CDS sequence (opt4) from neuraminidase__InfluenzaA__ADL32117

SEQ ID NO: 179401 - RNA, 1410 nt, Artificial Sequence; identical to SEQ ID NO: 176798
  derived and/or modified CDS sequence (opt4) from neuraminidase__InfluenzaA__ADL32347

SEQ ID NO: 179402 - RNA, 1410 nt, Artificial Sequence
  derived and/or modified CDS sequence (opt4) from neuraminidase__InfluenzaA__ADL32357
augaaccccaaccagaagaucaucaccaucggcagcgugugcaugaccaucggcauggccaaccugauccugcagaucggcaacaucaucagcaucuggaucagccacagcauccagcugggcaaccagaaccagaucgagaccugcaaccagagcgugaucaccuacgagaacaacaccugggugaaccagaccuacgugaacaucagcaacaccaacuucgccgccggccagagcguggugagcgugaagcuggccggcaacagcagccugugccccgugagcggcugggccaucuacagcaaggacaacagcaucagaaucggcagcaagggcgacguguucgugaucagagagcccuucaucagcugcagcccccuggagugcagaaccuucuuccugacccagggcgcccugcugaacgacaagcacagcaacggcaccaucaaggacagaagccccuacagaacccugaugagcugccccaucggcgaggugcccagccccuacaacagcagauucgagagcguggccuggagcgccagcgccugccacgacggcaucaacuggcugaccaucggcaucagcggccccgacaacggcgccguggccgugcugaaguacaacggcaucaucaccgacaccaucaagagcuggagaaacaacauccugagaacccaggagagcgagugcgccugcgugaacggcagcugcuucaccgugaugaccgacggccccagcgacggccaggccagcuacaagaucuucagaaucgagaagggcaagaucgugaagagcguggagaugaacgcccccaacuaccacuacgaggagugcagcugcuaccccgacagcagcgagaucaccugcgugugcagagacaacuggcacggcagcaacagacccugggugagcuucaaccagaaccuggaguaccagaucggcuacaucugcagcggcaucuucggcgacaaccccagacccaacgacaagaccggcagcugcggccccgugagcagcaacggcgccaacggcgugaagggcuucagcuucaaguacggcaacggcguguggaucggcagaaccaagagcaucagcagcagaaacggcuucgagaugaucugggaccccaacggcuggaccggcaccgacaacaacuucagcaucaagcaggacaucgugggcaucaacgaguggagcggcuacagcggcagcuucgugcagcaccccgagcugaccggccuggacugcaucagacccugcuucuggguggagcugaucagaggcagacccaaggagaacaccaucuggaccagcggcagcagcaucagcuucugcggcgugaacagcgacaccgugggcuggagcuggcccgacggcgccgagcugcccuucaccguggacaaguga

SEQ ID NO: 179403 - RNA, 1410 nt, Artificial Sequence; identical to SEQ ID NO: 176798
  derived and/or modified CDS sequence (opt4) from neuraminidase__InfluenzaA__ADL32367

SEQ ID NO: 179404 - RNA, 1410 nt, Artificial Sequence; identical to SEQ ID NO: 176798
  derived and/or modified CDS sequence (opt4) from neuraminidase__InfluenzaA__ADL32377

SEQ ID NO: 179405 - RNA, 1410 nt, Artificial Sequence; identical to SEQ ID NO: 176798
  derived and/or modified CDS sequence (opt4) from neuraminidase__InfluenzaA__ADL32387

SEQ ID NO: 179406 - RNA, 1410 nt, Artificial Sequence; identical to SEQ ID NO: 176798
  derived and/or modified CDS sequence (opt4) from neuraminidase__InfluenzaA__ADL32397

SEQ ID NO: 179407 - RNA, 1410 nt, Artificial Sequence; identical to SEQ ID NO: 176798
  derived and/or modified CDS sequence (opt4) from neuraminidase__InfluenzaA__ADL32407

SEQ ID NO: 179408 - RNA, 1410 nt, Artificial Sequence; identical to SEQ ID NO: 176798
  derived and/or modified CDS sequence (opt4) from neuraminidase__InfluenzaA__ADL32417

SEQ ID NO: 179409 - RNA, 1410 nt, Artificial Sequence
  derived and/or modified CDS sequence (opt4) from neuraminidase__InfluenzaA__ADL32427
augaaccccaaccagaagaucaucaccaucggcagcgugugcaugaccaucggcauggccaaccugauccugcagaucggcaacaucaucagcaucuggaucagccacagcauccagcugggcaaccagaaccagaucgagaccugcaaccagagcgugaucaccuacgagaacaacaccugggugaaccagaccuacgugaacaucagcaacaccaacuucgccgccggccagagcguggugagcgugaagcuggccggcaacagcagccugugccccgugagcggcugggccaucuacagcaaggacaacagcaucagaaucggcagcaagggcgacguguucgugaucagagagcccuucaucagcugcagcccccuggagugcagaaccuucuuccugacccagggcgcccugcugaacgacaagcacagcaacggcaccaucaaggacagaagccccuacagaacccugaugagcugccccaucggcgaggugcccagccccuacaacagcagauucgagagcguggccuggagcgccagcgccugccacgacggcaucaacuggcugaccaucggcaucagcggccccgacaacggcgccguggccgugcugaaguacaacggcaucaucaccgacaccaucaagagcuggagaaacaacauccugagaacccaggagagcgagugcgccugcgugaacggcagcugcuucaccgugaugaccgacggccccagcgacggccaggccagcuacaagaucuucagaaucgagaagggcaagaucgugaagagcguggagaugaacgcccccaacuaccacuacgaggagugcagcugcuaccccgacagcagcgagaucaccugcgugugcagagacaacuggcacggcagcaacagacccugggugagcuucaaccagaaccuggaguaccagaucggcuacaucugcagcggcaucuucggcgacaaccccagacccaacgacaagaccggcagcugcggccccgugagcagcaacggcgccaacggcgugaagggcuucagcuucaaguacggcaacggcguguggaucggcagaaccaagagcaucagcagcagaaacggcuucgagaugaucugggaccccaacggcuggaccggcaccgacaacaacuucagcaucaagcaggacaucgugggcaucaacgaguggagcggcuacagcggcagcuucgugcagcaccccgagcugaccggccuggacugcaucagacccugcuucuggguggagcugaucagaggcagacccaaggagaagaccaucuggaccagcggcagcaucaucagcuucugcggcgugaacagcgacaccgugggcuggagcuggcccgacggcgccgagcugcccuucaccaucgacaaguga

SEQ ID NO: 179410 - RNA, 1410 nt, Artificial Sequence; identical to SEQ ID NO: 176798
  derived and/or modified CDS sequence (opt4) from neuraminidase__InfluenzaA__ADL32447

SEQ ID NO: 179411 - RNA, 1410 nt, Artificial Sequence
  derived and/or modified CDS sequence (opt4) from neuraminidase__InfluenzaA__ADL32457
augaaccccaaccagaagaucaucaccaucggcagcgugugcaugaccaucggcauggccaaccugauccugcagaucggcaacaucaucagcaucuggaucagccacagcauccagcugggcaaccagaaccagaucgagaccugcaaccagagcgugaucaccuacgagaacaacaccugggugaaccagaccuacgugaacaucagcaacaccaacuucgccgccggccagagcguggugagcgugaagcuggccggcaacagcagccugugccccgugagcggcugggccaucuacagcaaggacaagagcaucagaaucggcagcaagggcgacguguucgugaucagagagcccuucaucagcugcagcccccuggagugcagaaccuucuuccugacccagggcgcccugcugaacgacaagcacagcaacggcaccaucaaggacagaagccccuacagaacccugaugagcugccccaucggcgaggugcccagccccuacaacagcagauucgagagcguggccuggagcgccagcgccugccacgacggcaucagcuggcugaccaucggcaucagcggccccgacaacggcgccguggccgugcugaaguacaacggcaucaucaccgacaccaucaagagcuggagaaacaacauccugagaacccaggagagcgagugcgccugcgugaacggcagcugcuucaccgugaugaccgacggccccagcgacggccaggccagcuacaagaucuucagaaucgagaagggcaagaucgugaagagcguggagaugaacgcccccaacuaccacuacgaggagugcagcugcuaccccgacagcagcgagaucaccugcgugugcagagacaacuggcacggcagcaacagacccugggugagcuucaaccagaaccuggaguaccagaucggcuacaucugcagcggcaucuucggcgacaaccccagacccaacgacaagaccggcagcugcggccccgugagcagcaacggcgccaacggcgugaagggcuucagcuucaaguacggcaacggcguguggaucggcagaaccaagagcaucagcagcagaaacggcuucgagaugaucugggaccccaacggcuggaccggcaccgacaacaacuucagcaucaagcaggacaucgugggcaucaacgaguggagcggcuacagcggcagcuucgugcagcaccccgagcugaccggccuggacugcaucagacccugcuucuggguggagcugaucagaggcagacccaaggagaacaccaucuggaccagcggcagcagcaucagcuucugcggcgugagcagcgacaccgugggcuggagcuggcccgacggcgccgagcugcccuucaccaucgacaaguga

SEQ ID NO: 179412 - RNA, 1410 nt, Artificial Sequence; identical to SEQ ID NO: 177975
  derived and/or modified CDS sequence (opt4) from neuraminidase__InfluenzaA__ADL32487

SEQ ID NO: 179413 - RNA, 1410 nt, Artificial Sequence; identical to SEQ ID NO: 176798
  derived and/or modified CDS sequence (opt4) from neuraminidase__InfluenzaA__ADL32497

SEQ ID NO: 179414 - RNA, 1410 nt, Artificial Sequence; identical to SEQ ID NO: 176798
  derived and/or modified CDS sequence (opt4) from neuraminidase__InfluenzaA__ADL32507

SEQ ID NO: 179415 - RNA, 1410 nt, Artificial Sequence; identical to SEQ ID NO: 178260
  derived and/or modified CDS sequence (opt4) from neuraminidase__InfluenzaA__ADL32517

SEQ ID NO: 179416 - RNA, 1410 nt, Artificial Sequence; identical to SEQ ID NO: 177975
  derived and/or modified CDS sequence (opt4) from neuraminidase__InfluenzaA__ADL32527

SEQ ID NO: 179417 - RNA, 1410 nt, Artificial Sequence; identical to SEQ ID NO: 176798
  derived and/or modified CDS sequence (opt4) from neuraminidase__InfluenzaA__ADL32537

SEQ ID NO: 179418 - RNA, 1410 nt, Artificial Sequence; identical to SEQ ID NO: 177685
  derived and/or modified CDS sequence (opt4) from neuraminidase__InfluenzaA__ADL32547

SEQ ID NO: 179419 - RNA, 1410 nt, Artificial Sequence; identical to SEQ ID NO: 178149
  derived and/or modified CDS sequence (opt4) from neuraminidase__InfluenzaA__ADL32673

SEQ ID NO: 179420 - RNA, 1410 nt, Artificial Sequence; identical to SEQ ID NO: 176798
  derived and/or modified CDS sequence (opt4) from neuraminidase__InfluenzaA__ADL32683

SEQ ID NO: 179421 - RNA, 1410 nt, Artificial Sequence; identical to SEQ ID NO: 176788
  derived and/or modified CDS sequence (opt4) from neuraminidase__InfluenzaA__ADL32693

SEQ ID NO: 179422 - RNA, 1410 nt, Artificial Sequence; identical to SEQ ID NO: 178021
  derived and/or modified CDS sequence (opt4) from neuraminidase__InfluenzaA__ADL32703

SEQ ID NO: 179423 - RNA, 1410 nt, Artificial Sequence; identical to SEQ ID NO: 176788
  derived and/or modified CDS sequence (opt4) from neuraminidase__InfluenzaA__ADL32713

SEQ ID NO: 179424 - RNA, 1410 nt, Artificial Sequence; identical to SEQ ID NO: 176798
  derived and/or modified CDS sequence (opt4) from neuraminidase__InfluenzaA__ADL32723

SEQ ID NO: 179425 - RNA, 1410 nt, Artificial Sequence; identical to SEQ ID NO: 178479
  derived and/or modified CDS sequence (opt4) from neuraminidase__InfluenzaA__ADL32733

SEQ ID NO: 179426 - RNA, 1410 nt, Artificial Sequence; identical to SEQ ID NO: 178479
  derived and/or modified CDS sequence (opt4) from neuraminidase__InfluenzaA__ADL32743

SEQ ID NO: 179427 - RNA, 1410 nt, Artificial Sequence
  derived and/or modified CDS sequence (opt4) from neuraminidase__InfluenzaA__ADL39139
augaaccccaaccagaagaucaucaccaucggcagcgugagccugaccaucagcaccaucugcuucuucaugcagaucgccauccugaucaccaccgugacccugcacuucaagcaguacgaguucaacagcccccccaacaaccaggugaugcugagcgagcccaccaucaucgagagaaacaucaccgagaucguguaccugaccaacaccaccaucgagaaggagaucugccccaagcuggccgaguacagaaacuggagcaagccccagugcgacaucaccggcuucgcccccuucagcaaggacaacagcaucagacugagcgccggcggcgacaucugggugaccagagagcccuacgugagcugcgaccccgacaagugcuaccaguucgcccugggccagggcaccacccugaacaacgugcacagcaacaacaccgugagagagagaacccccuacagaacccugcugaugaacgagcugggcgugcccuuccaccugggcaccaagcaggugugcaucgccuggagcagcagcagcugccacgacggcaaggccuggcugcacgugugcaucaccggcgacgacaagaacgccaccgccagcuucaucuacaacggcagacugguggacagcguggugagcuggagcaaggagauccugagaacccaggagagcgagugcgugugcaucaacggcaccugcaccguggugaugaccgacggcagcgccagcggcaaggccgacaccaagauccuguucaucgaggagggcaagaucgugcacaccagcacccugagcggcagcgcccagcacguggaggagugcagcugcuaccccagauaccccggcgugagaugcgugugcagagacaacuggaagggcagcaacagacccaucguggacaucaacaucaaggaccacagcaucgugagcagcuacgugugcagcggccuggugggcgacacccccagaaagaacgacagcagcagcagcagccacugccuggaccccaacaacgaggagggcggccacggcgugaagggcugggccuucgacgacggcaacgacguguggaugggcagaaccaucagcgagaagagcagacugggcuacgagaccuucaaggugaucgagggcuggagcaaccccaagagcaagcugcagaucaacagacaggugaucguggacagaggcaacagaagcggcuacagcggcaucuucagcguggagggcaagagcugcaucaacagaugcuucuacguggagcugaucagaggcagaaaggaggagaccgaggugcuguggaccagcaacagcaucgugguguucugcggcaccagcggcaccuacggcaccggcagcuggcccgacggcgccgacaucaaccugaugcccaucuga

SEQ ID NO: 179428 - RNA, 1413 nt, Artificial Sequence
  derived and/or modified CDS sequence (opt4) from neuraminidase__InfluenzaA__ADL39150
augaaccccaaccagaagaucaucaccaucggcagcaucagcaucgccaucggcaucaucagccugaugcugcagaucggcaacaucaucagcaucugggccagccacagcauccagaccggcagccagaacaacaccggcaucugcaaccagagaaucaucaccuacgagaacagcaccugggugaaccacaccuacgugaacaucaacaacaccaacgugguggccggcgaggacaagaccagcgugacccuggccggcaacagcagccugugcagcaucagcggcugggccaucuacaccaaggacaacagcaucagaaucggcagcaagggcgacguguucgugaucagagagcccuucaucagcugcagccaccuggagugcagaaccuucuuccugacccagggcgcccugcugaacgacaagcacagcaacggcaccgugaaggacagaagccccuacagagcccugaugagcugcccccugggcgaggcccccagccccuacaacagcaaguucgagagcguggccuggagcgccagcgccugccacgacggcaugggcuggcugaccaucggcaucagcggccccgacaacggcgccguggccgugcugaaguacaacggcaucaucaccgagaccaucaagagcuggaagaagcagauccugagaacccaggagagcgagugcgugugcaugaacggcagcugcuucaccaucaugaccgacggccccagcaacaaggccgccagcuacaagaucuucaagaucgagaagggcaaggugaccaagagcaucgagcugaacgcccccaacuucuacuacgaggagugcagcugcuaccccgacaccggcaucgugaugugcgugugcagagacaacuggcacggcagcaacagacccugggugagcuucaaccagaaccuggacuaccagaucggcuacaucugcagcggcguguucggcgacaaccccagacccgaggacggcgagggcagcugcaaccccgugaccguggacggcgccaacggcgugaagggcuucagcuacaaguacggcaacggcguguggaucggcagaaccaagagcaacagacugagaaagggcuucgagaugaucugggaccccaacggcuggaccaacaccgacagcgacuucagcgugaagcaggacgugguggccaucaccgacuggagcggcuacagcggcagcuucgugcagcaccccgagcugaccggccuggacugcaucagacccugcuucuggguggagcuggugagaggccugcccagagagaacaccaccaucuggaccagcggcagcagcaucagcuucugcggcgugaacagcgacaccgccaacuggagcuggcccgacggcgccgagcugcccuucaccaucgacaaguga

SEQ ID NO: 179429 - RNA, 1410 nt, Artificial Sequence
  derived and/or modified CDS sequence (opt4) from neuraminidase__InfluenzaA__ADL39172
augaaccccaaccagaagaucaucaccaucggcagcgugagccugaccaucagcaccaucugcuucuucaugcagaucgccauccugaucaccaccgugacccugcacuucaagcaguacgaguucaacagcccccccaacaaccaggugaugcugugcgagcccaccaucaucgagagaaacaucaccgagaucguguaccugaccaacaccaccaucgagaaggagaucugccccaagcuggccgaguacagaaacuggagcaagccccagugcgacaucaccggcuucgcccccuucagcaaggacaacagcaucagacugagcgccggcggcgacaucugggugaccagagagcccuacgugagcugcgaccccgacaagugcuaccaguucgcccugggccagggcaccacccugaacaacgugcacagcaacaacaccgugagagacagaacccccuacagaacccugcugaugaacgagcugggcgugcccuuccaccugggcaccaagcaggugugcaucgccuggagcagcagcagcugccacgacggcaaggccuggcugcacgugugcaucaccggcgacgacaagaacgccaccgccagcuucaucuacaacggcagacugguggacagcguggugagcuggagcaaggagauccugagaacccaggagagcgagugcgugugcaucaacggcaccugcaccguggugaugaccgacggcagcgccagcggcgaggccgacaccaagauccuguucaucgaggagggcaagaucgugcacaccagcacccugagcggcagcgcccagcacguggaggagugcagcugcuaccccagauaccccggcgugagaugcgugugcagagacaacuggaagggcagcaacagacccaucguggacaucaacaucaaggaccacagcaucgugagcagcuacgugugcagcggccuggugggcgacacccccagaaagaacgacagcagcagcagcagccacugccuggaccccaacaacgaggagggcggccacggcgugaagggcugggccuucgacgacggcaacgacguguggaugggcagaaccaucagcgagaagagcagacugggcuacgagaccuucaaggugaucgagggcuggagcaaccccaagagcaagcugcagaucaacagacaggugaucguggacagaggcaacagaagcggcuacagcggcaucuucagcguggagggcaagagcugcaucaacagaugcuucuacguggagcugaucagaggcagaaaggaggagaccgaggugcuguggaccagcaacagcaucgugguguucugcggcaccagcggcaccuacggcaccggcagcuggcccgacggcgccgacaucaaccugaugcccaucuga

SEQ ID NO: 179430 - RNA, 1410 nt, Artificial Sequence; identical to SEQ ID NO: 176659
  derived and/or modified CDS sequence (opt4) from neuraminidase__InfluenzaA__ADL39183

SEQ ID NO: 179431 - RNA, 1413 nt, Artificial Sequence; identical to SEQ ID NO: 178990
  derived and/or modified CDS sequence (opt4) from neuraminidase__InfluenzaA__ADL39194

SEQ ID NO: 179432 - RNA, 1410 nt, Artificial Sequence; identical to SEQ ID NO: 176659
  derived and/or modified CDS sequence (opt4) from neuraminidase__InfluenzaA__ADL39205

SEQ ID NO: 179433 - RNA, 1413 nt, Artificial Sequence; identical to SEQ ID NO: 177521
  derived and/or modified CDS sequence (opt4) from neuraminidase__InfluenzaA__ADL39227

SEQ ID NO: 179434 - RNA, 1413 nt, Artificial Sequence; identical to SEQ ID NO: 178990
  derived and/or modified CDS sequence (opt4) from neuraminidase__InfluenzaA__ADL39238

SEQ ID NO: 179435 - RNA, 1413 nt, Artificial Sequence; identical to SEQ ID NO: 178990
  derived and/or modified CDS sequence (opt4) from neuraminidase__InfluenzaA__ADL39249

SEQ ID NO: 179436 - RNA, 1413 nt, Artificial Sequence; identical to SEQ ID NO: 177521
  derived and/or modified CDS sequence (opt4) from neuraminidase__InfluenzaA__ADL39260

SEQ ID NO: 179437 - RNA, 1410 nt, Artificial Sequence
  derived and/or modified CDS sequence (opt4) from neuraminidase__InfluenzaA__ADL39282
augaaccccaaccagaagaucaucaccaucggcagcgugagccugaccaucagcaccaucugcuucuucaugcagaucgccauccugaucaccaccgugacccugcacuucaagcaguacgaguucaacagcccccccaacaaccaggugaugcugugcgagcccaccaucaucgagaagaacaucaccgagaucguguaccugaccaacaccaccaucgagaaggagaucugccccagacuggccgaguacagaaacuggagcaagccccagugcgacaucaccggcuucgcccccuucagcaaggacaacagcaucagacugagcgccggcggcgacaucugggugaccagagagcccuacgugagcugcgaccccgacaagugcuaccaguucgcccugggccagggcaccacccugaacaacgugcacagcaacaacaaggugagagacagaacccccuacagaacccugcugaugaacgagcugggcgugcccuuccaccugggcaccaagcaggugugcaucgccuggagcagcagcagcugccacgacggcaaggccuggcugcacgugugcaucaccggcgacgacaagaacgccaccgccagcuucaucuacaacggcagacugguggacagcguggugagcuggagcaaggagauccugagaacccaggagagcgagugcgugugcaucaacggcaccugcaccguggugaugaccgacggcagcgccagcggcaaggccgacaccaagauccuguucaucgaggagggcaagaucgugcacaccagcacccugagcggcagcgcccagcacguggaggagugcagcugcuaccccagauaccccggcgugagaugcgugugcagagacaacuggaagggcagcaacagacccaucguggacaucaacaucaaggaccacagcaucgugagcagcuacgugugcagcggccuggugggcgacacccccagaaagaacgacagcagcagcagcagccacugccuggaccccaacaacgaggagggcggccacggcgugaagggcugggccuucgacgacggcaacgacguguggaugggcagaaccaucagcgagaagagcagacugggcuacgagaccuucaaggugaucgagggcuggagcaaccccaagagcaagcugcagaucaacagacaggugaucguggacagaggcaacagaagcggcuacagcggcaucuucagcguggagggcaagagcugcaucaacagaugcuucuacguggagcugaucagaggcagaaaggaggagaccgaggugcuguggaccagcaacagcaucgugguguucugcggcaccagcggcaccuacggcaccggcagcuggcccgacggcgccgacaucaaccugaugcccaucuga

SEQ ID NO: 179438 - RNA, 1413 nt, Artificial Sequence; identical to SEQ ID NO: 177521
  derived and/or modified CDS sequence (opt4) from neuraminidase__InfluenzaA__ADL39293

SEQ ID NO: 179439 - RNA, 1410 nt, Artificial Sequence
  derived and/or modified CDS sequence (opt4) from neuraminidase__InfluenzaA__ADL39304
augaaccccaaccagaagaucaucaccaucggcagcgugagccugaccaucagcaccaucugcuucuucaugcagaucgccauccugaucaccaccgugacccugcacuucaagcaguacgaguucaacuucccccccaacaaccaggugaugcugugcgagcccaccaucaucgagagaaacaucaccgagaucguguaccugaccaacaccaccaucgagaaggagaucugccccaagcuggccgaguacagaaacuggagcaagccccagugcgacaucaccggcuucgcccccuucagcaaggacaacagcaucagacugagcgccggcggcgacaucugggugaccagagagcccuacgugagcugcgaccccgacaagugcuaccaguucgcccugggccagggcaccacccugaacaacgugcacagcaacaacaccgugagagacagaacccccuacagaacccugcugaugaacgagcugggcgugcccuuccaccugggcaccaagcaggugugcaucgccuggagcagcagcagcugccacgacggcaaggccuggcugcacgugugcaucaccggcgacgacaagaacgccaccgccagcuucaucuacaacggcagacugguggacagcguggugagcuggagcaaggagauccugagaacccaggagagcgagugcgugugcaucaacggcaccugcaccguggugaugaccgacggcagcgccagcggcaaggccgacaccaagauccuguucaucgaggagggcaagaucgugcacaccagcacccugagcggcagcgcccagcacguggaggagugcagcugcuaccccagauaccccggcgugagaugcgugugcagagacaacuggaagggcagcaacagacccaucguggacaucaacaucaaggaccacagcaucgugagcagcuacgugugcagcggccuggugggcgacacccccagaaagaacgacagcagcagcagcagccacugccuggaccccaacaacgaggagggcggccacggcgugaagggcugggccuucgacgacggcaacgacguguggaugggcagaaccaucagcgagaagagcagacugggcuacgagaccuucaaggugaucgagggcuggagcaaccccaagagcaagcugcagaucaacagacaggugaucguggacagaggcaacagaagcggcuacagcggcaucuucagcguggagggcaagagcugcaucaacagaugcuucuacguggagcugaucagaggcagaaaggaggagaccgaggugcuguggaccagcaacagcaucgugguguucugcggcaccagcggcaccuacggcaccggcagcuggcccgacggcgccgacaucaaccugaugcccaucuga

SEQ ID NO: 179440 - RNA, 1410 nt, Artificial Sequence; identical to SEQ ID NO: 176659
  derived and/or modified CDS sequence (opt4) from neuraminidase__InfluenzaA__ADL39326

SEQ ID NO: 179441 - RNA, 1413 nt, Artificial Sequence; identical to SEQ ID NO: 178990
  derived and/or modified CDS sequence (opt4) from neuraminidase__InfluenzaA__ADL39392

SEQ ID NO: 179442 - RNA, 1410 nt, Artificial Sequence
  derived and/or modified CDS sequence (opt4) from neuraminidase__InfluenzaA__ADL39403
augaaccccaaccagaagaucaucaccaucggcagcgugagccugaccaucagcaccaucugcuucuucaugcagaucgccauccugaucaccaccgugacccugcacuucaagcaguacgaguucaaccccccccccaacaaccaggugaugcugugcgagcccaccaucaucgagagaaacaucaccgagaucguguaccugaccaacaccaccaucgagaaggagaucugccccaagcuggccgaguacagaaacuggagcaagccccagugcgacaucaccggcuucgcccccuucagcaaggacaacagcaucagacugagcgccggcggcgacaucugggugaccagagagcccuacgugagcugcgaccccgacaagugcuaccaguucgcccugggccagggcaccacccugaacaacgugcacagcaacaacaccgugagagacagaacccccuacagaacccugcugaugaacgagcugggcgugcccuuccaccugggcaccaagcaggugugcaucgccuggagcagcagcagcugccacgacggcaaggccuggcugcacgugugcaucaccggcgacgacaagaacgccaccgccagcuucaucuacaacggcagacugguggacagcguggugagcuggagcaaggagauccugagaacccaggagagcgagugcgugugcaucaacggcaccugcaccguggugaugaccgacggcagcgccagcggcaaggccgacaccaagauccuguucaucgaggagggcaagaucgugcacaccagcacccugagcggcagcgcccagcacguggaggagugcagcugcuaccccagauaccccggcgugagaugcgugugcagagacaacuggaagggcagcaacagacccaucguggacaucaacaucaaggaccacagcaucgugagcagcuacgugugcagcggccuggugggcgacacccccagaaagaacgacagcagcagcagcagccacugccuggaccccaacaacgaggagggcggccacggcgugaagggcugggccuucgacgacggcaacgacguguggaugggcagaaccaucagcgagaagagcagacugggcuacgagaccuucaaggugaucgagggcuggagcaaccacaagagcaagcugcagaucaacagacaggugaucguggacagaggcaacagaagcggcuacagcggcaucuucagcguggagggcaagagcugcaucaacagaugcuucuacguggagcugaucagaggcagaaaggaggagaccgaggugcuguggaccagcaacagcaucgugguguucugcggcaccagcggcaccuacggcaccggcagcuggcccgacggcgccgaccugaaccugaugcccaucuga

SEQ ID NO: 179443 - RNA, 1413 nt, Artificial Sequence; identical to SEQ ID NO: 177521
  derived and/or modified CDS sequence (opt4) from neuraminidase__InfluenzaA__ADL39425

SEQ ID NO: 179444 - RNA, 1413 nt, Artificial Sequence
  derived and/or modified CDS sequence (opt4) from neuraminidase__InfluenzaA__ADL39447
augaaccccaaccagaagaucaucaccaucggcagcaucagcaucgccaucggcaucaucagccugaugcugcagaucggcagcaucaucagcaucugggccagccacagcauccagaccggcagccagaacaacaccggcaucugcaaccagagaaucaucaccuacgagaacagcaccugggugaaccacaccuacgugaacaucaacaacaccaacgugguggccggcgaggacaagaccagcgugacccugaccggcaacagcagccugugcagcaucagcggcugggccaucuacaccaaggacaacagcaucagaaucggcagcaagggcgacguguucgugaucagagagcccuucaucagcugcagccaccuggagugcagaaccuucuuccugacccagggcgcccugcugaacgacaagcacagcaacggcaccgugaaggacagaagccccuacagagcccugaugagcugcccccugggcgaggcccccagccccuacaacagcaaguucgagagcguggccuggagcgccagcgccugccacgacggcaugggcuggcugaccaucggcaucagcggccccgacaacggcgccguggccgugcugaaguacaacggcaucaucaccggcaccaucaagagcuggaagaagcagauccugagaacccaggagagcgagugcgugugcaugaacggcagcugcuucaccaucaugaccgacggccccagcaacaaggccgccagcuacaagaucuucaagaucgagaagggcaaggugaccaagagcaucgagcugaacgcccccaacuucuacuacgaggagugcagcugcuaccccgacaccggcaucgugaugugcgugugcagagacaacuggcacggcagcaacagacccugggugagcuucaaccagaaccuggacuaccagaucggcuacaucugcagcggcguguucggcgacaaccccagacccgaggacggcgagggcagcugcaaccccgugaccguggacggcgccaacggcgugaagggcuucagcuacaaguacggcaacggcguguggaucggcagaaccaagagcaacagacugagaaagggcuucgagaugaucugggaccccaacggcuggaccaacaccgacagcgacuucagcgugaagcaggacgugguggccaucaccgacuggagcggcuacagcggcagcuucgugcagcaccccgagcugaccggccuggacugcaucagacccugcuucuggguggagcuggugagaggccugcccagagagaacaccaccaucuggaccagcggcagcagcaucagcuucugcggcgugaacagcgacaccgccaacuggagcuggcccgacggcgccgagcugcccuucaccaucgacaaguga

SEQ ID NO: 179445 - RNA, 1413 nt, Artificial Sequence; identical to SEQ ID NO: 177521
  derived and/or modified CDS sequence (opt4) from neuraminidase__InfluenzaA__ADL39458

SEQ ID NO: 179446 - RNA, 1413 nt, Artificial Sequence
  derived and/or modified CDS sequence (opt4) from neuraminidase__InfluenzaA__ADL39469
augaaccccaaccagaagaucaucaccaucggcagcaucagcaucgccaucggcaucaucagccugaugcugcagaucggcagcaucaucagcaucugggccagccacagcauccagaccggcagccagaacaacaccggcaucugcaaccagagaaucaucaccuacgagaacagcaccugggugaaccacaccuacgugaacaucaacaacaccaacgugguggccggcgaggacaagaccagcgugacccuggccggcaacagcagccugugcagcaucagcggcugggccaucuacaccaaggacaacagcaucagaaucggcagcaagggcgacguguucgugaucagagagcccuucaucagcugcagccaccuggagugcagaaccuucuuccugacccagggcgcccugcugaacgacaagcacagcaacggcaccgugaaggacagaagccccuacagagcccugaugagcugcccccugggcgaggcccccagccccuacaacagcaaguucgagagcguggccuggagcgccagcgccugccacgacggcaugggcuggcugaccaucggcaucagcggccccgacaacggcgccguggccgugcugaaguacaacggcaucaucaccggcaccaucaagagcuggaagaagcagauccugagaacccaggagagcgagugcgugugcaugaacggcagcugcuucaccaucaugaccgacggccccagcaacaaggccgccagcuacaagaucuucaagaucgagaagggcaaggugaccaagagcaucgagcuggacgcccccaacuucuacuacgaggagugcagcugcuaccccgacaccggcaucgugaugugcgugugcagagacaacuggcacggcagcaacagacccugggugagcuucaaccagaaccuggacuaccagaucggcuacaucugcagcggcguguucggcgacaaccccagacccgaggacggcgagggcagcugcaaccccgugaccguggacggcgccaacggcgugaagggcuucagcuacaaguacggcaacggcguguggaucggcagaaccaagagcaacagacugagaaagggcuucgagaugaucugggaccccaacggcuggaccaacaccgacagcgacuucagcgugaagcaggacgugguggccaucaccgacuggagcggcuacagcggcagcuucgugcagcaccccgagcugaccggccuggacugcaucagacccugcuucuggguggagcuggugagaggccugcccagagagaacaccaccaucuggaccagcggcagcagcaucagcuucugcggcgugaacagcgacaccgccaacuggagcuggcccgacggcgccgagcugcccuucaccaucgacaaguga

SEQ ID NO: 179447 - RNA, 1413 nt, Artificial Sequence
  derived and/or modified CDS sequence (opt4) from neuraminidase__InfluenzaA__ADL39480
augaaccccaaccagaagaucaucaccaucggcagcaucagcaucgccaucggcaucaucagccugaugcugcagaucggcagcaucaucagcaucugggccagccacagcauccagaccggcagccagaacaacaccggcaucugcaaccagagaaucaucaccuacgagaacagcaccugggugaaccacaccuacgugaacaucaacaacaccaacgugguggccggcgaggacaagaccagcgugacccuggccggcaacagcagccugugcagcaucagcggcugggccaucuacaccaaggacaacagcaucagaaucggcagcaagggcgacguguucgugaucagagagcccuucaucagcugcagccaccuggagugcagaaccuucuuccugacccagggcgcccugcugaacgacaagcacagcaacggcaccgugaaggacagaagccccuacagagcccugaugagcugcccccugggcgaggcccccagccccuacaacagcaaguucgagagcguggccuggagcgccagcgccugccacgacggcaugggcuggcugaccaucggcaucagcggccccgacaacggcgccguggccgugcugaaguacaacggcaucaucaccggcaccaucaagagcuggaagaagcagauccugagaacccaggagagcgagugcgugugcaugaacggcagcugcuucaccaucaugaccgacggccccagcaacaaggccgccagcuacaagaucuucaagaucgagaagggcaaggugaccaagagcaucgagcugaacgcccccaacuucuacuacgaggagugcagcugcuaccccgacaccggcaucgugaugugcgugugcagagacaacuggcacggcagcaacagacccugggugagcuucaaccagaaccuggacuaccagaucggcuacaucugcagcggcguguucggcgacaaccccagacccgaggacggcgagggcagcugcaaccccgugaccguggacggcgccaacggcgugaagggcuucagcuacaaguacggcaacggcguguggaucggcagaaccaagagcaacagacugagaaagggcuucgagauggugugggaccccaacggcuggaccaacaccgacagcgacuucagcgugaagcaggacgugguggccaucaccgacuggagcggcuacagcggcagcuucgugcagcaccccgagcugaccggccuggacugcaucagacccugcuucuggguggagcuggugagaggccugcccagagagaacaccaccaucuggaccagcggcagcagcaucagcuucugcggcgugaacagcgacaccgccaacuggagcuggcccgacggcgccgagcugcccuucaccaucgacaaguga

SEQ ID NO: 179448 - RNA, 1410 nt, Artificial Sequence
  derived and/or modified CDS sequence (opt4) from neuraminidase__InfluenzaA__ADL39491
augaaccccaaccagaagaucaucaccaucggcagcgugagccugaccaucagcaccaucugcuucuucaugcagaucgccauccugaucaccaccgugacccugcacuucaagcaguacgaguucaacagcagccccaacaaccaggugaugcugugcgagcccaccaucaucgagagaaacaucaccgagaucguguaccugaccaacaccaccaucgagaaggagaucugccccaagcuggccgaguacagaaacuggagcaagccccagugcgacaucaccggcuucgcccccuucagcaaggacaacagcaucagacugagcgccggcggcgacaucugggugaccagagagcccuacgugagcugcgaccccgacaagugcuaccaguucgcccugggccagggcaccacccugaacaacgugcacagcaacaacaucgugagagacagaacccccuacagaacccugcugaugaacgagcugggcgugcccuuccaccugggcaccaagcaggugugcaucgccuggagcagcagcagcugccacgacggcaaggccuggcugcacgugugcaucaccggcgacgacaagaacgccaccgccagcuucaucuacaacggcagacugguggacagcaucgugagcuggagcaaggagauccugagaacccaggagagcgagugcgugugcaucaacggcaccugcaccguggugaugaccgacggcagcgccagcggcaaggccgacaccaagauccuguucaucgaggagggcaagaucgugcacaccagcacccugagcggcagcgcccagcacguggaggagugcagcugcuaccccagauaccccggcgugagaugcgugugcagagacaacuggaagggcagcaacagacccaucguggacaucaacaucaaggaccacagcaucgugagcagcuacgugugcagcggccuggugggcgacacccccagaaagaacgacagcagcagcagcagccacugccuggaccccaacaacgaggagggcggccacggcgugaagggcugggccuucgacgacggcaacgacguguggaugggcagaaccaucagcgagaagagcagacugggcuacgagaccuucaaggugaucgagggcuggagcaaccccaagagcaagcugcagaucaacagacaggugaucguggacagaggcaacagaagcggcuacagcggcaucuucagcguggagggcaagagcugcaucaacagaugcuucuacguggagcugaucagaggcagaaaggaggagaccgaggugcuguggaccagcagcagcaucgugguguucugcggcaccagcggcaccuacggcaccggcagcuggcccgacggcgccgacaucaaccugaugcccaucuga

SEQ ID NO: 179449 - RNA, 1410 nt, Artificial Sequence; identical to SEQ ID NO: 176798
  derived and/or modified CDS sequence (opt4) from neuraminidase__InfluenzaA__ADL41165

SEQ ID NO: 179450 - RNA, 1410 nt, Artificial Sequence
  derived and/or modified CDS sequence (opt4) from neuraminidase__InfluenzaA__ADL41175
augaaccccaaccagaagaucaucaccaucggcagcgugugcaugaccaucggcauggccaaccugauccugcagaucggcaacaucaucagcaccuggaucagccacagcauccagcugggcaaccagaaccagaucgagaccugcaaccagagcgugaucaccuacgagaacaacaccugggugaaccagaccuacgugaacaucagcaacaccaacuucgccgccggccagagcguggugagcgugaagcuggccggcaacagcagccugugccccgugagcggcugggccaucuacagcaaggacaacagcgugagaaucggcagcaagggcgacguguucgugaucagagagcccuucaucagcugcagcccccuggagugcagaaccuucuuccugacccagggcgcccugcugaacgacaagcacagcaacggcaccaucaaggacagaagccccuacagaacccugaugagcugccccaucggcgaggugcccagccccuacaacagcagauucgagagcguggccuggagcgccagcgccugccacgacggcaucaacuggcugaccaucggcaucagcggccccgacaacggcgccguggccgugcugaaguacaacggcaucaucaccgacaccaucaagagcuggagaaacaacauccugagaacccaggagagcgagugcgccugcgugaacggcagcugcuucaccgugaugaccgacggccccagcaacggccaggccagcuacaagaucuucagaaucgagaagggcaagaucgugaagagcguggagaugaacgcccccaacuaccacuacgaggagugcagcugcuaccccgacagcagcgagaucaccugcgugugcagagacaacuggcacggcagcaacagacccugggugagcuucaaccagaaccuggaguaccagaucggcuacaucugcagcggcaucuucggcgacaaccccagacccaacgacaagaccggcagcugcggccccgugagcagcaacggcgccaacggcgugaagggcuucagcuucaaguacggcaacggcguguggaucggcagaaccaagagcaucagcagcagaaacggcuucgagaugaucugggaccccaacggcuggaccggcaccgacaacaacuucagcaucaagcaggacaucgugggcaucaacgaguggagcggcuacagcggcagcuucgugcagcaccccgagcugaccggccuggacugcaucagacccugcuucuggguggagcugaucagaggcagacccaaggagaacaccaucuggaccagcggcagcagcaucagcuucugcggcgugaacagcgacaccgugggcuggagcuggcccgacggcgccgagcugcccuucaccaucgacaaguga

SEQ ID NO: 179451 - RNA, 1413 nt, Artificial Sequence
  derived and/or modified CDS sequence (opt4) from neuraminidase__InfluenzaA__ADL60255
augaaccccaaccagaagaucaucaccaucggcagcaucagcaucgccaucggcaucaucagccugaugcugcagaucggcaacaucaucagcaucugggccagccacagcauccagaccggcagccagaacaacaccggcaucugcaaccagagaaucaucaccuacgagaacagcaccugggugaacuacaccuacgugaacaucaacaacaccaacgugguggccggcgaggacaagaccagcgugacccuggccggcaacagcagccugugcagcaucagcggcugggccaucuacaccaaggacaacagcaucagaaucggcagcaagggcgacguguucgugaucagagagcccuucaucagcugcagccaccuggagugcagaaccuucuuccugacccagggcgcccugcugaacgacaagcacagcaacggcaccgugaaggacagaagccccuacagagcccugaugagcugcccccugggcgaggcccccagccccuacaacagcaaguucgagagcguggccuggagcgccagcgccugccacgacggcaugggcuggcugaccaucggcaucagcggccccgacaacggcgccguggccgugcugaaguacaacggcaucaucaccggcaccaucaagagcuggaagaagcagauccugagaacccaggagagcgagugcgugugcaugaacggcagcugcuucaccaucaugaccgacggccccagcaacaaggccgccagcuacaagaucuucaagaucgagaagggcaaggugaccaagagcaucgagcugaacgcccccaacuuccacuacgaggagugcagcugcuaccccgacaccggcaucgugaugugcgugugcagagacaacuggcacggcagcaacagacccugggugagcuucaaccagaaccuggacuaccagaucggcuacaucugcagcggcguguucggcgacaaccccagacccaaggacggcagaggcagcugcaaccccgugaccguggacggcgccaacggcgugaagggcuucagcuacaaguacgacaacggcguguggaucggcagaaccaagagcaacagacugagaaagggcuucgagaugaucugggaccccaacggcuggaccaacaccgacagcgacuucagcgugaagcaggacgugguggccaucaccgacuggagcggcuacagcggcagcuucgugcagcaccccgagcugaccggccuggacugcaucagacccugcuucuggguggagcuggugagaggccugcccagagagaacaccaccaucuggaccagcggcagcagcaucagcuucugcggcgugaacagcgacaccgccaacuggagcuggcccgacggcgccgagcugcccuucaccaucgacaaguga

SEQ ID NO: 179452 - RNA, 1413 nt, Artificial Sequence
  derived and/or modified CDS sequence (opt4) from neuraminidase__InfluenzaA__ADL60277
augaaccccaaccagagaaucaucaccaucggcagcaucagcaucgccaucggcaucaucagccugaugcugcagaucggcaacaucaucagcaucugggccagccacagcauccagaucggcagccagaacaacaccggcaucugcaaccagagaaucaucaccuacgagaacagcaccugggugaaccacaccuacgugaacaucaacaacaccaacgugguggccggcgaggacaagacccccgugacccuggccggcaacagcagccugugcagcaucagcggcugggccaucuacaccaaggacaacagcaucagaaucggcagcaagggcgacguguucgugaucagagagcccuucaucagcugcagccaccuggagugcagaaccuucuuccugacccagggcgcccugcugaacgacaagcacagcaacggcaccgccaaggacagaagccccuacagagcccugaugagcugcccccugggcgaggcccccagccccuacaacagcaaguucgagagcguggccuggagcgccagcgccugccacgacggcaugggcuggcugaccaucggcaucagcggccccgacaacggcgccguggccgugcugaaguacaacggcaucaucaccggcaccaucaagagcuggaagaagcagauccugagaacccaggagagcgagugcgugugcaugaacggcagcugcuucaccaucaugaccgacggccccagcaacaaggccgccagcuacaagaucuucaagaucgagaagggcaaggugaccaagagcaucgagcugaacgcccccaacuucuacuacgaggagugcagcugcuaccccgacaccggcaucgugaugugcgugugcagagacaacuggcacggcagcaacagacccugggugagcuucaaccagaaccuggacuaccagaucggcuacaucugcagcggcguguucggcgacaaccccagacccgaggacggcgagggcagcugcaaccccgugaccguggacggcgccaacggcgugaagggcuucagcuacaaguacggcaacggcguguggaucggcagaaccaagagcaacagacugagaaagggcuucgagaugaucugggaccccaacggcuggaccaacaccgacagcgacuucagcgugaagcaggacgugguggccaucaccgacuggagcggcuacagcggcagcuucgugcagcaccccgagcugaccggccuggacugcaucagacccugcuucuggguggagcuggugagaggccugcccagagagaacaccaccaucuggaccagcggcagcagcaucagcuucugcggcgugaacagcgacaccgccaacuggagcuggcccgacggcgccgagcugcccuucaccaucgacaaguga

SEQ ID NO: 179453 - RNA, 1413 nt, Artificial Sequence
  derived and/or modified CDS sequence (opt4) from neuraminidase__InfluenzaA__ADL60288
augaaccccaaccagaagaucaucaccaucggcagcaucagcaucgccaucggcaucaucagccugaugcugcagaucggcaacaucaucagcaucugggccagccacagcauccagaccggcagccagaacaacaccggcaucugcaaccagagaaucaucaccuacgagaacagcaccugggugaaccacaccuacgugaacaucaacaacaccaacgugguggccggcgaggacaagaccagcgugacccuggccggcaacagcagccugugcagcaucagcggcugggccaucuacaccaaggacaacagcaucagaaucggcagcaagggcgacguguucgugaucagagagcccuucaucagcugcagccaccuggagugcagaaccuucuuccugacccagggcgcccugcugaacgacaagcacagcaacggcaccgugaaggacagaagccccuacagagcccugaugagcugcccccugggcgaggcccccagccccuacaacagcaaguucgagagcguggccuggagcgccagcgccugccacgacggcaugggcuggcugaccaucggcaucagcggccccgacaacggcgccguggccgugcugaaguacaacggcaucaucaccggcaccaucaagagcuggaagaagcagauccugagaacccaggagagcgagugcgugugcaugaacggcagcugcuucaccaucaugaccgacggccccagcaacaaggccgccagcuacaagaucuucaagaucgagaagggcaaggugaccaagagcaucgagcugaacgcccccaacuucuacuacgaggagugcagcugcuaccccgacaccggcaucgugaugugcgugugcagagacaacuggcacggcagcaacagacccugggugagcuucaaccagaaccuggacuaccagaucggcuacaucugcagcggcguguucggcgacaaccccagacccaaggacggcaagggcagcugcaaccccgugaccguggacggcgccaacggcgugaagggcuucagcuacaaguacggcaacggcguguggaucggcagaaccaagagcaacagacugagaaagggcuucgagaugaucugggaccccaacggcuggaccaacaccgacagcgacuucagcgugaagcaggacgugguggccaucaccgacuggagcggcuacagcggcagcuucgugcagcaccccgagcugaccggccuggacugcaucagacccugcuucuggguggagcuggugagaggccugcccagagagaacaccaccaucuggaccagcggcagcagcaucagcuucugcggcgugaacagcgacaccgccaacuggagcuggcccgacggcgccgagcugcccuucaccaucgacaaguga

SEQ ID NO: 179454 - RNA, 1413 nt, Artificial Sequence
  derived and/or modified CDS sequence (opt4) from neuraminidase__InfluenzaA__ADL60299
augaaccccaaccagaagaucaucaccaucggcagcaucagcaucgccaucggcaucaucagccugaugcugcagaucggcaacaucaucagcaucugggccagccacagcauccagaccggcagccagaacaacaccggcaucugcaaccagagaaucaucaccuacgagaacagcaccugggugaaccacaccuacgugagcaucaacaacaccaacgugguggccggcaaggacaagaccagcgugacccuggccggcaacagcagccugugcagcaucagcggcugggccaucuacaccaaggacaacagcaucagaaucggcagcaagggcgacguguucgugaucagagagcccuucaucagcugcagccaccuggagugcagaaccuucuuccugacccagggcgcccugcugaacgacaagcacagcaacggcaccgugaaggacagaagccccuacagagcccugaugagcugcccccugggcgaggcccccagccccuacaacagcaaguucgagagcguggccuggagcgccagcgccugccacgacggcaugggcuggcugaccaucggcaucagcggccccgacaacggcgccguggccgugcugaaguacaacggcaucaucaccggcaccaucaagagcuggaagaagcagauccugagaacccaggagagcgagugcgugugcaugaacggcagcugcuucaccaucaugaccgacggccccagcaacaaggccgccagcuacaagaucuucaagaucgagaagggcaaggugaccaagagcaucgagcugaacgcccccaacuucuacuacgaggagugcagcugcuaccccgacaccggcaucgugaugugcgugugcagagacaacuggcacggcagcaacagacccugggugagcuucaaccaggaccuggacuaccagaucggcuacaucugcagcggcguguucggcgacaaccccagacccaaggacggcaagggcagcugcaaccccgugaccguggacggcgccaacggcgugaagggcuucagcuacaaguacggcaacggcguguggaucggcagaaccaagagcaacagacugagaaagggcuucgagaugaucugggaccccaacggcuggaccaacaccgacagcgacuucagcgugaagcaggacgugguggccaucaccgacuggagcggcuacagcggcagcuucgugcagcaccccgagcugaccggccuggacugcaucagacccugcuucuggguggagcuggugagaggccugcccagagagaacaccaccaucuggaccagcggcagcagcaucagcuucugcggcgugaacagcgacaccgccaacuggagcuggcccgacggcgccgagcugcccuucaccaucgacaaguga

SEQ ID NO: 179455 - RNA, 1413 nt, Artificial Sequence; identical to SEQ ID NO: 176692
  derived and/or modified CDS sequence (opt4) from neuraminidase__InfluenzaA__ADL60310

SEQ ID NO: 179456 - RNA, 1413 nt, Artificial Sequence
  derived and/or modified CDS sequence (opt4) from neuraminidase__InfluenzaA__ADL60321
augaaccccaaccagaagaucaucaccaucggcagcaucagcaucgccaucggcaucaucagccugaugcugcagaucggcaacaucaucagcaucugggccagccacagcauccagaccggcagccagaacaacaccggcaucugcaaccagagaaucaucaccuacgagaacagcaccugggugaaccacaccuacgugaacaucaacaacaccaacgugguggccggcgaggacaagaccagcgugacccuggccggcaacagcagccugugcagcaucagcggcugggccaucuacaccaaggacaacagcaucagaaucggcagcaagggcgacguguucgugaucagagagcccuucaucagcugcagccaccuggagugcagaaccuucuuccugacccagggcgcccugcugaacgacaagcacagcaacggcaccgugaaggacagaagccccuacagagcccugaugagcugcccccugggcgaggcccccagccccuacaacagcaaguucgagagcguggccuggagcgccagcgccugccacgacggcaugggcuggcugaccaucggcaucagcggccccgacaacggcgccguggccgugcugaaguacaacggcaucaucaccggcaccaucaagagcuggaagaagcagauccugagaacccaggagagcgagugcgugugcaugaacggcagcugcuucaccaucaugaccgacggccccagcaacaaggccgccagcuacaagaucuucaagaucgagaagggcaaggugaccaagagcaucgagcugaacgcccccaacuuccacuacgaggagugcagcugcuaccccgacaccggcauggugaugugcgugugcagagacaacuggcacggcagcaacagacccugggugagcuucaaccagaaccuggacuaccagaucggcuacaucugcagcggcguguucggcgacaaccccagacccgaggacggcgagggcagcugcaaccccgugaccguggacggcgccaacggcgugaagggcuucagcuacaaguacgacaacggcguguggaucggcagaaccaagagcaacagacugagaaagggcuucgagaugaucugggaccccaacggcuggaccaacaccgacagcgacuucagcgugaagcaggacgugguggccaucaccgacuggagcggcuacagcggcagcuucgugcagcaccccgagcugaccggccuggacugcaucagacccugcuucuggguggagcuggugagaggccugcccagagagaacaccaccaucuggaccagcggcagcagcaucagcuucugcggcgugaacagcgacaccgccaacuggagcuggcccgacggcgccgagcugcccuucaccaucgacaaguga

SEQ ID NO: 179457 - RNA, 1413 nt, Artificial Sequence
  derived and/or modified CDS sequence (opt4) from neuraminidase__InfluenzaA__ADL60332
augaaccccaaccagaagaucaucaccaucggcagcaucagcaucgccaucggcaucaucagccugaugcugcagaucggcaacaucaucagcaucugggccagccacagcauccagaccggcagccagaacaacaccggcaucugcaaccagagaaucaucaccuacgagaacagcaccugggugaaccacaccuacgugaacaucaacaacaccaacgugguggccggcgaggacaagaccagcgugacccuggccggcaacagcagccugugcagcaucagcggcugggccaucuacaccaaggacaacagcaucagaaucggcagcaagggcgacguguucgugaucagagagcccuucaucagcugcagccaccuggagugcagaaccuucuuccugacccagggcgcccugcugaacgacaagcacagcaacggcaccgugaaggacagaagccccuacagagcccugaugagcugcccccugggcgaggcccccagccccuacaacagcaaguucgagagcguggccuggagcgccagcgccugccacgacggcaugggcuggcugaccaucggcaucagcggccccgacaacggcgccguggccgugcugaaguacaacggcaucaucaccggcaccaucaagagcuggaagaagcagauccugagaacccaggagagcgagugcgugugcaugaacggcagcugcuucaccaucaugaccgacggccccagcaacaaggccgccagcuacaagaucuucaagaucgagaagggcaaggugaccaagagcaucgagcugaacgcccccaacuuccacuacgaggagugcagcugcuaccccgacaccggcaucgugaugugcgugugcagagacaacuggcacggcagcaacagacccugggugagcuucaaccagaaccuggacuaccagaucggcuacaucugcagcggcguguucggcgacaaccccagacccaaggacggcagaggcagcugcaaccccgugaccguggacggcgccaacggcgugaagggcuucagcuacaaguacgacaacggcguguggaucggcagaaccaagagcaacagacugagaaagggcuucgagaugaucugggaccccaacggcuggaccaacaccgacagcgacuucagcgugaagcaggacgugguggccaucaccgacuggagcggcuacagcggcagcuucgugcagcaccccgagcugaccggccuggacugcaucagacccugcuucuggguggagcuggugagaggccugcccagagagaacaccaccaucuggaccagcggcagcagcaucagcuucugcggcgugaacagcgacaccgccaacuggagcuggcccgacggcgccgagcugcccuucaccaucgacaaguga

SEQ ID NO: 179458 - RNA, 1413 nt, Artificial Sequence; identical to SEQ ID NO: 176692
  derived and/or modified CDS sequence (opt4) from neuraminidase__InfluenzaA__ADL60343

SEQ ID NO: 179459 - RNA, 1413 nt, Artificial Sequence
  derived and/or modified CDS sequence (opt4) from neuraminidase__InfluenzaA__ADL60354
augaaccccaaccagagaaucaucaccaucggcagcaucagcaucgccaucggcaucaucagccugaugcugcagaucggcaacaucaucagcaucugggccagccacagcauccagaucggcagccagaacaacaccggcaucugcaaccagagaaucaucaccuacgagaacagcaccugggugaaccacaccuacgugaacaucaacaacaccaacgugguggccggcgaggacaagaccagcgugacccuggccggcaacagcagccugugcagcaucagcggcugggccaucuacaccaaggacaacagcaucagaaucggcagcaagggcgacguguucgugaucagagagcccuucaucagcugcagccaccuggagugcagaaccuucuuccugacccagggcgcccugcugaacgacaagcacagcaacggcaccgccaaggacagaagccccuacagagcccugaugagcugcccccugggcgaggcccccagccccuacaacagcaaguucgagagcguggccuggagcgccagcgccugccacgacggcaugggcuggcugaccaucggcaucagcggccccgacaacggcgccguggccgugcugaaguacaacggcaucaucaccggcaccaucaagagcuggaagaagcagauccugagaacccaggagagcgagugcgugugcaugaacggcagcugcuucaccaucaugaccgacggccccagcaacaaggccgccagcuacaagaucuucaagaucgagaagggcaaggugaccaagagcaucgagcugaacgcccccaacuucuacuacgaggagugcagcugcuaccccgacaccggcaucgugaugugcgugugcagagacaacuggcacggcagcaacagacccugggugagcuucaaccagaaccuggacuaccagaucggcuacaucugcagcggcguguucggcgacaaccccagacccaaggacggcaagggcagcugcaaccccgugaccguggacggcgccaacggcgugaagggcuucagcuacaaguacggcaacggcguguggaucggcagaaccaagagcaacagacugagaaagggcuucgagaugaucugggaccccaacggcuggaccaacaccgacagcgacuucagcgugaagcaggacgugguggccaucaccgacuggagcggcuacagcggcagcuucgugcagcaccccgagcugaccggccuggacugcaucagacccugcuucuggguggagcuggugagaggccugcccagagagaacaccaccaucuggaccagcggcagcagcaucagcuucugcggcgugaacagcgacaccgccaacuggagcuggcccgacggcgccgagcugcccuucaccaucgacaaguga

SEQ ID NO: 179460 - RNA, 1410 nt, Artificial Sequence
  derived and/or modified CDS sequence (opt4) from neuraminidase__InfluenzaA__ADL60365
augaaccccaaccagaagaucaucaccaucggcagcgugagccugaccaucagcaccaucugcuucuucaugcagaucgccauccugaucaccaccgugacccugcacuucaagcaguacgaguucaacagcagccccaacaaccaggugaugcugugcgagcccaccaucaucgagagaaacaucaccgagaucguguaccugaccaacaccaccaucgagaaggagaucagccccaagcuggccgaguacagaaacuggagcaagccccagugcgacaucaccggcuucgcccccuucagcaaggacaacagcaucagacugagcgccggcggcgacaucugggugaccagagagcccuacgugagcugcgaccccgacaagugcuaccaguucgcccugggccagggcaccacccugaacaacgugcacagcaacaacaucgugagagacagaacccccuacagaacccugcugaugaacgagcugggcgugcccuuccaccugggcaccaagcaggugugcaucgccuggagcagcagcagcugccacgacggcaaggccuggcugcacgugugcaucaccggcgacgacaagaacgccaccgccagcuucaucuacaacggcagacugguggacagcaucgugagcuggagcaaggagauccugagaacccaggagagcgagugcgugugcaucaacggcaccugcaccguggugaugaccgacggcagcgccagcggcaaggccgacaccaagauccuguucaucgaggagggcaagaucgugcacaccagcacccugagcggcagcgcccagcacguggaggagugcagcugcuaccccagauaccccggcgugagaugcgugugcagagacaacuggaagggcagcaacagacccaucguggacaucaacaucaaggaccacagcaccgugagcagcuacgugugcagcggccuggugggcgacacccccagaaagaacgacagcagcagcagcagccacugccuggaccccaacaacgaggagggcggccacggcgugaagggcugggccuucgacgacggcaacgacguguggaugggcagaaccaucagcgagaagagcagacugggcuacgagaccuucaaggugaucgagggcuggagcaaccccaagagcaagcugcagaucaacagacaggugaucguggacagaggcaacagaagcggcuacagcggcaucuucagcguggagggcaagagcugcaucaacagaugcuucuacguggagcugaucagaggcagaaaggaggagaccgaggugcuguggaccagcaacagcaucgugguguucugcggcaccagcggcaccuacggcaccggcagcuggcccgacggcgccgacaucaaccugaugcccaucuga

SEQ ID NO: 179461 - RNA, 1413 nt, Artificial Sequence
  derived and/or modified CDS sequence (opt4) from neuraminidase__InfluenzaA__ADL60376
augaaccccaaccagaagaucaucaccaucggcagcaucagcaucgccaucggcaucaucagccugaugcugcagaucggcaacaucaucagcaucugggccagccacagcauccagaccggcagccagaacaacaccggcaucugcaaccagagaaucaucaccuacgagaacagcaccugggugaaccacaccuacgugaacaucaacaacaccaacgugguggccggcgaggacaagaccagcgugacccuggccggcaacagcagccugugcagcaucagcggcugggccaucuacaccaaggacaacagcaucagaaucggcagcaagggcgacguguucgugaucagagagcccuucaucagcugcagccaccuggagugcagaaccuucuuccugacccagggcgcccugcugaacgacaagcacagcaacggcaccggcaaggacagaagccccuacagagcccugaugagcugcccccugggcgaggcccccagccccuacaacagcaaguucgagagcguggccuggagcgccagcgccugccacgacggcaugggcuggcugaccaucggcaucagcggccccgacaacggcgccguggccgugcugaaguacaacggcaucaucaccggcaccaucaagagcuggaagaagcagauccugagaacccaggagagcgagugcgugugcaugaacggcagcugcuucaccaucaugaccgacggccccagcaacaaggccgccagcuacaagaucuucaagaucgagaagggcaaggugaccaagagcaucgagcugaacgcccccaacuuccacuacgaggagugcagcugcuaccccgacaccggcaucgugaugugcgugugcagagacaacuggcacggcagcaacagacccugggugagcuucaaccagaaccuggacuaccagaucggcuacaucugcagcggcguguucggcgacaaccccagacccaaggacggcaagggcagcugcaaccccgugaccguggacggcgccaacggcgugaagggcuucagcuacaaguacgacaacggcguguggaucggcagaaccaagagcaacagacugagaaagggcuucgagaugaucugggaccccaacggcuggaccaacaccgacagcgacuucagcgugaagcaggacgugguggccaucaccgacuggagcggcuacagcggcagcuucgugcagcaccccgagcugaccggccuggacugcaucagacccugcuucuggguggagcuggugagaggccugcccagagagaacaccaccaucuggaccagcggcagcagcaucagcuucugcggcgugaacagcgacaccgccaacuggagcuggcccgacggcgccgagcugcccuucaccaucgacaaguga

SEQ ID NO: 179462 - RNA, 1410 nt, Artificial Sequence; identical to SEQ ID NO: 176798
  derived and/or modified CDS sequence (opt4) from neuraminidase__InfluenzaA__ADM07137

SEQ ID NO: 179463 - RNA, 1410 nt, Artificial Sequence; identical to SEQ ID NO: 176798
  derived and/or modified CDS sequence (opt4) from neuraminidase__InfluenzaA__ADM07146

SEQ ID NO: 179464 - RNA, 1410 nt, Artificial Sequence; identical to SEQ ID NO: 176798
  derived and/or modified CDS sequence (opt4) from neuraminidase__InfluenzaA__ADM07156

SEQ ID NO: 179465 - RNA, 1410 nt, Artificial Sequence; identical to SEQ ID NO: 176798
  derived and/or modified CDS sequence (opt4) from neuraminidase__InfluenzaA__ADM07165

SEQ ID NO: 179466 - RNA, 1413 nt, Artificial Sequence; identical to SEQ ID NO: 177521
  derived and/or modified CDS sequence (opt4) from neuraminidase__InfluenzaA__ADM07474

SEQ ID NO: 179467 - RNA, 1413 nt, Artificial Sequence; identical to SEQ ID NO: 177521
  derived and/or modified CDS sequence (opt4) from neuraminidase__InfluenzaA__ADM07485

SEQ ID NO: 179468 - RNA, 1410 nt, Artificial Sequence
  derived and/or modified CDS sequence (opt4) from neuraminidase__InfluenzaA__ADM07496
augaaccccaaccagaagaucaucaccaucggcagcgugagccugaccaucagcaccaucugcuucuucaugcagaucgccauccugaucaccaccgugacccugcacuucaagcaguacgaguucaacagcccccccaacaaccaggugaugcugugcgagcccaccaucaucgagagaaacaucaccgagaucguguaccugaccaacaccaccaucgagaaggagaucugccccaagcuggccgaguacagaaacuggagcaagccccagugcgacaucaccggcuucgcccccuucagcaaggacaacagcaucagacugagcgccggcggcgacaucugggugaccagagagcccuacgugagcugcgaccccgacaagugcuaccaguucgcccugggccagggcaccacccugaacaacgugcacagcaacaacaccgugagagacagaacccccuacagaacccugcugaugaacgagcugggcgugcccuuccaccugggcaccaagcaggugugcaucgccuggagcagcagcagcugccacgacggcaaggccuggcugcacgugugcaucaccggcgacgacaagaacgccaccgccagcuucaucuacaacggcagacugguggacagcguggugagcuggagcaaggagauccugagaacccaggagagcgagugcgugugcaucaacggcaccugcaccguggugaugaccgacggcagcgccagcggcaaggccgacaccaagauccuguucaucgaggagggcaagaucgugcacaccagcacccugagcggcagcgcccagcacguggaggagugcagcugcuaccccagauaccccggcgugagaugcgugugcagagacaacuggaagggcagcaacagacccaucguggacaucaacaucaaggaccacagcaucgugagcagcuacgugugcagcggccuggugggcgacacccccagaaagaacgacagcagcagcagcagccacugccuggaccccaacaacgaggagggcggccacggcgugaagggcugggccuucgacgacggcaacgacguguggaugggcagaaccaucagcgagaagagcagacugggcuacgagaccuucaaggugaucgagggcuggagcaaccccaagagcaagcugcagaucaacagacaggugaucguggacagaggcaacagaagcggcuacagcggcaucuucagcguggagggcaagagcugcaucaacagaugcuucuacguggagcugaucagaggcagaaaggaggagaccgaggugcuguggaccagcaacagcaucgugguguucugcggcaccagcggcaccuacggcaccggcagcuggcccgacggcgccgacaucaacaucaugcccaucuga

SEQ ID NO: 179469 - RNA, 1410 nt, Artificial Sequence
  derived and/or modified CDS sequence (opt4) from neuraminidase__InfluenzaA__ADM07507
augaaccccaaccagaagaucaucaccaucggcagcgugagccugaccaucagcaccaucugcuucuucaugcagaccgccauccugaucaccaccgugacccugcacuucaagcaguucgaguucaacagcccccccaacaaccaggugaugcugugcgagcccgccaucaucgagagaaacaucaccgagaucguguaccugaccaacaccaccaucgagaaggagaucugccccaagcuggccgaguacagaaacuggagcaagccccagugcgacaucaccggcuucgcccccuucagcaaggacaacagcaucagacugagcgccggcggcgacaucugggugaccagagagcccuacgugagcugcgaccccgacaagugcuaccaguucgcccugggccagggcaccacccugaacaacgugcacagcaacaacaccgugagagacagaacccccuacagaacccugcugaugaacgagcugggcgugcccuuccaccugggcaccaagcaggugugcaucgccuggagcagcagcagcugccacgacggcaaggccuggcugcacgugugcaucaccggcgacgacaagaacgccaccgccagcuucaucuacaacggcagacugguggacagcguggugagcuggagcaaggagauccugagaacccaggagagcgagugcgugugcaucaacggcaccugcaccguggugaugaccgacggcagcgccagcggcaaggccgacaccaagauccuguucaucgaggagggcaagaucgugcacaccagcacccugagcggcagcgcccagcacguggaggagugcagcugcuaccccagauaccccggcgugagaugcgugugcagagacaacuggaagggcagcaacagacccaucguggacaucaacaucaaggaccacagcaucgugagcagcuacgugugcagcggccuggugggcgacacccccagaaagaacgacagcagcagcagcagccacugccuggaccccaacaacgaggagggcggccacggcgugaagggcugggccuucgacgacggcaacgacguguggaugggcagaaccaucagcgagaagagcagacugggcuacgagaccuucaaggugaucgagggcuggagcaaccccaagagcaagcugcagaucaacagacaggugaucguggacagaggcaacagaagcggcuacagcggcaucuucagcguggagggcaagagcugcaucaacagaugcuucuacguggagcugaucagaggcagaaaggaggagaccgaggugcuguggaccagcaacagcaucgugguguucugcggcaccagcggcaccuacggcaccggcagcuggcccgacggcgccgacaucaaccugaugcccaucuga

SEQ ID NO: 179470 - RNA, 1410 nt, Artificial Sequence
  derived and/or modified CDS sequence (opt4) from neuraminidase__InfluenzaA__ADM12820
augaaccccaaccagaagaucaucaccaucggcagcgugagccugaccaucagcaccaucugcuucuucaugcagaucgccauccugaucaccaccgugacccugcacuucaagcaguacaaguucaacagcccccccaacaaccaggugaugcugugcgagcccaccaucaucgagagaaacaucaccgagaucguguaccugaccaacaccaccaucgagaaggagaucugccccaagcuggccgaguacagaaacuggagcaagccccagugcgacaucaccggcuucgcccccuucagcaaggacaacagcaucagacugagcgccggcggcgacaucugggugaccagagagcccuacgugagcugcgaccccgacaagugcuaccaguucgcccugggccagggcaccacccugaacaacgugcacagcaacaacaccgugagagacagaacccccuacagaacccugcugaugaacgagcugggcgugcccuuccaccugggcaccaagcaggugugcaucgccuggagcagcagcagcugccacgacggcaaggccuggcugcacgugugcaucaccggcgacgacaagaacgccaccgccagcuucaucuacaacggcagacugguggacagcguggugagcuggagcaaggagauccugagaacccaggagagcgagugcgugugcaucaacggcaccugcaccguggugaugaccgacggcagcgccagcggcaaggccgacaccaagauccuguucaucgaggagggcaagaucgugcacaccagcacccugagcggcagcgcccagcacguggaggagugcagcugcuaccccagauaccccggcgugagaugcgugugcagagacaacuggaagggcagcaacagacccaucguggacaucaacaucaaggaccacagcaucgugagcagcuacgugugcagcggccuggugggcgacacccccagaaagaacgacagcagcagcagcagccacugccuggaccccaacaacgaggagggcggccacggcgugaagggcugggccuucgacgacggcaacgacguguggaugggcagaaccaucaacgagaccagcagacugggcuacgagaccuucaaggugaucgagggcuggagcaaccccaagagcaagcugcagaucaacagacaggugaucguggacagaggcaacagaagcggcuacagcggcaucuucagcguggagggcaagagcugcaucaacagaugcuucuacguggagcugaucagaggcagaaaggaggagaccgaggugcuguggaccagcaacagcaucgugguguucugcggcaccagcggcaccuacggcaccggcagcuggcccgacggcgccgaccugaaccugaugcccaucuga

SEQ ID NO: 179471 - RNA, 1410 nt, Artificial Sequence; identical to SEQ ID NO: 179470
  derived and/or modified CDS sequence (opt4) from neuraminidase__InfluenzaA__ADM12831

SEQ ID NO: 179472 - RNA, 1410 nt, Artificial Sequence; identical to SEQ ID NO: 179470
  derived and/or modified CDS sequence (opt4) from neuraminidase__InfluenzaA__ADM12842

SEQ ID NO: 179473 - RNA, 1410 nt, Artificial Sequence; identical to SEQ ID NO: 179470
  derived and/or modified CDS sequence (opt4) from neuraminidase__InfluenzaA__ADM12853

SEQ ID NO: 179474 - RNA, 1410 nt, Artificial Sequence; identical to SEQ ID NO: 176798
  derived and/or modified CDS sequence (opt4) from neuraminidase__InfluenzaA__ADM12864

SEQ ID NO: 179475 - RNA, 1410 nt, Artificial Sequence; identical to SEQ ID NO: 176798
  derived and/or modified CDS sequence (opt4) from neuraminidase__InfluenzaA__ADM12874

SEQ ID NO: 179476 - RNA, 1410 nt, Artificial Sequence; identical to SEQ ID NO: 176798
  derived and/or modified CDS sequence (opt4) from neuraminidase__InfluenzaA__ADM12884

SEQ ID NO: 179477 - RNA, 1410 nt, Artificial Sequence
  derived and/or modified CDS sequence (opt4) from neuraminidase__InfluenzaA__ADM12894
augaaccccaaccagaagaucaucaccaucggcagcgugugcaugaccaucggcauggccaaccugauccugcagaucggcaacaucaucagcaucuggaucagccacagcauccagcugggcaaccagaaccagaucgagaccugcaaccagagcgugaucaccuacgagaacaacaccugggugaaccagaccuacgugaacaucagcaacaccaacuucgccgccggccagagcguggugagcgugaagcuggccggcaacagcagccugugccccgugagcggcugggccaucuacagcaaggacaacagcaucagaaucggcagcaagggcgacguguucgugaucagagagcccuucaucagcugcagcccccuggagugcagaaccuucuuccugacccagggcgcccugcugaacgacaagcacagcaacggcaccaucaaggacagaagccccuacagaacccugaugagcugccccaucggcgaggugcccagccccuacaacagcagauucgagagcguggccuggagcgccagcgccugccacgacggcaucaacuggcugaccaucggcaucagcggccccgacaacggcgccguggccgugcugaaguacaacggcaucaucaccgacaccaucaagagcuggagaaacaacauccugagaacccaggagagcgagugcgccugcgugaacggcagcugcuucaccgugaugaccgacggccccagcgacggccagagcagcuacaagaucuucagaaucgagaagggcaagaucgugaagagcguggagaugaacgcccccaacuaccacuacgaggagugcagcugcuaccccgacagcagcgagaucaccugcgugugcagagacaacuggcacggcagcaacagacccugggugagcuucaaccagaaccuggaguaccagaucggcuacaucugcagcggcaucuucggcgacaaccccagacccaacgacaagaccggcagcugcggccccgugagcagcaacggcgccaacggcgugaagggcuucagcuucaaguacggcaacggcguguggaucggcagaaccaagagcaucagcagcagaaacggcuucgagaugaucugggaccccaacggcuggaccggcaccgacaacaacuucagcaucaagcaggacaucgugggcaucaacgaguggagcggcuacagcggcagcuucgugcagcaccccgagcugaccggccuggacugcaucagacccugcuucuggguggagcugaucagaggcagacccaaggagaacaccaucuggaccagcggcagcagcaucagcuucugcggcgugaacagcgacaccgugggcuggagcuggcccgacggcgccgagcugcccuucaccaucgacaaguga

SEQ ID NO: 179478 - RNA, 1410 nt, Artificial Sequence; identical to SEQ ID NO: 176798
  derived and/or modified CDS sequence (opt4) from neuraminidase__InfluenzaA__ADM12904

SEQ ID NO: 179479 - RNA, 1410 nt, Artificial Sequence
  derived and/or modified CDS sequence (opt4) from neuraminidase__InfluenzaA__ADM12914
augaaccccaaccagaagaucaucaccaucggcagcgugugcaugaccaucggcauggccaaccugauccugcagaucggcaacaucaucagcaucuggaucagccacagcauccagcugggcaaccagaaccagaucgagaccugcaaccagagcgugaucaccuacgagaacaacaccugggugaaccagaccuacgugaacaucagcaacaccaacuucgccgccggccagagcguggugagcgugaagcuggccggcaacagcagccugugccccgugagcggcugggccaucuacagcaaggacaacagcaucagaaucggcagcaagggcgacguguucgugaucagagagcccuucaucagcugcagcccccuggagugcagaaccuucuuccugacccagggcgcccugcugaacgacaagcacagcaacggcaccaucaaggacagaagccccuacagaacccugaugagcugccccaucggcgaggugcccagccccuacaacagcagauucgagagcguggccuggagcgccagcgccugccacgacggcaucaacuggcugaccaucggcaucagcggccccgacaacggcgccguggccgugcugaaguacaacggcaucaucaccgacaccaucaagagcuggagaaacaacauccugagaacccaggagagcgagugcgccugcgugaacggcagcugcuucaccgugaugaccgacggccccagcgacggccaggccagcuacaagaucuucagaaucgagaagggcaagaucgugaagagcguggagaugaacgcccccaacuaccacuacgaggagugcagcugcuaccccgacagcagcgagaucaccugcgugugcagagacaacuggcacggcagcaacagacccugggugagcuucaaccagaaccuggaguaccagaucggcuacaucugcagcggcaucuucggcgacaaccccagacccaacgacaagaccggcagcugcggccccgugagcagcuacggcgccaacggcgugaagggcuucagcuucaaguacggcaacggcguguggaucggcagaaccaagagcaucagcagcagaaacggcuucgagaugaucugggaccccaacggcuggaccggcaccgacaacaacuucagcaucaagcaggacaucgugggcaucaacgaguggagcggcuacagcggcagcuucgugcagcaccccgagcugaccggccuggacugcaucagacccugcuucuggguggagcugaucagaggcagacccaaggagaacaccaucuggaccagcggcagcagcaucagcuucugcggcgugaacagcgacaccgugggcuggagcuggcccgacggcgccgagcugcccuucaccaucgacaaguga

SEQ ID NO: 179480 - RNA, 1410 nt, Artificial Sequence; identical to SEQ ID NO: 176798
  derived and/or modified CDS sequence (opt4) from neuraminidase__InfluenzaA__ADM12924

SEQ ID NO: 179481 - RNA, 1410 nt, Artificial Sequence; identical to SEQ ID NO: 176798
  derived and/or modified CDS sequence (opt4) from neuraminidase__InfluenzaA__ADM12934

SEQ ID NO: 179482 - RNA, 1410 nt, Artificial Sequence; identical to SEQ ID NO: 176798
  derived and/or modified CDS sequence (opt4) from neuraminidase__InfluenzaA__ADM12944

SEQ ID NO: 179483 - RNA, 1410 nt, Artificial Sequence; identical to SEQ ID NO: 176798
  derived and/or modified CDS sequence (opt4) from neuraminidase__InfluenzaA__ADM12954

SEQ ID NO: 179484 - RNA, 1410 nt, Artificial Sequence; identical to SEQ ID NO: 176798
  derived and/or modified CDS sequence (opt4) from neuraminidase__InfluenzaA__ADM12964

SEQ ID NO: 179485 - RNA, 1410 nt, Artificial Sequence; identical to SEQ ID NO: 178086
  derived and/or modified CDS sequence (opt4) from neuraminidase__InfluenzaA__ADM12974

SEQ ID NO: 179486 - RNA, 1410 nt, Artificial Sequence
  derived and/or modified CDS sequence (opt4) from neuraminidase__InfluenzaA__ADM12984
augaaccccaaccagaagaucaucaccaucggcagcgugugcaugaccaucggcauggccaaccugauccugcagaucggcaacaucaucagcaucuggaucagccacagcauccagcugggcaaccagaaccagaucgagaccugcaaccagagcgugaucaccuacgagaacaacaccugggugaaccagaccuacgugaacaucagcaacaccaacuucgccgccggccagagcguggugagcgugaagcuggccggcaacagcagccugugccccgugagcggcugggccaucuacagcaaggacaacagcaucagaaucggcagcaagggcgacguguucgugaucagagagcccuucaucagcugcagcccccuggagugcagaaccuucuuccugacccagggcgcccugcugaacgacaagcacagcaacggcaccaucaaggacagaagccccuacagaacccugaugagcugccccaucggcgaggugcccagccccuacaacagcagauucgagagcguggccuggagcgccagcgccugccacgacggcaucaacuggcugaccaucggcaucagcggccccgacaacggcgccguggccgugcugaaguacaacggcaucaucaccgacaccaucagaagcuggagaaacaacauccugagaacccaggagagcgagugcgccugcgugaacggcagcugcuucaccgugaugaccgacggccccagcgacggccaggccagcuacaagaucuucagaaucgagaagggcaagaucgugaagagcguggagaugaacgcccccaacuaccacuacgaggagugcagcugcuaccccgacagcagcgagaucaccugcgugugcagagacaacuggcacggcagcaacagacccugggugagcuucaaccagaaccuggaguaccagaucggcuacaucugcagcggcaucuucggcgacaaccccagacccaacgacaagaccggcagcugcggccccgugagcagcaacggcgccaacggcgugaagggcuucagcuucaaguacggcaacggcguguggaucggcagaaccaagagcaucagcagcagaaacggcuucgagaugaucugggaccccaacggcuggaccggcaccgacaacaacuucagcaucaagcaggacaucgugggcaucaacgaguggagcggcuacagcggcagcuucgugcagcaccccgagcugaccggccuggacugcaucagacccugcuucuggguggagcugaucagaggcagacccaaggagaacaccaucuggaccagcggcagcagcaucagcuucugcggcgugaacagcgacaccgugggcuggagcuggcccgacggcgccgagcugcccuucaccaucgacaaguga

SEQ ID NO: 179487 - RNA, 1410 nt, Artificial Sequence; identical to SEQ ID NO: 176798
  derived and/or modified CDS sequence (opt4) from neuraminidase__InfluenzaA__ADM12994

SEQ ID NO: 179488 - RNA, 1410 nt, Artificial Sequence; identical to SEQ ID NO: 176798
  derived and/or modified CDS sequence (opt4) from neuraminidase__InfluenzaA__ADM13004

SEQ ID NO: 179489 - RNA, 1410 nt, Artificial Sequence; identical to SEQ ID NO: 176798
  derived and/or modified CDS sequence (opt4) from neuraminidase__InfluenzaA__ADM13014

SEQ ID NO: 179490 - RNA, 1410 nt, Artificial Sequence
  derived and/or modified CDS sequence (opt4) from neuraminidase__InfluenzaA__ADM13034
augaaccccaaccagaagaucaucaccaucggcagcgugugcaugaccaucggcauggccaaccugauccugcagaucggcaacaucaucagcaucuggaucagccacagcauccagcugggcaaccagaaccagaucgagaccugcaaccagagcgugaucaccuacgagaacaacaccugggugaaccagaccuacgugaacaucagcaacaccaacuucgccgccggccagagcguggugagcgugaagcuggccggcaacagcagccugugccccgugagcggcugggccaucuacagcaaggacaacagcaucagaaucggcagcaagggcgacguguucgugaucagagagcccuucaucagcugcagcccccuggagugcagaaccuucuuccugacccagggcgcccugcugaacgacaagcacagcaacggcaccaucaaggacagaagccccuacagaacccugaugagcugccccaucggcgaggugcccagccccuacaacagcagauucgagagcguggccuggagcgccagcgccugccacgacggcaucaacuggcugaccaucggcaucagcggccccgacaacggcgccguggccgugcugaaguacaacggcaucaucaccgacaccaucaagagcuggagaaacaacauccugagaacccaggagagcgagugcgccugcgugaacggcagcugcuucaccgugaugaccgacggccccagcgacggccaggccagcuacaagaucuucagaaucgagaagggcaagaucgugaagagcguggagaugaacgcccccaacuaccacuacgaggagugcagcugcuaccccgacagcagcgagaucaccugcgugugcagagacaacuggcacggcagcaacagacccugggugagcuucaaccagaaccuggaguaccagaucggcuacaucugcagcggcaucuucggcgacaaccccagacccaacgacaagaccggcaacugcggccccgugagcagcaacggcgccaacggcgugaagggcuucagcuucaaguacggcaacggcguguggaucggcagaaccaagagcaucagcagcagaaacggcuucgagaugaucugggaccccaacggcuggaccggcaccgacaacaacuucagcaucaagcaggacaucgugggcaucaacgaguggagcggcuacagcggcagcuucgugcagcaccccgagcugaccggccuggacugcaucagacccugcuucuggguggagcugaucagaggcagacccaaggagaacaccaucuggaccagcggcagcagcaucagcuucugcggcgugaacagcgacaccgugggcuggagcuggcccgacggcgccgagcugcccuucaccaucgacaaguga

SEQ ID NO: 179491 - RNA, 1410 nt, Artificial Sequence; identical to SEQ ID NO: 178711
  derived and/or modified CDS sequence (opt4) from neuraminidase__InfluenzaA__ADM13044

SEQ ID NO: 179492 - RNA, 1410 nt, Artificial Sequence; identical to SEQ ID NO: 177624
  derived and/or modified CDS sequence (opt4) from neuraminidase__InfluenzaA__ADM13054

SEQ ID NO: 179493 - RNA, 1410 nt, Artificial Sequence; identical to SEQ ID NO: 177975
  derived and/or modified CDS sequence (opt4) from neuraminidase__InfluenzaA__ADM13064

SEQ ID NO: 179494 - RNA, 1410 nt, Artificial Sequence
  derived and/or modified CDS sequence (opt4) from neuraminidase__InfluenzaA__ADM13074
augaaccccaaccagaagaucaucaccaucggcagcgugugcaugaccaucggcauggccaaccugauccugcagaucggcaacaucaucagcaucuggaucagccacagcauccagcugggcaaccagaaccagaucgagaccugcaaccagagcgugaucaccuacgagaacaacaccugggugaaccagaccuacgugaacaucagcaacaccaaccuggccgccggccagagcguggugagcgugaagcuggccggcaacagcagccugugccccgugagcggcugggccaucuacagcaaggacaacagcaucagaaucggcagcaagggcgacguguucgugaucagagagcccuucaucagcugcagcccccuggagugcagaaccuucuuccugacccagggcgcccugcugaacgacaagcacagcaacggcaccaucaaggacagaagccccuacagaacccugaugagcugccccaucggcgaggugcccagccccuacaacagcagauucgagagcguggccuggagcgccagcgccugccacgacggcaucaacuggcugaccaucggcaucagcggccccgacaacggcgccguggccgugcugaaguacaacggcaucaucaccgacaccaucaagagcuggagaaacaacauccugagaacccaggagagcgagugcgccugcgugaacggcagcugcuucaccgugaugaccgacggccccagcgacggccaggccagcuacaagaucuucagaaucgagaagggcaagaucgugaagagcguggagaugaacgcccccaacuaccacuacgaggagugcagcugcuaccccgacagcagcgagaucaccugcgugugcagagacaacuggcacggcagcaacagacccugggugagcuucaaccagaaccuggaguaccagaucggcuacaucugcagcggcaucuucggcgacaaccccagacccaacgacaagaccggcagcugcggccccgugagcagcaacggcgccaacggcgugaagggcuucagcuucaaguacggcaacggcguguggaucggcagaaccaagagcaucagcagcagaaacggcuucgagaugaucugggaccccaacggcuggaccggcaccgacaacaaguucagcaucaagcaggacaucgugggcaucaacgaguggagcggcuacagcggcagcuucgugcagcaccccgagcugaccggccuggacugcaucagacccugcuucuggguggagcugaucagaggcagacccaaggagaacaccaucuggaccagcggcagcagcaucagcuucugcggcgugaacagcgacaccgugggcuggagcuggcccgacggcgccgagcugcccuucaccaucgacaaguga

SEQ ID NO: 179495 - RNA, 1410 nt, Artificial Sequence; identical to SEQ ID NO: 177975
  derived and/or modified CDS sequence (opt4) from neuraminidase__InfluenzaA__ADM13084

SEQ ID NO: 179496 - RNA, 1410 nt, Artificial Sequence
  derived and/or modified CDS sequence (opt4) from neuraminidase__InfluenzaA__ADM13094
augaaccccaaccagaagaucaucaccaucggcagcgugugcaugaccaucggcauggccaaccugauccugcagaucggcaacaccaucagcaucuggaucagccacagcauccagcugggcaaccagaaccagaucgagaccugcaaccagagcgugaucaccuacgagaacaacaccugggugaaccagaccuacgugaacaucagcaacaccaacuucgccgccggccagagcguggugagcgccaagcuggccggcaacagcagccugugccccgugagcggcugggccaucuacagcaaggacaacagcaucagaaucggcagcaagggcgacguguucgugaucagagagcccuucaucagcugcagcccccuggagugcagaaccuucuuccugacccagggcgcccugcugaacgacaagcacagcaacggcaccaucaaggacagaagccccuacagaacccugaugagcugccccaucggcgaggugcccagccccuacaacagcagauucgagagcguggccuggagcgccagcgccugccacgacggcaucaacuggcugaccaucggcaucagcggccccgacaacggcgccguggccgugcugaaguacaacggcaucaucaccgacaccaucaagagcuggagaaacaacauccugagaacccaggagagcgagugcgccugcgugaacggcagcugcuucaccgugaugaccgacggccccagcgacggccaggccagcuacaagaucuucagaaucgagaagggcaagaucgugaagagcguggagaugaacgcccccaacuaccacuacgaggagugcagcugcuaccccgacagcagcgagaucaccugcgugugcagagacaacuggcacggcagcaacagacccugggugagcuucaaccagaaccuggaguaccagaucggcuacaucugcagcggcaucuucggcgacaaccccagacccaacgacaagaccggcagcugcggccccgugagcagcaacggcgccaacggcgugaagggcuucagcuucaaguacggcaacggcguguggaucggcagaaccaagagcaucagcagcagaaacggcuucgagaugaucugggaccccaacggcuggaccggcaccgacaacaacuucagcaucaagcaggacaucgugggcaucaacgaguggagcggcuacagcggcagcuucgugcagcaccccgagcugaccggccuggacugcaucagacccugcuucuggguggagcugaucagaggcagacccaaggagaacaccaucuggaccagcggcagcagcaucagcuucugcggcgugaacagcgacaccgugggcuggagcuggcccgacggcgccgagcugcccuucaccaucgacaaguga

SEQ ID NO: 179497 - RNA, 1410 nt, Artificial Sequence; identical to SEQ ID NO: 177975
  derived and/or modified CDS sequence (opt4) from neuraminidase__InfluenzaA__ADM13104

SEQ ID NO: 179498 - RNA, 1410 nt, Artificial Sequence; identical to SEQ ID NO: 178700
  derived and/or modified CDS sequence (opt4) from neuraminidase__InfluenzaA__ADM13124

SEQ ID NO: 179499 - RNA, 1410 nt, Artificial Sequence
  derived and/or modified CDS sequence (opt4) from neuraminidase__InfluenzaA__ADM13134
augaaccccaaccagaagaucaucaccaucggcagcgugugcaugaccaucggcauggccaaccugauccugcagaucggcaacaucaucagcaucuggaucagccacagcauccagcugggcaaccagaaccagaucgagaccugcaaccagagcgugaucaccuacgagaacaacaccugggugaaccagaccuacgugaacaucagcaacaccaacuucgccgccggccagagcguggugagcgugaagcuggccggcaacagcagccugugccccgugagcggcugggccaucuacagcaaggacaacagcaucagaaucggcagcaagggcgacguguucgugaucagagagcccuucaucagcugcagcccccuggagugcagaaccuucuuccugacccagggcgcccugcugaacgacaagcacagcaacggcaccaucaaggacagaagccccuacagaacccugaugagcugccccaucggcgaggugcccagccccuacaacagcagauucgagagcguggccuggagcgccagcgccugccacgacggcaucaacuggcugaccaucggcaucagcggccccgacaacggcgccguggccgugcugaaguacaacggcaucaucaccgacaccaucaagagcuggagaaacaacacccugagaacccaggagagcgagugcgccugcgugaacggcagcugcuucaccgugaugaccgacggccccagcgacggccaggccagcuacaagaucuucagaaucgagaagggcaagaucgugaagagcguggagaugaacgcccccaacuaccacuacgaggagugcagcugcuaccccgacagcagcgagaucaccugcgugugcagagacaacuggcacggcagcaacagacccugggugagcuucaaccagaaccuggaguaccagaucggcuacaucugcagcggcaucuucggcgacaaccccagacccaacgacaagaagggcagcugcggccccgugagcagcaacggcgccaacggcgugaagggcuucagcuucaaguacggcaacggcguguggaucggcagaaccaagagcaucagcagcagaaacggcuucgagaugaucugggaccccaacggcuggaccggcaccgacaacaacuucagcaucaagcaggacaucgugggcaucaacgaguggagcggcuacagcggcagcuucgugcagcaccccgagcugaccggccuggacugcaucagacccugcuucuggguggagcugaucagaggcagacccaaggagaacaccaucuggaccagcggcagcagcaucagcuucugcggcgugaacagcgacaccgugggcuggagcuggcccgacggcgccgagcugcccuucaccaucgacaaguga

SEQ ID NO: 179500 - RNA, 1410 nt, Artificial Sequence
  derived and/or modified CDS sequence (opt4) from neuraminidase__InfluenzaA__ADM13154
augaaccccaaccagaagaucaucaccaucggcagcgugugcaugaccaucggcauggccaaccugauccugcagaucggcaacaucaucagcaucuggaucagccacagcauccagcugggcaaccagaagcagaucgagaccugcaaccagagcguguucaccuacgagaacaacaccugggugaaccagaccuacgugaacaucagcaacaccaacuucgccgccggccagagcguggugagcgugaagcuggccggcaacagcagccugugccccgugagcggcugggccaucuacagcaaggacaacagcaucagaaucggcagcaagggcgacguguucgugaucagagagcccuucaucagcugcagcccccuggagugcagaaccuucuuccugacccagggcgcccugcugaacgacaagcacagcaacggcaccaucaaggacagaagccccuacagaacccugaugagcugccccaucggcgaggugcccagccccuacaacagcagauucgagagcguggccuggagcgccagcgccugccacgacggcaucaacuggcugaccaucggcaucagcggccccgacaacggcgccguggccgugcugaaguacaacggcaucaucaccgacaccaucaagagcuggagaaacaacauccugagaacccaggagagcgagugcgccugcgugaacggcagcugcuucaccgugaugaccgacggccccagcgacggccaggccagcuacaagaucuucaagaucgagaagggcaagaucgugaagagcguggagaugaacgcccccaacuaccacuacgaggagugcagcugcuaccccgacagcagcgagaucaccugcgugugcagagacaacuggcacggcagcaacagacccugggugagcuucaaccagaaccuggaguaccagaucggcuacaucugcagcggcaucuucggcgacaaccccagacccaacgacaagaccggcagcugcggccccgugagcagcaacggcgccaacggcgugaagggcuucagcuucaaguacggcaacggcguguggaucggcagaaccaagagcaucagcagcagaaacggcuucgagaugaucugggaccccaacggcuggaccggcaccgacaacaacuucagcaucaagcaggacaucgugggcaucaacgaguggagcggcuacagcggcagcuucgugcagcaccccgagcugaccggccuggacugcaucagacccugcuucuggguggagcugaucagaggcagacccaaggagaacaccaucuggaccagcggcagcagcaucagcuucugcggcgugaacagcgacaccgugggcuggagcuggcccgacggcgccgagcugcccuucaccaucgacaaguga

SEQ ID NO: 179501 - RNA, 1410 nt, Artificial Sequence; identical to SEQ ID NO: 178228
  derived and/or modified CDS sequence (opt4) from neuraminidase__InfluenzaA__ADM13164

SEQ ID NO: 179502 - RNA, 1410 nt, Artificial Sequence; identical to SEQ ID NO: 176798
  derived and/or modified CDS sequence (opt4) from neuraminidase__InfluenzaA__ADM13174

SEQ ID NO: 179503 - RNA, 1410 nt, Artificial Sequence; identical to SEQ ID NO: 176798
  derived and/or modified CDS sequence (opt4) from neuraminidase__InfluenzaA__ADM13184

SEQ ID NO: 179504 - RNA, 1410 nt, Artificial Sequence; identical to SEQ ID NO: 176798
  derived and/or modified CDS sequence (opt4) from neuraminidase__InfluenzaA__ADM13194

SEQ ID NO: 179505 - RNA, 1410 nt, Artificial Sequence; identical to SEQ ID NO: 176798
  derived and/or modified CDS sequence (opt4) from neuraminidase__InfluenzaA__ADM13204

SEQ ID NO: 179506 - RNA, 1410 nt, Artificial Sequence; identical to SEQ ID NO: 177975
  derived and/or modified CDS sequence (opt4) from neuraminidase__InfluenzaA__ADM13214

SEQ ID NO: 179507 - RNA, 1410 nt, Artificial Sequence
  derived and/or modified CDS sequence (opt4) from neuraminidase__InfluenzaA__ADM13224
augaaccccaaccagaagaucaucaccaucggcagcgugugcaugaccaucggcauggccaaccugauccugcagaucggcaacaucaucagcaucuggaucagccacagcauccagcugggcaaccagaaccagaucgagaccugcaaccagagcgugaucaccuacgagaacaacaccugggugaaccagaccuacgugaacaucagcaacaccaacuucgccgccggccagagcguggugagcgugaagcuggccggcaacagcagccugugccccgugagcggcugggccaucuacagcaaggacaacagcaucagaaucggcagcaagggcgacguguucgugaucagagagcccuucaucagcugcagcccccuggagugcagaaccuucuuccugacccagggcgcccugcugaacgacaagcacagcaacggcaccaucaaggacagaagccccuacagaacccugaugagcugccccaucggcgaggugcccagccccuacaacagcagauucgagagcguggccuggagcgccagcgccugccacgacggcaucaacuggcugaccaucggcaucagcggccccgacaacggcgccguggccgugcugaaguacaacggcaucaucaccgacaccaucagaagcuggagaaacaacauccugagaacccaggagagcgagugcgccugcgugaacggcagcugcuucaccgugaugaccgacggccccagcgacggccaggccagcuacaagaucuucagaaucgagaagggcaagaucgugaagagcguggagaugaacgcccccaacuaccacuacgaggagugcagcugcuaccccgacagcagcaagaucaccugcgugugcagagacaacuggcacggcagcaacagacccugggugagcuucaaccagaaccuggaguaccagaucggcuacaucugcagcggcaucuucggcgacaaccccagacccaacgacaagaccggcagcugcggccccgugagcagcaacggcgccaacggcgugaagggcuucagcuucaaguacggcaacggcguguggaucggcagaaccaagagcaucagcagcagaaacggcuucgagaugaucugggaccccaacggcuggaccggcaccgacaacaacuucagcaucaagcaggacaucgugggcaucaacgaguggagcggcuacagcggcagcuucgugcagcaccccgagcugaccggccuggacugcaucagacccugcuucuggguggagcugaucagaggcagacccaaggagaacaccaucuggaccagcggcagcagcaucagcuucugcggcgugaacagcgacaccgugggcuggagcuggcccgacggcgccgagcugcccuucaccaucgacaaguga

SEQ ID NO: 179508 - RNA, 1410 nt, Artificial Sequence; identical to SEQ ID NO: 176798
  derived and/or modified CDS sequence (opt4) from neuraminidase__InfluenzaA__ADM13234

SEQ ID NO: 179509 - RNA, 1410 nt, Artificial Sequence; identical to SEQ ID NO: 178086
  derived and/or modified CDS sequence (opt4) from neuraminidase__InfluenzaA__ADM13244

SEQ ID NO: 179510 - RNA, 1410 nt, Artificial Sequence; identical to SEQ ID NO: 177152
  derived and/or modified CDS sequence (opt4) from neuraminidase__InfluenzaA__ADM13254

SEQ ID NO: 179511 - RNA, 1410 nt, Artificial Sequence; identical to SEQ ID NO: 177975
  derived and/or modified CDS sequence (opt4) from neuraminidase__InfluenzaA__ADM13264

SEQ ID NO: 179512 - RNA, 1410 nt, Artificial Sequence; identical to SEQ ID NO: 176798
  derived and/or modified CDS sequence (opt4) from neuraminidase__InfluenzaA__ADM13274

SEQ ID NO: 179513 - RNA, 1410 nt, Artificial Sequence; identical to SEQ ID NO: 176798
  derived and/or modified CDS sequence (opt4) from neuraminidase__InfluenzaA__ADM13284

SEQ ID NO: 179514 - RNA, 1410 nt, Artificial Sequence
  derived and/or modified CDS sequence (opt4) from neuraminidase__InfluenzaA__ADM13294
augaaccccaaccagaagaucaucaccaucggcagcgugugcaugaccaucggcauggccaaccugauccugcagaucggcaacaucaucagcaucuggaucagccacagcauccagcugggcaaccagaaccagaucgagaccugcaaccagagcgugaucaccuacgagaacaacaccugggugaaccagaccuacgugaacaucagcaacaccaacuucgccgccggccagagcguggugagcgugaagcuggccggcaacagcagccugugccccgugagcggcugggccaucuacagcaaggacaacagcaucagaaucggcagcaagggcgacguguucgugaucagagagcccuucaucagcugcagcccccuggagugcagaaccuucuuccugacccagggcgcccugcugaacgacaagcacagcaacggcaccaucaaggacagaagccccuacagagcccugaugagcugccccaucggcgaggugcccagccccuacaacagcagauucgagagcguggccuggagcgccagcgccugccacgacggcaucaacuggcugaccaucggcaucagcggccccgacaacggcgccguggccgugcugaaguacaacggcaucaucaccgacaccaucaagagcuggagaaacaacauccugagaacccaggagagcgagugcgccugcgugaacggcagcugcuucaccgugaugaccgacggccccagcgacggccaggccagcuacaagaucuucagaaucgagaagggcaagaucgugaagagcguggagaugaacgcccccaacuaccacuacgaggagugcagcugcuaccccgacagcagcgagaucaccugcgugugcagagacaacuggcacggcagcaacagacccugggugagcuucaaccagaaccuggaguaccagaucggcuacaucugcagcggcaucuucggcgacaaccccagacccaacgacaagaccggcagcugcggccccgugagcagcaacggcgccaacggcgugaagggcuucagcuucaaguacggcaacggcguguggaucggcagaaccaagagcaucagcagcagaaacggcuucgagaugaucugggaccccaacggcuggaccggcaccgacaacagcuucagcaucaagcaggacaucgugggcaucaacgaguggagcggcuacagcggcagcuucgugcagcaccccgagcugaccggccuggacugcaucagacccugcuucuggguggagcugaucagaggcagacccaaggagaacaccaucuggaccagcggcagcagcaucagcuucugcggcgugaacagcgacaccgugggcuggagcuggcccgacggcgccgagcugcccuucaccaucgacaaguga

SEQ ID NO: 179515 - RNA, 1410 nt, Artificial Sequence; identical to SEQ ID NO: 176798
  derived and/or modified CDS sequence (opt4) from neuraminidase__InfluenzaA__ADM13304

SEQ ID NO: 179516 - RNA, 1410 nt, Artificial Sequence; identical to SEQ ID NO: 178260
  derived and/or modified CDS sequence (opt4) from neuraminidase__InfluenzaA__ADM13314

SEQ ID NO: 179517 - RNA, 1410 nt, Artificial Sequence; identical to SEQ ID NO: 176798
  derived and/or modified CDS sequence (opt4) from neuraminidase__InfluenzaA__ADM13324

SEQ ID NO: 179518 - RNA, 1410 nt, Artificial Sequence
  derived and/or modified CDS sequence (opt4) from neuraminidase__InfluenzaA__ADM13344
augaaccccaaccagaagaucaucaucaucggcagcgugugcaugaccaucggcauggccaaccugauccugcagaucggcaacaucaucagcaucuggauccugcacagcauccagcugggcaaccagaaccagaucgagaccugcaaccagagcgugaucaccuacgagaacaacaccugggugaaccagaccuacgugaacaucagcaacaccaacuucgccgccggccagagcguggugagcgugaagcuggccggcaacagcagccugugccccgugagcggcugggccaucuacagcaaggacaacagcaucagaaucggcagcaagggcgacguguucgugaucagagagcccuucaucagcugcagcccccuggagugcagaaccuucuuccugacccagggcgcccugcugaacgacaagcacagcaacggcaccaucaaggacagaagccccuacagaacccugaugagcugccccaucggcgaggugcccagccccuacaacagcagauucgagagcguggccuggagcgccagcgccugccacgacggcaucaacuggcugaccaucggcaucagcggccccgacaacggcgccguggccgugcugaaguacaacggcaucaucaccgacaccaucaagagcuggagaaacaacauccugagaacccaggagagcgagugcgccugcgugaacggcagcugcuucaccgugaugaccgacggccccagcgacggccaggccagcuacaagaucuucagaaucgagaagggcaagaucgugaagagcguggagaugaacgcccccaacuaccacuacgaggagugcagcugcuaccccgacagcagcgagaucaccugcgugugcagagacaacuggcacggcagcaacagacccugggugagcuucaaccagaaccuggaguaccagaucggcuacaucugcagcggcaucuucggcgacaaccccagacccaacgacaagaccggcagcugcggccccgugagcagcaacggcgccaacggcgugaagggcuucagcuucaaguacggcaacggcguguggaucggcagaaccaagagcaucagcagcagaaacggcuucgagaugaucugggaccccaacggcuggaccggcaccgacaacaacuucgccaucaagcaggacaucgugggcaucaacgaguggagcggcuacagcggcagcuucgugcagcaccccgagcugaccggccuggacugcaucagacccugcuucuggguggagcugaucagaggcagacccaaggagaacaccaucuggaccagcggcagcagcaucagcuucugcggcgugaacagcgacaccgugggcuggagcuggcccgacggcgccgagcugcccuucaccaucgacaaguga

SEQ ID NO: 179519 - RNA, 1410 nt, Artificial Sequence; identical to SEQ ID NO: 178700
  derived and/or modified CDS sequence (opt4) from neuraminidase__InfluenzaA__ADM13354

SEQ ID NO: 179520 - RNA, 1410 nt, Artificial Sequence; identical to SEQ ID NO: 177975
  derived and/or modified CDS sequence (opt4) from neuraminidase__InfluenzaA__ADM13363

SEQ ID NO: 179521 - RNA, 1410 nt, Artificial Sequence
  derived and/or modified CDS sequence (opt4) from neuraminidase__InfluenzaA__ADM13464
augaaccccaaccagaagaucaucaccaucggcagcgugagccugaccaucgccaccgugugcuuccugaugcagaucgccauccuggugaccaccgugacccugcacuucaagcaguacgagugcgacagccccgccagcaaccaggugaugcccugcgagcccaucaucaucgagagaaacaucaccgagaucguguaccugaacaacaccaccaucgagaaggagaucugccccaaggugguggaguacagaaacuggagcaagccccagugccagaucaccggcuucgcccccuucagcaaggacaacagcaucagacugagcgccggcggcgacaucugggugaccagagagcccuacgugagcugcgaccacggcaagugcuaccaguucgcccugggccagggcaccacccuggacaacaagcacagcaacgacaccauccacgacagaaucccccacagaacccugcugaugaacgagcugggcgugcccuuccaccugggcaccagacaggugugcaucgccuggagcagcagcagcugccacgacggcaaggccuggcugcacgugugcaucaccggcaacgacaagaacgccaccgccagcuucaucuacgacggcagacugguggacagcaucggcagcuggagccagaacauccugagaacccaggagagcgagugcgugugcaucaacggcaccugcaccguggugaugaccgacggcagcgccagcggcagagccgacaccagaauccuguucaucgaggagggcaagaucgugcacaucagcccccugagcggcagcgcccagcacguggaggagugcagcugcuaccccagauaccccggcgugagaugcaucugcagagacaacuggaagggcagcaacagacccgugguggacaucaacauggaggacuacagcaucgacagcagcuacgugugcagcggccuggugggcgacacccccagaaacgacgacagaagcagcaacagcaacugcagaaaccccaacaacgagagaggcaaccagggcgugaagggcugggccuucgacaacggcgacgacguguggaugggcagaaccaucagcaaggaccugagaagcggcuacgagaccuucaaggugaucggcggcuggagcacccccaacagcaagagccagaucaacagacaggugaucguggacagcgacaacagaagcggcuacagcggcaucuucagcguggagggcaagagcugcaucaacagaugcuucuacguggagcugaucagaggcagagagcaggagaccagagugugguggaccagcaacagcaucgugguguucugcggcaccagcggcaccuacggcaccggcagcuggcccgacggcgccaacaucaacuucaugcccaucuga

SEQ ID NO: 179522 - RNA, 1410 nt, Artificial Sequence
  derived and/or modified CDS sequence (opt4) from neuraminidase__InfluenzaA__ADM13465
augaaccccaaccagaagaucaucaccaucggcagcgugagccugaccaucgccaccgugugcuuccugaugcagaucgccauccuggugaccaccgugacccugcacuucaagcaguacgagugcgacagccccgccagcaaccaggugaugcccugcgagcccaucaucaucgagagaaacaucaccgagaucguguaccugaacaacaccaccaucgagaaggagaucugccccaaggugguggaguacagaaacuggagcaagccccagugccagaucaccggcuucgcccccuucagcaaggacaacagcaucagacugagcgccggcggcgacaucugggugaccagagagcccuacgugagcugcgaccacggcaagugcuaccaguucgcccugggccagggcaccacccuggacaacaagcacagcaacgacaccauccacgacagaaucccccacagaacccugcugaugaacgagcugggcgugcccuuccaccugggcaccagacaggugugcaucgccuggagcagcagcagcugccacgacggcaaggccuggcugcacgugugcaucaccggcgacgacaagaacgccaccgccagcuucaucuacgacggcagacugguggacagcaucggcagcuggagccagaacauccugagaacccaggagagcgagugcgugugcaucaacggcaccugcaccguggugaugaccgacggcagcgccagcggcagagccgacaccagaauccuguucaucgaggagggcaagaucgugcacaucagcccccugagcggcagcgcccagcacguggaggagugcagcugcuaccccagauaccccggcgugagaugcaucugcagagacaacuggaagggcagcaacagacccgugguggacaucaacauggaggacuacagcaucgacagcagcuacgugugcagcggccuggugggcgacacccccagaaacgacgacagaagcagcaacagcaacugcagaaaccccaacaacgagagaggcaaccagggcgugaagggcugggccuucgacaacggcgacgacguguggaugggcagaaccaucagcaaggaccugagaagcggcuacgagaccuucaaggugaucggcggcuggagcacccccaacagcaagagccagaucaacagacaggugaucguggacagcgacaacagaagcggcuacagcggcaucuucagcguggagggcaagagcugcaucaacagaugcuucuacguggagcugaugagaggcagaaagcaggagaccagagugugguggaccagcaacagcaucgugguguucugcggcaccagcggcaccuacggcaccggcagcuggcccgacggcgccaacaucaacuucaugcccaucuga

SEQ ID NO: 179523 - RNA, 1410 nt, Artificial Sequence; identical to SEQ ID NO: 174155
  derived and/or modified CDS sequence (opt4) from neuraminidase__InfluenzaA__ADM13466

SEQ ID NO: 179524 - RNA, 1410 nt, Artificial Sequence
  derived and/or modified CDS sequence (opt4) from neuraminidase__InfluenzaA__ADM13467
augaaccccaaccagaagaucaucaccaucggcagcgugagccugaccaucgccaccgugugcuuccugaugcagaucgccauccuggugaccaccgugacccugcacuucaagcaguacgagugcgacagccccgccagcaaccaggugaugcccugcgagcccaucaucaucgagagaaacaucaccgagaucguguaccugaacaacaccaccaucgagaaggagaucugccccaaggugguggaguacagaaacuggagcaagccccagugccagaucaccggcuucgcccccuucagcaaggacaacagcaucagacugagcagcggcggcgacaucugggugaccagagagcccuacgugagcugcgaccacggcaagugcuaccaguucgcccugggccagggcaccacccuggacaacaagcacagcaacgacaccauccacgacagaaucccccacagaacccugcugaugaacgagcugggcgugcccuuccaccugggcaccagacaggugugcaucgccuggagcagcagcagcugccacgacggcaaggccuggcugcacgugugcaucaccggcgacgacaagaacgccaccgccagcuucaucuacgacggcagacugguggacagcaucggcagcuggagccagaacauccugagaacccaggagagcgagugcgugugcaucaacggcaccugcaccguggugaugaccgacggcagcgccagcggcagagccgacaccagaauccuguucaucgaggagggcaagaucgugcacaucagcccccugagcggcagcgcccagcacguggaggagugcagcugcuaccccagauaccccggcgugagaugcaucugcagagacaacuggaagggcagcaacagacccgugguggacaucaacauggaggacuacagcaucgacagcagcuacgugugcagcggccuggugggcgacacccccagaaacgacgacagaagcagcaacagcaacugcagaaaccccaacaacgagagaggcaaccagggcgugaagggcugggccuucgacaacggcgacgacguguggaugggcagaaccaucagcaaggaccugagaagcggcuacgagaccuucaaggugaucggcggcuggagcacccccaacagcaagagccagaucaacagacaggugaucguggacagcgacaacagaagcggcuacagcggcaucuucagcguggagggcaagagcugcaucaacagaugcuucuacguggagcugaucagaggcagaaagcaggagaccagagugugguggaccagcaacagcaucgugguguucugcggcaccagcggcaccuacggcaccggcagcuggcccgacggcgccaacaucaacuucaugcccaucuga

SEQ ID NO: 179525 - RNA, 1410 nt, Artificial Sequence; identical to SEQ ID NO: 174155
  derived and/or modified CDS sequence (opt4) from neuraminidase__InfluenzaA__ADM13468

SEQ ID NO: 179526 - RNA, 1410 nt, Artificial Sequence
  derived and/or modified CDS sequence (opt4) from neuraminidase__InfluenzaA__ADM13469
augaaccccaaccagaagaucaucaccaucggcagcgugagccugaccaucgccaccgccugcuuccugaugcagaucgccauccuggugaccaccgugacccugcacuucaagcaguacgagugcgacagccccgccagcaaccaggugaugcccugcgagcccaucaucaucgagagaaacaucaccgagaucguguaccugaacaacaccaccaucgagaaggagaucugccccaaggugguggaguacagaaacuggagcaagccccagugccagaucaccggcuucgcccccuucagcaaggacaacagcaucagacugagcgccggcggcgacaucugggugaccagagagcccuacgugagcugcgaccacggcaagugcuaccaguucgcccugggccagggcaccacccuggacaacaagcacagcaacgacaccauccacgacagaaucccccacagaacccugcugaugaacgagcugggcgugcccuuccaccugggcaccagacaggugugcaucgccuggagcagcagcagcugccacgacggcaaggccuggcugcacgugugcaucaccggcgacgacaagaacgccaccgccagcuucaucuacgacggcagacugguggacagcaucggcagcuggagccagaacauccugagaacccaggagagcgagugcgugugcaucaacggcaccugcaccguggugaugaccgacggcagcgccagcggcagagccgacaccagaauccuguucaucgaggagggcaagaucgugcacaucagcccccugagcggcagcgcccagcacguggaggagugcagcugcuaccccagauaccccggcgugagaugcaucugcagagacaacuggaagggcagcaacagacccgugguggacaucaacauggaggacuacagcaucgacagcagcuacgugugcagcggccuggugggcgacacccccagaaacgacgacagaagcagcaacagcaacugcagaaaccccaacaacgagagaggcaaccagggcgugaagggcugggccuucgacaacggcgacgacguguggaugggcagaaccaucagcaaggaccugagaagcggcuacgagaccuucaaggugaucggcggcuggagcacccccaacagcaagagccagaucaacagacaggugaucguggacagcgacaacagaagcggcuacagcggcaucuucagcguggagggcaagagcugcaucaacagaugcuucuacguggagcugaucagaggcagaaagcaggagaccagagugugguggaccagcaacagcaucgugguguucugcggcaccagcggcaccuacggcaccggcagcuggcccgacggcgccaacaucaacuucaugcccaucuga

SEQ ID NO: 179527 - RNA, 1410 nt, Artificial Sequence
  derived and/or modified CDS sequence (opt4) from neuraminidase__InfluenzaA__ADM13470
augaaccccaaccagaagaucaucaccaucggcagcgugagccugaccaucgccaccgugugcuuccugaugcagaucgccauccuggugaccaccgugacccugcacuucaagcaguacgagugcgacagccccgccagcaaccaggugaugcccugcgagcccaucaucaucgagagaaacaucaccgagaucguguaccugaacaacaccaccaucgagaaggagaucugccccaaggugguggaguacagaaacuggagcaagccccagugccagaucaccggcuucgcccccuucagcaaggacaacagcaucagacugagcgccggcggcgacaucugggugaccagagagcccuacgugagcugcgaccacggcaagugcuaccaguucgcccugggccagggcaccacccuggacaacaagcacagcaacgacaccauccacgacagaaucccccacagaacccugcugaugaacgagcugggcgugcccuuccaccugggcaccagacaggugugcaucgccuggagcagcagcagcugccacgacggcaaggccuggcugcacgugugcaucaccggcgacgacaagaacgccaccgccagcuucaucuacgacggcagacugguggacagcaucggcagcuggagccagaacauccugagaacccaggagagcgagugcgugugcaucaacggcaccugcaccguggugaugaccgacggcagcgccagcggcagagccgacaccagaauccuguucaucgaggagggcaagaucgugcacaucagcccccugagcggcagcgcccagcacguggaggagugcagcugcuaccccagauaccccggcgugagaugcaucugcagagacaacuggaagggcagcaacagacccgugguggacaucaacauggaggacuacagcaucgacagcagcuacgugugcagcggccuggugggcgacacccccagaaacgacgacagaagcagcaacagcaacugcagaaaccccaacaacgagagaggcaaccagggcgugaagggcugggccuucgacaacggcgacgacguguggaugggcagaaccaucagcaaggaccugagaagcggcuacgagaccuucaaggugaucggcggcuggagcacccccaacagcaagagccagaucaacagacaggugaucaucgacagcgacaacagaagcggcuacagcggcaucuucagcguggagggcaagagcugcaucaacagaugcuucuacguggagcugaucagaggcagaaagcaggagaccagagugugguggaccagcaacagcaucgugguguucugcggcaccagcggcaccuacggcaccggcagcuggcccgacggcgccaacaucaacuucaugcccaucuga

SEQ ID NO: 179528 - RNA, 1410 nt, Artificial Sequence
  derived and/or modified CDS sequence (opt4) from neuraminidase__InfluenzaA__ADM13471
augaaccccaaccagaagaucaucaccaucggcagcgugagccugaccaucgccaccgugugcuuccugaugcagaucgccauccuggugaccaccgugacccugcacuucaagcaguacgagugcgacagccccgccagcaaccaggugaugcccugcgagcccaucaucaucgagagaaacaucaccgagaucguguaccugaacaacaccaccaucgagaaggagaucugccccaaggugguggaguacagaaacuggagcaagccccagugccagaucaccggcuucgcccccuucagcaaggacaacagcaucagaaucagcgccggcggcgacaucugggugaccagagagcccuacgugagcugcgaccacggcaagugcuaccaguucgcccugggccagggcaccacccuggacaacaagcacagcaacgacaccauccacgacagaaucccccacagaacccugcugaugaacgagcugggcgugcccuuccaccugggcaccagacaggugugcaucgccuggagcagcagcagcugccacgacggcaaggccuggcugcacgugugcaucaccggcgacgacaagaacgccaccgccagcuucaucuacgacggcagacugguggacagcaucggcagcuggagccagaacauccugagaacccaggagagcgagugcgugugcaucaacggcaccugcaccguggugaugaccgacggcagcgccagcggcagagccgacaccagaauccuguucaucgaggagggcaagaucgugcacaucagcccccugagcggcagcgcccagcacguggaggagugcagcugcuaccccagauaccccggcgugagaugcaucugcagagacaacuggaagggcagcaacagacccgugguggacaucaacauggaggacuacagcaucgacagcagcuacgugugcagcggccuggugggcgacacccccagaaacgacgacagaagcagcaacagcaacugcagaaaccccaacaacgagagaggcaaccagggcgugaagggcugggccuucgacaacggcgacgacguguggaugggcagaaccaucagcaaggaccugagaagcggcuacgagaccuucaaggugaucggcggcuggagcacccccaacagcaagagccagaucaacagacaggugaucguggacagcgacaacagaagcggcuacagcggcaucuucagcguggagggcaagagcugcaucaacagaugcuucuacguggagcugaucagaggcagaaagcaggagaccagagugugguggaccagcaacagcaucgugguguucugcggcaccagcggcaccuacggcaccggcagcuggcccgacggcgccaacaucaacuucaugcccaucuga

SEQ ID NO: 179529 - RNA, 1410 nt, Artificial Sequence; identical to SEQ ID NO: 176568
  derived and/or modified CDS sequence (opt4) from neuraminidase__InfluenzaA__ADM13472

SEQ ID NO: 179530 - RNA, 1410 nt, Artificial Sequence; identical to SEQ ID NO: 174155
  derived and/or modified CDS sequence (opt4) from neuraminidase__InfluenzaA__ADM13473

SEQ ID NO: 179531 - RNA, 1410 nt, Artificial Sequence; identical to SEQ ID NO: 176563
  derived and/or modified CDS sequence (opt4) from neuraminidase__InfluenzaA__ADM13474

SEQ ID NO: 179532 - RNA, 1410 nt, Artificial Sequence
  derived and/or modified CDS sequence (opt4) from neuraminidase__InfluenzaA__ADM14469
augaaccccaaccagaagaucaucaccaucggcagcgugugcaugaccaucggcauggccaaccugauccugcagaucggcaacaucaucagcaucuggaucagccacagcauccagcugggcaaccagaaccagaucgagaccugcaaccagagcgugaucaccuacgagaacaacaccugggugaaccagaccuacgugaacaucagcaacaccaacuucgccgccggccagagcguggugagcgugaagcuggccggcaacagcagccugugccccgugagcggcugggccaucuacagcaaggacaacagcaugagaaucggcagcaagggcgacguguucgugaucagagagcccuucaucagcugcagcccccuggagugcagaaccuucuuccugacccagggcgcccugcugaacgacaagcacagcaacggcaccaucaaggacagaagccccuacagaacccugaugagcugccccaucggcgaggugcccagccccuacaacagcagauucgagagcguggccuggagcgccagcgccugccacgacggcaucaacuggcugaccaucggcaucagcggccccgacaacggcgccguggccgugcugaaguacaacggcaucaucaccgacaccaucaagagcuggagaaacaacauccugagaacccaggagagcgagugcgccugcgugaacggcagcugcuucaccgugaugaccgacggccccagcgacggccaggccagcuacaagaucuucagaaucgagaagggcaagaucgugaagagcguggagaugaacgcccccaacuaccacuacgaggagugcagcugcuaccccgacagcagcgagaucaccugcgugugcagagacaacuggcacggcagcaacagacccugggugagcuucaaccagaaccuggaguaccagaucggcuacaucugcagcggcaucuucggcgacaaccccagacccaacgacaagaccggcagcugcggccccgugagcagcaacggcgccaacggcgugaagggcuucagcuucaaguacggcaacggcguguggaucggcagaaccaagagcaucagcagcagaaccggcuucgagaugaucugggaccccaacggcuggaccggcaccgacaacaacuucagcaucaagcaggacaucgugggcaucaacgaguggagcggcuacagcggcagcuucgugcagcaccccgagcugaccggccuggacugcaucagacccugcuucuggguggagcugaucagaggcagacccaaggagaacaccaucuggaccagcggcagcagcaucagcuucugcggcgugaacagcgacaccgugggcuggagcuggcccgacggcgccgagcugcccuucaccaucgacaaguga

SEQ ID NO: 179533 - RNA, 1410 nt, Artificial Sequence; identical to SEQ ID NO: 176798
  derived and/or modified CDS sequence (opt4) from neuraminidase__InfluenzaA__ADM14479

SEQ ID NO: 179534 - RNA, 1410 nt, Artificial Sequence; identical to SEQ ID NO: 176798
  derived and/or modified CDS sequence (opt4) from neuraminidase__InfluenzaA__ADM14499

SEQ ID NO: 179535 - RNA, 1410 nt, Artificial Sequence; identical to SEQ ID NO: 178311
  derived and/or modified CDS sequence (opt4) from neuraminidase__InfluenzaA__ADM14518

SEQ ID NO: 179536 - RNA, 1410 nt, Artificial Sequence; identical to SEQ ID NO: 179136
  derived and/or modified CDS sequence (opt4) from neuraminidase__InfluenzaA__ADM14527

SEQ ID NO: 179537 - RNA, 1410 nt, Artificial Sequence; identical to SEQ ID NO: 178229
  derived and/or modified CDS sequence (opt4) from neuraminidase__InfluenzaA__ADM14537

SEQ ID NO: 179538 - RNA, 1410 nt, Artificial Sequence; identical to SEQ ID NO: 176798
  derived and/or modified CDS sequence (opt4) from neuraminidase__InfluenzaA__ADM14546

SEQ ID NO: 179539 - RNA, 1410 nt, Artificial Sequence
  derived and/or modified CDS sequence (opt4) from neuraminidase__InfluenzaA__ADM14555
augaaccccaaccagaagaucaucaccaucggcagcgugugcaugaccaucggcauggccaaccugauccugcagaucggcaacaucaucagcaucuggaucagccacagcauccagcugggcaaccagaaccagaucgagaccugcaaccagagcgugaucaccuacgagaacaacaccugggugaaccagaccuacgugaacaucagcaacaccaacuucgccgccggccagagcguggugagcgugaagcuggccggcaacagcagccugugccccgugagcggcugggccaucuacagcaaggacaacagcaucagaaucggcagcaagggcgacguguucgugaucagagagcccuucaucagcugcagcccccuggagugcagaaccuucuuccugacccagggcgcccugcugaacgacaagcacagcaacggcaccaucaaggacagaagccccuacagaacccugaugagcugccccaucggcgaggugcccagccccuacaacagcagauucgagagcguggccuggagcgccagcgccugccacgacggcaucaacuggcugaccaucggcaucagcggccccgacaacggcgccguggccgugcugaaguacaacggcaucaucaccgacaccaucaagagcuggagaaacaacauccugagaacccaggagagcgagugcgccugcgugaacggcagcugcuucaccgugaugaccgacggccccagcgacggccaggccagcuacaagaucuucagaaucgagaagggcaagaucgugaagagcguggagaugaacgcccccaacuaccacuacgaggagugcagcugcuaccccgacagcagcgagaucaccugcgugugcagagacaacuggcacggcagcaacagacccugggugagcuucaaccagaaccuggaguaccagaucggcuacaucugcagcggcaucuucggcgacaaccccagacccaacgacaagaccggcagcugcggccccgugagcagcaacggcgccaacggcgugaagggcuucagcuucagauacggcaacggcguguggaucggcagaaccaagagcaucagcagcagaaacggcuucgagaugaucugggaccccaacggcuggaccggcaccgacaacaacuucagcaucaagcaggacaucgugggcaucaacgaguggagcggcuacagcggcagcuucgugcagcaccccgagcugaccggccuggacugcaucagacccugcuucuggguggagcugaucagaggcagacccaaggagaacaccaucuggaccagcggcagcagcaucagcuucugcggcgugaacagcgacaccgugggcuggagcuggcccgacggcgccgagcugcccuucaccaucgacaaguga

SEQ ID NO: 179540 - RNA, 1410 nt, Artificial Sequence; identical to SEQ ID NO: 176798
  derived and/or modified CDS sequence (opt4) from neuraminidase__InfluenzaA__ADM14573

SEQ ID NO: 179541 - RNA, 1410 nt, Artificial Sequence; identical to SEQ ID NO: 176798
  derived and/or modified CDS sequence (opt4) from neuraminidase__InfluenzaA__ADM14582

SEQ ID NO: 179542 - RNA, 1410 nt, Artificial Sequence; identical to SEQ ID NO: 176798
  derived and/or modified CDS sequence (opt4) from neuraminidase__InfluenzaA__ADM14591

SEQ ID NO: 179543 - RNA, 1410 nt, Artificial Sequence
  derived and/or modified CDS sequence (opt4) from neuraminidase__InfluenzaA__ADM14601
augaaccccaaccagaagaucaucaccaucggcagcgugugcaugaccaucggcauggccaaccugauccugcagaucggcaacaucaucagcaucuggaucagccacagcauccagcugggcaaccagaaccagaucgagaccugcaaccagagcgugaucaccuacgagaacaacaccugggugaaccagaccuacgugaacaucagcaacaccaacuucgccgccggccagagcguggugagcgugaagcuggccggcaacagcagccugugccccgugaacggcugggccaucuacagcaaggacaacagcgugagaaucggcagcaagggcgacguguucgugaucagagagcccuucaucagcugcagcccccuggagugcagaaccuucuuccugacccagggcgcccugcugaacgacaagcacagcaacggcaccaucaaggacagaagccccuacagaacccugaugagcugccccaucggcgaggugcccagccccuacaacagcagauucgagagcguggccuggagcgccagcgccugccacgacggcaucaacuggcugaccaucggcaucagcggccccgacaacggcgccguggccgugcugaaguacaacggcaucaucaccgacaccaucaagagcuggagaaacaacauccugagaacccaggagagcgagugcgccugcgugaacggcagcugcuucaccgugaugaccgacggccccagcgacggccaggccagcuacaagaucuucagaaucgagaagggcaagaucgugaagagcguggagaugaacgcccccaacuaccacuacgaggagugcagcugcuaccccgacagcagcgagaucaccugcgugugcagagacaacuggcacggcagcaacagacccugggugagcuucaaccagaaccuggaguaccagaucggcuacaucugcagcggcaucuucggcgacaaccccagacccaacgacaagaccggcagcugcggccccgugagcagcaacggcgccaacggcgugaagggcuucagcuucaaguacggcaacggcguguggaucggcagaaccaagagcaucagcagcagaaacggcuucgagaugaucugggaccccaacggcuggaccggcaccgacaacaacuucagcaucaagcaggacaucgugggcaucaacgaguggagcggcuacagcggcagcuucgugcagcaccccgagcugaccggccuggacugcaucagacccugcuucuggguggagcugaucagaggcagacccaaggagaacaccaucuggaccagcggcagcagcaucagcuucugcggcgugaacagcgacaccgugggcuggagcuggcccgacggcgccgagcugcccuucaccaucgacaaguga

SEQ ID NO: 179544 - RNA, 1410 nt, Artificial Sequence
  derived and/or modified CDS sequence (opt4) from neuraminidase__InfluenzaA__ADM14611
augaaccccaaccagaagaucaucaccaucggcagcgugugcaugaccaucggcauggccaaccugauccugcagaucggcaacaucaucagcaucuggaucagccacagcauccagcugggcaaccagaaccagaucgagaccugcaaccagagcgugaucaccuacgagaacaacaccugggugaaccagaccuacgugaacaucagcaacaccaacuucgccgccggccagagcguggugagcgugaagcugagcggcaacagcagccugugccccgugagcggcugggccaucuacagcaaggacaacagcaucagaaucggcagcaagggcgacguguucgugaucagagagcccuucaucagcugcagcccccuggagugcagaaccuucuuccugacccagggcgcccugcugaacgacaagcacagcaacggcaccaucaaggacagaagccccuacagaacccugaugagcugccccaucggcgaggugcccagccccuacaacagcagauucgagagcguggccuggagcgccagcgccugccacgacggcaucaacuggcugaccaucggcaucagcggccccgacaacggcgccguggccgugcugaaguacaacggcaucaucaccgacaccaucaagagcuggagaaacaacauccugagaacccaggagagcgagugcgccugcgugaacggcagcugcuucaccgugaugaccgacggccccagcgacggccaggccagcuacaagaucuucagaaucgagaagggcaagaucgugaagagcguggagaugaacgcccccaacuaccacuacgaggagugcagcugcuaccccgacagcagcgagaucaccugcgugugcagagacaacuggcacggcagcaacagacccugggugagcuucaaccagaaccuggaguaccagaucggcuacaucugcagcggcaucuucggcgacaaccccagacccaacgacaagaccggcagcugcggccccgugagcagcaacggcgccaacggcgugaagggcuucagcuucaaguacggcaacggcguguggaucggcagaaccaagagcaucagcagcagaaacggcuucgagaugaucugggaccccaacggcuggaccggcaccgacaacaacuucagcaucaagcaggacaucgugggcaucaacgaguggagcggcuacagcggcagcuucgugcagcaccccgagcugaccggccuggacugcaucagacccugcuucuggguggagcugaucagaggcagacccaaggagaacaccaucuggaccagcggcagcagcaucagcuucugcggcgugaacagcgacaccgugggcuggagcuggcccgacggcgccgagcugcccuucaccaucgacaaguga

SEQ ID NO: 179545 - RNA, 1410 nt, Artificial Sequence; identical to SEQ ID NO: 176798
  derived and/or modified CDS sequence (opt4) from neuraminidase__InfluenzaA__ADM14620

SEQ ID NO: 179546 - RNA, 1410 nt, Artificial Sequence; identical to SEQ ID NO: 176798
  derived and/or modified CDS sequence (opt4) from neuraminidase__InfluenzaA__ADM14629

SEQ ID NO: 179547 - RNA, 1410 nt, Artificial Sequence; identical to SEQ ID NO: 176798
  derived and/or modified CDS sequence (opt4) from neuraminidase__InfluenzaA__ADM14639

SEQ ID NO: 179548 - RNA, 1410 nt, Artificial Sequence; identical to SEQ ID NO: 176798
  derived and/or modified CDS sequence (opt4) from neuraminidase__InfluenzaA__ADM14657

SEQ ID NO: 179549 - RNA, 1410 nt, Artificial Sequence; identical to SEQ ID NO: 176798
  derived and/or modified CDS sequence (opt4) from neuraminidase__InfluenzaA__ADM14666

SEQ ID NO: 179550 - RNA, 1410 nt, Artificial Sequence; identical to SEQ ID NO: 176798
  derived and/or modified CDS sequence (opt4) from neuraminidase__InfluenzaA__ADM14684

SEQ ID NO: 179551 - RNA, 1410 nt, Artificial Sequence
  derived and/or modified CDS sequence (opt4) from neuraminidase__InfluenzaA__ADM14693
augaaccccaaccagaagaugaucaccaucggcagcgugugcaugaccaucggcauggccaaccugauccugcagaucggcaacaucaucagcaucuggaucagccacagcauccagcugggcaaccagaaccagaucgagaccugcaaccagagcgugaucaccuacgagaacaacaccugggugaaccagaccuacgugaacaucagcaacaccaacuucgccgccggccagagcguggugagcgugaagcuggccggcaacagcagccugugccccgugagcggcugggccaucuacagcaaggacaacagcaucagaaucggcagcaagggcgacguguucgugaucagagagcccuucaucagcugcagcccccuggagugcagaaccuucuuccugacccagggcgcccugcugaacgacaagcacagcaacggcaccaucaaggacagaagccccuacagaacccugaugagcugccccaucggcgaggugcccagccccuacaacagcagauucgagagcguggccuggagcgccagcgccugccacgacggcaucaacuggcugaccaucggcaucagcggccccgacaacggcgccguggccgugcugaaguacaacggcaucaucaccgacaccaucaagagcuggagaaacaacauccugagaacccaggagagcgagugcgccugcgugaacggcagcugcuucaccgugaugaccgacggccccagcgacggccaggccagcuacaagaucuucagaaucgagaagggcaagaucgugaagagcguggagaugaacgcccccaacuaccacuacgaggagugcagcugcuaccccgacagcagcgagaucaccugcgugugcagagacaacuggcacggcagcaacagacccugggugagcuucaaccagaaccuggaguaccagaucggcuacaucugcagcggcaucuucggcgacaaccccagacccaacgacaagaccggcagcugcggccccgugagcagcaacggcgccaacggcgugaagggcuucagcuucaaguacggcaacggcguguggaucggcagaaccaagagcaucagcagcagaaacggcuucgagaugaucugggaccccaacggcuggaccggcaccgacaacaacuucagcaucaagcaggacaucgugggcaucaacgaguggagcggcuacagcggcagcuucgugcagcaccccgagcugaccggccuggacugcaucagacccugcuucuggguggagcugaucagaggcagacccaaggagaacaccaucuggaccagcggcagcagcaucagcuucugcggcgugaacagcgacaccgugggcuggagcuggcccgacggcgccgagcugcccuucaccaucgacaaguga

SEQ ID NO: 179552 - RNA, 1410 nt, Artificial Sequence
  derived and/or modified CDS sequence (opt4) from neuraminidase__InfluenzaA__ADM14702
augaaccccaaccagaagaucaucaccaucggcagcgugugcaugaccaucggcauggccaaccugauccugcagaucggcaacaucaucagcaucuggaucagccacagcauccagcugggcaaccagaaccagaucgagaccugcaaccagagcgugaucaccuacgagaacaacaccugggugaaccagaccuacgugaacaucagcaacaccaacuucgccgccggccagagcguggugagcgugaagcuggccggcaacagcagccugugccccgugagcggcugggccaucuacagcaaggacaacagcaucagaaucggcagcaagggcgacguguucgugaucagagagcccuucaucagcugcagccaccuggagugcagaaccuucuuccugacccagggcgcccugcugaacgacaagcacagcaacggcaccaucaaggacagaagccccuacagaacccugaugagcugccccaucggcgaggugcccagccccuacaacagcagauucgagagcguggccuggagcgccagcgccugccacgacggcaucaacuggcugaccaucggcaucagcggccccgacaacggcgccguggccgugcugaaguacaacggcaucaucaccgacaccaucaagagcuggagaaacaacauccugagaacccaggagagcgagugcgccugcgugaacggcagcugcuucaccgugaugaccgacggccccagcgacggccaggccagcuacaagaucuucagaaucgagaagggcaagaucgugaagagcguggagaugaacgcccccaacuaccacuacgaggagugcagcugcuaccccgacagcagcgagaucaccugcgugugcagagacaacuggcacggcagcaacagacccugggugagcuucaaccagaaccuggaguaccagaucggcuacaucugcagcggcaucuucggcgacaaccccagacccaacgacaagaccggcagcugcggccccgugagcagcaacggcgccaacggcgugaagggcuucagcuucaaguacggcaacggcgccuggaucggcagaaccaagagcaccagcagcagaaacggcuucgagaugaucugggaccccaacggcuggaccggcaccgacaacaacuucagcaucaagcaggacaucgugggcaucaacgaguggagcggcuacagcggcagcuucgugcagcaccccgagcugaccggccuggacugcaucagacccugcuucuggguggagcugaucagaggcagacccaaggagaacaccaucuggaccagcggcagcagcaucagcuucugcggcgugaacagcgacaccgugggcuggagcuggcccgacggcgccgagcugcccuucaccaucgacaaguga

SEQ ID NO: 179553 - RNA, 1410 nt, Artificial Sequence; identical to SEQ ID NO: 178700
  derived and/or modified CDS sequence (opt4) from neuraminidase__InfluenzaA__ADM14711

SEQ ID NO: 179554 - RNA, 1410 nt, Artificial Sequence
  derived and/or modified CDS sequence (opt4) from neuraminidase__InfluenzaA__ADM14720
augaaccccaaccagaagaucaucaccaucggcagcgugugcaugaccaucggcauggccaaccugauccugcagaucggcaacaucaucagcaucuggaucagccacagcauccagcugggcaaccagaaccagaucgagaccugcaaccagagcgugaucaccuacgagaacaacaccugggugaaccagaccuacgugaacaucagcaacaccaacuucgccgccggccagagcguggugagcgugaagcuggccggcaacagcagccugugccccgugagcggcugggccaucuacagcaaggacaacagcaucagaaucggcagcaagggcgacguguucgugaucagagagcccuucaucagcugcagcccccuggagugcagaaccuucuuccugacccagggcgcccugcugaacgacaagcacagcaacggcaccaucaaggacagaagccccuacagaacccugaugagcugccccaucggcgaggugcccagccccuacaacagcagauucgagagcguggccuggagcgccagcgccugccacgacggcaucaacuggcugaccaucggcaucagcggccccgacaacggcgccguggccgugcugaaguacaacggcaucaucaccgacaccaucaagagcuggagaaacaacauccugagaacccaggagagcgagugcgccugcgugaacggcagcugcuucaccgugaugaccgacggccccagcgacggccaggccagcuacaagaucuucagaaucgagaagggcaagaucgugaagagcguggagaugaacgcccccaacuaccacuacgaggagugcagcugcuaccccgacagcagcgagaucaccugcgugugcagagacaacuggcacggcagcaacagacccugggugagcuucaaccagaaccuggaguaccagaucggcuacaucugcagcggcguguucggcgacaaccccagacccaacgacaagaccggcagcugcggccccgugagcagcaacggcgccaacggcgugaagggcuucagcuucaaguacggcaacggcguguggaucggcagaaccaagagcaucagcagcagaaacggcuucgagaugaucugggaccccaacggcuggaccggcaccgacaacaacuucagcaucaagcaggacaucgugggcaucaacgaguggagcggcuacagcggcagcuucgugcagcaccccgagcugaccggccuggacugcaucagacccugcuucuggguggagcugaucagaggcagacccaaggagaacaccaucuggaccagcggcagcagcaucagcuucugcggcgugaacagcgacaccgugggcuggagcuggcccgacggcgccgagcugcccuucaccaucgacaaguga

SEQ ID NO: 179555 - RNA, 1410 nt, Artificial Sequence
  derived and/or modified CDS sequence (opt4) from neuraminidase__InfluenzaA__ADM14730
augaaccccaaccagaagaucaucaccaucggcagcgugugcaugaccaucggcauggccaaccugauccugcagaucggcaacaucaucagcaucuggaucagccacagcauccagcugggcaaccagaaccagaucgagaccugcaaccagagcaucaucaccuacgagaacaacaccugggugaaccagaccuacgugaacaucagcaacaccaacuucgccgccggccagagcguggugagcgugaagcuggccggcaacagcagccugugccccgugagcggcugggccguguacagcaaggacaacagcaucagaaucggcagcaagggcgacgugcuggugaucagagagcccuucaucagcugcagcccccuggagugcagaaccuucuuccugacccagggcgcccugcugaacgacaagcacagcaacggcaccaucaaggacagaagccccuacagaacccugaugagcugccccaucggcgaggugcccagccccuacaacagcagauucgagagcguggccuggagcgccagcgccugccacgacggcaucaacuggcugaccaucggcaucagcggccccgacaacggcgccguggccgugcugaaguacaacggcaucaucaccgacaccaucaagagcuggagaaacaacauccugagaacccaggagagcgagugcgccugcgugaacggcagcugcuucaccgugaugaccgacggccccagcgacggccaggccagcuacaagaucuucagaaucgagaagggcaagaucgugaagagcguggagaugaacgcccccaacuaccacuacgaggagugcagcugcuaccccgacagcagcgagaucaccugcgugugcagagacaacuggcacggcagcaacagacccugggugagcuucaaccagaaccuggaguaccagaucggcuacaucugcagcggcaucuucggcgacaaccccagacccaacgacaagaccggcagcugcggccccgugagcagcaacggcgccaacggcgugaagggcuucagcuucaaguacggcaacggcguguggaucggcagaaccaagagcaucagcagcagaagcggcuucgagaugaucugggaccccaacggcuggaccggcaccgacaacaacuucagcaucaagcaggacaucgugggcaucaacgaguggagcggcuacagcggcagcuucgugcagcaccccgagcugaccggccuggacugcaucagacccugcuucuggguggagcugaucagaggcagacccaaggagaacaccaucuggaccagcggcagcagcaucagcuucugcggcgugaacagcgacaccgugggcuggagcuggcccgacggcgccgagcugcccuucaccaucgacaaguga

SEQ ID NO: 179556 - RNA, 1350 nt, Artificial Sequence
  derived and/or modified CDS sequence (opt4) from neuraminidase__InfluenzaA__ADM14748
augaaccccaaccagaagaucaucaccaucggcagcgugugcaugaccaucggcauggccaaccugauccugcagaucggcaacaucaucagcaucuggaucagccacagcauccagcugggcaaccagaaccagaucgagaccugcaaccagagcgugaucaccuacgagaacaacaccugggugaaccagaccuacgugaacaucagcaacaccaacuucgccgccggccagagcguggugagcgugaagcuggccggcaacagcagccugugccccgugagcggcugggccaucuacagcaaggacaacagcaucagaaucugcagaaccuucuuccugacccagggcgcccugcugaacgacaagcacagcaacggcaccaucaaggacagaagccccuacagaacccugaugagcugccccaucggcgaggugcccagccccuacaacagcagauucgagagcguggccuggagcgccagcgccugccacgacggcaucaacuggcugaccaucggcaucagcggccccgacaacggcgccguggccgugcugaaguacaacggcaucaucaccgacaccaucaagagcuggagaaacaacauccugagaacccaggagagcgagugcgccugcgugaacggcagcugcuucaccgugaugaccgacggccccagcgacggccaggccagcuacaagaucuucagaaucgagaagggcaagaucgugaagagcguggagaugaacgcccccaacuaccacuacgaggagugcagcugcuaccccgacagcagcgagaucaccugcgugugcagagacaacuggcacggcagcaacagacccugggugagcuucaaccagaaccuggaguaccagaucggcuacaucugcagcggcaucuucggcgacaaccccagacccaacgacaagaccggcagcugcggccccgugagcagcaacggcgccaacggcgugaagggcuucagcuucaaguacggcaacggcguguggaucggcagaaccaagagcaucagcagcagaaacggcuucgagaugaucugggaccccaacggcuggaccggcaccgacaacaacuucagcaucaagcaggacaucgugggcaucaacgaguggagcggcuacagcggcagcuucgugcagcaccccgagcugaccggccuggacugcaucagacccugcuucuggguggagcugaucagaggcagacccaaggagaacaccaucuggaccagcggcagcagcaucagcuucugcggcgugaacagcgacaccgugggcuggagcuggcccgacggcgccgagcugcccuucaccaucgacaaguga

SEQ ID NO: 179557 - RNA, 1410 nt, Artificial Sequence
  derived and/or modified CDS sequence (opt4) from neuraminidase__InfluenzaA__ADM14758
augaaccccaaccagaagaucaucaccaucggcagcgugugcaugaccaucggcauggccaaccugauccugcagaucggcaacaucaucagcaucuggaucagccacagcauccagcugggcaaccagaaccagaucgagaccugcaaccagagcgugaucaccuacgagaacaacaccugggugaaccagaccuacgugaacaucagcaacaccaacuucgccgccggccagagcguggugagcgugaagcuggccggcaacagcagccugugccccgugagcggcugggccaucuacagcaaggacaacagcaucagaaucggcagcaagggcgacguguucgugaucagagagcccuucaucagcugcagcccccuggagugcagaaccuucuuccugacccagggcgcccugcugaacgacaagcacagcaacggcaccaucaaggacagaagccccuacagaacccugaugagcugccccaucggcgaggugcccagccccuacaacagcagauucgagagcguggccuggagcgccagcgccugccacgacggcaucaacuggcugaccaucggcaucagcggccccgacaacggcgccguggccgugcugaaguacaacggcaucaucaccgacaccaucaagagcuggagaaacaacauccugagaacccaggagagcgagugcgccugcgugaacggcagcugcuucaccgugaugaccgacggccccagcgacggccaggccagcuacaagaucuucagaaucgagaagggcaagaucgugaagagcguggagaucaacgcccccaacuaccacuacgaggagugcagcugcuaccccgacagcagcgagaucaccugcgugugcagagacaacuggcacggcagcaacagacccugggugagcuucaaccagaaccuggaguaccagaucggcuacaucugcagcggcaucuucggcgacaaccccagacccaacgacaagaccggcagcugcggccccgugagcagcaacggcgccaacggcgugaagggcuucagcuucaaguacggcaacggcguguggaucggcagaaccaagagcaucagcagcagaaacggcuucgagaugaucugggaccccaacggcuggaccggcaccgacaacaacuucagcaucaagcaggacaucgugggcaucaacgaguggagcggcuacagcggcagcuucgugcagcaccccgagcugaccggccuggacugcaucagacccugcuucuggguggagcugaucagaggcagacccaaggagaacaccaucuggaccagcggcagcagcaucagcuucugcggcgugaacagcgacaccgugggcuggagcuggcccgacggcgccgagcugcccuucaccaucgacaaguga

SEQ ID NO: 179558 - RNA, 1410 nt, Artificial Sequence; identical to SEQ ID NO: 179557
  derived and/or modified CDS sequence (opt4) from neuraminidase__InfluenzaA__ADM14767

SEQ ID NO: 179559 - RNA, 1410 nt, Artificial Sequence; identical to SEQ ID NO: 176798
  derived and/or modified CDS sequence (opt4) from neuraminidase__InfluenzaA__ADM14777

SEQ ID NO: 179560 - RNA, 1410 nt, Artificial Sequence; identical to SEQ ID NO: 176798
  derived and/or modified CDS sequence (opt4) from neuraminidase__InfluenzaA__ADM14814

SEQ ID NO: 179561 - RNA, 1410 nt, Artificial Sequence; identical to SEQ ID NO: 176798
  derived and/or modified CDS sequence (opt4) from neuraminidase__InfluenzaA__ADM14823

SEQ ID NO: 179562 - RNA, 1410 nt, Artificial Sequence; identical to SEQ ID NO: 178421
  derived and/or modified CDS sequence (opt4) from neuraminidase__InfluenzaA__ADM14841

SEQ ID NO: 179563 - RNA, 1410 nt, Artificial Sequence; identical to SEQ ID NO: 178421
  derived and/or modified CDS sequence (opt4) from neuraminidase__InfluenzaA__ADM14859

SEQ ID NO: 179564 - RNA, 1410 nt, Artificial Sequence; identical to SEQ ID NO: 177935
  derived and/or modified CDS sequence (opt4) from neuraminidase__InfluenzaA__ADM14868

SEQ ID NO: 179565 - RNA, 1410 nt, Artificial Sequence; identical to SEQ ID NO: 178421
  derived and/or modified CDS sequence (opt4) from neuraminidase__InfluenzaA__ADM14878

SEQ ID NO: 179566 - RNA, 1410 nt, Artificial Sequence; identical to SEQ ID NO: 176798
  derived and/or modified CDS sequence (opt4) from neuraminidase__InfluenzaA__ADM14887

SEQ ID NO: 179567 - RNA, 1410 nt, Artificial Sequence
  derived and/or modified CDS sequence (opt4) from neuraminidase__InfluenzaA__ADM14896
augaaccccaaccagaagaucaucaccaucggcagcgugugcaugaccaucggcauggccaaccugauccugcagaucggcaacaucaucagcaucuggaucagccacagcauccagcugggcaaccagaaccagaucgagaccugcaaccagagcgugaucaccuacgagaacaacaccugggugaaccagaccuacgugaacaucagcaacaccaacuucgccgccggccagagcguggugagcgugaagcuggccggcaacagcagccugugccccgugagcggcugggccaucuacagcaaggacaacagcaucagaaucggcagcaagggcgacgugcuggugaucagagagcccuucaucagcugcagcccccuggagugcagaaccuucuuccugacccagggcgcccugcugaacgacaagcacagcaacggcaccaucaaggacagaagccccuacagaacccugaugagcugccccaucggcgaggugcccagccccuacaacagcagauucgagagcguggccuggagcgccagcgccugccacgacggcaucaacuggcugaccaucggcaucagcggccccgacaacggcgccguggccgugcugaaguacaacggcaucaucaccgacaccaucaagagcuggagaaacaacauccugagaacccaggagagcgagugcgccugcgugaacggcagcugcuucaccgugaugaccgacggccccagcgacggccaggccagcuacaagaucuucagaaucgagaagggcaagaucgugaagagcguggagaugaacgcccccaacuaccacuacgaggagugcagcugcuaccccgacagcagcgagaucaccugcgugugcagagacaacuggcacggcagcaacagacccugggugagcuucaaccagaaccuggaguaccagaucggcuacaucugcagcggcaucuucggcgacaaccccagacccaacgacaagaccggcagcugcggccccgugagcagcaacggcgccaacggcgugaagggcuucagcuucaaguacggcaacggcguguggaucggcagaaccaagagcaucagcagcagaaacggcuucgagaugaucugggaccccaacggcuggaccggcaccgacaacaacuucagcaucaagcaggacaucgugggcaucaacgaguggagcggcuacagcggcagcuucgugcagcaccccgagcugaccggccuggacugcaucagacccugcuucuggguggagcugaucagaggcagacccaaggagaacaccaucuggaccagcggcagcagcaucagcuucugcggcgugaacagcgacaccgugggcuggagcuggcccgacggcgccgagcugcccuucaccaucgacaaguga

SEQ ID NO: 179568 - RNA, 1410 nt, Artificial Sequence; identical to SEQ ID NO: 176798
  derived and/or modified CDS sequence (opt4) from neuraminidase__InfluenzaA__ADM14905

SEQ ID NO: 179569 - RNA, 1410 nt, Artificial Sequence; identical to SEQ ID NO: 176798
  derived and/or modified CDS sequence (opt4) from neuraminidase__InfluenzaA__ADM14923

SEQ ID NO: 179570 - RNA, 1410 nt, Artificial Sequence; identical to SEQ ID NO: 178086
  derived and/or modified CDS sequence (opt4) from neuraminidase__InfluenzaA__ADM14932

SEQ ID NO: 179571 - RNA, 1410 nt, Artificial Sequence; identical to SEQ ID NO: 176798
  derived and/or modified CDS sequence (opt4) from neuraminidase__InfluenzaA__ADM14950

SEQ ID NO: 179572 - RNA, 1410 nt, Artificial Sequence; identical to SEQ ID NO: 177816
  derived and/or modified CDS sequence (opt4) from neuraminidase__InfluenzaA__ADM14959

SEQ ID NO: 179573 - RNA, 1410 nt, Artificial Sequence
  derived and/or modified CDS sequence (opt4) from neuraminidase__InfluenzaA__ADM14977
augaaccccaaccagaagaucaucaccaucggcagcgugugcaugaccaucggcauggccaaccugauccugcagaucggcaacaucaucagcaucuggaucagccacagcauccagcugggcaaccagaaccagaucgagaccugcaaccagagcgugaucaccuacgagaacaacaccugggugaaccagaccuacgugaacaucagcaacaccaacuucgccgccggccagagcguggugagcgugaagcuggccggcaacagcagccugugccccgugaacggcugggccaucuacagcaaggacaacagcgugagaaucggcagcaagggcgacguguucgugaucagagagcccuucaucagcugcagcccccuggagugcagaaccuucuuccugacccagggcgcccugcugaacgacaagcacagcaacggcaccaucaaggacagaagccccuacagaacccugaugagcugccccaucggcgaggugcccagccccuacaacagcagauucgagagcguggccuggagcgccagcgccugccacgacggcaucaacuggcugaccaucggcaucagcggccccgacaacggcgccguggccgugcugaaguacaacggcaucaucaccgacaccaucaagagcuggagaaacaacauccugagaacccaggagagcgagugcgccugcgugaacggcagcugcuucaccgugaugaccgacggccccagcaacggccaggccagcuacaagaucuucagaaucgagaagggcaagaucgugaagagcguggagaugaacgcccccaacuaccacuacgaggagugcagcugcuaccccgacagcagcgagaucaccugcgugugcagagacaacuggcacggcagcaacagacccugggugagcuucaaccagaaccuggaguaccagaucggcuacaucugcagcggcaucuucggcgacaaccccagacccaacgacaagaccggcagcugcggccccgugagcagcaacggcgccaacggcgugaagggcuucagcuucaaguacggcaacggcguguggaucggcagaaccaagagcaucagcagcagaaacggcuucgagaugaucugggaccccaacggcuggaccggcaccgacaacaacuucagcaucaagcaggacaucgugggcaucaacgaguggagcggcuacagcggcagcuucgugcagcaccccgagcugaccggccuggacugcaucagacccugcuucuggguggagcugaucagaggcagacccaaggagaacaccaucuggaccagcggcagcagcaucagcuucugcggcgugaacagcgacaccgugggcuggagcuggcccgacggcgccgagcugcccuucaccaucgacaaguga

SEQ ID NO: 179574 - RNA, 1410 nt, Artificial Sequence; identical to SEQ ID NO: 178421
  derived and/or modified CDS sequence (opt4) from neuraminidase__InfluenzaA__ADM14987

SEQ ID NO: 179575 - RNA, 1410 nt, Artificial Sequence; identical to SEQ ID NO: 177965
  derived and/or modified CDS sequence (opt4) from neuraminidase__InfluenzaA__ADM26787

SEQ ID NO: 179576 - RNA, 1410 nt, Artificial Sequence; identical to SEQ ID NO: 178544
  derived and/or modified CDS sequence (opt4) from neuraminidase__InfluenzaA__ADM26798

SEQ ID NO: 179577 - RNA, 1410 nt, Artificial Sequence
  derived and/or modified CDS sequence (opt4) from neuraminidase__InfluenzaA__ADM26809
augaaccccaaccagaagaucaucaccaucggcagcgugagccugaccaucagcaccaucugcuucuucaugcagaucgccauccugaucaccaccgugacccugcacuucaagcaguacgaguucaacagcccccccaacaaccaggugaugcugugcgagcccaccaucaucgagagaaacaucaccgagaucguguaccugaccaacaccaccaucgagaaggagaucugccccaagcuggccgaguacagaaacuggagcaagccccagugcgacaucaccggcuucgcccccuucagcaaggacaacagcaucagacugagcgccggcggcgacaucugggugaccagagagcccuacgugagcugcgaccccgacaagugcuaccaguucgcccugggccagggcaccaccgugaacaacgugcacagcaacaacaccgugagagacagaacccccuacagaacccugcugaugaacgagcugggcgugcccuuccaccugggcaccaagcaggugugcaucgccuggagcagcagcagcugccacgacggcaaggccuggcugcacgugugcaucaccggcgacgacaagaacgccaccgccagcuucaucuacaacggcagacugguggacagcguggugagcuggagcaaggagauccugagaacccaggagagcgagugcgugugcaucaacggcaccugcaccguggugaugaccgacggcagcgccagcggcaaggccgacaccaagauccuguucaucgaggagggcaagaucgugcacaccagcacccugagcggcagcgcccagcacguggaggagugcagcugcuaccccagauaccccggcgugagaugcgugugcagagacaacuggaagggcagcaacagacccaucguggacaucaacaucaaggaccacagcaucgugagcagcuacgugugcagcggccuggugggcgacacccccagaaagaacgacagcagcagcagcagccacugccuggaccccaacaacgaggagggcggccacggcgugaagggcugggccuucgacgacggcaacgacguguggaugggcagaaccaucagcgagaagagcagacugggcuacgagaccuucaaggugaucgagggcuggagcaaccacaagagcaagcugcagaucaacagacaggugaucguggacagaggcaacagaagcggcuacagcggcaucuucagcguggagggcaagagcugcaucaacagaugcuucuacguggagcugaucagaggcagaaaggaggagaccgaggugcuguggaccagcaacagcaucgugguguucugcggcaccagcggcaccuacggcaccggcagcuggcccgacggcgccgaccugaaccugaugcccaucuga

SEQ ID NO: 179578 - RNA, 1410 nt, Artificial Sequence
  derived and/or modified CDS sequence (opt4) from neuraminidase__InfluenzaA__ADM26820
augaaccccaaccagaagaucaucaccaucggcagcgugagccugaccaucagcaccaucugcuucuucaugcagaucgccauccugaucaccaccgugacccugcacuucaagcaguacgaguucaacagcccccccaacaaccaggugaugcugugcgagcccaccaucaucgagagaaacaucaccgagaucguguaccugaccaacaccaccaucgagaaggagaucugccccaagcuggccgaguacagaaacuggagcaagccccagugcgacaucaccggcuucgcccccuucagcaaggacaacagcaucagacugagcgccggcggcgacaucugggugaccagagagcccuacgugagcugcgaccccgacaagugcuaccaguucgcccugggccagggcaccacccugaacaacgugcacagcaacaacaccgugagagacagaacccccuacagaacccugcugaugaacgagcugggcgugcccuuccaccugggcaccaagcaggugugcaucgccuggagcagcagcagcugccacgacggcaaggccuggcugcacgugugcaucaccggcgacgacaagaacgccaccgccagcuucaucuacaacggcagacugguggacagcguggugagcuggagcaaggagauccugagaacccaggagagcgagugcgugugcaucaacggcaccugcaccguggugaugaccgacggcagcgccagcggcaaggccgacaccaagauccuguucaucgaggagggcaagaucgugcacaccagcacccugagcggcagcgcccagcacguggaggagugcagcugcuaccccagauaccccggcgugagaugcgugugcagagacaacuggaagggcagcaacagacccaucguggacaucaacaucaaggaccacagcaucgugagcagcuacgugugcagcggccuggugggcgacacccccagaaagaacgacagcagcagcagcagccacugccuggaccccaacaacgaggagggcggccacggcgugaagggcugggccuucgacgacggcaacgacguguggaugggcagaaccaucaacgagaccagcagacugggcuacgagaccuucaaggugaucgagggcuggagcaaccccaagagcaagcugcagaucaacagacaggugaucguggacagaggcaacagaagcggcuacagcggcaucuucagcguggagggcaagagcugcaucaacagaugcuucuacguggagcugaucagaggcagaaaggaggagaccgaggugcuguggaccagcaacagcaucgugguguucugcggcaccagcggcaccuacggcaccggcagcuggcccgacggcgccgaccugaaccugaugcccaucuga

SEQ ID NO: 179579 - RNA, 1350 nt, Artificial Sequence
  derived and/or modified CDS sequence (opt4) from neuraminidase__InfluenzaA__ADM31427
augaaccccaaccagaagaucaucaccaucggcagcgugugcaugaucaucggcaucgugagccugaugcugcagaucggcaacaugaucagcaucugggugagccacagcauccagaccggcaaccagcaccaggccgagcccaucagaaacaccaacuuccugaccgagaacgccguggccagcgugacccuggccggcaacagcagccugugccccaucagaggcugggccgugcacagcaaggacaacagcaucagaaucggcagcaagggcgacguguucgugaucagagagcccuucaucagcugcagccacauggagugcagaaccuucuuccugacccagggcgcccugcugaacgacaagcacagcaacggcaccgugaaggacagaagcccccacagaacccugaugagcugccccgugggcgaggcccccagccccuacaacagcagauucgagagcguggccuggagcgccagcgccugccacgacggcaucagcuggcugaccaucggcaucagcggccccgacaacggcgccguggccgugcugaaguacaacggcaucaucaccgacaccaucaagagcuggggcaacaacauccugagaacccaggagagcgagugcgccugcgugaacggcagcugcuucaccgugaugaccgacggccccagcaacggccaggccagcuacaagaucuucaagaucgagaagggcaagguggugaagagcguggagcugaacgcccccaacuaccacuacgaggagugcagcugcuaccccgacagcggcgagaucaucugcgugugcagagacaacuggcacggcagcaacagacccugggugagcuucaaccagaaccuggaguaccagaucggcuacaucugcagcggcguguucggcgacaaccccagacccaacgacggcaccggcagcugcggccccaugagccccaacggcgccuacggcaucaagggcuucagcuucaaguacggcaacggcguguggaucggcagaaccaagagcaccaacagcagaagcggcuucgagaugaucugggaccccaacggcuggaccggcaccgacagcgaguucagcgugaagcaggacaucguggccaucaccgacuggagcggcuacagcggcagcuucgugcagcaccccgagcugaccggccuggacugcaucagacccugcuucuggguggagcugaucagaggcagacccaaggagagcaccaucuggaccagcggcagcagcaucagcuucugcggcgugaacagcgacaccgugagcuggagcuggcccgacggcgccgagcugcccuucaccaucgacaaguga

SEQ ID NO: 179580 - RNA, 1410 nt, Artificial Sequence
  derived and/or modified CDS sequence (opt4) from neuraminidase__InfluenzaA__ADM31481
augaaccccaaccagaagaucaucaccaucggcagcgugugcaugaccaucggcauggccaaccugauccugcagaucggcaacaucaucagcaucuggaucagccacagcauccagcugggcaaccagaaccagaucgagaccugcaaccagagcgugaucaccuacgagaacaacaccugggugaaccagaccuacgugaacaucagcaacaccaacuucgccgccggccagagcguggugagcgugaagcuggccggcaacagcagccugugccccgugagcggcugggccaucuacagcaaggacaacagcaucagaaucggcagcaagggcgacguguucgugaucagagagcccuucaucagcugcagcccccuggagugcagaaccuucuuccugacccagggcgcccugcugaacgacaagcacagcaacggcaccaucaaggacagaagccccuacagaacccugaugagcugccccaucggcgaggugcccagccccuacaacagcagauucgagagcguggccuggagcgccagcgccugccacgacggcaucaacuggcugaccaucggcaucagcggccccgacaagggcgccguggccgugcugaaguacaacggcaucaucaccgacaccaucaagagcuggagaaacaacauccugagaacccaggagagcgagugcgccugcgugaacggcagcugcuucaccgugaugaccgacggccccagcgacggccaggccagcuacaagaucuucagaaucgagaagggcaagaucgugaagagcguggagaugaacgcccccaacuaccacuacgaggagugcagcugcuaccccgacagcagcgagaucaccugcgugugcagagacaacuggcacggcagcaacagacccugggugagcuucaaccagaaccuggaguaccagaucggcuacaucugcagcggcaucuucggcgacaaccccagacccaacgacaagaccggcagcugcggccccgugagcagcaacggcgccaacggcgugaagggcuucagcuucaaguacggcaacggcguguggaucggcagaaccaagagcaucagcagcagaaacggcuucgagaugaucugggaccccaacggcuggaccggcaccgacaacaacuucagcaucaagcaggacaucgugggcaucaacgaguggagcggcuacagcggcagcuucgugcagcaccccgagcugaccggccuggacugcaucagacccugcuucuggguggagcugaucagaggcagacccaaggagaacaccaucuggaccagcggcagcagcaucagcuucugcggcgugaacagcgacaccgugggcuggagcuggcccgacggcgccgagcugcccuucaccaucgacaaguga

SEQ ID NO: 179581 - RNA, 1410 nt, Artificial Sequence; identical to SEQ ID NO: 177381
  derived and/or modified CDS sequence (opt4) from neuraminidase__InfluenzaA__ADM31491

SEQ ID NO: 179582 - RNA, 1410 nt, Artificial Sequence; identical to SEQ ID NO: 179003
  derived and/or modified CDS sequence (opt4) from neuraminidase__InfluenzaA__ADM31501

SEQ ID NO: 179583 - RNA, 1410 nt, Artificial Sequence; identical to SEQ ID NO: 176798
  derived and/or modified CDS sequence (opt4) from neuraminidase__InfluenzaA__ADM31511

SEQ ID NO: 179584 - RNA, 1410 nt, Artificial Sequence; identical to SEQ ID NO: 178999
  derived and/or modified CDS sequence (opt4) from neuraminidase__InfluenzaA__ADM31521

SEQ ID NO: 179585 - RNA, 1410 nt, Artificial Sequence; identical to SEQ ID NO: 176798
  derived and/or modified CDS sequence (opt4) from neuraminidase__InfluenzaA__ADM31531

SEQ ID NO: 179586 - RNA, 1410 nt, Artificial Sequence; identical to SEQ ID NO: 178086
  derived and/or modified CDS sequence (opt4) from neuraminidase__InfluenzaA__ADM31541

SEQ ID NO: 179587 - RNA, 1410 nt, Artificial Sequence; identical to SEQ ID NO: 176798
  derived and/or modified CDS sequence (opt4) from neuraminidase__InfluenzaA__ADM31551

SEQ ID NO: 179588 - RNA, 1410 nt, Artificial Sequence; identical to SEQ ID NO: 176798
  derived and/or modified CDS sequence (opt4) from neuraminidase__InfluenzaA__ADM31561

SEQ ID NO: 179589 - RNA, 1410 nt, Artificial Sequence; identical to SEQ ID NO: 176798
  derived and/or modified CDS sequence (opt4) from neuraminidase__InfluenzaA__ADM31571

SEQ ID NO: 179590 - RNA, 1410 nt, Artificial Sequence; identical to SEQ ID NO: 177975
  derived and/or modified CDS sequence (opt4) from neuraminidase__InfluenzaA__ADM31581

SEQ ID NO: 179591 - RNA, 1410 nt, Artificial Sequence; identical to SEQ ID NO: 176798
  derived and/or modified CDS sequence (opt4) from neuraminidase__InfluenzaA__ADM31601

SEQ ID NO: 179592 - RNA, 1410 nt, Artificial Sequence; identical to SEQ ID NO: 178086
  derived and/or modified CDS sequence (opt4) from neuraminidase__InfluenzaA__ADM31611

SEQ ID NO: 179593 - RNA, 1410 nt, Artificial Sequence
  derived and/or modified CDS sequence (opt4) from neuraminidase__InfluenzaA__ADM31621
augaaccccaaccagaagaucaucaccaucggcagcgugugcaugaccaucggcauggccaaccugauccugcagaucggcaacaucaucagcaucuggaucagccacagcauccagcugggcaaccagaaccagaucgagaccugcaaccagagcgugaucaccuacgagaacaacaccugggugaaccagaccuacgugaacaucagcaacaccaacuucgccgccggccagagcguggugagcgugaagcuggccggcaacagcagccugugccccgugagcggcugggccaucuacagcaaggacaacagcaucagaaucggcagcaagggcgacguguucgugaucagagagcccuucaucagcugcagcagccuggagugcagaaccuucuuccugacccagggcgcccugcugaacgacaagcacagcaacggcaccaucaaggacagaagccccuacagaacccugaugagcugccccaucggcgaggugcccagccccuacaacagcagauucgagagcguggccuggagcgccagcgccugccacgacggcaucaacuggcugaccaucggcaucagcggccccgacaacggcgccguggccgugcugaaguacaacggcaucaucaccgacaccaucaagagcuggagaaacaacauccugagaacccaggagagcgagugcgccugcgugaacggcagcugcuucaccgugaugaccgacggccccagcgacggccaggccagcuacaagaucuucagaaucgagaagggcaagaucgugaagagcguggagaugaacgcccccaacuaccacuacgaggagugcagcugcuaccccgacagcagcgagaucaccugcgugugcagagacaacuggcacggcagcaacagacccugggugagcuucaaccagaaccuggaguaccagaucggcuacaucugcagcggcaucuucggcgacaaccccagacccaacgacaagaccggcagcugcggccccgugagcagcaacggcgccaacggcgugaagggcuucagcuucaaguacggcaacggcguguggaucggcagaaccaagagcaucagcagcagaaacggcuucgagaugaucugggaccccaacggcuggaccggcaccgacaacaacuucagcaucaagcaggacaucgugggcaucaacgaguggagcggcuacagcggcagcuucgugcagcaccccgagcugaccggccuggacugcaucagacccugcuucuggguggagcugaucagaggcagacccaaggagaacaccaucuggaccagcggcagcagcaucagcuucugcggcgugaacagcgacaccgugggcuggagcuggcccgacggcgccgagcugcccuucaccaucgacaaguga

SEQ ID NO: 179594 - RNA, 1410 nt, Artificial Sequence; identical to SEQ ID NO: 178086
  derived and/or modified CDS sequence (opt4) from neuraminidase__InfluenzaA__ADM31631

SEQ ID NO: 179595 - RNA, 1410 nt, Artificial Sequence; identical to SEQ ID NO: 177975
  derived and/or modified CDS sequence (opt4) from neuraminidase__InfluenzaA__ADM31641

SEQ ID NO: 179596 - RNA, 1410 nt, Artificial Sequence; identical to SEQ ID NO: 178260
  derived and/or modified CDS sequence (opt4) from neuraminidase__InfluenzaA__ADM31651

SEQ ID NO: 179597 - RNA, 1410 nt, Artificial Sequence; identical to SEQ ID NO: 177975
  derived and/or modified CDS sequence (opt4) from neuraminidase__InfluenzaA__ADM31661

SEQ ID NO: 179598 - RNA, 1410 nt, Artificial Sequence
  derived and/or modified CDS sequence (opt4) from neuraminidase__InfluenzaA__ADM31671
augaaccccaaccagaagaucaucaccaucggcagcgugugcaugaccaucggcauggccaaccugauccugcagaucggcaacaucaucagcaucuggaucagccacagcacccagcugggcaaccagaaccagaucgagaccugcaaccagagcgugaucaccuacgagaacaacaccugggugaaccagaccuacgugaacaucagcaacaccaacuucgccgccggccagagcguggugagcgccaagcuggccggcaacagcagccugugccccgugagcggcugggccaucuacagcaaggacaacagcaucagaaucggcagcaagggcgacguguucgugaucagagagcccuucaucagcugcagcccccuggagugcagaaccuucuuccugacccagggcgcccugcugaacgacaagcacagcaacggcaccaucaaggacagaagccccuacagaacccugaugagcugccccaucggcgaggugcccagccccuacaacagcagauucgagagcguggccuggagcgccagcgccugccacgacggcaucaacuggcugaccaucggcaucagcggccccgacaacggcgccguggccgugcugaaguacaacggcaucaucaccgacaccaucaagagcuggagaaacaacauccugagaacccaggagagcgagugcgccugcgugaacggcagcugcuucaccgugaugaccgacggccccagcgacggccaggccagcuacaagaucuucagaaucgagaagggcaagaucgugaagagcguggagaugaacgcccccaacuaccacuacgaggagugcagcugcuaccccgacagcagcgagaucaccugcgugugcagagacaacuggcacggcagcaacagacccugggugagcuucaaccagaaccuggaguaccagaucggcuacaucugcagcggcaucuucggcgacaaccccagacccaacgacaagaccggcagcugcggccccgugagcagcaacggcgccaacggcgugaagggcuucagcuucaaguacggcaacggcguguggaucggcagaaccaagagcaucagcagcagaaacggcuucgagaugaucugggaccccaacggcuggaccggcaccgacaacaacuucagcaucaagcaggacaucgugggcaucaacgaguggagcggcuacagcggcagcuucgugcagcaccccgagcugaccggccuggacugcaucagacccugcuucuggguggagcugaucagaggcagacccaaggagaacaccaucuggaccagcggcagcagcaucagcuucugcggcgugaacagcgacaccgugggcuggagcuggcccgacggcgccgagcugcccuucaccaucgacaaguga

SEQ ID NO: 179599 - RNA, 1410 nt, Artificial Sequence; identical to SEQ ID NO: 178086
  derived and/or modified CDS sequence (opt4) from neuraminidase__InfluenzaA__ADM31681

SEQ ID NO: 179600 - RNA, 1410 nt, Artificial Sequence
  derived and/or modified CDS sequence (opt4) from neuraminidase__InfluenzaA__ADM31691
augaaccccaaccagaagauccugaccaucggcagcgugugcaugaccaucggcauggccaaccugauccugcagaucggcaacaucaucagcaucuggaucagccacagcauccagcugggcaaccagaaccagaccgagaccugcaaccagagcgugaucaccuacgagaacaacaccugggugaaccagaccuacgugaacaucagcaacaccaacuucgccgccggccagagcguggugagcgugaagcuggccggcaacagcagccugugccccgugagcggcugggccaucuacagcaaggacaacagcaucagaaucggcagcaagggcgacguguucgugaucagagagcccuucaucagcugcagcccccuggagugcagaaccuucuuccugacccagggcgcccugcugaacgacaagcacagcaacggcaccaucaaggacagaagccccuacagaacccugaugagcugccccaucggcgaggugcccagccccuacaacagcagauucgagagcguggccuggagcgccagcgccugccacgacggcaucaacuggcugaccaucggcaucagcggccccgacaacggcgccguggccgugcugaaguacaacggcaucaucaccgacaccaucaagagcuggagaaacaacauccugagaacccaggagagcgagugcgccugcgugaacggcagcugcuucaccgugaugaccgacggccccagcgacggccaggccagcuacaagaucuucagaaucgagaagggcaagaucgugaagagcguggagaugaacgcccccaacuaccacuacgaggagugcagcugcuaccccgacagcagcgagaucaccugcgugugcagagacaacuggcacggcagcaacagacccugggugagcuucaaccagaaccuggaguaccagaucggcuacaucugcagcggcaucuucggcgacaaccccagacccaacgacaagaccggcagcugcggccccgugagcagcaacggcgccaacggcgugaagggcuucagcuucaaguacggcaacggcguguggaucggcagaaccaagagcaucagcagcagaaacggcuucgagaugaucugggaccccaacggcuggaccggcaccgacaacaacuucagcaucaagcaggacaucgugggcaucaacgaguggagcggcuacagcggcagcuucgugcagcaccccgagcugaccggccuggacugcaucagacccugcuucuggguggagcugaucagaggcagacccaaggagaacaccaucuggaccagcggcagcagcaucagcuucugcggcgugaacagcgacaccgugggcuggagcuggcccgacggcgccgagcugcccuucaccaucgacaaguga

SEQ ID NO: 179601 - RNA, 1410 nt, Artificial Sequence; identical to SEQ ID NO: 176798
  derived and/or modified CDS sequence (opt4) from neuraminidase__InfluenzaA__ADM31701

SEQ ID NO: 179602 - RNA, 1410 nt, Artificial Sequence; identical to SEQ ID NO: 176798
  derived and/or modified CDS sequence (opt4) from neuraminidase__InfluenzaA__ADM31711

SEQ ID NO: 179603 - RNA, 1410 nt, Artificial Sequence; identical to SEQ ID NO: 178086
  derived and/or modified CDS sequence (opt4) from neuraminidase__InfluenzaA__ADM31721

SEQ ID NO: 179604 - RNA, 1410 nt, Artificial Sequence
  derived and/or modified CDS sequence (opt4) from neuraminidase__InfluenzaA__ADM31731
augaaccccaaccagaagaucaucaucaucggcagcgugugcaugaccaucggcauggccaaccugauccugcagaucggcaacaucaucagcaucuggaucagccacagcauccagcugggcaaccagaaccagaucgagaccugcaaccagagcgugaucaccuacgagaacaacaccugggugaaccagaccuacgugaacaucagcaacaccaacuucgccgccggccagagcguggugagcgugaagcuggccggcaacagcagccugugccccgugagcggcugggccaucuacagcaaggacaacagcaucagaaucggcagcaagggcgacguguucgugaucagagagcccuucaucagcugcagcccccuggagugcagaaccuucuuccugacccagggcgcccugcugaacgacaagcacagcaacggcaccaucaaggacagaagccccuacagaacccugaugagcugccccaucggcgaggugcccagccccuacaacagcagauucgagagcguggccuggagcgccagcgccugccacgacggcaucaacuggcugaccaucggcaucagcggccccgacaacggcgccguggccgugcugaaguacaacggcaucaucaccgacaccaucaagagcuggagaaacaacauccugagaacccaggagagcgagugcgccugcgugaacggcagcugcuucaccgugaugaccgacggccccagcgacggccaggccagcuacaagaucuucagaaucgagaagggcagaaucgugaagagcguggagaugaacgcccccaacuaccacuacgaggagugcagcugcuaccccgacagcagcgagaucaccugcgugugcagagacaacuggcacggcagcaacagacccugggugagcuucaaccagaaccuggaguaccagaucggcuacaucugcagcggcaucuucggcgacaaccccagacccaacgacaagaccggcagcugcggccccgugagcagcaacggcgccaacggcgugaagggcuucagcuucaaguacggcaacggcguguggaucggcagaaccaagagcaucagcagcagaaacggcuucgagaugaucugggaccccaacggcuggaccggcaccgacaacaacuucagcaucaagcaggacaucgugggcaucaacgaguggagcggcuacagcggcagcuucgugcagcaccccgagcugaccggccuggacugcaucagacccugcuucuggguggagcugaucagaggcagacccaaggagaacaccaucuggaccagcggcagcagcaucagcuucugcggcgugaacagcgacaccgugggcuggagcuggcccgacggcgccgagcugcccuucaccaucgacaaguga

SEQ ID NO: 179605 - RNA, 1410 nt, Artificial Sequence; identical to SEQ ID NO: 179173
  derived and/or modified CDS sequence (opt4) from neuraminidase__InfluenzaA__ADM31741

SEQ ID NO: 179606 - RNA, 1410 nt, Artificial Sequence; identical to SEQ ID NO: 176798
  derived and/or modified CDS sequence (opt4) from neuraminidase__InfluenzaA__ADM31751

SEQ ID NO: 179607 - RNA, 1410 nt, Artificial Sequence
  derived and/or modified CDS sequence (opt4) from neuraminidase__InfluenzaA__ADM31761
augaaccccaaccagaagaucaucaccaucggcagcgugugcaugaccaucggcauggccaaccugauccugcagaucggcaacaucaucagcaucuggaucagccacagcauccagcugggcaaccagaaccagaucgagaccugcaaccagagcgugaucaccuacgagaacaacaccugggugaaccagaccuacgugaacaucagcaacaccaacuucgccgccggccagagcguggugagcgugaagcuggccggcaacagcagccugugccccgugagcggcugggccaucuacagcaaggacaacagcaucagaaucggcagcaagggcgacguguucgugaucagagagcccuucaucagcugcagcccccuggagugcagaaccuucuuccugacccagggcgcccugcugaacgacaagcacagcaacggcaccaucaaggacagaagccccuacagaacccugaugagcugccccaucggcgaggugcccagccccuacaacagcagauucgagagcguggccuggagcgccagcgccugccacgacggcaucaacuggcugaccaucggcaucagcggccccgacaacggcgccguggccgugcugaaguacaacggcaucaucaccgacaccaucaagagcuggagaaacaacauccugagaacccaggagagcgagugcgccugcgugaacggcagcugcuucaccgugaugaccgacggccccagcgacggccaggccagcuacaagaucuucagaaucgagaagggcaagaucgugaagagcguggagaugaacgcccccaacuaccacuacgaggagugcagcugcuaccccgacagcagcgagaucaccugcgugugcagagacaacuggcacggcagcaacagacccugggugagcuucaaccacaaccuggaguaccagaucggcuacaucugcagcggcaucuucggcgacaaccccagacccaacgacaagaccggcagcugcggccccgugagcagcaacggcgccaacggcgugaagggcuucagcuucaaguacggcaacggcguguggaucggcagaaccaagagcaucagcagcagaaacggcuucgagaugaucugggaccccaacggcuggaccggcaccgacaacaaguucagcaucaagcaggacaucgugggcaucagcgaguggagcggcuacagcggcagcuucgugcagcaccccgagcugaccggccuggacugcaucagacccugcuucuggguggagcugaucagaggcagacccaaggagaacaccaucuggaccagcggcagcagcaucagcuucugcggcgugaacagcgacaccgugggcuggagcuggcccgacggcgccgagcugcccuucaccaucgacaaguga

SEQ ID NO: 179608 - RNA, 1410 nt, Artificial Sequence
  derived and/or modified CDS sequence (opt4) from neuraminidase__InfluenzaA__ADM31771
augaaccccaaccagaagauccugaccaucggcagcgugugcaugaccaucggcauggccaaccugauccugcagaucggcaacaucaucagcaucuggaucagccacagcauccagcugggcaaccagaaccagaccgagaccugcaaccagagcgugaucaucuacgagaacaacaccugggugaaccagaccuacgugaacaucagcaacaccaacuucgccgccggccagagcguggugagcgugaagcuggccggcaacagcagccugugccccgugagcggcugggccaucuacagcaaggacaacagcaucagaaucggcagcaagggcgacguguucgugaucagagagcccuucaucagcugcagcccccuggagugcagaaccuucuuccugacccagggcgcccugcugaacgacaagcacagcaacggcaccaucaaggacagaagccccuacagaacccugaugagcugccccaucggcgaggugcccagccccuacaacagcagauucgagagcguggccuggagcgccagcgccugccacgacggcaucaacuggcugaccaucggcaucagcggccccgacaacggcgccguggccgugcugaaguacaacggcaucaucaccgacaccaucaagagcuggagaaacaacauccugagaacccaggagagcgagugcgccugcgugaacggcagcugcuucaccgugaugaccgacggccccagcgacggccaggccagcuacaagaucuucagaaucgagaagggcaagaucgugaagagcguggagaugaacgcccccaacuaccacuacgaggagugcagcugcuaccccgacagcagcgagaucaccugcgugugcagagacaacuggcacggcagcaacagacccugggugagcuucaaccagaaccuggaguaccagaucggcuacaucugcagcggcaucuucggcgacaaccccagacccaacgacaagaccggcagcugcggccccgugagcagcaacggcgccaacggcgugaagggcuucagcuucaaguacggcaacggcguguggaucggcagaaccaagagcaucagcagcagaaacggcuucgagaugaucugggaccccaacggcuggaccggcaccgacaacaacuucagcaucaagcaggacaucgugggcaucaacgaguggagcggcuacagcggcagcuucgugcagcaccccgagcugaccggccuggacugcaucagacccugcuucuggguggagcugaucagaggcagacccaaggagaacaccaucuggaccagcggcagcagcaucagcuucugcggcgugaacagcgacaccgugggcuggagcuggcccgacggcgccgagcugcccuucaccaucgacaaguga

SEQ ID NO: 179609 - RNA, 1410 nt, Artificial Sequence
  derived and/or modified CDS sequence (opt4) from neuraminidase__InfluenzaA__ADM31801
augaaccccaaccagaagaucaucaccaucggcagcgugugcaugaccaucggcauggccaaccugauccugcagaucggcaacaucaucagcaucuggaucagccacagcauccagcugggcaaccagaaccagaucgagaccugcaaccagagcgugaucaccuacgagaacaacaccugggugaaccagaccuacgugaacaucaacaacaccaacuucgccgccggccagagcguggugagcgugaagcuggccggcaacagcagccugugccccgugagcggcugggccaucuacagcaaggacaacagcaucagaaucggcagcaagggcgacguguucgugaucagagagcccuucaucagcugcagcccccuggagugcagaaccuucuuccugacccagggcgcccugcugaacgacaagcacagcaacggcaccaucaaggacagaagccccuacagaacccugaugagcugccccaucggcgaggugcccagccccuacaacagcagauucgagagcguggccuggagcgccagcgccugccacgacggcaucaacuggcugaccaucggcaucagcggccccgacaacggcgccguggccgugcugaaguacaacggcaucaucaccgacaccaucaagagcuggagaaacaacauccugagaacccaggagagcgagugcgccugcgugaacggcagcugcuucaccgugaugaccgacggccccagcgacggccaggccagcuacaagaucuucagaaucgagaagggcaagaucgugaagagcguggagaugaacgcccccaacuaccacuacgaggagugcagcugcuaccccgacagcagcgagaucaccugcgugugcagagacaacuggcacggcagcaacagacccugggugagcuucaaccagaaccuggaguaccagaucggcuacaucugcagcggcaucuucggcgacaaccccagacccaacgacaagaccggcagcugcggccccgugagcagcaacggcgccaacggcgugaagggcuucagcuucaaguacggcaacggcguguggaucggcagaaccaagagcaucagcagcagaaacggcuucgagaugaucugggaccccaacggcuggaccggcaccgacaacaaguucagcaucaagcaggacaucgugggcaucaacgaguggagcggcuacagcggcagcuucgugcagcaccccgagcugaccggccuggacugcaucagacccugcuucuggguggagcugaucagaggcagacccaaggagaacaccaucuggaccagcggcagcagcaucagcuucugcggcgugaacagcgacaccgugggcuggagcuggcccgacggcgccgagcugcccuucaccaucgacaaguga

SEQ ID NO: 179610 - RNA, 1410 nt, Artificial Sequence
  derived and/or modified CDS sequence (opt4) from neuraminidase__InfluenzaA__ADM31811
augaaccccaaccagaagaucaucaccaucggcagcgugugcaugaccaucggcauggccaaccugauccugcagaucggcaacaucaucagcaucuggaucagccacagcauccagcugggcaaccagaaccagaucgagaccugcaaccagagcgugaucaccuacgagaacaacaccugggugaaccagaccuacgugaacaucagcaacaccaacuucgccgccggccagagcguggugagcgugaaguucgccggcaacagcagccugugccccgugagcggcugggccaucuacagcaaggacaacagcaucagaaucggcagcaagggcgacguguucgugaucagagagcccuucaucagcugcagcccccuggagugcagaaccuucuuccugacccagggcgcccugcugaacgacaagcacagcaacggcaccaucaaggacagaagccccuacagaacccugaugagcugccccaucggcgaggugcccagccccuacaacagcagauucgagagcguggccuggagcgccagcgccugccacgacggcaucaacuggcugaccaucggcaucagcggccccgacaacggcgccguggccgugcugaaguacaacggcaucaucaccgacaccaucaagagcuggagaaacaacauccugagaacccaggagagcgagugcgccugcgugaacggcagcugcuucaccgugaugaccgacggccccagcgacggccaggccagcuacaagaucuucagaaucgagaagggcaagaucgugaagagcguggagaugaacgcccccaacuaccacuacgaggagugcagcugcuaccccgacagcagcgagaucaccugcgugugcagagacaacuggcacggcagcaacagacccugggugagcuucaaccagaaccuggaguaccagaucggcuacaucugcagcggcaucuucggcgacaaccccagacccaacgacaagaccggcagcugcggccccgugagcagcaacggcgccaacggcgugaagggcuucagcuucaaguacggcaacggcguguggaucggcagaaccaagagcaucagcagcagaaacggcuucgagaugaucugggaccccaacggcuggaccggcaccgacaacaaguucagcaucaagcaggacaucgugggcaucaacgaguggagcggcuacagcggcagcuucgugcagcaccccgagcugaccggccuggacugcaucagacccugcuucuggguggagcugaucagaggcagacccaaggagaacaccaucuggaccagcggcagcagcaucagcuucugcggcgugaacagcgacaccgugggcuggagcuggcccgacggcgccgagcugcccuucaccaucgacaaguga

SEQ ID NO: 179611 - RNA, 1410 nt, Artificial Sequence; identical to SEQ ID NO: 177975
  derived and/or modified CDS sequence (opt4) from neuraminidase__InfluenzaA__ADM31821

SEQ ID NO: 179612 - RNA, 1410 nt, Artificial Sequence; identical to SEQ ID NO: 176798
  derived and/or modified CDS sequence (opt4) from neuraminidase__InfluenzaA__ADM31831

SEQ ID NO: 179613 - RNA, 1410 nt, Artificial Sequence; identical to SEQ ID NO: 176798
  derived and/or modified CDS sequence (opt4) from neuraminidase__InfluenzaA__ADM31841

SEQ ID NO: 179614 - RNA, 1410 nt, Artificial Sequence
  derived and/or modified CDS sequence (opt4) from neuraminidase__InfluenzaA__ADM31851
augaaccccaaccagaagauccugaccaucggcagcgugugcaugaccaucggcauggccaaccugauccugcagaucggcaacaucaucagcaucuggaucagccacagcauccagcugggcaaccagaaccagaccgagaccugcaaccagagcgugaucaccuacgagaacaacaccugggugaaccagaccuacgugaacaucagcaacaccaacuucgccgccggccagagcguggugagcgugaagcuggccggcaacagcagccugugccccgugagcggcugggccaucuacagcaaggacaacagcaucagaaucggcagcaagggcgacguguucgugaucagagagcccuucaucagcugcagcccccuggagugcagaaccuucuuccugacccagggcgcccugcugaacgacaagcacagcaacggcaccaucaaggacagaagccccuacagaacccugaugagcugccccaucggcgaggugcccagccccuacaacagcagauucgagagcguggccuggagcgccagcgccugccacgacggcaucaacuggcugaccaucggcaucagcggccccgacaacggcgccguggccgugcugaaguacaacggcaucaucaccgacaccaucaagagcuggagaaacaacauccugagaacccaggagagcgagugcgccugcgugaacggcagcugcuucaccgugaugaccgacggccccagcgacggccaggccagcuacaagaucuucagaaucgagagaggcaagaucgugaagagcguggagaugaacgcccccaacuaccacuacgaggagugcagcugcuaccccgacagcagcgagaucaccugcgugugcagagacaacuggcacggcagcaacagacccugggugagcuucaaccagaaccuggaguaccagaucggcuacaucugcagcggcaucuucggcgacaaccccagacccaacgacaagaccggcagcugcggccccgugagcagcaacggcgccaacggcgugaagggcuucagcuucaaguacggcaacggcguguggaucggcagaaccaagagcaucagcagcagaaacggcuucgagaugaucugggaccccaacggcuggaccggcaccgacaacaacuucagcaucaagcaggacaucgugggcaucaacgaguggagcggcuacagcggcagcuucgugcagcaccccgagcugaccggccuggacugcaucagacccugcuucuggguggagcugaucagaggcagacccaaggagaacaccaucuggaccagcggcagcagcaucagcuucugcggcgugaacagcgacaccgugggcuggagcuggcccgacggcgccgagcugcccuucaccaucgacaaguga

SEQ ID NO: 179615 - RNA, 1410 nt, Artificial Sequence; identical to SEQ ID NO: 176798
  derived and/or modified CDS sequence (opt4) from neuraminidase__InfluenzaA__ADM31861

SEQ ID NO: 179616 - RNA, 1410 nt, Artificial Sequence; identical to SEQ ID NO: 176798
  derived and/or modified CDS sequence (opt4) from neuraminidase__InfluenzaA__ADM31871

SEQ ID NO: 179617 - RNA, 1410 nt, Artificial Sequence
  derived and/or modified CDS sequence (opt4) from neuraminidase__InfluenzaA__ADM31881
augaaccccaaccagaagaucaucaccaucggcagcgugugcaugaccaucggcauggccaaccugauccugcagaucggcaacaccaucagcaucuggaucagccacagcauccagcugggcaaccagaaccagaucgagaccugcaaccagagcgugaucaccuacgagaacaacaccugggugaaccagaccuacgugaacaucagcaacaccaacuucgccgccggccagagcguggugagcgugaagcuggccggcaacagcagccugugccccgugagcggcugggccaucuacagcaaggacaacagcaucagaaucggcagcaagggcgacguguucgugaucagagagcccuucaucagcugcagcccccuggagugcagaaccuucuuccugacccagggcgcccugcugaacgacaagcacagcaacggcaccaucaaggacagaagccccuacagaacccugaugagcugccccaucggcgaggugcccagccccuacaacagcagauucgagagcguggccuggagcgccagcgccugccacgacggcaucaacuggcugaccaucggcaucagcggccccgacaacggcgccguggccgugcugaaguacaacggcaucaucaccgacaccaucaagagcuggagaaacaacauccugagaacccaggagagcgagugcgccugcgugaacggcagcugcuucaccgugaugaccgacggccccagcgacggccaggccagcuacaagaucuucagaaucgagaagggcaagaucgugaagagcguggagaugaacgcccccaacuaccacuacgaggagugcagcugcuaccccgacagcagcgagaucaccugcgugugcagagacaacuggcacggcagcaacagacccugggugagcuucaaccagaaccuggaguaccagaucggcuacaucugcagcggcaucuucggcgacaaccccagacccaacgacaagaccggcagcugcggccccgugagcagcaacggcgccaacggcgugaagggcuucagcuucaaguacggcaacggcguguggaucggcagaaccaagagcaucagcagcagaaacggcuucgagaugaucugggaccccaacggcuggaccggcaccgacaacaacuucagcaucaagcaggacaucgugggcaucaacgaguggagcggcuacagcggcagcuucgugcagcaccccgagcugaccggccuggacugcaucagacccugcuucuggguggagcugaucagaggcagacccaaggagaacaccaucuggaccagcggcagcagcaucagcuucugcggcgugaacagcgacaccgugggcuggagcuggcccgacggcgccgagcugcccuucaccaucgacaaguga

SEQ ID NO: 179618 - RNA, 1410 nt, Artificial Sequence; identical to SEQ ID NO: 176798
  derived and/or modified CDS sequence (opt4) from neuraminidase__InfluenzaA__ADM31891

SEQ ID NO: 179619 - RNA, 1410 nt, Artificial Sequence; identical to SEQ ID NO: 176788
  derived and/or modified CDS sequence (opt4) from neuraminidase__InfluenzaA__ADM31901

SEQ ID NO: 179620 - RNA, 1410 nt, Artificial Sequence; identical to SEQ ID NO: 178021
  derived and/or modified CDS sequence (opt4) from neuraminidase__InfluenzaA__ADM31911

SEQ ID NO: 179621 - RNA, 1410 nt, Artificial Sequence; identical to SEQ ID NO: 178021
  derived and/or modified CDS sequence (opt4) from neuraminidase__InfluenzaA__ADM31921

SEQ ID NO: 179622 - RNA, 1410 nt, Artificial Sequence; identical to SEQ ID NO: 178479
  derived and/or modified CDS sequence (opt4) from neuraminidase__InfluenzaA__ADM31931

SEQ ID NO: 179623 - RNA, 1410 nt, Artificial Sequence; identical to SEQ ID NO: 176788
  derived and/or modified CDS sequence (opt4) from neuraminidase__InfluenzaA__ADM31941

SEQ ID NO: 179624 - RNA, 1410 nt, Artificial Sequence; identical to SEQ ID NO: 178479
  derived and/or modified CDS sequence (opt4) from neuraminidase__InfluenzaA__ADM31951

SEQ ID NO: 179625 - RNA, 1410 nt, Artificial Sequence
  derived and/or modified CDS sequence (opt4) from neuraminidase__InfluenzaA__ADM31961
augaaccccaaccagaagaucaucaccaucggcagcgugugcauggccaucggcauggccaaccugauccugcagaucggcaacaucaucagcaucuggaucagccacagcauccagcugggcaaccagaaccagaucgagaccugcaaccagagcgugaucaccuacgagaacaacaccugggugaaccagaccuacgugaacaucagcaacaccaacuucgccgccggccagagcguggugagcgugaagcuggccggcaacagcagccugugccccgugagcggcugggccaucuacagcaaggacaacagcaucagaaucggcagcaagggcgacguguucgugaucagagagcccuucaucagcugcagcccccuggagugcagaaccuucuuccugacccagggcgcccugcugaacgacaagcacagcaacggcaccaucaaggacagaagccccuacagaacccugaugagcugccccaucggcgaggugcccagccccuacaacagcagauucgagagcguggccuggagcgccagcgccugccacgacggcaucaacuggcugaccaucggcaucagcggccccgacaacggcgccguggccgugcugaaguacaacggcaucaucaccgacaccaucaagagcuggagaaacaacauccugagaacccaggagagcgagugcgccugcgugaacggcagcugcuucaccgugaugaccgacggccccagcgacggccaggccagcuacaagaucuucagaaucgagaagggcaagaucgugaagagcguggagaugaacgcccccaacuaccacuacgaggagugcagcugcuaccccgacagcagcgagaucaccugcgugugcagagacaacuggcacggcagcaacagacccugggugagcuucaaccagaaccuggaguaccagaucggcuacaucugcagcggcaucuucggcgacaaccccagacccaacgacaagaccggcagcugcggccccgugagcagcaacggcgccaacggcgugaagggcuucagcuucaaguacggcaacggcguguggaucggcagaaccaagagcaucagcagcagaaacggcuucgagaugaucugggaccccaacggcuggaccggcaccgacaacaacuucagcaucaagcaggacaucgugggcaucaacgaguggagcggcuacagcggcagcuucgugcagcaccccgagcugaccggccuggacugcaucagacccugcuucuggguggagcugaucagaggcagacccaaggagaacaccaucuggaccagcggcagcagcaucagcuucugcggcgugaacagcgacaccgugggcuggagcuggcccgacggcgccgagcugcccuucaccaucgacaaguga

SEQ ID NO: 179626 - RNA, 1410 nt, Artificial Sequence
  derived and/or modified CDS sequence (opt4) from neuraminidase__InfluenzaA__ADM31971
augaaccccaaccagaagaucaucaccaucggcagcgugugcaugaccaucggcauggccaaccugauccugcagaucggcaacaucaucagcaucuggaucagccacagcauccagcugggcaaccagaaccagaucgagaccugcaaccagagcgugaucaccuacgagaacaacaccugggugaaccagaccuacgugaacaucagcaacaccaacuucgccgccggccagagcguggugagcaugaagcuggccggcaacagcagccugugccccgugagcggcugggccaucuacagcaaggacaacagcgugagaaucggcagcaagggcgacguguucgugaucagagagcccuucaucagcugcagcccccuggagugcagaaccuucuuccugacccagggcgcccugcugaacgacaagcacagcaacggcaccaucaaggacagaagccccuacagaacccugaugagcugccccaucggcgaggugcccagccccuacaacagcagauucgagagcguggccuggagcgccagcgccugccacgacggcaucaacuggcugaccaucggcaucagcggccccgacaacggcgccguggccgugcugaaguacaacggcgugaucaccgacaccaucaagagcuggagaaacaacauccugagaacccaggagagcgagugcgccugcgugaacggcagcugcuucaccgugaugaccgacggccccagcaacggccaggccagcuacaagaucuucagaaucgagaagggcaagaucgugaagagcguggagaugaacgcccccaacuaccacuacgaggagugcagcugcuaccccgacagcagcgagaucaccugcgugugcagagacaacuggcacggcagcaacagacccugggugagcuucaaccagaaccuggaguaccagaucggcuacaucugcagcggcaucuucggcgacaaccccagacccaacgacaagaccggcagcugcggccccgugagcagcaacggcgccaacggcgugaagggcuucagcuucaaguacggcaacggcguguggaucggcagaaccaagagcaucagcagcagaaacggcuucgagaugaucugggaccccaacggcuggaccggcaccgacaacaacuucagcaucaagcaggacaucgugggcaucaacgaguggagcggcuacagcggcagcuucgugcagcaccccgagcugaccggccuggacugcaucagacccugcuucuggguggagcugaucagaggcagacccaaggagaacaccaucuggaccagcggcagcagcaucagcuucugcggcgugaacagcgacaccgugggcuggagcuggcccgacggcgccgagcugcccuucaccaucgacaaguga

SEQ ID NO: 179627 - RNA, 1410 nt, Artificial Sequence; identical to SEQ ID NO: 178021
  derived and/or modified CDS sequence (opt4) from neuraminidase__InfluenzaA__ADM31981

SEQ ID NO: 179628 - RNA, 1410 nt, Artificial Sequence; identical to SEQ ID NO: 176788
  derived and/or modified CDS sequence (opt4) from neuraminidase__InfluenzaA__ADM31991

SEQ ID NO: 179629 - RNA, 1410 nt, Artificial Sequence; identical to SEQ ID NO: 176788
  derived and/or modified CDS sequence (opt4) from neuraminidase__InfluenzaA__ADM32001

SEQ ID NO: 179630 - RNA, 1410 nt, Artificial Sequence; identical to SEQ ID NO: 176788
  derived and/or modified CDS sequence (opt4) from neuraminidase__InfluenzaA__ADM32011

SEQ ID NO: 179631 - RNA, 1410 nt, Artificial Sequence; identical to SEQ ID NO: 176798
  derived and/or modified CDS sequence (opt4) from neuraminidase__InfluenzaA__ADM32021

SEQ ID NO: 179632 - RNA, 1410 nt, Artificial Sequence; identical to SEQ ID NO: 177768
  derived and/or modified CDS sequence (opt4) from neuraminidase__InfluenzaA__ADM32031

SEQ ID NO: 179633 - RNA, 1410 nt, Artificial Sequence; identical to SEQ ID NO: 178522
  derived and/or modified CDS sequence (opt4) from neuraminidase__InfluenzaA__ADM32051

SEQ ID NO: 179634 - RNA, 1410 nt, Artificial Sequence; identical to SEQ ID NO: 176798
  derived and/or modified CDS sequence (opt4) from neuraminidase__InfluenzaA__ADM32061

SEQ ID NO: 179635 - RNA, 1410 nt, Artificial Sequence; identical to SEQ ID NO: 176798
  derived and/or modified CDS sequence (opt4) from neuraminidase__InfluenzaA__ADM32071

SEQ ID NO: 179636 - RNA, 1410 nt, Artificial Sequence; identical to SEQ ID NO: 176798
  derived and/or modified CDS sequence (opt4) from neuraminidase__InfluenzaA__ADM32081

SEQ ID NO: 179637 - RNA, 1410 nt, Artificial Sequence; identical to SEQ ID NO: 178021
  derived and/or modified CDS sequence (opt4) from neuraminidase__InfluenzaA__ADM32091

SEQ ID NO: 179638 - RNA, 1410 nt, Artificial Sequence; identical to SEQ ID NO: 176798
  derived and/or modified CDS sequence (opt4) from neuraminidase__InfluenzaA__ADM32101

SEQ ID NO: 179639 - RNA, 1410 nt, Artificial Sequence; identical to SEQ ID NO: 176798
  derived and/or modified CDS sequence (opt4) from neuraminidase__InfluenzaA__ADM32111

SEQ ID NO: 179640 - RNA, 1410 nt, Artificial Sequence; identical to SEQ ID NO: 178479
  derived and/or modified CDS sequence (opt4) from neuraminidase__InfluenzaA__ADM32554

SEQ ID NO: 179641 - RNA, 1410 nt, Artificial Sequence; identical to SEQ ID NO: 176788
  derived and/or modified CDS sequence (opt4) from neuraminidase__InfluenzaA__ADM32564

SEQ ID NO: 179642 - RNA, 1410 nt, Artificial Sequence; identical to SEQ ID NO: 178021
  derived and/or modified CDS sequence (opt4) from neuraminidase__InfluenzaA__ADM32574

SEQ ID NO: 179643 - RNA, 1410 nt, Artificial Sequence; identical to SEQ ID NO: 176798
  derived and/or modified CDS sequence (opt4) from neuraminidase__InfluenzaA__ADM32584

SEQ ID NO: 179644 - RNA, 1410 nt, Artificial Sequence; identical to SEQ ID NO: 178479
  derived and/or modified CDS sequence (opt4) from neuraminidase__InfluenzaA__ADM32594

SEQ ID NO: 179645 - RNA, 1410 nt, Artificial Sequence; identical to SEQ ID NO: 176798
  derived and/or modified CDS sequence (opt4) from neuraminidase__InfluenzaA__ADM32604

SEQ ID NO: 179646 - RNA, 1410 nt, Artificial Sequence; identical to SEQ ID NO: 176798
  derived and/or modified CDS sequence (opt4) from neuraminidase__InfluenzaA__ADM32614

SEQ ID NO: 179647 - RNA, 1410 nt, Artificial Sequence; identical to SEQ ID NO: 176798
  derived and/or modified CDS sequence (opt4) from neuraminidase__InfluenzaA__ADM32624

SEQ ID NO: 179648 - RNA, 1410 nt, Artificial Sequence; identical to SEQ ID NO: 178479
  derived and/or modified CDS sequence (opt4) from neuraminidase__InfluenzaA__ADM32634

SEQ ID NO: 179649 - RNA, 1410 nt, Artificial Sequence; identical to SEQ ID NO: 176798
  derived and/or modified CDS sequence (opt4) from neuraminidase__InfluenzaA__ADM32644

SEQ ID NO: 179650 - RNA, 1410 nt, Artificial Sequence; identical to SEQ ID NO: 176798
  derived and/or modified CDS sequence (opt4) from neuraminidase__InfluenzaA__ADM32664

SEQ ID NO: 179651 - RNA, 1410 nt, Artificial Sequence; identical to SEQ ID NO: 178021
  derived and/or modified CDS sequence (opt4) from neuraminidase__InfluenzaA__ADM32674

SEQ ID NO: 179652 - RNA, 1410 nt, Artificial Sequence; identical to SEQ ID NO: 176798
  derived and/or modified CDS sequence (opt4) from neuraminidase__InfluenzaA__ADM32684

SEQ ID NO: 179653 - RNA, 1410 nt, Artificial Sequence; identical to SEQ ID NO: 176788
  derived and/or modified CDS sequence (opt4) from neuraminidase__InfluenzaA__ADM32694

SEQ ID NO: 179654 - RNA, 1410 nt, Artificial Sequence; identical to SEQ ID NO: 176798
  derived and/or modified CDS sequence (opt4) from neuraminidase__InfluenzaA__ADM32704

SEQ ID NO: 179655 - RNA, 1410 nt, Artificial Sequence; identical to SEQ ID NO: 178522
  derived and/or modified CDS sequence (opt4) from neuraminidase__InfluenzaA__ADM32714

SEQ ID NO: 179656 - RNA, 1410 nt, Artificial Sequence; identical to SEQ ID NO: 178522
  derived and/or modified CDS sequence (opt4) from neuraminidase__InfluenzaA__ADM32724

SEQ ID NO: 179657 - RNA, 1410 nt, Artificial Sequence; identical to SEQ ID NO: 176798
  derived and/or modified CDS sequence (opt4) from neuraminidase__InfluenzaA__ADM32734

SEQ ID NO: 179658 - RNA, 1410 nt, Artificial Sequence; identical to SEQ ID NO: 178021
  derived and/or modified CDS sequence (opt4) from neuraminidase__InfluenzaA__ADM32744

SEQ ID NO: 179659 - RNA, 1410 nt, Artificial Sequence; identical to SEQ ID NO: 178522
  derived and/or modified CDS sequence (opt4) from neuraminidase__InfluenzaA__ADM32754

SEQ ID NO: 179660 - RNA, 1410 nt, Artificial Sequence; identical to SEQ ID NO: 178021
  derived and/or modified CDS sequence (opt4) from neuraminidase__InfluenzaA__ADM32764

SEQ ID NO: 179661 - RNA, 1410 nt, Artificial Sequence
  derived and/or modified CDS sequence (opt4) from neuraminidase__InfluenzaA__ADM32774
augaaccccaaccagaagaucaucaucaucggcagcgugugcaugaccaucggcauggccaaccugauccugcagaucggcaacaucaucagcaucuggaucagccacagcauccagcugggcaaccagaaccagaucgagaccugcaaccagagcgugaccaccuacgagaacaacaccugggugaaccagaccuacgugaacaucagcaacaccaacuucgccgccggccagagcguggugagcgugaagcuggccggcaacagcagccugugccccgugagcggcugggccaucuacagcaaggacaacagcaucagaaucggcagcaagggcgacguguucgugaucagagagcccuucaucagcugcagcccccuggagugcagaaccuucuuccugacccagggcgcccugcugaacgacaagcacagcaacggcaccaucaaggacagaagccccuacagaacccugaugagcugccccaucggcgaggugcccagccccuacaacagcagauucgagagcguggccuggagcgccagcgccugccacgacggcaucaacuggcugaccaucggcaucagcggccccgacaacggcgccguggccgugcugaaguacaacggcaucaucaccgacaccaucaagagcuggagaaacaacauccugagaacccaggagagcgagugcgccugcgugaacggcagcugcuucaccgugaugaccgacggccccagcgacggccaggccagcuacaagaucuucagaaucgagaagggcaagaucgugaagagcguggagaugaacgcccccaacuaccacuacgaggagugcagcugcuaccccgacagcagcgagaucaccugcgugugcagagacaacuggcacggcagcaacagacccugggugagcuucaaccagaaccuggaguaccagaucggcuacaucugcagcggcaucuucggcgacaaccccagacccaacgacaagaccggcagcugcggccccgugagcagcaacggcgccaacggcgugaagggcuucagcuucaaguacggcaacggcguguggaucggcagaaccaagagcaucagcagcagaaacggcuucgagaugaucugggaccccaacggcuggaccggcaccgacaacaacuucagcaucaagcaggacaucgugggcaucaacgaguggagcggcuacagcggcagcuucgugcagcaccccgagcugaccggccuggacugcaucagacccugcuucuggguggagcugaucagaggcagacccaaggagaacaccaucuggaccagcggcagcagcaucagcuucugcggcgugaacagcgacaccgugggcuggagcuggcccgacggcgccgagcugcccuucaccaucgacaaguga

SEQ ID NO: 179662 - RNA, 1410 nt, Artificial Sequence; identical to SEQ ID NO: 177768
  derived and/or modified CDS sequence (opt4) from neuraminidase__InfluenzaA__ADM32784

SEQ ID NO: 179663 - RNA, 1410 nt, Artificial Sequence; identical to SEQ ID NO: 178021
  derived and/or modified CDS sequence (opt4) from neuraminidase__InfluenzaA__ADM32794

SEQ ID NO: 179664 - RNA, 1410 nt, Artificial Sequence
  derived and/or modified CDS sequence (opt4) from neuraminidase__InfluenzaA__ADM32804
augaaccccaaccagaagaucaucaccaucggcagcgugugcaugaccaucggcauggccaaccugauccugcagaucggcaacaucaucagcaucuggaucagccacagcauccagcugggcaaccagaaccagaucgagaccugcaaccagagcgugaucaccuacgagaacaacaccugggugaaccagaccuacgugaacaucagcaacaccaacuucgccgccggccagagcguggugagcgugaagcuggugggcaacagcagccugugccccgugagcggcugggccaucuacagcaaggacaacagcgugagaaucggcagcaagggcgacguguucgugaucagagagcccuucaucagcugcagcccccuggagugcagaaccuucuuccugacccagggcgcccugcugaacgacaagcacagcaacggcaccaucaaggacagaagccccuacagaacccugaugagcugccccaucggcgaggugcccagccccuacaacagcagauucgagagcguggccuggagcgccagcgccugccacgacggcaucaacuggcugaccaucggcaucagcggccccgacaacggcgccguggccgugcugaaguacaacggcaucaucaccgacaccaucaagagcuggagaaacaacauccugagaacccaggagagcgagugcgccugcgugaacggcagcugcuucaccgugaugaccgacggccccagcaacggccaggccagcuacaagaucuucagaaucgagaagggcaagaucgugaagagcguggagaugaacgcccccaacuaccacuacgaggagugcagcugcuaccccgacagcagcgagaucaccugcgugugcagagacaacuggcacggcagcaacagacccugggugagcuucaaccagaaccuggaguaccagaucggcuacaucugcagcggcaucuucggcgacaaccccagacccaacgacaagaccggcagcugcggccccgugagcagcaacggcgccaacggcgugaagggcuucagcuucaaguacggcaacggcguguggaucggcagaaccaagagcaucagcagcagaaacggcuucgagaugaucugggaccccaacggcuggaccggcaccgacaacaacuucagcaucaagcaggacaucguggagaucaacgaguggagcggcuacagcggcagcuucgugcagcaccccgagcugaccggccuggacugcaucagacccugcuucuggguggagcugaucagaggcagacccaaggagaacaccaucuggaccagcggcagcagcaucagcuucugcggcgugaacagcgacaccgugggcuggagcuggcccgacggcgccgagcugcccuucaccaucgacaaguga

SEQ ID NO: 179665 - RNA, 1410 nt, Artificial Sequence
  derived and/or modified CDS sequence (opt4) from neuraminidase__InfluenzaA__ADM32814
augaaccccaaccagaagaucaucaccaucggcagcgugugcaugaccaucggcauggccaaccugauccugcagaucggcaacaucaucagcaucuggaucagccacagcauccagcugggcaaccagaaccagguggagaccugcaaccagagcgugaucaccuacgagaacaacaccugggugaaccagaccuacgugaacaucagcaacaccaacuucgccgccggccagagcguggugagcgugaagcuggccggcaacagcagccugugccccgugagcggcugggccaucuacagcaaggacaacagcaucagaaucggcagcaagggcgacguguucgugaucagagagcccuucaucagcugcagcccccuggagugcagaaccuucuuccugacccagggcgcccugcugaacgacaagcacagcaacggcaccaucaaggacagaagccccuacagaacccugaugagcugccccaucggcgaggugcccagccccuacaacagcagauucgagagcguggccuggagcgccagcgccugccacgacggcaucaacuggcugaccaucggcaucagcggccccgacaacggcgccguggccgugcugaaguacaacggcaucaucaccgacaccaucaagagcuggagaaacaacauccugagaacccaggagagcgagugcgccugcgugaacggcagcugcuucaccgugaugaccgacggccccagcgacggccaggccagcuacaagaucuucagaaucgagaagggcaagaucgugaagagcguggagaugaacgcccccaacuaccacuacgaggagugcagcugcuaccccgacagcagcgagaucaccugcgugugcagagacaacuggcacggcagcaacagacccugggugagcuucaaccagaaccuggaguaccagaucggcuacaucugcagcggcaucuucggcgacaaccccagacccaacgacaagaccggcagcugcggccccgugagcagcaacggcgccaacggcgugaagggcuucagcuucaaguacggcaacggcguguggaucggcagaaccaagagcaucagcagcagaaacggcuucgagaugaucugggaccccaacggcuggaccggcaccgacaacaacuucagcaucaagcaggacaucgugggcaucaacgaguggagcggcuacagcggcagcuucgugcagcaccccgagcugaccggccuggacugcaucagacccugcuucuggguggagcugaucagaggcagacccaaggagaacaccaucuggaccagcggcagcagcaucagcuucugcggcgugaacagcgacaccgugggcuggagcuggcccgacggcgccgagcugcccuucaccaucgacaaguga

SEQ ID NO: 179666 - RNA, 1410 nt, Artificial Sequence; identical to SEQ ID NO: 176798
  derived and/or modified CDS sequence (opt4) from neuraminidase__InfluenzaA__ADM32824

SEQ ID NO: 179667 - RNA, 1410 nt, Artificial Sequence; identical to SEQ ID NO: 178021
  derived and/or modified CDS sequence (opt4) from neuraminidase__InfluenzaA__ADM32834

SEQ ID NO: 179668 - RNA, 1410 nt, Artificial Sequence; identical to SEQ ID NO: 176788
  derived and/or modified CDS sequence (opt4) from neuraminidase__InfluenzaA__ADM32844

SEQ ID NO: 179669 - RNA, 1410 nt, Artificial Sequence
  derived and/or modified CDS sequence (opt4) from neuraminidase__InfluenzaA__ADM32854
augaaccccaaccagaagaucaucaccaucggcagcgugugcaccaccaucggcauggccaaccugauccugcagaucggcaacaucaucagcaucuggaucagccacagcauccaguucggcaaccagaaccagaucgagaccugcaaccagagcgugaucaccuacgagaacaacaccugggugaaccagaccuacgugaacaucagcaacaccaacuucgccgccggccagagcguggugagcgugaagcuggugggcaacagcagccugugccccgugagcggcugggccaucuacagcaaggacaacagcgugagaaucggcagcaagggcgacguguucgugaucagagagcccuucaucagcugcagcccccuggagugcagaaccuucuuccugacccagggcgcccugcugaacgacaagcacagcaacggcaccaucaaggacagaagccccuacagaacccugaugagcugccccaucggcgaggugcccagccccuacaacagcagauucgagagcguggccuggagcgccagcgccugccacgacggcaucaacuggcugaccaucggcaucagcggccccgacaacggcgccguggccgugcugaaguacaacggcaucaucaccgacaccaucaagagcuggagaaacaacauccugagaacccaggagagcgagugcgccugcgugaacggcagcugcuucaccgugaugaccgacggccccagcaacggccaggccagcuacaagaucuucagaaucgagaagggcaagaucgugaagagcguggagaugaacgcccccaacuaccacuacgaggagugcagcugcuaccccgacagcagcgagaucaccugcgugugcagagacaacuggcacggcagcaacagacccugggugagcuucaaccagaaccuggaguaccagaucggcuacaucugcagcggcaucuucggcgacaaccccagacccaacgacaagaccggcagcugcggccccgugagcagcaacggcgccaacggcgugaagggcuucagcuucaaguacggcaacggcguguggaucggcagaaccaagagcaucagcagcagaaacggcuucgagaugaucugggaccccaacggcuggaccggcaccgacaacaacuucagcaucaagcaggacaucgugggcaucaacgaguggagcggcuacagcggcagcuucgugcagcaccccgagcugaccggccuggacugcaucagacccugcuucuggguggagcugaucagaggcagacccaaggagaacaccaucuggaccagcggcagcagcaucagcuucugcggcgugaacagcgacaccgugggcuggagcuggcccgacggcgccgagcugcccuucaccaucgacaaguga

SEQ ID NO: 179670 - RNA, 1410 nt, Artificial Sequence; identical to SEQ ID NO: 176788
  derived and/or modified CDS sequence (opt4) from neuraminidase__InfluenzaA__ADM32864

SEQ ID NO: 179671 - RNA, 1410 nt, Artificial Sequence; identical to SEQ ID NO: 176798
  derived and/or modified CDS sequence (opt4) from neuraminidase__InfluenzaA__ADM32874

SEQ ID NO: 179672 - RNA, 1410 nt, Artificial Sequence
  derived and/or modified CDS sequence (opt4) from neuraminidase__InfluenzaA__ADM32884
augaaccccaaccagaagaucaucaccaucggcagcgugugcaugaccaucggcauggccaaccugauccugcagaucggcaacaucaucagcaucuggaucagccacagcauccagcugggcaaccagaaccagaucgagaccugcaaccagagcgugaucaccuacgagaacaacaccugggugaaccagaccuacgugaacaucagcaacaccaacuucgccgugggccagagcguggugagcgugaagcuggccggcaacagcagccugugccccgugagcggcugggccaucuacagcaaggacaacagcaucagaaucggcagcaagggcgacguguucgugaucagagagcccuucaucagcugcagcccccuggagugcagaaccuucuuccugacccagggcgcccugcugaacgacaagcacagcaacggcaccaucaaggacagaagccccuacagaacccugaugagcugccccaucggcgaggugcccagccccuacaacagcagauucgagagcguggccuggagcgccagcgccugccacgacggcaucaacuggcugaccaucggcaucagcggccccgacaacggcgccguggccgugcugaaguacaacggcaucaucaccgacaccaucaagagcuggagaaacaacauccugagaacccaggagagcgagugcgccugcgugaacggcagcugcuucaccgugaugaccgacggccccagcgacggccaggccagcuacaagaucuucagaaucgagaagggcaagaucgugaagagcguggagaugaacgcccccaacuaccacuacgaggagugcagcugcuaccccgacagcagcgagaucaccugcgugugcagagacaacuggcacggcagcaacagacccugggugagcuucaaccagaaccuggaguaccagaucggcuacaucugcagcggcaucuucggcgacaaccccagacccaacgacaagaccggcagcugcggccccgugagcagcaacggcgccaacggcgugaagggcuucagcuucaaguacggcaacggcguguggaucggcagaaccaagagcaucagcagcagaaacggcuucgagaugaucugggaccccaacggcuggaccggcaccgacaacaaguucagcaucaagcaggacaucgugggcaucaacgaguggagcggcuacagcggcagcuucgugcagcaccccgagcugaccggccuggacugcaucagacccugcuucuggguggagcugaucagaggcagacccaaggagaacaccaucuggaccagcggcagcagcaucagcuucugcggcgugaacagcgacaccgugggcuggagcuggcccgacggcgccgagcugcccuucaccaucgacaaguga

SEQ ID NO: 179673 - RNA, 1410 nt, Artificial Sequence; identical to SEQ ID NO: 176798
  derived and/or modified CDS sequence (opt4) from neuraminidase__InfluenzaA__ADM32921

SEQ ID NO: 179674 - RNA, 1410 nt, Artificial Sequence; identical to SEQ ID NO: 176798
  derived and/or modified CDS sequence (opt4) from neuraminidase__InfluenzaA__ADM32931

SEQ ID NO: 179675 - RNA, 1410 nt, Artificial Sequence
  derived and/or modified CDS sequence (opt4) from neuraminidase__InfluenzaA__ADM32941
augaaccccaaccagaagaucaucaucaucggcagcgugugcaugaccaucggcauggccaaccugauccugcagaucggcaacaucaucagcaucuggaucagccacagcauccagcugggcaaccagaaccagaucgagaccugcaaccagagcgugaucaccuacgagaacaacaccugggugaaccagaccuacgugaacaucagcaacaccaacuucgccgccggccagagcguggugagcgugaagcuggccggcaacagcagccugugccccgugagcggcugggccaucuacagcaaggacaacagcaucagaaucggcagcaagggcgacguguucgugaucagagagcccuucaucagcugcagcccccuggagugcagaaccuucuuccugacccagggcgcccugcugaacgacaagcacagcaacggcaccaucaaggacagaagccccuacagaacccugaugagcugccccaucggcgaggugcccagccccuacaacagcagauucgagagcguggccuggagcgccagcgccugccacgacggcaucaacuggcugaccaucggcaucagcggccccgacaacggcgccguggccgugcugaaguacaacggcaucaucaccgacaccaucaagagcuggagaaacaacauccugagaacccaggagagcgagugcgccugcgugaacggcagcugcuucaccgugaugaccgacggccccagcgacggccaggccagcuacaagaucuucagaaucgagaagggcaagaucgugaagagcguggagaugaacgcccccaacuaccacuacgaggagugcagcugcuaccccgacagcagcgagaucaccugcgugugcagagacaacuggcacggcagcaacagacccugggugagcuucaaccagaaccuggaguaccagaucggcuacaucugcagcggcaucuucggcgacaaccccagacccaacgacaagaccggcagcugcggccccgugagcagcaacggcgccaacggcgugaagggcuucagcuucaaguacggcaacggcguguggaucggcagaaccaagagcaucaacagcagaaacggcuucgagaugaucugggaccccaacggcuggaccggcaccgacaacaacuucagcaucaagcaggacaucgugggcaucaacgaguggagcggcuacagcggcagcuucgugcagcaccccgagcugaccggccuggacugcaucagacccugcuucuggguggagcugaucagaggcagacccaaggagaacaccaucuggaccagcggcagcagcaucagcuucugcggcgugaacagcgacaccgugggcuggagcuggcccgacggcgccgagcugcccuucaccaucgacaaguga

SEQ ID NO: 179676 - RNA, 1410 nt, Artificial Sequence; identical to SEQ ID NO: 176798
  derived and/or modified CDS sequence (opt4) from neuraminidase__InfluenzaA__ADM32951

SEQ ID NO: 179677 - RNA, 1410 nt, Artificial Sequence; identical to SEQ ID NO: 177381
  derived and/or modified CDS sequence (opt4) from neuraminidase__InfluenzaA__ADM32960

SEQ ID NO: 179678 - RNA, 1410 nt, Artificial Sequence; identical to SEQ ID NO: 176798
  derived and/or modified CDS sequence (opt4) from neuraminidase__InfluenzaA__ADM32969

SEQ ID NO: 179679 - RNA, 1410 nt, Artificial Sequence; identical to SEQ ID NO: 176798
  derived and/or modified CDS sequence (opt4) from neuraminidase__InfluenzaA__ADM32979

SEQ ID NO: 179680 - RNA, 1410 nt, Artificial Sequence; identical to SEQ ID NO: 178700
  derived and/or modified CDS sequence (opt4) from neuraminidase__InfluenzaA__ADM32988

SEQ ID NO: 179681 - RNA, 1410 nt, Artificial Sequence; identical to SEQ ID NO: 178700
  derived and/or modified CDS sequence (opt4) from neuraminidase__InfluenzaA__ADM32997

SEQ ID NO: 179682 - RNA, 1410 nt, Artificial Sequence; identical to SEQ ID NO: 176798
  derived and/or modified CDS sequence (opt4) from neuraminidase__InfluenzaA__ADM33006

SEQ ID NO: 179683 - RNA, 1410 nt, Artificial Sequence; identical to SEQ ID NO: 178700
  derived and/or modified CDS sequence (opt4) from neuraminidase__InfluenzaA__ADM33015

SEQ ID NO: 179684 - RNA, 1410 nt, Artificial Sequence
  derived and/or modified CDS sequence (opt4) from neuraminidase__InfluenzaA__ADM33025
augaaccccaaccagaagaucaucaccaucggcagcgugugcaugaccaucggcauggccaaccugauccugcagaucggcaacaucaucagcaucuggaucagccacagcauccagcugggcaaccagaaccagaucgagaccugcaaccagagcgugaucaccuacgagaacaacaccugggugaaccagaccuacgugaacaucagcaacaccaacuucgccgccggccagagcguggugagcgugaagcuggccggcaacagcagccugugccccgugagcggcugggccaucuacagcaaggacaacagcaucagaaucggcagcaagggcgacguguucgugaucagagagcccuucaucagcugcagcccccuggagugcagaaccuucuuccugacccagggcgcccugcugaacgacaagcacagcaacggcaccaucaaggacagaagccccuacagaacccugaugagcugccccaucggcgaggugcccagccccuacaacagcagauucgagagcguggccuggagcgccagcgccugccacgacggcaucaacuggcugaccaucggcaucagcggccccgacaacggcgccguggccgugcugaaguacaacggcaucaucaccgacaccaucaagagcuggagaagcaacauccugagaacccaggagagcgagugcgccugcgugaacggcagcugcuucaccgugaugaccgacggccccagcgacggccaggccagcuacaagaucuucagaaucgagaagggcaagaucgugaagagcguggagaugaacgcccccaacuaccacuacgaggagugcagcugcuaccccgacagcagcgagaucaccugcgugugcagagacaacuggcacggcagcaacagacccugggugagcuucaaccagaaccuggaguaccagaucggcuacaucugcagcggcaucuucggcgacaaccccagacccaacgacaagaccggcagcugcggccccgugagcagcaacggcgccaacggcgugaagggcuucagcuucaaguacggcaacggcguguggaucggcagaaccaagagcaucagcagcagaaacggcuucgagaugaucugggaccccaacggcuggaccggcaccgacaacaacuucagcaucaagcaggacaucgugggcaucaacgaguggagcggcuacagcggcagcuucgugcagcaccccgagcugaccggccuggacugcaucagacccugcuucuggguggagcugaucagaggcagacccaaggagaacaccaucuggaccagcggcagcagcaucagcuucugcggcgugaacagcgacaccgugggcuggagcuggcccgacggcgccgagcugcccuucaccaucgacaaguga

SEQ ID NO: 179685 - RNA, 1410 nt, Artificial Sequence; identical to SEQ ID NO: 176798
  derived and/or modified CDS sequence (opt4) from neuraminidase__InfluenzaA__ADM33042

SEQ ID NO: 179686 - RNA, 1410 nt, Artificial Sequence; identical to SEQ ID NO: 176798
  derived and/or modified CDS sequence (opt4) from neuraminidase__InfluenzaA__ADM33062

SEQ ID NO: 179687 - RNA, 1410 nt, Artificial Sequence
  derived and/or modified CDS sequence (opt4) from neuraminidase__InfluenzaA__ADM33071
augaaccccaaccagaagaucaucaccaucggcagcgugugcaugaccaucggcauggccaaccugauccugcagaucggcaacaucaucagcaucuggaucagccacagcauccagcugggcaaccagaaccagaucgagaccugcaaccagagcgugaucaccuacgagaacaacaccugggugaaccagaccuacgugaacaucagcaacaccaacuucgccgccggccagagcguggugagcgugaagcuggccggcaacagcagccugugccccgugagcggcugggccaucuacagcaaggacaacagcaucagaaucggcagcaagggcgacguguucgugaucagagagcccuucaucagcugcagcccccuggagugcagaaccuucuuccugacccagggcgcccugcugaacgacaagcacagcaacggcaccaucaaggacagaagccccuacagaacccugaugagcugccccaucggcgaggugcccagccccuacaacagcagauucgagagcguggccuggagcgccagcgccugccacgacggcaucaacuggcugaccaucggcaucagcggccccgacaacggcgccguggccgugcugaaguacaacggcaucaucaccgacaccaucaagagcuggagaaacaacauccugagaacccaggagagcgagugcgccugcgugaacggcagcugcuucaccgugaugaccgacggccccagcgacggccaggccagcuacaagaucuucagaaucgagaagggcaagaucgugaagagcguggagaugaacgcccccaacuaccacuacgaggagugcagcugcuaccccgacagcagcaagaucaccugcgugugcagagacaacuggcacggcagcaacagacccugggugagcuucaaccagaaccuggaguaccagaucggcuacaucugcagcggcaucuucggcgacaaccccagacccaacgacaagaccggcagcugcggccccgugagcagcaacggcgccaacggcgugaagggcuucagcuucaaguacggcaacggcguguggaucggcagaaccaagagcaucagcagcagaaacggcuucgagaugaucugggaccccaacggcuggaccggcaccgacaacaacuucagcaucaagcaggacaucgugggcaucaacgaguggagcggcuacagcggcagcuucgugcagcaccccgagcugaccggccuggacugcaucagacccugcuucuggguggagcugaucagaggcagacccaaggagaacaccaucuggaccagcggcagcagcaucagcuucugcggcgugaacggcgacaccgugggcuggagcuggcccgacggcgccgagcugcccuucaccaucgacaaguga

SEQ ID NO: 179688 - RNA, 1410 nt, Artificial Sequence; identical to SEQ ID NO: 176798
  derived and/or modified CDS sequence (opt4) from neuraminidase__InfluenzaA__ADM33081

SEQ ID NO: 179689 - RNA, 1410 nt, Artificial Sequence; identical to SEQ ID NO: 177871
  derived and/or modified CDS sequence (opt4) from neuraminidase__InfluenzaA__ADM33091

SEQ ID NO: 179690 - RNA, 1410 nt, Artificial Sequence; identical to SEQ ID NO: 177871
  derived and/or modified CDS sequence (opt4) from neuraminidase__InfluenzaA__ADM33101

SEQ ID NO: 179691 - RNA, 1410 nt, Artificial Sequence; identical to SEQ ID NO: 177871
  derived and/or modified CDS sequence (opt4) from neuraminidase__InfluenzaA__ADM33111

SEQ ID NO: 179692 - RNA, 1410 nt, Artificial Sequence; identical to SEQ ID NO: 176798
  derived and/or modified CDS sequence (opt4) from neuraminidase__InfluenzaA__ADM33121

SEQ ID NO: 179693 - RNA, 1410 nt, Artificial Sequence; identical to SEQ ID NO: 176798
  derived and/or modified CDS sequence (opt4) from neuraminidase__InfluenzaA__ADM33130

SEQ ID NO: 179694 - RNA, 1410 nt, Artificial Sequence; identical to SEQ ID NO: 176798
  derived and/or modified CDS sequence (opt4) from neuraminidase__InfluenzaA__ADM33139

SEQ ID NO: 179695 - RNA, 1410 nt, Artificial Sequence; identical to SEQ ID NO: 176798
  derived and/or modified CDS sequence (opt4) from neuraminidase__InfluenzaA__ADM33149

SEQ ID NO: 179696 - RNA, 1410 nt, Artificial Sequence; identical to SEQ ID NO: 176798
  derived and/or modified CDS sequence (opt4) from neuraminidase__InfluenzaA__ADM33159

SEQ ID NO: 179697 - RNA, 1410 nt, Artificial Sequence; identical to SEQ ID NO: 176798
  derived and/or modified CDS sequence (opt4) from neuraminidase__InfluenzaA__ADM33169

SEQ ID NO: 179698 - RNA, 1410 nt, Artificial Sequence; identical to SEQ ID NO: 176798
  derived and/or modified CDS sequence (opt4) from neuraminidase__InfluenzaA__ADM33179

SEQ ID NO: 179699 - RNA, 1410 nt, Artificial Sequence; identical to SEQ ID NO: 176798
  derived and/or modified CDS sequence (opt4) from neuraminidase__InfluenzaA__ADM33188

SEQ ID NO: 179700 - RNA, 1410 nt, Artificial Sequence; identical to SEQ ID NO: 176798
  derived and/or modified CDS sequence (opt4) from neuraminidase__InfluenzaA__ADM33197

SEQ ID NO: 179701 - RNA, 1410 nt, Artificial Sequence; identical to SEQ ID NO: 176798
  derived and/or modified CDS sequence (opt4) from neuraminidase__InfluenzaA__ADM33206

SEQ ID NO: 179702 - RNA, 1410 nt, Artificial Sequence; identical to SEQ ID NO: 176798
  derived and/or modified CDS sequence (opt4) from neuraminidase__InfluenzaA__ADM33215

SEQ ID NO: 179703 - RNA, 1410 nt, Artificial Sequence; identical to SEQ ID NO: 176798
  derived and/or modified CDS sequence (opt4) from neuraminidase__InfluenzaA__ADM33224

SEQ ID NO: 179704 - RNA, 1410 nt, Artificial Sequence; identical to SEQ ID NO: 176798
  derived and/or modified CDS sequence (opt4) from neuraminidase__InfluenzaA__ADM33234

SEQ ID NO: 179705 - RNA, 1410 nt, Artificial Sequence; identical to SEQ ID NO: 177222
  derived and/or modified CDS sequence (opt4) from neuraminidase__InfluenzaA__ADM33243

SEQ ID NO: 179706 - RNA, 1410 nt, Artificial Sequence; identical to SEQ ID NO: 176798
  derived and/or modified CDS sequence (opt4) from neuraminidase__InfluenzaA__ADM33253

SEQ ID NO: 179707 - RNA, 1410 nt, Artificial Sequence; identical to SEQ ID NO: 177222
  derived and/or modified CDS sequence (opt4) from neuraminidase__InfluenzaA__ADM33262

SEQ ID NO: 179708 - RNA, 1410 nt, Artificial Sequence; identical to SEQ ID NO: 176828
  derived and/or modified CDS sequence (opt4) from neuraminidase__InfluenzaA__ADM33272

SEQ ID NO: 179709 - RNA, 1410 nt, Artificial Sequence; identical to SEQ ID NO: 176828
  derived and/or modified CDS sequence (opt4) from neuraminidase__InfluenzaA__ADM33282

SEQ ID NO: 179710 - RNA, 1410 nt, Artificial Sequence; identical to SEQ ID NO: 176798
  derived and/or modified CDS sequence (opt4) from neuraminidase__InfluenzaA__ADM33292

SEQ ID NO: 179711 - RNA, 1410 nt, Artificial Sequence; identical to SEQ ID NO: 176798
  derived and/or modified CDS sequence (opt4) from neuraminidase__InfluenzaA__ADM33302

SEQ ID NO: 179712 - RNA, 1410 nt, Artificial Sequence; identical to SEQ ID NO: 176788
  derived and/or modified CDS sequence (opt4) from neuraminidase__InfluenzaA__ADM33312

SEQ ID NO: 179713 - RNA, 1410 nt, Artificial Sequence; identical to SEQ ID NO: 176828
  derived and/or modified CDS sequence (opt4) from neuraminidase__InfluenzaA__ADM33322

SEQ ID NO: 179714 - RNA, 1410 nt, Artificial Sequence; identical to SEQ ID NO: 176828
  derived and/or modified CDS sequence (opt4) from neuraminidase__InfluenzaA__ADM33332

SEQ ID NO: 179715 - RNA, 1410 nt, Artificial Sequence; identical to SEQ ID NO: 176828
  derived and/or modified CDS sequence (opt4) from neuraminidase__InfluenzaA__ADM33342

SEQ ID NO: 179716 - RNA, 1410 nt, Artificial Sequence
  derived and/or modified CDS sequence (opt4) from neuraminidase__InfluenzaA__ADM33367
augaaccccaaccagaagaucaucaccaucggcagcgugugcaugaccaucggcauggccaaccugauccugcagaucggcaacaucaucagcaucuggaucagccacagcauccagcugggcaaccagaaccagaucgagaccugcaaccagagcguggugaccuacgagaacaacaccugggugaaccagaccuacgugaacaucagcaacaccaacuucgccgccggccagagcguggugagcgugaagcuggccggcaacagcagccugugccccgugggcggcugggccaucuacagcaaggacaacagcgugagaaucggcagcaagggcgacguguucgugaucagagagcccuucaucagcugcagcccccuggagugcagaaccuucuuccugacccagggcgcccugcugaacgacaagcacagcaacggcaccaucaaggacagaagccccuacagaacccugaugagcugccccaucggcgaggugcccagccccuacaacagcagauucgagagcguggccuggagcgccagcgccugccacgacggcaucaacuggcugaccaucggcaucagcggccccgacaacggcgccguggccgugcugaaguacaacggcaucaucaccgacaccaucaagagcuggagaaacaacauccugagaacccaggagagcgagugcgccugcgugaacggcagcugcuucaccgugaugaccgacggccccagcaacggccaggccagcuacaagaucuucagaaucgagaagggcaagaucgugaagagcguggagaugaacgcccccaacuaccacuacgaggagugcagcugcuaccccgacagcagcgagaucaccugcgugugcagagacaacuggcacggcagcaacagacccugggugagcuucaaccagaaccuggaguaccagaucggcuacaucugcagcggcaucuucggcgacaaccccagacccaacgacaagaccggcagcugcggccccgugagcagcaacggcgccaacggcgugaagggcuucagcuucaaguacggcaacggcguguggaucggcagaaccaagagcaucagcagcagaaacggcuucgagaugaucugggaccccaacggcuggaccggcaccgacaacaacuucagcaucaagcaggacaucgugggcaucaacgaguggagcggcuacagcggcagcuucgugcagcaccccgagcugaccggccuggacugcaucagacccugcuucuggguggagcugaucagaggcagacccaaggagaacaccaucuggaccagcggcagcagcaucagcuucugcggcgugaacagcgacaccgugggcuggagcuggcccgacggcgccgagcugcccuucaccaucgacaaguga

SEQ ID NO: 179717 - RNA, 1410 nt, Artificial Sequence; identical to SEQ ID NO: 176828
  derived and/or modified CDS sequence (opt4) from neuraminidase__InfluenzaA__ADM33377

SEQ ID NO: 179718 - RNA, 1410 nt, Artificial Sequence; identical to SEQ ID NO: 176828
  derived and/or modified CDS sequence (opt4) from neuraminidase__InfluenzaA__ADM33387

SEQ ID NO: 179719 - RNA, 1410 nt, Artificial Sequence; identical to SEQ ID NO: 176798
  derived and/or modified CDS sequence (opt4) from neuraminidase__InfluenzaA__ADM33397

SEQ ID NO: 179720 - RNA, 1410 nt, Artificial Sequence; identical to SEQ ID NO: 176798
  derived and/or modified CDS sequence (opt4) from neuraminidase__InfluenzaA__ADM33407

SEQ ID NO: 179721 - RNA, 1410 nt, Artificial Sequence; identical to SEQ ID NO: 176828
  derived and/or modified CDS sequence (opt4) from neuraminidase__InfluenzaA__ADM33417

SEQ ID NO: 179722 - RNA, 1410 nt, Artificial Sequence; identical to SEQ ID NO: 176798
  derived and/or modified CDS sequence (opt4) from neuraminidase__InfluenzaA__ADM33427

SEQ ID NO: 179723 - RNA, 1410 nt, Artificial Sequence
  derived and/or modified CDS sequence (opt4) from neuraminidase__InfluenzaA__ADM33437
augaaccccaaccagaagaucaucaccaucggcagcgugugcaugaccaucggcauggccaaccugauccugcagaucggcaacaucaucagcaucuggaucagccacagcauccagcugggcaaccagaaccagaucgagaccugcaaccagagcgugaucaccuacgagaacaacaccugggugaaccagaccuacgugaacaucagcaacaccaacuucgccgccggccagagcguggugagcgugaagcuggccggcaacagcagccugugccccgugagcggcugggccaucuacagcaaggacaacagcaucagaaucggcagcaagggcgacguguucgugaucagagagcccuucaucagcugcagcccccuggagugcagaaccuucuuccugacccagggcgcccugcugaacgacaagcacagcaacggcaccaucaaggacagaagccccuacagaacccugaugagcugccccaucggcgaggugcccagcgccuacaacagcagauucgagagcguggccuggagcgccagcgccugccacgacggcaucaacuggcugaccaucggcaucagcggccccgacaacggcgccguggccgugcugaaguacaacggcaucaucaccgacaccaucaagagcuggagaaacaacauccugagaacccaggagagcgagugcgccugcgugaacggcagcugcuucaccgugaugaccgacggccccagcgacggccaggccagcuacaagaucuucagaaucgagaagggcaagaucgugaagagcguggagaugaacgcccccaacuaccacuacgaggagugcagcugcuaccccgacagcagcgagaucaccugcgugugcagagacaacuggcacggcagcaacagacccugggugagcuucaaccagaaccuggaguaccagaucggcuacaucugcagcggcaucuucggcgacaaccccagacccaacgacaagaccggcagcugcggccccgugagcagcaacggcgccaacggcgugaagggcuucagcuucaaguacggcaacggcguguggaucggcagaaccaagagcaucagcagcagaaacggcuucgagaugaucugggaccccaacggcuggaccggcaccgacaacaacuucagcaucaagcaggacaucgugggcaucaacgaguggagcggcuacagcggcagcuucgugcagcaccccgagcugaccggccuggacugcaucagacccugcuucuggguggagcugaucagaggcagacccaaggagaacaccaucuggaccagcggcagcagcaucagcuucugcggcgugaacagcgacaccgugggcuggagcuggcccgacggcgccgagcugcccuucaccaucgacaaguga

SEQ ID NO: 179724 - RNA, 1410 nt, Artificial Sequence; identical to SEQ ID NO: 177152
  derived and/or modified CDS sequence (opt4) from neuraminidase__InfluenzaA__ADM33443

SEQ ID NO: 179725 - RNA, 1410 nt, Artificial Sequence; identical to SEQ ID NO: 176798
  derived and/or modified CDS sequence (opt4) from neuraminidase__InfluenzaA__ADM52446

SEQ ID NO: 179726 - RNA, 1410 nt, Artificial Sequence; identical to SEQ ID NO: 176798
  derived and/or modified CDS sequence (opt4) from neuraminidase__InfluenzaA__ADM52456

SEQ ID NO: 179727 - RNA, 1410 nt, Artificial Sequence; identical to SEQ ID NO: 179003
  derived and/or modified CDS sequence (opt4) from neuraminidase__InfluenzaA__ADM52466

SEQ ID NO: 179728 - RNA, 1410 nt, Artificial Sequence; identical to SEQ ID NO: 176798
  derived and/or modified CDS sequence (opt4) from neuraminidase__InfluenzaA__ADM52486

SEQ ID NO: 179729 - RNA, 1410 nt, Artificial Sequence; identical to SEQ ID NO: 176788
  derived and/or modified CDS sequence (opt4) from neuraminidase__InfluenzaA__ADM52496

SEQ ID NO: 179730 - RNA, 1410 nt, Artificial Sequence; identical to SEQ ID NO: 176798
  derived and/or modified CDS sequence (opt4) from neuraminidase__InfluenzaA__ADM52506

SEQ ID NO: 179731 - RNA, 1410 nt, Artificial Sequence; identical to SEQ ID NO: 176788
  derived and/or modified CDS sequence (opt4) from neuraminidase__InfluenzaA__ADM52516

SEQ ID NO: 179732 - RNA, 1410 nt, Artificial Sequence; identical to SEQ ID NO: 176788
  derived and/or modified CDS sequence (opt4) from neuraminidase__InfluenzaA__ADM52527

SEQ ID NO: 179733 - RNA, 1410 nt, Artificial Sequence; identical to SEQ ID NO: 178021
  derived and/or modified CDS sequence (opt4) from neuraminidase__InfluenzaA__ADM52537

SEQ ID NO: 179734 - RNA, 1410 nt, Artificial Sequence; identical to SEQ ID NO: 178522
  derived and/or modified CDS sequence (opt4) from neuraminidase__InfluenzaA__ADM52547

SEQ ID NO: 179735 - RNA, 1410 nt, Artificial Sequence; identical to SEQ ID NO: 176788
  derived and/or modified CDS sequence (opt4) from neuraminidase__InfluenzaA__ADM52557

SEQ ID NO: 179736 - RNA, 1410 nt, Artificial Sequence; identical to SEQ ID NO: 176788
  derived and/or modified CDS sequence (opt4) from neuraminidase__InfluenzaA__ADM52567

SEQ ID NO: 179737 - RNA, 1410 nt, Artificial Sequence; identical to SEQ ID NO: 176788
  derived and/or modified CDS sequence (opt4) from neuraminidase__InfluenzaA__ADM52577

SEQ ID NO: 179738 - RNA, 1410 nt, Artificial Sequence; identical to SEQ ID NO: 176798
  derived and/or modified CDS sequence (opt4) from neuraminidase__InfluenzaA__ADM52587

SEQ ID NO: 179739 - RNA, 1410 nt, Artificial Sequence; identical to SEQ ID NO: 176798
  derived and/or modified CDS sequence (opt4) from neuraminidase__InfluenzaA__ADM52597

SEQ ID NO: 179740 - RNA, 1410 nt, Artificial Sequence; identical to SEQ ID NO: 176788
  derived and/or modified CDS sequence (opt4) from neuraminidase__InfluenzaA__ADM52607

SEQ ID NO: 179741 - RNA, 1410 nt, Artificial Sequence; identical to SEQ ID NO: 176788
  derived and/or modified CDS sequence (opt4) from neuraminidase__InfluenzaA__ADM52617

SEQ ID NO: 179742 - RNA, 1410 nt, Artificial Sequence; identical to SEQ ID NO: 178479
  derived and/or modified CDS sequence (opt4) from neuraminidase__InfluenzaA__ADM52627

SEQ ID NO: 179743 - RNA, 1410 nt, Artificial Sequence; identical to SEQ ID NO: 178021
  derived and/or modified CDS sequence (opt4) from neuraminidase__InfluenzaA__ADM52637

SEQ ID NO: 179744 - RNA, 1410 nt, Artificial Sequence; identical to SEQ ID NO: 178021
  derived and/or modified CDS sequence (opt4) from neuraminidase__InfluenzaA__ADM52647

SEQ ID NO: 179745 - RNA, 1410 nt, Artificial Sequence; identical to SEQ ID NO: 176788
  derived and/or modified CDS sequence (opt4) from neuraminidase__InfluenzaA__ADM52657

SEQ ID NO: 179746 - RNA, 1410 nt, Artificial Sequence; identical to SEQ ID NO: 178021
  derived and/or modified CDS sequence (opt4) from neuraminidase__InfluenzaA__ADM52667

SEQ ID NO: 179747 - RNA, 1410 nt, Artificial Sequence; identical to SEQ ID NO: 176788
  derived and/or modified CDS sequence (opt4) from neuraminidase__InfluenzaA__ADM52687

SEQ ID NO: 179748 - RNA, 1410 nt, Artificial Sequence; identical to SEQ ID NO: 176788
  derived and/or modified CDS sequence (opt4) from neuraminidase__InfluenzaA__ADM52697

SEQ ID NO: 179749 - RNA, 1410 nt, Artificial Sequence; identical to SEQ ID NO: 178479
  derived and/or modified CDS sequence (opt4) from neuraminidase__InfluenzaA__ADM52707

SEQ ID NO: 179750 - RNA, 1410 nt, Artificial Sequence
  derived and/or modified CDS sequence (opt4) from neuraminidase__InfluenzaA__ADM52717
augaaccccaaccagaagaucaucaccaucggcagcgugugcaugaccaucggcauggccaaccugauccugcagaucggcaacaucaucagcaucuggaucagccacagcauccagcugggcaaccagaaccagaucgagaccugcaaccagagcgugaucaccuacgagaacaacaccugggugaaccagaccuacgugaacaucagcaacaccaacuucgccgccggccagagcgccgugagcgugaagcuggugggcaacagcagccugugccccgugagcggcugggccaucuacagcaaggacaacagcgugagaaucggcagcaagggcgacguguucgugaucagagagcccuucaucagcugcagcccccuggagugcagaaccuucuuccugacccagggcgcccugcugaacgacaagcacagcaacggcaccaucaaggacagaagccccuacagaacccugaugagcugccccaucggcgaggugcccagccccuacaacagcagauucgagagcguggccuggagcgccagcgccugccacgacggcaucaacuggcugaccaucggcaucagcggccccgacaacggcgccguggccgugcugaaguacaacggcaucaucaccgacaccaucaagagcuggagaaacaacauccugagaacccaggagagcgagugcgccugcgugaacggcagcugcuucaccgugaugaccgacggccccagcaacggccaggccagcuacaagaucuucagaaucgagaagggcaagaucgugaagagcguggagaugaacgcccccaacuaccacuacgaggagugcagcugcuaccccgacagcagcgagaucaccugcgugugcagagacaacuggcacggcagcaacagacccugggugagcuucaaccagaaccuggaguaccagaucggcuacaucugcagcggcaucuucggcgacaaccccagacccaacgacaagaccggcagcugcggccccgugagcagcaacggcgccaacggcgugaagggcuucagcuucaaguacggcaacggcguguggaucggcagaaccaagagcaucagcagcagaaacggcuucgagaugaucugggaccccaacggcuggaccggcaccgacaacaacuucagcaucaagcaggacaucgugggcaucaacgaguggagcggcuacagcggcagcuucgugcagcaccccgagcugaccggccuggacugcaucagacccugcuucuggguggagcugaucagaggcagacccaaggagaacaccaucuggaccagcggcagcagcaucagcuucugcggcgugaacagcgacaccgugggcuggagcuggcccgacggcgccgagcugcccuucaccaucgacaaguga

SEQ ID NO: 179751 - RNA, 1410 nt, Artificial Sequence
  derived and/or modified CDS sequence (opt4) from neuraminidase__InfluenzaA__ADM86402
augaaccccaaccagaagaucaucaccaucggcagcgugugcaugaccaucggcauggccaaccugauccugcagaucggcaacaucaucagcaucuggaucagccacagcauccagcugggcaaccagaaccagaucgagaccugcaaccagagcgugaucaccuacgagaacaacaccugggugaaccagaccuacgugaacaucagcaacaccaacuucgccgccggccagagcguggccagcgugaagcuggccggcaacagcagccugugccccgugagcggcugggccaucuacagcaaggacaacagcgugagaaucggcagcaagggcgacguguucgugaucagagagcccuucaucagcugcagcccccuggagugcagaaccuucuuccugacccagggcgcccugcugaacgacaagcacagcaacggcaccgugaaggacagaagccccuacagaacccugaugagcugccccaucggcgaggugcccagccccuacaacagcagauucgagagcguggccuggagcgccagcgccugccacgacggcaucaacuggcugaccaucggcaucagcggccccgacaacggcgccguggccgugcugaaguacaacggcaucaucaccgacaccaucaagagcuggagaaacaacauccugagaacccaggagagcgagugcgccugcgugaacggcagcugcuucaccgugaugaccgacggccccagcgacggccaggccagcuacaagaucuucagaaucgagaagggcaagaucgugaagagcguggagaugaacgcccccaacuaccacuacgaggagugcagcugcuaccccgacagcagcgagaucaccugcgugugcagagacaacuggcacggcagcaacagacccugggugagcuucaaccagaaccuggaguaccagaucggcuacaucugcagcggcaucuucggcgacaaccccagacccaacgacaagaccggcagcugcggccccgugagcagcaacggcgccaacggcgugaagggcuucagcuucaaguacggcaacggcguguggaucggcagaaccaagagcaucagcagcagaaacggcuucgagaugaucugggaccccaacggcuggaccggcaccgacaacaacuucagcaucaagcaggacaucgugggcaucaacgaguggagcggcuacagcggcagcuucgugcagcaccccgagcugaccggccuggacugcaucagacccugcuucuggguggagcugaucagaggcagacccaaggagaacaccaucuggaccagcggcagcagcaucagcuucugcggcgugaacagcgacaccgugggcuggagcuggcccgacggcgccgagcugcccuucaccaucgacaaguga

SEQ ID NO: 179752 - RNA, 1410 nt, Artificial Sequence; identical to SEQ ID NO: 176798
  derived and/or modified CDS sequence (opt4) from neuraminidase__InfluenzaA__ADM86412

SEQ ID NO: 179753 - RNA, 1410 nt, Artificial Sequence
  derived and/or modified CDS sequence (opt4) from neuraminidase__InfluenzaA__ADM86422
augaaccccaaccagaagaucaucaccaucggcagcgugugcaugaccaucggcauggccaaccugauccugcagaucggcaacaucaucagcaucuggaucagccacagcauccagcugggcaaccagaaccagaucgagaccugcaaccagagcgugaucaccuacgagaacaacaccugggugaaccagaccuacgugaacaucagcaacaccaacuucguggccggccagagcguggugagcgugaagcuggccggcaacagcagccugugccccgugagcggcugggccaucuacagcaaggacaacagcaucagaaucggcagcaagggcgacguguucgugaucagagagcccuucaucagcugcagcccccuggagugcagaaccuucuuccugacccagggcgcccugcugaacgacaagcacagcaacggcaccaucaaggacagaagccccuacagaacccugaugagcugccccaucggcgaggugcccagccccuacaacagcagauucgagagcguggccuggagcgccagcgccugccacgacggcaucaacuggcugaccaucggcaucagcggccccgacaacggcgccguggccgugcugaaguacaacggcaucaucaccgacaccaucaagagcuggagaaacaacauccugagaacccaggagagcgagugcgccugcgugaacggcagcugcuucaccgugaugaccgacggccccagcgacggccaggccagcuacaagaucuucagaaucgagaagggcaagguggugaagagcguggagaugaacgcccccaacuaccacuacgaggagugcagcugcuaccccgacagcagcgagaucaccugcgugugcagagacaacuggcacggcagcaacagacccugggugagcuucaaccagaaccuggaguaccagaucggcuacaucugcagcggcaucuucggcgacaaccccagacccaacgacaagaccggcagcugcggccccgugagcagcaacggcgccaacggcgugaagggcuucagcuucaaguacggcaacggcguguggaucggcagaaccaagagcaucagcagcagaaacggcuucgagaugaucugggaccccaacggcuggaccggcaccgacaacaacuucagcaucaagcaggacaucgugggcaucaacgaguggagcggcuacagcggcagcuucgugcagcaccccgagcugaccggccuggacugcaucagacccugcuucuggguggagcugaucagaggcagacccaaggagaacaccaucuggaccagcggcagcagcaucagcuucugcggcgugaacagcgacaccgugggcuggagcuggcccgacggcgccgagcugcccuucaccaucgacaaguga

SEQ ID NO: 179754 - RNA, 1410 nt, Artificial Sequence; identical to SEQ ID NO: 177652
  derived and/or modified CDS sequence (opt4) from neuraminidase__InfluenzaA__ADM86432

SEQ ID NO: 179755 - RNA, 1410 nt, Artificial Sequence
  derived and/or modified CDS sequence (opt4) from neuraminidase__InfluenzaA__ADM86443
augaaccccaaccagaagaucaucaccaucggcagcgugugcaugaccaucggcauggccaaccugauccugcagaucggcaacaucaucagcaucuggaucagccacagcauccagcugggcaaccagaaccagaucgagaccugcaaccagagcgugaucaccuacgagaacaacaccugggugaaccagaccuacgugaacaucagcaacaccaacuucgccgccggccagagcguggugagcgugaagcuggccggcaacagcagccugugccccgugagcggcugggccaucuacagcaaggacaacagcaucagaaucggcagcaagggcgacguguucgugaucagagagcccuucaucagcugcagcccccuggagugcagaaccuucuuccugacccagggcgcccugcugaacgacaagcacagcaacggcaccaucaaggacagaagccccuacagaacccugaugagcugccccaucggcgaggugcccagccccuacaacagcagauucgagagcguggccuggagcgccagcgccugccacgacggcaucaacuggcugaccaucggcaucagcggccccgacaacggcgccguggccgugcugaaguacaacggcaucaucaccgacaccaucaagagcuggagaaacaacauccugagaacccaggagagcgagugcgugugcgugaacggcagcugcuucaccgugaugaccgacggccccagcgacggccaggccagcuacaagaucuucagaaucgagaagggcaagaucgugaagagcguggagaugaacgcccccaacuaccacuacgaggagugcagcugcuaccccgacagcagcgagaucaccugcgugugcagagacaacuggcacggcagcaacagacccugggugagcuucaaccagaaccuggaguaccagaucggcuacaucugcagcggcaucuucggcgacaaccccagacccaacgacaagaccggcagcugcggccccgugagcagcaacggcgccaacggcgugaagggcuucagcuucaaguacggcaacggcguguggaucggcagaaccaagagcaucagcagcagaaacggcuucgagaugaucugggaccccaacggcuggaccggcaccgacaacaacuucagcaucaagcaggacaucgugggcaugaacgaguggagcggcuacagcggcagcuucgugcagcaccccgagcugaccggccuggacugcaucagacccugcuucuggguggagcugaucagaggcagacccaaggagaacaccaucuggaccagcggcagcagcaucagcuucugcggcgugaacagcgacaccgugggcuggagcuggcccgacggcgccgagcugcccuucaccaucgacaaguga

SEQ ID NO: 179756 - RNA, 1410 nt, Artificial Sequence; identical to SEQ ID NO: 177381
  derived and/or modified CDS sequence (opt4) from neuraminidase__InfluenzaA__ADM86453

SEQ ID NO: 179757 - RNA, 1350 nt, Artificial Sequence
  derived and/or modified CDS sequence (opt4) from neuraminidase__InfluenzaA__ADM95377
augaaccccaaccagaagaucaucaccaucggcagcaucugcauggugaccggcaucgugagccugaugcugcaggugggcagcaugaucagcaucugggugagccacagcauccacaccggcaaccagcaccaggccgagcccaucagcaacaccaacuuccugaccgagaaggccguggccagcgugaagcuggccggcaacagcagccugugccccaucaacggcugggccguguacagcaaggacaacagcaucagaaucggcagcaagggcgacguguucgugaucagagagcccuucaucagcugcagccaccuggagugcagaaccuucuuccugacccagggcgcccugcugaacgacaagcacagcaacggcaccgugaaggacagaagcccccacagaacccugaugagcugccccaugggcgaggcccccagccccuacaacagcagauucgagagcguggccuggagcgccagcgccugccacgacggcaccagcuggcugaccaucggcaucagcggccccgacaacggcgccguggccgugcugaaguacaacggcaucaucaccgacaccaucaagagcuggagaaacaacauccugagaacccaggagagcgagugcgccugcgugaacggcagcugcuucaccgugaugaccgacggccccagcaacggccaggccagccacaagaucuucaagauggagaagggcaaggugaucaagagcguggagcuggacgcccccaacuaccacuacgaggagugcagcugcuaccccgacgccggcgagaucaccugcgugugcagagacaacuggcacggcagcaacagacccugggugagcuucaaccagaaccuggaguaccagaucggcuacaucugcagcggcguguucggcgacaaccccagacccaacgacggcaccggcagcugcggccccgugagcagcaacggcgccuacggcgugaagggcuucagcuucaaguacggcaacggcguguggaucggcagaaccaagagcaccaacagcagaagcggcuucgagaugaucugggaccccaacggcuggaccgagaccgacagcagauucagcgugaagcaggacaucguggccaucaccgacuggagcggcuacagcggcagcuucgugcagcaccccgagcugaccggccuggacugcaucagacccugcuucuggguggagcugaucagaggcagacccaaggagagcaccaucuggaccagcggcagcagcaucagcuucugcggcgugaacagcgacaccgugggcuggagcuggcccgacggcgccgagcugcccuucaccaucgacaaguga

SEQ ID NO: 179758 - RNA, 1410 nt, Artificial Sequence; identical to SEQ ID NO: 176798
  derived and/or modified CDS sequence (opt4) from neuraminidase__InfluenzaA__ADM95650

SEQ ID NO: 179759 - RNA, 1410 nt, Artificial Sequence; identical to SEQ ID NO: 176798
  derived and/or modified CDS sequence (opt4) from neuraminidase__InfluenzaA__ADM95651

SEQ ID NO: 179760 - RNA, 1410 nt, Artificial Sequence
  derived and/or modified CDS sequence (opt4) from neuraminidase__InfluenzaA__ADM95652
augaaccccaaccagaagaucaucaccaucggcagcgugugcaugaccaucggcauggccaaccugauccugcagaucggcaacaucaucagcaucuggaucagccacagcauccagcugggcaaccagaaccagaucgagaccugcaaccagagcgugaucaccuacgagaacaacaccugggugaaccagaccuacgugaacaucagcaacaccaacuucgccgccggccagagcguggugagcgugaaguucgccggcaacagcagccugugccccgugagcggcugggccaucuacagcaaggacaacagcaucagaaucggcagcaagggcgacguguucgugaucagagagcccuucaucagcugcagcccccuggagugcagaaccuucuuccugacccagggcgcccugcugaacgacaagcacagcaacggcaccaucaaggacagaagccccuacagaacccugaugagcugccccaucggcgaggugcccagccccuacaacagcagauucgagagcguggccuggagcgccagcgccugccacgacggcaucaacuggcugaccaucggcaucagcggccccgacaacggcgccguggccgugcugaaguacaacggcaucaucaccgacaccaucaagagcuggagaaacaacauccugagaacccaggagagcgagugcgccugcgugaacggcagcugcuucaccgugaugaccgacggccccagcgacggccaggccagcuacaagaucuucagaaucgagaagggcaagaucgugaagagcguggagaugaacgcccccaacuaccacuacgaggagugcagcugcuaccccgacagcagcgagaucaccugcgugugcagagacaacuggcacggcagcaacagacccugggugagcuucaaccagaaccuggaguaccagaucggcuacaucugcagcggcaucuucggcgacaaccccagacccaacgacaagaccggcaacugcggccccgugagcagcaacggcgccaacggcgugaagggcuucagcuucaaguacggcaacggcguguggaucggcagaaccaagagcaucagcagcagaaacggcuucgagaugaucugggaccccaacggcuggaccggcaccgacaacaacuucagcaucaagcaggacaucgugggcaucaacgaguggagcggcuacagcggcagcuucgugcagcaccccgagcugaccggccuggacugcaucagacccugcuucuggguggagcugaucagaggcagacccaaggagaacaccaucuggaccagcggcagcagcaucagcuucugcggcgugaacagcgacaccgugggcuggagcuggcccgacggcgccgagcugcccuucaccaucgacaaguga

SEQ ID NO: 179761 - RNA, 1410 nt, Artificial Sequence
  derived and/or modified CDS sequence (opt4) from neuraminidase__InfluenzaA__ADM95654
augaaccccaaccagaagaucaucaccaucggcagcgugugcaugaccaucggcauggccaaccugauccugcagaucggcaacaucaucagcaucuggaucagccacagcauccagcugggcaaccagaaccagaucgagaccugcaaccagagcgugaucaccuacgagaacaacaccugggugaaccagaccuacgugaacaucagcaacaccaacuucgccgccggccagagcguggugagcgugaagcuggccggcaacagcagccugugccccgugagcggcugggccaucuacagcaaggacaacagcaucagaaucggcagcaagggcgacguguucgugaucagagagcccuucaucagcugcagcccccuggagugcagaaccuucuuccugacccagggcgcccugcugaacgacaagcacagcaacggcaccaucaaggacagaagccccuacagaacccugaugagcugccccaucggcgaggugcccagccccuacaacagcagauucgagagcguggccuggagcgccagcgccugccacgacggcaucaacuggcugaccaucggcaucagcggccccgacaacggcgccguggccgugcugaaguacaacggcaucaucaccgacaccaucaagagcuggagaaacaacauccugagaacccaggagagcgagugcgccugcgugaacggcagcugcuucaccgugaugaccgacggccccagcgacggccaggccagcuacaagaucuucagaaucgagaagggcaagaucgugaagagcguggagaugaacgcccccaacuaccacuacgaggagugcagcugcuaccccgacagcagcgagaucaccugcgugugcagagacaacuggcacggcagcaacagacccugggugagcuucaaccagaaccuggaguaccagaucggcuacaucugcagcggcaucuucggcgacaaccccagacccaacgacaagaccggcagcugcggccccgugagcagcaacggcgccaacggcgugaagggcuucagcuucaaguacggcaacggcguguggaucggcagaaccaagagcaucagcagcagacacggcuucgagaugaucugggaccccaacggcuggaccggcaccgacaacaacuucagcaucaagcaggacaucgugggcaccaacgaguggagcggcuacagcggcagcuucgugcagcaccccgagcugaccggccuggacugcaucagacccugcuucuggguggagcugaucagaggcagacccaaggagaacaccaucuggaccagcggcagcagcaucagcuucugcggcgugaacagcgacaccgugggcuggagcuggcccgacggcgccgagcugcccuucaccaucgacaaguga

SEQ ID NO: 179762 - RNA, 1410 nt, Artificial Sequence
  derived and/or modified CDS sequence (opt4) from neuraminidase__InfluenzaA__ADM95655
augaaccccaaccagaagaucaucaccaucggcagcgugugcaugaccaucggcauggccaaccugauccugcagaucggcaacaucaucagcaucuggaucagccacagcauccagcugggcaaccagaaccagaucgagaccugcaaccagagcgugaucaccuacgagaacaacaccugggugaaccagaccuacgugaacaucagcaacaccaacuucgccgccggccagagcguggugagcgugaagcuggccggcaacagcagccugugccccgugagcggcugggccaucuacagcaaggacaacagcaucagaaucggcagcaagggcgacguguucgugaucagagagcccuucaucagcugcagcccccuggagugcagaaccuucuuccugacccagggcgcccugcugaacgacaagcacagcaacggcaccaucaaggacagaagccccuacagaacccugaugagcugccccaucggcgaggugcccagccccuacaacagcagauucgagagcguggccuggagcgccagcgccugccacgacggcaucaacuggcugaccaucggcaucagcggccccgacaacggcgccguggccgugcugaaguacaacggcaucaucaccgacaccaucaagagcuggagaaacaacauccugagaacccaggagagcgagugcgccugcgugaacggcagcugcuucaccgugaugaccgacggccccagcgacggccaggccagcuacaagaucuucagaaucgagaagggcaagaucgugaagagcguggagaugaacgcccccaacuaccacuacgaggagugcagcugcuaccccgacagcagcgagaucaccugcgugugcagagacaacuggcacggcagcaacagacccugggugagcuucaaccagaaccuggaguaccagaucggcuacaucugcagcggcaucuucggcgacaaccccagacccagcgacaagaccggcagcugcggccccgugagcagcaacggcgccaacggcgugaagggcuucagcuucaaguacggcaacggcguguggaucggcagaaccaagagcaucagcagcagaaacggcuucgagaugaucugggaccccaacggcuggaccggcaccgacaacgacuucagcaucaagcaggacaucgugggcaucaacgaguggagcggcuacagcggcagcuucgugcagcaccccgagcugaccggccuggacugcaucagacccugcuucuggguggagcugaucagaggcagacccaaggagaacaccaucuggaccagcggcagcagcaucagcuucugcggcgugaacagcgacaccgugggcuggagcuggcccgacggcgccgagcugcccuucaccaucgacaaguga

SEQ ID NO: 179763 - RNA, 1410 nt, Artificial Sequence; identical to SEQ ID NO: 178410
  derived and/or modified CDS sequence (opt4) from neuraminidase__InfluenzaA__ADM95656

SEQ ID NO: 179764 - RNA, 1410 nt, Artificial Sequence; identical to SEQ ID NO: 177975
  derived and/or modified CDS sequence (opt4) from neuraminidase__InfluenzaA__ADM95658

SEQ ID NO: 179765 - RNA, 1410 nt, Artificial Sequence
  derived and/or modified CDS sequence (opt4) from neuraminidase__InfluenzaA__ADM95659
augaaccccaaccagaagaucaucaccaucggcagcgugugcaugaccaucggcauggccaaccugauccugcagaucggcaacaucaucagcaucuggaucagccacagcauccagcugggcaaccagaaccagaucgagaccugcaaccagagcgugaucaccuacgagaacaacaccugggugaaccagaccuacgugaacaucagcaacaccaacuucgccgccggccagagcguggugagcgugaagcuggccggcaacagcagccugugccccgugagcggcugggccaucuacagcaaggacaacagcaucagaaucggcagcaagggcgacguguucgugaucagagagcccuucaucagcugcagcccccuggagugcagaaccuucuuccugacccagggcgcccugcugaacgacaagcacagcaacggcaccaucaaggacagaagccccuacagaacccugaugagcugccccaucggcgaggugcccagccccuacaacagcagauucgagagcguggccuggagcgccagcgccugccacgacggcaucaacuggcugaccaucggcaucagcggccccgacaacggcgccguggccgugcugaaguacaacggcaucaucaccgacaccaucaagagcuggagaaacaacauccugagaacccaggagagcgagugcgccugcgugaacggcagcugcuucaccgugaugaccgacggccccagcgacggccaggccagcuacaagaucuucagaaucgagaagggcaagaucgugaagagcguggagaugaacgcccccaacuaccacuacgaggagugcagcugcuaccccgacagcagcgagaucaccugcgugugcagagacaacuggcacggcagcaacagacccugggugagcuucaaccagaaccuggaguaccagaucggcuacaucugcagcggcaucuucggcgacaaccccagacccaacgacaagaccggcagcugcggccccgugagcagcaacggcgccaacggcgugaagggcuucagcuucaaguacggcaacggcguguggaucggcagaaccaagagcaucagcagcagaagcggcuucgagaugaucugggaccccaacggcuggaccggcaccgacaacaacuucagcaucaagcaggacaucaucggcaccaacgaguggagcggcuacagcggcagcuucgugcagcaccccgagcugaccggccuggacugcaucagacccugcuucuggguggagcugaucagaggcagacccaaggagaacaccaucuggaccagcggcagcagcaucagcuucugcggcgugaacagcgacaccgugggcuggagcuggcccgacggcgccgagcugcccuucaccaucgacaaguga

SEQ ID NO: 179766 - RNA, 1410 nt, Artificial Sequence; identical to SEQ ID NO: 176798
  derived and/or modified CDS sequence (opt4) from neuraminidase__InfluenzaA__ADM95660

SEQ ID NO: 179767 - RNA, 1410 nt, Artificial Sequence
  derived and/or modified CDS sequence (opt4) from neuraminidase__InfluenzaA__ADM95661
augaaccccaaccagaagaucaucaccaucggcagcgugugcaugaccaucggcauggccaaccugauccugcagaucggcaacaucaucagcaucuggaucagccacagcauccagcugggcaaccagaaccagaucgagaccugcaaccagagcgugaucaccuacgagaacaacaccugggugaaccagaccuacgugaacaucagcaacaccaacuucgccgccggccagagcguggugagcgugaagcuggccggcaacagcagccugugccccgugagcggcugggccaucuacagcaaggacaacagcaucagaaucggcagcaagggcgacguguucgugaucagagagcccuucaucagcugcagcccccuggagugcagaaccuucuuccugacccagggcgcccugcugaacgacaagcacagcaacggcaccaucaaggacagaagccccuacagaacccugaugagcugccccaucggcgaggugcccagccccuacaacagcagauucgagagcguggccuggagcgccagcgccugccacgacggcaucaacuggcugaccaucggcaucagcggccccgacaacggcgccguggccgugcugaaguacaacggcaucaucaccgacaccaucaagagcuggagaaacaacauccugagaacccaggagagcgagugcgccugcgugaacggcagcugcuucaccgugaugaccgacggccccagcgacggccaggccagcuacaagaucuucagaaucgagaagggcaagaucgugaagagcguggagaugaacgcccccaacuaccacuacgaggagugcagcugcuaccccgacagcagcgagaucaccugcgugugcagagacaacuggcacggcagcaacagacccugggugagcuucaaccagaaccuggaguaccagaucggcuacaucugcagcggcaucuucggcgacaaccccagacccaacgacaagaccggcagcugcggccccgugagcagcaacggcgccaacggcgugaagggcuucagcuucaaguacggcaacggcguguggaucggcagaaccaagagcaucagcagcagaaacggcuucgagaugaucugggaccccaacggcuggaccggcaccgacaacaacuucagcaucaagcaggacaucgugggcaccaacgaguggagcggcuacagcggcagcuucgugcagcaccccgagcugaccggccuggacugcaucagacccugcuucuggguggagcugaucagaggcagacccaaggagaacaccaucuggaccagcggcagcaucaucagcuucugcggcgugaacagcgacaccgugggcuggagcuggcccgacggcgccgagcugcccuucaccaucgacaaguga

SEQ ID NO: 179768 - RNA, 1410 nt, Artificial Sequence; identical to SEQ ID NO: 178410
  derived and/or modified CDS sequence (opt4) from neuraminidase__InfluenzaA__ADM95662

SEQ ID NO: 179769 - RNA, 1410 nt, Artificial Sequence
  derived and/or modified CDS sequence (opt4) from neuraminidase__InfluenzaA__ADM95663
augaaccccaaccagaagaucaucaccaucggcagcgugugcaugaccaucggcauggccaaccugauccugcagaucggcaacaucaucagcaucuggaucagccacagcauccagcugggcaaccagaaccagaucgagaccugcaaccagagcgugaucaccuacgagaacaacaccugggugaaccagaccuacgugaacaucagcaacaccaacuucgccgccggccagagcguggugagcgugaagcuggccggcaacagcagccugugccccgugaacggcugggccaucuacagcaaggacaacagcaucagaaucggcagcaagggcgacguguucgugaucagagagcccuucaucagcugcagcccccuggagugcagaaccuucuuccugacccagggcgcccugcugaacgacaagcacagcaacggcaccaucaaggacagaagccccuacagaacccugaugagcugccccaucggcgaggugcccagccccuacaacagcagauucgagagcguggccuggagcgccagcgccugccacgacggcaucaacuggcugaccaucggcaucagcggccccgacaacggcgccguggccgugcugaaguacaacggcaucaucaccgacaccaucaagagcuggagaaacaacauccugagaacccaggagagcgagugcgccugcgugaacggcagcugcuucaccgugaugaccgacggccccagcgacggccaggccagcuacaagaucuucagaaucgagaagggcaagaucgugaagagcaucgagaugaacgcccccaacuaccacuacgaggagugcagcugcuaccccgacagcagcgagaucaccugcgugugcagagacaacuggcacggcagcaacagacccugggugagcuucaaccagaaccuggaguaccagaucggcuacaucugcagcggcaucuucggcgacaaccccagacccaacgacaagaccggcagcugcggccccgugagcagcaacggcgccaacggcgugaagggcuucagcuucaaguacggcaacggcguguggaucggcagaaccaagagcaucagcagcagaaacggcuucgagaugaucugggaccccaacggcuggaccggcaccgacaacaacuucagcaucaagcaggacaucgugggcaccaacgaguggagcggcuacagcggcagcuucgugcagcaccccgagcugaccggccuggacugcaucagacccugcuucuggguggagcugaucagaggcagacccaaggagaacaccaucuggaccagcggcagcaucaucagcuucugcggcgugaacagcgacaccgugggcuggagcuggcccgacggcgccgagcugcccuucaccaucgacaaguga

SEQ ID NO: 179770 - RNA, 1410 nt, Artificial Sequence; identical to SEQ ID NO: 178410
  derived and/or modified CDS sequence (opt4) from neuraminidase__InfluenzaA__ADM95664

SEQ ID NO: 179771 - RNA, 1410 nt, Artificial Sequence; identical to SEQ ID NO: 178410
  derived and/or modified CDS sequence (opt4) from neuraminidase__InfluenzaA__ADM95665

SEQ ID NO: 179772 - RNA, 1410 nt, Artificial Sequence
  derived and/or modified CDS sequence (opt4) from neuraminidase__InfluenzaA__ADM95666
augaaccccaaccagaagaucaucaccaucggcagcgugugcaugaccaucggcauggccaaccugauccugcagaucggcaacaucaucagcaucuggaucagccacagcauccagcugggcaaccagaaccagaucgagaccugcaaccagagcgugaucaccuacgagaacaacaccugggugaaccagaccuacgugaacaucagcaacaccaacuucgccgccggccagagcguggugagcgugaagcuggccggcaacagcagccugugccccgugaacggcugggccaucuacagcaaggacaacagcaucagaaucggcagcaagggcgacguguucgugaucagagagcccuucaucagcugcagcccccuggagugcagaaccuucuuccugacccagggcgcccugcugaacgacaagcacagcaacggcaccaucaaggacagaagccccuacagaacccugaugagcugccccaucggcgaggugcccagccccuacaacagcagauucgagagcguggccuggagcgccagcgccugccacgacggcaucaacuggcugaccaucggcaucagcggccccgacaacggcgccguggccgugcugaaguacaacggcaucaucaccgacaccaucaagagcuggagaaacaacauccugagaacccaggagagcgagugcgccugcgugaacggcagcugcuucaccgugaugaccgacggccccagcgacggccaggccagcuacaagaucuucaagaucgagaagggcaagaucgugaagagcguggagaugaacgcccccaacuaccacuacgaggagugcagcugcuaccccgacagcagcgagaucaccugcgugugcagagacaacuggcacggcagcaacagacccugggugagcuucaaccagaaccuggaguaccagaucggcuacaucugcagcggcaucuucggcgacaaccccagacccaacgacaagaccggcagcugcggccccgugagcuucaacggcgccaacggcgugaagggcuucagcuucaaguacggcaacggcguguggaucggcagaaccaagagcaucagcagcagaaacggcuucgagaugaucugggaccccaacggcuggaccggcaccgacaacaacuucagcaucaagcaggacaucgugggcaccaacgaguggagcggcuacagcggcagcuucgugcagcaccccgagcugaccggccuggacugcaucagacccugcuucuggguggagcugaucagaggcagacccaaggagaacaccaucuggaccagcggcagcaucaucagcuucugcggcgugaacagcgacaccgugggcuggagcuggcccgacggcgccgagcugcccuucaccaucgacaaguga

SEQ ID NO: 179773 - RNA, 1410 nt, Artificial Sequence; identical to SEQ ID NO: 178410
  derived and/or modified CDS sequence (opt4) from neuraminidase__InfluenzaA__ADM95667

SEQ ID NO: 179774 - RNA, 1410 nt, Artificial Sequence; identical to SEQ ID NO: 178410
  derived and/or modified CDS sequence (opt4) from neuraminidase__InfluenzaA__ADM95668

SEQ ID NO: 179775 - RNA, 1410 nt, Artificial Sequence; identical to SEQ ID NO: 176798
  derived and/or modified CDS sequence (opt4) from neuraminidase__InfluenzaA__ADM95669

SEQ ID NO: 179776 - RNA, 1410 nt, Artificial Sequence; identical to SEQ ID NO: 176798
  derived and/or modified CDS sequence (opt4) from neuraminidase__InfluenzaA__ADM95670

SEQ ID NO: 179777 - RNA, 1410 nt, Artificial Sequence
  derived and/or modified CDS sequence (opt4) from neuraminidase__InfluenzaA__ADM95672
augaaccccaaccagaagaucaucaccaucggcagcgugugcaugaccaucggcauggccaaccugauccugcagaucggcaacaucaucagcaucuggaucagccacaccauccagcugggcaaccagaaccagaucgagaccugcaaccagagcgugaucaccuacgagaacaacaccugggugaaccagaccuacgugaacaucagcaacaccaacuucgccgccggccagagcguggugagcgugaagcuggccggcaacagcagccugugccccgugagcggcugggccaucuacagcaaggacaacagcaucagaaucggcagcaagggcgacguguucgugaucagagagcccuucaucagcugcagcccccuggagugcagaaccuucuuccugacccagggcgcccugcugaacgacaagcacagcaacggcaccaucaaggacagaagccccuacagaacccugaugagcugccccaucggcgaggugcccagccccuacaacagcagauucgagagcguggccuggagcgccagcgccugccacgacggcaucaacuggcugaccaucggcaucagcggccccgacaacggcgccguggccgugcugaaguacaacggcaucaucaccgacaccaucaagagcuggagaaacaacauccugagaacccaggagagcgagugcgccugcgugaacggcagcugcuucaccgugaugaccgacggccccagcgacggccaggccagcuacaagaucuucagaaucgagaagggcaagaucgugaagagcguggagaugaacgcccccaacuaccacuacgaggagugcagcugcuaccccgacagcagcgagaucaccugcgugugcagagacaacuggcacggcagcaacagacccugggugagcuucaaccagaaccuggaguaccagaucggcuacaucugcagcggcaucuucggcgacaaccccagacccaacgacaagaccggcagcugcggccccgugagcagcaacggcgccaacggcgugaagggcuucagcuucaaguacggcaacggcguguggaucggcagaaccaagagcaucagcagcagaaacggcuucgagaugaucugggaccccaacggcuggaccggcaccgacaacaacuucagcaucaagcaggacaucgugggcaccaacgaguggagcggcuacagcggcagcuucgugcagcaccccgagcugaccggccuggacugcaucagacccugcuucuggguggagcugaucagaggcagacccaaggagaacaccaucuggaccagcggcagcagcaucagcuucugcggcgugaacagcgacaccgugggcuggagcuggcccgacggcgccgagcugcccuucaccaucgacaaguga

SEQ ID NO: 179778 - RNA, 1410 nt, Artificial Sequence; identical to SEQ ID NO: 176798
  derived and/or modified CDS sequence (opt4) from neuraminidase__InfluenzaA__ADM95673

SEQ ID NO: 179779 - RNA, 1410 nt, Artificial Sequence; identical to SEQ ID NO: 178410
  derived and/or modified CDS sequence (opt4) from neuraminidase__InfluenzaA__ADM95674

SEQ ID NO: 179780 - RNA, 1410 nt, Artificial Sequence; identical to SEQ ID NO: 176798
  derived and/or modified CDS sequence (opt4) from neuraminidase__InfluenzaA__ADM95675

SEQ ID NO: 179781 - RNA, 1410 nt, Artificial Sequence
  derived and/or modified CDS sequence (opt4) from neuraminidase__InfluenzaA__ADM95677
augaaccccaaccagaagaucaucaccaucggcagcgugugcaugaccaucggcauggccaaccugauccugcagaucggcaacaucaucagcaucuggaucagccacagcauccagcugggcaaccagaaccagaucgagaccugcaaccagagcgugaucaccuacgagaacaacaccugggugaaccagaccuacgugaacaucagcaacaccaacuucgccgccggccagagcguggugagcgugaagcuggccggcaacagcagccugugccccgugaacggcugggccaucuacagcaaggacaacagcaucagaaucggcagcaagggcgacguguucgugaucagagagcccuucaucagcugcagcccccuggagugcagaaccuucuuccugacccagggcgcccugcugaacgacaagcacagcaacggcaccaucaaggacagaagccccuacagaacccugaugagcugccccaucggcgaggugcccagccccuacaacagcagauucgagagcguggccuggagcgccagcgccugccacgacggcaucaacuggcugaccaucggcaucagcggccccgacaacggcgccguggccgugcugaaguacaacggcaucaucaccgacaccaucaagagcuggagaaacaacauccugagaacccaggagagcgagugcgccugcgugaacggcagcugcuucaccgugaugaccgacggccccagcgacggccaggccagcuacaagaucuucagaaucgagaagggcaagaucgugaagagcguggagaugaacgcccccaacuaccacuacgaggagugcagcugcuaccccgacagcagcgagaucaccugcgugugcagagacaacuggcacggcagcaacagacccugggugagcuucaaccagaaccuggaguaccagaucggcuacaucugcagcggcaucuucggcgacaaccccagacccaacgacaagaccggcagcugcggccccgugagcagcaacggcgccaacggcgugaagggcuucagcuucaaguacggcaacggcguguggaucggcagaaccaagagcaucagcagcagaaacggcuucgagaugaucugggaccccaacggcuggaccggcaccgacaacaacuucagcaucaagcaggacaucgugggcaccaacgaguggagcggcuacagcggcagcuucgugcagcaccccgagcugaccggccuggacugcaucagacccugcuucuggguggagcugaucagaggcagacccaaggagaacaccaucuggaccagcggcagcaucaucagcuucugcggcgugaacagcgacaccgugggcuggagcuggcccgacggcgccgagcugcccuucaccaucgacaaguga

SEQ ID NO: 179782 - RNA, 1410 nt, Artificial Sequence
  derived and/or modified CDS sequence (opt4) from neuraminidase__InfluenzaA__ADM95678
augaaccccaaccagaagaucaucaccaucggcagcgugugcaugaccaucggcauggccaaccugauccugcagaucggcaacaucaucagcaucuggaucagccacagcauccagcugggcaaccagaaccagaucgagaccugcaaccagagcgugaucaccuacgagaacaacaccugggugaaccagaccuacgugaacaucagcaacaccaacuucgccgccggccagagcguggugagcgugaaguucgccggcaacagcagccugugccccgugagcggcugggccaucuacagcaaggacaacagcaucagaaucggcagcaagggcgacguguucgugaucagagagcccuucaucagcugcagcccccuggagugcagaaccuucuuccugacccagggcgcccugcugaacgacaagcacagcaacggcaccaucaaggacagaagccccuacagaacccugaugagcugccccaucggcgaggugcccagccccuacaacagcagauucgagagcguggccuggagcgccagcgccugccacgacggcaucaacuggcugaccaucggcaucagcggccccgacaacggcgccguggccgugcugaaguacaacggcaucaucaccgacaccaucaagagcuggagaaacaacauccugagaacccaggagagcgagugcgccugcgugaacggcagcugcuucaccgugaugaccgacggccccagcgacggccaggccagcuacaagaucuucagaaucgagaagggcaagaucgugaagagcguggagaugaacgcccccaacuaccacuacgaggagugcagcugcuaccccgacagcagcgagaucaccugcgugugcagagacaacuggcacggcagcaacagacccugggugagcuucaaccagaaccuggaguaccagaucggcuacaucugcagcggcaucuucggcgacaaccccagacccaacgacaagaccggcagcugcggccccgugagcagcaacggcgccaacggcgugaagggcuucagcuucaaguacggcaacggcguguggaucggcagaaccaagagcaucagcagcagaaacggcuucgagaugaucugggaccccaacggcuggaccggcaccgacaacaacuucagcaucaagcaggacaucgugggcaucaacgaguggagcggcuacagcggcagcuucgugcagcaccccgagcugaccggccuggacugcaucagacccugcuucuggguggagcugaucagaggcagacccaaggagaacaccaucuggaccagcggcagcagcaucagcuucugcggcgugaacagcgacaccgugggcuggagcuggcccgacggcgccgagcugcccuucaccaucgacaaguga

SEQ ID NO: 179783 - RNA, 1410 nt, Artificial Sequence; identical to SEQ ID NO: 179781
  derived and/or modified CDS sequence (opt4) from neuraminidase__InfluenzaA__ADM95679

SEQ ID NO: 179784 - RNA, 1410 nt, Artificial Sequence; identical to SEQ ID NO: 179781
  derived and/or modified CDS sequence (opt4) from neuraminidase__InfluenzaA__ADM95680

SEQ ID NO: 179785 - RNA, 1410 nt, Artificial Sequence; identical to SEQ ID NO: 176798
  derived and/or modified CDS sequence (opt4) from neuraminidase__InfluenzaA__ADM95681

SEQ ID NO: 179786 - RNA, 1410 nt, Artificial Sequence
  derived and/or modified CDS sequence (opt4) from neuraminidase__InfluenzaA__ADM95682
augaaccccaaccagaagaucaucaccaucggcagcgugugcaugaccaucggcauggccaaccugauccugcagaucggcaacaucaucagcaucuggaucagccacagcauccagcugggcaaccagaaccagaucgagaucugcaaccagagcgugaucaccuacgagaacaacaccugggugaaccagaccuacgugaacaucagcaacaccaacuucgccgccggccagagcguggugagcgugaagcuggccggcaacagcagccugugccccgugagcggcugggccaucuacagcaaggacaacagcaucagaaucggcagcaagggcgacguguucgugaucagagagcccuucaucagcugcagcccccuggagugcagaaccuucuuccugacccagggcgcccugcugaacgacaagcacagcaacggcaccaucaaggacagaagccccuacagaacccugaugagcugccccaucggcgaggugcccagccccuacaacagcagauucgagagcguggccuggagcgccagcgccugccacgacggcaucaacuggcugaccaucggcaucagcggccccgacaacggcgccguggccgugcugaaguacaacggcaucaucaccgacaccaucaagagcuggagaaacaacauccugagaacccaggagagcgagugcgccugcgugaacggcagcugcuucaccgugaugaccgacggccccagcgacggccaggccagcuacaagaucuucagaaucgagaagggcaagaucgugaagagcguggagaugaacgcccccaacuaccacuacgaggagugcagcugcuaccccgacagcagcgagaucaccugcgugugcagagacaacuggcacggcagcaacagacccugggugagcuucaaccagaaccuggaguaccagaucggcuacaucugcagcggcaucuucggcgacaaccccagacccaacgacaagaccggcagcugcggccccgugagcagcaacggcgccaacggcgugaagggcuucagcuucaaguacggcaacggcguguggaucggcagaaccaagagcaucagcagcagaaacggcuucgagaugaucugggaccccaacggcuggaccggcaccgacaacaacuucagcaucaagcaggacaucgugggcaccaacgaguggagcggcuacagcggcagcuucgugcagcaccccgagcugaccggccuggacugcaucagacccugcuucuggguggagcugaucagaggcagacccaaggagaacaccaucuggaccagcggcagcagcaucagcuucugcggcgugaacagcgacaccgugggcuggagcuggcccgacggcgccgagcugcccuucaccaucgacaaguga

SEQ ID NO: 179787 - RNA, 1410 nt, Artificial Sequence
  derived and/or modified CDS sequence (opt4) from neuraminidase__InfluenzaA__ADM95683
augaaccccaaccagaagaucaucaccaucggcagcgugugcaugaccaucggcauggccaaccugauccugcagaucggcaacaucaucagcaucuggaucagccacagcauccagcugggcaaccagaaccagaucgagaccugcaaccagagcgugaucaccuacgagaacaacaccugggugaaccagaccuacgugaacaucagcaacaccaacuucgccgccggccagagcguggugagcgugaagcuggccggcaacagcagccugugccccgugagcggcugggccaucuacagcaaggacaacagcaucagaaucggcagcaagggcgacguguucgugaucagagagcccuucaucagcugcagcccccuggagugcagaaccuucuuccugacccagggcgcccugcugaacgacaagcacagcaacggcaccaucaaggacagaagccccuacagaacccugaugagcugccccaucggcgaggugcccagccccuacaacagcagauucgagagcguggccuggagcgccagcgccugccacgacggcaucaacuggcugaccaucggcaucagcggccccgacaacggcgccguggccgugcugaaguacaacggcaucaucaccgacaccaucaagagcuggagaaacaacauccugagaacccaggagagcgagugcgccugcgugaacggcagcugcuucaccgugaugaccgacggccccagcgacggccaggccagcuacaagaucuucagaaucgagaagggcaagaucgugaagagcguggagaugaacgcccccaacuaccacuacgaggagugcagcugcuaccccgacagcagcgagaucaccugcgugugcagagacaacuggcacggcagcaacagacccugggugagcuucaaccagaaccuggaguaccagaucggcuacaucugcagcggcaucuucggcgacaaccccagacccaacgacaagaccggcagcugcggccccgugagcagcaacggcgccaacggcgugaagggcuucagcuucaaguacggcaacggcguguggaucggcagaaccaagagcaucagcagcagaaacggcuucgagaugaucugggaccccaacggcuggaccggcaccgacaacaacuucagcaucaagcaggacaucgugggcaucaacgaguggagcggcuacagcggcagcuucgugcagcaccccgagcugaccggccuggacugcaucagacccugcuucuggguggagcugaucagaggcagacccaaggagaacaccaucuggaccagcggcagcagcaugagcuucugcggcgugaacagcgacaccgugggcuggagcuggcccgacggcgccgagcugcccuucaccaucgacaaguga

SEQ ID NO: 179788 - RNA, 1410 nt, Artificial Sequence; identical to SEQ ID NO: 176798
  derived and/or modified CDS sequence (opt4) from neuraminidase__InfluenzaA__ADM95684

SEQ ID NO: 179789 - RNA, 1410 nt, Artificial Sequence
  derived and/or modified CDS sequence (opt4) from neuraminidase__InfluenzaA__ADM95685
augaaccccaaccagaagaucaucaccaucggcagcgugugcaugaccaucggcauggccaaccugauccugcagaucggcaacaucaucagcaucuggaucagccacagcauccagcugggcaaccagaaccagaucgagaccugcaaccagagcgugaucaccuacgagaacaacaccugggugaaccagaccuacgugaacaucagcaacaccaacuucgccgccggccagagcguggugagcgugaagcuggccggcaacagcagccugugccccgugagcggcugggccaucuacagcaaggacaacagcaucagaaucggcagcaagggcgacguguucgugaucagagagcccuucaucagcugcagcccccuggagugcagaaccuucuuccugacccagggcgcccugcugaacgacaagcacagcaacggcaccaucaaggacagaagccccuacagaacccugaugagcugccccaucggcgaggugcccagccccuacaacagcagauucgagagcguggccuggagcgccagcgccugccacgacggcaucaacuggcugaccaucggcaucagcggccccgacaacggcgccguggccgugcugaaguacaacggcaucaucaccgacaccaucaagagcuggagaaacaacauccugagaacccaggagagcgagugcgccugcgugaacggcagcugcuucaccgugaugaccgacggccccagcgacggccaggccagcuacaagaucuucagaaucgagaagggcaagaucgugaagagcguggagaugaacgcccccaacuaccacuacgaggagugcagcugcuaccccgacagcagcgagaucaccugcgugugcagagacaacuggcacggcagcaacagacccugggugagcuucaaccagaaccuggaguaccagaucggcuacaucugcagcggcaucuucggcgacaaccccagacccaacgacaagaccggcagcugcggccccgugagcagcaacggcgccaacggcgugaagggcuucagcuucaaguacggcaacggcguguggaucggcagaaccaagagcaucagcagcagacacggcuucgagaugaucugggaccccaacggcuggaccggcaccgacaacaacuucagcaucaagcaggacaucgugggcaccaacgaguggagcggcuacagcggcagcuucgugcagcaccccgagcugaccggccuggacugcaucagacccugcuucuggguggagcugaucagaggcagacccaaggagaacaccguguggaccagcggcagcagcaucagcuucugcggcgugaacagcgacaccgugggcuggagcuggcccgacggcgccgagcugcccuucaccaucgacaaguga

SEQ ID NO: 179790 - RNA, 1410 nt, Artificial Sequence
  derived and/or modified CDS sequence (opt4) from neuraminidase__InfluenzaA__ADM95686
augaaccccaaccagaagaucaucaccaucggcagcgugugcaugaccaucggcauggccaaccugauccugcagaucggcaacaucaucagcaucuggaucagccacagcauccagcugggcaaccagaaccagaucgagaccugcaaccagagcgugaucaccuacgagaacaacaccugggugaaccagaccuacgugaacaucagcaacaccaacuucgccgccggccagagcguggugagcgugaagcuggccggcaacagcagccugugccccgugagcggcugggccaucuacagcaaggacaacagcaucagaaucggcagcaagggcgacguguucgugaucagagagcccuucaucagcugcagcccccuggagugcagaaccuucuuccugacccagggcgcccugcugaacgacaagcacagcaacggcaccaucaaggacagaagccccuacagaacccugaugagcugccccaucggcgaggugcccagccccuacaacagcagauucgagagcguggccuggagcgccagcgccugccacgacggcaucaacuggcugaccaucggcaucagcggccccgacaacggcgccguggccgugcugaaguacaacggcaucaucaccgacaccaucaagagcuggagaaacaacauccugagaacccaggagagcgagugcgccugcgugaacggcagcugcuucaccgugaugaccgacggccccagcgacggccaggccagcuacaagaucuucagaaucgagaagggcaagaucgugaagagcguggagaugaacgcccccaacuaccacuacgaggagugcagcugcuaccccgacagcagcgagaucaccugcgugugcagagacaacuggcacggcagcaacagacccugggugagcuucaaccagaaccuggaguaccagaucggcuacaucugcagcggcaucuucggcgacaaccccagacccaacgacaagaccggcagcugcggccccgugagcagcaacggcgccaacggcgugaagggcuucagcuucaaguacggcaacggcguguggaucggcagaaccaagagcaucagcagcagaaacggcuucgagaugaucugggaccccaacggcuggaccggcaccgacaacgacuucagcaucaagcaggacaucgugggcaucaacgaguggagcggcuacagcggcagcuucgugcagcaccccgagcugaccggccuggacugcaucagacccugcuucuggguggagcugaucagaggcagacccaaggagaacaccaucuggaccagcggcagcagcaucagcuucugcggcgugaacagcgacaccgugggcuggagcuggcccgacggcgccgagcugcccuucaccaucgacaaguga

SEQ ID NO: 179791 - RNA, 1410 nt, Artificial Sequence; identical to SEQ ID NO: 176798
  derived and/or modified CDS sequence (opt4) from neuraminidase__InfluenzaA__ADM95687

SEQ ID NO: 179792 - RNA, 1410 nt, Artificial Sequence
  derived and/or modified CDS sequence (opt4) from neuraminidase__InfluenzaA__ADM95688
augaaccccaaccagaagaucaucaccaucggcagcgugugcaugaccaucggcauggccaaccugauccugcagaucggcaacaucaucagcaucuggaucagccacagcauccagcugggcaaccagaaccagaucgagaccugcaaccagagcgugaucaccuacgagaacaacaccugggugaaccagaccuacgugaacaucagcaacaccaacuucgccgccggccagagcguggugagcgugaagcuggccggcaacagcagccugugccccgugagcggcugggccaucuacagcaaggacaacagcaucagaaucggcagcaagggcgacguguucgugaucagagagcccuucaucagcugcagcccccuggagugcagaaccuucuuccugacccagggcgcccugcugaacgacaagcacagcaacggcaccaucaaggacagaagccccuacagaacccugaugagcugccccaucggcgaggugcccagccccuacaacagcagauucgagagcguggccuggagcgccagcgccugccacgacggcaucaacuggcugaccaucggcaucagcggccccgacaacggcgccguggccgugcugaaguacaacggcaucaucaccgacaccaucaagagcuggagaaacaacauccugagaacccaggagagcgagugcgccugcgugaacggcagcugcuucaccgugaugaccgacggccccagcgacggccaggccagcuacaagaucuucagaaucgagaagggcaagaucgugaagagcguggagaugaacgcccccaacuaccacuacgaggagugcagcugcuaccccgacagcagcgagaucaccugcgugugcagagacaacuggcacggcagcaacagacccugggugagcuucaaccagaaccuggaguaccagaucggcuacaucugcagcggcaucuucggcgacaaccccagacccaacgacaagaccggcagcugcggccccgugagcagcaacggcgccaacggcgugaagggcuucagcuucaaguacggcaacggcguguggaucggcagaaccaagagcaucagcagcagaaacggcuucgagaugaucugggaccccaacggcuggaccggcaccgacaacaacuucagcaucaagcaggacaucgugggcaccaacgaguggagcggcuacagcggcagcuucgugcagcaccccgagcugaccagacuggacugcaucagacccugcuucuggguggagcugaucagaggcagacccaaggagaacaccaucuggaccagcggcagcaucaucagcuucugcggcgugaacagcgacaccgugggcuggagcuggcccgacggcgccgagcugcccuucaccaucgacaaguga

SEQ ID NO: 179793 - RNA, 1410 nt, Artificial Sequence; identical to SEQ ID NO: 179790
  derived and/or modified CDS sequence (opt4) from neuraminidase__InfluenzaA__ADM95689

SEQ ID NO: 179794 - RNA, 1410 nt, Artificial Sequence
  derived and/or modified CDS sequence (opt4) from neuraminidase__InfluenzaA__ADM95690
augaaccccaaccagaagaucaucaccaucggcagcgugugcaugaccaucggcauggccaaccugauccugcagaucggcaacaucaucagcaucuggaucagccacagcauccagcugggcaaccagaaccagaucgagaccugcaaccagagcgugaucaccuacgagaacaacaccugggugaaccagaccuacgugaacaucagcaacaccaacuucgccgccggccagagcguggugagcgugaagcuggccggcaacagcagccugugccccgugagcggcugggccaucuacagcaaggacaacagcaucagaaucggcagcaagggcgacguguucgugaucagagagcccuucaucagcugcagcccccuggagugcagaaccuucuuccugacccagggcgcccugcugaacgacaagcacagcaacggcaccaucaaggacagaagccccuacagaacccugaugagcugccccaucggcgaggugcccagccccuacaacagcagauucgagagcguggccuggagcgccagcgccugccacgacggcaucaacuggcugaccaucggcaucagcggccccgacaacggcgccguggccgugcugaaguacaacggcaucaucaccgacaccaucaagagcuggagaaacaacauccugagaacccaggagagcgagugcgccugcgugaacggcagcugcuucaccgugaugaccgacggccccagcgacggccaggccagcuacaagaucuucagaaucgagaagggcaagaucgugaagagcguggagaugaacgcccccaacuaccacuacgaggagugcagcugcuaccccgacagcagcgagaucaccugcgugugcagagacaacuggcacggcagcaacagacccugggugagcuucaaccagaaccuggaguaccagaucggcuacaucugcagcggcaucuucggcgacaaccccagacccaacgacaagaccggcagcugcggccccgugagcagcaacggcgccaacggcgugaagggcuucagcuucaaguacggcaacggcguguggaucggcagaaccaagagcaucagcagcagaaacggcuucgagaugaucugggaccccaacggcuggaccggcaccgacaacaacuucagcaucaagcaggacaucaucggcaccaacgaguggagcggcuacagcggcagcuucgugcagcaccccgagcugaccggccuggacugcaucagacccugcuucuggguggagcugaucagaggcagacccaaggagaacaccaucuggaccagcggcagcagcaucagcuucugcggcgugaacagcgacaccgugggcuggagcuggcccgacggcgccgagcugcccuucaccaucgacaaguga

SEQ ID NO: 179795 - RNA, 1410 nt, Artificial Sequence; identical to SEQ ID NO: 176798
  derived and/or modified CDS sequence (opt4) from neuraminidase__InfluenzaA__ADM95691

SEQ ID NO: 179796 - RNA, 1410 nt, Artificial Sequence
  derived and/or modified CDS sequence (opt4) from neuraminidase__InfluenzaA__ADM95692
augaaccccaaccagaagaucaucaccaucggcagcgugugcaugaccaucggcauggccaaccugauccugcagaucggcaacaucaucagcaucuggaucagccacagcauccagcugggcaaccagaaccagaucgagaccugcaaccagagcgugaucaccuacgagaacaacaccugggugaaccagaccuacgugaacaucaucaacaccaacuucgccgccggccagagcguggugagcgugaagcuggccggcaacagcagccugugccccgugagcggcugggccaucuacagcaaggacaacagcaucagaaucggcagcaagggcgacguguucgugaucagagagcccuucaucagcugcagcccccuggagugcagaaccuucuuccugacccagggcgcccugcugaacgacaagcacagcaacggcaccaucaaggacagaagccccuacagaacccugaugagcugccccaucggcgaggugcccagccccuacaacagcagauucgagagcguggccuggagcgccagcgccugccacgacggcaucaacuggcugaccaucggcaucagcggccccgacaacggcgccguggccgugcugaaguacaacggcaucaucaccgacaccaucaagagcuggagaaacaacauccugagaacccaggagagcgagugcgccugcgugaacggcagcugcuucaccgugaugaccgacggccccagcgacggccaggccagcuacaagaucuucagaaucgagaagggcaagaucgugaagagcguggagaugaacgcccccaacuaccacuacgaggagugcagcugcuaccccgacagcagcgagaucaccugcgugugcagagacaacuggcacggcagcaacagacccugggugagcuucaaccagaaccuggaguaccagaucggcuacaucugcagcggcaucuucggcgacaaccccagacccaacgacaagaccggcagcugcggccccgugagcagcaacggcgccaacggcgugaagggcuucagcuucaaguacggcaacggcguguggaucggcagaaccaagagcaucagcagcagaaacggcuucgagaugaucugggaccccaacggcuggaccggcaccgacaacaacuucagcaucaagcaggacaucgugggcaucaacgaguggagcggcuacagcggcagcuucgugcagcaccccgagcugaccggccuggacugcaucagacccugcuucuggguggagcugaucagaggcagacccaaggagaacaccaucuggaccagcggcagcagcaucagcuucugcggcgugaacagcgacaccgugggcuggagcuggcccgacggcgccgagcugcccuucaccaucgacaaguga

SEQ ID NO: 179797 - RNA, 1410 nt, Artificial Sequence; identical to SEQ ID NO: 176798
  derived and/or modified CDS sequence (opt4) from neuraminidase__InfluenzaA__ADM95693

SEQ ID NO: 179798 - RNA, 1410 nt, Artificial Sequence; identical to SEQ ID NO: 176798
  derived and/or modified CDS sequence (opt4) from neuraminidase__InfluenzaA__ADM95694

SEQ ID NO: 179799 - RNA, 1410 nt, Artificial Sequence; identical to SEQ ID NO: 176798
  derived and/or modified CDS sequence (opt4) from neuraminidase__InfluenzaA__ADM95695

SEQ ID NO: 179800 - RNA, 1410 nt, Artificial Sequence; identical to SEQ ID NO: 179790
  derived and/or modified CDS sequence (opt4) from neuraminidase__InfluenzaA__ADM95696

SEQ ID NO: 179801 - RNA, 1410 nt, Artificial Sequence; identical to SEQ ID NO: 178410
  derived and/or modified CDS sequence (opt4) from neuraminidase__InfluenzaA__ADM95697

SEQ ID NO: 179802 - RNA, 1413 nt, Artificial Sequence
  derived and/or modified CDS sequence (opt4) from neuraminidase__InfluenzaA__ADM95698
augaaccccaaccagaagaucaucaccaucggcagcaucagcaucgccaucggcaucaucagccugaugcugcagaucggcaacaucaucagcaucugggccagccacagcauccagaccggcagccagaacaacaccggcaucugcaaccagagaaucaucaccuacgagaacaacaccugggugaaccacaccuacgugaacaucaacaacaccaacgugguggccgaggaggacaagaccagcgugacccuggccggcaacagcagccugugcagcaucagcggcugggccaucuacaccaaggacaacagcaucagaaucggcagcaagggcgacguguucgugaucagagagcccuucaucagcugcagccaccuggagugcagaaccuucuuccugacccagggcgcccugcugaacgacaagcacagcaacggcaccgugaaggacagaagccccuacagagcccugaugagcugcccccugggcgaggcccccagccccuacaacagcaaguucgagagcguggccuggagcgccagcgccugccacgacggcaugggcuggcugaccaucggcaucagcggccccgacaacggcgccguggccgugcugaaguacaacggcaucaucaccggcaccaucaagagcuggaagaagcagauccugagaacccaggagagcgagugcgugugcaugaacggcagcugcuucaccaucaugaccgacggccccagcaacaaggccgccagcuacaagaucuucaagaucgagaagggcaaggugaccaagagcaucgagcugaacgcccccaacuuccacuacgaggagugcagcugcuaccccgacaccggcaucgugaugugcgugugcagagacaacuggcacggcagcaacagacccugggugagcuucaaccagaaccuggacuaccagaucggcuacaucugcagcggcguguucggcgacaaccccagacccgaggacggcgagggcagcugcaaccccgugaccguggacggcgccaacggcgugaagggcuucagcuacaaguacgacaacggcguguggaucggcagaaccaagagcaacagacugagaaagggcuucgagaugaucugggaccccaacggcuggaccaacaccgacagcgacuucagcgugaagcaggacgugguggccaucaccgacuggagcggcuacagcggcagcuucgugcagcaccccgagcugaccggccuggacugcaucagacccugcuucuggguggagcuggugagaggccagcccagagagaacaccaccaucuggaccagcggcagcagcaucagcuucugcggcgugaacagcgacaccgccaacuggagcuggcccgacggcgccgagcugcccuucaccaucgacaaguga

SEQ ID NO: 179803 - RNA, 1413 nt, Artificial Sequence
  derived and/or modified CDS sequence (opt4) from neuraminidase__InfluenzaA__ADM95699
augaaccccaaccagaagaucaucaccaucggcagcaucagcaucgccaucggcaucaucagccugaugcugcagaucggcaacaucaucagcaucugggccagccacagcauccagaccggcagccagaacaacaccggcaucugcaaccagagaaucaucaccuacgagaacaacaccugggugaaccacaccuacgugaacaucaacaacaccaacgugguggccgaggaggacaagaccagcgugacccuggccggcaacagcagccugugcagcaucagcggcugggccaucuacaccaaggacaacagcaucagaaucggcagcaagggcgacguguucgugaucagagagcccuucaucagcugcagccaccuggagugcagaaccuucuuccugacccagggcgcccugcugaacgacaagcacagcaacggcaccgugaaggacagaagccccuacagagcccugaugagcugcccccugggcgaggcccccagccccuacaacagcaaguucgagagcguggccuggagcgccagcgccugccacgacggcaugggcuggcugaccaucggcaucagcggccccgacaacggcgccguggccgugcugaaguacaacggcaucaucaccggcaccaucaagagcuggaagaagcagauccugagaacccaggagagcgagugcgugugcaugaacggcagcugcuucaccaucaugaccgacggccccagcaacaaggccgccagcuacaagaucuucaagaucgagaagggcaaggugaccaagagcaucgagcugaacgcccccaacuucuacuacgaggagugcagcugcuaccccgacaccggcaucgugaugugcgugugcagagacaacuggcacggcagcaacagacccugggugagcuucaaccagaaccuggacuaccagaucggcuacaucugcagcggcguguucggcgacaaccccagacccgaggacggcgagggcagcugcaaccccgugaccguggacggcgccaacggcgugaagggcuucagcuacaaguacgacaacggcguguggaucggcagaaccaagagcaacagacugagaaagggcuucgagaugaucugggaccccaacggcuggaccaacaccgacagcgacuucagcgugaagcaggacgugguggccaucaccgacuggagcggcuacagcggcagcuucgugcagcaccccgagcugaccggccuggacugcaucagacccugcuucuggguggagcuggugagaggccugcccagagagaacaccaccaucuggaccagcggcagcagcaucagcuucugcggcgugaacagcgacaccgccaacuggagcuggcccgacggcgccgagcugcccuucaccaucgacaaguga

SEQ ID NO: 179804 - RNA, 1413 nt, Artificial Sequence
  derived and/or modified CDS sequence (opt4) from neuraminidase__InfluenzaA__ADM95701
augaaccccaaccagaagaucaucaccaucggcagcaucagcaucgccaucggcaucaucagccugaugcugcagaucggcaacaucaucagcaucugggccagccacagcauccagaccggcagccagaacaacaccggcaucugcaaccagagaaucaucaccuacgagaacaacaccugggugaaccacaccuacgugaacaucaacaacaccaacgugguggccgaggaggacaagaccagcgugacccuggccggcaacagcagccugugcagcaucagcggcugggccaucuacaccaaggacaacagcaucagaaucggcagcaagggcgacguguucgugaucagagagcccuucaucagcugcagccaccuggagugcagaaccuucuuccugacccagggcgcccugcugaacgacaagcacagcaacggcaccgugaaggacagaagccccuacagagcccugaugagcugcccccugggcgaggcccccagccccuacaacagcaaguucgagagcguggccuggagcgccagcgccugccacgacggcaugggcuggcugaccaucggcaucagcggccccgacaacggcgccguggccgugcugaaguacaacggcaucaucaccggcaccaucaagagcuggaagaagcagauccugagaacccaggagagcgagugcgugugcaugaacggcagcugcuucaccaucaugaccgacggccccagcaacaaggccgccagcuacaagaucuucaagaucgagaagggcaaggugaccaagagcaucgagcugaacgcccccaacuuccacuacgaggagugcagcugcuaccccgacaccggcaucgugaugugcgugugcagagacaacuggcacggcagcaacagacccugggugagcuucaaccagaaccuggacuaccagaucggcuacaucugcagcggcguguucggcgacaaccccagacccgaggacggcgagggcagcugcaaccccgugaccguggacggcgccaacggcgugaagggcuucagcuacaaguacgacaacggcguguggaucggcagaaccaagagcaacagacugagaaagggcuucgagaugaucugggaccccaacggcuggaccaacaccgacagcgacuucagcgugaagcaggacgugguggccaucaccgacuggagcggcuacagcggcagcuucgugcagcaccccgagcugaccggccuggacugcaucagacccugcuucuggguggagcuggugagaggccugcccagagagaacaccaccaucuggaccagcggcagcagcaucagcuucugcggcgugaacagcgacaccgccaacuggagcuggcccgacggcgccgagcugcccuucaccaucgacaaguga

SEQ ID NO: 179805 - RNA, 1413 nt, Artificial Sequence
  derived and/or modified CDS sequence (opt4) from neuraminidase__InfluenzaA__ADM95702
augaaccccaaccagaagaucaucaccaucggcagcaucagcaucgccaucggcaucaucagccugaugcugcagaucggcaacaucaucagcaucugggccagccacagcauccagaccggcagacagaacaacaccggcaucugcaaccagagaaucaucaccuacgagaacagcaccugggugaaccacaccuacgugaacaucaacaacaccaaggugguggccggcgaggacaagaccagcgugacccuggccggcaacagcagccugugcagcaucagcggcugggccaucuacaccaaggacaacagcaucagaaucggcagcaagggcgacguguucgugaucagagagcccuucaucagcugcagccaccuggagugcagaaccuucuuccugacccagggcgcccugcugaacgacaagcacagcaacggcaccgugaaggacagaagccccuacagagcccugaugagcugcccccugggcgaggcccccagccccuacaacagcaaguucgagagcguggccuggagcgccagcgccugccacgacggcaugggcuggcugaccaucggcaucagcggccccgacaacggcgccguggccgugcugaaguacaacggcaucaucaccggcaccaucaagagcuggaagaagcagauccugagaacccaggagagcgagugcgugugcaugaacggcagcugcuucaccaucaugaccgacggccccagcaacaaggccgccagcuacaagaucuucaagaucgagaagggcaaggugaccaagagcaucgagcugaacgcccccaacuucuacuacgaggagugcagcugcuaccccgacaccggcaucgugaugugcgugugcagagacaacuggcacggcagcaacagacccugggugagcuucaaccagaaccuggacuaccagaucggcuacaucugcagcggcguguucggcgacaaccccagacccgaggacggcgagggcagcugcaaccccgugaccguggacggcgccaacggcgugaagggcuucagcuacaaguacggcaacggcguguggaucggcagaaccaagagcaacagacugagaaagggcuucgaggugaucugggaccccaacggcuggaccaacaccgacagcgacuucagcgugaagcaggacgugguggccaucaccgacuggagcggcuacagcggcagcuucgugcagcaccccgagcugaccggccuggacugcaucagacccugcuucuggguggagcuggugagaggccugcccagagagaacaccaccaucuggaccagcggcagcagcaucagcuucugcggcgugaacagcgacaccgccaacuggagcuggcccgacggcgccgagcugcccuucaccaucgacaaguga

SEQ ID NO: 179806 - RNA, 1413 nt, Artificial Sequence
  derived and/or modified CDS sequence (opt4) from neuraminidase__InfluenzaA__ADM95704
augaaccccaaccagaagaucaucaccaucggcagcaucagcaucgccaucggcaucaucagccugaugcugcagaucggcaacaucgugagcaucugggccagccacagcauccagaccggcagccagaacaacaccggcaucugcaaccagagaaucaucaccuacgagaacaacaccugggugaaccacaccuacgugaacaucaacaacaccaacgugguggccgaggaggacaagaccagcgugacccuggccggcaacagcagccugugcagcaucagcggcugggccaucuacaccaaggacaacagcaucagaaucggcagcaagggcgacguguucgugaucagagagcccuucaucagcugcagccaccuggagugcagaaccuucuuccugacccagggcgcccugcugaacgacaagcacagcaacggcaccgugaaggacagaagccccuacagagcccugaugagcugcccccugggcgaggcccccagccccuacaacagcaaguucgagagcguggccuggagcgccagcgccugccacgacggcaugggcuggcugaccaucggcaucagcggccccgacaacggcgccguggccgugcugaaguacaacggcaucaucaccggcaccaucaagagcuggaagaagcagauccugagaacccaggagagcgagugcgugugcaugaacggcagcugcuucaccaucaugaccgacggccccagcaacagagccgccagcuacaagaucuucaagaucgagaagggcaaggugaccaagagcaucgagcugaacgcccccaacuuccacuacgaggagugcagcugcuaccccgacaccggcaucgugaugugcgugugcagagacaacuggcacggcagcaacagacccugggugagcuucaaccagaaccuggacuaccagaucggcuacaucugcagcggcguguucggcgacaaccccagacccgaggacggcgagggcagcugcaaccccgugaccguggacggcgccaacggcgugaagggcuucagcuacaaguacgacaacggcguguggaucggcagaaccaagagcaacagacugagaaagggcuucgagaugaucugggaccccaacggcuggaccaacaccgacagcgacuucagcgugaagcaggacgugguggccaucaccgacuggagcggcuacagcggcagcuucgugcagcaccccgagcugaccggccuggacugcaucagacccugcuucuggguggagcuggugagaggccugcccagagagaacaccaccaucuggaccagcggcagcagcaucagcuucugcggcgugaacagcgacaccgccaacuggagcuggcccgacggcgccgagcugcccuucaccaucgacaaguga

SEQ ID NO: 179807 - RNA, 1413 nt, Artificial Sequence
  derived and/or modified CDS sequence (opt4) from neuraminidase__InfluenzaA__ADM95705
augaaccccaaccagaagaucaucaccaucggcagcaucagcaucgccaucggcaucaucagccugaugcugcagaucggcaacaucaucagcaucugggccagccacagcauccagaccggcagacagaacaacaccggcaucugcaaccagagaaucaucaccuacgagaacagcaccugggugaaccacaccuacgugaacaucaacaacaccaaggugguggccggcgaggacaagaccagcgugacccuggccggcaacagcagccugugcagcaucagcggcugggccaucuacaccaaggacaacagcaucagaaucggcagcaagggcgacguguucgugaucagagagcccuucaucagcugcagccaccuggagugcagaaccuucuuccugacccagggcgcccugcugaacgacaagcacagcaacggcaccgugaaggacagaagccccuacagagcccugaugagcugcccccugggcgaggcccccagccccuacaacagcaaguucgagagcguggccuggagcgccagcgccugccacgacggcaugggcuggcugaccaucggcaucagcggccccgacaacggcgccguggccgugcugaaguacaacggcaucaucaccggcaccaucaagagcuggaagaagcagauccugagaacccaggagagcgagugcgugugcaugaacggcagcugcuucaccaucaugaccgacggccccagcaacaaggccgccagcuacaagaucuucaagaucgagaagggcaaggugaccaagagcaucgagcugaacgcccccaacuucuacuacgaggagugcagcugcuaccccgacaccggcaucgugaugugcgugugcagagacaacuggcacggcagcaacagacccugggugagcuucaaccagaaccuggacuaccagaucggcuacaucugcagcggcguguucggcgacaaccccagacccgaggacggcgagggcagcugcaaccccgugaccguggacggcgccaacggcgugaagggcuucagcuacaaguacggcaacggcguguggaucggcagaaccaagagcaacagacugagaaagggcuucgagaugaucugggaccccaacggcuggaccaacaccgacagcgacuucagcgugaagcaggacgugguggccaucaccgacuggagcggcuacagcggcagcuucgugcagcaccccgagcugaccggccuggacugcaucagacccugcuucuggguggagcuggugagaggccugcccagagagaacaccaccaucuggaccagcggcagcagcaucagcuucugcggcgugaacagcgacaccgccaacuggagcuggcccgacggcgccgagcugcccuucaccaucgacaaguga

SEQ ID NO: 179808 - RNA, 1413 nt, Artificial Sequence; identical to SEQ ID NO: 179807
  derived and/or modified CDS sequence (opt4) from neuraminidase__InfluenzaA__ADM95706

SEQ ID NO: 179809 - RNA, 1413 nt, Artificial Sequence; identical to SEQ ID NO: 179807
  derived and/or modified CDS sequence (opt4) from neuraminidase__InfluenzaA__ADM95707

SEQ ID NO: 179810 - RNA, 1413 nt, Artificial Sequence; identical to SEQ ID NO: 177521
  derived and/or modified CDS sequence (opt4) from neuraminidase__InfluenzaA__ADM95708

SEQ ID NO: 179811 - RNA, 1410 nt, Artificial Sequence
  derived and/or modified CDS sequence (opt4) from neuraminidase__InfluenzaA__ADM95710
augaaccccaaccagaagaucaucaccaucggcagcgugagccugaccaucagcaccaucugcuucuucaugcagaucgccauccugaucaccaccgugacccugcacuucaagcaguacgaguucaacagcccccccaacaaccaggugaugcugugcgagcccaccaucaucgagagaaacaucaccgagaucguguaccugaccaacaccaccaucgagaaggagaucugccccaagcuggccgaguacagaaacuggagcaagccccagugcgacaucaccggcuucgcccccuucagcaaggacaacagcaucagacugagcgccggcggcgacaucugggugaccagagagcccuacgugagcugcgaccccgacaagugcuaccaguucgcccugggccagggcaccacccugaacaacgugcacagcaacaacaccgugagagacagaacccccuacagaacccugcugaugaacgagcugggcgugcccuuccaccugggcaccaagcaggugugcaucgccuggagcagcagcagcugccacgacggcaaggccuggcugcacgugugcaucaccggcgacgacaagaacgccaccgccagcuucaucuacaacggcagacugguggacagcguggugagcuggagcaaggagauccugagaacccaggagagcgagugcgugugcaucaacggcaccugcaccguggugaugaccgacggcagcgccagcggcaaggccgacaccaagauccuguucaucgaggagggcaagaucgugcacaccagcacccugagcggcagcgcccagcacguggaggagugcagcugcuaccccagauaccccggcgugagaugcgugugcagagacaacuggaagggcagcaacagacccaucguggacaucaacaucaaggaccacaacaucgugagcagcuacgugugcagcggccuggugggcgacacccccagaaagaacgacagcagcagcagcagccacugccuggaccccaacaacgaggagggcggccacggcgugaagggcugggccuucgacgacggcaacgacguguggaugggcagaaccaucagcgagaagagcagacugggcuacgagaccuucaaggugaucgagggcuggagcaaccccaagagcaagcugcagaucaacagacaggugaucguggacagaggcaacagaagcggcuacagcggcaucuucagcguggagggcaagagcugcaucaacagaugcuucuacguggagcugaucagaggcagaaaggaggagaccgacgugcuguggaccagcaacagcaucgugguguucugcggcaccagcggcaccuacggcaccggcagcuggcccgacggcgccgacaucaaccugaugcccaucuga

SEQ ID NO: 179812 - RNA, 1410 nt, Artificial Sequence; identical to SEQ ID NO: 176659
  derived and/or modified CDS sequence (opt4) from neuraminidase__InfluenzaA__ADM95711

SEQ ID NO: 179813 - RNA, 1410 nt, Artificial Sequence; identical to SEQ ID NO: 176659
  derived and/or modified CDS sequence (opt4) from neuraminidase__InfluenzaA__ADM95712

SEQ ID NO: 179814 - RNA, 1410 nt, Artificial Sequence; identical to SEQ ID NO: 176659
  derived and/or modified CDS sequence (opt4) from neuraminidase__InfluenzaA__ADM95713

SEQ ID NO: 179815 - RNA, 1410 nt, Artificial Sequence
  derived and/or modified CDS sequence (opt4) from neuraminidase__InfluenzaA__ADM95714
augaaccccaaccagaagaucaucaccaucggcagcgugagccugaccaucagcaccaucugcuucuucaugcagaucgccauccugaucaccaccgugacccugcacuucaagcaguacgaguucaacagcccccccaacaaccaggugaugcugugcgagcccaccaucaucgagagaaacaucaccgagaucguguaccugaccaacaccaccaucgagaaggagaucugccccaagcuggccgaguacagaaacuggagcaagccccagugcgacaucaccggcuucgcccccuucagcaaggacaacagcaucagacugagcgccggcggcgacaucugggugaccagagagcccuacgugagcugcgaccccgacaagugcuaccaguucgcccugggccagggcaccacccugaacaacgugcacagcaacaacaccgugagagacagaacccccuacagaacccugcugaugaacgagcugggcgugcccuuccaccugggcaccaagcaggugugcaucgccuggagcagcagcagcugccacgacggcaaggccuggcugcacgugugcaucaccggcgacgacaagaacgccaccgccagcuucaucuacaacggcagacugguggacagcguggugagcuggagcaaggagauccugagaacccaggagagcgagugcgugugcaucaacggcaccugcaccguggugaugaccgacggcagcgccagcggcaaggccgacaccaagauccuguucaucgaggagggcaagaucgugcacaccagcacccugagcggcagcgcccagcacguggaggagugcagcugcuaccccagauaccccggcgugagaugcgugugcagagacaacuggaagggcagcaacagacccaucguggacaucaacaucaaggaccacagcaucgugagcagcuacgugugcagcggccuggugggcgacacccccagaaagaacgacagcagcagcagcagccacugccuggaccccaacaacgaggagggcggccacggcgugaagggcugggccuucgacgacggcaacgacguguggaugggcagaaccaucagcgagaagagcagacugggcuacgagaccuucaaggugaucgagggcuggagcaaccccaagagcaagcugcagaucaacagacaggugaucguggacagaggcaacagaagcggcuacagcggcaucuucagcguggagggcaagagcugcaucaacagaugcuucuacguggagcugaucagaggcagaaaggaggagaccgacgugcuguggaccagcaacagcaucgugguguucugcggcaccagcggcaccuacggcaccggcagcuggcccgacggcgccgacaucaaccugaugcccaucuga

SEQ ID NO: 179816 - RNA, 1410 nt, Artificial Sequence; identical to SEQ ID NO: 176659
  derived and/or modified CDS sequence (opt4) from neuraminidase__InfluenzaA__ADM95715

SEQ ID NO: 179817 - RNA, 1410 nt, Artificial Sequence; identical to SEQ ID NO: 179815
  derived and/or modified CDS sequence (opt4) from neuraminidase__InfluenzaA__ADM95716

SEQ ID NO: 179818 - RNA, 1410 nt, Artificial Sequence; identical to SEQ ID NO: 179815
  derived and/or modified CDS sequence (opt4) from neuraminidase__InfluenzaA__ADM95717

SEQ ID NO: 179819 - RNA, 1410 nt, Artificial Sequence; identical to SEQ ID NO: 176659
  derived and/or modified CDS sequence (opt4) from neuraminidase__InfluenzaA__ADM95718

SEQ ID NO: 179820 - RNA, 1410 nt, Artificial Sequence
  derived and/or modified CDS sequence (opt4) from neuraminidase__InfluenzaA__ADM95719
augaaccccaaccagaagaucaucaccaucggcagcgugagccugaccaucagcaccaucugcuucuucaugcagaucgccauccugaucaccaccgugacccugcacuucaagcaguacgaguucaacagcccccccaacaaccaggugaugcugugcgagcccaccaucaucgagagaaacaucaccgagaucguguaccugaccaacaccaccaucgagaaggagaucugccccaagcuggccgaguacagaaacuggagcaagccccagugcgacaucaccggcuucgcccccuucagcaaggacaacagcaucagacugagcgccggcggcgacaucugggugaccagagagcccuacgugagcugcgaccccgacaagugcuaccaguucgcccugggccagggcaccacccugaacaacgugcacagcaacaacaccgugagagacagaacccccuacagaacccugcugaugaacgagcugggcgugcccuuccaccugggcaccaagcaggugugcaucgccuggagcagcagcagcugccacgacggcaaggccuggcugcacgugugcaucaccggcgacgacaagaacgccaccgccagcuucaucuacaacggcagacugguggacagcguggugagcuggagcaaggagauccugagaacccaggagagcgagugcgugugcaucaacggcaccugcaccguggugaugaccgacggcagcgccagcggcaaggccgacaccaagauccuguucaucgaggagggcaagaucgugcacaccagcacccugagcggcagcgcccagcacguggaggagugcagcugcuaccccagauaccccggcgugagaugcgugugcagagacaacuggaagggcagcaacagacccaucguggacaucaacaucaaggaccacagcaucgugagcagcuacgugugcagcggccuggugggcgacacccccagaaagaacgacagcagcagcagcagccacugccuggaccccaacaacgaggagggcggccacggcgugaagggcugggccuucgacgacggcaacgacguguggaugggcagaaccaucagcgagaagagcagaagcggcuacgagaccuucaaggugaucgagggcuggagcaaccccaagagcaagcugcagaucaacagacaggugaucguggacagaggcaacagaagcggcuacagcggcaucuucagcguggagggcaagagcugcaucaacagaugcuucuacguggagcugaucagaggcagaaaggaggagaccgaggugcuguggaccagcaacagcaucgugguguucugcggcaccagcggcaccuacggcaccggcagcuggcccgacggcgccgacaucaaccugaugcccaucuga

SEQ ID NO: 179821 - RNA, 1410 nt, Artificial Sequence; identical to SEQ ID NO: 176659
  derived and/or modified CDS sequence (opt4) from neuraminidase__InfluenzaA__ADM95720

SEQ ID NO: 179822 - RNA, 1410 nt, Artificial Sequence; identical to SEQ ID NO: 176659
  derived and/or modified CDS sequence (opt4) from neuraminidase__InfluenzaA__ADM95721

SEQ ID NO: 179823 - RNA, 1410 nt, Artificial Sequence; identical to SEQ ID NO: 176659
  derived and/or modified CDS sequence (opt4) from neuraminidase__InfluenzaA__ADM95723

SEQ ID NO: 179824 - RNA, 1410 nt, Artificial Sequence
  derived and/or modified CDS sequence (opt4) from neuraminidase__InfluenzaA__ADM95724
augaaccccaaccagaagaucaucaccaucggcagcgugagccugaccaucagcaccaucugcuucuucaugcagaucgccauccugaucaccaccgugacccugcacuucaagcaguacgaguucaacagcccccccaacaaccaggugaugcugugcgagcccaccaucaucgagagaaacaucaccgagaucguguaccugaccaacaccaccaucgagaaggagaucugccccaagcuggccgaguacagaaacuggagcaagccccagugcgacaucaccggcuucgcccccuucagcaaggacaacagcaucagacugagcgccggcggcgacaucugggugaccagagagcccuacgugagcugcgaccccgacaagugcuaccaguucgcccugggccagggcaccacccugaacaacgugcacagcaacaacaccgugagagacagaacccccuacagaacccugcugaugaacgagcugggcgugcccuuccaccugggcaccaagcaggugugcaucgccuggagcagcagcagcugccacgacggcaaggccuggcugcacgugugcaucaccggcgacgacaagaacgccaccgccagcuucaucuacaacggcagacugguggacagcguggugagcuggagcaaggagauccugagaacccaggagagcgagugcgugugcaucaacggcaccugcaccguggugaugaccgacggcagcgccagcggcaaggccgacaccaagauccuguucaucgaggagggcaagaucgugcacaccagcacccugagcggcagcgcccagcacguggaggagugcagcugcuaccccagauaccccggcgugagaugcgugugcagagacaacuggaagggcagcaacagacccaucguggacaucaacaucaaggaccacagcaucgugagcagcuacgugugcagcggccuggugggcgacacccccagaaagaacgacagcagcagcagcagccacugccuggaccccaacaacgaggagggcggccacggcgugaagggcugggccuucgacgacggcaacgacguguggaugggcagaaccaucagcgagaagagcagacugggcuacgagaccuucaaggugaucgagggcuggagcaaccccaacagcaagcugcagaucaacagacaggugaucguggacagaggcaacagaagcggcuacagcggcaucuucagcguggagggcaagagcugcaucaacagaugcuucuacguggagcugaucagaggcagaaaggaggagaccgaggugcuguggaccagcaacagcaucgugguguucugcggcaccagcggcaccuacggcaccggcagcuggcccgacggcgccgacaucaaccugaugcccaucuga

SEQ ID NO: 179825 - RNA, 1410 nt, Artificial Sequence
  derived and/or modified CDS sequence (opt4) from neuraminidase__InfluenzaA__ADM95725
augaaccccaaccagaagaucaucaccaucggcagcgugagccugaccaucagcaccaucugcuucuucaugcagaucgccauccugaucaccaccgugacccugcacuucaagcaguacgaguucaaccccccccccaacaaccaggugaugcugugcgagcccaccaucaucgagagaaacaucaccgagaucguguaccugaccaacaccaccaucgagaaggaggugugccccaagcuggccgaguacagaaacuggagcaagccccagugcgacaucaccggcuucgcccccuucagcaaggacaacagcaucagacugagcgccggcggcgacaucugggugaccagagagcccuacgugagcugcgaccccgacaagugcuaccaguucgcccugggccagggcaccacccugaacaacgugcacagcaacaacaccgugagagacagaacccccuacagaacccugcugaugaacgagcugggcgugcccuuccaccugggcaccaagcaggugugcaucgccuggagcagcagcagcugccacgacggcaaggccuggcugcacgugugcaucaccggcgacgacaagaacgccaccgccagcuucaucuacaacggcagacugguggacagcguggugagcuggagcaaggagauccugagaacccaggagagcgagugcgugugcaucaacggcaccugcaccguggugaucaccgacggcagcgccagcggcaaggccgacaccaagauccuguucaucgaggagggcaagaucgugcacaccagcacccugagcggcagcgcccagcacguggaggagugcagcugcuaccccagauaccccggcgugagaugcgugugcagagacaacuggaagggcagcaacagacccaucguggacaucaacaucaaggaccacagcaucgugagcagcuacgugugcagcggccuggugggcgacacccccagaaagaacgacagcagcagcagcagccacugccuggaccccaacaacgaggagggcggccacggcgugaagggcugggccuucgacgacggcaacgacguguggaugggcagaaccaucagcgagaagagcagacugggcuacgagaccuucaaggugaucgagggcuggagcaaccccaagagcaagcugcagaucaacagacaggugaucguggacagaggcaacagaagcggcuacagcggcaucuucagcguggagggcaagagcugcaucaacagaugcuucuacguggagcugaucagaggcagaaaggaggagaccgacgugcuguggaccagcaacagcaucgugguguucugcggcaccagcggcaccuacggcaccggcagcuggcccgacggcgccgacaucaaccugaugcccaucuga

SEQ ID NO: 179826 - RNA, 1410 nt, Artificial Sequence
  derived and/or modified CDS sequence (opt4) from neuraminidase__InfluenzaA__ADM95726
augaaccccaaccagaagaucaucaccaucggcagcgugagccugaccaucagcaccaucugcuucuucaugcagaucgccauccugaucaccgccgugacccugcacuucaagcaguacgaguucaacagcccccccaacaaccaggugaugcugugcgagcccaccaucaucgagagaaacaucaccgagaucguguaccugaccaacaccaccaucgagaaggagaucugccccaagcuggccgaguacagaaacuggagcaagccccagugcgacaucaccggcuucgcccccuucagcaaggacaacagcaucagacugagcgccggcggcgacaucugggugaccagagagcccuacgugagcugcgaccccgacaagugcuaccaguucgcccugggccagggcaccacccugaacaacgugcacagcaacaacaccgugagagacagaacccccuacagaacccugcugaugaacgagcugggcgugcccuuccaccugggcaccaagcaggugugcaucgccuggagcagcagcagcugccacgacggcaaggccuggcugcacgugugcaucaccggcgacgacaagaacgccaccgccagcuucaucuacaacggcagacugguggacagcguggugagcuggagcaaggagauccugagaacccaggagagcgagugcgugugcaucaacggcaccugcaccguggugaugaccgacggcagcgccagcggcaaggccgacaccaagauccuguucaucgaggagggcaagaucgugcacaccagcacccugagcggcagcgcccagcacguggaggagugcagcugcuaccccagauaccccggcgugagaugcgugugcagagacaacuggaagggcagcaacagacccaucguggacaucaacaucaaggaccacagcaucgugagcagcuacgugugcagcggccuggugggcgacacccccagaaagaacgacagcagcagcagcagccacugccuggaccccaacaacgaggagggcggccacggcgugaagggcugggccuucgacgacggcaacgacguguggaugggcagaaccaucagcgagaagagcagacugggcuacgagaccuucaaggugaucgagggcuggagcaaccccaagagcaagcugcagaucaacagacaggugaucguggacagaggcaacagaagcggcuacagcggcaucuucagcguggagggcaagagcugcaucaacagaugcuucuacguggagcugaucagaggcagaaaggaggagaccgacgugcuguggaccagcaacagcaucgugguguucugcggcaccagcggcaccuacggcaccggcagcuggcccgacggcgccgacaucaaccugaugcccaucuga

SEQ ID NO: 179827 - RNA, 1410 nt, Artificial Sequence; identical to SEQ ID NO: 176659
  derived and/or modified CDS sequence (opt4) from neuraminidase__InfluenzaA__ADM95727

SEQ ID NO: 179828 - RNA, 1410 nt, Artificial Sequence
  derived and/or modified CDS sequence (opt4) from neuraminidase__InfluenzaA__ADM95728
augaaccccaaccagaagaucaucaccaucggcagcgugagccugaccaucagcaccaucugcuucuucaugcagaucgccauccugaucaccaccgugacccugcacuucaagcaguacgaguucaacagcccccccaacaaccaggugaugcugugcgagcccaccaucaucgagagaaacaucaccgagaucguguaccugaccaacaccaccaucgagaaggagaucugccccgagcuggccgaguacagaaacuggagcaagccccagugcgacaucaccggcuucgcccccuucagcaaggacaacagcaucagacugagcgccggcggcgacaucugggugaccagagagcccuacgugagcugcgaccccgacaagugcuaccaguucgcccugggccagggcaccacccugaacaacgugcacagcaacaacaccgugagagacagaacccccuacagaacccugcugaugaacgagcugggcgugcccuuccaccugggcaccaagcaggugugcaucgccuggagcagcagcagcugccacgacggcaaggccuggcugcacgugugcaucaccggcgacgacaagaacgccaccgccagcuucaucuacaacggcagacugguggacagcguggugagcuggagcaaggagauccugagaacccaggagagcgagugcgugugcaucaacggcaccugcaccguggugaugaccgacggcagcgccagcggcaaggccgacaccaagauccuguucaucgaggagggcaagaucgugcacaccagcacccugagcggcagcgcccagcacguggaggagugcagcugcuaccccagauaccccggcgugagaugcgugugcagagacaacuggaagggcagcaacagacccaucguggacaucaacaucaaggaccacagcaucgugagcagcuacgugugcagcggccuggugggcgacacccccagaaagaacgacagcagcagcagcagccacugccuggaccccaacaacgaggagggcggccacggcgugaagggcugggccuucgacgacggcaacgacguguggaugggcagaaccaucagcgagaagagcagacugggcuacgagaccuucaaggugaucgagggcuggagcaaccccaagagcaagcugcagaucaacagacaggugaucguggacagaggcaacagaagcggcuacagcggcaucuucagcguggagggcaagagcugcaucaacagaugcuucuacguggagcugaucagaggcagaaaggaggagaccgaggugcuguggaccagcaacagcaucgugguguucugcggcaccagcggcaccuacggcaccggcagcuggcccgacggcgccgacaucaaccugaugcccaucuga

SEQ ID NO: 179829 - RNA, 1410 nt, Artificial Sequence
  derived and/or modified CDS sequence (opt4) from neuraminidase__InfluenzaA__ADM95729
augaaccccaaccagaagaucaucaccaucggcagcgugagccugaccaucagcaccaucugcuucuucaugcagaucgccauccugaucaccaccgugacccugcacuucaagcaguacgaguucaacagcccccccaacaaccaggugaugcugugcgagcccaccaucaucgagagaaacaucaccgagaucguguaccugaccaacaccaccaucgagaaggagaucugccccaagcuggccgaguacagaaacuggagcaagccccagugcgacaucaccggcuucgcccccuucagcaaggacaacagcaucagacugagcgccggcggcgacaucugggugaccagagagcccuacgugagcugcgaccccgacaagugcuaccaguucgcccugggccagggcaccacccugaacaacgugcacagcaacaacaccgugagagacagaacccccuacagaacccugcugaugaacgagcugggcgugcccuuccaccugggcaccaagcaggugugcaucgccuggagcagcagcagcugccacgacggcaaggccuggcugcacgugugcaucaccggcgacgacaagaacgccaccgccagcuucaucuacaacggcagacugguggacagcguggugagcuggagcaaggagauccugagaacccaggagagcgagugcgugugcaucaacggcaccugcaccguggugaugaccgacggcagcgccagcggcaaggccgacaccaagauccuguucaucgaggagggcaagaucgugcacaccagcacccugagcggcagcgcccagcacguggaggagugcagcugcuaccccagauaccccggcgugagaugcgugugcagagacaacuggaagggcagcaacagacccaucguggacaucaacaucaaggaccacagcaucgugagcagcuacgugugcagcggccuggugggcgacacccccagaaagaacgacagcagcagcagaagccacugccuggaccccaacaacgaggagggcggccacggcgugaagggcugggccuucgacgacggcaacgacguguggaugggcagaaccaucagcgagaagagcagacugggcuacgagaccuucaaggugaucgagggcuggagcaaccccaagagcaagcugcagaucaacagacaggugaucguggacagaggcaacagaagcggcuacagcggcaucuucagcguggagggcaagagcugcaucaacagaugcuucuacguggagcugaucagaggcagaaaggaggagaccgaggugcuguggaccagcaacagcaucgugguguucugcggcaccagcggcaccuacggcaccggcagcuggcccgacggcgccgacaucaaccugaugcccaucuga

SEQ ID NO: 179830 - RNA, 1410 nt, Artificial Sequence
  derived and/or modified CDS sequence (opt4) from neuraminidase__InfluenzaA__ADM95730
augaaccccaaccagaagaucaucaccaucggcagcgugagccugaccaucagcaccaucugcuucuucaugcagaucgccauccugaucaccaccgugacccugcacuucaagcaguacgaguucaacagcccccccagcaaccaggugaugcugugcgagcccaccaucaucgagagaaacaucaccgagaucguguaccugaccaacaccaccaucgagaaggagaucugccccaagcuggccgaguacagaaacuggagcaagccccagugcgacaucaccggcuucgcccccuucagcaaggacaacagcaucagacugagcgccggcggcgacaucugggugaccagagagcccuacgugagcugcgaccccgacaagugcuaccaguucgcccugggccagggcaccacccugaacaacgugcacagcaacaacaccgugagagacagaacccccuacagaacccugcugaugaacgagcugggcgugcccuuccaccugggcaccaagcaggugugcaucgccuggagcagcagcagcugccacgacggcaaggccuggcugcacgugugcaucaccggcgacgacaagaacgccaccgccagcuucaucuacaacggcagacugguggacagcguggugagcuggagcaaggagauccugagaacccaggagagcgagugcgugugcaucaacggcaccugcaccguggugaugaccgacggcagcgccagcggcaaggccgacaccaagauccuguucaucgaggagggcaagaucgugcacaccagcacccugagcggcagcgcccagcacguggaggagugcagcugcuaccccagauaccccggcgugagaugcgugugcagagacaacuggaagggcagcaacagacccaucguggacaucaacaucaaggaccacagcaucgugagcagcuacgugugcagcggccuggugggcgacacccccagaaagaacgacagcagcagcagcagccacugccuggaccccaacaacgaggagggcggccacggcgugaagggcugggccuucgacgacggcaacgacguguggaugggcagaaccaucagcgagaagagcagacugggcuacgagaccuucaaggugaucgagggcuggagcaaccccaagagcaagcugcagaucaacagacaggugaucguggacagaggcaacagaagcggcuacagcggcaucuucagcguggagggcaagagcugcaucaacagaugcuucuacguggagcugaucagaggcagaaaggaggagaccgaggugcuguggaccagcaacagcaucgugguguucugcggcaccagcggcaccuacggcaccggcagcuggcccgacggcgccgacaucaaccugaugcccaucuga

SEQ ID NO: 179831 - RNA, 1410 nt, Artificial Sequence
  derived and/or modified CDS sequence (opt4) from neuraminidase__InfluenzaA__ADM95732
augaaccccaaccagaagaucaucaccaucggcagcgugagccugaccaucagcaccaucugcuucuucaugcagaucgccauccugaucaccaccgugacccugcacuucaagcaguacgaguucaacagcccccccaacaaccaggugaugcugugcgagcccaccaucaucgagagaaacaucaccgagaucguguaccugaccaacaccaccaucgagaaggagaucugccccaagcuggccgaguacagaaacuggagcaagccccagugcgacaucaccggcuucgcccccuucagcaaggacaacagcaucagacugagcgccggcggcgacaucugggugaccagagagcccuacgugagcugcgaccccgacaagugcuaccaguucgcccugggccagggcaccacccugaacaacgugcacagcaacgacaccgugagagacagaacccccuacagaacccugcugaugaacgagcugggcgugcccuuccaccugggcaccaagcaggugugcaucgccuggagcagcagcagcugccacgacggcaaggccuggcugcacgugugcaucaccggcgacgacaagaacgccaccgccagcuucaucuacaacggcagacugguggacagcaucgugagcuggagcaaggagauccugagaacccaggagagcgagugcgugugcaucaacggcaccugcaccguggugaugaccgacggcagcgccagcggcaaggccgacaccaagauccuguucaucgaggagggcaagaucgugcacaccagcacccugagcggcagcgcccagcacguggaggagugcagcugcuaccccagauaccccggcgugagaugcgugugcagagacaacuggaagggcagcaacagacccaucguggacaucaacaucaaggacagaagcaucgugagcagcuacgugugcagcggccuggugggcgacacccccagaaagaacgacagcagcagcagcagccacugccuggaccccaacaacgaggagggcggccacggcgugaagggcugggccuucgacgacggcaacgacguguggaugggcagaaccaucagcgagaagagcagacugggcuacgagaccuucaaggugaucgagggcuggagcaaccacaagagcaagcugcagaucaacagacaggugaucguggacagaggcaacagaagcggcuacagcggcaucuucagcguggagggcaagagcugcaucaacagaugcuucuacguggagcugaucagaggcagaaaggaggagaccgaggugcuguggaccagcaacagcaucgugguguucugcggcaccagcggcaccuacggcaccggcagcuggcccgacggcgccgacaucaaccugaugcccaucuga

SEQ ID NO: 179832 - RNA, 1410 nt, Artificial Sequence; identical to SEQ ID NO: 176659
  derived and/or modified CDS sequence (opt4) from neuraminidase__InfluenzaA__ADM95733

SEQ ID NO: 179833 - RNA, 1410 nt, Artificial Sequence; identical to SEQ ID NO: 176659
  derived and/or modified CDS sequence (opt4) from neuraminidase__InfluenzaA__ADM95734

SEQ ID NO: 179834 - RNA, 1410 nt, Artificial Sequence; identical to SEQ ID NO: 176659
  derived and/or modified CDS sequence (opt4) from neuraminidase__InfluenzaA__ADM95735

SEQ ID NO: 179835 - RNA, 1410 nt, Artificial Sequence; identical to SEQ ID NO: 176659
  derived and/or modified CDS sequence (opt4) from neuraminidase__InfluenzaA__ADM95736

SEQ ID NO: 179836 - RNA, 1410 nt, Artificial Sequence
  derived and/or modified CDS sequence (opt4) from neuraminidase__InfluenzaA__ADM95737
augaaccccaaccagaagaucaucaccaucggcagcgugagccugaccaucagcaccaucugcuucuucaugcagaucgccauccugaucaccaccgugacccugcacuucaagcaguacgaguucaacagcccccccaacaaccaggugaugcugugcgagcccaccaucaucgagagaaacaucaccgagaucguguaccugaccaacaccaccaucgagaaggagaucugccccaagcuggccgaguacagaaacuggagcaagccccagugcgacaucaccggcuucgcccccuucagcaaggacaacagcaucagacugagcgccggcggcgacaucugggugaccagagagcccuacgugagcugcgaccccgacaagugcuaccaguucgcccugggccagggcaccacccugaacaacgugcacagcaacaacaccgugagagacagaacccccuacagaacccugcugaugaacgagcugggcgugcccuuccaccugggcaccaagcaggugugcaucgccuggagcagcagcagcugccacgacggcaaggccuggcugcacgugugcaucaccggcgacgacaagaacgccaccgccagcuucaucuacaacggcagacugguggacagcguggugagcuggagcaaggagauccugagaacccaggagagcgagugcgugugcaucaacggcaccugcaccguggugaugaccgacggcagcgccagcggcagagccgacaccaagauccuguucaucgaggagggcaagaucgugcacaccagcacccugagcggcagcgcccagcacguggaggagugcagcugcuaccccagauaccccggcgugagaugcgugugcagagacaacuggaagggcagcaacagacccaucguggacaucaacaucaaggaccacagcaucgugagcagcuacgugugcagcggccuggugggcgacacccccagaaagaacgacagcagcagcagcagccacugccuggaccccaacaacgaggagggcggccacggcgugaagggcugggccuucgacgacggcaacgacguguggaugggcagaaccaucagcgagaagagcagacugggcuacgagaccuucaaggugaucgagggcuggagcaaccccaagagcaagcugcagaucaacagacaggugaucguggacagaggcaacagaagcggcuacagcggcaucuucagcguggagggcaagagcugcaucaacagaugcuucuacguggagcugaucagaggcagaaaggaggagaccgacgugcuguggaccagcaacagcaucgugguguucugcggcaccagcggcaccuacggcaccggcagcuggcccgacggcgccgacaucaaccugaugcccaucuga

SEQ ID NO: 179837 - RNA, 1410 nt, Artificial Sequence; identical to SEQ ID NO: 176659
  derived and/or modified CDS sequence (opt4) from neuraminidase__InfluenzaA__ADM95738

SEQ ID NO: 179838 - RNA, 1410 nt, Artificial Sequence; identical to SEQ ID NO: 176659
  derived and/or modified CDS sequence (opt4) from neuraminidase__InfluenzaA__ADM95739

SEQ ID NO: 179839 - RNA, 1410 nt, Artificial Sequence
  derived and/or modified CDS sequence (opt4) from neuraminidase__InfluenzaA__ADM95740
augaaccccaaccagaagaucaucaccaucggcagcgugagccugaccaucagcaccaucugcuucuucaugcagaucgccauccugaucaccaccgugacccugcacuucaagcaguacgaguucaacagcccccccaacaaccaggugaugcugugcgagcccaccaucaucgagagaaacaucaccgagaucguguaccugaccaacaccaccaucgagaaggagaucugccccaagcuggccgaguacagaaacuggagcaagccccagugcgacaucaccggcuucgcccccuucagcaaggacaacagcaucagacugagcgccggcggcgacaucugggugaccagagagcccuacgugagcugcgaccccgacaagugcuaccaguucgcccugggccagggcaccacccugaacaacgugcacagcaacaacaccgugagagacagaacccccuacagaacccugcugaugaacgagcugggcgugcccuuccaccugggcaccaagcaggugugcaucgccuggagcagcagcagcugccacgacggcaaggccuggcugcacgugugcaucaccggcgacgacaagaacgccaccgccagcuucaucuacaacggcagacugguggacagcguggugagcuggagcaaggagauccugagaacccaggagagcgagugcgugugcaucaacggcaccugcaccguggugaugaccgacggcagcgccagcggcaaggccgacaccaagauccuguucaucgaggagggcaagaucgugcacaccagcacccugagcggcagcgcccagcacguggaggagugcagcugcuaccccagauaccccggcgugagaugcgugugcagagacaacuggaagggcagcaacagacccaucguggacaucaacaucaaggaccacagcaucgugagcagcuacgugugcagcggccuggugggcgacacccccagaaagaacgacagcagcagcagcagccacugccuggaccccaacgacgaggagggcggccacggcgugaagggcugggccuucgacgacggcaacgacguguggaugggcagaaccaucagcgagaagagcagacugggcuacgagaccuucaaggugaucgagggcuggagcaaccccaagagcaagcugcagaucaacagacaggugaucguggacagaggcaacagaagcggcuacagcggcaucuucagcguggagggcaagagcugcaucaacagaugcuucuacguggagcugaucagaggcagaaaggaggagaccaaggugcuguggaccagcaacagcaucgugguguucugcggcaccagcggcaccuacggcaccggcagcuggcccgacggcgccgacaucaaccugaugcccaucuga

SEQ ID NO: 179840 - RNA, 1410 nt, Artificial Sequence; identical to SEQ ID NO: 179815
  derived and/or modified CDS sequence (opt4) from neuraminidase__InfluenzaA__ADM95741

SEQ ID NO: 179841 - RNA, 1410 nt, Artificial Sequence; identical to SEQ ID NO: 176659
  derived and/or modified CDS sequence (opt4) from neuraminidase__InfluenzaA__ADM95742

SEQ ID NO: 179842 - RNA, 1410 nt, Artificial Sequence
  derived and/or modified CDS sequence (opt4) from neuraminidase__InfluenzaA__ADM95743
augaaccccaaccagaagaucaucaccaucggcagcgugagccugaccaucagcaccaucugcuucuucaugcagaucgccauccugaucaccaccgugacccugcacuucaagcaguacgaguucaacagcagccccaacaaccaggugaugcugugcgagcccaccaucaucgagagaaacaucaccgagaucguguaccugaccaacaccaccaucgagaaggagaucugccccaagcuggccgaguacagaaacuggagcaagccccagugcgacaucaccggcuucgcccccuucagcaaggacaacagcaucagacugagcgccggcggcgacaucugggugaccagagagcccuacgugagcugcgaccccgacaagugcuaccaguucgcccugggccagggcaccacccugaacaacgugcacagcaacaacaccgugagagacagaacccccuacagaacccugcugaugaacgagcugggcgugcccuuccaccugggcaccaagcaggugugcaucgccuggagcagcagcagcugccacgacggcaaggccuggcugcacgugugcaucaccggcgacgacaagaacgccaccgccagcuucaucuacaacggcagacugguggacagcguggugagcuggagcaaggagauccugagaacccaggagagcgagugcgugugcaucaacggcaccugcaccguggugaugaccgacggcagcgccagcggcaaggccgacaccaagauccuguucaucgaggagggcaagaucgugcacaccagcacccugagcggcagcgcccagcacguggaggagugcagcugcuaccccagauaccccggcgugagaugcgugugcagagacaacuggaagggcagcaacagacccaucguggacaucaacaucaaggaccacagcaucgugagcagcuacgugugcagcggccuggugggcgacacccccagaaagaacgacagcagcagcagcagccacugccuggaccccaacaacgaggagggcggccacggcgugaagggcugggccuucgacgacggcaacgacguguggaugggcagaaccaucagcgagaagagcagacugggcuacgagaccuucaaggugaucgagggcuggagcaaccccaagagcaagcugcagaucaacagacaggugaucguggacagaggcaacagaagcggcuacagcggcaucuucagcguggagggcaagagcugcaucaacagaugcuucuacguggagcugaucagaggcagaaaggaggagaccgaggugcuguggaccagcaacagcaucgugguguucugcggcaccagcggcaccuacggcaccggcagcuggcccgacggcgccgacaucaaccugaugcccaucuga

SEQ ID NO: 179843 - RNA, 1410 nt, Artificial Sequence; identical to SEQ ID NO: 176659
  derived and/or modified CDS sequence (opt4) from neuraminidase__InfluenzaA__ADM95744

SEQ ID NO: 179844 - RNA, 1410 nt, Artificial Sequence; identical to SEQ ID NO: 176798
  derived and/or modified CDS sequence (opt4) from neuraminidase__InfluenzaA__ADN05229

SEQ ID NO: 179845 - RNA, 1413 nt, Artificial Sequence; identical to SEQ ID NO: 177521
  derived and/or modified CDS sequence (opt4) from neuraminidase__InfluenzaA__ADN06292

SEQ ID NO: 179846 - RNA, 1413 nt, Artificial Sequence; identical to SEQ ID NO: 178990
  derived and/or modified CDS sequence (opt4) from neuraminidase__InfluenzaA__ADN06303

SEQ ID NO: 179847 - RNA, 1413 nt, Artificial Sequence
  derived and/or modified CDS sequence (opt4) from neuraminidase__InfluenzaA__ADN06314
augaaccccaaccagaagaucaucaccaucggcagcaucagcaucgccaucggcaucaucagccugaugcugcagaucggcaacaucaucagcaucugggccagccacagcauccagaccggcagccagaacaacaccggcaucugcaaccagagaaucaucaccuacgagaacagcaccugggugaaccacaccuacgugaacaucaacaacaccaacgugguggccggcgaggacaagaccagcgugacccuggccggcaacagcagccugugcagcaucagcggcugggccaucuacaccaaggacaacagcaucagaaucggcagcaagggcgagguguucgugaucagagagcccuucaucagcugcagccaccuggagugcagaaccuucuuccugacccagggcgcccugcugaacgacaagcacagcaacggcaccgugaaggacagaagccccuacagagcccugaugagcugcccccugggcgaggcccccagccccuacaacagcaaguucgagagcguggccuggagcgccagcgccugccacgacggcaugggcuggcugaccaucggcaucagcggccccgacaacggcgccguggccgugcugaaguacaacggcaucaucaccggcaccaucaagagcuggaagaagcagauccugagaacccaggagagcgagugcgugugcaugaacggcagcugcuucaccaucaugaccgacggccccagcaacaaggccgccagcuacaagaucuucaagaucgagaagggcaaggugaccaagagcaucgagcugaacgcccccaacuucuacuacgaggagugcagcugcuaccccgacaccggcaucgugaugugcgugugcagagacaacuggcacggcagcaacagacccugggugagcuucaaccagaaccuggacuaccagaucggcuacaucugcagcggcguguucggcgacaaccccagacccgaggacggcgagggcagcugcaaccccgugaccguggacggcgccaacggcgugaagggcuucagcuacaaguacggcaacggcguguggaucggcagaaccaagagcaacagacugagaaagggcuucgagaugaucugggaccccaacggcuggaccaacaccgacagcgacuucagcgugaagcaggacgugguggccaucaccgacuggagcggcuacagcggcagcuucgugcagcaccccgagcugaccggccuggacugcaucagacccugcuucuggguggagcuggugagaggccugcccagagagaacaccaccaucuggaccagcggcagcagcaucagcuucugcggcgugaacggcgacaccgccaacuggagcuggcccgacggcgccgagcugcccuucaccaucgacaaguga

SEQ ID NO: 179848 - RNA, 1413 nt, Artificial Sequence; identical to SEQ ID NO: 178990
  derived and/or modified CDS sequence (opt4) from neuraminidase__InfluenzaA__ADN06325

SEQ ID NO: 179849 - RNA, 1413 nt, Artificial Sequence
  derived and/or modified CDS sequence (opt4) from neuraminidase__InfluenzaA__ADN06347
augaaccccaaccagaagaucaucaccaucggcagcaucagcaucgccaucggcaucaucagccugaugcugcagaucggcaacaucaucagcaucugggccagccacagcauccagaccgagagccagaacaacaccggcaucugcaaccagagaaucaucaccuacgagaacagcaccugggugaaccacaccuacgugaacaucaacaacaccaacgugguggccggcgaggacaagaccagcgugacccuggccggcaacagcagccugugcagcaucagcggcugggccaucuacaccaaggacaacagcaucagaaucggcagcaagggcgacguguucgugaucagagagcccuucaucagcugcagccaccuggagugcagaaccuucuuccugacccagggcgcccugcugaacgacaagcacagcaacggcaccgugaaggacagaagccccuacagagcccugaugagcugcccccugggcgaggcccccagccccuacaacagcaaguucgagagcguggccuggagcgccagcgccugccacgacggcaugggcuggcugaccaucggcaucagcggccccgacaacggcgccguggccgugcugaaguacaacggcaucaucaccggcaccaucaagagcuggaagaagcagauccugagaacccaggagagcgagugcgugugcaugaacggcagcugcuucaccaucaugaccgacggccccagcaacaaggccgccagcuacaagaucuucaagaucgagaagggcaaggugaccaagagcaucgagcugaacgcccccaacuucuacuacgaggagugcagcugcuaccccgacaccggcaucgugaugugcgugugcagagacaacuggcacggcagcaacagacccugggugagcuucaaccagaaccuggacuaccagaugggcuacaucugcagcggcguguucggcgacaaccccagacccgaggacggcgagggcagcugcaaccccgugaacguggacggcgccaacggcgugaagggcuucagcuacaaguacggcaacggcguguggaucggcagaaccaagagcaacagacugagaaagggcuucgagaugaucugggaccccaacggcuggaccaacaccgacagcgacuucagcgugaagcaggacgugguggccaucaccgacuggagcggcuacagcggcagcuucgugcagcaccccgagcugaccggccuggacugcaucagacccugcuucuggguggagcuggugagaggccugcccagagagaacaccaccaucuggaccagcggcagcagcaucagcuucugcggcgugaacagcgacaccgccaacuggagcuggcccgacggcgccgagcugcccuucaccaucgacaaguga

SEQ ID NO: 179850 - RNA, 1410 nt, Artificial Sequence; identical to SEQ ID NO: 179470
  derived and/or modified CDS sequence (opt4) from neuraminidase__InfluenzaA__ADN06369

SEQ ID NO: 179851 - RNA, 1410 nt, Artificial Sequence; identical to SEQ ID NO: 176798
  derived and/or modified CDS sequence (opt4) from neuraminidase__InfluenzaA__ADN26031

SEQ ID NO: 179852 - RNA, 1410 nt, Artificial Sequence; identical to SEQ ID NO: 176798
  derived and/or modified CDS sequence (opt4) from neuraminidase__InfluenzaA__ADN26032

SEQ ID NO: 179853 - RNA, 1410 nt, Artificial Sequence; identical to SEQ ID NO: 176798
  derived and/or modified CDS sequence (opt4) from neuraminidase__InfluenzaA__ADN26033

SEQ ID NO: 179854 - RNA, 1410 nt, Artificial Sequence; identical to SEQ ID NO: 176798
  derived and/or modified CDS sequence (opt4) from neuraminidase__InfluenzaA__ADN26034

SEQ ID NO: 179855 - RNA, 1410 nt, Artificial Sequence; identical to SEQ ID NO: 176798
  derived and/or modified CDS sequence (opt4) from neuraminidase__InfluenzaA__ADN26035

SEQ ID NO: 179856 - RNA, 1410 nt, Artificial Sequence; identical to SEQ ID NO: 176798
  derived and/or modified CDS sequence (opt4) from neuraminidase__InfluenzaA__ADN26036

SEQ ID NO: 179857 - RNA, 1410 nt, Artificial Sequence
  derived and/or modified CDS sequence (opt4) from neuraminidase__InfluenzaA__ADN26037
augaaccccaaccagaagaucaucaccaucggcagcgugugcaugaccaucggcauggccaaccugauccugcagaucggcaacaucaucagcaucuggaucagccacagcauccagcugggcaaccagaaccagaucgagaccugcaaccagagcgugaucaccuacgagaacaacaccugggugaaccagaccuacgugaacaucagcaacaccaacuucgccgccggccagagcguggugagcgugaagcuggccggcaacagcagccugugccccgugagcggcugggccaucuacagcaaggacaacagcgugagaaucggcagcaagggcgacguguucgugaucagagagcccuucaucagcugcagcccccuggagugcagaaccuucuuccugacccagggcgcccugcugaacgacaagcacagcaacggcaccaucaaggacagaagccccuacagaacccugaugagcugccccaucggcgaggugcccagccccuacaacagcagauucgagagcguggccuggagcgccagcgccugccacgacggcaucaacuggcugaccaucggcaucagcggccccgacaacggcgccguggccgugcugaaguacaacggcaucaucaccgacaccaucaagagcuggagaaacaacauccugagaacccaggagagcgagugcgccugcgugaacggcagcugcuucaccgugaugaccgacggccccagcaacggccaggccagcuacaagaucuucagaaucgagaagggcaagaucgugaagagcguggagaugaacgcccccaacuaccacuacgaggagugcagcugcuaccccgacagcagcgagaucaccugcgugugcagagacaacuggcacggcagcaacagacccugggugagcuucaaccagaaccuggaguaccagaucggcuacaucugcagcggcaucuucggcgacaaccccagacccaucgacaagaccggcagcugcggccccgugagcagcaacggcgccaacggcgugaagggcuucagcuucaaguacggcaacggcguguggaucggcagaaccaagagcaucagcagcagaaacggcuucgagaugaucugggaccccaacggcuggaccggcaccgacaacaacuucagcaucaagcaggacaucgugggcaucaacgaguggagcggcuacagcggcagcuucgugcagcaccccgagcugaccggccuggacugcaucagacccugcuucuggguggagcugaucagaggcagacccaaggagaacaccaucuggaccagcggcagcagcaucagcuucugcggcgugaacagcgacaccgugggcuggagcuggcccgacggcgccgagcugcccuucaccaucgacaaguga

SEQ ID NO: 179858 - RNA, 1410 nt, Artificial Sequence; identical to SEQ ID NO: 176798
  derived and/or modified CDS sequence (opt4) from neuraminidase__InfluenzaA__ADN26038

SEQ ID NO: 179859 - RNA, 1410 nt, Artificial Sequence; identical to SEQ ID NO: 176798
  derived and/or modified CDS sequence (opt4) from neuraminidase__InfluenzaA__ADN26041

SEQ ID NO: 179860 - RNA, 1410 nt, Artificial Sequence; identical to SEQ ID NO: 176798
  derived and/or modified CDS sequence (opt4) from neuraminidase__InfluenzaA__ADN26042

SEQ ID NO: 179861 - RNA, 1410 nt, Artificial Sequence
  derived and/or modified CDS sequence (opt4) from neuraminidase__InfluenzaA__ADN26043
augaaccccaaccagaagaucaucaccaucggcagcgugugcaugaccaucggcauggccaaccugauccugcagaucggcaacaucaucagcaucuggaucagccacagcauccagcugggcaaccagaaccagaucgagaccugcaaccagagcgugaucaccuacgagaacaacaccugggugaaccagaccuacgugaacaucagcaacaccaacuucgccgccggccagagcguggugagcgugaagcuggccggcaacagcagccugugccccgugagcggcugggccaucuacagcaaggacaacagcaucagaaucggcagcaagggcgacguguucgugaucagagagcccuucaucagcugcagcccccuggagugcagaaccuucuuccugacccagggcgcccugcugaacgacaagcacagcaacggcaccaucaaggacagaagccccuacagaacccugaugagcugccccaucggcgaggugcccagccccuacaacagcagauucgagagcguggccuggagcgccagcgccugccacgacggcaucaacuggcugaccaucggcaucagcggccccgacaacggcgccguggccgugcugaaguacaacggcaucaucaccgacaccaucaagagcuggagaaacaacauccugagaacccaggagagcgagugcgccugcgugaacggcagcugcuucaccgugaugaccgacggccccagcgacggccaggccagcuacaagaucuucagaaucgagaagggcaagaucgugaagagcguggagaugaacgcccccaacuaccacuacgaggagugcagcugcuaccccgacagcagcgagaucaccugcgugugcagagacaacuggcacggcagcaacagacccugggugagcuucaaccagaaccuggaguaccaggugggcuacaucugcagcggcaucuucggcgacaaccccagacccaacgacaagaccggcagcugcggccccgugagcagcaacggcgccaacggcgugaagggcuucagcuucaaguacggcaacggcguguggaucggcagaaccaagagcaucagcagcagaaacggcuucgagaugaucugggaccccaacggcuggaccggcaccgacaacaacuucagcaucaagcaggacaucgugggcaucaacgaguggagcggcuacagcggcagcuucgugcagcaccccgagcugaccggccuggacugcaucagacccugcuucuggguggagcugaucagaggcagacccaaggagaacaccaucuggaccagcggcagcagcaucagcuucugcggcgugaacagcgacaccgugggcuggagcuggcccgacggcgccgagcugcccuucaccaucgacaaguga

SEQ ID NO: 179862 - RNA, 1410 nt, Artificial Sequence; identical to SEQ ID NO: 176798
  derived and/or modified CDS sequence (opt4) from neuraminidase__InfluenzaA__ADN26044

SEQ ID NO: 179863 - RNA, 1410 nt, Artificial Sequence; identical to SEQ ID NO: 176798
  derived and/or modified CDS sequence (opt4) from neuraminidase__InfluenzaA__ADN26045

SEQ ID NO: 179864 - RNA, 1410 nt, Artificial Sequence
  derived and/or modified CDS sequence (opt4) from neuraminidase__InfluenzaA__ADN26047
augaaccccaaccagaagaucaucaccaucggcagcgugugcaugaccaucggcauggccaaccugauccugcagaucggcaacaucaucagcaucuggaucagccacagcauccagcugggcaaccagaaccagaucgagaccugcaaccagagcgugaucaccuacgagaacaacaccugggugaaccagaccuacgugaacaucagcaacaccaacuucgccgccggccagagcauggugagcgugaagcugaccggcaacagcagccugugccccgugagcggcugggccaucuacagcaaggacaacagcgugagaaucggcagcaagggcgacguguucgugaucagagagcccuucaucagcugcagcccccuggagugcagaaccuucuuccugacccagggcgcccugcugaacgacaagcacagcaacggcaccaucaaggacagaagccccuacagaacccugaugagcugccccaucggcgaggugcccagccccuacaacagcagauucgagagcguggccuggagcgccagcgccugccacgacggcaucaacuggcugaccaucggcaucagcggccccgacaacggcgccguggccgugcugaaguacaacggcaucaucaccgacaccaucaagagcuggagaaacaacauccugagaacccaggagagcgagugcgccugcgugaacggcagcugcuucaccgugaugaccgacggccccagcaacggccaggccagcuacaagaucuucagaaucgagaagggcaagaucgugaagagcguggagaugaacgcccccaacuaccacuacgaggagugcagcugcuaccccgacagcagcgagaucaccugcgugugcagagacaacuggcacggcagcaacagacccugggugagcuucaaccagaaccuggaguaccagaucggcuacaucugcagcggcaucuucggcgacaaccccagacccaacgacaagaccggcagcugcggccccgugagcagcaacggcgccaacggcgugaagggcuucagcuucaaguacggcaacggcguguggaucggcagaaccaagagcaucagcagcagaaacggcuucgagaugaucugggaccccaacggcuggaccggcaccgacaacaacuucagcaucaagcaggacaucgugggcaucaacgaguggagcggcuacagcggcagcuucgugcagcaccccgagcugaccggccuggacugcaucagacccugcuucuggguggagcugaucagaggcagacccaaggagaacaccaucuggaccagcggcagcagcaucagcuucugcggcgugaacagcgacaccgugggcuggagcuggcccgacggcgccgagcugcccuucaccaucgacaaguga

SEQ ID NO: 179865 - RNA, 1410 nt, Artificial Sequence; identical to SEQ ID NO: 176798
  derived and/or modified CDS sequence (opt4) from neuraminidase__InfluenzaA__ADN26048

SEQ ID NO: 179866 - RNA, 1410 nt, Artificial Sequence; identical to SEQ ID NO: 176798
  derived and/or modified CDS sequence (opt4) from neuraminidase__InfluenzaA__ADN26049

SEQ ID NO: 179867 - RNA, 1410 nt, Artificial Sequence; identical to SEQ ID NO: 176798
  derived and/or modified CDS sequence (opt4) from neuraminidase__InfluenzaA__ADN26050

SEQ ID NO: 179868 - RNA, 1410 nt, Artificial Sequence; identical to SEQ ID NO: 176798
  derived and/or modified CDS sequence (opt4) from neuraminidase__InfluenzaA__ADN26051

SEQ ID NO: 179869 - RNA, 1410 nt, Artificial Sequence; identical to SEQ ID NO: 176798
  derived and/or modified CDS sequence (opt4) from neuraminidase__InfluenzaA__ADN26052

SEQ ID NO: 179870 - RNA, 1410 nt, Artificial Sequence; identical to SEQ ID NO: 176788
  derived and/or modified CDS sequence (opt4) from neuraminidase__InfluenzaA__ADN26053

SEQ ID NO: 179871 - RNA, 1410 nt, Artificial Sequence; identical to SEQ ID NO: 176798
  derived and/or modified CDS sequence (opt4) from neuraminidase__InfluenzaA__ADN26054

SEQ ID NO: 179872 - RNA, 1410 nt, Artificial Sequence; identical to SEQ ID NO: 176798
  derived and/or modified CDS sequence (opt4) from neuraminidase__InfluenzaA__ADN26057

SEQ ID NO: 179873 - RNA, 1410 nt, Artificial Sequence; identical to SEQ ID NO: 176798
  derived and/or modified CDS sequence (opt4) from neuraminidase__InfluenzaA__ADN26058

SEQ ID NO: 179874 - RNA, 1410 nt, Artificial Sequence; identical to SEQ ID NO: 176798
  derived and/or modified CDS sequence (opt4) from neuraminidase__InfluenzaA__ADN26059

SEQ ID NO: 179875 - RNA, 1410 nt, Artificial Sequence; identical to SEQ ID NO: 177165
  derived and/or modified CDS sequence (opt4) from neuraminidase__InfluenzaA__ADN26060

SEQ ID NO: 179876 - RNA, 1410 nt, Artificial Sequence; identical to SEQ ID NO: 176798
  derived and/or modified CDS sequence (opt4) from neuraminidase__InfluenzaA__ADN26061

SEQ ID NO: 179877 - RNA, 1410 nt, Artificial Sequence; identical to SEQ ID NO: 176798
  derived and/or modified CDS sequence (opt4) from neuraminidase__InfluenzaA__ADN26063

SEQ ID NO: 179878 - RNA, 1410 nt, Artificial Sequence; identical to SEQ ID NO: 176798
  derived and/or modified CDS sequence (opt4) from neuraminidase__InfluenzaA__ADN26064

SEQ ID NO: 179879 - RNA, 1410 nt, Artificial Sequence; identical to SEQ ID NO: 177871
  derived and/or modified CDS sequence (opt4) from neuraminidase__InfluenzaA__ADN26065

SEQ ID NO: 179880 - RNA, 1410 nt, Artificial Sequence; identical to SEQ ID NO: 176798
  derived and/or modified CDS sequence (opt4) from neuraminidase__InfluenzaA__ADN26066

SEQ ID NO: 179881 - RNA, 1410 nt, Artificial Sequence; identical to SEQ ID NO: 176798
  derived and/or modified CDS sequence (opt4) from neuraminidase__InfluenzaA__ADN26067

SEQ ID NO: 179882 - RNA, 1410 nt, Artificial Sequence; identical to SEQ ID NO: 176798
  derived and/or modified CDS sequence (opt4) from neuraminidase__InfluenzaA__ADN26069

SEQ ID NO: 179883 - RNA, 1410 nt, Artificial Sequence; identical to SEQ ID NO: 176798
  derived and/or modified CDS sequence (opt4) from neuraminidase__InfluenzaA__ADN26070

SEQ ID NO: 179884 - RNA, 1410 nt, Artificial Sequence; identical to SEQ ID NO: 176798
  derived and/or modified CDS sequence (opt4) from neuraminidase__InfluenzaA__ADN26072

SEQ ID NO: 179885 - RNA, 1410 nt, Artificial Sequence; identical to SEQ ID NO: 176798
  derived and/or modified CDS sequence (opt4) from neuraminidase__InfluenzaA__ADN26073

SEQ ID NO: 179886 - RNA, 1410 nt, Artificial Sequence; identical to SEQ ID NO: 176798
  derived and/or modified CDS sequence (opt4) from neuraminidase__InfluenzaA__ADN26075

SEQ ID NO: 179887 - RNA, 1410 nt, Artificial Sequence; identical to SEQ ID NO: 176798
  derived and/or modified CDS sequence (opt4) from neuraminidase__InfluenzaA__ADN26076

SEQ ID NO: 179888 - RNA, 1410 nt, Artificial Sequence; identical to SEQ ID NO: 176798
  derived and/or modified CDS sequence (opt4) from neuraminidase__InfluenzaA__ADN26077

SEQ ID NO: 179889 - RNA, 1410 nt, Artificial Sequence; identical to SEQ ID NO: 176798
  derived and/or modified CDS sequence (opt4) from neuraminidase__InfluenzaA__ADN26078

SEQ ID NO: 179890 - RNA, 1410 nt, Artificial Sequence; identical to SEQ ID NO: 176798
  derived and/or modified CDS sequence (opt4) from neuraminidase__InfluenzaA__ADN26079

SEQ ID NO: 179891 - RNA, 1410 nt, Artificial Sequence; identical to SEQ ID NO: 176798
  derived and/or modified CDS sequence (opt4) from neuraminidase__InfluenzaA__ADN26080

SEQ ID NO: 179892 - RNA, 1410 nt, Artificial Sequence; identical to SEQ ID NO: 176798
  derived and/or modified CDS sequence (opt4) from neuraminidase__InfluenzaA__ADN26081

SEQ ID NO: 179893 - RNA, 1410 nt, Artificial Sequence; identical to SEQ ID NO: 176798
  derived and/or modified CDS sequence (opt4) from neuraminidase__InfluenzaA__ADN26082

SEQ ID NO: 179894 - RNA, 1410 nt, Artificial Sequence; identical to SEQ ID NO: 176798
  derived and/or modified CDS sequence (opt4) from neuraminidase__InfluenzaA__ADN26083

SEQ ID NO: 179895 - RNA, 1410 nt, Artificial Sequence; identical to SEQ ID NO: 178700
  derived and/or modified CDS sequence (opt4) from neuraminidase__InfluenzaA__ADN26084

SEQ ID NO: 179896 - RNA, 1410 nt, Artificial Sequence; identical to SEQ ID NO: 176798
  derived and/or modified CDS sequence (opt4) from neuraminidase__InfluenzaA__ADN26085

SEQ ID NO: 179897 - RNA, 1410 nt, Artificial Sequence; identical to SEQ ID NO: 176798
  derived and/or modified CDS sequence (opt4) from neuraminidase__InfluenzaA__ADN26086

SEQ ID NO: 179898 - RNA, 1410 nt, Artificial Sequence; identical to SEQ ID NO: 176798
  derived and/or modified CDS sequence (opt4) from neuraminidase__InfluenzaA__ADN26087

SEQ ID NO: 179899 - RNA, 1410 nt, Artificial Sequence; identical to SEQ ID NO: 176798
  derived and/or modified CDS sequence (opt4) from neuraminidase__InfluenzaA__ADN26088

SEQ ID NO: 179900 - RNA, 1410 nt, Artificial Sequence; identical to SEQ ID NO: 176798
  derived and/or modified CDS sequence (opt4) from neuraminidase__InfluenzaA__ADN26090

SEQ ID NO: 179901 - RNA, 1410 nt, Artificial Sequence; identical to SEQ ID NO: 176798
  derived and/or modified CDS sequence (opt4) from neuraminidase__InfluenzaA__ADN26091

SEQ ID NO: 179902 - RNA, 1410 nt, Artificial Sequence; identical to SEQ ID NO: 176798
  derived and/or modified CDS sequence (opt4) from neuraminidase__InfluenzaA__ADN26092

SEQ ID NO: 179903 - RNA, 1410 nt, Artificial Sequence; identical to SEQ ID NO: 176798
  derived and/or modified CDS sequence (opt4) from neuraminidase__InfluenzaA__ADN26093

SEQ ID NO: 179904 - RNA, 1410 nt, Artificial Sequence
  derived and/or modified CDS sequence (opt4) from neuraminidase__InfluenzaA__ADN26094
augaaccccaaccagaagaucaucaccaucggcagcgugugcaugaccaucggcauggccaaccugauccugcagaucggcaacaucaucagcaucuggaucagccacagcauccagcugggcaaccagaaccagaucgagaccugcaaccagagcgugaucaccuacgagaacaacaccugggugaaccagaccuacgugaacaucagcaacaccaacuucgccgccggccagagcguggugagcgugaagcuggccggcaacagcagccugugccccgugagcggcugggccaucuacagcaaggacaacagcaucagaaucggcagcaagggcgacguguucgugaucagagagcccuucaucagcugcagcccccuggagugcagaaccuucuuccugacccagggcgcccugcugaacgacaagcacagcaacggcaccaucaaggacagaagccccuacagaacccugaugagcugccccaucggcgaggugcccagccccuacaacagcagauucgagagcguggccuggagcgccagcgccugccacgacggcaucaacuggcugaccaucggcaucagcggccccgacaacggcgccguggccgugcugaaguacaacggcaucaucaccgacaccaucaagagcuggagaaacaacauccugagaacccaggagagcgagugcgccugcgugaacggcagcugcuucaccgugaugaccgacggccccagcgacggccaggccagcuacaagaucuucagaaucgagaagggcaagaucgugaagagcguggagaugaacgcccccaacuaccacuacgaggagugcagcugcuaccccgacagcagcgagaucaccugcgugugcagagacaacuggcacggcagcaacagacccugggugagcuucaaccagaaccuggaguaccagaucggcuacaucugcagcggcaucuucggcgacaaccccagacccaacgacaagaccggcagcugcggccccgugagcagcaacggcgccaacggcgugaagggcuucagcuucaaguacggcaacggcguguggaucggcagaaccaagagcaucagcagcagaaacggcuucgagaugaucugggaccccaacggcuggaccggcaaggacaacaacuucagcaucaagcaggacaucgugggcaucaacgaguggagcggcuacagcggcagcuucgugcagcaccccgagcugaccggccuggacugcaucagacccugcuucuggguggagcugaucagaggcagacccaaggagaacaccaucuggaccagcggcagcagcaucagcuucugcggcgugaacagcgacaccgugggcuggagcuggcccgacggcgccgagcugcccuucaccaucgacaaguga

SEQ ID NO: 179905 - RNA, 1410 nt, Artificial Sequence; identical to SEQ ID NO: 178700
  derived and/or modified CDS sequence (opt4) from neuraminidase__InfluenzaA__ADN26095

SEQ ID NO: 179906 - RNA, 1410 nt, Artificial Sequence
  derived and/or modified CDS sequence (opt4) from neuraminidase__InfluenzaA__ADN26096
augaaccccaaccagaagaucaucaccaucggcagcgugugcaugaccaucggcauggccaaccugauccugcagaucggcaacaucaucagcaucuggaucagccacagcauccagcugggcaaccagaaccagaucgagaccugcaaccagagcgugaucaccuacgagaacaacaccugggugaaccagaccuacgugaacaucagcaacaccaacuucgccgccggccagagcguggugagcgugaagcuggccggcaacagcagccugugccccgugaacggcugggccaucuacagcaaggacaacagcaucagaaucggcagcaagggcgacguguucgugaucagagagcccuucaucagcugcagcccccuggagugcagaaccuucuuccugacccagggcgcccugcugaacgacaagcacagcaacggcaccaucaaggacagaagccccuacagaacccugaugagcugccccaucggcgaggugcccagccccuacaacagcagauucgagagcguggccuggagcgccagcgccugccacgacggcaucaacuggcugaccaucggcaucagcggccccgacaacggcgccguggccgugcugaaguacaacggcaucaucaccgacaccaucaagagcuggagaaacaacauccugagaacccaggagagcgagugcgccugcgugaacggcagcugcuucaccgugaugaccgacggccccagcgacggccaggccagcuacaagaucuucagaaucgagaagggcaagaucgugaagagcguggagaugaacgcccccaacuaccacuacgaggagugcagcugcuaccccgacagcagcgagaucaccugcgugugcagagacaacuggcacggcagcaacagacccugggugagcuucaaccagaaccuggaguaccagaucggcuacaucugcagcggcaucuucggcgacaaccccagacccaacgacaagaccggcagcugcggccccgugagcagcaacggcgccaacggcgugaagggcuucagcuucaaguacggcaacggcguguggaucggcagaaccaagaacaucagcagcagaaacggcuucgagaugaucugggaccccaacggcuggaccggcaccgacaacaacuucagcaucaagcaggacaucgugggcaucaacgaguggagcggcuacagcggcagcuucgugcagcaccccgagcugaccggccuggacugcaucagacccugcuucuggguggagcugaucagaggcagacccaaggagaacaccaucuggaccagcggcagcagcaucagcuucugcggcgugaacagcgacaccgugggcuggagcuggcccgacggcgccgagcugcccuucaccaucgacaaguga

SEQ ID NO: 179907 - RNA, 1410 nt, Artificial Sequence; identical to SEQ ID NO: 176798
  derived and/or modified CDS sequence (opt4) from neuraminidase__InfluenzaA__ADN26097

SEQ ID NO: 179908 - RNA, 1410 nt, Artificial Sequence; identical to SEQ ID NO: 176798
  derived and/or modified CDS sequence (opt4) from neuraminidase__InfluenzaA__ADN26098

SEQ ID NO: 179909 - RNA, 1410 nt, Artificial Sequence; identical to SEQ ID NO: 176798
  derived and/or modified CDS sequence (opt4) from neuraminidase__InfluenzaA__ADN26099

SEQ ID NO: 179910 - RNA, 1410 nt, Artificial Sequence; identical to SEQ ID NO: 176798
  derived and/or modified CDS sequence (opt4) from neuraminidase__InfluenzaA__ADN26100

SEQ ID NO: 179911 - RNA, 1410 nt, Artificial Sequence; identical to SEQ ID NO: 176798
  derived and/or modified CDS sequence (opt4) from neuraminidase__InfluenzaA__ADN26101

SEQ ID NO: 179912 - RNA, 1410 nt, Artificial Sequence
  derived and/or modified CDS sequence (opt4) from neuraminidase__InfluenzaA__ADN26102
augaaccccaaccagaagaucaucaccaucggcagcgugugcaugaccaucggcauggccaaccugauccugcagaucggcaacaucaucagcaucuggaucagccaccugauccagcugggcaaccagaaccagaucgagaccugcaaccagagcgugaucaccuacgagaacaacaccugggugaaccagaccuacgugaacaucagcaacaccaacuucgccgccggccagagcguggugagcgugaagcuggccggcaacagcagccugugccccgugagcggcugggccaucuacagcaaggacaacagcaucagaaucggcagcaagggcgacguguucgugaucagagagcccuucaucagcugcagcccccuggagugcagaaccuucuuccugacccagggcgcccugcugaacgacaagcacagcaacggcaccaucaaggacagaagccccuacagaacccugaugagcugccccaucggcgaggugcccagccccuacaacagcagauucgagagcguggccuggagcgccagcgccugccacgacggcaucaacuggcugaccaucggcaucagcggccccgacaacggcgccguggccgugcugaaguacaacggcaucaucaccgacaccaucaagagcuggagaaacaacauccugagaacccaggagagcgagugcgccugcgugaacggcagcugcuucaccgugaugaccgacggccccagcgacggccaggccagcuacaagaucuucaagaucgagaagggcaagaucgugaagagcguggagaugaacgcccccaacuaccacuacgaggagugcagcugcuaccccgacagcagcgagaucaccugcgugugcagagacaacuggcacggcagcaacagacccugggugagcuucaaccagaaccuggaguaccagaucggcuacaucugcagcggcaucuucggcgacaaccccagacccaacgacaagaccggcagcugcggccccgugagcagcaacggcgccaacggcgugaagggcuucagcuucaaguacggcaacggcguguggaucggcagaaccaagagcaucagcagcagaaacggcuucgagaugaucugggaccccaacggcuggaccggcaccgacaacaacuucagcaucaagcaggacaucgugggcaucaacgaguggagcggcuacagcggcagcuucgugcagcaccccgagcugaccggccuggacugcaucagacccugcuucuggguggagcugaucagaggcagacccaaggagaacagcaucuggaccagcggcagcagcaucagcuucugcggcgugaacagcgacaccgugggcuggagcuggcccgacggcgccgagcugcccuucaccaucgacaaguga

SEQ ID NO: 179913 - RNA, 1410 nt, Artificial Sequence; identical to SEQ ID NO: 176798
  derived and/or modified CDS sequence (opt4) from neuraminidase__InfluenzaA__ADN26103

SEQ ID NO: 179914 - RNA, 1410 nt, Artificial Sequence; identical to SEQ ID NO: 176798
  derived and/or modified CDS sequence (opt4) from neuraminidase__InfluenzaA__ADN26104

SEQ ID NO: 179915 - RNA, 1410 nt, Artificial Sequence; identical to SEQ ID NO: 176798
  derived and/or modified CDS sequence (opt4) from neuraminidase__InfluenzaA__ADN26105

SEQ ID NO: 179916 - RNA, 1410 nt, Artificial Sequence; identical to SEQ ID NO: 176798
  derived and/or modified CDS sequence (opt4) from neuraminidase__InfluenzaA__ADN26106

SEQ ID NO: 179917 - RNA, 1410 nt, Artificial Sequence; identical to SEQ ID NO: 178700
  derived and/or modified CDS sequence (opt4) from neuraminidase__InfluenzaA__ADN26107

SEQ ID NO: 179918 - RNA, 1410 nt, Artificial Sequence; identical to SEQ ID NO: 178700
  derived and/or modified CDS sequence (opt4) from neuraminidase__InfluenzaA__ADN26108

SEQ ID NO: 179919 - RNA, 1410 nt, Artificial Sequence; identical to SEQ ID NO: 176798
  derived and/or modified CDS sequence (opt4) from neuraminidase__InfluenzaA__ADN26109

SEQ ID NO: 179920 - RNA, 1410 nt, Artificial Sequence; identical to SEQ ID NO: 177772
  derived and/or modified CDS sequence (opt4) from neuraminidase__InfluenzaA__ADN26110

SEQ ID NO: 179921 - RNA, 1410 nt, Artificial Sequence; identical to SEQ ID NO: 178700
  derived and/or modified CDS sequence (opt4) from neuraminidase__InfluenzaA__ADN26111

SEQ ID NO: 179922 - RNA, 1410 nt, Artificial Sequence; identical to SEQ ID NO: 177772
  derived and/or modified CDS sequence (opt4) from neuraminidase__InfluenzaA__ADN26112

SEQ ID NO: 179923 - RNA, 1410 nt, Artificial Sequence; identical to SEQ ID NO: 178700
  derived and/or modified CDS sequence (opt4) from neuraminidase__InfluenzaA__ADN26113

SEQ ID NO: 179924 - RNA, 1410 nt, Artificial Sequence
  derived and/or modified CDS sequence (opt4) from neuraminidase__InfluenzaA__ADN26114
augaaccccaaccagaagaucaucaccaucggcagcgugugcaugaccaucggcauggccaaccugauccugcagaucggcaacaucaucagcaucuggaucagccacagcauccagcugggcaaccagaaccagaucgagaccugcaaccagagcgugaucaccuacgagaacaacaccugggugaaccagaccuacgugaacaucaacaacaccaacuucgccgccggccagagcguggugagcgugaagcuggccggcaacagcagccugugccccgugagcggcugggccaucuacagcaaggacaacagcaucagaaucggcagcaagggcgacguguucgugaucagagagcccuucaucagcugcagcccccuggagugcagaaccuucuuccugacccagggcgcccugcugaacgacaagcacagcaacggcaccaucaaggacagaagccccuacagaacccugaugagcugccccaucggcgaggugcccagccccuacaacagcagauucgagagcguggccuggagcgccagcgccugccacgacggcaucaacuggcugaccaucggcaucagcggccccgacaacggcgccguggccgugcugaaguacaacggcaucaucaccgacaccaucaagagcuggagaaacaacauccugagaacccaggagagcgagugcgccugcgugaacggcagcugcuucaccgugaugaccgacggccccagcgacggccaggccagcuacaagaucuucagaaucgagaagggcaagaucgugaagagcguggagaugaacgcccccaacuaccacuacgaggagugcagcugcuaccccgacagcagcgagaucaccugcgugugcagagacaacuggcacggcagcaacagacccugggugagcuucaaccagaaccuggaguaccagaucggcuacaucugcagcggcaucuucggcgacaaccccagacccaacgacaagaccggcagcugcggccccgugagcagcaacggcgccaacggcgugaagggcuucagcuucaaguacggcaacggcguguggaucggcagaaccaagagcaucagcagcagaaacggcuucgagaugaucugggaccccaacggcuggaccggcaccgacaacaacuucagcaucaagcaggacaucgugggcaucaacgaguggagcggcuacagcggcagcuucgugcagcaccccgagcugaccggccuggacugcaucagacccugcuucuggguggagcugaucagaggcagacccaaggagaacaccaucuggaccagcggcagcagcaucagcuucugcggcgugaacagcgacaccgugggcuggagcuggcccgacggcgccgagcugcccuucaccaucgacaaguga

SEQ ID NO: 179925 - RNA, 1410 nt, Artificial Sequence; identical to SEQ ID NO: 176798
  derived and/or modified CDS sequence (opt4) from neuraminidase__InfluenzaA__ADN26115

SEQ ID NO: 179926 - RNA, 1410 nt, Artificial Sequence
  derived and/or modified CDS sequence (opt4) from neuraminidase__InfluenzaA__ADN26116
augaaccccaaccagaagaucaucaccaucggcagcgugugcaugaccaucggcauggccaaccugauccugcagaucggcaacaucaucagcaucuggaucagccacagcauccagcugggcaaccagaaccagaucgagaccugcaaccagagcgugaucaccuacgagaacaacaccugggugaaccagaccuacgugaacaucagcaacaccaacuucgccgccggccagagcguggugagcgugaagcuggccggcaacagcagccugugccccgugaacggcugggccaucuacagcaaggacaacagcaucagaaucggcagcaagggcgacguguucgugaucagagagcccuucaucagcugcagcccccuggagugcagaaccuucuuccugacccagggcgcccugcugaacgacaagcacagcaacggcaccaucaaggacagaagccccuacagaacccugaugagcugccccaucggcgaggugcccagccccuacaacagcagauucgagagcguggccuggagcgccagcgccugccacgacggcaucaacuggcugaccaucggcaucagcggccccgacaacggcgccguggccgugcugaaguacaacggcaucaucaccgacaccaucaagagcuggagaaacaacauccugagaacccaggagagcgagugcgccugcgugaacggcagcugcuucaccgugaugaccgacggccccagcgacggccaggccagcuacaagaucuucagaaucgagaagggcaagaucgugaagagcguggagaugaacgcccccaacuaccacuacgaggagugcagcugcuaccccgacagcagcgagaucaccugcgugugcagagacaacuggcacggcagcaacagacccugggugagcuucaaccagaaccuggaguaccagaucggcuacaucugcagcggcaucuucggcgacaaccccagacccaacgacaagaccggcagcugcggccccgugagcagcaacggcgccaacggcgugaagggcuucagcuucaaguacggcaacggcguguggaucggcagaaccaagagcaucagcagcagaaacggcuucgagaugaucugggaccccaacggcuggaccggcaccgacaacaacuucagcaucaagcaggacaucgugggcaucaacgaguggagcggcuacagcggcagcuucgugcagcaccccgagcugaccagacuggacugcaucagacccugcuucuggguggagcugaucagaggcagacccaaggagaacaccaucuggaccagcggcagcagcaucagcuucugcggcgugaacagcgacaccgugggcuggagcuggcccgacggcgccgagcugcccuucaccaucgacaaguga

SEQ ID NO: 179927 - RNA, 1410 nt, Artificial Sequence; identical to SEQ ID NO: 178700
  derived and/or modified CDS sequence (opt4) from neuraminidase__InfluenzaA__ADN26117

SEQ ID NO: 179928 - RNA, 1410 nt, Artificial Sequence; identical to SEQ ID NO: 178700
  derived and/or modified CDS sequence (opt4) from neuraminidase__InfluenzaA__ADN26118

SEQ ID NO: 179929 - RNA, 1410 nt, Artificial Sequence; identical to SEQ ID NO: 176798
  derived and/or modified CDS sequence (opt4) from neuraminidase__InfluenzaA__ADN26119

SEQ ID NO: 179930 - RNA, 1410 nt, Artificial Sequence; identical to SEQ ID NO: 177772
  derived and/or modified CDS sequence (opt4) from neuraminidase__InfluenzaA__ADN26120

SEQ ID NO: 179931 - RNA, 1410 nt, Artificial Sequence; identical to SEQ ID NO: 178700
  derived and/or modified CDS sequence (opt4) from neuraminidase__InfluenzaA__ADN26121

SEQ ID NO: 179932 - RNA, 1410 nt, Artificial Sequence; identical to SEQ ID NO: 176798
  derived and/or modified CDS sequence (opt4) from neuraminidase__InfluenzaA__ADN26122

SEQ ID NO: 179933 - RNA, 1410 nt, Artificial Sequence; identical to SEQ ID NO: 176798
  derived and/or modified CDS sequence (opt4) from neuraminidase__InfluenzaA__ADN26123

SEQ ID NO: 179934 - RNA, 1410 nt, Artificial Sequence; identical to SEQ ID NO: 176798
  derived and/or modified CDS sequence (opt4) from neuraminidase__InfluenzaA__ADN26124

SEQ ID NO: 179935 - RNA, 1410 nt, Artificial Sequence; identical to SEQ ID NO: 177772
  derived and/or modified CDS sequence (opt4) from neuraminidase__InfluenzaA__ADN26125

SEQ ID NO: 179936 - RNA, 1410 nt, Artificial Sequence; identical to SEQ ID NO: 177772
  derived and/or modified CDS sequence (opt4) from neuraminidase__InfluenzaA__ADN26126

SEQ ID NO: 179937 - RNA, 1410 nt, Artificial Sequence; identical to SEQ ID NO: 177563
  derived and/or modified CDS sequence (opt4) from neuraminidase__InfluenzaA__ADN26127

SEQ ID NO: 179938 - RNA, 1410 nt, Artificial Sequence; identical to SEQ ID NO: 176798
  derived and/or modified CDS sequence (opt4) from neuraminidase__InfluenzaA__ADN26128

SEQ ID NO: 179939 - RNA, 1410 nt, Artificial Sequence; identical to SEQ ID NO: 177772
  derived and/or modified CDS sequence (opt4) from neuraminidase__InfluenzaA__ADN26129

SEQ ID NO: 179940 - RNA, 1410 nt, Artificial Sequence; identical to SEQ ID NO: 178700
  derived and/or modified CDS sequence (opt4) from neuraminidase__InfluenzaA__ADN26130

SEQ ID NO: 179941 - RNA, 1410 nt, Artificial Sequence
  derived and/or modified CDS sequence (opt4) from neuraminidase__InfluenzaA__ADN26131
augaaccccaaccagaagaucaucaccaucggcagcgugugcaugaccaucggcauggccaaccugauccugcagaucggcaacaucaucagcaucuggaucagccacagcauccagcugggcaaccagaaccagaucgagaccugcaaccagagcgugaucaccuacgagaacaacaccugggugaaccagaccuacgugaacaucagcaacaccaacuucgccgccggccagagcguggugagcgugaagcuggccggcaacagcagccugugccccgugagcggcugggccaucuacagcaaggacaacagcaucagaaucggcagcaagggcgacguguucgugaucagagagcccuucaucagcugcagcccccuggagugcagaaccuucuuccugacccagggcgcccugcugaacgacaagcacagcaacggcaccaucaaggacagaagccccuacagaacccugaugagcugccccaucggcgaggugcccagccccuacaacagcagauucgagagcguggccuggagcgccagcgccugccacgacggcaucaacuggcugaccaucggcaucagcggccccgacaacggcgccguggccgugcugaaguacaacggcaucaucaccgacaccaucaagagcuggagaaacaacauccugagaacccaggagagcgagugcgccugcgugaacggcagcugcuucaccgugaugaccgacggccccagcgacggccaggccagcuacaagaucuucagaaucgagaagggcaagaucgugaagagcguggagaugaacgcccccaacuaccacuacgaggagugcagcugcuaccccgacagcagcgagaucaccugcgugugcagagacaacuggcacggcagcaacagacccugggugagcuucaaccagaaccuggaguaccagaucggcuacaucugcagcggcaucuucggcgacaaccccagacccaacgacaagaagggcagcugcggccccgugagcagcaacggcgccaacggcgugaagggcuucagcuucaaguacggcaacggcguguggaucggcagaaccaagagcaucagcagcagaaacggcuucgagaugaucugggaccccaacggcuggaccggcaccgacaacaacuucagcaucaagcaggacaucgugggcaucaacgaguggagcggcuacagcggcagcuucgugcagcaccccgagcugaccggccuggacugcaucagacccugcuucuggguggagcugaucagaggcagacccaaggagaacaccaucuggaccagcggcagcagcaucagccugugcggcgugaacagcgacaccgugggcuggagcuggcccgacggcgccgagcugcccuucaccaucgacaaguga

SEQ ID NO: 179942 - RNA, 1410 nt, Artificial Sequence; identical to SEQ ID NO: 178700
  derived and/or modified CDS sequence (opt4) from neuraminidase__InfluenzaA__ADN26132

SEQ ID NO: 179943 - RNA, 1410 nt, Artificial Sequence; identical to SEQ ID NO: 177772
  derived and/or modified CDS sequence (opt4) from neuraminidase__InfluenzaA__ADN26134

SEQ ID NO: 179944 - RNA, 1410 nt, Artificial Sequence; identical to SEQ ID NO: 176798
  derived and/or modified CDS sequence (opt4) from neuraminidase__InfluenzaA__ADN26135

SEQ ID NO: 179945 - RNA, 1410 nt, Artificial Sequence; identical to SEQ ID NO: 176798
  derived and/or modified CDS sequence (opt4) from neuraminidase__InfluenzaA__ADN26136

SEQ ID NO: 179946 - RNA, 1410 nt, Artificial Sequence; identical to SEQ ID NO: 176798
  derived and/or modified CDS sequence (opt4) from neuraminidase__InfluenzaA__ADN26137

SEQ ID NO: 179947 - RNA, 1410 nt, Artificial Sequence; identical to SEQ ID NO: 178700
  derived and/or modified CDS sequence (opt4) from neuraminidase__InfluenzaA__ADN26138

SEQ ID NO: 179948 - RNA, 1410 nt, Artificial Sequence; identical to SEQ ID NO: 177772
  derived and/or modified CDS sequence (opt4) from neuraminidase__InfluenzaA__ADN26140

SEQ ID NO: 179949 - RNA, 1410 nt, Artificial Sequence
  derived and/or modified CDS sequence (opt4) from neuraminidase__InfluenzaA__ADN26141
augaaccccaaccagaagaucaucaccaucggcagcgugugcaugaccaucggcauggccaaccugauccugcagaucggcaacaucaucagcaucuggaucagccacagcauccagcugggcaaccagaacagaaucgagaccugcaaccagagcgugaucaccuacgagaacaacaccugggugaaccagaccuacgugaacaucagcaacaccaacuucgccgccggccagagcguggugagcgugaagcuggccggcaacagcagccugugccccgugagcggcugggccaucuacagcaaggacaacagcaucagaaucggcagcaagggcgacguguucgugaucagagagcccuucaucagcugcagcccccuggagugcagaaccuucuuccugacccagggcgcccugcugaacgacaagcacagcaacggcaccaucaaggacagaagccccuacagaacccugaugagcugccccaucggcgaggugcccagccccuacaacagcagauucgagagcguggccuggagcgccagcgccugccacgacggcaucaacuggcugaccaucggcaucagcggccccgacaacggcgccguggccgugcugaaguacaacggcaucaucaccgacaccaucaagagcuggagaaacaacauccugagaacccaggagagcgagugcgccugcgugaacggcagcugcuucaccgugaugaccgacggccccagcgacggccaggccagcuacaagaucuucagaaucgagaagggcaagaucgugaagagcguggagaugaacgcccccaacuaccacuacgaggagugcagcugcuaccccgacagcagcgagaucaccugcgugugcagagacaacuggcacggcagcaacagacccugggugagcuucaaccagaaccuggaguaccagaucggcuacaucugcagcggcaucuucggcgacaaccccagacccaacgacaagaccggcagcugcggccccgugagcagcaacggcgccaacggcgugaagggcuucagcuucaaguacggcaacggcguguggaucggcagaaccaagagcaucagcagcagaaacggcuucgagaugaucugggaccccaacggcuggaccggcaccgacaacaacuucagcaucaagcaggacaucgugggcaucaacgaguggagcggcuacagcggcagcuucgugcagcaccccgagcugaccggccuggacugcaucagacccugcuucuggguggagcugaucagaggcagacccaaggagaacaccaucuggaccagcggcagcagcaucagcuucugcggcgugaacagcgacaccgugggcuggagcuggcccgacggcgccgagcugcccuucaccaucgacaaguga

SEQ ID NO: 179950 - RNA, 1410 nt, Artificial Sequence
  derived and/or modified CDS sequence (opt4) from neuraminidase__InfluenzaA__ADN26142
augaaccccaaccagaagaucaucaccaucggcagcgugugcaugaccaucggcauggccaaccugauccugcagaucggcaacaucaucagcaucuggaucagccacagcauccagcugggcaaccagaaccagaucgagaccugcaaccagagcgugaucaccuacgagaacaacaccugggugaaccagaccuacgugaacaucagcaacaacaacuucgccgccggccagagcguggugagcgugaagcuggccggcaacagcagccugugccccgugaacggcugggccaucuacagcaaggacaacagcaucagaaucggcagcaagggcgacguguucgugaucagagagcccuucaucagcugcagcccccuggagugcagaaccuucuuccugacccagggcgcccugcugaacgacaagcacagcaacggcaccaucaaggacagaagccccuacagaacccugaugagcugccccaucggcgaggugcccagccccuacaacagcagauucgagagcguggccuggagcgccagcgccugccacgacggcaucaacuggcugaccaucggcaucagcggccccgacaacggcgccguggccgugcugaaguacaacggcaucaucaccgacaccaucaagagcuggagaaacaacauccugagaacccaggagagcgagugcgccugcgugaacggcagcugcuucaccgugaugaccgacggccccagcgacggccaggccagcuacaagaucuucagaaucgagaagggcaagaucgugaagagcguggagaugaacgcccccaacuaccacuacgaggagugcagcugcuaccccgacagcagcgagaucaccugcgugugcagagacaacuggcacggcagcaacagacccugggugagcuucaaccagaaccuggaguaccagaucggcuacaucugcagcggcaucuucggcgacaaccccagacccaacgacaagaccggcagcugcggccccgugagcagcaacggcgccaacggcgugaagggcuucagcuucaaguacggcaacggcguguggaucggcagaaccaagagcaucagcagcagaaacggcuucgagaugaucugggaccccaacggcuggaccggcaccgacaacaacuucagcaucaagcaggacaucgugggcaucaacgaguggagcggcuacagcggcagcuucgugcagcaccccgagcugaccggccuggacugcaucagacccugcuucuggguggagcugaucagaggcagacccaaggagaacaccaucuggaccagcggcagcagcaucagcuucugcggcgugaacagcgacaccgugggcuggagcuggcccgacggcgccgagcugcccuucaccaucgacaaguga

SEQ ID NO: 179951 - RNA, 1410 nt, Artificial Sequence; identical to SEQ ID NO: 176798
  derived and/or modified CDS sequence (opt4) from neuraminidase__InfluenzaA__ADN26143

SEQ ID NO: 179952 - RNA, 1410 nt, Artificial Sequence; identical to SEQ ID NO: 178700
  derived and/or modified CDS sequence (opt4) from neuraminidase__InfluenzaA__ADN26144

SEQ ID NO: 179953 - RNA, 1410 nt, Artificial Sequence; identical to SEQ ID NO: 178700
  derived and/or modified CDS sequence (opt4) from neuraminidase__InfluenzaA__ADN26145

SEQ ID NO: 179954 - RNA, 1410 nt, Artificial Sequence; identical to SEQ ID NO: 176798
  derived and/or modified CDS sequence (opt4) from neuraminidase__InfluenzaA__ADN26146

SEQ ID NO: 179955 - RNA, 1410 nt, Artificial Sequence; identical to SEQ ID NO: 178700
  derived and/or modified CDS sequence (opt4) from neuraminidase__InfluenzaA__ADN26147

SEQ ID NO: 179956 - RNA, 1410 nt, Artificial Sequence; identical to SEQ ID NO: 176798
  derived and/or modified CDS sequence (opt4) from neuraminidase__InfluenzaA__ADN26148

SEQ ID NO: 179957 - RNA, 1410 nt, Artificial Sequence; identical to SEQ ID NO: 178700
  derived and/or modified CDS sequence (opt4) from neuraminidase__InfluenzaA__ADN26149

SEQ ID NO: 179958 - RNA, 1410 nt, Artificial Sequence
  derived and/or modified CDS sequence (opt4) from neuraminidase__InfluenzaA__ADN26150
augaaccccaaccagaagaucaucaccaucggcagcgugugcaugaccaucggcauggccagccugauccugcagaucggcaacaucaucagcaucuggaucagccacagcauccagcugggcaaccagaaccagaucgagaccugcaaccagagcgugaucaccuacgagaacaacaccugggugaaccagaccuacgugaacaucagcaacaccaacuucgccgccggccagagcguggugagcgugaagcuggccggcaacagcagccugugccccgugagcggcugggccaucuacagcaaggacaacagcaucagaaucggcagcaagggcgacguguucgugaucagagagcccuucaucagcugcagcccccuggagugcagaaccuucuuccugacccagggcgcccugcugaacgacaagcacagcaacggcaccaucaaggacagaagccccuacagaacccugaugagcugccccaucggcgaggugcccagccccuacaacagcagauucgagagcguggccuggagcgccagcgccugccacgacggcaucaacuggcugaccaucggcaucagcggccccgacaacggcgccguggccgugcugaaguacaacggcaucaucaccgacaccaucaagagcuggagaaacaacauccugagaacccaggagagcgagugcgccugcgugaacggcagcugcuucaccgugaugaccgacggccccagcgacggccaggccagcuacaagaucuucagaaucgagaagggcaagaucgugaagagcguggagaugaacgcccccaacuaccacuacgaggagugcagcugcuaccccgacagcagcgagaucaccugcgugugcagagacaacuggcacggcagcaacagacccugggugagcuucaaccagaaccuggaguaccagaucggcuacaucugcagcggcaucuucggcgacaaccccagacccaacgacaagaccggcagcugcggccccgugagcagcaacggcgccaacggcgugaagggcuucagcuucaaguacggcaacggcguguggaucggcagaaccaagagcaucagcagcagaaacggcuucgagaugaucugggaccccaacggcuggaccggcaccgacaacaacuucagcaucaagcaggacaucgugggcaucaacgaguggagcggcuacagcggcagcuucgugcagcaccccgagcugaccggccuggacugcaucagacccugcuucuggguggagcugaucagaggcagacccaaggagaacaccaucuggaccagcggcagcagcaucagcuucugcggcgugaacagcgacaccgugggcuggagcuggcccgacggcgccgagcugcccuucaccaucgacaaguga

SEQ ID NO: 179959 - RNA, 1410 nt, Artificial Sequence; identical to SEQ ID NO: 177772
  derived and/or modified CDS sequence (opt4) from neuraminidase__InfluenzaA__ADN26151

SEQ ID NO: 179960 - RNA, 1410 nt, Artificial Sequence
  derived and/or modified CDS sequence (opt4) from neuraminidase__InfluenzaA__ADN26152
augaaccccaaccagaagaucaucaccaucggcagcgugugcaugaccaucggcauggccaaccugauccugcagaucggcaacaucaucagcaucuggaucagccacagcauccagcugggcaaccagaaccagaucgagaccugcaaccagagcgugaucaccuacgagaacaacaccugggugaaccagaccuacgugaacaucagcaacaccaacuucgccgccggccagagcguggugagcaugaagcuggccggcaacagcagccugugccccgugaacggcugggccaucuacagcaaggacaacagcaucagaaucggcagcaagggcgacguguucgugaucagagagcccuucaucagcugcagcccccuggagugcagaaccuucuuccugacccagggcgcccugcugaacgacaagcacagcaacggcaccaucaaggacagaagccccuacagaacccugaugagcugccccaucggcgaggugcccagccccuacaacagcagauucgagagcguggccuggagcgccagcgccugccacgacggcaucaacuggcugaccaucggcaucagcggccccgacaacggcgccguggccgugcugaaguacaacggcaucaucaccgacaccaucaagagcuggagaaacaacauccugagaacccaggagagcgagugcgccugcgugaacggcagcugcuucaccgugaugaccgacggccccagcgacggccaggccagcuacaagaucuucagaaucgagaagggcaagaucgugaagagcguggagaugaacgcccccaacuaccacuacgaggagugcagcugcuaccccgacagcagcgagaucaccugcgugugcagagacaacuggcacggcagcaacagacccugggugagcuucaaccagaaccuggaguaccagaucggcuacaucugcagcggcaucuucggcgacaaccccagacccaacgacaagaccggcagcugcggccccgugagcagcaacggcgccaacggcgugaagggcuucagcuucaaguacggcaacggcguguggaucggcagaaccaagagcaucagcagcagaaacggcuucgagaugaucugggaccccaacggcuggaccagaaccgacaacaacuucagcaucaagcaggacaucgugggcaucaacgaguggagcggcuacagcggcagcuucgugcagcaccccgagcugaccggccuggacugcaucagacccugcuucuggguggagcugaucagaggcagacccaaggagaacaccaucuggaccagcggcagcagcaucagcuucugcggcgugaacagcgacaccgugggcuggagcuggcccgacggcgccgagcugcccuucaccaucgacaaguga

SEQ ID NO: 179961 - RNA, 1410 nt, Artificial Sequence; identical to SEQ ID NO: 178700
  derived and/or modified CDS sequence (opt4) from neuraminidase__InfluenzaA__ADN26153

SEQ ID NO: 179962 - RNA, 1410 nt, Artificial Sequence; identical to SEQ ID NO: 177381
  derived and/or modified CDS sequence (opt4) from neuraminidase__InfluenzaA__ADN26154

SEQ ID NO: 179963 - RNA, 1410 nt, Artificial Sequence; identical to SEQ ID NO: 176798
  derived and/or modified CDS sequence (opt4) from neuraminidase__InfluenzaA__ADN26155

SEQ ID NO: 179964 - RNA, 1410 nt, Artificial Sequence; identical to SEQ ID NO: 177772
  derived and/or modified CDS sequence (opt4) from neuraminidase__InfluenzaA__ADN26157

SEQ ID NO: 179965 - RNA, 1410 nt, Artificial Sequence; identical to SEQ ID NO: 176798
  derived and/or modified CDS sequence (opt4) from neuraminidase__InfluenzaA__ADN26159

SEQ ID NO: 179966 - RNA, 1410 nt, Artificial Sequence; identical to SEQ ID NO: 176798
  derived and/or modified CDS sequence (opt4) from neuraminidase__InfluenzaA__ADN26161

SEQ ID NO: 179967 - RNA, 1410 nt, Artificial Sequence
  derived and/or modified CDS sequence (opt4) from neuraminidase__InfluenzaA__ADN26162
augaaccccaaccagaagaucaucaccaucagcagcgugugcaugaccgugggcauggccaaccugauccugcagaucggcaacaucaucagcaucuggaucagccacagcauccagcugggcaaccagaaccagaucgagaccugcaaccagagcgugaucaccuacgagaacaacaccugggugaaccagaccuacgugaacaucagcaacaccaacuucgccgccggccagagcguggugagcgugaagcuggccggcaacagcagccugugccccgugagcggcugggccaucuacagcaaggacaacagcaucagaaucggcagcaagggcgacguguucgugaucagagagcccuucaucagcugcagcccccuggagugcagaaccuucuuccugacccagggcgcccugcugaacgacaagcacagcaacggcaccaucaaggacagaagccccuacagaacccugaugagcugccccaucggcgaggugcccagccccuacaacagcagauucgagagcguggccuggagcgccagcgccugccacgacggcaucaacuggcugaccaucggcaucagcggccccgacaacggcgccguggccgugcugaaguacaacggcaucaucaccgacaccaucaagagcuggagaaacaacauccugagaacccaggagagcgagugcgccugcgugaacggcagcugcuucaccgugaugaccgacggccccagcgacggccaggccagcuacaagaucuucagaaucgagaagggcaagaucgugaagagcguggagaugaacgcccccaacuaccacuacgaggagugcagcugcuaccccgacagcagcgagaucaccugcgugugcagagacaacuggcacggcagcaacagacccugggugagcuucaaccagaaccuggaguaccagaucggcuacaucugcagcggcaucuucggcgacaaccccagacccaacgacaagaccggcagcugcggccccgugagcagcaacggcgccaacggcgugaagggcuucagcuucaaguacggcaacggcguguggaucggcagaaccaagagcaucagcagcagaaacggcuucgagaugaucugggaccccaacggcuggaccggcaccgacaacaacuucagcaucaagcaggacaucgugggcaucaacgaguggagcggcuacagcggcagcuucgugcagcaccccgagcugaccggccuggacugcaucagacccugcuucuggguggagcugaucagaggcagacccaaggagaacaccaucuggaccagcggcagcagcaucagcuucugcggcgugaacagcgacaccgugggcuggagcuggcccgacggcgccgagcugcccuucaccaucgacaaguga

SEQ ID NO: 179968 - RNA, 1410 nt, Artificial Sequence
  derived and/or modified CDS sequence (opt4) from neuraminidase__InfluenzaA__ADN26163
augaaccccaaccagaagaucaucaccaucggcagcgugugcaugaccaucggcauggccaaccugauccugcagaucggcaacaucaucagcaucuggaucagccacagcauccagcugggcaaccagaaccagaucgagaccugcaaccagagcgugaucaccuacgagaacaacaccugggugaaccagaccuacgugaacaucagcaacaccaacuucgccgccggccagagcguggugagcgugaagcuggccggcaacagcagccugugccccgugagcggcugggccaucuacagcaaggacaacagcaucagaaucggcagcaagggcgacguguucgugaucagagagcccuucaucagcugcagcccccuggagugcagaaccuucuuccugacccagggcgcccugcugaacgacaagcacagcaacggcaccaucaaggacagaagccccuacagaacccugaugagcugccccaucggcgaggugcccagccccuacaacagcagauucgagagcguggccuggagcgccagcgccugccacgacggcaucaacuggcugaccaucggcaucagcggccccgacaacggcgccguggccgugcugaaguacaacggcaucaucaccgacaccaucaagagcuggagaaacaacauccugagaacccaggagagcgagugcgccugcgugaacggcagcugcuucaccgugaugaccgacggccccagcgacggccaggccagcuacaagaucuucagaaucgagaagggcaagaucgugaagagcguggagaugaacgcccccaacuaccacuacgaggagugcagcugcuaccccgacagcagcgagaucaccugcgugugcagagacaacuggcacggcagcaacagacccugggugagcuucaaccagaaccuggaguaccagaucggcuacaucugcagcggcaucuucggcgacaaccccagacccaacgacaagaccggcagcugcggccccgugagcagcaacggcgccaacggcgugaagggcuucagcuucaaguacggcaacggcguguggaucggcagaaccaagagcaucagcagcagaaacggcuucgagaugaucugggaccccaacggcuggaccggcaccgacaacaacuucagcaucaagcaggacaucaucggcaucaacgaguggagcggcuacagcggcagcuucgugcagcaccccgagcugaccggccuggacugcaucagacccugcuucuggguggagcugaucagaggcagacccaaggagaacaccaucuggaccagcggcagcagcaucagcuucugcggcgugaacagcgacaccgugggcuggagcuggcccgacggcgccgagcugcccuucaucaucgacaaguga

SEQ ID NO: 179969 - RNA, 1410 nt, Artificial Sequence
  derived and/or modified CDS sequence (opt4) from neuraminidase__InfluenzaA__ADN26164
augaaccccaaccagaagaucaucaccaucggcagcgugugcaugaccaucggcauggccaaccugauccugcagaucggcaacaucaucagcaucuggaucagccacagcauccagcugggcaaccagaaccagaucgagaccugcaaccagagcgugaucaccuacgagaacaacaccugggugaaccagaccuacgugaacaucagcaacaccaacuucgccgccggccagagcguggugagcgugaagcuggccggcaacagcagccugugccccgugagcggcugggccaucuacagcaaggacaacagcaucagaaucggcagcaagggcgacguguucgugaucagagagcccuucaucagcugcagcccccuggagugcagaaccuucuuccugacccagggcgcccugcugaacgacaagcacagcaacggcaccaucaaggacagaagccccuacagaacccugaugagcugccccaucggcgaggugcccagccccuacaacagcagauucgagagcguggccuggagcgccagcgccugccacgacggcaucaacuggcugaccaucggcaucagcggccccgacaacggcgccguggccgugcugaaguacaacggcaucaucaccgacaccaucaagagcuggagaaacaacauccugagaacccaggagagcgagugcgccugccugaacggcagcugcuucaccgugaugaccgacggccccagcgacggccaggccagcuacaagaucuucagaaucgagaagggcaagaucgugaagagcguggagaugaacgcccccaacuaccacuacgaggagugcagcugcuaccccgacagcagcgagaucaccugcgugugcagagacaacuggcacggcagcaacagacccugggugagcuucaaccagaaccuggaguaccagaucggcuacaucugcagcggcaucuucggcgacaaccccagacccaacgacaagaccggcagcugcggccccgugagcagcaacggcgccaacggcgugaagggcuucagcuucaaguacggcaacggcguguggaucggcagaaccaagagcaucagcagcagaaacggcuucgagaugaucugggaccccaacggcuggaccggcaccgacaacgacuucagcaucaagcaggacaucgugggcaucaacgaguggagcggcuacagcggcagcuucgugcagcaccccgagcugaccggccuggacugcaucagacccugcuucuggguggagcugaucagaggcagacccaaggagaacaccaucuggaccagcggcagcagcaucagcuucugcggcgugaacagcgacaccgugggcuggagcuggcccgacggcgccgagcugcccuucaccaucgacaaguga

SEQ ID NO: 179970 - RNA, 1410 nt, Artificial Sequence; identical to SEQ ID NO: 178755
  derived and/or modified CDS sequence (opt4) from neuraminidase__InfluenzaA__ADN26168

SEQ ID NO: 179971 - RNA, 1410 nt, Artificial Sequence; identical to SEQ ID NO: 178021
  derived and/or modified CDS sequence (opt4) from neuraminidase__InfluenzaA__ADN26178

SEQ ID NO: 179972 - RNA, 1410 nt, Artificial Sequence; identical to SEQ ID NO: 176798
  derived and/or modified CDS sequence (opt4) from neuraminidase__InfluenzaA__ADN26868

SEQ ID NO: 179973 - RNA, 1410 nt, Artificial Sequence; identical to SEQ ID NO: 176798
  derived and/or modified CDS sequence (opt4) from neuraminidase__InfluenzaA__ADN26869

SEQ ID NO: 179974 - RNA, 1410 nt, Artificial Sequence; identical to SEQ ID NO: 176798
  derived and/or modified CDS sequence (opt4) from neuraminidase__InfluenzaA__ADN26870

SEQ ID NO: 179975 - RNA, 1410 nt, Artificial Sequence
  derived and/or modified CDS sequence (opt4) from neuraminidase__InfluenzaA__ADN26871
augaaccccaaccagaagaucaucaccaucggcagcgugugcaugaccaucggcauggccaaccugauccugcagaucggcaacaucaucagcaucuggaucagccacagcauccagcugggcaaccagaaccagaucgagaccuacaaccagagcgugaucaccuacgagaacaacaccugggugaaccagaccuacgugaacaucagcaacaccaacuucgccgccggccagagcguggugagcgugaagcuggccggcaacagcagccugugccccgugagcggcugggccaucuacagcaaggacaacagcaucagaaucggcagcaagggcgacguguucgugaucagagagcccuucaucagcugcagcccccuggagugcagaaccuucuuccugacccagggcgcccugcugaacgacaagcacagcaacggcaccaucaaggacagaagccccuacagaacccugaugagcugccccaucggcgaggugcccagccccuacaacagcagauucgagagcguggccuggagcgccagcgccugccacgacggcaucaacuggcugaccaucggcaucagcggccccgacaacggcgccguggccgugcugaaguacaacggcaucaucaccgacaccaucaagagcuggagaaacaacauccugagaacccaggagagcgagugcgccugcgugaacggcagcugcuucaccgugaugaccgacggccccagcgacggccaggccagcuacaagaucuucagaaucgagaagggcaagaucgugaagagcguggagaugaacgcccccaacuaccacuacgaggagugcagcugcuaccccgacagcagcgagaucaccugcgugugcagagacaacuggcacggcagcaacagacccugggugagcuucaaccagaaccuggaguaccagaucggcuacaucugcagcggcaucuucggcgacaaccccagacccaacgacaagaccggcagcugcggccccgugagcagcaacggcgccaacggcgugaagggcuucagcuucaaguacggcaacggcguguggaucggcagaaccaagagcaucagcagcagaaacggcuucgagaugaucugggaccccaacggcuggaccggcaccgacaacaacuucagcaucaagcaggacaucgugggcaucaacgaguggagcggcuacagcggcagcuucgugcagcaccccgagcugaccggccuggacugcaucagacccugcuucuggguggagcugaucagaggcagacccaaggagaacaccaucuggaccagcggcagcagcaucagcuucugcggcgugaacagcgacaccgugggcuggagcuggcccgacggcgccgagcugcccuucaccaucgacaaguga

SEQ ID NO: 179976 - RNA, 1410 nt, Artificial Sequence
  derived and/or modified CDS sequence (opt4) from neuraminidase__InfluenzaA__ADN26872
augaaccccaaccagaagaucaucaccaucggcagcgugugcaugaccaucggcauggccaaccugauccugcagaucggcaacaucaucagcaucuggaucagccacagcauccagcugggcaaccagaaccagaucgagaccugcaaccagagcgugaucaccuacgagaacaacaccugggugaaccagaccuacgugaacaucagcaacaccaacuucgccgccggccugagcguggugagcgugaagcuggccggcaacagcagccugugccccgugagcggcugggccaucuacagcaaggacaacagcaucagaaucggcagcaagggcgacguguucgugaucagagagcccuucaucagcugcagcccccuggagugcagaaccuucuuccugacccagggcgcccugcugaacgacaagcacagcaacggcaccaucaaggacagaagccccuacagaacccugaugagcugccccaucggcgaggugcccagccccuacaacagcagauucgagagcguggccuggagcgccagcgccugccacgacggcaucagcuggcugaccaucggcaucagcggccccgacaacggcgccguggccgugcugaaguacaacggcaucaucaccgacaccaucaagagcuggagaaacaacauccugagaacccaggagagcgagugcgccugcgugaacggcagcugcuucaccgugaugaccgacggccccagcgacggccaggccagcuacaagaucuucagaaucgagaagggcaagaucgugaagagcguggagaugaacgcccccaacuaccacuacgaggagugcagcugcuaccccgacagcagcgagaucaccugcgugugcagagacaacuggcacggcagcaacagacccugggugagcuucaaccagaaccuggaguaccagaucggcuacaucugcagcggcaucuucggcgacaaccccagacccaacgacaagaccggcagcugcggccccgugagcagcaacggcgccaacggcgugaagggcuucagcuucaaguacggcaacggcguguggaucggcagaaccaagagcaucagcagcagaaacggcuucgagaugaucugggaccccaacggcuggaccggcaccgacaacaacuucagcaucaagcaggacaucgugggcaucaacgaguggagcggcuacagcggcagcuucgugcagcaccccgagcugaccggccuggacugcaucagacccugcuucuggguggagcugaucagaggcagacccaaggagaacaccaucuggaccagcggcagcagcaucagcuucugcggcgugaacagcgacaccgugggcuggagcuggcccgacggcgccgagcugcccuucaccaucgacaaguga

SEQ ID NO: 179977 - RNA, 1410 nt, Artificial Sequence; identical to SEQ ID NO: 176798
  derived and/or modified CDS sequence (opt4) from neuraminidase__InfluenzaA__ADN26873

SEQ ID NO: 179978 - RNA, 1410 nt, Artificial Sequence; identical to SEQ ID NO: 176798
  derived and/or modified CDS sequence (opt4) from neuraminidase__InfluenzaA__ADN26874

SEQ ID NO: 179979 - RNA, 1410 nt, Artificial Sequence; identical to SEQ ID NO: 176798
  derived and/or modified CDS sequence (opt4) from neuraminidase__InfluenzaA__ADN26875

SEQ ID NO: 179980 - RNA, 1410 nt, Artificial Sequence; identical to SEQ ID NO: 176798
  derived and/or modified CDS sequence (opt4) from neuraminidase__InfluenzaA__ADN26876

SEQ ID NO: 179981 - RNA, 1410 nt, Artificial Sequence; identical to SEQ ID NO: 176798
  derived and/or modified CDS sequence (opt4) from neuraminidase__InfluenzaA__ADN26877

SEQ ID NO: 179982 - RNA, 1410 nt, Artificial Sequence; identical to SEQ ID NO: 176798
  derived and/or modified CDS sequence (opt4) from neuraminidase__InfluenzaA__ADN26878

SEQ ID NO: 179983 - RNA, 1410 nt, Artificial Sequence; identical to SEQ ID NO: 177935
  derived and/or modified CDS sequence (opt4) from neuraminidase__InfluenzaA__ADN26879

SEQ ID NO: 179984 - RNA, 1410 nt, Artificial Sequence; identical to SEQ ID NO: 176798
  derived and/or modified CDS sequence (opt4) from neuraminidase__InfluenzaA__ADN26880

SEQ ID NO: 179985 - RNA, 1410 nt, Artificial Sequence; identical to SEQ ID NO: 176798
  derived and/or modified CDS sequence (opt4) from neuraminidase__InfluenzaA__ADN26881

SEQ ID NO: 179986 - RNA, 1410 nt, Artificial Sequence; identical to SEQ ID NO: 176798
  derived and/or modified CDS sequence (opt4) from neuraminidase__InfluenzaA__ADN26882

SEQ ID NO: 179987 - RNA, 1410 nt, Artificial Sequence; identical to SEQ ID NO: 176798
  derived and/or modified CDS sequence (opt4) from neuraminidase__InfluenzaA__ADN26883

SEQ ID NO: 179988 - RNA, 1413 nt, Artificial Sequence
  derived and/or modified CDS sequence (opt4) from neuraminidase__InfluenzaA__ADN89064
augaaccccaaccagaagaucaucaccaucggcagcaucagcaucgccaucggcaucaucagccugaugcugcagaucggcaacaucaucagcaucugggccagccacagcauccagaccggcagccagaacaacaccggcaucugcaaccagagaaucaucaccuacgagaacagcaccugggugaaccacaccuacgugaacaucaacaacaccaacgugguggccggcgaggacaagaccagcgugacccuggccggcaacagcagccugugcagcaucagcggcugggccaucuacaccaaggacaacagcaucagaaucggcagcaagggcgacguguucgugaucagagagcccuucaucagcugcagccaccuggagugcagaaccuucuuccugacccagggcgcccugcugaacgacaagcacagcaacggcaccgugaaggacagaagccccuacagagcccugaugagcugcccccugggcgaggcccccagccccuacaacagcaaguucgagagcguggccuggagcgccagcgccugccacgacggcaugggcuggcugaccaucggcaucagcggccccgacaacggcgccguggccgugcugaaguacaacggcaucaucaccggcaccaucaagagcuggaagaagcagauccugagaacccaggagagcgagugcgugugcaugaacggcagcugcuucaccaucaugaccgacggccccagcaacaaggccgccagcuacaagaucuucaagaucgagaagggcaaggugaccaagagcaucgagcugaacgcccccaacuucuacuacgaggagugcagcugcuaccccgacaccggcaucgugaugugcgugugcagagacaacuggcacggcagcaacagacccugggugagcuucaaccagaaccuggacuaccagaucggcuacaucugcagcggcguguucggcgacaaccccagacccgaggacggcgagggcagcugcaaccccgugaccguggacggcgccaacggcgugaagggcuucagcuacaaguacggcaacggcguguggaucggcagaaccaagagcaacagacugagaagaggcuucgagaugaucugggaccccaacggcuggaccaacaccgacagcgacuucagcgugaagcaggacgugguggccaucaccgacuggagcggcuacagcggcagcuucgugcagcaccccgagcugaccggccuggacugcaucagacccugcuucuggguggagcuggugagaggccugcccagagagaacaccaccaucuggaccagcggcagcagcaucagcuucugcggcgugaacagcgacaccgccaacuggagcuggcccgacggcgccgagcugcccuucaccaucgacaaguga

SEQ ID NO: 179989 - RNA, 1413 nt, Artificial Sequence; identical to SEQ ID NO: 177521
  derived and/or modified CDS sequence (opt4) from neuraminidase__InfluenzaA__ADN89075

SEQ ID NO: 179990 - RNA, 1413 nt, Artificial Sequence
  derived and/or modified CDS sequence (opt4) from neuraminidase__InfluenzaA__ADN89086
augaaccccaaccagaagaucaucaccaucggcagcaucagcaucgccaucggcaucaucagccugaugcugcagaucggcaacaucaucagcaucugggccagccacagcauccagaccggcagccagaacaacaccggcaucugcaaccagagaaucaucaccuacgagaacagcaccugggugaaccacaccuacgugaacaucaacaacaccaacgugguggccggcgaggacaagaccagcgugacccuggccggcaacagcagccugugcagcaucagcggcugggccaucuacaccaaggacaacagcaucagaaucggcagcaagggcgacguguucgugaucagagagcccuucaucagcugcagccaccuggagugcagaaccuucuuccugacccagggcgcccugcugaacgacaagcacagcaacggcaccgugaaggacagaagccccuacagagcccugaugagcugcccccugggcgaggcccccagccccuacaacagcaaguucgagagcguggccuggagcgccagcgccugccacgacggcaugggcuggcugaccaucggcaucagcggccccgacaacggcgccguggccgugcugaaguacaacggcaucaucaccggcaccaucaagagcuggaagaagcagauccugagaacccaggagagcgagugcgugugcaugaacggcagcugcuucaccaucaugaccgacggccccagcaacaagaccgccagcuacaagaucuucaagaucgagaagggcaaggugaccaagagcaucgagcugaacgcccccaacuucuacuacgaggagugcagcugcuaccccgacaccggcaucgugaugugcgugugcagagacaacuggcacggcagcaacagacccugggugagcuucaaccagaaccuggacuaccagaucggcuacaucugcagcggcguguucggcgacaaccccagacccgaggacggcgagggcagcugcaaccccgugaccguggacggcgccaacggcgugaagggcuucagcuacaaguacggcaacggcguguggaucggcagaaccaagagcaacagacugagaaagggcuucgagaugaucugggaccccaacggcuggaccaacaccgacagcgacuucagcgugaagcaggacgugguggccaucaccgacuggagcggcuacagcggcagcuucgugcagcaccccgagcugaccggccuggacugcaucagacccugcuucuggguggagcuggugagaggccugcccagagagaacaccaccaucuggaccagcggcagcagcaucagcuucugcggcgugaacagcgacaccgccaacuggagcuggcccgacggcgccgagcugcccuucaccaucgacaaguga

SEQ ID NO: 179991 - RNA, 1413 nt, Artificial Sequence; identical to SEQ ID NO: 177521
  derived and/or modified CDS sequence (opt4) from neuraminidase__InfluenzaA__ADN89097

SEQ ID NO: 179992 - RNA, 1413 nt, Artificial Sequence
  derived and/or modified CDS sequence (opt4) from neuraminidase__InfluenzaA__ADN89108
augaaccccaaccagaagaucaucaccaucggcagcaucagcaucgccaucggcaucaucagccugaugcugcagaucggcaacaucaucagcaucugggccagccacagcauccagaccggcagccagaacaacaccggcaucugcaaccagagaaucaucaccuacgagaacagcaccugggugaaccacaccuacgugaacaucaacaacaccaacgugguggccggcgaggacaagaccagcgugacccuggccggcaacagcagccugugcagcaucagcggcugggccaucuacaccaaggacaacagcaucagaaucggcagcaagggcgacguguucgugaucagagagcccuucaucagcugcagccaccuggagugcagaaccuucuuccugacccagggcgcccugcugaacgacaagcacagcaacggcaccgugaaggacagaagccccuacagagcccugaugagcugcccccugggcgaggcccccagccccuacaacagcaaguucgagagcguggccuggagcgccagcgccugccacgacggcaugggcuggcugaccaucggcaucagcggccccgacaacggcgccguggccgugcugaaguacaacggcaucaucaccggcaccaucaagagcuggaagaagcagauccugagaacccaggagagcgagugcgugugcaugaacggcagcugcuucaccaucaugaccgacggccccagcaacaaggccgccagcuacaagaucuucaagaucgagaagggcaaggugaccaagagcaucgagcugaacgcccccaacuucuacuacgaggagugcagcugcuaccccgacaccggcaucgugaugugcgugugcagagacaacuggcacggcagcaacagacccugggugagcuucaaccagaaccuggacuaccagaucggcuacaucugcagcggcguguucggcgacaaccccagacccgaggacggcgagggcagcugcaaccccgugaccguggacggcgccaacggcgugaagggcuucagcuacaaguacggcaacggcguguggaucggcagaaccaagagcaacagacugagaaagggcuucgagaugaucugggaccccaacggcuggaccaacaccgacagcgacuucagcgugaagcaggacguggugagcaucaccgacuggagcggcuacagcggcagcuucgugcagcaccccgagcugaccggccuggacugcaucagacccugcuucuggguggagcuggugagaggccugcccagagagaacaccaccaucuggaccagcggcagcagcaucagcuucugcggcgugaacagcgacaccgccaacuggagcuggcccgacggcgccgagcugcccuucaccaucgacaaguga

SEQ ID NO: 179993 - RNA, 1413 nt, Artificial Sequence
  derived and/or modified CDS sequence (opt4) from neuraminidase__InfluenzaA__ADN89119
augaaccccaaccagaagaucaucaccaucggcagcaucagcaucgccaucggcaucaucagccugaugcugcagaucggcaacaucaucagcaucugggccagccacagcauccagaccggcagccagaacaacaccggcaucugcaaccagagaaucaucaccuacgagaacagcaccugggugaaccacaccuacgugaacaucaacaacaccaacgugguggccggcgaggacaagaccagcgugacccuggccggcaacagcagccugugcagcaucagcggcugggccaucuacaccaaggacaacagcaucagaaucggcagcaagggcgacguguucgugaucagagagcccuucaucagcugcagccaccuggagugcagaaccuucuuccugacccagggcgcccugcugaacgacaagcacagcaacggcaccgugaaggacagaagccccuacagagcccugaugagcugcccccugggcgaggcccccagccccuacaacagcaaguucgagagcguggccuggagcgccagcgccugccacgacggcaugggcuggcugaccaucggcaucagcggccccgacaacggcgccguggccgugcugaaguacaacggcaucaucaccggcaccaucaagagcuggaagaagcagauccugagaacccaggagagcgagugcgugugcaugaacggcagcugcuucaccaucaugaccgacggccccagcaacaaggccgccagcuacaagaucuucaagaucgagaagggcaaggugaccaagagcaucgagcugaacgcccccaacuucuacuacgaggagugcagcugcuaccccgacaccggcaucgugaugugcgugugcagagacaacuggcacggcagcaacagacccugggugagcuucaaccagaaccuggacuaccagaucggcuacaucugcagcggcguguucggcgacaaccccagacccgaggacggcgagggcagcugcaaccccgugaccgugaacggcgccgacggcgugaagggcuucagcuacaaguacggcaacggcguguggaucggcagaaccaagagcaacagacugagaaagggcuucgagaugaucugggaccccaacggcuggaccaacaccgacagcgacuucagcgugaagcaggacgugguggccaucaccgacuggagcggcuacagcggcagcuucgugcagcaccccgagcugaccggccuggacugcaccagacccugcuucuggguggagcuggugagaggccugcccagagagaacaccaccaucuggaccagcggcagcagcaucagcuucugcggcgugaacagcgacaccgccaacuggagcuggcccgacggcgccgagcugcccuucaccaucgacaaguga

SEQ ID NO: 179994 - RNA, 1413 nt, Artificial Sequence
  derived and/or modified CDS sequence (opt4) from neuraminidase__InfluenzaA__ADN89130
augaaccccaaccagaagaucaucaccaucggcagcaucagcaucgccaucggcaucaucagccugaugcugcagaucggcaacaucaucagcaucugggccagccacagcauccagaccggcagccagaacaacaccggcaucugcaaccagagaaucaucaccuacgagaacagcaccugggugaaccacaccuacgugaacaucaacaacaccaacgugguggccggcgaggacaagaccagcgugacccuggccggcaacagcagccugugcagcaucagcggcugggccaucuacaccaaggacaacagcaucagaaucggcagcaagggcgacguguucgugaucagagagcccuucaucagcugcagccaccuggagugcagaaccuucuuccugacccagggcgcccugcugaacgacaagcacagcaacggcaccgugaaggacagaagccccuacagagcccugaugagcugcccccugggcgaggcccccagccccuacaacagcaacuucgagagcguggccuggagcgccagcgccugccacgacggcaugggcuggcugaccaucggcaucagcggccccgacaacggcgccguggccgugcugaaguacaacggcaucaucaccggcaccaucaagagcuggaagaagcagauccugagaacccaggagagcgagugcgugugcaugaacggcagcugcuucaccaucaugaccgacggccccagcaacaaggccgccagcuacaagaucuucaagaucgagaagggcaaggugaccaagagcaucgagcugaacgcccccaacuucuacuacgaggagugcagcugcuaccccgacaccggcaucgugaugugcgugugcagagacaacuggcacggcagcaacagacccugggugagcuucaaccagaaccuggacuaccagaucggcuacaucugcagcggcguguucggcgacaaccccagacccgaggacggcgagggcagcugcaaccccgugaccguggacggcgccaacggcgugaagggcuucagcuacaaguacggcaacggcguguggaucggcagaaccaagagcaacagacugagaaagggcuucgagaugaucugggaccccaacggcuggaccaacaccgacagcgacuucagcgugaagcaggacgugguggccaucaccgacuggagcggcuacagcggcagcuucgugcagcaccccgagcugaccggccuggacugcaucagacccugcuucuggguggagcuggugagaggccugcccagagagaacaccaccaucuggaccagcggcagcagcaucagcuucugcggcgugaacggcgacaccgccaacuggagcuggcccgacggcgccgagcugcccuucaccaucgacaaguga

SEQ ID NO: 179995 - RNA, 1413 nt, Artificial Sequence; identical to SEQ ID NO: 179992
  derived and/or modified CDS sequence (opt4) from neuraminidase__InfluenzaA__ADN89141

SEQ ID NO: 179996 - RNA, 1413 nt, Artificial Sequence
  derived and/or modified CDS sequence (opt4) from neuraminidase__InfluenzaA__ADN89152
augaaccccaaccagaagaucaucaccaucggcagcaucagcaucgccaucggcaucaucagccugaugcugcagaucggcaacaucaucagcaucugggccagccacagcauccagaccggcagccagaacaacaccggcaucugcaaccagagaaucaucaccuacgagaacagcaccugggugaaccacaccuacgugaacaucaacaacaccaacgugguggccggcgaggacaagaccagcgugacccuggccggcaacagcagccugugcagcaucagcggcugggccaucuacaccaaggacaacagcaucagaaucggcagcaagggcgacguguucgugaucagagagcccuucaucagcugcagccaccuggagugcagaaccuucuuccugacccagggcgcccugcugaacgacaagcacagcaacggcaccgugaaggacagaagccccuacagagcccugaugagcugcccccugggcgaggcccccagccccuacaacagcaaguucgagagcguggccuggagcgccagcgccugccacgacggcaugggcuggcugaccaucggcaucagcggccccgacaacggcgccguggccgugcugaaguacaacggcaucaucaccggcaccaucaagagcuggaagaagcagauccugagaacccaggagagcgagugcgugugcaugaacggcagcugcuucaccaucaugaccgacggccccagcaacaaggccgccagcuacaagaucuucaagaucgagaagggcaaggugaccaagagcaucgagcugaacgcccccaacuucuacuacgaggagugcagcugcuaccccgacaccggcaucgugaugugcgugugcagagacaacuggcacggcagcaacagacccugggugagcuucaaccagaaccuggacuaccagaucggcuacaucugcagcggcguguucggcgacaaccccagacccgaggacggcgagggcagcugcaaccccgugaccaucgacggcgccaacggcgugaagggcuucagcuacaaguacggcaacggcguguggaucggcagaaccaagagcaacagacugagaaagggcuucgagaugaucugggaccccaacggcuggaccaacaccgacagcgacuucagcgugaagcaggacgugguggccaucaccgacuggagcggcuacagcggcagcuucgugcagcaccccgagcugaccggccuggacugcaucagacccugcuucuggguggagcuggugagaggccugcccagagagaacaccaccaucuggaccagcggcagcagcaucagcuucugcggcgugaacagcgacaccgccaacuggagcuggcccgacggcgccgagcugcccuucaccaucgacaaguga

SEQ ID NO: 179997 - RNA, 1413 nt, Artificial Sequence
  derived and/or modified CDS sequence (opt4) from neuraminidase__InfluenzaA__ADN89163
augaaccccaaccagagaaucaucaccaucggcagcaucagcaucgccaucggcaucaucagccugaugcugcagaucggcaacaucaucagcaucugggccagccacagcauccagaccggcagccagaacaacaccggcaucugcaaccagagaaucaucaccuacgagaacagcaccugggugaaccacaccuacgugaacaucaacaacaccaacgugguggccggcgaggacaagaccagcgugacccuggccggcaacagcagccugugcagcaucagcggcugggccaucuacaccaaggacaacagcaucagaaucggcagcaagggcgacguguucgugaucagagagcccuucaucagcugcagccaccuggagugcagaaccuucuuccugacccagggcgcccugcugaacgacaagcacagcaacggcaccgccaaggacagaagccccuacagagcccugaugagcugcccccugggcgaggcccccagccccuacaacagcaaguucgagagcguggccuggagcgccagcgccugccacgacggcaugggcuggcugaccaucggcaucagcggccccgacaacggcgccguggccgugcugaaguacaacggcaucaucaccggcaccaucaagagcuggaagaagcagauccugagaacccaggagagcgagugcgugugcaugaacggcagcugcuucaccaucaugaccgacggccccagcaacaaggccgccagcuacaagaucuucaagaucgagaagggcaaggugaccaagagcaucgagcugaacgcccccaacuucuacuacgaggagugcagcugcuaccccgacaccggcaucgugaugugcgugugcagagacaacuggcacggcagcaacagacccugggugagcuucaaccagaaccuggacuaccagaucggcuacaucugcagcggcguguucggcgacaaccccagacccgaggacggcgagggcagcugcaaccccgugaccguggacggcgccaacggcgugaagggcuucagcuacaaguacggcaacggcguguggaucggcagaaccaagagcaacagacugagaaagggcuucgagaugaucugggaccccaacggcuggaccaacaccgacagcgacuucagcgugaagcaggacgugguggccaucaccgacuggagcggcuacagcggcagcuucgugcagcaccccgagcugaccggccuggacugcaucagacccugcuucuggguggagcuggugagaggccugcccagagagaacaccaccaucuggaccagcggcagcagcaucagcuucugcggcgugaacagcgacaccgccaacuggagcuggcccgacggcgccgagcugcccuucaccaucgacaaguga

SEQ ID NO: 179998 - RNA, 1413 nt, Artificial Sequence; identical to SEQ ID NO: 178990
  derived and/or modified CDS sequence (opt4) from neuraminidase__InfluenzaA__ADN89174

SEQ ID NO: 179999 - RNA, 1413 nt, Artificial Sequence; identical to SEQ ID NO: 179992
  derived and/or modified CDS sequence (opt4) from neuraminidase__InfluenzaA__ADN89185

SEQ ID NO: 180000 - RNA, 1413 nt, Artificial Sequence
  derived and/or modified CDS sequence (opt4) from neuraminidase__InfluenzaA__ADN89196
augaaccccaaccagaagaucaucaccaucggcagcaucagcaucgccaucggcaucaucagccugaugcugcagaucggcagcaucaucagcaucugggccagccacagcauccagaccggcagccagaacaacaccggcaucugcaaccagagaaucaucaccuacgagaacagcaccugggugaaccacaccuacgugaacaucaacaacaccaacgugguggccggcgaggacaagaccagcgugacccuggccggcaacagcagccugugcagcaucagcggcugggccaucuacaccaaggacaacagcaucagaaucggcagcaagggcgacguguucgugaucagagagcccuucaucagcugcagccaccuggagugcagaaccuucuuccugacccagggcgcccugcugaacgacaagcacagcaacggcaccgugaaggacagaagccccuacagagcccugaugagcugcccccugggcgaggcccccagccccuacaacagcaaguucgagagcguggccuggagcgccagcgccugccacgacggcaugggcuggcugaccaucggcaucagcggccccgacaacggcgccguggccgugcugaaguacaacggcaucaucaccggcaccaucaagagcuggaagaagcagauccugagaacccaggagagcgagugcgugugcaugaacggcagcugcuucaccaucaugaccgacggccccagcaacaaggccgccagcuacaagaucuucaagaucgagaagggcaaggugaccaagagcaucgagcugaacgcccccaacuucuacuacgaggagugcagcugcuaccccgacaccggcaucgugaugugcgugugcagagacaacuggcacggcagcaacagacccugggugagcuucaaccagaaccuggacuaccagaugggcuacaucugcagcggcguguucggcgacaaccccagacccgaggacggcgagggcagcugcaaccccgugaccguggacggcgccaacggcgugaagggcuucagcuacaaguacggcaacggcguguggaucggcagaaccaagagcaacagacugagaaagggcuucgagaugaucugggaccccaacggcuggaccaacaccgacagcgacuucagccugaagcaggacgugguggccaucaccgacuggagcggcuacagcggcagcuucgugcagcaccccgagcugaccggccuggacugcaucagacccugcuucuggguggagcuggugagaggccugcccagagagaacaccaccaucuggaccagcggcagcagcaucagcuucugcggcgugaacagcgacaccgccaacuggagcuggcccgacggcgccgagcugcccuucaccaucgacaaguga

SEQ ID NO: 180001 - RNA, 1413 nt, Artificial Sequence; identical to SEQ ID NO: 180000
  derived and/or modified CDS sequence (opt4) from neuraminidase__InfluenzaA__ADN89207

SEQ ID NO: 180002 - RNA, 1413 nt, Artificial Sequence
  derived and/or modified CDS sequence (opt4) from neuraminidase__InfluenzaA__ADN89218
augaaccccaaccagaagaucaucaccaucggcagcaucagcaucgccaucggcaucaucagccugaugcugcagaucggcaacaucaucagcaucugggccagccacagcauccagcccggcagccagaacaacaccggcaucugcaaccagagaaucaucaccuacgagaacagcaccugggugaaccacaccuacgugaacaucaacaacaccaacgugguggccggcgaggacaagaccagcgugacccuggccggcaacagcagccugugcagcaucagcggcugggccaucuacaccaaggacaacagcaucagaaucggcagcaagggcgacguguucgugaucagagagcccuucaucagcugcagccaccuggagugcagaaccuucuuccugacccagggcgcccugcugaacgacaagcacagcaacggcaccgugaaggacagaagccccuacagagcccugaugagcugcccccugggcgaggcccccagccccuacaacagcaaguucgagagcguggccuggagcgccagcgccugccacgacggcaugggcuggcugaccaucggcaucagcggccccgacaacggcgccguggccgugcugaaguacaacggcaucaucaccggcaccaucaagagcuggaagaagcagauccugagaacccaggagagcgagugcgugugcaugaacggcagcugcuucaccaucaugaccgacggccccagcaacaaggccgccagcuacaagaucuucaagaucgagaagggcaaggugaccaagagcaucgagcugaacgcccccaacuucuacuacgaggagugcagcugcuaccccgacaccggcaucgugaugugcgugugcagagacaacuggcacggcagcaacagacccugggugagcuucaaccagaaccuggacuaccagaucggcuacaucugcagcggcguguucggcgacaaccccagacccgaggacggcgagggcagcugcaaccccgugaccguggacggcgccaacggcgugaagggcuucagcuacaaguacggcaacggcguguggaucggcagaaccaagagcaacagacugagaaagggcuucgagaugaucugggaccccaacggcuggaccaacaccgacagcgacuucagcgugaagcaggacgugguggccaucaccgacuggagcggcuacagcggcagcuucgugcagcaccccgagcugaccggccuggacugcaucagacccugcuucuggguggagcuggugagaggccugcccagagagaacaccaccaucuggaccagcggcagcagcaucagcuucugcggcgugaacggcgacaccgccaacuggagcuggcccgacggcgccgagcugcccuucaccaucgacaaguga

SEQ ID NO: 180003 - RNA, 1413 nt, Artificial Sequence
  derived and/or modified CDS sequence (opt4) from neuraminidase__InfluenzaA__ADN89229
augaaccccaaccagaagaucaucaccaucggcagcaucagcaucgccaucggcaucaucagccugaugcugcagaucggcaacaucaucagcaucugggccagccacagcauccagaccggcagccagaacaacaccggcaucugcaaccagagaaucaucaccuacgagaacagcaccugggugaaccacaccuacgugaacaucaacaacaccaacgugguggccggcgaggacaagaccagcgugacccuggccggcaacagcagccugugcagcaucagcggcugggccaucuacaccaaggacaacagcaucagaaucggcagcaagggcgacguguucgugaucagagagcccuucaucagcugcagccaccuggagugcagaaccuucuuccugacccagggcgcccugcugaacgacaagcacagcaacggcaccgugaaggacagaagccccuacagagcccugaugagcugcccccugggcgaggcccccagccccuacaacagcaaguucgagagcguggccuggagcgccagcgccugccacgacggcaugggcuggcugaccaucggcaucagcggccccgacaacggcgccguggccgugcugaaguacaacggcaucaucaccggcaccaucaagagcuggaagaagcagauccugagaacccaggagagcgagugcgugugcaugaacggcagcugcuucaccaucaugaccgacggccccagcaacaaggccgccagcuacaagaucuucaagaucgagaagggcaaggugaccaagagcaucgagcugaacgcccccaacuucuacuacgaggagugcagcugcuaccccgacaccggcaucgugaugugcgugugcagagacaacuggcacggcagcaacagacccugggugagcuucaaccagaaccuggacuaccagaucggcuacaucugcagcggcguguucggcgacaaccccagacccgaggacggcgagggcagcugcaaccccgugaccguggacggcgccaacggcgugaagggcuucagcuacaaguacggcaacggcguguggaucggcagaaccaagagcaacagacugagaaagggcuucgagaugaucugggaccccaacggcuggaccaacaccgacagcgacuucagcgugaagcaggacgugguggccaccaccgacuggagcggcuacagcggcagcuucgugcagcaccccgagcugaccggccuggacugcaucagacccugcuucuggguggagcuggugagaggccugcccagagagaacaccaccaucuggaccagcggcagcagcaucagcuucugcggcgugaacagcgacaccgccaacuggagcuggcccgacggcgccgagcugcccuucaccaucgacaaguga

SEQ ID NO: 180004 - RNA, 1413 nt, Artificial Sequence
  derived and/or modified CDS sequence (opt4) from neuraminidase__InfluenzaA__ADN89240
augaaccccaaccagaagaucaucaccaucggcagcaucagcaucgccaucggcaucaucagccugaugcugcagaucggcaacaucaucagcaucugggccagccacagcauccagaccggcagccagaacaacaccggcaucugcaaccagagaaucaucaccuacgagaacagcaccugggugaaccacaccuacgugaacaucaacaacaccaacgugguggccggcgaggacaagaccagcgugacccuggccggcaacagcagccugugcagcaucagcggcugggccaucuacaccaaggacaacagcaucagaaucggcagcaagggcgacguguucgugaucagagagcccuucaucagcugcagccaccuggagugcagaaccuucuuccugacccagggcgcccugcugaacgacaagcacagcaacggcaccgugaaggacagaagccccuacagagcccugaugagcugcccccugggcgaggcccccagccccuacaacagcaaguucgagagcguggccuggagcgccagcgccugccacgacggcaugggcuggcugaccaucggcaucagcggccccgacaacggcgccguggccgugcugaaguacaacggcaucaucaccggcaccaucaagagcuggaagaagcagauccugagaacccaggagagcgagugcgugugcaugaacggcagcugcuucaccaucaugaccgacggccccagcaacaaggccgccagcuacaagaucuucaagaucgagaagggcaaggugaccaagagcaucgagcugaacgcccccaacuucuacuacgaggagugcagcugcuaccccgacaccggcaucgugaugugcgugugcagagacaacuggcacggcagcaacagacccugggugagcuucaaccagaaccuggacuaccagaucggcuacaucugcagcggcguguucggcgacaaccccagacccgaggacggcgagggcagcugcaaccccgugaccguggacggcgccaacggcgugaagggcuucagcuacaaguacggcaacggcguguggaucggcagaaccaagagcaacagacugagaaagggcuucgagaugaucugggaccccaacggcuggaccaacaccgacagcgacuucagcgugaagcaggacgugguggccaucaccgacuggagcggcuacagcggcagcuucgugcagcaccccgagcugaccggccuggacugcaucagacccugcuucuggguggagcuggugagaggccugcccagagagaacaccaccaucuggaccagcggcagcagcaucagcuucugcggcgugaacggcgacaccgccaacuggagcuggcccgacggcgccgagcugcccuucaccaucgacaaguga

SEQ ID NO: 180005 - RNA, 1413 nt, Artificial Sequence; identical to SEQ ID NO: 177521
  derived and/or modified CDS sequence (opt4) from neuraminidase__InfluenzaA__ADN89251

SEQ ID NO: 180006 - RNA, 1413 nt, Artificial Sequence; identical to SEQ ID NO: 177521
  derived and/or modified CDS sequence (opt4) from neuraminidase__InfluenzaA__ADN89262

SEQ ID NO: 180007 - RNA, 1413 nt, Artificial Sequence; identical to SEQ ID NO: 177521
  derived and/or modified CDS sequence (opt4) from neuraminidase__InfluenzaA__ADN89273

SEQ ID NO: 180008 - RNA, 1413 nt, Artificial Sequence; identical to SEQ ID NO: 177521
  derived and/or modified CDS sequence (opt4) from neuraminidase__InfluenzaA__ADN89284

SEQ ID NO: 180009 - RNA, 1413 nt, Artificial Sequence; identical to SEQ ID NO: 177521
  derived and/or modified CDS sequence (opt4) from neuraminidase__InfluenzaA__ADN89295

SEQ ID NO: 180010 - RNA, 1413 nt, Artificial Sequence; identical to SEQ ID NO: 177521
  derived and/or modified CDS sequence (opt4) from neuraminidase__InfluenzaA__ADN89306

SEQ ID NO: 180011 - RNA, 1413 nt, Artificial Sequence
  derived and/or modified CDS sequence (opt4) from neuraminidase__InfluenzaA__ADN89317
augaaccccaaccagagaaucaucaccaucggcagcaucagcaucgccaucggcaucaucagccugaugcugcagaucggcaacaucaucagcaucugggccagccacagcauccagaccggcagccagaacaacaccggcaucugcaaccagagaaucaucaccuacgagaacagcaccugggugaaccacaccuacgugaacaucaacagcaccaacgugguggccggcgaggacaagaccagcgugacccuggccggcaacagcagccugugcagcaucagcggcugggccaucuacaccaaggacaacagcaucagaaucggcagcaagggcgacguguucgugaucagagagcccuucaucagcugcagccaccuggagugcagaaccuucuuccugacccagggcgcccugcugaacgacaagcacagcaacggcaccgugaaggacagaagccccuacagagcccugaugagcugcccccugggcgaggcccccagccccuacaacagcaaguucgagagcguggccuggagcgccagcgccugccacgacggcaugggcuggcugaccaucggcaucagcggccccgacaacggcgccguggccgugcugaaguacaacggcaucaucaccggcaccaucaagagcuggaagaagcagauccugagaacccaggagagcgagugcgugugcaugaacggcagcugcuucaccaucaugaccgacggccccagcaacaaggccgccagcuacaagaucuucaagaucgagaagggcaaggugaccaagagcaucgagcugaacgcccccaacuucuacuacgaggagugcagcugcuaccccgacaccggcaucgugaugugcgugugcagagacaacuggcacggcagcaacagacccugggugagcuucaaccagaaccuggacuaccagaucggcuacaucugcagcggcguguucggcgacaaccccagacccgaggacggcgagggcagcugcaaccccgugaccguggacggcgccaacggcgugaagggcuucagcuacaaguacggcaacggcguguggaucggcagaaccaagagcaacagacugagaaagggcuucgagaugaucugggaccccaacggcuggaccaacaccgacagcgacuucagcgugaagcaggacgugguggccaucaccgacuggagcggcuacagcggcagcuucgugcagcaccccgagcugaccggccuggacugcaucagacccugcuucuggguggagcuggugagaggccugcccagagagaacaccaccaucuggaccagcggcagcagcaucagcuucugcggcgugaacggcgacaccgccaacuggagcuggcccgacggcgccgagcugcccuucaccaucgacaaguga

SEQ ID NO: 180012 - RNA, 1413 nt, Artificial Sequence
  derived and/or modified CDS sequence (opt4) from neuraminidase__InfluenzaA__ADN89328
augaaccccaaccagaagaucaucaccaucggcagcaucagcaucgccaucggcaucaucagccugaugcugcagaucggcagcaucaucagcaucugggccagccacagcauccagaccggcagccagaacaacaccggcaucugcaaccagagaaucaucaccuacgagaacagcaccugggugaaccacaccuacgugaacaucaacaacaccaacgugguggccggcgaggacaagaccagcgugacccuggccggcaacagcagccugugcagcaucagcggcugggccaucuacaccaaggacaacagcaucagaaucggcagcaagggcgacguguucgugaucagagagcccuucaucagcugcagccaccuggagugcagaaccuucuuccugacccagggcgcccugcugaacgacaagcacagcaacggcaccgugaaggacagaagccccuacagagcccugaugagcugcccccugggcgaggcccccagccccuacaacagcaaguucgagagcguggccuggagcgccagcgccugccacgacggcaugggcuggcugaccaucggcaucagcggccccgacaacggcgccguggccgugcugaaguacaacggcaucaucaccggcaccaucaagagcuggaagaagcagauccugagaacccaggagagcgagugcgugugcaugaacggcagcugcuucaccaucaugaccgacggccccagcaacaaggccgccagcuacaagaucuucaagaucgagaagggcaaggugaccaagagcaucgagcugaacgcccccaacuucuacuacgaggagugcagcugcuaccccgacaccggcaucgugaugugcgugugcagagacaacuggcacggcagcaacagacccugggugagcuucaaccagaaccuggacuaccagaucggcuacaucugcagcggcguguucggcgacaaccccagacccgaggacggcgagggcagcugcaaccccgugaccguggacggcgccaacggcgugaagggcuucagcuacaaguacggcaacggcguguggaucggcagaaccaagagcaacagacugagaaagggcuucgagaugaucugggaccccaacggcuggaccaacaccgacagcgacuucagcgugaagcaggacgugguggccaucaccgacuggagcggcuacagcggcagcuucgugcagcaccccgagcugaccggccuggacugcaucagacccugcuucuggguggagcuggugagaggccugcccagagagaacaccaccaucugggccagcggcagcagcaucagcuucugcggcgugaacagcgacaccgccaacuggagcuggcccgacggcgccgagcugcccuucaccaucgacaaguga

SEQ ID NO: 180013 - RNA, 1413 nt, Artificial Sequence; identical to SEQ ID NO: 179997
  derived and/or modified CDS sequence (opt4) from neuraminidase__InfluenzaA__ADN89339

SEQ ID NO: 180014 - RNA, 1413 nt, Artificial Sequence; identical to SEQ ID NO: 180003
  derived and/or modified CDS sequence (opt4) from neuraminidase__InfluenzaA__ADN89350

SEQ ID NO: 180015 - RNA, 1413 nt, Artificial Sequence
  derived and/or modified CDS sequence (opt4) from neuraminidase__InfluenzaA__ADN89361
augaaccccaaccagaagaucaucaccaucggcagcaucagcaucgccaucggcaucaucagccugaugcugcagaucggcagcaucaucagcaucugggccagccacagcauccagaccggcagccagaacaacaccggcaucugcaaccagagaaucaucaccuacgagaacagcaccugggugaaccacaccuacgugaacaucaacaacaccaacgugguggccggcgaggacaagaccagcgugacccuggccggcaacagcagccugugcagcaucagcggcugggccaucuacaccaaggacaacagcaucagaaucggcagcaagggcgacguguucaucaucagagagcccuucaucagcugcagccaccuggagugcagaaccuucuuccugacccagggcgcccugcugaacgacaagcacagcaacggcaccgugaaggacagaagccccuacagagcccugaugagcugcccccugggcgaggcccccagccccuacaacagcaaguucgagagcguggccuggagcgccagcgccugccacgacggcaugggcuggcugaccaucggcaucagcggccccgacaacggcgccguggccgugcugaaguacaacggcaucaucaccggcaccaucaagagcuggaagaagcagauccugagaacccaggagagcgagugcgugugcaugaacggcagcugcuucaccaucaugaccgacggccccagcaacaaggccgccagcuacaagaucuucaagaucgagaagggcaaggugaccaagagcaucgagcugaacgcccccaacuucuacuacgaggagugcagcugcuaccccgacaccggcaucgugaugugcgugugcagagacaacuggcacggcagcaacagacccugggugagcuucaaccagaaccuggacuaccagaucggcuacaucugcagcggcguguucggcgacaaccccagacccgaggacggcgagggcagcugcaaccccgugaccguggacggcgccaacggcgugaagggcuucagcuacaaguacggcaacggcguguggaucggcagaaccaagagcaacagacugagaaagggcuucgagaugaucugggaccccaacggcuggaccaacaccgacagcgacuucagcgugaagcaggacgugguggccaucaccgacuggagcggcuacagcggcagcuucgugcagcaccccgagcugaccggccuggacugcaucagacccugcuucuggguggagcuggugagaggccugcccagagagaacaccaccaucuggaccagcggcagcagcaucagcuucugcggcgugaacagcgacaccgccaacuggagcuggcccgacggcgccgagcugcccuucaccaucgacaaguga

SEQ ID NO: 180016 - RNA, 1413 nt, Artificial Sequence
  derived and/or modified CDS sequence (opt4) from neuraminidase__InfluenzaA__ADN89372
augaaccccaaccagaagaucaucaccaucggcagcaucagcaucgccaucggcaucaucagccugaugcugcagaucggcaacaucaucagcaucugggccagccacagcauccagaccggcagccagaacaacaccggcaucugcaaccagagaaucaucaccuacgagaacagcaccugggugaaccacaccuacgugaacaucaacaacaccaacaucguggccggcgaggacaagaccagcgugacccuggccggcaacagcagccugugcagcaucagcggcugggccaucuacaccaaggacaacagcaucagaaucggcagcaagggcgacguguucgugaucagagagcccuucaucagcugcagccaccuggagugcagaaccuucuuccugacccagggcgcccugcugaacgacaagcacagcaacggcaccgugaaggacagaagccccuacagagcccugaugagcugcccccugggcgaggcccccagccccuacaacagcaaguucgagagcguggccuggagcgccagcgccugccacgacggcaugggcuggcugaccaucggcaucagcggccccgacaacggcgccguggccgugcugaaguacaacggcaucaucaccggcaccaucaagagcuggaagaagcagauccugagaacccaggagagcgagugcgugugcaugaacggcagcugcuucaccaucaugaccgacggccccagcaacaaggccgccagcuacaagaucuucaagaucgagaagggcaaggugaccaagagcaucgagcugaacgcccccaacuucuacuacgaggagugcagcugcuaccccgacaccggcaucgugaugugcgugugcagagacaacuggcacggcagcaacagacccugggugagcuucaaccagaaccuggacuaccagaucggcuacaucugcagcggcguguucggcgacaaccccagacccgaggacggcgagggcagcugcaaccccgugaccgugaacggcgccgacggcgugaagggcuucagcuacaaguacggcaacggcguguggaucggcagaaccaagagcaacagacugagaaagggcuucgagaugaucugggaccccaacggcuggaccaacaccgacagcgacuucagcgugaagcaggacgugguggccaucaccgacuggagcggcuacagcggcagcuucgugcagcaccccgagcugaccggccuggacugcaucagacccugcuucuggguggagcuggugagaggccugcccagagagaacaccaccaucuggaccagcggcagcagcaucagcuucugcggcgugaacagcgacaccgccaacuggagcuggcccgacggcgccgagcugcccuucaccaucgacaaguga

SEQ ID NO: 180017 - RNA, 1413 nt, Artificial Sequence; identical to SEQ ID NO: 179992
  derived and/or modified CDS sequence (opt4) from neuraminidase__InfluenzaA__ADN89383

SEQ ID NO: 180018 - RNA, 1413 nt, Artificial Sequence
  derived and/or modified CDS sequence (opt4) from neuraminidase__InfluenzaA__ADN89405
augaaccccaaccagaagaucaucaccaucggcagcaucagcaucgccaucggcaucaucagccugaugcugcagaucggcagcaucaucagcaucugggccagccacagcauccagaccggcagccagaacaacaccggcaucugcaaccagagaaucaucaccuacgagaacagcaccugggugaaccacaccuacgugaacaucaacaacaccaacgugguggccggcgaggacaagaccagcgugacccuggccggcaacagcagccugugcagcaccagcggcugggccaucuacaccaaggacaacagcaucagaaucggcagcaagggcgacguguucgugaucagagagcccuucaucagcugcagccaccuggagugcagaaccuucuuccugacccagggcgcccugcugaacgacaagcacagcaacggcaccgugaaggacagaagccccuacagagcccugaugagcugcccccugggcgaggcccccagccccuacaacagcaaguucgagagcguggccuggagcgccagcgccugccacgacggcaugggcuggcugaccaucggcaucagcggccccgacaacggcgccguggccgugcugaaguacaacggcaucaucaccggcaccaucaagagcuggaagaagcagauccugagaacccaggagagcgagugcgugugcaugaacggcagcugcuucaccaucaugaccgacggccccagcaacaaggccgccagcuacaagaucuucaagaucgagaagggcaaggugaccaagagcaucgagcugaacgcccccaacuucuacuacgaggagugcagcugcuaccccgacaccggcaucgugaugugcgugugcagagacaacuggcacggcagcaacagacccugggugagcuucaaccagaaccuggacuaccagaucggcuacaucugcagcggcguguucggcgacaaccccagacccgaggacggcgagggcagcugcaaccccgugaccguggacggcgccaacggcgugaagggcuucagcuacaaguacggcaacggcguguggaucggcagaaccaagagcaacagacugagaaagggcuucgagaugaucugggaccccaacggcuggaccaacaccgacagcgacuucagcgugaagcaggacgugguggccaucaccgacuggagcggcuacagcggcagcuucgugcagcaccccgagcugaccggccuggacugcaucagacccugcuucuggguggagcuggugagaggccugcccagagagaacaccaccaucuggaccagcggcagcagcaucagcuucugcggcgugaacagcgacaccgccaacuggagcuggcccgacggcgccgagcugcccuucaccaucgacaaguga

SEQ ID NO: 180019 - RNA, 1413 nt, Artificial Sequence
  derived and/or modified CDS sequence (opt4) from neuraminidase__InfluenzaA__ADN89416
augaaccccaaccagaagaucaucaccaucggcagcaucagcaucgccaucggcaucaucagccugaugcugcagaucggcaacaucaucagcaucugggccagccacagcauccagaccggcagccagaacaacaccggcaucugcaaccagagaaucaucaccuacgagaacagcaccugggugaaccacaccuacgugaacaucaacaacaccaacgugguggccggcgaggacaagaccagcgugacccuggccggcaacagcagccugugcagcaucagcggcugggccaucuacaccaaggacaacagcaucagaaucggcagcaagggcgacguguucgugaucagagagcccuucaucagcugcagccaccuggagugcagaaccuucuuccugacccagggcgcccugcugaacgacaagcacagcaacggcaccgugaaggacagaagccccuacagagcccugaugagcugcccccugggcgaggcccccagccccuacaacagcaaguucgagagcguggccuggagcgccagcgccugccacgacggcaugggcuggcugaccaucggcaucagcggccccgacaacggcgccguggccgugcugaaguacaacggcaucaucaccggcaccaucaagagcuggaagaagcagauccugagaacccaggagagcgagugcgugugcaugaacggcagcugcuucaccaucaugaccgacggccccagcaacaaggccgccagcuacaagaucuucaagaucgagaagggcaaggugaccaagagcaucgagcugaacgcccccaacuucuacuacgaggagugcagcugcuaccccgacaccggcaucgugaugugcgugugcagagacaacuggcacggcagcaacagacccugggugagcuucaaccagaaccuggacuaccagaucggcuacaucugcagcggcgugcugggcgacaaccccagacccgaggacggcgagggcagcugcaaccccgugaccguggacggcgccaacggcgugaagggcuucagcuacaaguacggcaacggcguguggaucggcagaaccaagagcaacagacugagaaagggcuucgagaugaucugggaccccaacggcuggaccaacaccgacagcgacuucagcgugaagcaggacgugguggccaucaccgacuggagcggcuacagcggcagcuucgugcagcaccccgagcugaccggccuggacugcaucagacccugcuucuggguggagcuggugagaggccugcccagagagaacaccaccaucuggaccagcggcagcagcaucagcuucugcggcgugaacggcgacaccgccaacuggagcuggcccgacggcgccgagcugcccuucaccaucgacaaguga

SEQ ID NO: 180020 - RNA, 1413 nt, Artificial Sequence
  derived and/or modified CDS sequence (opt4) from neuraminidase__InfluenzaA__ADN89427
augaaccccaaccagaagaucaucaccaucggcagcaucagcaucgccaucggcaucaucagccugaugcugcagaucggcagcaucaucagcaucugggccagccacagcauccagaccggcagccagaacaacaccggcaucugcaaccagagaaucaucaccuacgagaacagcaccugggugaaccacaccuacgugaacaucaacaacaccaacgugguggccggcgaggacaagaccagcgugacccuggccggcaacagcagccugugcagcaucagcggcugggccaucuacaccaaggacaacagcaucagaaucggcagcaagggcgacguguucgugaucagagagcccuucaucagcugcagccaccuggagugcagaaccuucuuccugacccagggcgcccugcugaacgacaagcacagcaacggcaccgugaaggacagaagccccuacagagcccugaugagcugcccccugggcgaggcccccagccccuacaacagcaaguucgagagcguggccuggagcgccagcgccugccacgacggcaugggcuggcugaccaucggcaucagcggccccgacaacggcgccguggccgugcugaaguacaacggcaucaucaccggcaccaucaagagcuggaagaagcagauccugagaacccaggagagcgagugcgugugcaugaacggcagcugcuucaccaucaugaccgacggccccagcaacaaggccgccagcuacaagaucuucaagaucgagaagggcaaggugaccaagagcaucgagcugaacgcccccaacuucuacuacgaggagugcagcugcuaccccgacaccggcaucgugaugugcgugugcagagacaacuggcacggcagcaacagacccugggugagcuucaaccagaaccuggacuaccagaucggcuacaucugcagcggcguguucggcgacaaccccagacccgaggacggcgagggcagcugcaaccccgugaccguggacggcgccaacggcgugaagggcuucagcuacaaguacggcaacggcguguggaucggcagaaccaagagcaacagacugagaaagggcuucgagaugaucugggaccccaacggcuggaccaacaccgacagcgacuucagcgugaagcaggacgugguggccaucaccgacuggagcggcuacagcggcagcuucgugcagcaccccgagcugaccggccuggacugcaucagacccugcuucuggguggagcuggugagaggccugcccagagagaacaccaccaucuggaccagcggcagcagcaucagcuucugcggcguggacagcgacgccgccgacuggagcuggcccgacggcgccgagcugcccuucaccaucgacaaguga

SEQ ID NO: 180021 - RNA, 1413 nt, Artificial Sequence; identical to SEQ ID NO: 177521
  derived and/or modified CDS sequence (opt4) from neuraminidase__InfluenzaA__ADN89438

SEQ ID NO: 180022 - RNA, 1413 nt, Artificial Sequence
  derived and/or modified CDS sequence (opt4) from neuraminidase__InfluenzaA__ADN89449
augaaccccaaccagaagaucaucaccaucggcagcaucagcaucgccaucggcaucaucagccugaugcugcagaucggcaacaucaucagcaucugggccagccacagcauccagaccggcagccagaacaacaccggcaucugcaaccagagaaucaucaccuacgagaacagcaccugggugaaccacaccuacgugaacaucaacaacaccaacgugguggccggcgaggacaagcccagcgugacccuggccggcaacagcagccugugcagcaucagcggcugggccaucuacaccaaggacaacagcaucagaaucggcagcaagggcgacguguucgugaucagagagcccuucaucagcugcagccaccuggagugcagaaccuucuuccugacccagggcgcccugcugaacgacaagcacagcaacggcaccgugaaggacagaagccccuacagagcccugaugagcugcccccugggcgaggcccccagccccuacaacagcaaguucgagagcguggccuggagcgccagcgccugccacgacggcaugggcuggcugaccaucggcaucagcggccccgacaacggcgccguggccgugcugaaguacaacggcaucaucaccggcaccaucaagagcuggaagaagcagauccugagaacccaggagagcgagugcgugugcaugaacggcagcugcuucaccaucaugaccgacggccccagcaacaaggccgccagcuacaagaucuucaagaucgagaagggcaaggugaccaagagcaucgagcugaacgcccccaacuucuacuacgaggagugcagcugcuaccccgacaccggcaucgugaugugcgugugcagagacaacuggcacggcagcaacagacccugggugagcuucaaccagaaccuggacuaccagaucggcuacaucugcagcggcguguucggcgacaaccccagacccgaggacggcgagggcagcugcaaccccgugaccguggacggcgccaacggcgugaagggcuucagcuacaaguacggcaacggcguguggaucggcagaaccaagagcaacagacugagaaagggcuucgagaugaucugggaccccaacggcuggaccaacaccgacagcgacuucagcgugaagcaggacgugguggccaucaccgacuggagcggcuacagcggcagcuucgugcagcaccccgagcugaccggccuggacugcaucagacccugcuucuggguggagcuggugagaggccugcccagagagaacaccaccaucuggaccagcggcagcagcaucagcuucugcggcgugaacagcgacaccgccaacuggagcuggcccgacggcgccgagcugcccuucaccaucgacaaguga

SEQ ID NO: 180023 - RNA, 1413 nt, Artificial Sequence; identical to SEQ ID NO: 178990
  derived and/or modified CDS sequence (opt4) from neuraminidase__InfluenzaA__ADN89460

SEQ ID NO: 180024 - RNA, 1413 nt, Artificial Sequence; identical to SEQ ID NO: 177521
  derived and/or modified CDS sequence (opt4) from neuraminidase__InfluenzaA__ADN89482

SEQ ID NO: 180025 - RNA, 1413 nt, Artificial Sequence
  derived and/or modified CDS sequence (opt4) from neuraminidase__InfluenzaA__ADN89493
augaaccccaaccagaagaucaucaccaucggcagcaucagcaucgccaucggcaucaucagccugaugcugcagaucggcaacaucaucagcaucugggccagccacagcauccagaccgagagccagaacaacaccggcaucugcaaccagagaaucaucaccuacgagaacagcaccugggugaaccacaccuacgugaacaucaacaacaccaacgugguggccggcgaggacaagaccagcgugacccuggccggcaacagcagccugugcagcaucagcggcugggccaucuacaccaaggacaacagcaucagaaucggcagcaagggcgacguguucgugaucagagagcccuucaucagcugcagccaccuggagugcagaaccuucuuccugacccagggcgcccugcugaacgacaagcacagcaacggcaccgugaaggacagaagccccuacagagcccugaugagcugcccccugggcgaggcccccagccccuacaacagcaaguucgagagcguggccuggagcgccagcgccugccacgacggcaugggcuggcugaccaucggcaucagcggccccgacaacggcgccguggccgugcugaaguacaacggcaucaucaccggcaccaucaagagcuggaagaagcagauccugagaacccaggagagcgagugcgugugcaugaacggcagcugcuucaccaucaugaccgacggccccagcaacaaggccgccagcuacaagaucuucaagaucgagaagggcaaggugaccaagagcaucgagcugaacgcccccaacuucuacuacgaggagugcagcugcuaccccgacaccggcaucgugaugugcgugugcagagacaacuggcacggcagcaacagacccugggugagcuucaaccagaaccuggacuaccagaugggcuacaucugcagcggcguguucggcgacaaccccagacccgaggacggcgagggcagcugcaaccccgugaccguggacggcgccaacggcgugaagggcuucagcuacaaguacggcaacggcguguggaucggcagaaccaagagcaacagacugagaaagggcuucgagaugaucugggaccccaacggcuggaccaacaccgacagcgacuucagcgugaagcaggacgugguggccaucaccgacuggagcggcuacagcggcagcuucgugcagcaccccgagcugaccggccuggacugcaucagacccugcuucuggguggagcuggugagaggccugcccagagagaacaccaccaucuggaccagcggcagcagcaucagcuucugcggcgugaacagcgacaccgccaacuggagcuggcccgacggcgccgagcugcccuucaccaucgacaaguga

SEQ ID NO: 180026 - RNA, 1413 nt, Artificial Sequence; identical to SEQ ID NO: 177521
  derived and/or modified CDS sequence (opt4) from neuraminidase__InfluenzaA__ADN89504

SEQ ID NO: 180027 - RNA, 1413 nt, Artificial Sequence
  derived and/or modified CDS sequence (opt4) from neuraminidase__InfluenzaA__ADN89515
augaaccccaaccagaagaucaucaccaucggcagcaucagcaucgccaucggcaucaucagccugaugcugcagaucggcaacaucaucagcaucugggccagccacagcauccagaccggcagccagaacaacaccggcaucugcaaccagagaaucaucaccuacgagaacagcaccugggugaaccacaccuacgugaacaucaacaacaccaacgugguggccggcgaggacaagaccagcgugacccuggccggcaacagcagccugugcagcaucagcggcugggccaucuacaccaaggacaacagcaucagaaucggcagcaagggcgacguguucgugaucagagagcccuucaucagcugcagccaccuggagugcagaaccuucuuccugacccagggcgcccugcugaacgacaagcacagcaacggcaccgugaaggacagaagccccuacagagcccugaugagcugcccccugggcgaggcccccagccccuacaacagcaaguucgagagcguggccuggagcgccagcgccugccacgacggcaugggcuggcugaccaucggcaucagcggccccgacaacggcgccguggccgugcugaaguacaacggcaucaucaccggcaccaucaagagcuggaagaagcagauccugagaacccaggagagcgagugcgugugcaugaacggcagcugcuucaccaucaugaccgacggccccagcaacaaggccgccagcuacaagaucuucaagaucgagaagggcaaggugaccaagagcaucgagcugaacgcccccaacuucuacuacgaggagugcagcugcuaccccgacaccggcaucgugaugugcgugugcagagacaacuggcacggcagcaacagacccugggugagcuucaaccagaaccuggacuaccagaucggcuacaucugcagcggcguguucggcgacaaccccagacccgaggacggcgagggcagcugcaaccccgugaccguggacggcgccaacggcgugaagggcuucagcuacaaguacggcaacggcguguggaucggcagaaccaagagcaacagacugagaaagggcuucgagaugaucugggaccccaacggcuggaccaacaccgacagcgacuucaccgugaagcaggacgugguggccaucaccgacuggagcggcuacagcggcagcuucgugcagcaccccgagcugaccggccuggacugcaucagacccugcuucuggguggagcuggugagaggccugcccagagagaacaccaccaucuggaccagcggcagcagcaucagcuucugcggcgugaacagcgacaccgccaacuggagcuggcccgacggcgccgagcugcccuucaccaucgacaaguga

SEQ ID NO: 180028 - RNA, 1413 nt, Artificial Sequence; identical to SEQ ID NO: 177521
  derived and/or modified CDS sequence (opt4) from neuraminidase__InfluenzaA__ADN89526

SEQ ID NO: 180029 - RNA, 1413 nt, Artificial Sequence; identical to SEQ ID NO: 179992
  derived and/or modified CDS sequence (opt4) from neuraminidase__InfluenzaA__ADN89537

SEQ ID NO: 180030 - RNA, 1413 nt, Artificial Sequence; identical to SEQ ID NO: 177521
  derived and/or modified CDS sequence (opt4) from neuraminidase__InfluenzaA__ADN89548

SEQ ID NO: 180031 - RNA, 1413 nt, Artificial Sequence; identical to SEQ ID NO: 177521
  derived and/or modified CDS sequence (opt4) from neuraminidase__InfluenzaA__ADN89570

SEQ ID NO: 180032 - RNA, 1413 nt, Artificial Sequence
  derived and/or modified CDS sequence (opt4) from neuraminidase__InfluenzaA__ADN89581
augaaccccaaccagaagaucaucaccaucggcagcaucagcaucgccaucggcaucaucagccugaugcugcagaucggcaacaucaucagcaucugggccagccacagcauccagaccggcagccagaacaacaccggcaucugcaaccagagaaucaucaccuacgagaacagcaccugggugaaccacaccuacgugaacaucaacaacaccaacgugguggccggcgaggacaagaccagcgugacccuggccggcaacagcagccugugcagcaucagcggcugggccaucuacaccaaggacaacagcaucagaaucggcagcaagggcgacguguucgugaucagagagcccuucaucagcugcagccaccuggagugcagaaccuucuuccugacccagggcgcccugcugaacgacaagcacagcaacggcaccgugaaggacagaagccccuacagagcccugaugagcugcccccugggcgaggcccccagccccuacaacagcaaguucgagagcguggccuggagcgccagcgccugccacgacggcaugggcuggcugaccaucggcaucagcggccccgacaacggcgccguggccgugcugaaguacaacggcaucaucaccggcaccaucaagagcuggaagaagcagauccugagaacccaggagagcgagugcgugugcaugaacggcagcugcuucaccaucaugaccgacggccccagcaacaagaccgccagcuacaagaucuucaagaucgagaagggcaaggugaccaagagcaucgagcugaacgcccccaacuucuacuacgaggagugcagcugcuaccccgacaccggcaucgugaugugcgugugcagagacaacuggcacggcagcaacagacccugggugagcuucaaccagaaccuggacuaccagaucggcuacaucugcagcggcguguucggcgacaaccccagacccgaggacggcgagggcagcugcaaccccgugaccguggacggcgccaacggcgugaagggcuucagcuacaaguacggcaacggcguguggaucggcagaaccaagagcaacagacugagaaagggcuucgagaugaucugggaccccaacggcuggaccaacaccgacagcgacuucagcgugaagcaggacgugguggccaucaccgacuggagcggcuacagcggcagcuucgugcagcaccccgagcugaccggccuggacugcaucagacccugcuucuggguggagcuggugagaggccugcccagagagaacaccaccaucuggaccagcggcagcagcaucagcuucugcggcgugaacggcgacaccgccaacuggagcuggcccgacggcgccgagcugcccuucaccaucgacaaguga

SEQ ID NO: 180033 - RNA, 1413 nt, Artificial Sequence; identical to SEQ ID NO: 178990
  derived and/or modified CDS sequence (opt4) from neuraminidase__InfluenzaA__ADN89592

SEQ ID NO: 180034 - RNA, 1413 nt, Artificial Sequence; identical to SEQ ID NO: 178990
  derived and/or modified CDS sequence (opt4) from neuraminidase__InfluenzaA__ADN89603

SEQ ID NO: 180035 - RNA, 1413 nt, Artificial Sequence; identical to SEQ ID NO: 180000
  derived and/or modified CDS sequence (opt4) from neuraminidase__InfluenzaA__ADN89614

SEQ ID NO: 180036 - RNA, 1413 nt, Artificial Sequence; identical to SEQ ID NO: 180019
  derived and/or modified CDS sequence (opt4) from neuraminidase__InfluenzaA__ADN89625

SEQ ID NO: 180037 - RNA, 1413 nt, Artificial Sequence; identical to SEQ ID NO: 177521
  derived and/or modified CDS sequence (opt4) from neuraminidase__InfluenzaA__ADN89636

SEQ ID NO: 180038 - RNA, 1413 nt, Artificial Sequence; identical to SEQ ID NO: 177521
  derived and/or modified CDS sequence (opt4) from neuraminidase__InfluenzaA__ADN89647

SEQ ID NO: 180039 - RNA, 1413 nt, Artificial Sequence; identical to SEQ ID NO: 177521
  derived and/or modified CDS sequence (opt4) from neuraminidase__InfluenzaA__ADN89658

SEQ ID NO: 180040 - RNA, 1413 nt, Artificial Sequence; identical to SEQ ID NO: 178990
  derived and/or modified CDS sequence (opt4) from neuraminidase__InfluenzaA__ADN89669

SEQ ID NO: 180041 - RNA, 1413 nt, Artificial Sequence; identical to SEQ ID NO: 177521
  derived and/or modified CDS sequence (opt4) from neuraminidase__InfluenzaA__ADN89680

SEQ ID NO: 180042 - RNA, 1413 nt, Artificial Sequence; identical to SEQ ID NO: 177521
  derived and/or modified CDS sequence (opt4) from neuraminidase__InfluenzaA__ADN89691

SEQ ID NO: 180043 - RNA, 1413 nt, Artificial Sequence; identical to SEQ ID NO: 180019
  derived and/or modified CDS sequence (opt4) from neuraminidase__InfluenzaA__ADN89702

SEQ ID NO: 180044 - RNA, 1413 nt, Artificial Sequence; identical to SEQ ID NO: 177521
  derived and/or modified CDS sequence (opt4) from neuraminidase__InfluenzaA__ADN89713

SEQ ID NO: 180045 - RNA, 1413 nt, Artificial Sequence; identical to SEQ ID NO: 177521
  derived and/or modified CDS sequence (opt4) from neuraminidase__InfluenzaA__ADN89724

SEQ ID NO: 180046 - RNA, 1413 nt, Artificial Sequence; identical to SEQ ID NO: 177521
  derived and/or modified CDS sequence (opt4) from neuraminidase__InfluenzaA__ADN89735

SEQ ID NO: 180047 - RNA, 1413 nt, Artificial Sequence; identical to SEQ ID NO: 177521
  derived and/or modified CDS sequence (opt4) from neuraminidase__InfluenzaA__ADN89746

SEQ ID NO: 180048 - RNA, 1413 nt, Artificial Sequence; identical to SEQ ID NO: 177521
  derived and/or modified CDS sequence (opt4) from neuraminidase__InfluenzaA__ADN89757

SEQ ID NO: 180049 - RNA, 1413 nt, Artificial Sequence; identical to SEQ ID NO: 177521
  derived and/or modified CDS sequence (opt4) from neuraminidase__InfluenzaA__ADN89768

SEQ ID NO: 180050 - RNA, 1413 nt, Artificial Sequence; identical to SEQ ID NO: 179996
  derived and/or modified CDS sequence (opt4) from neuraminidase__InfluenzaA__ADN89779

SEQ ID NO: 180051 - RNA, 1413 nt, Artificial Sequence; identical to SEQ ID NO: 177521
  derived and/or modified CDS sequence (opt4) from neuraminidase__InfluenzaA__ADN89790

SEQ ID NO: 180052 - RNA, 1413 nt, Artificial Sequence
  derived and/or modified CDS sequence (opt4) from neuraminidase__InfluenzaA__ADN89801
augaaccccaaccagaagaucaucaccaucggcagcaucagcaucgccaucggcaccaucagccugaugcugcagaucggcaacaucaucagcaucugggccagccacagcauccagaccggcagccagaacaacaccggcaucugcaaccagagaaucaucaccuacaagaacagcaccugggugaaccacaccuacgugaacaucaacaacaccaacgugguggccggcgaggacaagaccagcgugacccuggccggcaacagcagccugugcagcaucagcggcugggccaucuacaccaaggacaacagcaucagaaucggcagcaagggcgacguguucgugaucagagagcccuucaucagcugcagccaccuggagugcagaaccuucuuccugacccagggcgcccugcugaacgacaagcacagcaacggcaccgugaaggacagaagccccuacagagcccugaugagcugcccccugggcgaggcccccagccccuacaacagcaaguucgagagcguggccuggagcgccagcgccugccacgacggcaugggcuggcugaccaucggcaucagcggccccgacaacggcgccguggccgugcugaaguacaacggcaucaucaccggcaccaucaagagcuggaagaagcagauccugagaacccaggagagcgagugcgugugcaugaacggcagcugcuucaccaucaugaccgacggccccagcaacaaggccgccagcuacaagaucuucaagaucgagaagggcaaggugaccaagagcaucgagcugaacgcccccaacuucuacuacgaggagugcagcugcuaccccgacaccggcaucgugaugugcgugugcagagacaacuggcacggcagcaacagacccugggugagcuucaaccagaaccuggacuaccagaucggcuacaucugcagcggcguguucggcgacaaccccagacccgaggacggcgagggcagcugcaaccccgugaccguggacggcgccaacggcgugaagggcuucagcuacaaguacggcaacggcguguggaucggcagaaccaagagcaacagacugagaaagggcuucgagaugaucugggaccccaacggcuggaccaacaccgacagcgacuucagcgugaagcaggacgugguggccaucaccgacuggagcggcuacagcggcagcuucgugcagcaccccgagcugaccggccuggacugcaucagacccugcuucuggguggagcuggugagaggccugcccagagagaacaccaccaucuggaccagcggcagcagcaucagcuucugcggcgugaacagcgacaccgccaacuggagcuggcccgacggcgccgagcugcccuucaccaucgacaaguga

SEQ ID NO: 180053 - RNA, 1413 nt, Artificial Sequence
  derived and/or modified CDS sequence (opt4) from neuraminidase__InfluenzaA__ADN89823
augaaccccaaccagaagaucaucaccaucggcagcaucagcaucgccaucggcaucaucagccugaugcugcagaucggcagcaucaucagcaucugggccagccacagcauccacaccggcagccagaacaacaccggcaucugcaaccagagaaucaucaccuacgagaacagcaccugggugaaccacaccuacgugaacaucaacaacaccaacgugguggccggcgaggacaagaccagcgugacccuggccggcaacagcagccugugcagcaucagcggcugggccaucuacaccaaggacaacagcaucagaaucggcagcaagggcgacguguucgugaucagagagcccuucaucagcugcagccaccuggagugcagaaccuucuuccugacccagggcgcccugcugaacgacaagcacagcaacggcaccgugaaggacagaagccccuacagagcccugaugagcugcccccugggcgaggcccccagccccuacaacagcaaguucgagagcguggccuggagcgccagcgccugccacgacggcaugggcuggcugaccaucggcaucagcggccccgacaacggcgccguggccgugcugaaguacaacggcaucaucaccggcaccaucaagagcuggaagaagcagauccugagaacccaggagagcgagugcgugugcaugaacggcagcugcuucaccaucaugaccgacggccccagcaacaaggccgccagcuacaagaucuucaagaucgagaagggcaaggugaccaagagcaucgagcugaacgcccccaacuucuacuacgaggagugcagcugcuaccccgacaccggcaucgugaugugcgugugcagagacaacuggcacggcagcaacagacccugggugagcuucaaccagaaccuggacuaccagaucggcuacaucugcagcggcguguucggcgacaaccccagacccgaggacggcgagggcagcugcaaccccgugaccguggacggcgccaacggcgugaagggcuucagcuacaaguacggcaacggcguguggaucggcagaaccaagagcaacagacugagaaagggcuucgagaugaucugggaccccaacggcuggaccaacaccgacagcgacuucagcgugaagcaggacgugguggccaucaccgacuggagcggcuacagcggcagcuucgugcagcaccccgagcugaccggccuggacugcaucagacccugcuucuggguggagcuggugagaggccugcccagagagaacaccaccaucuggaccagcggcagcagcaucagcuucugcggcgugaacagcgacaccgccaacuggagcuggcccgacggcgccgagcugcccuucaccaucgacaaguga

SEQ ID NO: 180054 - RNA, 1413 nt, Artificial Sequence; identical to SEQ ID NO: 178990
  derived and/or modified CDS sequence (opt4) from neuraminidase__InfluenzaA__ADN89834

SEQ ID NO: 180055 - RNA, 1413 nt, Artificial Sequence; identical to SEQ ID NO: 179992
  derived and/or modified CDS sequence (opt4) from neuraminidase__InfluenzaA__ADN89845

SEQ ID NO: 180056 - RNA, 1413 nt, Artificial Sequence; identical to SEQ ID NO: 177521
  derived and/or modified CDS sequence (opt4) from neuraminidase__InfluenzaA__ADN89856

SEQ ID NO: 180057 - RNA, 1410 nt, Artificial Sequence; identical to SEQ ID NO: 179470
  derived and/or modified CDS sequence (opt4) from neuraminidase__InfluenzaA__ADN89867

SEQ ID NO: 180058 - RNA, 1410 nt, Artificial Sequence; identical to SEQ ID NO: 179470
  derived and/or modified CDS sequence (opt4) from neuraminidase__InfluenzaA__ADN89878

SEQ ID NO: 180059 - RNA, 1410 nt, Artificial Sequence; identical to SEQ ID NO: 179470
  derived and/or modified CDS sequence (opt4) from neuraminidase__InfluenzaA__ADN89889

SEQ ID NO: 180060 - RNA, 1410 nt, Artificial Sequence; identical to SEQ ID NO: 179470
  derived and/or modified CDS sequence (opt4) from neuraminidase__InfluenzaA__ADN89900

SEQ ID NO: 180061 - RNA, 1410 nt, Artificial Sequence; identical to SEQ ID NO: 179470
  derived and/or modified CDS sequence (opt4) from neuraminidase__InfluenzaA__ADN89911

SEQ ID NO: 180062 - RNA, 1410 nt, Artificial Sequence
  derived and/or modified CDS sequence (opt4) from neuraminidase__InfluenzaA__ADN89922
augaaccccaaccagaagaucaucaccaucggcagcgugagccugaccaucagcaccaucugcuucuucaugcagaucgccauccugaucaccaccgugacccugcacuucaagcaguacaaguucaacagcccccccaacaaccaggugaugcugugcgagcccaccaucaucgagagaaacaucaccgagaucguguaccugaccaacaccaccaucgagaaggagaucugccccaagcuggccgaguacagaaacuggagcaagccccagugcgacaucaccggcuucgcccccuucagcaaggacaacagcaucagacugagcgccggcggcgacaucugggugaccagagagcccuacgugagcugcgaccccgacaagugcuaccaguucgcccugggccagggcaccacccugaacaacgugcacagcaacaacaccgugagagacagaacccccuacagaacccugcugaugaacgagcugggcgugcccuuccaccugggcaccaagcaggugugcaucgccuggagcagcagcagcugccacgacggcaaggccuggcugcacgugugcaucaccggcgacgacaagaacgccaccgccagcuucaucuacaacggcagacugguggacagcguggugagcuggagcaaggagauccugagaacccaggagagcgagugcgugugcaucaacggcaccugcaccguggugaugaccgacggcagcgccagcggcaaggccgacaccaagauccuguucaucgaggagggcaagaucgugcacaccagcacccugagcggcagcgcccagcacguggaggagugcagcugcuaccccagauaccccggcgugagaugcgugugcagagacaacuggaagggcagcaacagacccaucguggacaucaacaucaaggaccacagcaucgugagcagcuacgugugcagcggccuggugggcgacacccccagaaagaacgacagcagcagcagcagccacugccuggaccccaacaacgaggagggcggccacggcgugaagggcugggccuucgacgacggcaacgacguguggaugggcagaaccaucaacgagaccagcagacugggcuacgagaccuucaaggugaucgagggcuggagcaaccccaagagcaagcugcagaucaacagacaggugaucguggacagaggcaacagaagcggcuacagcggcaucuucagcguggagggcaagagcugcaucaacagaugcuucuacguggagcugaucagaggcagaaaggaggagaccgaggugcuguggaccagcaacagcaucgugguguucugcggcaccagcggcaccuacggcaccggcagcuggcccgacggcgccgaccugaacaucaugcccaucuga

SEQ ID NO: 180063 - RNA, 1410 nt, Artificial Sequence; identical to SEQ ID NO: 179470
  derived and/or modified CDS sequence (opt4) from neuraminidase__InfluenzaA__ADN89933

SEQ ID NO: 180064 - RNA, 1410 nt, Artificial Sequence; identical to SEQ ID NO: 179470
  derived and/or modified CDS sequence (opt4) from neuraminidase__InfluenzaA__ADN89955

SEQ ID NO: 180065 - RNA, 1410 nt, Artificial Sequence; identical to SEQ ID NO: 179470
  derived and/or modified CDS sequence (opt4) from neuraminidase__InfluenzaA__ADN89966

SEQ ID NO: 180066 - RNA, 1410 nt, Artificial Sequence; identical to SEQ ID NO: 179470
  derived and/or modified CDS sequence (opt4) from neuraminidase__InfluenzaA__ADN89977

SEQ ID NO: 180067 - RNA, 1410 nt, Artificial Sequence; identical to SEQ ID NO: 179470
  derived and/or modified CDS sequence (opt4) from neuraminidase__InfluenzaA__ADN89988

SEQ ID NO: 180068 - RNA, 1410 nt, Artificial Sequence; identical to SEQ ID NO: 179470
  derived and/or modified CDS sequence (opt4) from neuraminidase__InfluenzaA__ADN89999

SEQ ID NO: 180069 - RNA, 1410 nt, Artificial Sequence; identical to SEQ ID NO: 179470
  derived and/or modified CDS sequence (opt4) from neuraminidase__InfluenzaA__ADN90010

SEQ ID NO: 180070 - RNA, 1410 nt, Artificial Sequence; identical to SEQ ID NO: 179470
  derived and/or modified CDS sequence (opt4) from neuraminidase__InfluenzaA__ADN90021

SEQ ID NO: 180071 - RNA, 1410 nt, Artificial Sequence; identical to SEQ ID NO: 179470
  derived and/or modified CDS sequence (opt4) from neuraminidase__InfluenzaA__ADN90032

SEQ ID NO: 180072 - RNA, 1410 nt, Artificial Sequence; identical to SEQ ID NO: 179470
  derived and/or modified CDS sequence (opt4) from neuraminidase__InfluenzaA__ADN90043

SEQ ID NO: 180073 - RNA, 1410 nt, Artificial Sequence; identical to SEQ ID NO: 179470
  derived and/or modified CDS sequence (opt4) from neuraminidase__InfluenzaA__ADN90054

SEQ ID NO: 180074 - RNA, 1410 nt, Artificial Sequence; identical to SEQ ID NO: 179470
  derived and/or modified CDS sequence (opt4) from neuraminidase__InfluenzaA__ADN90065

SEQ ID NO: 180075 - RNA, 1410 nt, Artificial Sequence; identical to SEQ ID NO: 179470
  derived and/or modified CDS sequence (opt4) from neuraminidase__InfluenzaA__ADN90076

SEQ ID NO: 180076 - RNA, 1410 nt, Artificial Sequence; identical to SEQ ID NO: 179470
  derived and/or modified CDS sequence (opt4) from neuraminidase__InfluenzaA__ADN90087

SEQ ID NO: 180077 - RNA, 1410 nt, Artificial Sequence; identical to SEQ ID NO: 179470
  derived and/or modified CDS sequence (opt4) from neuraminidase__InfluenzaA__ADN90098

SEQ ID NO: 180078 - RNA, 1410 nt, Artificial Sequence; identical to SEQ ID NO: 179470
  derived and/or modified CDS sequence (opt4) from neuraminidase__InfluenzaA__ADN90109

SEQ ID NO: 180079 - RNA, 1410 nt, Artificial Sequence; identical to SEQ ID NO: 179470
  derived and/or modified CDS sequence (opt4) from neuraminidase__InfluenzaA__ADN90120

SEQ ID NO: 180080 - RNA, 1410 nt, Artificial Sequence; identical to SEQ ID NO: 179470
  derived and/or modified CDS sequence (opt4) from neuraminidase__InfluenzaA__ADN90131

SEQ ID NO: 180081 - RNA, 1410 nt, Artificial Sequence; identical to SEQ ID NO: 179470
  derived and/or modified CDS sequence (opt4) from neuraminidase__InfluenzaA__ADN90142

SEQ ID NO: 180082 - RNA, 1410 nt, Artificial Sequence; identical to SEQ ID NO: 179470
  derived and/or modified CDS sequence (opt4) from neuraminidase__InfluenzaA__ADN90153

SEQ ID NO: 180083 - RNA, 1410 nt, Artificial Sequence; identical to SEQ ID NO: 179470
  derived and/or modified CDS sequence (opt4) from neuraminidase__InfluenzaA__ADN90164

SEQ ID NO: 180084 - RNA, 1410 nt, Artificial Sequence; identical to SEQ ID NO: 179470
  derived and/or modified CDS sequence (opt4) from neuraminidase__InfluenzaA__ADN90186

SEQ ID NO: 180085 - RNA, 1410 nt, Artificial Sequence; identical to SEQ ID NO: 179470
  derived and/or modified CDS sequence (opt4) from neuraminidase__InfluenzaA__ADN90197

SEQ ID NO: 180086 - RNA, 1410 nt, Artificial Sequence
  derived and/or modified CDS sequence (opt4) from neuraminidase__InfluenzaA__ADN90208
augaaccccaaccagaagaucaucaccaucggcagcgugagccugaccaucagcaccaucugcuucuucaugcagaucgccauccugaucaccaccgugacccugcacuucaagcaguacaaguucaacagcccccccaacaaccaggugaugcugugcgagcccaccaucaucgagagaaacaucaccgagaucguguaccugaccaacaccaccaucgagaaggagaucugccccaagcuggccgaguacagaaacuggagcaagccccagugcgacaucaccggcuucgcccccuucagcaaggacaacagcaucagacugagcgccggcggcgacaucugggugaccagagagcccuacgugagcugcgaccccgacaagugcuaccaguucgcccugggccagggcaccacccugaacaacgugcacagcaacaacaccgugagagacagaacccccuacagaacccugcugaugaacgagcugggcgugcccuuccaccugggcaccaagcaggugugcaucgccuggagcagcagcagcugccacgacggcaaggccuggcugcacgugugcaucaccggcgacgacaagaacgccaccgccagcuucaucuacaacggcagacugguggacagcguggugagcuggagcaaggagauccugagaacccaggagagcgagugcgugugcaucaacggcaccugcaccguggugaugaccgacggcagcgccagcggcaaggccgacaccaagauccuguucaucgaggagggcaagaucgugcacaccagcacccugagcggcagcgcccagcacguggaggagugcagcugcuaccccagauaccccggcgugagaugcgugugcagagacaacuggaagggcagcaacagacccaucguggacaucaacaucaaggaccacagcaucgugagcagcuacgugugcagcggccuggugggcgacacccccagaaagaacgacagcagcagcagcagccacugccuggaccccaacaacgaggagggcggccacggcgugaagggcugggccuucgacgacggcaacgacguguggaugggcagaaccaucaacgagaccagcagacugggcuacgagaccuucaaggugaucgagggcuggagcaaccccaagagcaagcugcagaucaacagacaggugaucguggacagaagcaacagaagcggcuacagcggcaucuucagcguggagggcaagagcugcaucaacagaugcuucuacguggagcugaucagaggcagaaaggaggagaccgaggugcuguggaccagcaacagcaucgugguguucugcggcaccagcggcaccuacggcaccggcagcuggcccgacggcgccgaccugaaccugaugcccaucuga

SEQ ID NO: 180087 - RNA, 1410 nt, Artificial Sequence; identical to SEQ ID NO: 179470
  derived and/or modified CDS sequence (opt4) from neuraminidase__InfluenzaA__ADN90219

SEQ ID NO: 180088 - RNA, 1410 nt, Artificial Sequence
  derived and/or modified CDS sequence (opt4) from neuraminidase__InfluenzaA__ADN92469
augaaccccaaccagaagaucaucaccaucggcagcgugagccugaccaucagcaccaucugcuucuucaugcagaucgccauccugaucaccaccgugacccugcacuucaagcaguacgaguucaacagcccccccaacaaccaggugaugcugugcgagcccaccaucaucgagagaaacaucaccgagaucguguaccugaccaacaccaccaucgagaaggagaucugccccaagcuggccgaguacagaaacuggagcaagccccagugcgacaucaccggcuucgcccccuucagcaaggacaacagcaucagacugagcgccggcggcgacaucugggugaccagagagcccuacgugagcugcgaccccgacaagugcuaccaguucgcccugggccagggcaccacccugaacaacgugcacagcaacaacaccgugagagacagaacccccuacagaacccugcugaugaacgagcugggcgugcccuuccaccugggcaccaagcaggugugcaucgccuggagcagcagcagcugccacgacggcaaggccuggcugcacgugugcaucaccggcgacgacaagaacgccaccgccagcuucaucuacaacggcagacugguggacagcguggugagcuggagcaaggagauccugagaacccaggagagcgagugcgugugcaucaacggcaccugcaccguggugaugaccgacggcagcgccagcgagaaggccgacaccaagauccuguucaucgaggagggcaagaucgugcacaccagcacccugagcggcagcgcccagcacguggaggagugcagcugcuaccccagauaccccggcgugagaugcgugugcagagacaacuggaagggcagcaacagacccaucguggacaucaacaucaaggaccacagcaucgugagcagcuacgugugcagcggccuggugggcgacacccccagaaagaacgacagcagcagcagcagccacugccuggaccccaacaacgaggagggcggccacggcgugaagggcugggccuucgacgacggcaacgacguguggaugggcagaaccaucagcgagaagagcagacugggcuacgagaccuucaaggugaucgagggcuggagcaaccccaagagcaagcugcagaucaacagacaggugaucguggacagaggcaacagaagcggcuacagcggcaucuucagcguggagggcaagagcugcaucaacagaugcuucuacguggagcugaucagaggcagaaaggaggagaccgaggugcuguggaccagcaacagcaucgugguguucugcggcaccagcggcaccuacggcaccggcagcuggcccgacggcgccgacaucaaccugaugcccaucuga

SEQ ID NO: 180089 - RNA, 1410 nt, Artificial Sequence; identical to SEQ ID NO: 179315
  derived and/or modified CDS sequence (opt4) from neuraminidase__InfluenzaA__ADN92480

SEQ ID NO: 180090 - RNA, 1410 nt, Artificial Sequence; identical to SEQ ID NO: 179315
  derived and/or modified CDS sequence (opt4) from neuraminidase__InfluenzaA__ADN92491

SEQ ID NO: 180091 - RNA, 1410 nt, Artificial Sequence
  derived and/or modified CDS sequence (opt4) from neuraminidase__InfluenzaA__ADN92502
augaaccccaaccagaagaucaucaccaucggcagcgugagccugaccaucagcaccaucugcuucuucaugcagaucgccauccugaucaccaccgugacccugcacuucaagcaguacgaguucaacagcccccccaacaaccaggugaugcugugcgagcccaccaucaucgagagaaacaucaccgagaucguguaccugaccaacaccaccaucgagaaggagaucugccccaagcuggccgaguacagaaacuggagcaagccccagugcgacaucaccggcuucgcccccuucagcaaggacaacagcaucagacugagcgccggcggcgacaucugggugaccagagagcccuacgugagcugcgaccccgacaagugcuaccaguucgcccugggccagggcaccacccugaacaacgugcacagcaacaacaccgugagagacagaacccccuacagaacccugcugaugaacgagcugggcgugcccuuccaccugggcaccaagcaggugugcaucgccuggagcagcagcagcugccacgacggcaaggccuggcugcacgugugcaucaccggcgacgacaagaacgccaccgccagcuucaucuacaacggcagacugguggacagcguggugagcuggagcaaggagauccugagaacccaggagagcgagugcgugugcaucaacggcaccugcaccguggugaugaccgacggcagcgccagcggcaaggccgacaccaagauccuguucaucgaggagggcaagaucgugcacaccagcacccugagcggcagcgcccagcacguggaggagugcagcugcuaccccagauaccccggcgugagaugcgugugcagagacaacuggaagggcagcaacagacccaucguggacaucaacaucaaggaccacagcaucgugagcagcuacgugugcagcggccuggugggcgacacccccagaaagaacgacagcagcagcagcagccacugccuggaccccaacaacgaggagggcggcaacggcgugaagggcugggccuucgacgacggcaacgacguguggaugggcagaaccaucagcgagaagagcagacugggcuacgagaccuucaaggugaucgagggcuggagcaaccccaagagcaagcugcagaucaacagacaggugaucguggacagaggcaacagaagcggcuacagcggcaucuucagcguggagggcaagagcugcaucaacagaugcuucuacguggagcugaucagaggcagaaaggaggagaacgaggugcuguggaccagcaacagcaucgugguguucugcggcaccagcggcaccuacggcaccggcagcuggcccgacggcgccgacaucaaccugaugcccaucuga

SEQ ID NO: 180092 - RNA, 1410 nt, Artificial Sequence; identical to SEQ ID NO: 176798
  derived and/or modified CDS sequence (opt4) from neuraminidase__InfluenzaA__ADN92512

SEQ ID NO: 180093 - RNA, 1410 nt, Artificial Sequence; identical to SEQ ID NO: 176798
  derived and/or modified CDS sequence (opt4) from neuraminidase__InfluenzaA__ADN92522

SEQ ID NO: 180094 - RNA, 1410 nt, Artificial Sequence; identical to SEQ ID NO: 176798
  derived and/or modified CDS sequence (opt4) from neuraminidase__InfluenzaA__ADN92532

SEQ ID NO: 180095 - RNA, 1410 nt, Artificial Sequence; identical to SEQ ID NO: 176798
  derived and/or modified CDS sequence (opt4) from neuraminidase__InfluenzaA__ADN92542

SEQ ID NO: 180096 - RNA, 1410 nt, Artificial Sequence; identical to SEQ ID NO: 176798
  derived and/or modified CDS sequence (opt4) from neuraminidase__InfluenzaA__ADN92552

SEQ ID NO: 180097 - RNA, 1410 nt, Artificial Sequence; identical to SEQ ID NO: 176798
  derived and/or modified CDS sequence (opt4) from neuraminidase__InfluenzaA__ADO00733

SEQ ID NO: 180098 - RNA, 1410 nt, Artificial Sequence
  derived and/or modified CDS sequence (opt4) from neuraminidase__InfluenzaA__ADO00743
augaaccccaaccagaagaucaucaccaucggcagcgugugcaugaccaucggcauggccaaccugauccugcagaucggcaacaucaucagcaucuggaucagccacagcauccagcugggcaaccagaaccagaucgagaccugcaaccagagcgugaucaccuacgagaacaacaccugggugaaccagaccuacgugaacaucagcaacaccaacuucgccgccggccagagcguggugagcgccaagcuggccggcaacagcagccugugccccgugagcggcugggccaucuacagcaaggacaacagcaucagaaucggcagcaagggcgacguguucgugaucagagagcccuucaucagcugcagcccccuggagugcagaaccuucuuccugacccagggcgcccugcugaacgacaagcacagcaacggcaccaucaaggacagaagccccuacagaacccugaugagcugccccaucggcgaggugcccagccccuacaacagcagauucgagagcguggccuggagcgccagcgccugccacgacggcaucaacuggcugaccaucggcaucagcggccccgacaacggcgccguggccgugcugaaguacaacggcaucaucaccgacaccaucaagagcuggagaaacaacauccugagaacccaggagagcgagugcgccugcgugaacggcagcugcuucaccgugaugaccgacggccccagcgacggccaggccagcuacaagaucuucagaaucgagaagggcaagaucgugaagagcguggagaugaacgcccccaacuaccacuacgaggagugcagcugcuaccccgacagcagcgagaucaccugcgugugcagagacaacuggcacggcagcaacagacccugggugagcuucaaccagaaccuggaguaccagaucggcuacaucugcagcggcaucuucggcgacaaccccagacccaacgacaagaccggcagcugcggccccgugagcagcaacggcgccaacggcgugaagggcuucagcuucaaguacggcaacggcguguggaucggcagaaccaagagcaucagcagcagaaacggcuucgagaugaucugggaccccaacggcuggaccggcaccgacaacaacuucagcaucagacaggacaucgugggcaucaacgaguggagcggcuacagcggcagcuucgugcagcaccccgagcugaccggccuggacugcaucagacccugcuucuggguggagcugaucagaggcagacccaaggagaacaccaucuggaccagcggcagcagcaucagcuucugcggcgugaacagcgacaccgugggcuggagcuggcccgacggcgccgagcugcccuucaccaucgacaaguga

SEQ ID NO: 180099 - RNA, 1410 nt, Artificial Sequence; identical to SEQ ID NO: 177975
  derived and/or modified CDS sequence (opt4) from neuraminidase__InfluenzaA__ADO00753

SEQ ID NO: 180100 - RNA, 1410 nt, Artificial Sequence; identical to SEQ ID NO: 176798
  derived and/or modified CDS sequence (opt4) from neuraminidase__InfluenzaA__ADO12146

SEQ ID NO: 180101 - RNA, 1410 nt, Artificial Sequence; identical to SEQ ID NO: 176798
  derived and/or modified CDS sequence (opt4) from neuraminidase__InfluenzaA__ADO12156

SEQ ID NO: 180102 - RNA, 1410 nt, Artificial Sequence; identical to SEQ ID NO: 176798
  derived and/or modified CDS sequence (opt4) from neuraminidase__InfluenzaA__ADO12166

SEQ ID NO: 180103 - RNA, 1410 nt, Artificial Sequence; identical to SEQ ID NO: 176798
  derived and/or modified CDS sequence (opt4) from neuraminidase__InfluenzaA__ADO12176

SEQ ID NO: 180104 - RNA, 1410 nt, Artificial Sequence; identical to SEQ ID NO: 176798
  derived and/or modified CDS sequence (opt4) from neuraminidase__InfluenzaA__ADO12186

SEQ ID NO: 180105 - RNA, 1410 nt, Artificial Sequence; identical to SEQ ID NO: 176798
  derived and/or modified CDS sequence (opt4) from neuraminidase__InfluenzaA__ADO12196

SEQ ID NO: 180106 - RNA, 1410 nt, Artificial Sequence; identical to SEQ ID NO: 176798
  derived and/or modified CDS sequence (opt4) from neuraminidase__InfluenzaA__ADO12206

SEQ ID NO: 180107 - RNA, 1410 nt, Artificial Sequence; identical to SEQ ID NO: 176798
  derived and/or modified CDS sequence (opt4) from neuraminidase__InfluenzaA__ADO12216

SEQ ID NO: 180108 - RNA, 1410 nt, Artificial Sequence; identical to SEQ ID NO: 176798
  derived and/or modified CDS sequence (opt4) from neuraminidase__InfluenzaA__ADO12226

SEQ ID NO: 180109 - RNA, 1410 nt, Artificial Sequence; identical to SEQ ID NO: 176798
  derived and/or modified CDS sequence (opt4) from neuraminidase__InfluenzaA__ADO12246

SEQ ID NO: 180110 - RNA, 1410 nt, Artificial Sequence; identical to SEQ ID NO: 176798
  derived and/or modified CDS sequence (opt4) from neuraminidase__InfluenzaA__ADO12266

SEQ ID NO: 180111 - RNA, 1410 nt, Artificial Sequence
  derived and/or modified CDS sequence (opt4) from neuraminidase__InfluenzaA__ADO12276
augaaccccaaccagaagaucaucaccaucggcagcgugugcaugaccaucggcauggccaaccugauccugcagaucggcaacaucaucagcaucuggaucagccacagcauccagcugggcaaccagaaccagaucgagaccugcaaccagagcgugaucaccuacgagaacaacaccugggugaaccagaccuacgugaacaucagcaacaccaacuucgccgccggccagagcguggugagcgugaagcuggccggcaacagcagccugugccccgugagcggcugggccaucuacagcaaggacaacagcaucagaaucggcagcaagggcgacguguucgugaucagagagcccuucaucagcugcagcccccuggagugcagaaccuucuuccugacccagggcgcccugcugaacgacaagcacagcaacggcaccaucaaggacagaagccccuacagaacccugaugagcugccccaucggcgaggugcccagccccuacaacagcagauucgagagcguggccuggagcgccagcgccugccacgacggcaucaacuggcugaccaucggcaucagcggccccgacaacggcgccguggccgugcugaaguacaacggcaucaucaccgacaccaucaagagcuggagaaacaacauccugagaacccaggagagcgagugcgccugcgugaacggcagcugcuucaccgugaugaccgacggccccagcgacggccaggccagcuacaagaucuucagaaucgagaagggcaagaucgugaagagcguggagaugaacgcccccaacuaccacuacgaggagugcagcugcuaccccgacagcagcgagaucaccugcgugugcagagacaacuggcacggcagcaacagacccugggugagcuucaaccagaaccuggaguaccagaucggcuacaucugcagcggcaucuucggcgacaaccccagacccaacgacaagagcggcagcugcggccccgugagcagcaacggcgccaacggcgugaagggcuucagcuucaaguacggcaacggcguguggaucggcagaaccaagagcaucagcagcagaaacggcuucgagaugaucugggaccccaacggcuggaccggcaccgacaacaacuucagcaucaagcaggacaucgugggcaucaacgaguggagcggcuacagcggcagcuucgugcagcaccccgagcugaccggccuggacugcaucagacccugcuucuggguggagcugaucagaggcagacccaaggagaacaccaucuggaccagcggcagcagcaucagcuucugcggcgugaacagcgacaccgugggcuggagcuggcccgacggcgccgagcugcccuucaccaucgacaaguga

SEQ ID NO: 180112 - RNA, 1410 nt, Artificial Sequence; identical to SEQ ID NO: 176798
  derived and/or modified CDS sequence (opt4) from neuraminidase__InfluenzaA__ADO12286

SEQ ID NO: 180113 - RNA, 1410 nt, Artificial Sequence; identical to SEQ ID NO: 176798
  derived and/or modified CDS sequence (opt4) from neuraminidase__InfluenzaA__ADO12296

SEQ ID NO: 180114 - RNA, 1410 nt, Artificial Sequence; identical to SEQ ID NO: 176798
  derived and/or modified CDS sequence (opt4) from neuraminidase__InfluenzaA__ADO12306

SEQ ID NO: 180115 - RNA, 1410 nt, Artificial Sequence
  derived and/or modified CDS sequence (opt4) from neuraminidase__InfluenzaA__ADO12316
augaaccccaaccagaagaucaucaccaucggcagcgugugcaugaccaucggcauggccaaccugauccugcagaucggcaacaucaucagcaucuggaucagccacagcauccagcugggcaaccagaaccagaucgagaccugcaaccagagcgugaucaccuacgagaacaacaccugggugaaccagaccuacgugaacaucagcaacaccaacuucgccgccggccagagcguggugagcgugaagcuggccggcaacagcagccugugccccgugagcggcugggccaucuacagcaaggacaacagcaucagaaucggcagcaagggcgacguguucgugaucagagagcccuucaucagcugcagcccccuggagugcagaaccuucuuccugacccagggcgcccugcugaacgacaagcacagcaacggcaccaucaaggacagaagccccuacagaacccugaugagcugccccaucggcgaggugcccagccccuacaacagcagauucgagagcguggccuggagcgccagcgccugccacgacggcaucaacuggcugaccaucggcaucagcggccccgacaacggcgccguggccgugcugaaguacaacggcaucaucaccgacaccaucaagagcuggagaaacaacauccugagaacccaggagagcgagugcgccugcgugaacggcagcugcuucaccgugaugaccgacggccccagcgacggccaggccagcuacaagaucuucagaaucgagaagggcaagaucgugaagagcguggagaugaacgcccccaacuaccacuacgaggagugcagcugcuaccccgacagcagcgagaucaccugcgugugcagagacaacuggcacggcagcaacagacccugggugagcuucaaccagaaccuggaguaccagaucggcuacaucugcagcggcaucuucggcgacaaccccagacccaacgacaagaccggcagcugcggccccgugagcagcaacggcgccaacggcgugaagggcuucagcuucaaguacggcgacggcguguggaucggcagaaccaagagcaucagcagcagaaacggcuucgagaugaucugggaccccaacggcuggaccggcaccgacaacaacuucagcaucaagcaggacaucgugggcaucaacgaguggagcggcuacagcggcagcuucgugcagcaccccgagcugaccggccuggacugcaucagacccugcuucuggguggagcugaucagaggcagacccaaggagaacaccaucuggaccagcggcagcagcaucagcuucugcggcgugaacagcgacaccgugggcuggagcuggcccgacggcgccgagcugcccuucaccaucgacaaguga

SEQ ID NO: 180116 - RNA, 1410 nt, Artificial Sequence; identical to SEQ ID NO: 176798
  derived and/or modified CDS sequence (opt4) from neuraminidase__InfluenzaA__ADO12326

SEQ ID NO: 180117 - RNA, 1410 nt, Artificial Sequence; identical to SEQ ID NO: 176798
  derived and/or modified CDS sequence (opt4) from neuraminidase__InfluenzaA__ADO12336

SEQ ID NO: 180118 - RNA, 1410 nt, Artificial Sequence; identical to SEQ ID NO: 176798
  derived and/or modified CDS sequence (opt4) from neuraminidase__InfluenzaA__ADO12346

SEQ ID NO: 180119 - RNA, 1410 nt, Artificial Sequence; identical to SEQ ID NO: 176798
  derived and/or modified CDS sequence (opt4) from neuraminidase__InfluenzaA__ADO12356

SEQ ID NO: 180120 - RNA, 1410 nt, Artificial Sequence; identical to SEQ ID NO: 176798
  derived and/or modified CDS sequence (opt4) from neuraminidase__InfluenzaA__ADO12366

SEQ ID NO: 180121 - RNA, 1410 nt, Artificial Sequence; identical to SEQ ID NO: 176798
  derived and/or modified CDS sequence (opt4) from neuraminidase__InfluenzaA__ADO12376

SEQ ID NO: 180122 - RNA, 1410 nt, Artificial Sequence; identical to SEQ ID NO: 176798
  derived and/or modified CDS sequence (opt4) from neuraminidase__InfluenzaA__ADO12386

SEQ ID NO: 180123 - RNA, 1410 nt, Artificial Sequence; identical to SEQ ID NO: 176798
  derived and/or modified CDS sequence (opt4) from neuraminidase__InfluenzaA__ADO12396

SEQ ID NO: 180124 - RNA, 1410 nt, Artificial Sequence; identical to SEQ ID NO: 176798
  derived and/or modified CDS sequence (opt4) from neuraminidase__InfluenzaA__ADO12406

SEQ ID NO: 180125 - RNA, 1410 nt, Artificial Sequence; identical to SEQ ID NO: 177565
  derived and/or modified CDS sequence (opt4) from neuraminidase__InfluenzaA__ADO12416

SEQ ID NO: 180126 - RNA, 1410 nt, Artificial Sequence; identical to SEQ ID NO: 176798
  derived and/or modified CDS sequence (opt4) from neuraminidase__InfluenzaA__ADO12426

SEQ ID NO: 180127 - RNA, 1410 nt, Artificial Sequence; identical to SEQ ID NO: 176798
  derived and/or modified CDS sequence (opt4) from neuraminidase__InfluenzaA__ADO12436

SEQ ID NO: 180128 - RNA, 1410 nt, Artificial Sequence; identical to SEQ ID NO: 176798
  derived and/or modified CDS sequence (opt4) from neuraminidase__InfluenzaA__ADO12446

SEQ ID NO: 180129 - RNA, 1410 nt, Artificial Sequence; identical to SEQ ID NO: 176798
  derived and/or modified CDS sequence (opt4) from neuraminidase__InfluenzaA__ADO12456

SEQ ID NO: 180130 - RNA, 1410 nt, Artificial Sequence; identical to SEQ ID NO: 176798
  derived and/or modified CDS sequence (opt4) from neuraminidase__InfluenzaA__ADO12466

SEQ ID NO: 180131 - RNA, 1410 nt, Artificial Sequence; identical to SEQ ID NO: 176798
  derived and/or modified CDS sequence (opt4) from neuraminidase__InfluenzaA__ADO12476

SEQ ID NO: 180132 - RNA, 1410 nt, Artificial Sequence; identical to SEQ ID NO: 176798
  derived and/or modified CDS sequence (opt4) from neuraminidase__InfluenzaA__ADO12486

SEQ ID NO: 180133 - RNA, 1410 nt, Artificial Sequence; identical to SEQ ID NO: 176798
  derived and/or modified CDS sequence (opt4) from neuraminidase__InfluenzaA__ADO12496

SEQ ID NO: 180134 - RNA, 1410 nt, Artificial Sequence; identical to SEQ ID NO: 176798
  derived and/or modified CDS sequence (opt4) from neuraminidase__InfluenzaA__ADO12506

SEQ ID NO: 180135 - RNA, 1410 nt, Artificial Sequence; identical to SEQ ID NO: 176798
  derived and/or modified CDS sequence (opt4) from neuraminidase__InfluenzaA__ADO12516

SEQ ID NO: 180136 - RNA, 1410 nt, Artificial Sequence; identical to SEQ ID NO: 176798
  derived and/or modified CDS sequence (opt4) from neuraminidase__InfluenzaA__ADO12526

SEQ ID NO: 180137 - RNA, 1410 nt, Artificial Sequence; identical to SEQ ID NO: 176798
  derived and/or modified CDS sequence (opt4) from neuraminidase__InfluenzaA__ADO12536

SEQ ID NO: 180138 - RNA, 1410 nt, Artificial Sequence; identical to SEQ ID NO: 176798
  derived and/or modified CDS sequence (opt4) from neuraminidase__InfluenzaA__ADO12546

SEQ ID NO: 180139 - RNA, 1410 nt, Artificial Sequence; identical to SEQ ID NO: 176798
  derived and/or modified CDS sequence (opt4) from neuraminidase__InfluenzaA__ADO12556

SEQ ID NO: 180140 - RNA, 1410 nt, Artificial Sequence; identical to SEQ ID NO: 176798
  derived and/or modified CDS sequence (opt4) from neuraminidase__InfluenzaA__ADO12566

SEQ ID NO: 180141 - RNA, 1410 nt, Artificial Sequence; identical to SEQ ID NO: 176798
  derived and/or modified CDS sequence (opt4) from neuraminidase__InfluenzaA__ADO12576

SEQ ID NO: 180142 - RNA, 1410 nt, Artificial Sequence
  derived and/or modified CDS sequence (opt4) from neuraminidase__InfluenzaA__ADO12586
augaaccccaaccagaagaucaucaccaucggcagcgugugcaugaccaucggcauggccaaccugauccugcagaucggcaacaucaucagcaucuggaucagccacagcauccagcugggcaaccagaaccagaucgagaccugcaaccagagcgugaucaccuacgagaacaacaccugggugaaccagaccuacgugaacaucagcaacaccaacuucgccgccggccagagcguggugagcgugaagcuggccggcaacagcagccugugccccgugagcggcugggccaucuacagcaaggacaacagcaucagaaucggcagcaagggcgacguguucgugaucagagagcccuucaucagcugcagcccccuggagugcagaaccuucuuccugacccagggcgcccugcugaacgacaagcacagcaacggcaccaucaaggacagaagccccuacagaacccugaugagcugccccaucggcgaggugcccagccccuacaacagcagauucgagagcguggccuggagcgccagcgccugccacgacggcaucaacuggcugaccaucggcaucagcggccccgacagcggcgccguggccgugcugaaguacaacggcaucaucaccgacaccaucaagagcuggagaaacaacauccugagaacccaggagagcgagugcgccugcgugaacggcagcugcuucaccgugaugaccgacggccccagcgacggccaggccagcuacaagaucuucagaaucgagaagggcaagaucgugaagagcguggagaugaacgcccccaacuaccacuacgaggagugcagcugcuaccccgacagcagcgagaucaccugcgugugcagagacaacuggcacggcagcaacagacccugggugagcuucaaccagaaccuggaguaccagaucggcuacaucugcagcggcaucuucggcgacaaccccagacccaacgacaagaccggcagcugcggccccgugagcagcaacggcgccaacggcgugaagggcuucagcuucaaguacggcaacggcguguggaucggcagaaccaagagcaucagcagcagaaacggcuucgagaugaucugggaccccaacggcuggaccggcaccgacaacaacuucagcaucaagcaggacaucgugggcaucaacgaguggagcggcuacagcggcagcuucgugcagcaccccgagcugaccggccuggacugcaucagacccugcuucuggguggagcugaucagaggcagacccaaggagaacaccaucuggaccagcggcagcagcaucagcuucugcggcgugaacagcgacaccgugggcuggagcuggcccgacggcgccgagcugcccuucaccaucgacaaguga

SEQ ID NO: 180143 - RNA, 1410 nt, Artificial Sequence; identical to SEQ ID NO: 180142
  derived and/or modified CDS sequence (opt4) from neuraminidase__InfluenzaA__ADO12596

SEQ ID NO: 180144 - RNA, 1410 nt, Artificial Sequence; identical to SEQ ID NO: 176798
  derived and/or modified CDS sequence (opt4) from neuraminidase__InfluenzaA__ADO12606

SEQ ID NO: 180145 - RNA, 1410 nt, Artificial Sequence; identical to SEQ ID NO: 176798
  derived and/or modified CDS sequence (opt4) from neuraminidase__InfluenzaA__ADO12616

SEQ ID NO: 180146 - RNA, 1410 nt, Artificial Sequence; identical to SEQ ID NO: 176798
  derived and/or modified CDS sequence (opt4) from neuraminidase__InfluenzaA__ADO12626

SEQ ID NO: 180147 - RNA, 1410 nt, Artificial Sequence; identical to SEQ ID NO: 176798
  derived and/or modified CDS sequence (opt4) from neuraminidase__InfluenzaA__ADO14355

SEQ ID NO: 180148 - RNA, 1401 nt, Artificial Sequence
  derived and/or modified CDS sequence (opt4) from neuraminidase__InfluenzaA__ADO21028
augaaccccaaccagaagaucaucgccaucggcagcgugagccugaccaucgccaccaucugcuuccugaugcagaucgccauccuggccaccaccaugacccugcacuucaagcagaacgagugcagcaaccccagcaacaaccagguggugcccugcgagcccaccaucaucgagagaaacaucgugcaccugaacagcaccaccaucgagaaggagaucugccccaagguggccgaguacaagaacuggagcaagccccagugccagaucaccggcagcgcccccuucagcaagggcaacagcaucagacugagcgccggcggcgacaucugggugaccagagagcccuacgugagcugcagccugggcaagugcuaccaguucgcccugggccagggcaccacccugaagaacaagcacagcaacggcaccacccacgacagagugccccacagaacccugcugaugagcgagcugggcgugcccuuccaccugggcaccaagcaggugugcaucgccuggagcagcagcagcugccacgacggcaaggccuggcugcacgugugcgugaccggcgacgacaagaacgccaccgccagcaucaucuacgacggcaugcugguggacagcaucggcagcuggagcaagaacauccugagaacccaggagagcgagugcgugugcaucaacggcaccugcaccguggugaugaccgacggcagcgccagcggcaaggccgacaccagaauccuguucaucagagagggcaagaucgugcacaucagcccccugagcggcagcgcccagcacguggaggagugcagcugcuaccccagauaccccgaggugagaugcgugugcagagacaacuggaagggcagcaacagacccgugcuguacaucaacauggccgacuacagcaucgagagcagcuacgugugcagcggccuggugggcgacacccccagaaacgacgacagcuacagcagcagcaacugcagagaccccaacaacgagagaggcgcccccggcgugaagggcugggccuucgacaacggcaacgacaucuggaugggcagaaccaucaaggaggacagcagaagcggcuacgagaccuucagaguggugggcggcuggaccaccgccaacagcaagagccagaucaacagacaggugaucguggacagcgacaacuggagcggcuacagcggcaucuucagcguggagggcaagaacugcaucaacagaugcuucuacguggagcugaucagaggcagaccccaggagaccagagugugguggaccagcaacagcaucaucguguucugcggcaccagcggcaccuacggcaccggcagcuggcccgacggcgccaacaucaacuucaugcccaucuga

SEQ ID NO: 180149 - RNA, 1401 nt, Artificial Sequence
  derived and/or modified CDS sequence (opt4) from neuraminidase__InfluenzaA__ADO21039
augaaccccaaccagaagaucaucgccaucggcagcgugagccugaccaucgccaccaucugcuuccugaugcagaucgccauccuggccaccaccaugacccugcacuucaagcagaacgagugcagcaaccccagcaacaaccagguggugcccugcgagcccaccaucaucgagagaaacaucgugcaccugaacagcaccaccaucgagaaggagaucugccccaagguggccgaguacaagaacuggagcaagccccagugccagaucaccggcagcgcccccuucagcaagggcaacagcaucagacugagcgccggcggcgacaucugggugaccagagagcccuacgugagcugcagccugggcaagugcuaccaguucgcccugggccagggcaccacccugaagaacaagcacagcaacggcaccacccacgacagagacccccacagaacccugcugaugagcgagcugggcgugcccuuccaccugggcaccaagcaggugugcaucgccuggagcagcagcagcugccacgacggcaaggccuggcugcacgugugcgugaccggcgacgacaagaacgccaccgccagcaucaucuacgacggcaugcugguggacagcaucggcagcuggagcaagaacauccugagaacccaggagagcgagugcgugugcaucaacggcaccugcaccguggugaugaccgacggcagcgccagcggcaaggccgacaccagaauccuguucaucagagagggcaagaucgugcacaucagcccccugagcggcagcgcccagcacguggaggagugcagcugcuaccccagauaccccgaggugagaugcgugugcagagacaacuggaagggcagcaacagacccgugcuguacaucaacauggccgacuacaccaucgagagcagcuacgugugcagcggccuggugggcgacacccccagaaacgacgacagcuacagcagcagcaacugcagagaccccaacaacgagagaggcgcccccggcgugaagggcugggccuucgacaacggcaacgacaucuggaugggcagaaccaucaaggaggacagcagaagcggcuacgagaccuucagaguggugggcggcuggaccaccgccaacagcaagagccagaucaacagacaggugaucguggacagcgacaacuggagcggcuacagcggcaucuucagcguggagggcaagaacugcaucaacagaugcuucuacguggagcugaucagaggcagaccccaggagaccagagugugguggaccagcaacagcaucaucguguucugcggcaccagcggcaccuacggcaccggcagcuggcccgacggcgccaacaucaacuucaugcccaucuga

SEQ ID NO: 180150 - RNA, 1401 nt, Artificial Sequence
  derived and/or modified CDS sequence (opt4) from neuraminidase__InfluenzaA__ADO21050
augaaccccaaccagaagaucaucgccaucggcagcgugagccugaccaucgccaccaucugcuuccugaugcagaucgccauccuggccaccaccaugacccugcacuucaagcagaacgagugcagcaaccccagcaacaaccagguggugcccugcgagcccaccaucaucgagagaaacaucgugcaccugaacagcaccaccaucgagaaggagaucugccccaagguggccgaguacaagaacuggagcaagccccagugccagaucaccggcagcgcccccuucagcaagggcaacagcaucagacugagcgccggcggcgacaucugggugaccagagagcccuacgugagcugcagccugggcaagugcuaccaguucgcccugggccagggcaccacccugaagaacaagcacagcaacggcaccacccacgacagaggcccccacagaacccugcugaugagcgagcugggcgugcccuuccaccugggcaccaagcaggugugcaucgccuggagcagcagcagcugccacgacggcaaggccuggcugcacgugugcgugaccggcgacgacaagaacgccaccgccagcaucaucuacgacggcaugcugguggacagcaucggcagcuggagcaagaacauccugagaacccaggagagcgagugcgugugcaucaacggcaccugcaccguggugaugaccgacggcagcgccagcggcaaggccgacaccagaauccuguucaucagagagggcaagaucgugcacaucagcccccugagcggcagcgcccagcacguggaggagugcagcugcuaccccagauaccccgaggugagaugcgugugcagagacaacuggaagggcagcaacagacccgugcuguacaucaacauggccgacuacagcaucgagagcagcuacgugugcagcggccuggugggcgacacccccagaaacgacgacagcuacagcagcagcaacugcagagaccccaacaacgagagcggcgcccccggcgugaagggcugggccuucgacaacggcaacgacaucuggaugggcagaaccaucaaggaggacagcagaagcggcuacgagaccuucagaguggugggcggcuggaccaccgccaacagcaagagccagaucaacagacaggugaucguggacagcgacaacuggagcggcuacagcggcaucuucagcguggagggcaagaacugcaucaacagaugcuucuacguggagcugaucagaggcagaccccaggagaccagagugugguggaccagcaacagcaucaucguguucugcggcaccagcggcaccuacggcaccggcagcuggcccgacggcgccaacaucaacuucaugcccaucuga

SEQ ID NO: 180151 - RNA, 1410 nt, Artificial Sequence
  derived and/or modified CDS sequence (opt4) from neuraminidase__InfluenzaA__ADO25095
augaaccccaaccagaagaucaucaccaucggcagcgugugcaugaccaucggcauggccaaccugauccugcagaucggcaacaucaucagcaucuggaucagccacagcauccagcugggcaaccagaaccagaucgagaccugcaaccagagcaucaucaccuacgagaacaacaccugggugaaccagaccuacgugaacaucagcaacaccaacuucgccgccggccagagcguggugagcgugaagcuggccggcaacagcagccugugccccgugagcggcugggccaucuacagcaaggacaacagcaucagaaucggcagcaagggcgacguguucgugaucagagagcccuucaucagcugcagcccccuggagugcagaaccuucuuccugacccagggcgcccugcugaacgacaagcacagcaacggcaccaucaaggacagaagccccuacagaacccugaugagcugccccaucggcgaggugcccagccccuacaacagcagauucgagagcguggccuggagcgccagcgccugccacgacggcaucaacuggcugaccaucggcaucagcggccccgacaacggcgccguggccgugcugaaguacaacggcaucaucaccgacaccaucaagagcuggagaaacaacauccugagaacccaggagagcgagugcgccugcgugaacggcagcugcuucaccgugaugaccgacggccccagcgacggccaggccagcuacaagaucuucagaaucgagaagggcaagaucgugaagagcguggagaugaacgcccccaacuaccacuacgaggagugcagcugcuaccccgacagcagcgagaucaccugcgugugcagagacaacuggcacggcagcaacagacccugggugagcuucaaccagaaccuggaguaccagaucggcuacaucugcagcggcaucuucggcgacaaccccagacccaacgacaagaccggcagcugcggccccgugagcagcaacggcgccaacggcgugaagggcuucagcuucaaguacggcaacggcguguggaucggcagaaccaagagcaucagcagcagaagcggcuucgagaugaucugggaccccaacggcuggaccggcaccgacaacaacuucagcaucaagcaggacaucgugggcaucaacgaguggagcggcuacagcggcagcuucgugcagcaccccgagcugaccggccuggacugcaucagacccugcuucuggguggagcugaucagaggcagacccaaggagaacaccaucuggaccagcggcagcagcaucagcuucugcggcgugaacagcgacaccgugggcuggagcuggcccgacggcgccgagcugcccuucaccaucgacaaguga

SEQ ID NO: 180152 - RNA, 1410 nt, Artificial Sequence
  derived and/or modified CDS sequence (opt4) from neuraminidase__InfluenzaA__ADO25105
augaaccccaaccagaagaucaucaccaucggcagcgugugcaugaccaucggcauggccaaccugauccugcagaucggcaacaucaucagcaucuggaucagccacagcauccagcugggcaaccagaaccagaucggcaccugcaaccagagcgugaucaccuacgagaccaacaccugggugaaccagaccuacgugaacaucagcaacaccaacuucgccgccggccagagcguggugagcgugaagcuggccggcaacagcagccugugccccgugagcggcugggccaucuacagcaaggacaacagcaucagaaucggcagcaagggcgacguguucgugaucagagagcccuucaucagcugcagcccccuggagugcagaaccuucuuccugacccagggcgcccugcugaacgacaagcacagcaacggcaccaucaaggacagaagccccuacagaacccugaugagcugccccaucggcgaggugcccagccccuacaacagcagauucgagagcguggccuggagcgccagcgccugccacgacggcaucaacuggcugaccaucggcaucagcggccccgacaacggcgccguggccgugcugaaguacaacggcaucaucaccgacaccaucaagagcuggagaaacaacauccugagaacccaggagagcgagugcgccugcgugaacggcagcugcuucaccgugaugaccgacggccccagcgacagacaggccagcuacaagaucuucagaaucgagaagggcaagaucgugaagagcguggagaugaacgcccccaacuaccacuacgaggagugcagcugcuaccccgacagcagcgagaucaccugcgugugcagagacaacuggcacggcagcaacagacccugggugagcuucaaccagaaccuggaguaccagaucggcuacaucugcagcggcaucuucggcgacaaccccagacccaacgacaagaccggcagcugcggccccgugagcagcaacggcgccaacggcgugaagggcuucagcuucaaguacggcaacggcguguggaucggcagaaccaagagcaucagcagcagaaacggcuucgagaugaucugggaccccaacggcuggaccggcaccgacaacaacuucagcaucaagcaggacaucgugggcaucaacgaguggagcggcuacagcggcagcuucgugcagcaccccgagcugaccggccuggacugcaucagacccugcuucuggguggagcugaucagaggcagacccaaggagaacaccaucuggaccagcggcagcagcaucagcuucugcggcgugaacagcgacaccgugggcuggagcuggcccgacggcgccgagcugcccuucaccaucgacaaguga

SEQ ID NO: 180153 - RNA, 1410 nt, Artificial Sequence; identical to SEQ ID NO: 178579
  derived and/or modified CDS sequence (opt4) from neuraminidase__InfluenzaA__ADO25115

SEQ ID NO: 180154 - RNA, 1410 nt, Artificial Sequence; identical to SEQ ID NO: 178579
  derived and/or modified CDS sequence (opt4) from neuraminidase__InfluenzaA__ADO25125

SEQ ID NO: 180155 - RNA, 1410 nt, Artificial Sequence
  derived and/or modified CDS sequence (opt4) from neuraminidase__InfluenzaA__ADO25135
augaaccccaaccagaagaucaucaccaucggcagcgugugcaugaccaucggcauggccaaccuggugcugcagaucggcaacaucaucagcaucuggaucagccacagcauccagcugggcaaccagaaccagaucgagaccugcaaccagagcgugaucaccuacgagaacaacaccugggugaaccagaccuacgugaacaucagcaacaccaacuucgccgccggccagagcguggugagcgugaagcuggccggcaacagcagccugugccccgugagcggcugggccaucuacagcaaggacaacagcaucagaaucggcagcaagggcgacguguucgugaucagagagcccuucaucagcugcagcccccuggagugcagaaccuucuuccugacccagggcgcccugcugaacgacaagcacagcaacggcaccaucaaggacagaagccccuacagaacccugaugagcugccccaucggcgaggugcccagccccuacaacagcagauucgagagcguggccuggagcgccagcgccugccacgacggcaucaacuggcugaccaucggcaucagcggccccgacaacggcgccguggccgugcugaaguacaacggcaucaucaccgacaccaucaagagcuggagaaacaacauccugagaacccaggagagcgagugcgccugcgugaacggcagcugcuucaccgugaugaccgacggccccagcgacggccaggccagcuacaagaucuucagaaucgagaagggcaagaucgugaagagcguggagaugaacgcccccaacuaccacuacgaggagugcagcugcuaccccgacagcagcgagaucaccugcgugugcagagacaacuggcacggcagcaacagacccugggugagcuucaaccagaaccuggaguaccagaucggcuacaucugcagcggcaucuucggcgacaaccccagacccaacgacaagaccggcagcugcggccccgugagcagcaacggcgccaacggcgugaagggcuucagcuucaaguacggcaacggcguguggaucggcagaaccaagagcaucagcagcagaaacggcuucgagaugaucugggaccccaacggcuggaccggcaccgacaacaacuucagcaucaagcaggacaucgugggcaucaacgaguggagcggcuacagcggcagcuucgugcagcaccccgagcugaccggccuggacugcaucagacccugcuucuggguggagcugaucagaggcagacccaaggagaacaccaucuggaccagcggcagcagcaucagcuucugcggcgugaacagcgacaccgugggcuggagcuggcccgacggcgccgagcugcccuucaccaucgacaaguga

SEQ ID NO: 180156 - RNA, 1410 nt, Artificial Sequence; identical to SEQ ID NO: 178149
  derived and/or modified CDS sequence (opt4) from neuraminidase__InfluenzaA__ADO25145

SEQ ID NO: 180157 - RNA, 1410 nt, Artificial Sequence; identical to SEQ ID NO: 176798
  derived and/or modified CDS sequence (opt4) from neuraminidase__InfluenzaA__ADO25155

SEQ ID NO: 180158 - RNA, 1410 nt, Artificial Sequence; identical to SEQ ID NO: 176798
  derived and/or modified CDS sequence (opt4) from neuraminidase__InfluenzaA__ADO25165

SEQ ID NO: 180159 - RNA, 1410 nt, Artificial Sequence; identical to SEQ ID NO: 176798
  derived and/or modified CDS sequence (opt4) from neuraminidase__InfluenzaA__ADO25175

SEQ ID NO: 180160 - RNA, 1410 nt, Artificial Sequence
  derived and/or modified CDS sequence (opt4) from neuraminidase__InfluenzaA__ADO25185
augaaccccaaccagaagaucaucaccaucggcagcgugugcaugaccaucggcauggccaaccugauccugcagaucggcaacaucaucagcaucuggaucagccacagcauccagcugggcaaccagaaccagaucgagaccugcaaccagagcgugaucaccuacgagaacaacaccugggugaaccagaccuacgugaacaucagcaacaccaacuucgccgccggccagagcguggugagcgugaagcuggccggcaacagcagccugugccccgugagcggcugggccaucuacagcaaggacaacagcaucagaaucggcagcaagggcgacguguucgugaucagagagcccuucaucagcugcagcccccuggagugcagaaccuucuuccugacccagggcgcccugcugaacgacaagcacagcaacggcaccaucaaggacagaagccccuacagaacccugaugagcugccccaucggcgaggugcccagccccuacaacagcagauucgagagcguggccuggagcgccagcgccugccacgacggcaucaacuggcugaccaucggcaucagcggccccgacaacggcgccguggccgugcugaaguacaacggcaucaucaccgacaccaucaagagcuggagaaacaacauccugagaacccaggagagcgagugcgccugcgugaacggcagcugcuucaccgugaugaccgacggccccagcgacggccaggccagcuacaagaucuucagaaucgagaagggcaagaucgugaagagcguggagaugaacgcccccaacuaccacuacgaggagugcagcugcuaccccgacagcagcgagaucaccugcgugugcagagacaacuggcacggcagcaacagacccugggugagcuucaaccagaaccuggaguaccagaucggcuacaucugcagcggcaucuucggcgacaaccccagacccaacgacaagaccggcagcugcggccccgugagcagcaacggcgccaacggcgugaagggcuucagcuucaaguacggcaacggcguguggaucggcagaaccaagagcaugagcagcagaaacggcuucgagaugaucugggaccccaacggcuggaccggcaccgacaacaacuucagcaucaagcaggacaucgugggcaucaacgaguggagcggcuacagcggcagcuucgugcagcaccccgagcugaccggccuggacugcaucagacccugcuucuggguggagcugaucagaggcagacccaaggagaacaccaucuggaccagcggcagcagcaucagcuucugcggcgugaacagcgacaccgugggcuggagcuggcccgacggcgccgagcugcccuucaccaucgacaaguga

SEQ ID NO: 180161 - RNA, 1410 nt, Artificial Sequence; identical to SEQ ID NO: 179227
  derived and/or modified CDS sequence (opt4) from neuraminidase__InfluenzaA__ADO25195

SEQ ID NO: 180162 - RNA, 1410 nt, Artificial Sequence; identical to SEQ ID NO: 177935
  derived and/or modified CDS sequence (opt4) from neuraminidase__InfluenzaA__ADO25205

SEQ ID NO: 180163 - RNA, 1410 nt, Artificial Sequence; identical to SEQ ID NO: 178149
  derived and/or modified CDS sequence (opt4) from neuraminidase__InfluenzaA__ADO25215

SEQ ID NO: 180164 - RNA, 1410 nt, Artificial Sequence; identical to SEQ ID NO: 176798
  derived and/or modified CDS sequence (opt4) from neuraminidase__InfluenzaA__ADO25225

SEQ ID NO: 180165 - RNA, 1410 nt, Artificial Sequence; identical to SEQ ID NO: 178149
  derived and/or modified CDS sequence (opt4) from neuraminidase__InfluenzaA__ADO25235

SEQ ID NO: 180166 - RNA, 1410 nt, Artificial Sequence; identical to SEQ ID NO: 176798
  derived and/or modified CDS sequence (opt4) from neuraminidase__InfluenzaA__ADO25245

SEQ ID NO: 180167 - RNA, 1410 nt, Artificial Sequence; identical to SEQ ID NO: 176798
  derived and/or modified CDS sequence (opt4) from neuraminidase__InfluenzaA__ADO25255

SEQ ID NO: 180168 - RNA, 1410 nt, Artificial Sequence; identical to SEQ ID NO: 178579
  derived and/or modified CDS sequence (opt4) from neuraminidase__InfluenzaA__ADO25265

SEQ ID NO: 180169 - RNA, 1410 nt, Artificial Sequence; identical to SEQ ID NO: 178390
  derived and/or modified CDS sequence (opt4) from neuraminidase__InfluenzaA__ADO25275

SEQ ID NO: 180170 - RNA, 1410 nt, Artificial Sequence; identical to SEQ ID NO: 178149
  derived and/or modified CDS sequence (opt4) from neuraminidase__InfluenzaA__ADO25285

SEQ ID NO: 180171 - RNA, 1413 nt, Artificial Sequence
  derived and/or modified CDS sequence (opt4) from neuraminidase__InfluenzaA__ADO27623
augaaccccaaccagaagaucaucaccaucggcagcaucagcaucgccaucggcaucaucagccugaugcugcagaucggcaacaucaucagcaucugggccagccacagcauccagaccggcagccagaacaacaccggcaucugcaaccagagaaucaucaccuacgagaacagcaccugggugaaccacaccuacgugaacaucaacaacaccaacguggccgccggcgaggacaagaccagcgugacccuggccggcaacagcagccugugcagcaucagcggcugggccaucuacaccaaggacaacagcaucagaaucggcagcaagggcgacguguucgugaucagagagcccuucaucagcugcagccaccuggagugcagaaccuucuuccugacccagggcgcccugcugaacgacaagcacagcaacggcaccgugaaggacagaagccccuacagagcccugaugagcugcccccugggcgaggcccccagccccuacaacagcaaguucgagagcguggccuggagcgccagcgccugccacgacggcaugggcuggcugaccaucggcaucagcggccccgacaacggcgccguggccgugcugaaguacaacggcaucaucaccggcaccaucaagagcuggaagaagcagauccugagaacccaggagagcgagugcgugugcaugaacggcagcugcuucaccaucaugaccgacggccccagcaacaaggccgccagcuacaagaucuucaagaucgagaagggcaaggugaccaagagcaucgagcugaacgcccccaacuucuacuacgaggagugcagcugcuaccccgacaccggcaucgugaugugcgugugcagagacaacuggcacggcagcaacagacccugggugagcuucaaccagaaccuggacuaccagaucggcuacaucugcagcggcguguucggcgacaaccccagacccgaggacggcgagggcagcugcaaccccgugaccguggacggcgccaacggcgugaagggcuucagcuacaaguacggcaacggcguguggaucggcagaaccaagagcaacagacugagaaagggcuucgagaugaucugggaccccaacggcuggaccaacaccgacagcgacuucagcgugaagcaggacgugguggccaucaccgacuggagcggcuacagcggcagcuucgugcagcaccccgagcugaccggccuggacugcaucagacccugcuucuggguggagcuggugagaggccugcccagagagaacaccaccaucuggaccagcggcagcagcaucagcuucugcggcgugaacagcgacaccgccaacuggagcuggcccgacggcgccgagcugcccuucaccaucgacaaguga

SEQ ID NO: 180172 - RNA, 1410 nt, Artificial Sequence; identical to SEQ ID NO: 176798
  derived and/or modified CDS sequence (opt4) from neuraminidase__InfluenzaA__ADO30410

SEQ ID NO: 180173 - RNA, 1410 nt, Artificial Sequence; identical to SEQ ID NO: 178149
  derived and/or modified CDS sequence (opt4) from neuraminidase__InfluenzaA__ADO30420

SEQ ID NO: 180174 - RNA, 1410 nt, Artificial Sequence; identical to SEQ ID NO: 177506
  derived and/or modified CDS sequence (opt4) from neuraminidase__InfluenzaA__ADP95343

SEQ ID NO: 180175 - RNA, 1410 nt, Artificial Sequence; identical to SEQ ID NO: 176788
  derived and/or modified CDS sequence (opt4) from neuraminidase__InfluenzaA__ADP95353

SEQ ID NO: 180176 - RNA, 1410 nt, Artificial Sequence; identical to SEQ ID NO: 176788
  derived and/or modified CDS sequence (opt4) from neuraminidase__InfluenzaA__ADP95363

SEQ ID NO: 180177 - RNA, 1410 nt, Artificial Sequence; identical to SEQ ID NO: 176788
  derived and/or modified CDS sequence (opt4) from neuraminidase__InfluenzaA__ADP95373

SEQ ID NO: 180178 - RNA, 1410 nt, Artificial Sequence; identical to SEQ ID NO: 176788
  derived and/or modified CDS sequence (opt4) from neuraminidase__InfluenzaA__ADP95383

SEQ ID NO: 180179 - RNA, 1410 nt, Artificial Sequence; identical to SEQ ID NO: 176788
  derived and/or modified CDS sequence (opt4) from neuraminidase__InfluenzaA__ADP95393

SEQ ID NO: 180180 - RNA, 1410 nt, Artificial Sequence
  derived and/or modified CDS sequence (opt4) from neuraminidase__InfluenzaA__ADQ43774
augaaccccaaccagaagaucaucaccaucggcagcggcugcaugaccaucggcauggccaaccugauccugcagaucggcaacaucaucagcaucuggaucagccacagcauccagcugggcaaccagaaccagaucgagaccugcaaccagagcgugaucaccuacgagaacaacaccugggugaaccagaccuacgugaacaucagcaacaccaacuucgccgccggccagagcguggugagcgugaagcuggccggcaacagcagccugugccccgugagcggcugggccaucuacagcaaggacaacagcaucagaaucggcagcaagggcgacguguucgugaucagagagcccuucaucagcugcagcccccuggagugcagaaccuucuuccugacccagggcgcccugcugaacgacaagcacagcaacggcaccaucaaggacagaagccccuacagaacccugaugagcugccccaucggcgaggugcccagccccuacaacagcagauucgagagcguggccuggagcgccagcgccugccacgacggcaucaacuggcugaccaucggcaucagcggccccgacaacggcgccguggccgugcugaaguacaacggcaucaucaccgacaccaucaagagcuggagaaacaacauccugagaacccaggagagcgagugcgccugcgugaacggcagcugcuucaccgugaugaccgacggccccagcgacggccaggccagcuacaagaucuucagaaucgagaagggcaagaucgugaagagcguggagaugaaggcccccaacuaccacuacgaggagugcagcugcuaccccgacagcagcgagaucaccugcgugugcagagacaacuggcacggcagcaacagacccugggugagcuucaaccagaaccuggaguaccagaucggcuacaucugcagcggcaucuucggcgacaaccccagacccaacgacaagaccggcagcugcggccccgugagcagcaacggcgccaacggcgugaagggcuucagcuucaaguacggcaacggcguguggaucggcagaaccaagagcaucagcagcagaaacggcuucgagaugaucugggaccccaacggcuggaccggcaccgacaacaacuucagcaucaagcaggacaucgugggcaucaacgaguggagcggcuacagcggcagcuucgugcagcaccccgagcugaccggccuggacugcaucagacccugcuucuggguggagcugaucagaggcagacccaaggagaacaccaucuggaccagcggcagcagcaucagcuucugcggcgugaacagcgacaccgugggcuggagcuggcccgacggcgccgagcugcccuucaccaucgacaaguga

SEQ ID NO: 180181 - RNA, 1410 nt, Artificial Sequence
  derived and/or modified CDS sequence (opt4) from neuraminidase__InfluenzaA__ADQ92578
augaaccccaaccagaagaucaucaccaucggcagcgugagccugaccaucagcaccaucugcuucuucaugcagaucgccauccugaucaccaccgugacccugcacuucaagcaguacgaguucaacagcccccccaacaaccaggugauccugugcgagcccaccaucaucgagagaaacaucaccgagaucguguaccugaccaacgccaccaucgagaaggagaucugccccaagcuggccgaguacagaaacuggagcaagccccagugcgacaucaccggcuucgcccccuucagcaaggacaacagcaucagacugagcgccggcggcgacaucugggugaccagagagcccuacgugagcugcgaccccgacaagugcuaccaguucgcccugggccagggcaccacccugaacaacgugcacagcaacaacaccgugagagacagaacccccuacagaacccugcugaugaacgagcugggcgugcccuuccaccugggcaccaagcaggugugcaucgccuggagcagcagcagcugccacgacggcaaggccuggcugcacgugugcaucaccggcgacgacaagaacgccaccgccagcuucaucuacaacggcagacugguggacagcguggugagcuggagcaaggagauccugagaacccaggagagcgagugcgugugcaucaacggcaccugcaccguggugaugaccgacggcagcgccagcggcaaggccgacaccaagauccuguucaucgaggagggcaagaucgugcacaccagcacccugagcggcagcgcccagcacguggaggagugcagcugcuaccccagauaccccggcgugagaugcgugugcagagacaacuggaagggcagcaacagacccaucguggacaucaacaucaaggaccacagcaucgugagcagcuacgugugcagcggccuggugggcgacacccccagaaagaacgacagcagcagcagcagccacugccuggaccccaacaacgaggagggcggccacggcgugaagggcugggccuucgacgacggcaacgacguguggaugggcagaaccaucagcgagaagagcagacugggcuacgagaccuucaaggugaucgagggcuggagcaaccccaagagcaagcugcagaucaacagacaggugaucguggacagaggcaacagaagcggcuacagcggcaucuucagcguggagggcaagagcugcaucaacagaugcuucuacguggagcugaucagaggcagaaaggaggagaccgaggugcuguggaccagcaacagcaucgugguguucugcggcaccagcggcaccuacggcaccggcagcuggcccgacggcgccgacaucaaccugaugcccaucuga

SEQ ID NO: 180182 - RNA, 1410 nt, Artificial Sequence; identical to SEQ ID NO: 176659
  derived and/or modified CDS sequence (opt4) from neuraminidase__InfluenzaA__ADR32364

SEQ ID NO: 180183 - RNA, 1410 nt, Artificial Sequence
  derived and/or modified CDS sequence (opt4) from neuraminidase__InfluenzaA__ADT64478
augaaccccaaccagaagaucaucaccaucggcagcgugugcaugaccaucggcauggccaaccugauccugcagaucggcaacaucaucagcaucuggaucggccacagcauccagcugggcaaccagaaccagaucgagaccugcaaccagagcgugaucaccuacgagaacaacaccugggugaaccagaccuacgugaacaucagcaacaccaacuucgccgccggccagagcguggugagcgugaagcuggccggcaacagcagccugugccccgugagcggcugggccaucuacagcaaggacaacagcgugagaaucggcagcaagggcgacguguucgugaucagagagcccuucaucagcugcagcccccuggagugcagaaccuucuuccugacccagggcgcccugcugaacgacaagcacagcaacggcaccaucaaggacagaagccccuacagaacccugaugagcugccccaucggcgaggugcccagccccuacaacagcagauucgagagcguggccuggagcgccagcgccugccacgacggcaucaacuggcugaccaucggcaucagcggccccgacaacggcgccguggccgugcugaaguacaacggcaucaucaccgacaccaucaagagcuggagaaacaacauccugagaacccaggagagcgagugcgccugcgugaacggcagcugcuucaccgugaugaccgacggccccagcaacggccaggccagcuacaagaucuucagaaucgagaagggcaagaucgugaagagcguggagaugaacgcccccaacuaccacuacgaggagugcagcugcuaccccgacagcagcgagaucaccugcgugugcagagacaacuggcacggcagcaacagacccugggugagcuucaaccagaaccuggaguaccagaucggcuacaucugcagcggcaucuucggcgacaaccccagacccaacgacaagaccggcagcugcggccccgugagcagcaacggcgccaacggcgugaagggcuucagcuucaaguacggcaacggcguguggaucggcagaaccaagagcaucagcagcagaaacggcuucgagaugaucugggaccccaacggcuggaccggcaccgacaacaacuucagcaucaagcaggacaucgugggcaucaacgaguggagcggcuacagcggcagcuucgugcagcaccccgagcugaccggccuggacugcaucagacccugcuucuggguggagcugaucagaggcagacccaaggagaacaccaucuggaccagcggcagcagcaucagcuucugcggcgugaacagcgacaccgugggcuggagcuggcccgacggcgccgagcugcccuucaccaucgacaaguga

SEQ ID NO: 180184 - RNA, 1410 nt, Artificial Sequence
  derived and/or modified CDS sequence (opt4) from neuraminidase__InfluenzaA__ADT78889
augaaccccaaccagaagaucaucaccaucggcagcgugagccugaccaucgccaccgugugcuuccugaugcagaucgccauccuggugaccaccgugacccugcacuucaagcagcacgagugcgacagccccgccagcaaccaggugaugcccugcgagcccaucaucaucgagagaaacaucaccgagaucguguaccugaacaacaccaccaucgagaaggagaucugccccaaggugguggaguacagaaacuggagcaagccccagugccagaucaccggcuucgcccccuucagcaaggacaacagcaucagacugagcgccggcggcgacaucugggugaccagagagcccuacgugagcugcgaccccggcaagugcuaccaguucgcccugggccagggcaccacccuggacaacaagcacagcaacgacaccauccacgacagaaucccccacagaacccugcugaugaacgagcugggcgugcccuuccaccugggcaccagacaggugugcguggccuggagcagcagcagcugccacgacggcaaggccuggcugcacgugugcgugaccggcgacgacaagaacgccaccgccagcuucaucuacgacggcagacugguggacagcaucggcagcuggagccagaacauccugagaacccaggagagcgagugcgugugcaucaacggcaccugcaccguggugaugaccgacggcagcgccagcggcagagccgacaccagaauccuguucaucgaggagggcaagaucgugcacaucagcccccugagcggcagcgcccagcacguggaggagugcagcugcuaccccagauaccccgacgugagaugcaucugcagagacaacuggaagggcagcaacagacccgugaucgacaucaacauggaggacuacagcaucgacagcagcuacgugugcagcggccuggugggcgacacccccagaaacgacgacagaagcagcaacagcaacugcagagaccccaacaacgagagaggcaaccccggcgugaagggcugggccuucgacaacggcgacgacguguggaugggcagaaccaucagcaaggaccugagaagcggcuacgagaccuucaaggugaucggcggcuggagcacccccaacagcaagagccagaucaacagacaggugaucguggacagcaacaacuggagcggcuacagcggcaucuucagcguggagggcaagagcugcaucaacagaugcuucuacguggagcugaucagaggcagacagcaggagaccagagugugguggaccagcaacagcaucgugguguucugcggcaccagcggcaccuacggcaccggcagcuggcccgacggcgccaacaucagcuucaugcccaucuga

SEQ ID NO: 180185 - RNA, 1410 nt, Artificial Sequence
  derived and/or modified CDS sequence (opt4) from neuraminidase__InfluenzaA__ADT78899
augaaccccaaccagaagaucaucaccaucggcagcgugagccugaccaucgccaccgugugcuuccugaugcagaucgccauccuggccaccaccgugacccugcacuucaagcagcacgagugcgacagccccgccagcaaccaggugaugcccugcgagcccaucaucaucgagagaaacaucaccgagaucguguaccugaacaacaccaccaucgagaaggagaucugccccgaggugguggaguacagaaacuggagcaagccccagugccagaucaccggcuucgcccccuucagcaaggacaacagcaucagacugagcgccggcggcgacaucugggugaugagagagcccuacgugagcugcaaccccggcaagugcuaccaguucgcccugggccagggcaccacccuggacaacaagcacagcaacggcaccauccacgacagaaucccccacagaacccugcugaugaacgagcugggcgugcccuuccaccugggcaccaagcaggugugcguggccuggagcagcagcagcugccacgacggcaaggccuggcugcacgugugcgugaccggcgacgacagaaacgccaccgccagcuucaucuacgacggcagacugguggacagcaucggcagcuggagccagaacauccugagaacccaggagagcgagugcgugugcaucaacggcaccugcaccguggugaugaccgacggcagcgccagcggcagagccgacaccagaauccuguucaucaaggagggcaagaucgugcacaucagcccccugagcggcagcgcccagcacaucgaggagugcagcugcuaccccagauaccccgacgugagaugcaucugcagagacaacuggaagggcagcaacagacccgugaucgacaucaacauggaggacuacagcaucgacagcagcuacgugugcagcggccuggugggcgacacccccagaaacgacgacagcagcagcaacagcaacugcagagaccccaacaacgagagaggcaaccccggcgugaagggcugggccuucgacaacggcgacgacguguggaugggcagaaccaucagcaaggaccugagaagcggcuacgagaccuucaaggugaucggcggcuggagcacccccaacagcaagagccaggugaacagacaggugaucguggacaacaacaacuggagcggcuacagcggcaucuucagcguggagggcaagagcugcaucaacagaugcuucuacguggagcugaucagaggcagaccccaggagaccagagugugguggaccagcagcagcaucgugguguucugcggcaccagcggcaccuacggcaccggcagcuggcccgacggcgccaacaucaacuucaugcccaucuga

SEQ ID NO: 180186 - RNA, 1410 nt, Artificial Sequence
  derived and/or modified CDS sequence (opt4) from neuraminidase__InfluenzaA__ADT78963
augaaccccaaccagaagaucaucaccaucggcagcgugagccugaccaucgccaccgugugcuuccugaugcagaucgccauccuggccaccaccgugacccugcacuucaagcagcacgagugcgacagccccgccagcaaccaggugaugcccugcgagcccaucaucaucgagagaaacaucaccgagaucguguaccugaacaacaccaccaucgagaaggagaucugccccgaggugguggaguacagaaacuggagcaagccccagugccagaucaccggcuucgcccccuucagcaaggacaacagcaucagacugagcgccggcggcgacaucugggugaccagagagcccuacgugagcugcgaccccggcaagugcuaccaguucgcccugggccagggcaccacccuggacaacaagcacagcaacgacaccauccacgacagaaucccccacagaacccugcugaugaacgagcugggcgugcccuuccaccugggcaccagacaggugugcguggccuggagcagcagcagcugccacgacggcaaggccuggcugcacgugugcgugaccggcgacgacagaaacgccaccgccagcuucaucuacgacggcagacugguggacagcaucggcagcuggagccagaacauccugagaacccaggagagcgagugcgugugcaucaacggcaccugcaccguggugaugaccgacggcagcgccagcggcagagccgacaccagaauccuguucaucaaggagggcaagaucgugcacaucagcccccugagcggcagcgcccagcacguggaggagugcagcugcuaccccagauaccccgacgugagaugcaucugcagagacaacuggaagggcagcaacagacccgugaucgacaucaacauggaggacuacagcaucgacagcagcuacgugugcagcggccuggugggcgacacccccagaaacgacgacagaagcagcaacagcaacugcagagaccccaacaacgagagaggcaaccccggcgugaagggcugggccuucgacaacggcaacgacguguggaugggcagaaccaucagcaaggaccugagaagcggcuacgagaccuucaaggugaucggcggcuggagcacccccaacagcaagagccaggugaacagacaggugaucguggacaacaacaacuggagcggcuacagcggcaucuucagcguggagggcaagagcugcaucaacagaugcuucuacguggagcugaucagaggcagacagcaggagaccagagugugguggaccagcaacagcaucgugguguucugcggcaccagcggcaccuacggcaccggcagcuggcccgacggcgccaacaucaacuucaugcccaucuga

SEQ ID NO: 180187 - RNA, 1410 nt, Artificial Sequence
  derived and/or modified CDS sequence (opt4) from neuraminidase__InfluenzaA__ADT79001
augaaccccaaccagaagaucaucaccaucggcagcaucagccugaccaucgccaccaucugcuuccugaugcagaucgccauccuggugaccaccgugacccugcacuucaagcaguacgagugcgacagccccgccaacaaccaggugaugcccugcgagcccaucaucaucgagagaaacaucaccgagaucguguaccugaccaacaccaccaucgagaaggagaucugccccaagcugguggaguacagaaacuggagcaagccccagugcaagaucaccggcuucgcccccuucagcaaggacaacagcaucagacugagcgccggcggcgacaucugggugaccagagagcccuacgugagcugcgaccccggcaagugcuaccaguucgcccugggccagggcaccacccuggacaacaagcacagcaacgacaccauccacgacagaaucccccacagaacccugcugaugaacgagcugggcgugcccuuccaccugggcaccagacaggugugcaucgccuggagcagcagcagcugccacgacggcaaggccuggcugcacgugugcgugaccggcgacgacaagaacgccaccgccagcuucaucuacgacggcagacugguggacagcaucggcagcuggagccagaacauccugagaacccaggagagcgagugcgugugcaucaacggcaccugcaccguggugaugaccgacggcagcgccagcggcaaggccgacaccagaauccuguucaucgaggagggcaagaucgugcacaucagcccccugagcggcagcgcccagcacguggaggagugcagcugcuaccccagauaccccggcgugagaugcaucugcagagacaacuggaagggcagcaacagacccgugguggacaucaacgugaaggacuacagcaucgacagcagcuacgugugcagcggccuggugggcgacacccccagaaacaacgacagaagcagcagcagcuacugcagaaaccccaacaacgagagaggcaaccacggcgugaagggcugggccuucgacgacggcaacgacguguggaugggcagaaccaucagcaaggacagcagaagcggcuacgagaccuucaaggugaucggcggcuggagcacccccaacagcaagagccagaucaacagacaggugaucguggacagcgacaacagaagcggcuacagcggcaucuucagcguggagggcaagagcugcaucaacagaugcuucuacguggagcugaucagaggcagagagcaggagaccagagugugguggaccagcaacagcaucgugguguucugcggcaccagcggcaccuacggcaccggcagcuggcccgacggcgccgacaucaaccugaugcccaucuga

SEQ ID NO: 180188 - RNA, 1410 nt, Artificial Sequence; identical to SEQ ID NO: 174178
  derived and/or modified CDS sequence (opt4) from neuraminidase__InfluenzaA__ADT79021

SEQ ID NO: 180189 - RNA, 1410 nt, Artificial Sequence
  derived and/or modified CDS sequence (opt4) from neuraminidase__InfluenzaA__ADT79041
augaaccccaaccagaagaucaucaccaucggcagcgugagccugaccaucgccaccgugugcuuccugaugcagaucgccauccuggugaccaccgugacccugcacuucagacaguacgagugcgacagccccgccaacaaccaggugaugcccugcgagcccaucaucaucgagagaaacaucaccgagaucguguaccugaacaacaccaccaucgagaaggagaucugccccaagcugguggaguacagaaacuggagcaagccccagugcaagaucaccggcuucgcccccuucagcaaggacaacagcaucagacugagcgccggcggcgacaucugggugaccagagagcccuacgugagcugcgaccccggcaagugcuaccaguucgcccugggccagggcaccacccuggacaacaagcacagcaacgacaccauccacgacagaaucccccacagaacccugcugaugaacgagcugggcgugcccuuccaccugggcaccagacaggugugcaucgccuggagcagcagcagcugccacgacggcaaggccuggcugcacgugugcgugaccggcgacgacaagaacgccaccgccagcuucaucuacgacggcagacugguggacagcaucggcagcuggagccagaacauccugagaacccaggagagcgagugcgugugcaucaacggcaccugcaccguggugaugaccgacggcagcgccagcggcagagccgacaccaagauccuguucaucgaggagggcaagaucgugcacaucagcccccugagcggcagcgcccagcacguggaggagugcagcugcuaccccagauaccccggcgugagaugcaucugcagagacaacuggaagggcagcaacagacccgugguggacaucaacguggaggacuacagcaucgacagcagcuacgugugcagcggccuggugggcgacacccccagaaacaacgacagaagcagcaacagcaacugcagaaaccccaacaacgagagaggcaaccacggcgugaagggcugggccuucgacgacggcaacgacguguggaugggcagaaccaucagcaaggaccugagaagcggcuacgagaccuucaaggugaucggcggcuggagcacccccaacagcaagagccagaucaacagacaggugaucguggacagcgacaacagaagcggcuacagcggcaucuucagcguggagggcaagagcugcaucaacagaugcuucuacguggagcugaucagaggcagagagcaggagaccagagugugguggaccagcaacagcaucgugguguucugcggcaccagcggcaccuacggcaccggcagcuggcccgacggcgccgacaucaaccugaugcccaucuga

SEQ ID NO: 180190 - RNA, 1410 nt, Artificial Sequence; identical to SEQ ID NO: 175820
  derived and/or modified CDS sequence (opt4) from neuraminidase__InfluenzaA__ADT79121

SEQ ID NO: 180191 - RNA, 1410 nt, Artificial Sequence
  derived and/or modified CDS sequence (opt4) from neuraminidase__InfluenzaA__ADT79131
augaaccccaaccagaagaucaucaccaucggcagcgugagccugaccaucgccaccgugugcuuccugaugcagaucgccauccuggccaccaccgugacccugcacuucaagcagcacgagugcgacagccccgccagcaaccaggugaugcccugcgagcccaucaucaucgagagaaacaucaccgagaucguguaccugaacaacaccaccaucgagaaggagaucugccccgaggugguggaguacagaaacuggagcaagccccagugccagaucaccggcuucgcccccuucagcaaggacaacagcaucagacugagcgccggcggcgacaucugggugaccagagagcccuacgugagcugcgaccccggcaagugcuaccaguucgcccugggccagggcaccacccuggacaacaagcacagcaacggcaccauccacgacagaaucccccacagaacccugcugaugaacgagcugggcgugcccuuccaccugggcaccaagcaggugugcguggccuggagcagcagcagcugccacgacggcaaggccuggcugcacgugugcgugaccggcgacgacagaaacgccaccgccagcuucaucuacgacggcagacuggaggacagcaucggcagcuggagccagaacauccugagaacccaggagagcgagugcgugugcaucaacggcaccugcaccguggugaugaccgacggcagcgccagcggcagagccgacaccagaauccuguucaucaaggagggcaagaucgugcacaucagcccccugagcggcagcgcccagcacaucgaggagugcagcugcuaccccagauaccccgacgugagaugcaucugcagagacaacuggaagggcagcaacagacccgugcuggacaucagcauggaggacuacagcaucgacagcagcuacgugugcagcggccuggugggcgacacccccagaaacgacgacagcagcagcaacagcaacugcagagaccccaacaacgagagaggcaaccccggcgugaagggcugggccuucgacaacggcgacgacguguggaugggcagaaccaucagcaaggaccugagaagcggcuacgagaccuucaaggugaucggcggcuggagcacccccaacagcaagagccaggugaacagacaggugaucguggacaacaacaacuggagcggcuacagcggcaucuucagcguggagggcaagagcugcaucaacagaugcuucuacguggagcugaucagaggcagaagccaggagaccagagugugguggaccagcaacagcaucgugguguucugcggcaccagcggcaccuacggcaccggcagcuggcccgacggcgccaacaucaacuucaugcccaucuga

SEQ ID NO: 180192 - RNA, 1410 nt, Artificial Sequence; identical to SEQ ID NO: 176798
  derived and/or modified CDS sequence (opt4) from neuraminidase__InfluenzaA__ADT79234

SEQ ID NO: 180193 - RNA, 1410 nt, Artificial Sequence; identical to SEQ ID NO: 176788
  derived and/or modified CDS sequence (opt4) from neuraminidase__InfluenzaA__ADT79244

SEQ ID NO: 180194 - RNA, 1410 nt, Artificial Sequence
  derived and/or modified CDS sequence (opt4) from neuraminidase__InfluenzaA__ADU25480
augaaccccaaccagaagaucaucaucaucagcagcaucugccugaucaacggcaucaccagccugauccugcagaucggcaacaucaucagcaucuggaucagccacagcauccagaucggcaaccagaaccagaccgagaccugcagccagaacaucaucaccuacgagaacaacaccugggugaaccagaccuacgugaacaucagcaacaacaacuucguggccgagcaggccguggugagcaugaagcuggccggcagcagcccccugugccccgugagcggcugggccaucuacagcaaggacaacagcgugagaaucggcagcaagggcgacguguucgugaucagagagcccuucaucagcugcagccaccuggagugcagaaccuucuuccugacccagggcgcccugcugaacgacaagcacagcaacggcaccaucaaggacagaagccccuacagaacccugaugagcugccccaucggcgaggugcccagccccuacaacagcagauucgagagcguggccuggagcgccagcgccugccacgacggcaccagcuggcugaccaucggcaucagcggccccgacaacggcgccguggccgugcugaaguacaacgacaucaucaccgacaccaucaagagcuggagaaacaacauccugagaacccaggagagcgagugcgugugcgugaacggcagcugcuucaccgugaugaccgacggccccagcaacggccaggccagcuacaagaucuucaagaucgagaagggcaagguggugaagagcguggagcugaacgcccccaacuaccacuacgaggagugcagcugcuaccccgacagcggcgagaucaucugcgugugcagagacaacuggcacggcagcaacagacccugggugagcuucaaccagaaccuggaguaccagaucggcuacaucugcagcggcauccugggcgacaaccccagacccaacgacagaaccggcagcugcggccccgugagccugaacggcgccaacggcgugaagggcuucagcuucaaguacggcaacggcguguggaucggcagaaccaagagcagcagcagcagaagcggcuucgagaugaucugggaccccaacggcuggaccgagaccgacaacaacuuccuggugaagcaggacaucgugggcaugaccgacuggagcggcuacagcggcagcuucgugcagcaccccgagcugaccggcaugaacugcaugagacccugcuucuggguggagcugaucagaggcagacccaaggagaacaccaucuggaccagcggcagcagcaucagcuucugcggcgugaacagcgacaccguggacuggagcuggcccgacggcgccgagcugcccuucaccaucgacaaguga

SEQ ID NO: 180195 - RNA, 1410 nt, Artificial Sequence; identical to SEQ ID NO: 176798
  derived and/or modified CDS sequence (opt4) from neuraminidase__InfluenzaA__ADU59780

SEQ ID NO: 180196 - RNA, 1410 nt, Artificial Sequence
  derived and/or modified CDS sequence (opt4) from neuraminidase__InfluenzaA__ADU59789
augaaccccaaccagaagaucaucaccaucggcagcgugugcaugaccaucggcauggccaaccugauccugcagaucggcaacaucaucagcaucuggaucagccacagcauccagcugggcaaccagaaccagaucgagaccugcaaccagagcgugaucaccuacgagaacaacaccugggugaaccagaccuacgugaacgugagcaacaccaacuucgccgccggccagagcguggugagcgugaagcuggccggcaacagcagccugugccccgugagcggcugggccaucuacagcaaggacaacagcaucagaaucggcagcaagggcgacguguucgugaucagagagcccuucaucagcugcagcccccuggagugcagaaccuucuuccugacccagggcgcccugcugaacgacaagcacagcaacggcaccaucaaggacagaagccccuacagaacccugaugagcugccccaucggcgaggugcccagccccuacaacagcagauucgagagcguggccuggagcgccagcgccugccacgacggcaucaacuggcugaccaucggcaucagcggccccgacaacggcgccguggccgugcugaaguacaacggcaucaucaccgacaccaucaagagcuggagaaacaacauccugagaacccaggagagcgagugcgccugcgugaacggcagcugcuucaccgugaugaccgacggccccagcgacggccaggccagcuacaagaucuucagaaucgagaagggcaagaucgugaagagcguggagaugaacgcccccaacuaccacuacgaggagugcagcugcuaccccgacagcagcgagaucaccugcgugugcagagacaacuggcacggcagcaacagacccugggugagcuucaaccagaaccuggaguaccagaucggcuacaucugcagcggcaucuucggcgacaaccccagacccaacgacaagaccggcagcugcggccccgugagcagcaacggcgccaacggcgugaagggcuucagcuucaaguacggcaacggcguguggaucggcagaaccaagagcaucagcagcagaaacggcuucgagaugaucugggaccccaacggcuggaccggcaccgacaacaacuucagcaucaagcaggacaucgugggcaucaacgaguggagcggcuacagcggcagcuucgugcagcaccccgagcugaccggccuggacugcaucagacccugcuucuggguggagcugaucagaggcagacccaaggagaacaccaucuggaccagcggcagcagcaucagcuucugcggcgugaacagcgacaccgugggcuggagcuggcccgacggcgccgagcugcccuucaccaucgacaaguga

SEQ ID NO: 180197 - RNA, 1410 nt, Artificial Sequence; identical to SEQ ID NO: 176798
  derived and/or modified CDS sequence (opt4) from neuraminidase__InfluenzaA__ADU59829

SEQ ID NO: 180198 - RNA, 1410 nt, Artificial Sequence
  derived and/or modified CDS sequence (opt4) from neuraminidase__InfluenzaA__ADU59838
augaaccccaaccagaagaucaucaucaucggcagcgugugcaugaccaucggcauggccaaccugauccugcagaucggcaacaucaucagcaucuggaucagccacagcauccagcugggcaaccagaaccagaucgagaccugcaaccagagcgugaucaccuacgagaacaacaccugggugaaccagaccuacgugaacaucagcaacaccaacuucgccgccggccagagcguggugagcgugaagcuggccggcaacagcagccugugccccgugagcggcugggccaucuacagcaaggacaacagcaucagaaucggcagcaagggcgacguguucgugaucagagagcccuucaucagcugcagcccccuggagugcagaaccuucuuccugacccagggcgcccugcugaacgacaagcacagcaacggcaccaucaaggacagaagccccuacagaacccugaugagcugccccaucggcgaggugcccagccccuacaacagcagauucgagagcguggccuggagcgccagcgccugccacgacggcaucaacuggcugaccaucggcaucagcggccccgacaacggcgccguggccgugcugaaguacaacggcaucaucaccgacaccaucaagagcuggagaaacaacauccugagaacccaggagagcgagugcgccugcgugaacggcagcugcuucaccgugaugaccgacggccccagcgacggccaggccagcuacaagaucuucagaaucgagaagggcaagaucgugaagagcguggagaugaacgcccccaacuaccacuucgaggagugcagcugcuaccccgacagcagcgagaucaccugcgugugcagagacaacuggcacggcagcaacagacccugggugagcuucaaccagaaccuggaguaccagaucggcuacaucugcagcggcaucuucggcgacaaccccagacccaacgacaagaccggcagcugcggccccgugagcagcaacggcgccaacggcgugaagggcuucagcuucaaguacggcaacggcguguggaucggcagaaccaagagcaucagcagcagaaacggcuucgagaugaucugggaccccaacggcuggaccggcaccgacaacaacuucagcaucaagcaggacaucgugggcaucaacgaguggagcggcuacagcggcagcuucgugcagcaccccgagcugaccggccuggacugcaucagacccugcuucuggguggagcugaucagaggcagacccaaggagaacaccaucuggaccagcggcagcagcaucagcuucugcggcgugaacagcgacaccguggacuggagcuggcccgacggcgccgagcugcccuucaccaucgacaaguga

SEQ ID NO: 180199 - RNA, 1410 nt, Artificial Sequence; identical to SEQ ID NO: 178149
  derived and/or modified CDS sequence (opt4) from neuraminidase__InfluenzaA__ADU59847

SEQ ID NO: 180200 - RNA, 1410 nt, Artificial Sequence; identical to SEQ ID NO: 176798
  derived and/or modified CDS sequence (opt4) from neuraminidase__InfluenzaA__ADU59907

SEQ ID NO: 180201 - RNA, 1410 nt, Artificial Sequence; identical to SEQ ID NO: 176798
  derived and/or modified CDS sequence (opt4) from neuraminidase__InfluenzaA__ADU59917

SEQ ID NO: 180202 - RNA, 1410 nt, Artificial Sequence; identical to SEQ ID NO: 176798
  derived and/or modified CDS sequence (opt4) from neuraminidase__InfluenzaA__ADU59920

SEQ ID NO: 180203 - RNA, 1410 nt, Artificial Sequence; identical to SEQ ID NO: 176798
  derived and/or modified CDS sequence (opt4) from neuraminidase__InfluenzaA__ADU59941

SEQ ID NO: 180204 - RNA, 1410 nt, Artificial Sequence
  derived and/or modified CDS sequence (opt4) from neuraminidase__InfluenzaA__ADU76311
augaaccccaaccagaagaucaucaccaucggcagcgugugcaugaccaucggcauggccaaccugauccugcagaucggcaacaucaucagcaucuggaucagccacagcauccagcugggcaaccagaaccagaucgagaccugcaaccagagcgugaucaccuacgagaacaacaccugggugaaccagaccuacgugaacaucagcaacaccaacuucgccgccggccagagcguggugagcgugaagcuggccggcaacagcagccugugccccgugagcggcugggccaucuacagcaaggacaacagcaucagaaucggcagcaagggcgacguguucgugaucagagagcccuucaucagcugcagcccccuggagugcagaaccuucuuccugacccagggcgcccugcugaacgacaagcacagcaacggcaccaucaaggacagaagccccuacagaacccugaugagcugccccaucggcgaggugcccagccccuacaacagcagauucgagagcguggccuggagcgccagcgccugccacgacggcaucaacuggcugaccaucggcaucagcggccccgacaacggcgccguggccgugcugaaguacaacggcaucaucaccgacaccaucaagagcuggagaaacaacauccugagaacccaggagagcgagugcgccugcgugaacggcagcugcuucaccgugaugaccgacggccccagcgacggccaggccagcuacaagaucuucagaaucgagaagggcaagaucgugaagagcguggagaugaacgcccccaacuaccacuacgaggagugcagcugcuaccccgacagcagcgagaucaccugcgugugcagagacaacuggcacggcagcaacagacccugggugagcuucaaccagaaccuggaguaccagaucggcuacaucugcagcggcaucuucggcgacaaccccagacccaacgacaagaccggcagcugcggccccgugagcagcaacggcgccaacggcgugaagggcuucagcuucaaguacggcaacggcguguggaucggcagaaccaagagcaucagcagcagaaacggcuucgagaugaucugggaccccaacggcuggaccggcaccgacaacaacuucagcaucaagcaggacaucgugggcaucaacgaguggagcggcuacagcggcagcuucgugcagcaccccgagcugaccggccuggacugcaucagacccugcuucuggguggagcugaucagaggcagacccaaggagaacaccaucuggaccagcggcagcagcaucagcuucugcggcgugaacagcgacaccgugggcuggagcuggcccgacggcgccaagcugcccuucaccaucgacaaguga

SEQ ID NO: 180205 - RNA, 1410 nt, Artificial Sequence
  derived and/or modified CDS sequence (opt4) from neuraminidase__InfluenzaA__ADU76313
augaaccccaaccagaagaucaucaccaucggcagcgugugcaugaccaucggcauggccaaccugauccugcagaucggcaacaucaucagcaucuggaucagccacagcauccagcugggcaaccagaaccagaucgagaccugcaaccagagcgugaucaccuacgagaacaacaccugggugaaccagaccuacgugaacaucagcaacaccaacuucgccgccggccagagcguggugagcgugaagcuggccggcaacagcagccugugccccgugagcggcugggccaucuacagcaaggacaacagcaucagaaucggcagcaagggcgacguguucgugaucagagagcccuucaucagcugcagcccccuggagugcagaaccuucuuccugacccagggcgcccugcugaacgacaagcacagcaacggcaccaucaaggacagaagccccuacagaacccugaugagcugccccaucggcgaggugcccagccccuacaacagcagauucgagagcguggccuggagcgccagcgccugccacgacggcaucaacuggcugaccaucggcaucagcggccccgacaacggcgccguggccgugcugaaguacaacggcaucaucaccgacaccaucaagagcuggagaaacaacauccugagaacccaggagagcgagugcgccugcgugaacggcagcugcuucaccgugaugaccgacggccccagcgacggccaggccagcuacaagaucuucagaaucgagaagggcaagaucgugaagagcguggagaugaacgcccccaacuacuacuacgaggagugcagcugcuaccccgacagcagcgagaucaccugcgugugcagagacaacuggcacggcagcaacagacccugggugagcuucaaccagaaccuggaguaccagaucggcuacaucugcagcggcaucuucggcgacaaccccagacccaacgacaagaccggcagcugcggccccgugagcagcaacggcgccaacggcgugaagggcuucagcuucaaguacggcaacggcguguggaucggcagaaccaagagcaucagcagcagaaacggcuucgagaugaucugggaccccaacggcuggaccggcaccgacaacaacuucagcaucaagcaggacaucgugggcaucaacgaguggagcggcuacagcggcagcuucgugcagcaccccgagcugaccggccuggacugcaucagacccugcuucuggguggagcugaucagaggcagacccaaggagaacaccaucuggaccagcggcagcagcaucagcuucugcggcgugaacagcgacaccgugggcuggagcuggcccgacggcgccaagcugcccuucaccaucgacaaguga

SEQ ID NO: 180206 - RNA, 1410 nt, Artificial Sequence; identical to SEQ ID NO: 180205
  derived and/or modified CDS sequence (opt4) from neuraminidase__InfluenzaA__ADU76314

SEQ ID NO: 180207 - RNA, 1410 nt, Artificial Sequence; identical to SEQ ID NO: 180205
  derived and/or modified CDS sequence (opt4) from neuraminidase__InfluenzaA__ADU76315

SEQ ID NO: 180208 - RNA, 1410 nt, Artificial Sequence; identical to SEQ ID NO: 180205
  derived and/or modified CDS sequence (opt4) from neuraminidase__InfluenzaA__ADU76316

SEQ ID NO: 180209 - RNA, 1410 nt, Artificial Sequence
  derived and/or modified CDS sequence (opt4) from neuraminidase__InfluenzaA__ADU76317
augaaccccaaccagaagaucaucaccaucggcagcgugugcaugaccaucggcauggccaaccugauccugcagaucggcaacaucaucagcaucuggaucagccacagcauccagcugggcaaccagaaccagaucgagaccugcaaccagagcgugaucaccuacgagaacaacaccugggugaaccagaccuacgugaacaucagcaacaccaacuucgccgccggccagagcguggugagcgugaagcuggccggcaacagcagccugugccccgugagcggcugggccaucuacagcaaggacaacagcaucagaaucggcagcaagggcgacguguucgugaucagagagcccuucaucagcugcagcccccuggagugcagaaccuucuuccugacccagggcgcccugcugaacgacaagcacagcaacggcaccaucaaggacagaagccccuacagaacccugaugagcugccccaucggcgaggugcccagccccuacaacagcagauucgagagcguggccuggagcgccagcgccugccacgacggcaucaacuggcugaccaucggcaucagcggccccgacaacggcgccguggccgugcugaaguacaacggcaucaucaccgacaccaucaagagcuggagaaacaacauccugagaacccaggagagcgagugcgccugcgugaacggcagcugcuucaccgugaugaccgacggccccagcgacggccaggccagcuacaagaucuucagaaucgagaagggcaagaucgugaagagcguggagaugaacgcccccaacuaccacuacgaggagugcagcugcuaccccgacagcagcgagaucaccugcgugugcagagacaacuggcacggcagcaacagacccugggugagcuucaaccagaaccuggaguaccagaucggcuacaucugcagcggcaucuucggcgacaaccccagacccaacgacaagaccggcagcugcggccccgugagcagcaacggcgccaacggcgugaagggcuucagcuucaaguacggcaacggcguguggaucggcagaaccaagagcaccagcagcagaaacggcuucgagaugaucugggaccccaacggcuggaccggcaccgacaacaacuucagcaucaagcaggacaucgugggcaucaacgaguggagcggcuacagcggcagcuucgugcagcaccccgagcugaccggccuggacugcaucagacccugcuucuggguggagcugaucagaggcagacccaaggagaacaccaucuggaccagcggcagcagcaucagcuucugcggcgugaacagcgacaccgugggcuggagcuggcccgacggcgccgagcugcccuucaccaucgacaaguga

SEQ ID NO: 180210 - RNA, 1410 nt, Artificial Sequence
  derived and/or modified CDS sequence (opt4) from neuraminidase__InfluenzaA__ADU76318
augaaccccaaccagaagaucaucaccaucggcagcgugugcaugaccaucggcauggccaaccugauccugcagaucggcaacaucaucagcaucuggaucagccacagcauccagcugggcaaccagaaccagaucgagaccugcaaccagagcgugaucaccuacgagaacaacaccugggugaaccagaccuacgugaacaucagcaacaccaacuucgccgccggccagagcguggugagcgugaagcuggccggcaacagcagccugugccccgugagcggcugggccaucuacagcaaggacaacagcaucagaaucggcagcaagggcgacguguucgugaucagagagcccuucaucagcugcagcccccuggagugcagaaccuucuuccugacccagggcgcccugcugaacgacaagcacagcaacggcaccaucaaggacagaagccccuacagaacccugaugagcugccccaucggcgaggugcccagccccuacaacagcagauucgagagcguggccuggagcgccagcgccugccacgacggcaucaacuggcugaccaucggcaucagcggccccgacaacggcgccguggccgugcugaaguacaacggcaucaucaccgacaccaucaagagcuggagaaacaacauccugagaacccaggagagcgagugcgccugcgugaacggcagcugcuucaccgugaugaccgacggccccagcgacggccaggccagcuacaagaucuucagaaucgagaagggcaagaucgugaagagcguggagaugaacgcccccaacuaccacuacgaggagugcagcugcuaccccgacagcagcgagaucaccugcgugugcagagacaacuggcacggcagcaacagacccugggugagcuucaaccacaaccuggaguaccagaucggcuacaucugcagcggcaucuucggcgacaaccccagacccaacgacaagaccggcagcugcggccccgugagcagcaacggcgccaacggcgugaagggcuucagcuucaaguacggcaacggcguguggaucggcagaaccaagagcaucagcagcagaaacggcuucgagaugaucugggaccccaacggcuggaccggcaccgacaacaacuucagcaucaagcaggacaucgugggcaucaacgaguggagcggcuacagcggcagcuucgugcagcaccccgagcugaccggccuggacugcaucagacccugcuucuggguggagcugaucagaggcagacccaaggagaacaccaucuggaccagcggcagcagcaucagcuucugcggcgugaacagcgacaccgugggcuggagcuggcccgacggcgccgagcugcccuucaccaucgacaaguga

SEQ ID NO: 180211 - RNA, 1410 nt, Artificial Sequence; identical to SEQ ID NO: 178041
  derived and/or modified CDS sequence (opt4) from neuraminidase__InfluenzaA__ADU76319

SEQ ID NO: 180212 - RNA, 1410 nt, Artificial Sequence; identical to SEQ ID NO: 176798
  derived and/or modified CDS sequence (opt4) from neuraminidase__InfluenzaA__ADU76320

SEQ ID NO: 180213 - RNA, 1410 nt, Artificial Sequence; identical to SEQ ID NO: 176798
  derived and/or modified CDS sequence (opt4) from neuraminidase__InfluenzaA__ADU76321

SEQ ID NO: 180214 - RNA, 1410 nt, Artificial Sequence
  derived and/or modified CDS sequence (opt4) from neuraminidase__InfluenzaA__ADU76322
augaaccccaaccagaagaucaucaccaucggcagcgugugcaugaccaucggcauggccaaccugauccugcagaucggcaacaucaucagcaucuggaucagccacagcauccagcugggcaaccagaaccagaucgagaccugcaaccagagcgugaucaccuacgagaacaacaccugggugaaccagaccuacgugaacaucagcaacaccaacuucgccgccggccagagcguggugagcgugaagcuggccggcaacagcagccugugccccgugagcggcugggccaucuacagcaaggacaacagcaucagaaucggcagcaagggcgacguguucgugaucagagagcccuucaucagcugcagcccccuggagugcagaaccuucuuccugacccagggcgcccugcugaacgacaagcacagcaacggcaccaucaaggacagaagccccuacagaacccugaugagcugccccaucggcgaggugcccagccccuacaacagcagauucgagagcguggccuggagcgccagcgccugccacgacggcaucaacuggcugaccaucggcaucagcggccccgacaacggcgccguggccgugcugaaguacaacggcaucaucaccgacaccaucaagagcuggagaaacaacauccugagaacccaggagagcgagugcgccugcgugaacggcagcugcuucaccgugaugaccgacggccccagcgacggccaggccagcuacaagaucuucagaaucgagaagggcaagguggugaagagcguggagaugaacgcccccaacuaccacuacgaggagugcagcugcuaccccgacagcagcgagaucaccugcgugugcagagacaacuggcacggcagcaacagacccugggugagcuucaaccagaaccuggaguaccagaucggcuacaucugcagcggcaucuucggcgacaaccccagacccaacgacaagaccggcagcugcggccccgugagcagcaacggcgccaacggcgugaagggcuucagcuucaaguacggcaacggcguguggaucggcagaaccaagagcaucagcagcagaaacggcuucgagaugaucugggaccccaacggcuggaccggcaccgacaacaacuucagcaucaagcaggacaucgugggcaucaacgaguggagcggcuacagcggcagcuucgugcagcaccccgagcugaccggccuggacugcaucagacccugcuucuggguggagcugaucagaggcagacccaaggagaacaccaucuggaccagcggcagcaucaucagcuucugcggcgugaacagcgacaccgugggcuggagcuggcccgacggcgccgagcugcccuucaccaucgacaaguga

SEQ ID NO: 180215 - RNA, 1410 nt, Artificial Sequence; identical to SEQ ID NO: 180204
  derived and/or modified CDS sequence (opt4) from neuraminidase__InfluenzaA__ADU76323

SEQ ID NO: 180216 - RNA, 1410 nt, Artificial Sequence; identical to SEQ ID NO: 180205
  derived and/or modified CDS sequence (opt4) from neuraminidase__InfluenzaA__ADU76324

SEQ ID NO: 180217 - RNA, 1410 nt, Artificial Sequence; identical to SEQ ID NO: 180204
  derived and/or modified CDS sequence (opt4) from neuraminidase__InfluenzaA__ADU76325

SEQ ID NO: 180218 - RNA, 1410 nt, Artificial Sequence; identical to SEQ ID NO: 180205
  derived and/or modified CDS sequence (opt4) from neuraminidase__InfluenzaA__ADU76326

SEQ ID NO: 180219 - RNA, 1410 nt, Artificial Sequence; identical to SEQ ID NO: 180205
  derived and/or modified CDS sequence (opt4) from neuraminidase__InfluenzaA__ADU76327

SEQ ID NO: 180220 - RNA, 1410 nt, Artificial Sequence; identical to SEQ ID NO: 180204
  derived and/or modified CDS sequence (opt4) from neuraminidase__InfluenzaA__ADU76328

SEQ ID NO: 180221 - RNA, 1410 nt, Artificial Sequence; identical to SEQ ID NO: 180205
  derived and/or modified CDS sequence (opt4) from neuraminidase__InfluenzaA__ADU76329

SEQ ID NO: 180222 - RNA, 1410 nt, Artificial Sequence; identical to SEQ ID NO: 180205
  derived and/or modified CDS sequence (opt4) from neuraminidase__InfluenzaA__ADU76330

SEQ ID NO: 180223 - RNA, 1410 nt, Artificial Sequence; identical to SEQ ID NO: 180205
  derived and/or modified CDS sequence (opt4) from neuraminidase__InfluenzaA__ADU76331

SEQ ID NO: 180224 - RNA, 1410 nt, Artificial Sequence; identical to SEQ ID NO: 180205
  derived and/or modified CDS sequence (opt4) from neuraminidase__InfluenzaA__ADU76332

SEQ ID NO: 180225 - RNA, 1410 nt, Artificial Sequence; identical to SEQ ID NO: 176798
  derived and/or modified CDS sequence (opt4) from neuraminidase__InfluenzaA__ADU76333

SEQ ID NO: 180226 - RNA, 1410 nt, Artificial Sequence; identical to SEQ ID NO: 176798
  derived and/or modified CDS sequence (opt4) from neuraminidase__InfluenzaA__ADU76334

SEQ ID NO: 180227 - RNA, 1410 nt, Artificial Sequence; identical to SEQ ID NO: 176798
  derived and/or modified CDS sequence (opt4) from neuraminidase__InfluenzaA__ADU76335

SEQ ID NO: 180228 - RNA, 1410 nt, Artificial Sequence; identical to SEQ ID NO: 180205
  derived and/or modified CDS sequence (opt4) from neuraminidase__InfluenzaA__ADU76336

SEQ ID NO: 180229 - RNA, 1410 nt, Artificial Sequence; identical to SEQ ID NO: 177565
  derived and/or modified CDS sequence (opt4) from neuraminidase__InfluenzaA__ADU76337

SEQ ID NO: 180230 - RNA, 1410 nt, Artificial Sequence; identical to SEQ ID NO: 178700
  derived and/or modified CDS sequence (opt4) from neuraminidase__InfluenzaA__ADU76338

SEQ ID NO: 180231 - RNA, 1410 nt, Artificial Sequence; identical to SEQ ID NO: 180204
  derived and/or modified CDS sequence (opt4) from neuraminidase__InfluenzaA__ADU76339

SEQ ID NO: 180232 - RNA, 1410 nt, Artificial Sequence; identical to SEQ ID NO: 176798
  derived and/or modified CDS sequence (opt4) from neuraminidase__InfluenzaA__ADU76341

SEQ ID NO: 180233 - RNA, 1410 nt, Artificial Sequence; identical to SEQ ID NO: 176798
  derived and/or modified CDS sequence (opt4) from neuraminidase__InfluenzaA__ADU76342

SEQ ID NO: 180234 - RNA, 1410 nt, Artificial Sequence; identical to SEQ ID NO: 176798
  derived and/or modified CDS sequence (opt4) from neuraminidase__InfluenzaA__ADU76343

SEQ ID NO: 180235 - RNA, 1410 nt, Artificial Sequence; identical to SEQ ID NO: 180205
  derived and/or modified CDS sequence (opt4) from neuraminidase__InfluenzaA__ADU76344

SEQ ID NO: 180236 - RNA, 1410 nt, Artificial Sequence; identical to SEQ ID NO: 180205
  derived and/or modified CDS sequence (opt4) from neuraminidase__InfluenzaA__ADU76345

SEQ ID NO: 180237 - RNA, 1410 nt, Artificial Sequence
  derived and/or modified CDS sequence (opt4) from neuraminidase__InfluenzaA__ADU76346
augaaccccaaccagaagaucaucaccaucggcagcgugugcaugaccaucggcauggccaaccugauccugcagaucggcaacaucaucagcaucuggaucagccacagcauccagcugggcaaccagaaccagaucgagaccugcaaccagagcgugaucaccuacgagaacaacaccugggugaaccagaccuacgugaacaucagcaacaccaacuucgccgccggccagagcguggugagcgugaagcuggccggcaacagcagccugugccccgugagcggcugggccaucuacagcaaggacaacagcaucagaaucggcagcaagggcgacguguucgugaucagagagcccuucaucagcugcagcccccuggagugcagaaccuucuuccugacccagggcgcccugcugaacgacaagcacagcaacggcaccaucaaggacagaagccccuacagaacccugaugagcugccccaucggcgaggugcccagccccuacaacagcagauucgagagcguggccuggagcgccagcgccugccacgacggcaucaacuggcugaccaucggcaucagcggccccgacaacggcgccguggccgugcugaaguacaacggcaucaucaccgacaccaucaagagcuggagaaacaacauccugagaacccaggagagcgagugcgccugcgugaacggcagcugcuucaccgugaugaccgacggccccagcgacggccaggccagcuacaagaucuucagaaucgagaagggcaagaucgugaagagcguggagaugaacgcccccaacuaccacuacgaggagugcagcugcuaccccgacagcagcgagaucaccugcgugugcagagacaacuggcacggcagcaacagacccugggugagcuucaaccagaaccuggaguaccagaucggcuacaucugcagcggcaucuucggcgacaaccccagacccaacgacaagaccggcagcugcggccccgugagcagcaacggcgccaacggcgugaagggcuucagcuucaaguacggcaacggcguguggaucggcagaaccaagagcaucagcagcagaaacggcuucgagaugaucugggaccccaacggcuggaccgagaccgacaacaacuucagcaucaagcaggacaucgugggcaucaacgaguggagcggcuacagcggcagcuucgugcagcaccccgagcugaccggccuggacugcaucagacccugcuucuggguggagcugaucagaggcagacccaaggagaacaccaucuggaccagcggcagcagcaucagcuucugcggcgugaacagcgacaccgugggcuggagcuggcccgacggcgccgagcugcccuucaccaucgacaaguga

SEQ ID NO: 180238 - RNA, 1410 nt, Artificial Sequence; identical to SEQ ID NO: 177565
  derived and/or modified CDS sequence (opt4) from neuraminidase__InfluenzaA__ADU76347

SEQ ID NO: 180239 - RNA, 1410 nt, Artificial Sequence
  derived and/or modified CDS sequence (opt4) from neuraminidase__InfluenzaA__ADV17285
augaaccccaaccaggagaucaucaccaucggcagcgugugcaugaccaucggcauggccaaccugauccugcagaucggcaacaucaucagcaucuggaucagccacagcauccagcugggcaaccagaaccagaucgagaccugcaaccagagcgugaucaccuacgagaacaacaccugggugaaccagaccuacgugaacaucagcaacaccaacuucgccgccggccagagcguggugagcgugaagcuggccggcaacagcagccugugccccgugagcggcugggccaucuacagcaaggacaacagcaucagaaucggcagcaagggcgacguguucgugaucagagagcccuucaucagcugcagcccccuggagugcagaaccuucuuccugacccagggcgcccugcugaacgacaagcacagcaacggcaccaucaaggacagaagccccuacagaacccugaugagcugccccaucggcgaggugcccagccccuacaacagcagauucgagagcguggccuggagcgccagcgccugccacgacggcaucaacuggcugaccaucggcaucagcggccccgacaacggcgccguggccgugcugaaguacaacggcaucaucaccgacaccaucaagagcuggagaaacaacauccugagaacccaggagagcgagugcgccugcgugaacggcagcugcuucaccgugaugaccgacggccccagcgacggccaggccagcuacaagaucuucagaaucgagaagggcaagaucgugaagagcguggagaugaacgcccccaacuaccacuacgaggagugcagcugcuaccccgacagcagcgagaucaccugcgugugcagagacaacuggcacggcagcaacagacccugggugagcuucaaccagaaccuggaguaccagaucggcuacaucugcagcggcaucuucggcgacaaccccagacccaacgacaagaccggcagcugcggccccgugagcagcaacggcgccaacggcgugaagggcuucagcuucagauacggcaacggcguguggaucggcagaaccaagagcaucagcagcagaaacggcuucgagaugaucugggaccccaacggcuggaccggcaccgacaacaacuucagcaucaagcaggacaucgugggcaucaacgaguggagcggcuacagcggcagcuucgugcagcaccccgagcugaccggccuggacugcaucagacccugcuucuggguggagcugaucagaggcagacccaaggagaacaccaucuggaccagcggcagcagcaucagcuucugcggcgugaacagcgacaccgugggcuggagcuggcccgacggcgccgagcugcccuucaccaucgacaaguga

SEQ ID NO: 180240 - RNA, 1410 nt, Artificial Sequence; identical to SEQ ID NO: 176798
  derived and/or modified CDS sequence (opt4) from neuraminidase__InfluenzaA__ADV17295

SEQ ID NO: 180241 - RNA, 1410 nt, Artificial Sequence
  derived and/or modified CDS sequence (opt4) from neuraminidase__InfluenzaA__ADV17305
augaaccccaaccagaagaucaucaccaucggcagcgugugcaugaccaucggcauggccaaccugauccugcagaucggcaacaucaucagcaucuggaucagccacagcauccagcugggcaaccagaaccagaucgagaccugcaaccagagcgugaucaccuacgagaacaacaccugggugaaccagaccuacgugaacaucagcaacaccaacuucgccgccggccagagcguggugagcgugaagcuggccggcaacagcagccugugccccgugagcggcugggccaucuacagcaaggacaacagcaucagaaucggcagcaagggcgacguguucgugaucagagagcccuucaucagcugcagcagccuggagugcagaaccuucuuccugacccagggcgcccugcugaacgacaagcacagcaacggcaccaucaaggacagaagccccuacagaacccugaugagcugccccaucggcgaggugcccagccccuacaacagcagauucgagagcguggccuggagcgccagcgccugccacgacggcaucaacuggcugaccaucggcaucagcggcagcgacaacggcgccguggccgugcugaaguacaacggcaucaucaccgacaccaucaagagcuggagaaacaacauccugagaacccaggagagcgagugcgccugcgugaacggcagcugcuucaccaucaugaccgacggccccagcgacggccaggccagcuacaagaucuucagaaucgagaagggcaagaucgugaagagcguggagaugaacgcccccaacuaccacuacgaggagugcagcugcuaccccgacagcagcgagaucaccugcgugugcagagacaacuggcacggcagcaacagacccugggugagcuucaaccagaaccuggaguaccagaucggcuacaucugcagcggcaucuucggcgacaaccccagacccaacgacaagaccggcagcugcggccccgugagcagcaacggcgccaacggcgugaagggcuucagcuucaaguacggcaacggcguguggaucggcagaaccaagagcaucagcagcagaaacggcuucgagaugaucugggaccccaacggcuggaccggcaccgacaacaacuucagcaucaagcaggacaucgugggcaucaacgaguggagcggcuacagcggcagcuucgugcagcaccccgagcugaccggccuggacugcaucagacccugcuucuggguggagcugaucagaggcagacccaaggagaacaccaucuggaccagcggcagcagcaucagcuucugcggcgugaacagcgacaccgugggcuggagcuggcccgacggcgccgagcugcccuucaccaucgacaaguga

SEQ ID NO: 180242 - RNA, 1410 nt, Artificial Sequence; identical to SEQ ID NO: 176798
  derived and/or modified CDS sequence (opt4) from neuraminidase__InfluenzaA__ADV17315

SEQ ID NO: 180243 - RNA, 1410 nt, Artificial Sequence; identical to SEQ ID NO: 178229
  derived and/or modified CDS sequence (opt4) from neuraminidase__InfluenzaA__ADV17325

SEQ ID NO: 180244 - RNA, 1410 nt, Artificial Sequence
  derived and/or modified CDS sequence (opt4) from neuraminidase__InfluenzaA__ADV17335
augaaccccaaccagaagaucaucaccaucggcagcgugugcaugaccaucggcauggccaaccugauccugcagaucggcaacaucaucagcaucuggaucagccacagcauccagcugggcaaccagaaccagaucgagaccugcaaccagagcgugaucaccuacgagaacaacaccugggugaaccagaccuacgugaacaucagcaacaccaacuucgccgccggccagagcguggugagcgugaagcuggccggcaacagcagccugugccccgugagcggcugggccaucuacagcaaggacaacagcaucagaaucggcagcaagggcgacguguucgugaucagagagcccuucaucagcugcagcccccuggagugcagaaccuucuuccugacccagggcgcccugcugaacgacaagcacagcaacggcaccaucaaggacagaagccccuacagaacccugaugagcugccccaucggcgaggugcccagccccuacaacagcagauucgagagcguggccuggagcgccagcgccugccacgacggcaucaacuggcugaccaucggcaucagcggccccgacaacggcgccguggccgugcugaaguacaacggcaucaucaccgacaccaucaagagcuggagaaacaacauccugagaacccaggagagcgagugcgccugcgugaacggcagcugcuucaccgugaugaccgacggccccagcgacggccaggccagcuacaagaucuucagaaucgagaagggcaagaucgugaagagcguggagaugaacgcccccaacuaccacuacgaggagugcagcugcuaccccgacagcagcgagaucaccugcgugugcagagacaacuggcacggcagcaacagacccugggugagcuucaaccagaaccuggaguaccagaucggcuacaucugcagcggcguguucggcgacaaccccagacccaacgacaagaccggcagcugcggccccgugagcagcaacggcgccaacggcgugaagggcuucagcuucaaguacggcaacggcguguggaucggcagaaccaagagcaucagcagcagaaacggcuucgagaugaucugggaccccaacggcuggaccggcaccgacaacaacuucagcaucaagcaggacaucgugggcaucaacgaguggagcggcuacagcggcagcuucgugcagcaccccgagcugaccggccuggacugcaucagacccugcuucuggguggagcugaucagaggcagacccaaggagaacaccaucuggaccagcggcagcagcaucagcuucugcggcgugaacagcgacaccgugggcuggagcuggcccgacggcgccgagugccccuucaccaucgacaaguga

SEQ ID NO: 180245 - RNA, 1410 nt, Artificial Sequence; identical to SEQ ID NO: 176798
  derived and/or modified CDS sequence (opt4) from neuraminidase__InfluenzaA__ADV19022

SEQ ID NO: 180246 - RNA, 1410 nt, Artificial Sequence
  derived and/or modified CDS sequence (opt4) from neuraminidase__InfluenzaA__ADV41679
augaaccccaaccagaagaucaucaccaucggcagcgugugcaugaccaucggcauggccaaccugauccugcagaucggcaacaucaucagcaucuggaucagccacagcauccagcugagaaaccagaaccagaucgagaccugcaaccagagcgugaucaccuacgagaacaacaccugggugaaccagaccuacgugaacaucagcaacaccaacuucgccgccggccagagcguggugagcgugaagcuggccggcaacagcagccugugccccgugagcggcugggccaucuacagcaaggacaacagcaucagaaucggcagcaagggcgacguguucgugaucagagagcccuucaucagcugcagcccccuggagugcagaaccuucuuccugacccagggcgcccugcugaacgacaagcacagcaacggcaccaucaaggacagaagccccuacagaacccugaugagcugccccaucggcgaggugcccagccccuacaacagcagauucgagagcguggccuggagcgccagcgccugccacgacggcaucaacuggcugaccaucggcaucagcggccccgacaacggcgccguggccgugcugaaguacaacggcaucaucaccgacaccaucaagagcuggagaaacaacauccugagaacccaggagagcgagugcgccugcgugaacggcagcugcuucaccgugaugaccgacggccccagcgacggccaggccagcuacaagaucuucagaaucgagaagggcaagaucgugaagagcguggagaugaacgcccccaacuaccacuacgaggagugcagcugcuaccccgacagcagcgagaucaccugcgugugcagagacaacuggcacggcagcaacagacccugggugagcuucaaccagaaccuggaguaccagaucggcuacaucugcagcggcaucuucggcgacaaccccagacccaacgacaagaccggcagcugcggccccgugagcagcaacggcgccaacggcgugaagggcuucagcuucaaguacggcaacggcguguggaucggcagaaccaagagcaucagcagcagaaacggcuucgagaugaucugggaccccaacggcuggaccggcaccgacaacaacuucagcaucaagcaggacaucgugggcaucaacgaguggagcggcuacagcggcagcuucgugcagcaccccgagcugaccggccuggacugcaucagacccugcuucuggguggagcugaucagaggcagacccaaggagaacaccaucuggaccagcggcagcagcaucagcuucugcggcgugaacagcgacaccgugggcuggagcuggcccgacggcgccgagcugcccuucaccaucgacaaguga

SEQ ID NO: 180247 - RNA, 1410 nt, Artificial Sequence
  derived and/or modified CDS sequence (opt4) from neuraminidase__InfluenzaA__ADV76582
augaaccccaaccagaagaucaucaccaucggcagcgugagccugaccaucagcaccgugugcuucuucaugcagaucgccauccugaucaccaccgugacccugcacuucaagcaguacgaguucaacagcccccccaacaaccaggugaugcugugcgagcccaccaucaucgagagaaacaucaccgagaucguguaccugaccaacaccaccaucgagaaggagaucugccccaagcuggccgaguacagaaacuggagcaagccccagugcgacaucaccggcuucgcccccuucagcaaggacaacagcaucagacugagcgccggcggcgacaucugggugaccagagagcccuacgugagcugcgaccccgacaagugcuaccaguucgcccugggccagggcaccacccugaacaacgugcacagcaacaacaccgugagagacagaacccccuacagaacccugcugaugaacgagcugggcgugcccuuccaccugggcaccaagcaggugugcaucgccuggagcagcagcagcugccacgacggcaaggccuggcugcacgugugcaucaccggcgacgacaagaacgccaccgccagcuucaucuacaacggcagacugguggacagcguggugagcuggagcaaggagauccugagaacccaggagagcgagugcgugugcaucaacggcaccugcaccguggugaugaccgacggcagcgccagcggcaaggccgacaccaagauccuguucaucgaggagggcaagaucgugcacaccagcacccugagcggcagcgcccagcacguggaggagugcagcugcuaccccagauaccccggcgugagaugcgugugcagagacaacuggaagggcagcaacagacccaucguggacaucaacaucaaggaccacagcaucgugagcagcuacgugugcagcggccuggugggcgacacccccagaaagaacgacagcagcagcagcagccacugccuggaccccaacaacgaggagggcggccacggcgugaagggcugggccuucgacgacggcaacgacguguggaugggcagaaccaucaacgagaccagcagacugggcuacgagaccuucaaggugaucgagggcuggagcaaccccaagagcaagcugcagaucaacagacaggugaucguggacaagggcaacagaagcggcuacagcggcaucuucagcguggagggcaagagcugcaucaacagaugcuucuacguggagcugaucagaggcagaaaggaggagaccgaggugcuguggaccagcaacagcaucgugguguucugcggcaccagcggcaccuacggcaccggcagcuggcccgacggcgccgaccugaaccugaugcccaucuga

SEQ ID NO: 180248 - RNA, 1410 nt, Artificial Sequence; identical to SEQ ID NO: 176659
  derived and/or modified CDS sequence (opt4) from neuraminidase__InfluenzaA__ADV76590

SEQ ID NO: 180249 - RNA, 1410 nt, Artificial Sequence; identical to SEQ ID NO: 176659
  derived and/or modified CDS sequence (opt4) from neuraminidase__InfluenzaA__ADV76601

SEQ ID NO: 180250 - RNA, 1410 nt, Artificial Sequence; identical to SEQ ID NO: 177652
  derived and/or modified CDS sequence (opt4) from neuraminidase__InfluenzaA__ADV76612

SEQ ID NO: 180251 - RNA, 1410 nt, Artificial Sequence; identical to SEQ ID NO: 176659
  derived and/or modified CDS sequence (opt4) from neuraminidase__InfluenzaA__ADV76623

SEQ ID NO: 180252 - RNA, 1410 nt, Artificial Sequence; identical to SEQ ID NO: 176659
  derived and/or modified CDS sequence (opt4) from neuraminidase__InfluenzaA__ADV76634

SEQ ID NO: 180253 - RNA, 1410 nt, Artificial Sequence; identical to SEQ ID NO: 179526
  derived and/or modified CDS sequence (opt4) from neuraminidase__InfluenzaA__ADV76645

SEQ ID NO: 180254 - RNA, 1410 nt, Artificial Sequence
  derived and/or modified CDS sequence (opt4) from neuraminidase__InfluenzaA__ADV76667
augaaccccaaccagaagaucaucaccaucggcagcgugagccugaccaucgccaccgugugcuuccugaugcagaucgccauccuggugaccaccgugacccugcacuucaagcaguacgagugcgacagccccgccagcaaccaggugaugcccugcgagcccaucaucaucgagagaaacaucaccgagaucguguaccugaacaacaccaccaucgagaaggagaucugccccaaggugguggaguacagaaacuggagcaagccccagugccagaucaccggcuucgcccccuucagcaaggacaacagcaucagacugagcgccggcggcgacaucugggugaccagagagcccuacgugagcugcgaccacggcaagugcuaccaguucgcccugggccagggcaccacccuggacaacaagcacagcaacgacaccauccacgacagaaucccccacagaacccugcugaugaacgagcugggcgugcccuuccaccugggcaccagacaggugugcaucgccuggagcagcagcagcugccacgacggcaaggccuggcugcacgugugcaucaccggcgacgacaagaacgccaccgccagcuucaucuacgacggcagacugguggacagcaucggcagcuggagccagaacauccugagaacccaggagagcgagugcgugugcaucaacggcaccugcaccguggugaugaccgacggcagcgccagcggcagagccgacaccagaauccuguucaucgaggagggcaagaucgugcacaucagcccccugagcggcagcgcccagcacguggaggagugcagcugcuaccccagauaccccggcgugagaugcaucugcagagacaacuggaagggcagcaacagacccgugguggacaucaacauggaggacuacagcaucgacagcagcuacgugugcagcggccuggugggcgacacccccagaaacgacgacagaagcagcaacagcaagagcagaaaccccaacaacgagagaggcaaccagggcgugaagggcugggccuucgacaacggcgacgacguguggaugggcagaaccaucagcagagaccugagaagcggcuacgagaccuucaaggugaucggcggcuggagcacccccaacagcaagagccagaucaacagacaggugaucguggacagcgacaacagaagcggcuacagcggcaucuucagcguggagggcaagagcugcaucaacagaugcuucuacguggagcugaucagaggcagaaagcaggagaccagagugugguggaccagcaacagcaucgugguguucugcggcaccagcggcaccuacggcaccggcagcuggcccgacggcgccaacaucaacuucaugcccaucuga

SEQ ID NO: 180255 - RNA, 1410 nt, Artificial Sequence; identical to SEQ ID NO: 179528
  derived and/or modified CDS sequence (opt4) from neuraminidase__InfluenzaA__ADV76676

SEQ ID NO: 180256 - RNA, 1410 nt, Artificial Sequence; identical to SEQ ID NO: 178669
  derived and/or modified CDS sequence (opt4) from neuraminidase__InfluenzaA__ADV76697

SEQ ID NO: 180257 - RNA, 1410 nt, Artificial Sequence
  derived and/or modified CDS sequence (opt4) from neuraminidase__InfluenzaA__ADV76708
augaaccccaaccagaagaucaucaccaucggcagcgugagccugaccaucagcaccaucugcuucuucaugcagaccgccauccugaucaccaccgugacccugcacuucaagcagugcgaguucaacagcccccccaacaaccaggugaugcugugcgagcccaccaucaucgagagaaacaucaccgagaucguguaccugaccaacaucaccaucgagaaggagaucugccccaagcuggccgaguacagaaacuggagcaagccccagugcgacaucaccggcuucgcccccuucagcaaggacaacagcaucagacugagcgccggcggcgacaucugggugaccagagagcccuacgugagcugcgaccccgacaagugcuaccaguucgcccugggccagggcaccacccugaacaacgugcacagcaacaacaccgugagagacagaacccccuacagaacccugcugaugaacgagcugggcgugcccuuccaccugggcaccaagcaggugugcaucgccuggagcagcagcagcugccacgacggcaaggccuggcugcacgugugcaucaccggcgacgacaagaacgccaccgccagcuucaucuacaacggcagacugguggacagcguggugagcuggagcaaggagauccugagaacccaggagagcgagugcgugugcaucaacggcaccugcaccguggugaugaccgacggcagcgccagcggcaaggccgacaccaagauccuguucaucgaggagggcaagaucgugcacaccagcacccugagcggcagcgcccagcacguggaggagugcagcugcuaccccagauaccccggcgugagaugcgugugcagagacaacuggaagggcagcaacagacccaucguggacaucaacaucaaggaccacagcaucgugagcagcuacgugugcagcggccuggugggcgacacccccagaaagaacgacagcagcagcagcagccacugccuggaccccaacaacgaggagggcggccacggcgugaagggcugggccuucgacgacggcaacgacguguggaugggcagaaccaucagcgagaagagcagacugggcuacgagaccuucaaggugaucgagggcuggagcaaccccaagagcaagcugcagaucaacagacaggugaucguggacagaggcaacagaagcggcuacagcggcaucuucagcguggagggcaagagcugcaucaacagaugcuucuacguggagcugaucagaggcagaaaggaggagaccgaggugcuguggaccagcaacagcaucgugguguucugcggcaccagcggcaccuacggcaccggcagcuggcccgacggcgccgacaucaaccugaugcccaucuga

SEQ ID NO: 180258 - RNA, 1410 nt, Artificial Sequence
  derived and/or modified CDS sequence (opt4) from neuraminidase__InfluenzaA__ADV76719
augaaccccaaccagaagaucaucaccaucggcagcgugagccugaccaucagcaccaucugcuucuucaugcagaucgccauccugaucaccaccgugacccugcacuucaagcaguacgaguucaacagcccccccaacaaccaggugaugcugugcgagcccaccaucaucgagaagaacaucaccgagaucguguaccugaccaacaccaccaucgagaaggagaucugccccaagcuggccgaguacagaaacuggagcaagccccagugcgacaucaccggcuucgcccccuucagcaaggacaacagcaucagacugagcgccggcggcgacaucugggugaccagagagcccuacgugagcugcgaccccgacaagugcuaccaguucgcccugggccagggcaccacccugaacaacgugcacagcaacaacaccgugagagacagaacccccuacagaacccugcugaugaacgagcugggcgugcccuuccaccugggcaccaagcaggugugcaucgccuggagcagcagcagcugccacgacggcaaggccuggcugcacgugugcaucaccggcgacgacaagaacgccaccgccagcuucaucuacaacggcagacugguggacagcguggugagcuggagcaaggagauccugagaacccaggagagcgagugcgugugcaucaacggcaccugcaccguggugaugaccgacggcagcgccagcggcaaggccgacaccaagauccuguucaucgaggagggcaagaucgugcacaccagcacccugagcggcagcgcccagcacguggaggagugcagcugcuaccccagauaccccggcgugagaugcgugugcagagacaacuggaagggcagcaacagacccaucguggacaucaacaucaaggaccacagcaucgugagcagcuacgugugcagcggccuggugggcgacacccccagaaagaacgacagcagcagcagcagccacugccuggaccccaacaacgaggagggcggccacggcgugaagggcugggccuucgacgacggcaacgacguguggaugggcagaaccaucagcgagaagagcagacugggcuacgagaccuucaaggugaucgagggcuggagcaaccccaagagcaagcugcagaugaacagacaggugaucguggacagaggcaacagaagcggcuacagcggcaucuucagcguggagggcaagagcugcaucaacagaugcuucuacguggagcugaucagaggcagaaaggaggagaccgaggugcuguggaccagcaacagcaucgugguguucugcggcaccagcggcaccuacggcaccggcagcuggcccgacggcgccgacaucaaccugaugcccaucuga

SEQ ID NO: 180259 - RNA, 1410 nt, Artificial Sequence
  derived and/or modified CDS sequence (opt4) from neuraminidase__InfluenzaA__ADV76730
augaaccccaaccagaagaucaucaccaucggcagcgugagccugaccaucagcaccaucugcuucuucaugcagaucgccauccugaucaccaccgugacccugcacuucaagcaguacgaguucaacagcccccccaacaaccaggugaugcugugcgagcccaccaucaucgagagaaacaucaccgagaucguguaccugaccaacaccaccaucgagaaggagaucugccccaagcuggccgaguacagaaacuggagcaagccccagugcgacaucaccggcuucgcccccuucagcaaggacaacagcaucagacugagcgccggcggcgacaucugggugaccagagagcccuacgugagcugcgaccccgacaagugcuaccaguucgcccugggccagggcaccacccugaacaacgugcacagcaacaacaccgugagagacagaacccccuacagaacccugcugaugaacgagcugggcgugcccuuccaccugggcaccaagcaggugugcaucgccuggagcagcagcagcugccacgacggcaaggccuggcugcacgugugcaucaccggcgacgacaagaacgccaccgccagcuucaucuacaacggcagacugguggacagcguggugagcuggagcaaggagacccugagaacccaggagagcgagugcgugugcaucaacggcaccugcaccguggugaugaccgacggcagcgccagcggcaaggccgacaccaagauccuguucaucgaggagggcaagaucgugcacaccagcacccugagcggcagcgcccagcacguggaggagugcagcugcuaccccagauaccccggcgugagaugcgugugcagagacaacuggaagggcagcaacagacccaucguggacaucaacaucaaggaccacagcaucgugagcagcuacgugugcagcggccuggugggcgacacccccagaaaggacgacagcagcagcagcagccacugccuggaccccaacaacgaggagggcggccacggcgugaagggcugggccuucgacgacggcaacgacguguggaugggcagaaccaucagcgagaagagcagacugggcuacgagaccuucaaggugaucgagggcuggagcaaccccaagagcaagcugcagaucaacagacaggugaucguggacagaggcaacagaagcggcuacagcggcaucuucagcguggagggcaagagcugcaucaacagaugcuucuacguggagcugaucagaggcagaaaggaggagaccgaggugcuguggaccagcaacagcaucgugguguucugcggcaccagcggcaccuacggcaccggcagcuggcccgacggcgccgacaucaaccugaugcccaucuga

SEQ ID NO: 180260 - RNA, 1410 nt, Artificial Sequence
  derived and/or modified CDS sequence (opt4) from neuraminidase__InfluenzaA__ADV78132
augaaccccaaccagaagaucaucaccaucggcagcgugugcaugaccaucggcauggccaaccugauccugcagaucggcaacaucaucagcaucuggaucagccacagcauccagcugggcaaccagagccagaucgagaccugcaaccagagcgugaucaccuacgagaacaacaccuggcugaaccagaccuacgugaacaucagcaacaccaacuucgccgccggccagagcguggugagcgugaagcuggccggcaacagcagccugugccccgugagcggcugggccaucuacagcaaggacaacagcaucagaaucggcagcaagggcgacguguucgugaucagagagcccuucaucagcugcagccccagcgagugcagaaccuucuuccugacccagggcgcccugcugaacgacaagcacagcaacggcaccaucaaggacagaagccccuacagaacccugaugagcugccccaucggcgaggugcccagccccuacaacagcagauucgagagcguggccuggagcgccagcgccugccacgacggcaucaacuggcugaccaucggcaucagcggccccgacaacggcgccguggccgugcugaaguacaacggcaucaucaccgacaccaucaagagcuggagaaacaacauccugagaacccaggagagcgagugcgccugcgugaacggcagcugcuucaccaucaugaccgacggccccagcgacggccaggccagcuacaagaucuucagaaucgagaagggcaagaucgugaagagcgugggcaugaacgcccccaacuaccacuacgaggagugcagcugcuaccccgacagcagcgagaucaccugcgugugcagagacaacuggcacggcagcaacagacccugggugagcuucaaccagaaccuggaguaccagaucggcuacaucugcagcggcaucuucggcgacaaccccagacccaacgacaagaccggcagcugcggccccgugagcagcaacggcgccaacggcgugaagggcuucagcuucaaguacggcaacggcguguggaucggcagaaccaagagcaucagcagcagaaagggcuucgagaugaucugggaccccaacggcuggaccggcaccgacaacaacuucagcaucaagcaggacaucgugggcaucaacgaguggagcggcuacagcggcagcuucgugcagcaccccgagcugaccggccuggacugcaucagacccugcuucuggguggagcugaucagaggcagacccaaggagaacaccaucugggccagcggcagcagcaucagcuucugcggcgugaacagcgacaccgugggcuggagcuggcccgacggcgccgagcugcccuucaucaucgacaaguga

SEQ ID NO: 180261 - RNA, 1413 nt, Artificial Sequence
  derived and/or modified CDS sequence (opt4) from neuraminidase__InfluenzaA__ADW09104
augaaccccaaccagaagaucaucaccaucggcagcaucagcaucgccaucggcaucaucagccugaugcugcagaucggcaacaucaucagcaucugggccagccacagcauccagaccggcagccagaacaacaccggcaucugcaaccagagaaucaucaccuacgagaacagcaccugggugaaccacaccuacgugaacaucaacaacaccaacgugguggccggcgaggacaagaccagcgugacccuggccggcaacagcagccugugcagcaucagcggcugggccaucuacaccaaggacaacagcaucagaaucggcagcaagggcgacguguucgugaucagagagcccuucaucagcugcagccaccuggagugcagaaccuucuuccugacccagggcgcccugcugaacgacaagcacagcaacggcaccgugaaggacagaagccccuacagagcccugaugagcugcccccugggcgaggcccccagccccuacaacagcaaguucgagagcguggccuggagcgccagcgccugccacgacggcaugggcuggcugaccaucggcaucagcggccccgacaacggcgccguggccgugcugaaguacaacggcaucaucaccggcaccaucaagagcuggaagaagcagauccugagaacccaggagagcgagugcgugugcaugaacggcagcugcuucaccaucaugaccgacggccccaacaacaaggccgccagcuacaagaucuucaagaucgagaagggcaaggugaccaagagcaucgagcugaacgcccccaacuucuacuacgaggagugcagcugcuaccccgacaccggcaucgugaugugcgugugcagagacaacuggcacggcagcaacagacccugggugagcuucaaccagaaccuggacuaccagaucggcuacaucugcagcggcguguucggcgacaaccccagacccgaggacggcgagggcagcugcaaccccgugaccguggacggcgccaacggcgugaagggcuucagcuacaaguacggcaacggcguguggaucggcagaaccaagagcaacagacugagaaagggcuucgagaugaucugggaccccaacggcuggaccaacaccgacagcgacuucagcgugaagcaggacgugguggccaucaccgacuggagcggcuacagcggcagcuucgugcagcaccccgagcugaccggccuggacugcaucagacccugcuucuggguggagcuggugagaggccugcccagagagaacaccaccaucuggaccagcggcagcagcaucagcuucugcggcgugaacagcgacaccgccaacuggagcuggcccgacggcgccgagcugcccuucaccaucgacaaguga

SEQ ID NO: 180262 - RNA, 1413 nt, Artificial Sequence; identical to SEQ ID NO: 177521
  derived and/or modified CDS sequence (opt4) from neuraminidase__InfluenzaA__ADW09114

SEQ ID NO: 180263 - RNA, 1413 nt, Artificial Sequence
  derived and/or modified CDS sequence (opt4) from neuraminidase__InfluenzaA__ADW09123
augaaccccaaccagaagaucaucaccaucggcagcaucagcaucgccaucggcaucaccagccugaugcugcagaucggcaacaucaucagcaucugggccagccacagcauccagaccggcagccagaacaacaccggcaucugcaaccagagaaucaucaccuacgagaacagcaccugggugaaccacaccuacgugaacaucaacaacaccaacgugguggccggcgaggacaagaccagcgugacccuggccggcaacagcagccugugcagcaucagcggcugggccaucuacaccaaggacaacagcaucagaaucggcagcaagggcgacguguucgugaucagagagcccuucaucagcugcagccaccuggagugcagaaccuucuuccugacccagggcgcccugcugaacgacaagcacagcaacggcaccgugaaggacagaagccccuacagagcccugaugagcugcccccugggcgaggcccccagccccuacaacagcaaguucgagagcguggccuggagcgccagcgccugccacgacggcaugggcuggcugaccaucggcaucagcggccccgacaacggcgccguggccgugcugaaguacaacggcaucaucaccggcaccaucaagagcuggaagaagcagauccugagaacccaggagagcgagugcgugugcaugaacggcagcugcuucaccaucaugaccgacggccccagcaacaaggccgccagcuacaagaucuucaagaucgagaagggcaaggugaccaagagcaucgagcugaacgcccccaacuucuacuacgaggagugcagcugcuaccccgacaccggcaucgugaugugcgugugcagagacaacuggcacggcagcaacagacccugggugagcuucaaccagaaccuggacuaccagaucggcuacaucugcagcggcguguucggcgacaaccccagacccgaggacggcgagggcagcugcaaccccgugaccguggacggcgccgacggcgugaagggcuucagcuacaaguacggcaacggcguguggaucggcagaaccaagagcaacagacugagaaagggcuucgagaugaucugggaccccaacggcuggaccaacaccgacagcgacuucagcgugaagcaggacgugguggccaucaccgacuggagcggcuacagcggcagcuucgugcagcaccccgagcugaccggccuggacugcaucagacccugcuucuggguggagcuggugagaggccugcccagagagaacaccaccaucuggaccagcggcagcagcaucagcuucugcggcgugaacagcgacaccgccaacuggagcuggcccgacggcgccgagcugcccuucaccaucgacaaguga

SEQ ID NO: 180264 - RNA, 1413 nt, Artificial Sequence
  derived and/or modified CDS sequence (opt4) from neuraminidase__InfluenzaA__ADW09156
augaaccccaaccagaagaucaucaccaucggcagcaucagcaucgccaucggcaucaucagccugaugcugcagaucggcaacaucaucagcaucugggccagccacagcauccagaccggcagccagaacaacaccggcaucugcaaccagagaaucaucaccuacgagaacagcaccugggugaaccacaccuacgugaacaucaacaacaccaacgugguggccggcgaggacaagaccagcgugacccuggccggcaacagcagccugugcagcaucagcggcugggccaucuacaccaaggacaacagcaucagaaucggcagcaagggcgacguguucgugaucagagagcccuucaucagcugcagccaccuggagugcagaaccuucuuccugacccagggcgcccugcugaacgacaagcacagcaacggcaccgugaaggacagaagccccuacagagcccugaugagcugcccccugggcgaggcccccagccccuacaacagcaaguucgagagcguggccuggagcgccagcgccugccacgacggcaugggcuggcugaccaucggcaucagcggccccgacaacggcgccguggccgugcugaaguacaacggcaucaucaccggcaccaucaagagcuggaagaagcagauccugagaacccaggagagcgagugcgugugcaugaacggcagcugcuucaccaucaugaccgacggccccagcaacaaggccgccagcuacaagaucuucaagaucgagaagggcaaggugaccaagagcaucgagcugaacgcccccaacuucuacuacgaggagugcagcugcuaccccgacaccggcaucgugaugugcgugugcagagacaacuggcacggcagcaacagacccugggugagcuucaaccagaaccuggacuaccagaucggcuacaucugcagcggcguguucggcgacaaccccagacccgaggacggcgagggcagcugcaaccccgugaccguggacggcgccgacggcgugaagggcuucagcuacaaguacggcaacggcguguggaucggcagaaccaagagcaacagacugagaaagggcuucgagaugaucugggaccccaacggcuggaccaacaccgacagcgacuucagcgugaagcaggacgugguggccaucaccgacuggagcggcuacagcggcagcuucgugcagcaccccgagcugaccggccuggacugcaucagacccugcuucuggguggagcuggugagaggccugcccagagagaacaccaccaucuggaccagcggcagcagcaucagcuucugcggcgugaacagcgacaccgccaacuggagcuggcccgacggcgccgagcugcccuucaccaucgacaaguga

SEQ ID NO: 180265 - RNA, 1413 nt, Artificial Sequence
  derived and/or modified CDS sequence (opt4) from neuraminidase__InfluenzaA__ADW09167
augaaccccaaccagaagaucaucaccaucggcagcaucagcaucgccaucggcaucaucagccugaugcugcagaucggcaacaucaucagcaucugggccagccacagcauccagaccggcagccagaacaacaccggcaucugcaaccagagaaucaucaccuacgagaacagcaccugggugaaccacaccuacgugaacaucaacaacaccaacgugguggccggcgaggacaagaccagcgugacccuggccggcaacagcagccugugcagcaucagcggcugggccaucuacaccaaggacaacagcaucagaaucggcagcaagggcgacguguucgugaucagagagcccuucaucagcugcagccaccuggagugcagaaccuucuuccugacccagggcgcccugcugaacgacaagcacagcaacggcaccgugaaggacagaagccccuacagagcccugaugagcugcccccugggcgaggcccccagccccuacaacagcaaguucgagagcguggccuggagcgccagcgccugccacgacggcaugggcuggcugaccaucggcaucagcggccccgacaacggcgccguggccgugcugaaguacaacggcaucaucaccggcaccaucaagagcuggaagaagcagauccugagaacccaggagagcgagugcgugugcaugaacggcagcugcuucaccaucaugaccgacggccccagcaacaaggccgccagcuacaagaucuucaagaucgagaagggcaaggugaccaagagcaucgagcugaacgcccccaacuucuacuacgaggagugcagcugcuaccccgacaccggcaucgugaugugcgugugcagagacaacuggcacggcagcaacagacccugggugagcuucaaccagaaccuggacuaccagaucggcuacaucugcagcggcguguucggcgacaaccccagacccgaggacggcgagggcagcugcaaccccgugaccgugaacggcgccgacggcgugaagggcuucagcuacaaguacggcaacggcguguggaucggcagaaccaagagcaacagacugagaaagggcuucgagaugaucugggaccccaacggcuggaccaacaccgacagcgacuucagcgugaagcaggacgugguggccaucaccgacuggagcggcuacagcggcagcuucgugcagcaccccgagcugaccggccuggacugcaucagacccugcuucuggguggagcuggugagaggccugcccagagagaacaccaccaucuggaccagcggcagcagcaucagcuucugcggcgugaacagcgacaccgccaacuggagcuggcccgacggcgccgagcugcccuucaccaucgacaaguga

SEQ ID NO: 180266 - RNA, 1413 nt, Artificial Sequence; identical to SEQ ID NO: 177521
  derived and/or modified CDS sequence (opt4) from neuraminidase__InfluenzaA__ADW09178

SEQ ID NO: 180267 - RNA, 1413 nt, Artificial Sequence; identical to SEQ ID NO: 177521
  derived and/or modified CDS sequence (opt4) from neuraminidase__InfluenzaA__ADW09189

SEQ ID NO: 180268 - RNA, 1413 nt, Artificial Sequence; identical to SEQ ID NO: 180265
  derived and/or modified CDS sequence (opt4) from neuraminidase__InfluenzaA__ADW09211

SEQ ID NO: 180269 - RNA, 1413 nt, Artificial Sequence
  derived and/or modified CDS sequence (opt4) from neuraminidase__InfluenzaA__ADW09222
augaaccccaaccagaagaucaucaccaucggcagcaucagcaucgccaucggcaucaucagccugaugcugcagaucggcaacaucaucagcaucugggccagccacagcauccagaccggcagccagaacaacaccggcaucugcaaccagagaaucaucaccuacgagaacagcaccugggugaaccacaccuacgugaacaucaacaacaccaacgugguggccggcgaggacaagaccagcgugacccuggccggcaacagcagccugugcagcaucagcggcugggccaucuacaccaaggacaacagcaucagaaucggcagcaagggcgacguguucgugaucagagagcccuucaucagcugcagccaccuggagugcagaaccuucuuccugacccagggcgcccugcugaacgacaagcacagcaacggcaccgugaaggacagaagccccuacagagcccugaugagcugcccccugggcgaggcccccagccccuacaacagcaaguucgagagcguggccuggagcgccagcgccugccacgacggcaugggcuggcugaccaucggcaucagcggccccgacaacggcgccguggccgugcugaaguacaacggcaucaucaccggcaccaucaagagcuggaagaagcagauccugagaacccaggagagcgagugcgugugcaugaacggcagcugcuucaccaucaugaccgacggccccagcaacaaggccgccagcuacaagaucuucaagaucgagaagggcaaggugaccaagagcaucgagcugaacgcccccaacuucuacuacgaggagugcagcugcuaccccgacaccggcaucgugaugugcgugugcagagacaacuggcacggcagcaacagacccugggugagcuucaaccagaaccuggacuaccagaucggcuacaucugcagcggcguguucggcgacaaccccagacccgaggacggcgagggcagcugcaacagcgugaccguggacggcgccgacggcgugaagggcuucagcuacaaguacggcaacggcguguggaucggcagaaccaagagcaacagacugagaaagggcuucgagaugaucugggaccccaacggcuggaccaacaccgacagcgacuucagcgugaagcaggacgugguggccaucaccgacuggagcggcuacagcggcagcuucgugcagcaccccgagcugaccggccuggacugcaucagacccugcuucuggguggagcuggugagaggccugcccagagagaacaccaccaucuggaccagcggcagcagcaucagcuucugcggcgugaacagcgacaccgccaacuggagcuggcccgacggcgccgagcugcccuucaccaucgacaaguga

SEQ ID NO: 180270 - RNA, 1413 nt, Artificial Sequence
  derived and/or modified CDS sequence (opt4) from neuraminidase__InfluenzaA__ADW09233
augaaccccaaccagaagaucaucaccaucggcagcaucagcaucgccaucggcaccaucagccugaugcugcagaucggcaacaucaucagcaucugggccagccacagcauccagaccggcagccagaacaacaccggcaucugcaaccagagaaucaucaccuacgagaacagcaccugggugaaccacaccuacgugaacaucaacaacaccaacgugguggccggcgaggacaagaccagcgugacccuggccggcaacagcagccugugcagcaucagcggcugggccaucuacaccaaggacaacagcaucagaaucggcagcaagggcgacguguucgugaucagagagcccuucaucagcugcagccaccuggagugcagaaccuucuuccugacccagggcgcccugcugaacgacaagcacagcaacggcaccgugaaggacagaagccccuacagagcccugaugagcugcccccugggcgaggcccccagccccuacaacagcaaguucgagagcguggccuggagcgccagcgccugccacgacggcaugggcuggcugaccaucggcaucagcggccccgacaacggcgccguggccgugcugaaguacaacggcaucaucaccggcaccaucaagagcuggaagaagcagauccugagaacccaggagagcgagugcgugugcaugaacggcagcugcuucaccaucaugaccgacggccccagcaacaaggccgccagcuacaagaucuucaagaucgagaagggcaaggugaccaagagcaucgagcugaacgcccccaacuucuacuacgaggagugcagcugcuaccccgacaccggcaucgugaugugcgugugcagagacaacuggcacggcagcaacagacccugggugagcuucaaccagaaccuggacuaccagaucggcuacaucugcagcggcguguucggcgacaaccccagacccgaggacggcgagggcagcugcaaccccgugaccguggacggcgccaacggcgugaagggcuucagcuacaaguacggcaacggcguguggaucggcagaaccaagagcaacagacugagaaagggcuucgagaugaucugggaccccaacggcuggaccaacaccgacagcgacuucagcgugaagcaggacgugguggccaucaccgacuggagcggcuacagcggcagcuucgugcagcaccccgagcugaccggccuggacugcaucagacccugcuucuggguggagcuggugagaggccugcccagagagaacaccaccaucuggaccagcggcagcagcaucagcuucugcggcgugaacagcgacaccgccaacuggagcuggcccgacggcgccgagcugcccuucaccaucgacaaguga

SEQ ID NO: 180271 - RNA, 1413 nt, Artificial Sequence; identical to SEQ ID NO: 180264
  derived and/or modified CDS sequence (opt4) from neuraminidase__InfluenzaA__ADW09244

SEQ ID NO: 180272 - RNA, 1413 nt, Artificial Sequence; identical to SEQ ID NO: 180264
  derived and/or modified CDS sequence (opt4) from neuraminidase__InfluenzaA__ADW09255

SEQ ID NO: 180273 - RNA, 1413 nt, Artificial Sequence; identical to SEQ ID NO: 180264
  derived and/or modified CDS sequence (opt4) from neuraminidase__InfluenzaA__ADW09266

SEQ ID NO: 180274 - RNA, 1413 nt, Artificial Sequence; identical to SEQ ID NO: 180264
  derived and/or modified CDS sequence (opt4) from neuraminidase__InfluenzaA__ADW09277

SEQ ID NO: 180275 - RNA, 1413 nt, Artificial Sequence; identical to SEQ ID NO: 177521
  derived and/or modified CDS sequence (opt4) from neuraminidase__InfluenzaA__ADW09288

SEQ ID NO: 180276 - RNA, 1413 nt, Artificial Sequence; identical to SEQ ID NO: 180265
  derived and/or modified CDS sequence (opt4) from neuraminidase__InfluenzaA__ADW09299

SEQ ID NO: 180277 - RNA, 1413 nt, Artificial Sequence; identical to SEQ ID NO: 177521
  derived and/or modified CDS sequence (opt4) from neuraminidase__InfluenzaA__ADW09310

SEQ ID NO: 180278 - RNA, 1413 nt, Artificial Sequence; identical to SEQ ID NO: 177521
  derived and/or modified CDS sequence (opt4) from neuraminidase__InfluenzaA__ADW09330

SEQ ID NO: 180279 - RNA, 1413 nt, Artificial Sequence; identical to SEQ ID NO: 180264
  derived and/or modified CDS sequence (opt4) from neuraminidase__InfluenzaA__ADW10475

SEQ ID NO: 180280 - RNA, 1413 nt, Artificial Sequence; identical to SEQ ID NO: 180265
  derived and/or modified CDS sequence (opt4) from neuraminidase__InfluenzaA__ADW10486

SEQ ID NO: 180281 - RNA, 1413 nt, Artificial Sequence; identical to SEQ ID NO: 177521
  derived and/or modified CDS sequence (opt4) from neuraminidase__InfluenzaA__ADW10497

SEQ ID NO: 180282 - RNA, 1413 nt, Artificial Sequence
  derived and/or modified CDS sequence (opt4) from neuraminidase__InfluenzaA__ADW10508
augaaccccaaccagaagaucaucaccaucggcagcaucagcaucgccaucggcaucaucagccugaugcugcagaucggcaacaucaucagcaucugggccagccacagcauccagaccggcagccagaacaacaccggcaucugcaaccagagaaucaucaccuacgagaacagcaccugggugaaccacaccuacgugaacaucaacaacaccaacgugguggccggcgaggacaagaccagcgugacccuggccggcaacagcagccugugcagcaucagcggcugggccaucuacaccaaggacaacagcaucagaaucggcagcaagggcgacguguucgugaucagagagcccuucaucagcugcagccaccuggagugcagaaccuucuuccugacccagggcgcccuggugaacgacaagcacagcaacggcaccgugaaggacagaagccccuacagagcccugaugagcugcccccugggcgaggcccccagccccuacaacagcaaguucgagagcguggccuggagcgccagcgccugccacgacggcaugggcuggcugaccaucggcaucagcggccccgacaacggcgccguggccgugcugaaguacaacggcaucaucaccggcaccaucaagagcuggaagaagcagauccugagaacccaggagagcgagugcgugugcaugaacggcagcugcuucaccaucaugaccgacggccccagcaacaaggccgccagcuacaagaucuucaagaucgagaagggcaaggugaccaagagcaucgagcugaacgcccccaacuucuacuacgaggagugcagcugcuaccccgacaccggcaucgugaugugcgugugcagagacaacuggcacggcagcaacagacccugggugagcuucaaccagaaccuggacuaccagaucggcuacaucugcagcggcguguucggcgacaaccccagacccgaggacggcgagggcagcugcaaccccgugaccgugaacggcgccgacggcgugaagggcuucagcuacaaguacggcaacggcguguggaucggcagaaccaagagcaacagacugagaaagggcuucgagaugaucugggaccccaacggcuggaccaacaccgacagcgacuucagcgugaagcaggacgugguggccaucaccgacuggagcggcuacagcggcagcuucgugcagcaccccgagcugaccggccuggacugcaucagacccugcuucuggguggagcuggugagaggccugcccagagagaacaccaccaucuggaccagcggcagcagcaucagcuucugcggcgugaacagcgacaccgccaacuggagcuggcccgacggcgccgagcugcccuucaccaucgacaaguga

SEQ ID NO: 180283 - RNA, 1413 nt, Artificial Sequence; identical to SEQ ID NO: 177521
  derived and/or modified CDS sequence (opt4) from neuraminidase__InfluenzaA__ADW10519

SEQ ID NO: 180284 - RNA, 1413 nt, Artificial Sequence; identical to SEQ ID NO: 177521
  derived and/or modified CDS sequence (opt4) from neuraminidase__InfluenzaA__ADW10530

SEQ ID NO: 180285 - RNA, 1413 nt, Artificial Sequence
  derived and/or modified CDS sequence (opt4) from neuraminidase__InfluenzaA__ADW10541
augaaccccaaccagaagaucaucaccaucggcagcaucagcaucgccaucggcaucaucagccugaugcugcagaucggcaacaucaucagcaucugggccagccacagcauccagaccggcagccagaacaacaccggcaucugcaaccagagaaucaucaccuacgagaacagcaccugggugaaccacaccuacgugaacaucaacaacaccaacgugguggccggcgaggacaagaccagcgugacccuggccggcaacagcagccugugcagcaucagcggcugggccaucuacaccaaggacaacagcaucagaaucggcagcaagggcgacguguucgugaucagagagcccuucaucagcugcagccaccuggagugcagaaccuucuuccugacccagggcgcccugcugaacgacaagcacagcaacggcaccgugaaggacagaagccccuacagagcccugaugagcugcccccugggcgaggcccccagccccuacaacagcaaguucgagagcguggccuggagcgccagcgccugccacgacggcaugggcuggcugaccaucggcaucagcggccccgacaacggcgccguggccgugcugaaguacaacggcaucaucaccggcaccaucaagagcuggaagaagcagauccugagaacccaggagagcgagugcgugugcauggacggcagcugcuucaccaucaugaccgacggccccagcaacaaggccgccagcuacaagaucuucaagaucgagaagggcaaggugaccaagagcaucgagcugaacgcccccaacuucuacuacgaggagugcagcugcuaccccgacaccggcaucgugaugugcgugugcagagacaacuggcacggcagcaacagacccugggugagcuucaaccagaaccuggacuaccagaucggcuacaucugcagcggcguguucggcgacaaccccagacccgaggacggcgagggcagcugcaaccccgugaccguggacggcgccaacggcgugaagggcuucagcuacaaguacggcaacggcguguggaucggcagaaccaagagcaacagacugagaaagggcuucgagaugaucugggaccccaacggcuggaccaacaccgacagcgacuucagcgugaagcaggacgugguggccaucaccgacuggagcggcuacagcggcagcuucgugcagcaccccgagcugaccggccuggacugcaucagacccugcuucuggguggagcuggugagaggccugcccagagagaacaccaccaucuggaccagcggcagcagcaucagcuucugcggcgugaacagcgacaccgccaacuggagcuggcccgacggcgccgagcugcccuucaccaucgacaaguga

SEQ ID NO: 180286 - RNA, 1413 nt, Artificial Sequence
  derived and/or modified CDS sequence (opt4) from neuraminidase__InfluenzaA__ADW10552
augaaccccaaccagaagaucaucaccaucggcagcaucagcaucgccaucggcaucaucagccugaugcugcagaucggcaacaucaucagcaucugggccagccacagcauccagaccggcagccagaacaacaccggcaucugcaaccagagaaucaucaccuacgagaacagcaccugggugaaccacaccuacgugaacaucaacaacaccaacgugguggccggcgaggacaagaccagcgugacccuggccggcaacagcagccugugcagcaucagcggcugggccaucuacaccaaggacaacagcaucagaaucggcagcaagggcgacguguucgugaucagagagcccuucaucagcugcagccaccuggagugcagaaccuucuuccugacccagggcgcccugcugaacgacaagcacagcaacggcaccgugaaggacagaagccccuacagagcccugaugagcugcccccugggcgaggcccccagccccuacaacagcaaguucgagagcguggccuggagcgccagcgccugccacgacggcaugggcuggcugaccaucggcaucagcggccccgacaacggcgccguggccgugcugaaguacaacggcaucaucaccggcaccaucaagagcuggaagaagcagauccugagaacccaggagagcgagugcgugugcaugaacggcagcugcuucaccaucaugaccgacggccccagcaacaaggccgccagcuacaagaucuucaagaucgagaagggcaaggugaccaagagcaucgagcugaacgcccccgacuucuacuacgaggagugcagcugcuaccccgacaccggcaucgugaugugcgugugcagagacaacuggcacggcagcaacagacccugggugagcuucaaccagaaccuggacuaccagaucggcuacaucugcagcggcguguucggcgacaaccccagacccgaggacggcgagggcagcugcaaccccgugaccgugaacggcgccgacggcgugaagggcuucagcuacaaguacggcaacggcguguggaucggcagaaccaagagcaacagacugagaaagggcuucgagaugaucugggaccccaacggcuggaccaacaccgacagcgacuucagcgugaagcaggacgugguggccaucaccgacuggagcggcuacagcggcagcuucgugcagcaccccgagcugaccggccuggacugcaucagacccugcuucuggguggagcuggugagaggccugcccagagagaacaccaccaucuggaccagcggcagcagcaucagcuucugcggcgugaacagcgacaccgccaacuggagcuggcccgacggcgccgagcugcccuucaccaucgacaaguga

SEQ ID NO: 180287 - RNA, 1413 nt, Artificial Sequence; identical to SEQ ID NO: 179997
  derived and/or modified CDS sequence (opt4) from neuraminidase__InfluenzaA__ADW10563

SEQ ID NO: 180288 - RNA, 1413 nt, Artificial Sequence; identical to SEQ ID NO: 177521
  derived and/or modified CDS sequence (opt4) from neuraminidase__InfluenzaA__ADW10574

SEQ ID NO: 180289 - RNA, 1413 nt, Artificial Sequence
  derived and/or modified CDS sequence (opt4) from neuraminidase__InfluenzaA__ADW10585
augaaccccaaccagaagaucaucaccaucggcagcaucagcaucgccaucggcaucaucagccugaugcugcagaucggcagcaucaucagcaucugggccagccacagcauccagaccggcagccagaacaacaccggcaucugcaaccagagaaucaucaccuacgagaacagcaccugggugaaccacaccuacgugaacaucaacaacaccaacgugguggccggcgaggacaagaagagcgugacccuggccggcaacagcagccugugcagcaucagcggcugggccaucuacaccaaggacaacagcaucagaaucggcagcaagggcgacguguucgugaucagagagcccuucaucagcugcagccaccuggagugcagaaccuucuuccugacccagggcgcccugcugaacgacaagcacagcaacggcaccgugaaggacagaagccccuacagagcccugaugagcugcccccugggcgaggcccccagccccuacaacagcaaguucgagagcguggccuggagcgccagcgccugccacgacggcaugggcuggcugaccaucggcaucagcggccccgacaacggcgccguggccgugcugaaguacaacggcaucaucaccggcaccaucaagagcuggaagaagcagauccugagaacccaggagagcgagugcgugugcaugaacggcagcugcuucaccaucaugaccgacggccccagcaacaaggccgccagcuacaagaucuucaagaucgagaagggcaaggugaccaagagcaucgagcugaacgcccccaacuucuacuacgaggagugcagcugcuaccccgacaccggcaucgugaugugcgugugcagagacaacuggcacggcagcaacagacccugggugagcuucaaccagaaccuggaguaccagaucggcuacaucugcagcggcguguucggcgacaaccccagacccgaggacggcgagggcagcugcaaccccgugaccguggacggcgccaacggcgugaagggcuucagcuacaaguacggcaacggcguguggaucggcagaaccaagagcaacagacugagaaagggcuucgagaugaucugggaccccaacggcuggaccaacaccgacagcgacuucagcgugaagcaggacgugguggccaucaccgacuggagcggcuacagcggcagcuucgugcagcaccccgagcugaccggccuggacugcaucagacccugcuucuggguggagcuggugagaggccugcccagagagaacaccaccaucuggaccagcggcagcagcaucagcuucugcggcgugaacagcgacaccgccaacuggagcuggcccgacggcgccgagcugcccuucaccaucgacaaguga

SEQ ID NO: 180290 - RNA, 1413 nt, Artificial Sequence; identical to SEQ ID NO: 180265
  derived and/or modified CDS sequence (opt4) from neuraminidase__InfluenzaA__ADW10596

SEQ ID NO: 180291 - RNA, 1413 nt, Artificial Sequence; identical to SEQ ID NO: 180264
  derived and/or modified CDS sequence (opt4) from neuraminidase__InfluenzaA__ADW10607

SEQ ID NO: 180292 - RNA, 1413 nt, Artificial Sequence; identical to SEQ ID NO: 180264
  derived and/or modified CDS sequence (opt4) from neuraminidase__InfluenzaA__ADW10618

SEQ ID NO: 180293 - RNA, 1413 nt, Artificial Sequence; identical to SEQ ID NO: 180264
  derived and/or modified CDS sequence (opt4) from neuraminidase__InfluenzaA__ADW10629

SEQ ID NO: 180294 - RNA, 1413 nt, Artificial Sequence; identical to SEQ ID NO: 180264
  derived and/or modified CDS sequence (opt4) from neuraminidase__InfluenzaA__ADW10724

SEQ ID NO: 180295 - RNA, 1413 nt, Artificial Sequence; identical to SEQ ID NO: 180265
  derived and/or modified CDS sequence (opt4) from neuraminidase__InfluenzaA__ADW10735

SEQ ID NO: 180296 - RNA, 1413 nt, Artificial Sequence; identical to SEQ ID NO: 180265
  derived and/or modified CDS sequence (opt4) from neuraminidase__InfluenzaA__ADW10746

SEQ ID NO: 180297 - RNA, 1413 nt, Artificial Sequence
  derived and/or modified CDS sequence (opt4) from neuraminidase__InfluenzaA__ADW10757
augaaccccaaccagaagaucaucaccaucggcagcaucagcaucgccaucggcaucaucagccugaugcugcagaucggcaacaucaucagcaucugggccagccacagcauccagaccagaagccagaacaacaccggcaucugcaaccagagaaucaucaccuacgagaacagcaccugggugaaccacaccuacgugaacaucaacaacaccaacgugguggccggcggcgacaagaccagcgugacccuggccggcaacagcagccugugcagcaucagcggcugggccaucuacaccaaggacaacagcaucagaaucggcagcaagggcgacguguucgugaucagagagcccuucaucagcugcagccaccuggagugcagaaccuucuuccugacccagggcgcccugcugaacgacaagcacagcaacggcaccgugaaggacagaagccccuacagagcccugaugagcugcccccugggcgaggcccccagccccuacaacagcaaguucgagagcguggccuggagcgccagcgccugccacgacggcaugggcuggcugaccaucggcaucagcggccccgacaacggcgccguggccgugcugaaguacaacggcaucaucaccggcaccaucaagagcuggaagaagcagauccugagaacccaggagagcgagugcgugugcaugaacggcagcugcuucacccugaugaccgacggccccagcaacaaggccgccagcuacaagaucuucaagaucgagaagggcaaggugaccaagagcaucgagcugaacgcccccaacuucuacuacgaggagugcagcugcuaccccgacaccggcaucgugaugugcgugugcagagacaacuggcacggcagcaacagacccugggugagcuucaaccagaaccuggacuaccagaucggcuacaucugcagcggcguguucggcgacaaccccagacccgaggacggcgagggcagcugcaaccccgugaccguggacggcgccaacggcgugaagggcuucagcuacaaguacggcaacggcguguggaucggcagaaccaagagcaacagacugagaaagggcuucgagaugaucugggaccccaacggcuggaccaacaccgacagcgacuucagcgugaagcaggacgugguggccaucaccgacuggagcggcuacagcggcagcuucgugcagcaccccgagcugaccggccuggacugcaucagacccugcuucuggguggagcuggugagaggccugcccagagagaacaccaccaucuggaccagcggcagcagcaucagcuucugcggcgugaacagcgacaccgccaacuggagcuggcccgacggcgccgagcugcccuucaccaucgacaaguga

SEQ ID NO: 180298 - RNA, 1413 nt, Artificial Sequence; identical to SEQ ID NO: 180264
  derived and/or modified CDS sequence (opt4) from neuraminidase__InfluenzaA__ADW10768

SEQ ID NO: 180299 - RNA, 1413 nt, Artificial Sequence; identical to SEQ ID NO: 177521
  derived and/or modified CDS sequence (opt4) from neuraminidase__InfluenzaA__ADW10779

SEQ ID NO: 180300 - RNA, 1413 nt, Artificial Sequence
  derived and/or modified CDS sequence (opt4) from neuraminidase__InfluenzaA__ADW10790
augaaccccaaccagaagaucaucaccaucggcagcaucagcaucgccaucggcaucaucagccugaugcugcagaucggcaacaucaucagcaucugggccagccacagcauccagaccggcagccagaacaacaccggcaucugcaaccagagaaucaucaccuacgagaacagcaccugggugaaccacaccuacgugaacaucaacaacaccaacgugguggccggcgaggacaagaccagcgugacccuggccggcaacagcagccugugcagcaucagcggcugggccaucuacaccaaggacaacagcaucagaaucggcagcaagggcgacguguucgugaucagagagcccuucaucagcugcagccaccuggagugcagaaccuucuuccugacccagggcgcccugcugaacgacaagcacagcaacggcaccgugaaggacagaagccccuacagagcccugaugagcugcccccugggcgaggcccccagccccuacaacagcaaguucgagagcguggccuggagcgccagcgccugccacgacggcaugggcuggcugaccaucggcaucagcggccccgacaacggcgccguggccgugcugaaguacaacggcaucaucaccggcaccaucaagagcuggaagaagcagauccugagaacccaggagagcgagugcgugugcaugaacggcagcugcuucaccaucaugaccgacggccccagcaacaaggccgccagcuacaagaucuucaagaucgagaagggcaaggugaccaagagcaucgagcugaacgcccccaacuucuacuacgaggagugcagcugcuaccccgacaccggcaucgugaugugcgugugcagagacaacuggcacggcagcaacagacccugggugagcuucaaccagaaccuggacuaccagaucggcuacaucugcagcggcguguucggcgacaaccccagacccgaggacggcgagggcagcugcaaccccgugaccguggacggcgccaacggcgugaagggcuucagcuacaaguacggcaacggcguguggaucggcagaaccaagagcaacagacugagaaagggcuucgagaugaucugggaccccaacggcuggaccaacaccgacagcgacuucagcgugaagcaggacgugguggccaucaccgacuggagcggcuacagcggcagcuucgugcagcaccccgagcugaccggccuggacugcaucauccccugcuucuggguggagcuggugagaggccugcccagagagaacgccaccaucuggaccagcggcagcagcaucagcuucugcggcgugaacagcgacaccgccaacuggagcuggcccgacggcgccgagcugcccuucaccaucgacaaguga

SEQ ID NO: 180301 - RNA, 1413 nt, Artificial Sequence; identical to SEQ ID NO: 178990
  derived and/or modified CDS sequence (opt4) from neuraminidase__InfluenzaA__ADW10801

SEQ ID NO: 180302 - RNA, 1413 nt, Artificial Sequence; identical to SEQ ID NO: 180264
  derived and/or modified CDS sequence (opt4) from neuraminidase__InfluenzaA__ADW10812

SEQ ID NO: 180303 - RNA, 1413 nt, Artificial Sequence; identical to SEQ ID NO: 180016
  derived and/or modified CDS sequence (opt4) from neuraminidase__InfluenzaA__ADW10823

SEQ ID NO: 180304 - RNA, 1413 nt, Artificial Sequence
  derived and/or modified CDS sequence (opt4) from neuraminidase__InfluenzaA__ADW10834
augaaccccaaccagaagaucaucaccaucggcagcaucagcaucgccaucggcaucaucagccugaugcugcagaucggcaacaucaucagcaucugggccagccacagcauccagaccggcagccagaacaacaccggcaucugcaaccagagaaucaucaccuacgagaacagcaccugggugaaccacaccuacgugaacaucaacaacaccaacgugguggccggcgaggacaagaccagcgugacccuggccggcaacagcagccugugcagcaucagcggcugggccaucuacaccaaggacaacagcaucagaaucggcagcaagggcgacguguucgugaucagagagcccuucaucagcugcagccaccuggagugcagaaccuucuuccugacccagggcgcccugcugaacgacaagcacagcaacggcaccgugaaggacagaagccccuacagagcccugaugagcugcccccugggcgaggcccccagccccuacaacagcaaguucgagagcguggccuggagcgccagcgccugccacgacggcaugggcuggcugaccaucggcaucagcggccccgacaacggcgccguggccgugcugaaguacaacggcaucaucaccggcaccaucaagagcuggaagaagcagauccugagaacccaggagagcgagugcgugugcaugaacggcagcugcuucaccaucaugaccgacggccccagcaacaaggccgccagcuacaagaucuucaagaucgagaagggcaaggugaucaagagcaucgagcugaacgcccccaacuucuacuacgaggagugcagcugcuaccccgacaccggcaucgugaugugcgugugcagagacaacuggcacggcagcaacagacccugggugagcuucaaccagaaccuggacuaccagaucggcuacaucugcagcggcguguucggcgacaaccccagacccgaggacggcgagggcagcugcaaccccgugaccguggacggcgccaacggcgugaagggcuucagcuacaaguacggcaacggcguguggaucggcagaaccaagagcaacagacugagaaagggcuucgagaugaucugggaccccaacggcuggaccaacaccgacagcgacuucagcgugaagcaggacgugguggccaucaccgacuggagcggcuacagcggcagcuucgugcagcaccccgagcugaccggccuggacugcaucagacccugcuucuggguggagcuggugagaggccugcccagagagaacaccaccaucuggaccagcggcagcagcaucagcuucugcggcgugaacagcgacaccgccaacuggagcuggcccgacggcgccgagcugcccuucaccaucgacaaguga

SEQ ID NO: 180305 - RNA, 1413 nt, Artificial Sequence; identical to SEQ ID NO: 180265
  derived and/or modified CDS sequence (opt4) from neuraminidase__InfluenzaA__ADW10845

SEQ ID NO: 180306 - RNA, 1413 nt, Artificial Sequence
  derived and/or modified CDS sequence (opt4) from neuraminidase__InfluenzaA__ADW10856
augaaccccaaccagagaaucaucaccaucggcagcaucagcaucgccaucggcaucaucagccugaugcugcagaucggcaacaucaucagcaucugggccagccacagcauccagaccggcagccagaacaacaccggcaucugcaaccagagaaucaucaccuacgagaacagcaccugggugaaccacaccuacgugaacaucaacaacaccaacgugguggccggcgaggacaagaccagcaugacccuggccggcaacagcagccugugcagcaucagcggcugggccaucuacaccaaggacaacagcaucagaaucggcagcaagggcgacguguucgugaucagagagcccuucaucagcugcagccaccuggagugcagaaccuucuuccugacccagggcgcccugcugaacgacaagcacagcaacggcaccgccaaggacagaagccccuacagagcccugaugagcugcccccugggcgaggcccccagccccuacaacagcaaguucgagagcguggccuggagcgccagcgccugccacgacggcaugggcuggcugaccaucggcaucagcggccccgacaacggcgccguggccgugcugaaguacaacggcaucaucaccggcaccaucaagagcuggaagaagcagauccugagaacccaggagagcgagugcgugugcaugaacggcagcugcuucaccaucaugaccgacggccccagcaacaaggccgccagcuacaagaucuucaagaucgagaagggcaaggugaccaagagcaucgagcugaacgcccccaacuucuacuacgaggagugcagcugcuaccccgacaccggcaucgugaugugcgugugcagagacaacuggcacggcagcaacagacccugggugagcuucaaccagaaccuggacuaccagaucggcuacaucugcagcggcguguucggcgacaaccccagacccgaggacggcgagggcagcugcaaccccgugaccguggacggcgccaacggcgugaagggcuucagcuacaaguacggcaacggcguguggaucggcagaaccaagagcaacagacugagaaagggcuucgagaugaucugggaccccaacggcuggaccaacaccgacagcgacuucagcgugaagcaggacgugguggccaucaccgacuggagcggcuacagcggcagcuucgugcagcaccccgagcugaccggccuggacugcaucagacccugcuucuggguggagcuggugagaggccugcccagagagaacaccaccaucuggaccagcggcagcagcaucagcuucugcggcgugaacagcgacaccgccaacuggagcuggcccgacggcgccgagcugcccuucaccaucgacaaguga

SEQ ID NO: 180307 - RNA, 1413 nt, Artificial Sequence; identical to SEQ ID NO: 180264
  derived and/or modified CDS sequence (opt4) from neuraminidase__InfluenzaA__ADW10867

SEQ ID NO: 180308 - RNA, 1413 nt, Artificial Sequence; identical to SEQ ID NO: 180264
  derived and/or modified CDS sequence (opt4) from neuraminidase__InfluenzaA__ADW10878

SEQ ID NO: 180309 - RNA, 1413 nt, Artificial Sequence; identical to SEQ ID NO: 180264
  derived and/or modified CDS sequence (opt4) from neuraminidase__InfluenzaA__ADW10889

SEQ ID NO: 180310 - RNA, 1413 nt, Artificial Sequence; identical to SEQ ID NO: 177521
  derived and/or modified CDS sequence (opt4) from neuraminidase__InfluenzaA__ADW10900

SEQ ID NO: 180311 - RNA, 1410 nt, Artificial Sequence; identical to SEQ ID NO: 178544
  derived and/or modified CDS sequence (opt4) from neuraminidase__InfluenzaA__ADW11155

SEQ ID NO: 180312 - RNA, 1410 nt, Artificial Sequence; identical to SEQ ID NO: 176798
  derived and/or modified CDS sequence (opt4) from neuraminidase__InfluenzaA__ADW23530

SEQ ID NO: 180313 - RNA, 1410 nt, Artificial Sequence
  derived and/or modified CDS sequence (opt4) from neuraminidase__InfluenzaA__ADW54483
augaaccccaaccagaagaucaucaccaucggcagcgugugcaugaccaucggcauggccaaccugaugcugcagaucggcaacaucaucagcaucuggaucagccacagcauccagcugggcaaccagagccagaucgagaccugcaaccagagcgugaucaccuacgagaacaacaccugggugaaccagaccuacgugaacaucagcaacaccaacuucgccgccggccagagcguggugagcgugaagcuggccggcaacagcagccugugccccgugagcggcugggccaucuacagcaaggacaacagcaucagaaucggcagcaagggcgacguguucgugaucagagagcccuucaucagcugcagcccccuggagugcagaaccuucuuccugacccagggcgcccugcugaacgacaagcacagcaacggcaccaucaaggacagaagccccuacagaacccugaugagcugccccaucggcgaggugcccagccccuacaacagcagauucgagagcguggccuggagcgccagcgccugccacgacggcaucaacuggcugaccaucggcaucagcggccccgacaacggcgccguggccgugcugaaguacaacggcaucaucaccgacaccaucaagagcuggagaaacaacauccugagaacccaggagagcgagugcgccugcgugaacggcagcugcuucaccaucaugaccgacggccccagcgacggccaggccagcuacaagaucuucagaaucgagaagggcaagaucgugaagagcguggagaugaacgcccccaacuaccacuacgaggagugcagcugcuaccccgacagcagcgagaucaccugcgugugcagagacaacuggcacggcagcaacagacccugggugagcuucaaccagaaccuggaguaccagaucggcuacaucugcagcggcaucuucggcgacaaccccagacccaacgacaagaccggcagcugcggccccgugagcagcaacggcgccaacggcgugaagggcuucagcuucaaguacggcaacggcguguggaucggcagaaccaagagcaucagcagcagaaagggcuucgagaugaucugggaccccaacggcuggaccggcaccgacaacaacuucagcaucaagcaggacaucgugggcaucaacgaguggagcggcuacagcggcagcuucgugcagcaccccgagcugaccggccuggacugcaucagacccugcuucuggguggagcugaucagaggcagacccaaggagaacaccaucuggaccagcggcagcagcaucagcuucugcggcgugaacagcgacaccgugggcuggagcuggcccgacggcgccgagcugcccuucaccaucgacaaguga

SEQ ID NO: 180314 - RNA, 1410 nt, Artificial Sequence
  derived and/or modified CDS sequence (opt4) from neuraminidase__InfluenzaA__ADW54494
augaaccccaaccagaagaucaucaccaucggcagcgugugcaugaccaucggcauggccaaccugauccugcagaucggcaacaucaucagcaucuggaucagccacagcauccagcugggcaaccagaaccagaucgagaccugcaaccagagcgugaucaccuacgagaacaacaccugggugaaccagaccuacgugaacaucagcaacaccaacuucgccgccggccagagcguggugagcgugaagcuggccggcaacagcagccugugccccgugagcggcugggccaucuacagcaaggacaacagcaucagaaucggcagcaagggcgacguguucgugaucagagagcccuucaucagcugcagcccccuggagugcagaaccuucuuccugacccagggcgcccugcugaacgacaagcacagcaacggcaccaucaaggacagaagccccuacagaacccugaugagcugccccaucggcgaggugcccagccccuacaacagcagauucgagagcguggccuggagcgccagcgccugccacgacggcaucaacuggcugaccaucggcaucagcggccccgacaacggcgccguggccgugcugaaguacaacggcaucaucaccgacaccaucaagagcuggagaaacaacauccugagaacccaggagagcgagugcgccugcgugaacggcagcugcuucaccgugaugaccgacggccccagcgacggccaggccagcuacaagaucuucagaaucgagaagggcaagaucgugaagagcguggagaugaacgcccccaacuaccacuacgaggagugcagcugcuaccccgacagcagcgagaucaccugcgugugcagagacaacuggcacggcagcaacagacccugggugagcuucaaccagaaccuggaguacagaaucggcuacaucugcagcggcaucuucggcgacaaccccagacccaacgacaagaccggcagcugcggccccgugagcagcaacggcgccaacggcgugaagggcuucagcuucaaguacggcaacggcguguggaucggcagaaccaagagcaucagcagcagaaacggcuucgagaugaucugggaccccaacggcuggaccggcaccgacaacaacuucagcaucaagcaggacaucaucggcaucaacgaguggagcggcuacagcggcagcuucgugcagcaccccgagcugaccggccuggacugcaucagacccugcuucuggguggagcugaucagaggcagacccaaggagaacaccaucuggaccagcggcagcagcaucagcuucugcggcgugaacagcgacaccgugggcuggagcuggcccgacggcgccgagcugcccuucaccaucgacaaguga

SEQ ID NO: 180315 - RNA, 1410 nt, Artificial Sequence
  derived and/or modified CDS sequence (opt4) from neuraminidase__InfluenzaA__ADW54514
augaaccccaaccagaagaucaucaccaucggcagcgugugcaugaccaucggcauggccaaccugauccugcagaucggcaacaucaucagcaucuggaucagccacagcauccagcugggcaaccagaaccagaucgagaccugcaaccagagcgugaucaccuacgagaacaacaccugggugaaccagaccuacgugaacaucagcaacaccaacuucgccgccggccagagcguggugagcgugaagcuggccggcaacagcagccugugccccgugagcggcugggccaucuacagcaaggacaacagcaucagaaucggcagcaagggcgacguguucgugaucagagagcccuucaucagcugcagcccccuggagugcagaaccuucuuccugacccagggcgcccugcugaacgacaagcacagcaacggcaccaucaaggacagaagccccuacagaacccugaugagcugccccaucggcgaggugcccagccccuacaacagcagauucgagagcguggccuggagcgccagcgccugccacgacggcaucaacuggcugaccaucggcaucagcggccccgacaacggcgccguggccgugcugaaguacaacggcaucaucaccgacaccaucaagagcuggaagaacaacauccugagaacccaggagagcgagugcgccugcgugaacggcagcugcuucaccgugaugaccgacggccccagcgacggccaggccagcuacaagaucuucagaaucgagaagggcaagaucgugaagagcguggagaugaacgcccccaacuaccacuacgaggagugcagcugcuaccccgacagcagcgagaucaccugcgugugcagagacaacuggcacggcagcaacagacccugggugagcuucaaccagaaccuggaguacagaaucggcuacaucugcagcggcaucuucggcgacaaccccagacccaacgacaagaccggcagcugcggccccgugagcagcaacggcgccaacggcgugaagggcuucagcuucaaguacggcaacggcguguggaucggcagaaccaagagcaucagcagcagaaacggcuucgagaugaucugggaccccaacggcuggaccggcaccgacaacaacuucagcaagaagcaggacaucaucggcaucaacgaguggagcggcuacagcggcagcuucgugcagcaccccgagcugaccggccuggacugcaucagacccugcuucuggguggagcugaucagaggcagacccaaggagaacaccaucuggaccagcggcagcagcaucagcuucugcggcgugaacagcgacaccgugggcuggagcuggcccgacggcgccgagcugcccuucaccaucgacaaguga

SEQ ID NO: 180316 - RNA, 1410 nt, Artificial Sequence
  derived and/or modified CDS sequence (opt4) from neuraminidase__InfluenzaA__ADW54522
augaaccccaaccagaagaucaucaccaucggcagcgugugcaugaucaucggcauggccaaccugauccugcagaucggcaacaucaucagcaucuggaucagccacagcauccagcugggcaaccagaaccagaucgagaccugcaaccagagcgugaucaccuacgagaacaacaccugggugaaccagaccuacgugaacaucagcaacaccaacuucgccgccggccagagcguggugagcgugaagcuggccggcaacagcagccugugccccgugagcggcugggccaucuacagcaaggacaacagcaucagaaucggcagcaagggcgacguguucgugaucagagagcccuucaucagcugcagcccccuggagugcagaaccuucuuccugacccagggcgcccugcugaacgacaagcacagcaacggcaccaucaaggacagaagccccuacagaacccugaugagcugccccaucggcgaggugcccagccccuacaacagcagauucgagagcguggccuggagcgccagcgccugccacgacggcaucaacuggcugaccaucggcaucagcggccccgacaacggcgccguggccgugcugaaguacaacggcaucaucaccgacaccaucaagagcuggagaaacaacagacugagaacccaggagagcgagugcgccugcgugaacggcagcugcuucaccgugaugaccgacggccccagcgacggccaggccagcuacaagaucuucagaaucgagaagggcaagaucgugaagagcguggagaugaacgcccccaacuaccacuacgaggagugcagcugcuaccccgacagcagcgagaucaccugcgugugcagagacaacuggcacggcagcaacagacccugggugagcuucaaccagaaccuggaguaccagaucggcuacaucugcagcggcaucuucggcgacaaccccagacccaacgacaagaccggcagcugcggccccgugagcagcaacggcgccaacggcgugaagggcuucagcuucaaguacggcaacggcguguggaucggcagaaccaagagcaucagcagcagaaagggcuucgagaugaucugggaccccaacggcuggaccggcaccgacaacaacuucagcaucaagcaggacaucgugggcaucaacgaguggagcggcuacagcggcagcuucgugcagcaccccgagcugaccggccuggacugcaucagacccugcuucuggguggagcugaucagaggcagacccaaggagaacaccaucuggaccagcggcagcagcaucagcuucugcggcgugaacagcgacaccgugggcuggagcuggcccgacggcgccgagcugcccuucaccaucgacaaguga

SEQ ID NO: 180317 - RNA, 1410 nt, Artificial Sequence
  derived and/or modified CDS sequence (opt4) from neuraminidase__InfluenzaA__ADW65826
augaaccccaaccagaagaucaucaccaucggcagcgugugcaugaccaucggcauggccaaccugauccugcagaucggcaacaucaucagcaucuggaucagccacagcauccagcugggcaaccagagccagaucgagaccugcaaccagagcgugaucaccuacgagaacaacaccugggugaaccagaccuacgugaacaucagcaacaccaacuucgccgccggccagagcguggugagcgugaagcuggccggcaacagcagccugugccccgugagcggcugggccaucuacagcaaggacaacagcaucagaaucggcagcaagggcgacguguucgugaucagagagcccuucaucagcugcagcccccuggagugcagaaccuucuuccugacccagggcgcccugcugaacgacaagcacagcaacggcaccaucaaggacagaagccccuacagaacccugaugagcugccccaucggcgaggugcccagccccuacaacagcagauucgagagcguggccuggagcgccagcgccugccacgacggcaucaacuggcugaccaucggcaucagcggccccgacaacggcgccguggccgugcugaaguacaacggcaucaucaccgacaccaucaagagcuggagaaacaacauccugagaacccaggagagcgagugcgccugcgugaacggcagcugcuucaccaucaugaccgacggccccagcgacggccaggccagcuacaagaucuucagaaucgagaagggcaagaucgugaagagcguggagaugaacgcccccaacuaccacuacgaggagugcagcugcuaccccgacagcagcgagaucaccugcgugugcagagacaacuggcacggcagcaacagacccugggugagcuucaaccagaaccuggaguaccagaucggcuacaucugcagcggcaucuucggcgacaaccccagacccaacgacaagaccggcagcugcggccccgugagcagcaacggcgccaacggcgugaagggcuucagcuucaaguacggcaacggcguguggaucggcagaaccaagagcaucagcagcagaaagggcuucgagaugaucugggaccccaacggcuggaccggcaccgacaacaacuucagcaucaagcaggacaucgugggcaucaacgaguggagcggcuacagcggcagcuucgugcagcaccccgagcugaccggccuggacugcaucagacccugcuucuggguggagcugaucagaggcagacccaaggagaacaccaucuggaccagcggcagcagcaucagcuucugcggcgugaacagcgacaccgugggcuggagcuggcccgacggcgccgagcugcccuucaccaucgacaaguga

SEQ ID NO: 180318 - RNA, 1410 nt, Artificial Sequence; identical to SEQ ID NO: 176659
  derived and/or modified CDS sequence (opt4) from neuraminidase__InfluenzaA__ADW80519

SEQ ID NO: 180319 - RNA, 1410 nt, Artificial Sequence; identical to SEQ ID NO: 176659
  derived and/or modified CDS sequence (opt4) from neuraminidase__InfluenzaA__ADW82127

SEQ ID NO: 180320 - RNA, 1410 nt, Artificial Sequence; identical to SEQ ID NO: 176659
  derived and/or modified CDS sequence (opt4) from neuraminidase__InfluenzaA__ADW82138

SEQ ID NO: 180321 - RNA, 1410 nt, Artificial Sequence; identical to SEQ ID NO: 176659
  derived and/or modified CDS sequence (opt4) from neuraminidase__InfluenzaA__ADW82149

SEQ ID NO: 180322 - RNA, 1410 nt, Artificial Sequence; identical to SEQ ID NO: 176659
  derived and/or modified CDS sequence (opt4) from neuraminidase__InfluenzaA__ADW82158

SEQ ID NO: 180323 - RNA, 1410 nt, Artificial Sequence; identical to SEQ ID NO: 176659
  derived and/or modified CDS sequence (opt4) from neuraminidase__InfluenzaA__ADW82169

SEQ ID NO: 180324 - RNA, 1410 nt, Artificial Sequence; identical to SEQ ID NO: 176659
  derived and/or modified CDS sequence (opt4) from neuraminidase__InfluenzaA__ADW82180

SEQ ID NO: 180325 - RNA, 1410 nt, Artificial Sequence; identical to SEQ ID NO: 176798
  derived and/or modified CDS sequence (opt4) from neuraminidase__InfluenzaA__ADW82191

SEQ ID NO: 180326 - RNA, 1410 nt, Artificial Sequence; identical to SEQ ID NO: 176798
  derived and/or modified CDS sequence (opt4) from neuraminidase__InfluenzaA__ADW82201

SEQ ID NO: 180327 - RNA, 1410 nt, Artificial Sequence; identical to SEQ ID NO: 176798
  derived and/or modified CDS sequence (opt4) from neuraminidase__InfluenzaA__ADW82211

SEQ ID NO: 180328 - RNA, 1410 nt, Artificial Sequence; identical to SEQ ID NO: 176798
  derived and/or modified CDS sequence (opt4) from neuraminidase__InfluenzaA__ADW82221

SEQ ID NO: 180329 - RNA, 1410 nt, Artificial Sequence; identical to SEQ ID NO: 176798
  derived and/or modified CDS sequence (opt4) from neuraminidase__InfluenzaA__ADW82231

SEQ ID NO: 180330 - RNA, 1410 nt, Artificial Sequence; identical to SEQ ID NO: 176798
  derived and/or modified CDS sequence (opt4) from neuraminidase__InfluenzaA__ADW82241

SEQ ID NO: 180331 - RNA, 1410 nt, Artificial Sequence; identical to SEQ ID NO: 176798
  derived and/or modified CDS sequence (opt4) from neuraminidase__InfluenzaA__ADW82251

SEQ ID NO: 180332 - RNA, 1410 nt, Artificial Sequence; identical to SEQ ID NO: 176798
  derived and/or modified CDS sequence (opt4) from neuraminidase__InfluenzaA__ADW82261

SEQ ID NO: 180333 - RNA, 1410 nt, Artificial Sequence; identical to SEQ ID NO: 176798
  derived and/or modified CDS sequence (opt4) from neuraminidase__InfluenzaA__ADW82271

SEQ ID NO: 180334 - RNA, 1410 nt, Artificial Sequence; identical to SEQ ID NO: 180317
  derived and/or modified CDS sequence (opt4) from neuraminidase__InfluenzaA__ADW95306

SEQ ID NO: 180335 - RNA, 1410 nt, Artificial Sequence; identical to SEQ ID NO: 180317
  derived and/or modified CDS sequence (opt4) from neuraminidase__InfluenzaA__ADW95313

SEQ ID NO: 180336 - RNA, 1410 nt, Artificial Sequence; identical to SEQ ID NO: 180317
  derived and/or modified CDS sequence (opt4) from neuraminidase__InfluenzaA__ADW95320

SEQ ID NO: 180337 - RNA, 1410 nt, Artificial Sequence; identical to SEQ ID NO: 180317
  derived and/or modified CDS sequence (opt4) from neuraminidase__InfluenzaA__ADW95327

SEQ ID NO: 180338 - RNA, 1410 nt, Artificial Sequence
  derived and/or modified CDS sequence (opt4) from neuraminidase__InfluenzaA__ADW95333
augaaccccaaccagaagaucaucaccaucggcagcgugugcaugaccaucggcauggccaaccugauccugcagaucggcaacaucaucagcaucuggaucagccacagcauccagcugggcaaccagagccagaucgagaccugcaaccagagcgugaucaccuacgagaacaacaccugggugaaccagaccuacgugaacaucagcaacaccaacuucgccgccggccagagcguggugagcgugaagcuggccggcaacagcagccugugccccgugagcggcugggccaucuacagcaaggacaacagcaucagaaucggcagcaagggcgacguguucgugaucagagagcccuucaucagcugcagcccccuggagugcagaaccuucuuccugacccagggcgcccugcugaacgacaagcacagcaacggcaccaucaaggacagaagccccuacagaacccugaugagcugccccaucggcgaggugcccagccccuacaacagcagauucgagagcguggccuggagcgccagcgccugccacgacggcaucaacuggcugaccaucggcaucagcggccccgacaacggcgccguggccgugcugaaguacaacggcaucaucaccgacaccaucaagagcuggagaaacaacauccugagaacccaggagagcgagugcgccugcgugaacggcagcugcuucaccaucaugaccgacggccccagcgacggccaggccagcuacaagaucuucagaaucgagaagggcaagaucgugaagagcguggagaugaacgcccccaacuaccacuacgaggagugcagcugcuaccccgacagcagcgagaucaccugcgugugcagagacaacuggcacggcagcaacagacccugggugagcuucaaccagaaccuggaguaccagaucggcuacaucugcagcggcaucuucggcgacaaccccagacccaacgacaagaccggcagcugcggccccgugagcagcaacggcgccaacggcgugaagggcuucagcuucaaguacggcaacggcguguggaucggcagcgccaagagcaucagcagcagaaaggccuucgagaugaucugggaccccaacggcuggaccggcaccgacaacaacuucagcaucaagcaguacaucgugggcaucaacgaguggagcggcuacagcggcagcuucguggagcaccccgagcugaccggccuggacugcaucagacccugcuucuggguggagcugaucagaggcagacccaaggagaacaccaucuggaccagcggcagcagcaucagcuucugcggcgugaacagcgacaccgugggcuggagcuggcccgacggcgccgagcugcccuucaccaucgacaaguga

SEQ ID NO: 180339 - RNA, 1410 nt, Artificial Sequence
  derived and/or modified CDS sequence (opt4) from neuraminidase__InfluenzaA__ADX20813
augaaccccaaccagaagaucaucaccaucggcagcgugugcaugaccaucggcauggccaaccugauccugcagaucggcaacaucaucagcaucuggaucagccacagcauccagcugggcaaccagaaccagaucgagaccugcaaccagagcgugaucaccuacgagaacaacaccugggugaaccagaccuacgugaacaucagcaacaccaacuucgccgccggccagagcguggugagcgugaagcuggccggcaacagcagccugugccccgugagcggcugggccaucuacagcaaggacaacagcaucagaaucggcagcaagggcgacguguucgugaucagagagcccuucaucagcugcagcccccuggagugcagaaccuucuuccugacccagggcgcccugcugaacgacaagcacagcaacggcaccaucaaggacagaagccccuacagaacccugaugagcugccccaucggcgaggugcccagccccuacaacagcagauucgagcugguggccuggagcgccagcgccugccacgacggcaucaacuggcugaccaucggcaucagcggccccgacaacggcgccguggccgugcugaaguacaacggcaucaucaccgacaccaucaagagcuggagaaacaacauccugagaacccaggagagcgagugcgccugcgugaacggcagcugcuucaccgugaugaccgacggccccagcgacggccagaccagcuacaagaucuucagaaucgagaagggcaagaucgugaagagcguggagaugaacgcccccaacuacuacuacgaggagugcagcugcuaccccgacagcagcgagaucaccugcgugugcagagacaacuggcacggcagcaacagacccugggugagcuucaaccagaaccuggaguaccagaucggcuacaucugcagcggcaucuucggcgacaaccccagacccaacgacaagaccggcagcugcggccccgugagcagcaacggcgccaacggcgugaagggcuucagcuucaaguacggcaacggcguguggaucggcagaaccaagagcaucagcagcagaaagggcuucgagaugaucugggaccccaacggcuggaccggcaccgacaacaacuucagcaucaagcaggacaucgugggcaucaacgaguggagcggcuacagcggcagcuucgugcagcaccccgagcugaccggccuggacugcaucagacccugcuucuggguggagcugaucagaggcagacccaaggagaacaccaucuggaccagcggcagcagcaucagcuucugcggcgugaacagcgacaccgugggcuggagcuggcccgacggcgccgagcugcccuucaccaucgacaaguga

SEQ ID NO: 180340 - RNA, 1410 nt, Artificial Sequence
  derived and/or modified CDS sequence (opt4) from neuraminidase__InfluenzaA__ADX20814
augaaccccaaccagaagaucaucaccaucggcagcgugugcaugaccaucggcauggccaaccugauccugcagaucggcaacaucaucagcaucuggaucagccacagcauccagcugggcaaccagagccagaucgagaccugcaaccagagcgugaucaccuacgagaacaacaccugggugaaccagaccuacgugaacaucagcaacaccaacuucgccgccggccagagcguggugagcgugaagcuggccggcaacagcagccugugccccgugagcggcugggccaucuacagcaaggacaacagcaucagaaucggcagcaagggcgacguguucgugaucagagagcccuucaucagcugcagcccccuggagugcagaaccuucuuccugacccagggcgcccugcugaacgacaagcacagcaacggcaccaucaaggacagaagccccuacagaacccugaugagcugccccaucggcgaggugcccagccccuacaacagcagauucgagagcguggccuggagcgccagcgccugccacgacggcaucaacuggcugaccaucggcaucagcggccccgacaacggcgccguggccgugcugaaguacaacggcaucaucaccgacaccaucaagagcuggagaaacaacauccugagaacccaggagagcgagugcgccugcgugaacggcagcugcuucaccaucaugaccgacggccccagcgacggccaggccagcuacaagaucuucagaaucgagaagggcaagaucgugaagagcguggagaugaacgcccccaacuacuacuacgaggagugcagcugcuaccccgacagcagcgagaucaccugcgugugcagagacaacuggcacggcagcaacagacccugggugagcuucaaccagaaccuggaguaccagaucggcuacaucugcagcggcaucuucggcgacaaccccagacccaacgacaagaccggcagcugcggccccgugagcagcaacggcgccaacggcgugaagggcuucagcuucaaguacggcaacggcguguggaucggcagaaccaagagcaucagcagcagaaagggcuucgagaugaucugggaccccaacggcuggaccggcaccgacaacaacuucagcaucaagcaggacaucgugggcaucaacgaguggagcggcuacagcggcagcuucgugcagcaccccgagcugaccggccuggacugcaucagacccugcuucuggguggagcugaucagaggcagacccaaggagaacaccaucuggaccagcggcagcagcaucagcuucugcggcgugaacagcgacaccgugggcuggagcuggcccgacggcgccgagcugcccuucaccaucgacaaguga

SEQ ID NO: 180341 - RNA, 1410 nt, Artificial Sequence; identical to SEQ ID NO: 176659
  derived and/or modified CDS sequence (opt4) from neuraminidase__InfluenzaA__ADX21091

SEQ ID NO: 180342 - RNA, 1410 nt, Artificial Sequence; identical to SEQ ID NO: 176798
  derived and/or modified CDS sequence (opt4) from neuraminidase__InfluenzaA__ADX21101

SEQ ID NO: 180343 - RNA, 1410 nt, Artificial Sequence; identical to SEQ ID NO: 177665
  derived and/or modified CDS sequence (opt4) from neuraminidase__InfluenzaA__ADX36112

SEQ ID NO: 180344 - RNA, 1410 nt, Artificial Sequence
  derived and/or modified CDS sequence (opt4) from neuraminidase__InfluenzaA__ADX87386
augaaccccaaccagagaaucaucaccaucggcagcgugagccugaccaucagcaccaucugcuucuucaugcagaucgccauccugaucaccaccgugacccugcacuucaagcaguacgaguucaacagcccccccaacaaccaggugaugcugugcgagcccaccaucaucgagagaaacaucaccgagaucguguaccugaccaacaccaccaucgagaaggagaucugccccaagcuggccgaguacagaaacuggagcaagccccagugcgacaucaccggcuucgcccccuucagcaaggacaacagcaucagacugagcgccggcggcgacaucugggugaccagagagcccuacgugagcugcgaccccgacaagugcuaccaguucgcccugggccagggcaccacccugaacaacgugcacagcaacaacaccgugagagacagaacccccuacagaacccugcugaugaacgagcugggcgugcccuuccaccugggcaccaagcaggugugcaucgccuggagcagcagcagcugccacgacggcaaggccuggcugcacgugugcaucaccggcgacgacaagaacgccaccgccagcuucaucuacaacggcagacugguggacagcguggugagcuggagcaaggagauccugagaacccaggagagcgagugcgugugcaucaacggcaccugcaccguggugaugaccgacggcagcgccagcggcaaggccgacaccaagauccuguucaucgaggagggcaagaucgugcacaccagcacccugagcggcagcgcccagcacguggaggagugcagcugcuaccccagauaccccggcgugagaugcgugugcagagacaacuggaagggcagcaacagacccaucguggacaucaacaucaaggaccacagcaucgugagcagcuacgugugcagcggccuggugggcgacacccccagaaagaacgacagcagcagcagcagccacugccuggaccccaacaacgaggagggcggccacggcgugaagggcugggccuucgacgacggcaacgacguguggaugggcagaaccaucagcgagaagagcagacugggcuacgagaccuucaaggugaucgagggcuggagcaaccccaagagcaagcugcagaucaacagacaggugaucguggacagaggcaacagaagcggcuacagcggcaucuucagcguggagggcaagagcugcaucaacagaugcuucuacguggagcugaucagaggcagaaaggaggagaccgaggugcuguggaccagcaacagcaucgugguguucugcggcaccagcggcaccuacggcaccggcagcuggcccgacggcgccgacaucaaccugaugcccguguga

SEQ ID NO: 180345 - RNA, 1410 nt, Artificial Sequence
  derived and/or modified CDS sequence (opt4) from neuraminidase__InfluenzaA__ADX96270
augaaccccaaccagaagaucaucaccaucggcagcgugugcaugaccaucggcauggccaaccugauccugcagaucggcaacaucaucagcaucuggaucagccacagcauccagcugggcaaccagaaccagaucgagaccugcaaccagagcaucaucaccuacgagaacaacaccugggugaaccagaccuacgugaacaucagcaacaccaacuucgccgccggccagagcguggccagcgugaagcuggccggcaacagcagccugugccccgugagcggcugggccaucuacagcaaggacaacagcgugagaaucggcagcaagggcgacguguucgugaucagagagcccuucaucagcugcagcccccuggagugcagaaccuucuuccugacccagggcgcccugcugaacgacaagcacagcaacggcaccaucaaggacagaagccccuacagaacccugaugagcugccccaucggcgaggugcccagccccuacaacagcagauucgagagcguggccuggagcgccagcgccugccacgacggcaucaacuggcugaccaucggcaucagcggccccgacaacggcgccguggccgugcugaaguacaacggcaucaucaccgacaccaucaagagcuggagaaacaacauccugagaacccaggagagcgagugcgccugcgugaacggcagcugcuucaccgugaugaccgacggccccagcgacggccaggccagcuacaagaucuucagaaucgagaagggcaagaucgugaagagcguggagaugaacgcccccaacuaccacuacgaggagugcagcugcuaccccgacagcagcgagaucaccugcgugugcagagacaacuggcacggcagcaacagacccugggugagcuucaaccagaaccuggaguaccagaucggcuacaucugcagcggcaucuucggcgacaaccccagacccaacgacaagaccggcagcugcggccccgugagcagcaacggcgccaacggcgugaagggcuucagcuucaaguacggcaacggcguguggaucggcagaaccaagagcaucagcagcagaaacggcuucgagaugaucugggaccccaacggcuggaccggcaccgacaacaacuucagcaucaagcaggacaucgugggcaucaacgaguggagcggcuacagcggcagcuucgugcagcaccccgagcugaccggccuggacugcaucagacccugcuucuggguggagcugaucagaggcagacccaaggagaacaccaucuggaccagcggcagcagcaucagcuucugcggcgugaacagcgacaccgugggcuggagcuggcccgacggcgccgagcugcccuucaccaucgacaaguga

SEQ ID NO: 180346 - RNA, 1410 nt, Artificial Sequence; identical to SEQ ID NO: 180345
  derived and/or modified CDS sequence (opt4) from neuraminidase__InfluenzaA__ADX96280

SEQ ID NO: 180347 - RNA, 1410 nt, Artificial Sequence; identical to SEQ ID NO: 177381
  derived and/or modified CDS sequence (opt4) from neuraminidase__InfluenzaA__ADX96290

SEQ ID NO: 180348 - RNA, 1410 nt, Artificial Sequence; identical to SEQ ID NO: 176798
  derived and/or modified CDS sequence (opt4) from neuraminidase__InfluenzaA__ADX96300

SEQ ID NO: 180349 - RNA, 1410 nt, Artificial Sequence; identical to SEQ ID NO: 176798
  derived and/or modified CDS sequence (opt4) from neuraminidase__InfluenzaA__ADX96310

SEQ ID NO: 180350 - RNA, 1410 nt, Artificial Sequence
  derived and/or modified CDS sequence (opt4) from neuraminidase__InfluenzaA__ADX96330
augaaccccaaccagaagaucaucaccaucggcagcgugugcaugaccaucggcauggccaaccugauccugcagaucggcaacggcaucagcaucuggaucagccacagcauccagcugggcaaccagaaccagaucgagaccugcaaccagagcgugaucaccuacgagaacaacaccugggugaaccagaccuacgugaacaucagcaacaccaacuucgccgccggccagagcguggugagcgugaagcuggccggcaacagcagccugugccccgugagcggcugggccaucuacagcaaggacaacagcaucagaaucggcagcaagggcgacguguucgugaucagagagcccuucaucagcugcagcccccuggagugcagaaccuucuuccugacccagggcgcccugcugaacgacaagcacagcaacggcaccaucaaggacagaagccccuacagaacccugaugagcugccccaucggcgaggugcccagccccuacaacagcagauucgagagcguggccuggagcgccagcgccugccacgacggcaucaacuggcugaccaucggcaucagcggccccgacaacggcgccguggccgugcugaaguacaacggcaucaucaccgacaccaucaagagcuggagaaacaacauccugagaacccaggagagcgagugcgccugcgugaacggcagcugcuucaccgugaugaccgacggccccagcgacggccaggccagcuacaagaucuucagaaucgagaagggcaagaucgugaagagcguggagaugaacgcccccaacuaccacuacgaggagugcagcugcuaccccgacagcaacgagaucaccugcgugugcagagacaacuggcacggcagcaacagacccugggugagcuucaaccagaaccuggaguaccagaucggcuacaucugcagcggcaucuucggcgacaaccccagacccaacgacaagaccggcagcugcggccccgugagcagcaacggcgccaacggcgugaagggcuucagcuucaaguacggcaacggcguguggaucggcagaaccaagagcaucagcagcagaaacggcuucgagaugaucugggaccccaacggcuggaccggcaccgacaacaacuucagcaucaagcaggacaucgugggcaucaacgaguggagcggcuacagcggcagcuucgugcagcaccccgagcugaccggccuggacugcaucagacccugcuucuggguggagcugaucagaggcagacccaaggagaacaccaucuggaccagcggcagcagcaucagcuucugcggcgugaacagcgacaccgugggcuggagcuggcccgacggcgccgagcugcccuucaccaucgacaaguga

SEQ ID NO: 180351 - RNA, 1410 nt, Artificial Sequence; identical to SEQ ID NO: 176798
  derived and/or modified CDS sequence (opt4) from neuraminidase__InfluenzaA__ADX96339

SEQ ID NO: 180352 - RNA, 1410 nt, Artificial Sequence
  derived and/or modified CDS sequence (opt4) from neuraminidase__InfluenzaA__ADX96349
augaaccccaaccagaagaucaucaccaucggcagcgugugcaugaccaucggcauggccaaccugauccugcagaucggcaacaucaucagcaucuggaucagccacagcauccagcugggcaaccagaaccagaucgagaccugcaaccagagcgugaucaccuacgagaacaacaccugggugaaccagaccuacgugaacaucagcaacaccaacuucgccgccggccagagcguggugagcgugaagcuggccggcaacagcagccugugccccgugagcggcugggccaucuacagcaaggacaacagcaucagaaucggcagcaagggcgacguguucgugaucagagagcccuucaucagcugcagcccccuggagugcagaaccuucuuccugacccagggcgcccugcugaacgacaagcacagcaacggcaccaucaaggacagaagccccuacagaacccugaugagcugccccaucggcgaggugcccagccccuacaacagcagauucgagagcguggccuggagcgccagcgccugccacgacggcaucaacuggcugaccaucggcaucagcggccccgacaacggcgccguggccgugcugaaguacaacggcaucaucaccgacaccaucaagagcuggagaaacaacauccugagaacccaggagagcgagugcgccugcgugaacggcagcugcuucaccgugaugaccgacggccccagcgacggccaggccagcuacaagaucuucagaaucgagaagggcaagaucgugaagagcguggagaugaacgcccccaacuaccacuacgaggagugcagcugcuaccccgacagcaacgagaucaccugcgugugcagagacaacuggcacggcagcaacagacccugggugagcuucaaccagaaccuggaguaccagaucggcuacaucugcagcggcaucuucggcgacaaccccagacccaacgacaagaccggcagcugcggccccgugagcagcaacggcgccaacggcgugaagggcuucagcuucaaguacggcaacggcguguggaucggcagaaccaagagcaucagcagcagaaacggcuucgagaugaucugggaccccaacggcuggaccggcaccgacaacaacuucagcaucaagcaggacaucgugggcaucaacgaguggagcggcuacagcggcagcuucgugcagcaccccgagcugaccggccuggacugcaucagacccugcuucuggguggagcugaucagaggcagacccaaggagaacaccaucuggaccagcggcagcagcaucagcuucugcggcgugaacagcgacaccgugggcuggagcuggcccgacggcgccgagcugcccuucaccaucgacaaguga

SEQ ID NO: 180353 - RNA, 1410 nt, Artificial Sequence; identical to SEQ ID NO: 176798
  derived and/or modified CDS sequence (opt4) from neuraminidase__InfluenzaA__ADX96359

SEQ ID NO: 180354 - RNA, 1410 nt, Artificial Sequence; identical to SEQ ID NO: 176798
  derived and/or modified CDS sequence (opt4) from neuraminidase__InfluenzaA__ADX96369

SEQ ID NO: 180355 - RNA, 1410 nt, Artificial Sequence
  derived and/or modified CDS sequence (opt4) from neuraminidase__InfluenzaA__ADX96380
augaaccccaaccagaagaucaucaccaucggcagcgugugcaugaccaucggcauggccaaccugauccugcagaucggcaacaucaucagcaucuggcccgugcacagcauccagcugggcaaccagaaccagaucgagaccugcaaccagagcgugaucaccuacgagaacaacaccugggugaaccagaccuacgugaacaucagcaacaccaacuucgccgccggccagagcguggugagcaugaagcuggccggcaacagcagccugugccccgugggcggcugggccaucuacagcaaggacaacagcgugagaaucggcagcaagggcgacguguucgugaucagagagcccuucaucagcugcagcccccuggagugcagaaccuucuuccugacccagggcgcccugcugaacgacaagcacagcaacggcaccaucaaggacagaagccccuacagaacccugaugagcugccccaucggcgaggugcccagccccuacaacagcagauucgagagcguggccuggagcgccagcgccugccacgacggcaucaacuggcugaccaucggcaucagcggccccgacaacggcgccguggccgugcugaaguacaacggcaucaucaccgacaccaucaagagcuggagaaacaacauccugagaacccaggagagcgagugcgccugcgugaacggcagcugcuucaccgugaugaccgacggccccagcgacggccaggccagcuacaagaucuucagaaucgagaagggcaagaucguggagagcguggagaugaacgcccccaacuaccacuacgaggagugcagcugcuaccccgacagcagcgagaucaccugcgugugcagagacaacuggcacggcagcaacagacccugggugagcuucaaccagaaccuggaguaccagaucggcuacaucugcagcggcaucuucggcgacaaccccagacccaacgacaagaccggcagcugcggccccgugagcagcaacggcgccaacggcgugaagggcuucagcuucaaguacggcaacggcguguggaucggcagaaccaagagcaucagcagcagaaacggcuucgagaugaucugggaccccaacggcuggaccggcaccgacaacaacuucagcaucaagcaggacaucgugggcaucaacgaguggagcggcuacagcggcagcuucgugcagcaccccgagcugaccggccuggacugcaucagacccugcuucuggguggagcugaucagaggcagacccaaggagaacaccaucuggaccagcggcagcagcaucagcuucugcggcgugaacagcgacaccgugggcuggagcuggcccgacggcgccgagcugcccuucaccaucgacaaguga

SEQ ID NO: 180356 - RNA, 1410 nt, Artificial Sequence
  derived and/or modified CDS sequence (opt4) from neuraminidase__InfluenzaA__ADX96390
augaaccccaaccagaagaucaucaccaucggcagcgugugcaugaccaucggcauggccaaccugauccugcagaucggcaacaucaucagcaucuggcugagccacagcauccagcugggcaaccagaaccagaucgagaccugcaaccagagcgugaucaccuacgagaacaacaccugggugaaccagaccuacgugaacaucagcaacaccaacuucgccgccggccagagcguggugagcgugaagcuggccggcaacagcagccugugccccgugagcggcugggccaucuacagcaaggacaacagcaucagaaucggcagcaagggcgacguguucgugaucagagagcccuucaucagcugcagcccccuggagugcagaaccuucuuccugacccagggcgcccugcugaacgacaagcacagcaacggcaccaucaaggacagaagccccuacagaacccugaugagcugccccaucggcgaggugcccagccccuacaacagcagauucgagagcguggccuggagcgccagcgccugccacgacggcaucaacuggcugaccaucggcaucagcggccccgacaacggcgccguggccgugcugaaguacaacggcaucaucaccgacaccaucaagagcuggagaaacaacauccugagaacccaggagagcgagugcgccugcgugaacggcagcugcuucaccgugaugaccgacggccccagcgacggccaggccagcuacaagaucuucagaaucgagaagggcaagaucgugaagagcguggagaugaacgcccccaacuaccacuacgaggagugcagcugcuaccccgacagcagcgagaucaccugcgugugcagagacaacuggcacggcagcaacagacccugggugagcuucaaccagaaccuggaguaccagaucggcuacaucugcagcggcaucuucggcgacaaccccagacccaacgacaagaccggcagcugcggccccgugagcagcaacggcgccaacggcgugaagggcuucagcuucaaguacggcaacggcguguggaucggcagaaccaagagcaucagcagcagaaacggcuucgagaugaucugggaccccaacggcuggaccggcaccgacaacaacuucagcaucaagcaggacaucgugggcaucaacgaguggagcggcuacagcggcagcuucgugcagcaccccgagcugaccggccuggacugcaucagacccugcuucuggguggagcugaucagaggcagacccaaggagaacaccaucuggaccagcggcagcagcaucagcuucugcggcgugaacagcgacaccgugggcuggagcuggcccgacggcgccgagcugcccuucaccaucgacaaguga

SEQ ID NO: 180357 - RNA, 1410 nt, Artificial Sequence; identical to SEQ ID NO: 176798
  derived and/or modified CDS sequence (opt4) from neuraminidase__InfluenzaA__ADX96400

SEQ ID NO: 180358 - RNA, 1410 nt, Artificial Sequence; identical to SEQ ID NO: 176798
  derived and/or modified CDS sequence (opt4) from neuraminidase__InfluenzaA__ADX96410

SEQ ID NO: 180359 - RNA, 1410 nt, Artificial Sequence; identical to SEQ ID NO: 176798
  derived and/or modified CDS sequence (opt4) from neuraminidase__InfluenzaA__ADX96419

SEQ ID NO: 180360 - RNA, 1410 nt, Artificial Sequence
  derived and/or modified CDS sequence (opt4) from neuraminidase__InfluenzaA__ADX96429
augaaccccaaccagaagaucaucaccaucggcagcgugugcaugaccaucggcauggccaaccugauccugcagaucggcaacaucaucagcaucuggaucagccacagcauccagcugggcaaccagaaccagaucgagaccugcaaccagagcgugaucaccuacgagaacaacaccugggugaaccagaccuacgugaacaucagcaacaccaacuucgccgccggccagagcguggugagcgugaagcuggccggcaacagcagccugugccccgugagcggcugggccaucuacagcaaggacaacagcgugagaaucggcagcaagggcgacguguucgugaucagagagcccuucaucagcugcagcccccuggagugcagaaccuucuuccugacccagggcgcccugcugaacgacaagcacagcaacggcaccaucaaggacagaagccccuacagaacccugaugagcugccccaucggcgaggugcccagccccuacaacagcagauucgagagcguggccuggagcgccagcgccugccacgacggcaucaacuggcugaccaucggcaucagcggccccgacaacggcgccguggccgugcugaaguacaacggcaucaucaccgacaccaucaagagcuggagaaacaacauccugagaacccaggagagcgagugcgccugcgugaacggcagcugcuucaccgugaugaccgacggccccagcaacggccaggccagcuacaagaucuucagaaucgagaagggcaagaucgugaagagcguggagaugaacgcccccaacuaccacuacgaggagugcagcugcuaccccgacagcagcgagaucaccugcgugugcagagacaacuggcacggcagcaacagacccugggugagcuucaaccagaaccuggaguaccagaucggcuacaucugcagcggcaucuucggcgacaaccccagacccaacgacaagaccggcagcugcggccccgugagcagcaacggcgccaacggcgugaagggcuucagcuucaaguacggcaacggcguguggaucggcagaaccaagagcaucagcagcagaaacggcuucgagaugaucugggaccccaacggcuggaccggcaccgacaacaacuucagcaucaagcaggacaucgugagaaucaacgaguggagcggcuacagcggcagcuucgugcagcaccccgagcugaccggccuggacugcaucagacccugcuucuggguggagcugaucagaggcagacccaaggagaacaccaucuggaccagcggcagcagcaucagcuucugcggcgugaacagcgacaccgugggcuggagcuggcccgacggcgccgagcugcccuucaccaucgacaaguga

SEQ ID NO: 180361 - RNA, 1410 nt, Artificial Sequence; identical to SEQ ID NO: 176798
  derived and/or modified CDS sequence (opt4) from neuraminidase__InfluenzaA__ADX96449

SEQ ID NO: 180362 - RNA, 1410 nt, Artificial Sequence; identical to SEQ ID NO: 176798
  derived and/or modified CDS sequence (opt4) from neuraminidase__InfluenzaA__ADX96469

SEQ ID NO: 180363 - RNA, 1410 nt, Artificial Sequence; identical to SEQ ID NO: 176798
  derived and/or modified CDS sequence (opt4) from neuraminidase__InfluenzaA__ADX96489

SEQ ID NO: 180364 - RNA, 1410 nt, Artificial Sequence; identical to SEQ ID NO: 176798
  derived and/or modified CDS sequence (opt4) from neuraminidase__InfluenzaA__ADX96499

SEQ ID NO: 180365 - RNA, 1410 nt, Artificial Sequence
  derived and/or modified CDS sequence (opt4) from neuraminidase__InfluenzaA__ADX96509
augaaccccaaccagaagaucaucaccaucggcagcgugugcaugaccaucggcauggccaaccugauccugcagaucggcaacaucaucagcaucuggaucagccacagcauccagcugggcaaccagaaccagaucgagaccugcaaccagagcgugaucaccuacgagaacaacaccugggugaaccagaccuacgugaacaucagcaacaccaacuucgccgccggccagagcguggugagcgugaagcuggccggcaacagcagccugugccccgugagcggcugggccaucuacagcaaggacaacagcaucagaaucggcagcaacggcgacguguucgugaucagagagcccuucaucagcugcagcccccuggagugcagaaccuucuuccugacccagggcgcccugcugaacgacaagcacagcaacggcaccaucaaggacagaagccccuacagaacccugaugagcugccccaucggcgaggugcccagccccuacaacagcagauucgagagcguggccuggagcgccagcgccugccacgacggcaucaacuggcugaccaucggcaucagcggccccgacaacggcgccguggccgugcugaaguacaacggcaucaucaccgacaccaucaagagcuggagaaacaacauccugagaacccaggagagcgagugcgccugcgugaacggcagcugcuucaccgugaugaccgacggccccagcgacggccaggccagcuacaagaucuucagaaucgagaagggcaagaucgugaagagcguggagaugaacgcccccaacuaccacuacgaggagugcagcugcuaccccgacagcagcgagaucaccugcgugugcagagacaacuggcacggcagcaacagacccugggugagcuucaaccagaaccuggaguaccagaucggcuacaucugcagcggcaucuucggcgacaaccccagacccaacgacaagaccggcagcugcggccccgugagcagcaacggcgccaacggcgugaagggcuucagcuucaaguacggcaacggcguguggaucggcagaaccaagagcaucagcagcagaaacggcuucgagaugaucugggaccccaacggcuggaccggcaccgacaacaacuucagcaucaagcaggacaucgugggcaucaacgaguggagcggcuacagcggcagcuucgugcagcaccccgagcugaccggccuggacugcaucagacccugcuucuggguggagcugaucagaggcagacccaaggagaacaccaucuggaccagcggcagcagcaucagcuucugcggcgugaacagcgacaccgugggcuggagcuggcccgacggcgccgagcugcccuucaccaucgacaaguga

SEQ ID NO: 180366 - RNA, 1410 nt, Artificial Sequence; identical to SEQ ID NO: 176798
  derived and/or modified CDS sequence (opt4) from neuraminidase__InfluenzaA__ADX96519

SEQ ID NO: 180367 - RNA, 1410 nt, Artificial Sequence; identical to SEQ ID NO: 176798
  derived and/or modified CDS sequence (opt4) from neuraminidase__InfluenzaA__ADX96529

SEQ ID NO: 180368 - RNA, 1410 nt, Artificial Sequence; identical to SEQ ID NO: 176798
  derived and/or modified CDS sequence (opt4) from neuraminidase__InfluenzaA__ADX96539

SEQ ID NO: 180369 - RNA, 1410 nt, Artificial Sequence; identical to SEQ ID NO: 176798
  derived and/or modified CDS sequence (opt4) from neuraminidase__InfluenzaA__ADX96549

SEQ ID NO: 180370 - RNA, 1410 nt, Artificial Sequence; identical to SEQ ID NO: 176798
  derived and/or modified CDS sequence (opt4) from neuraminidase__InfluenzaA__ADX96559

SEQ ID NO: 180371 - RNA, 1410 nt, Artificial Sequence; identical to SEQ ID NO: 176798
  derived and/or modified CDS sequence (opt4) from neuraminidase__InfluenzaA__ADX96569

SEQ ID NO: 180372 - RNA, 1410 nt, Artificial Sequence; identical to SEQ ID NO: 176788
  derived and/or modified CDS sequence (opt4) from neuraminidase__InfluenzaA__ADX96579

SEQ ID NO: 180373 - RNA, 1410 nt, Artificial Sequence; identical to SEQ ID NO: 176798
  derived and/or modified CDS sequence (opt4) from neuraminidase__InfluenzaA__ADX96589

SEQ ID NO: 180374 - RNA, 1410 nt, Artificial Sequence; identical to SEQ ID NO: 176798
  derived and/or modified CDS sequence (opt4) from neuraminidase__InfluenzaA__ADX96599

SEQ ID NO: 180375 - RNA, 1410 nt, Artificial Sequence
  derived and/or modified CDS sequence (opt4) from neuraminidase__InfluenzaA__ADX96609
augaaccccaaccagaagaucaucaccaucggcagcgugugcaugaccaucggcauggccaaccugauccugcagaucggcaacaucaucagcaucuggaucagccacagcauccagcugggcaaccagaaccagaucgagaccugcaaccagagcgugaucaccuacgagaacaacaccugggugaaccagaccuacgugaacaucagcaacaccaacuucgccgccggccagagcguggugagcgugaagcuggccggcaacagcagccugugccccgugggcggcugggccaucuacagcaaggacaacagcgugagaaucggcagcaagggcgacguguucgugaucagagagcccuucaucagcugcagcccccuggagugcagaaccuucuuccugacccagggcgcccugcugaacgacaagcacagcaacggcaccaucaaggacagaagccccuacagaacccugaugagcugccccaucggcgaggugcccagccccuacaacagcagauucgagagcguggccuggagcgccagcgccugccacgacggcaucaacuggcugaccaucggcaucagcggccccgacaacggcgccguggccgugcugaaguacaacggcaucaucaccgacaccaucaagagcuggagaaacaacauccugagaacccaggagagcgagugcgccugcgugaacggcagcugcuucaccgugaugaccgacggccccagcaacggccaggccagcuacaagaucuucagaaucgagaagggcaagaucgugaagagcguggagaugaacgcccccaacuaccacuacgaggagugcagcugcuaccccgacagcagcgagaucaccugcgugugcagagacaacuggcacggcagcaacagacccugggugagcuucaaccagaaccuggaguaccagaucggcuacaucugcagcggcaucuucggcgacaaccccagacccaacgacaagaccggcagcugcggccccgugagcagcaacggcgccaacggcgugaagggcuucagcuucaaguacggcgacggcguguggaucggcagaaccaagagcaucagcagcagaaacggcuucgagaugaucugggaccccaacggcuggaccggcaccgacaacaacuucagcaucaagcaggacaucgugggcaucaacgaguggagcggcuacagcggcagcuucgugcagcaccccgagcugaccggccuggacugcaucagacccugcuucuggguggagcugaucagaggcagacccaaggagaacaccaucuggaccagcggcagcagcaucagcuucugcggcgugaacagcgacaccgugggcuggagcuggcccgacggcgccgagcugcccuucaccaucgacaaguga

SEQ ID NO: 180376 - RNA, 1410 nt, Artificial Sequence; identical to SEQ ID NO: 176788
  derived and/or modified CDS sequence (opt4) from neuraminidase__InfluenzaA__ADX96619

SEQ ID NO: 180377 - RNA, 1410 nt, Artificial Sequence; identical to SEQ ID NO: 176798
  derived and/or modified CDS sequence (opt4) from neuraminidase__InfluenzaA__ADX96629

SEQ ID NO: 180378 - RNA, 1410 nt, Artificial Sequence; identical to SEQ ID NO: 176798
  derived and/or modified CDS sequence (opt4) from neuraminidase__InfluenzaA__ADX96639

SEQ ID NO: 180379 - RNA, 1410 nt, Artificial Sequence; identical to SEQ ID NO: 176798
  derived and/or modified CDS sequence (opt4) from neuraminidase__InfluenzaA__ADX96649

SEQ ID NO: 180380 - RNA, 1410 nt, Artificial Sequence; identical to SEQ ID NO: 176788
  derived and/or modified CDS sequence (opt4) from neuraminidase__InfluenzaA__ADX96659

SEQ ID NO: 180381 - RNA, 1410 nt, Artificial Sequence; identical to SEQ ID NO: 176798
  derived and/or modified CDS sequence (opt4) from neuraminidase__InfluenzaA__ADX96669

SEQ ID NO: 180382 - RNA, 1410 nt, Artificial Sequence; identical to SEQ ID NO: 176798
  derived and/or modified CDS sequence (opt4) from neuraminidase__InfluenzaA__ADX96679

SEQ ID NO: 180383 - RNA, 1410 nt, Artificial Sequence; identical to SEQ ID NO: 176798
  derived and/or modified CDS sequence (opt4) from neuraminidase__InfluenzaA__ADX96689

SEQ ID NO: 180384 - RNA, 1410 nt, Artificial Sequence; identical to SEQ ID NO: 176798
  derived and/or modified CDS sequence (opt4) from neuraminidase__InfluenzaA__ADX96699

SEQ ID NO: 180385 - RNA, 1410 nt, Artificial Sequence
  derived and/or modified CDS sequence (opt4) from neuraminidase__InfluenzaA__ADX96709
augaaccccaaccagaagaucaucaccaucggcagcgugugcaugaccaucggcauggccaaccugauccugcagaucggcaacaucaucagcaucuggaucagccacagcauccagcugggcaaccagaaccagaucgagaccugcaaccagagcgugaucaccuacgagaacaacaccugggugaaccagaccuacgugaacaucagcaacaccaacuucgccgccggccagagcguggugagcgugaagcuggccggcaacagcagccugugccccgugagcggcugggccaucuacagcaaggacaacagcaucagaaucggcagcaagggcgacguguucgugaucagagagcccuucaucagcugcagcccccuggagugcagaaccuucuuccugacccagggcgcccugcugaacgacaagcacagcaacggcaccaucaaggacagaagccccuacagaacccugaugagcugccccaucggcgaggugcccagccccuacaacagcagauucgagagcguggccuggagcgccagcgccugccacgacggcaucaacuggcugaccaucggcaucagcggccccgacaacggcgccguggccgugcugaaguacaacggcaucaucaccgacaccaucaagagcuggagaaacaacauccugagaacccaggagagcgagugcgccugcgugaacggcagcugcuucaccgugaugaccgacggccccagcgacggccaggccagcuacaagaucuucagaaucgagaagggcaagaucgugaagagcguggagaucaacgcccccaacuaccacuacgaggagugcagcugcuaccccgacagcagcgagaucaccugcgugugcagagacaacuggcacggcagcaacagacccugggugagcuucaaccagaaccuggaguaccagaucggcuacaucugcagcggcaucuucggcgacaaccccagacccaacgacgagaccggcagcugcggccccgugagcagcaacggcgccaacggcgugaagggcuucagcuucaaguacggcaacggcguguggaucggcagaaccaagagcaucagcagcagaaacggcuucgagaugaucugggaccccaacggcuggaccggcaccgacaacaacuucagcaucaagcaggacaucgugggcaucaacgaguggagcggcuacagcggcagcuucgugcagcaccccgagcugaccggccuggacugcaucagacccugcuucuggguggagcugaucagaggcagacccaaggagaacaccaucuggaccagcggcagcagcaucagcuucugcggcgugaacagcgacaccgugggcuggagcuggcccgacggcgccgagcugcccuucaccaucgacaaguga

SEQ ID NO: 180386 - RNA, 1410 nt, Artificial Sequence
  derived and/or modified CDS sequence (opt4) from neuraminidase__InfluenzaA__ADX96719
augaaccccaaccagaagaucaucaccaucggcagcgugugcaugaccaucggcauggccaaccugauccugcagaucggcaacaucaucagcaucuggaucagccacagcauccagcugggcaaccagaaccagaucgagaccugcaaccagagcgugaucaccuacgagaacaacaccugggugaaccagaccuacgugaacaucagcaacaccaacuucgccgccggccagagcguggugagcgugaaguucgccggcaacagcagccugugccccgugagcggcugggccaucuacagcaaggacaacagcaucagaaucggcagcaagggcgacguguucgugaucagagagcccuucaucagcugcagcccccuggagugcagaaccuucuuccugacccagggcgcccugcugaacgacaagcacagcaacggcaccaucaaggacagaagccccuacagaacccugaugagcugccccaucggcgaggugcccagccccuacaacagcagauucgagagcguggccuggagcgccagcgccugccacgacggcaucaacuggcugaccaucggcaucagcggccccgacaacggcgccguggccgugcugaaguacaacggcaucaucaccgacaccaucaagagcuggagaaacaacauccugagaacccaggagagcgagugcgccugcgugaacggcagcugcuucaccgugaugaccgacggccccagcgacggccaggccagcuacaagaucuucagaaucgagaagggcaagaucgugaagagcguggagaugaacgcccccaacuaccacuacgaggagugcagcugcuaccccgacagcagcgagaucaccugcgugugcagagacaacuggcacggcagcaacagacccugggugagcuucaaccagaaccuggaguaccagaucggcuacaucugcagcggcaucuucggcgacaaccccagacccaacgacaagaccggcagcugcggccccgugagcagcaacggcgccaacggcgugaagggcuucagcuucaaguacggcaacggcguguggaucggcagaaccaagagcaucagcagcagaaacggcuucgagaugaucugggaccccaacggcuggaccggcaccgacaacaacuucagcaucaagcaggacaucgugggcaucaacgaguggagcggcuacagcggcagcuucgugcagcaccccgagcugaccggccuggacugcaucagacccugcuucuggguggagcugaucagaggcagacccaaggagagcaccguguggaccagcggcagcagcaucagcuucugcggcgugaacagcgacaccgugggcuggagcuggcccgacggcgccgagcugcccuucaccaucgacaaguga

SEQ ID NO: 180387 - RNA, 1410 nt, Artificial Sequence; identical to SEQ ID NO: 176798
  derived and/or modified CDS sequence (opt4) from neuraminidase__InfluenzaA__ADX96729

SEQ ID NO: 180388 - RNA, 1410 nt, Artificial Sequence
  derived and/or modified CDS sequence (opt4) from neuraminidase__InfluenzaA__ADX96739
augaaccccaaccagaagaucaucaccaucggcagcgugugcaugaccaucggcauggccaaccugauccugcagaucggcaacaucaucagcaucuggaucagccacagcauccagcugggcaaccagaaccagaucgagaccugcaaccagagcgugaucaccuacgagaacaacaccugggugaaccagaccuacgugaacaucagcaacaccaacuucgccgccggccagagcguggugagcgugaagcuggccggcaacagcagccugugccccgugagcggcugggccaucuacagcaaggacaacagcaucagaaucggcagcaagggcgacguguucgugaucagagagcccuucaucagcugcagcccccuggagugcagaaccuucuuccugacccagggcgcccugcugaacgacaagcacagcaacggcaccaucaaggacagaagccccuacagaacccugaugagcugccccaucggcgaggugcccagccccuacaacagcagauucgagagcguggccuggagcgccagcgccugccacgacggcaucaacuggcugaccaucggcaucagcggccccgacaacggcgccguggccgugcugaaguacaacggcaucaucaccgacaccaucaagagcuggagaaacaacauccugagaacccaggagagcgagugcgccugcgugaacggcagcugcuucaccgugaugaccgacggccccagcgacggccaggccagcuacaagaucuucagaaucgagaagggcaagaucgugaagagcguggagaugaacgcccccaacuaccacuacgaggagugcagcugcuaccccgacagcagcgagaucaccugcgugugcagagacaacuggcacggcagcaacagacccugggugagcuucaaccagaaccuggaguaccagaucggcuacaucugcagcggcaucuucggcgacaaccccagacccaacgacaagaccggcagcugcggccccgugagcagcaacggcgccaacggcgugaagggcuucagcuucaaguacggcaacggcguguggaucggcagaaccaagagcaucagcagcagaaacggcuucgagaugaucugggaccccaacggcuggaccggcaccgacaacaacuucagcaucaagcaggacaucgugggcaucaacgaguggagcggcuacagcggcagcuucgugcagcaccccgagcugaccggccuggacugcaucagacccugcuucuggguggagcugaucagaggcagacccaaggagaacaccaucuggaccagcggcagcagcaucagcuucugcggcgugaagagcgacaccgugggcuggagcuggcccgacggcgccgagcugcccuucaccaucgacaaguga

SEQ ID NO: 180389 - RNA, 1410 nt, Artificial Sequence; identical to SEQ ID NO: 176798
  derived and/or modified CDS sequence (opt4) from neuraminidase__InfluenzaA__ADX96749

SEQ ID NO: 180390 - RNA, 1410 nt, Artificial Sequence; identical to SEQ ID NO: 176798
  derived and/or modified CDS sequence (opt4) from neuraminidase__InfluenzaA__ADX96759

SEQ ID NO: 180391 - RNA, 1410 nt, Artificial Sequence; identical to SEQ ID NO: 177772
  derived and/or modified CDS sequence (opt4) from neuraminidase__InfluenzaA__ADX96769

SEQ ID NO: 180392 - RNA, 1410 nt, Artificial Sequence; identical to SEQ ID NO: 176798
  derived and/or modified CDS sequence (opt4) from neuraminidase__InfluenzaA__ADX96779

SEQ ID NO: 180393 - RNA, 1410 nt, Artificial Sequence
  derived and/or modified CDS sequence (opt4) from neuraminidase__InfluenzaA__ADX96789
augaaccccaaccagaagaucaucaccaucggcagcgugugcaugaccaucggcauggccaaccugauccugcagaucggcaacaucaucagcaucuggaucagccacagcauccagcugggcaaccagaaccagaucgagaccugcaaccagagcgugaucaccuacgagaacaacaccugggugaaccagaccuacgugaacaucagcaacaccaacuucgccgccggccagagcguggugagccugaagcuggccggcaacagcagccugugccccgugagcggcugggccaucuacagcaaggacaacagcaucagaaucggcagcaagggcgacguguucgugaucagagagcccuucaucagcugcagcccccuggagugcagaaccuucuuccugacccagggcgcccugcugaacgacaagcacagcaacggcaccaucaaggacagaagccccuacagaacccugaugagcugccccaucggcgaggugcccagccccuacaacagcagauucgagagcguggccuggagcgccagcgccugccacgacggcaucaacuggcugaccaucggcaucagcggccccgacaacggcgccguggccgugcugaaguacaacggcaucaucaccgacaccaucaagagcuggagaaacaacauccugagaacccaggagagcgagugcgccugcgugaacggcagcugcuucaccgugaugaccgacggccccagcgacggccaggccagcuacaagaucuucagaaucgagaagggcaagaucgugaagagcguggagaugaacgcccccaacuaccacuacgaggagugcagcugcuaccccgacagcagcgagaucaccugcgugugcagagacaacuggcacggcagcaacagacccugggugagcuucaaccagaaccuggaguaccagaucggcuacaucugcagcggcaucuucggcgacaaccccagacccaacgacaagaccggcagcugcggccccgugagcagcaacggcgccaacggcgugaagggcuucagcuucaaguacggcaacggcguguggaucggcagaaccaagagcaucagcagcagaaacggcuucgagaugaucugggaccccaacggcuggaccggcaccgacaacaacuucagcaucaagcaggacaucgugggcaucaacgaguggagcggcuacagcggcagcuucgugcagcaccccgagcugaccggccuggacugcaucagacccugcuucuggguggagcugaucagaggcagacccaaggagaacaccaucuggaccagcggcagcagcaucagcuucugcggcgugaacagcgacaccgugggcuggagcuggcccgacggcgccgagcugcccuucaccaucgacaaguga

SEQ ID NO: 180394 - RNA, 1410 nt, Artificial Sequence; identical to SEQ ID NO: 176798
  derived and/or modified CDS sequence (opt4) from neuraminidase__InfluenzaA__ADX96799

SEQ ID NO: 180395 - RNA, 1410 nt, Artificial Sequence; identical to SEQ ID NO: 176953
  derived and/or modified CDS sequence (opt4) from neuraminidase__InfluenzaA__ADX96809

SEQ ID NO: 180396 - RNA, 1410 nt, Artificial Sequence; identical to SEQ ID NO: 176798
  derived and/or modified CDS sequence (opt4) from neuraminidase__InfluenzaA__ADX96819

SEQ ID NO: 180397 - RNA, 1410 nt, Artificial Sequence; identical to SEQ ID NO: 178021
  derived and/or modified CDS sequence (opt4) from neuraminidase__InfluenzaA__ADX96829

SEQ ID NO: 180398 - RNA, 1410 nt, Artificial Sequence
  derived and/or modified CDS sequence (opt4) from neuraminidase__InfluenzaA__ADX96839
augaaccccaaccagaagaucaucaccaucggcagcgugugcaugaccaucggcauggccaaccugauccugcagaucggcaacaucaucagcaucuggaucagccacagcauccagcugggcaaccagaaccagaucgagaccugcaaccagagcgugaucaccuacgagaacaacaccugggugaaccagaccuacgugaacaucagcaacaccaacuucgccgccggccagagcguggugagcgugaagcuggccggcaacagcagccugugccccgugagcggcugggccaucuacagcaaggacaacaacgugagaaucggcagcaagggcgacguguucgugaucagagagcccuucaucagcugcagcccccuggagugcagaaccuucuuccugacccagggcgcccugcugaacgacaagcacagcaacggcaccaucaaggacagaagccccuacagaacccugaugagcugccccaucggcgaggugcccagccccuacaacagcagauucgagagcguggccuggagcgccagcgccugccacgacggcaucaacuggcugaccaucggcaucagcggccccgacaacggcgccguggccgugcugaaguacaacggcaucaucaccgacaccaucaagagcuggagaaacaacauccugagaacccaggagagcgagugcgccugcgugaacggcagcugcuucaccgugaugaccgacggccccagcgacggccaggccagcuacaagaucuucagaaucgagaagggcaagaucgugaagagcguggagaugaacgcccccaacuaccacuacgaggagugcagcugcuaccccgacagcagcgagaucaccugcgugugcagagacaacuggcacggcagcaacagacccugggugagcuucaaccagaaccuggaguaccagaucggcuacaucugcagcggcaucuucggcgacaaccccagacccaacgacaagaccggcagcugcggccccgugagcagcaacggcgccaacggcgugaagggcuucagcuucaaguacggcaacggcguguggaucggcagaaccaagagcaucagcagcagaaacggcuucgagaugaucugggaccccaacggcuggaccggcaccgacaacaacuucagcaucaagcaggacaucgugggcaucaacgaguggagcggcuacagcggcagcuucgugcagcaccccgagcugaccggccuggacugcaucagacccugcuucuggguggagcugaucagaggcagacccaaggagaacaccaucuggaccagcggcagcagcaucagcuucugcggcgugaacagcgacaccgugggcuggagcuggcccgacggcgccgagcugcccuucaccaucgacaaguga

SEQ ID NO: 180399 - RNA, 1410 nt, Artificial Sequence; identical to SEQ ID NO: 176798
  derived and/or modified CDS sequence (opt4) from neuraminidase__InfluenzaA__ADX96849

SEQ ID NO: 180400 - RNA, 1410 nt, Artificial Sequence; identical to SEQ ID NO: 176798
  derived and/or modified CDS sequence (opt4) from neuraminidase__InfluenzaA__ADX96859

SEQ ID NO: 180401 - RNA, 1410 nt, Artificial Sequence; identical to SEQ ID NO: 178021
  derived and/or modified CDS sequence (opt4) from neuraminidase__InfluenzaA__ADX96869

SEQ ID NO: 180402 - RNA, 1410 nt, Artificial Sequence; identical to SEQ ID NO: 176798
  derived and/or modified CDS sequence (opt4) from neuraminidase__InfluenzaA__ADX96879

SEQ ID NO: 180403 - RNA, 1410 nt, Artificial Sequence; identical to SEQ ID NO: 176798
  derived and/or modified CDS sequence (opt4) from neuraminidase__InfluenzaA__ADX96899

SEQ ID NO: 180404 - RNA, 1410 nt, Artificial Sequence
  derived and/or modified CDS sequence (opt4) from neuraminidase__InfluenzaA__ADX96909
augaaccccaaccagaagaucaucaccaucggcagcgugugcaugaccaucggcauggccaaccugauccugcagaucggcaacaucaucagcaucuggaucagccacagcauccagcugggcaaccagaaccagaucgagaccugcaaccagagcgugaucaccuacgagaacaacaccugggugaaccagaccuacgugaacaucagcaacaccaacuucgccgccggccagagcguggugagcgugaagcuggccggcaacagcagccugugccccgugagcggcugggccaucuacagcaaggacaacagcaucagaaucggcagcaagggcgacguguucgugaucagagagcccuucaucagcugcagcccccuggagugcagaaccuucuuccugacccagggcgcccugcugaacgacaagcacagcaacggcaccaucaaggacagaagccccuacagaacccugaugagcugccccaucggcgaggugcccagccccuacaacagcagauucgagagcguggccuggagcgccagcgccugccacgacggcaucaacuggcugaccaucggcaucagcggccccgacaacggcgccguggccgugcugaaguacaacggcaucaucaccgacaccaucaagagcuggagaaacgacauccugagaacccaggagagcgagugcgccugcgugaacggcagcugcuucaccgugaugaccgacggccccagcgacggccaggccagcuacaagaucuucagaaucgagaagggcaagaucgugaagagcguggagaucaacgcccccaacuaccacuacgaggagugcagcugcuaccccgacagcagcgagaucaccugcgugugcagagacaacuggcacggcagcaacagacccugggugagcuucaaccagaaccuggaguaccagaucggcuacaucugcagcggcaucuucggcgacaaccccagacccaacgacaagaccggcagcugcggccccgugagcagcaacggcgccaacggcgugaagggcuucagcuucaaguacggcaacggcguguggaucggcagaaccaagagcaucaacagcagaaacggcuucgagaugaucugggaccccaacggcuggaccggcaccgacaacaacuucagcaucaagcaggacaucgugggcaucaacgaguggagcggcuacagcggcagcuucgugcagcaccccgagcugaccggccuggacugcaucagacccugcuucuggguggagcugaucagaggcagacccaaggagaacaccaucuggaccagcggcagcagcaucagcuucugcggcgugaacagcgacaccgugggcuggagcuggcccgacggcgccgagcugcccuucaccaucgacaaguga

SEQ ID NO: 180405 - RNA, 1410 nt, Artificial Sequence; identical to SEQ ID NO: 176798
  derived and/or modified CDS sequence (opt4) from neuraminidase__InfluenzaA__ADX96919

SEQ ID NO: 180406 - RNA, 1410 nt, Artificial Sequence; identical to SEQ ID NO: 176798
  derived and/or modified CDS sequence (opt4) from neuraminidase__InfluenzaA__ADX96929

SEQ ID NO: 180407 - RNA, 1410 nt, Artificial Sequence; identical to SEQ ID NO: 176798
  derived and/or modified CDS sequence (opt4) from neuraminidase__InfluenzaA__ADX96939

SEQ ID NO: 180408 - RNA, 1410 nt, Artificial Sequence; identical to SEQ ID NO: 177381
  derived and/or modified CDS sequence (opt4) from neuraminidase__InfluenzaA__ADX96949

SEQ ID NO: 180409 - RNA, 1410 nt, Artificial Sequence; identical to SEQ ID NO: 176798
  derived and/or modified CDS sequence (opt4) from neuraminidase__InfluenzaA__ADX96959

SEQ ID NO: 180410 - RNA, 1410 nt, Artificial Sequence
  derived and/or modified CDS sequence (opt4) from neuraminidase__InfluenzaA__ADX96969
augaaccccaaccagaugaucaucaccaucggcagcgugugcaugaccaucggcauggccaaccugauccugcagaucggcaacaucaucagcaucuggaucagccacagcauccagcugggcaaccagaaccagaucgagaccugcaaccagagcgugaucaccuacgagaacaacaccugggugaaccagaccuacgugaacaucagcaacaccaacuucgccgccggccagagcguggugagcgugaagcuggccggcaacagcagccugugccccgugagcggcugggccaucuacagcaaggacaacagcgugagaaucggcagcaagggcgacguguucgugaucagagagcccuucaucagcugcagcccccuggagugcagaaccuucuuccugacccagggcgcccugcugaacgacaagcacagcaacggcaccaucaaggacagaagccccuacagaacccugaugagcugccccaucggcgaggugcccagccccuacaacagcagauucgagagcguggccuggagcgccagcgccugccacgacggcaucaacuggcugaccaucggcaucagcggccccgacaacggcgccguggccgugcugaaguacaacggcaucaucaccgacaccaucaagagcuggagaaacaacauccugagaacccaggagagcgagugcgccugcgugaacggcagcugcuucaccgugaugaccgacggccccagcaacggccaggccagcuacaagaucuucagaaucgagaagggcaagaucgugaagagcguggagaugaacgcccccaacuaccacuacgaggagugcagcugcuaccccgacagcagcgagaucaccugcgugugcagagacaacuggcacggcagcaacagacccugggugagcuucaaccagaaccuggaguaccagaucggcuacaucugcagcggcaucuucggcgacaaccccagacccaacgacaagaccggcagcugcggccccgugagcagcaacggcgccaacggcgugaagggcuucagcuucaaguacggcaacggcguguggaucggcagaaccaagagcaucagcagcagaaacggcuucgagaugaucugggaccccaacggcuggaccggcaccgacaacaacuucagcaucaagcaggacaucgugggcaucaacgaguggagcggcuacagcggcagcuucgugcagcaccccgagcugaccggccuggacugcaucagacccugcuucuggguggagcugaucagaggcagacccaaggagaacaccaucuggaccagcggcagcagcaucagcuucugcggcgugaacagcgacaccgugggcuggagcuggcccgacggcgccgagcugcccuucaccaucgacaaguga

SEQ ID NO: 180411 - RNA, 1410 nt, Artificial Sequence; identical to SEQ ID NO: 178021
  derived and/or modified CDS sequence (opt4) from neuraminidase__InfluenzaA__ADX96979

SEQ ID NO: 180412 - RNA, 1410 nt, Artificial Sequence; identical to SEQ ID NO: 178021
  derived and/or modified CDS sequence (opt4) from neuraminidase__InfluenzaA__ADX96989

SEQ ID NO: 180413 - RNA, 1407 nt, Artificial Sequence
  derived and/or modified CDS sequence (opt4) from neuraminidase__InfluenzaA__ADX96999
augaaccccaaccagaagaucaucaccaucggcagcgugugcaugaccaucggcauggccaaccugauccugcagaucggcaucaucagcaucuggaucagccacagcauccagcugggcaaccagaaccagaucgagaccugcaaccagagcgugaucaccuacgagaacaacaccugggugaaccagaccuacgugaacaucagcaacaccaacuucgccgccggccagagcguggugagcgugaagcuggccggcaacagcagccugugccccgugagcggcugggccaucuacagcaaggacaacagcaucagaaucggcagcaagggcgacguguucgugaucagagagcccuucaucagcugcagcccccuggagugcagaaccuucuuccugacccagggcgcccugcugaacgacaagcacagcaacggcaccaucaaggacagaagccccuacagaacccugaugagcugccccaucggcgaggugcccagccccuacaacagcagauucgagagcguggccuggagcgccagcgccugccacgacggcaucaacuggcugaccaucggcaucagcggccccgacaacggcgccguggccgugcugaaguacaacggcaucaucaccgacaccaucaagagcuggagaaacaacauccugagaacccaggagagcgagugcgccugcgugaacggcagcugcuucaccgugaugaccgacggccccagcaacggccaggccagcuacaagaucuucagaaucgagaagggcaagaucgugaagagcguggagaugaacgcccccaacuaccacuacgaggagugcagcugcuaccccgacagcagcgagaucaccugcgugugcagagacaacuggcacggcagcaacagacccugggugagcuucaaccagaaccuggaguaccagaucggcuacaucugcagcggcaucuucggcgacaaccccagacccaacgacaagaccggcagcugcggccccgugagcagcaacggcgccaacggcgugaagggcuucagcuucaaguacggcaacggcguguggaucggcagaaccaagagcaucagcagcagaaacggcuucgagaugaucugggaccccaacggcuggaccggcaccgacaacaacuucagcaucaagcaggacaucgugggcaucaacgaguggagcggcuacagcggcagcuucgugcagcaccccgagcugaccggccuggacugcaucagacccugcuucuggguggagcugaucagaggcagacccaaggagaacaccaucuggaccagcggcagcagcaucagcuucugcggcgugaacagcgacaccgugggcuggagcuggcccgacggcgccgagcugcccuucaccaucgacaaguga

SEQ ID NO: 180414 - RNA, 1410 nt, Artificial Sequence; identical to SEQ ID NO: 176798
  derived and/or modified CDS sequence (opt4) from neuraminidase__InfluenzaA__ADX97009

SEQ ID NO: 180415 - RNA, 1410 nt, Artificial Sequence; identical to SEQ ID NO: 176953
  derived and/or modified CDS sequence (opt4) from neuraminidase__InfluenzaA__ADX97020

SEQ ID NO: 180416 - RNA, 1410 nt, Artificial Sequence
  derived and/or modified CDS sequence (opt4) from neuraminidase__InfluenzaA__ADX97030
augaaccccaaccagaagaucaucaccaucggcagcgugugcaugaucaucggcauggccaaccugaugcugcagaucggcaacaucaucagcaucuggaucagccacagcauccagcugggcaaccagaaccagaucgagaccugcaaccagagcgugaucaccuacgagaacaacaccugggugaaccagaccuacgugaacaucagcaacaccaacuucgccgccggccagagcguggugagcgugaagcuggccggcaacagcagccugugccccgugagcggcugggccaucuacagcaaggacaacagcgugagaaucggcagcaagggcgacguguucgugaucagagagcccuucaucagcugcagcccccuggagugcagaaccuucuuccugacccagggcgcccugcugaacgacaagcacagcaacggcaccaucaaggacagaagccccuacagaacccugaugagcugccccaucggcgaggugcccagccccuacaacagcagauucgagagcguggccuggagcgccagcgccugccacgacggcaucaacuggcugaccaucggcaucagcggccccgacaacggcgccguggccgugcugaaguacaacggcaucaucaccgacaccaucaagagcuggagaaacaacauccugagaacccaggagagcgagugcgccugcgugaacggcagcugcuucaccgugaugaccgacggccccagcgacggccaggccagcuacaagaucuucagaaucgagaagggcaagaucgugaagagcguggagaugaacgcccccaacuaccacuacgaggagugcagcugcuaccccgacagcagcgagaucaccugcgugugcagagacaacuggcacggcagcaacagacccugggugagcuucaaccagaaccuggaguaccagaucggcuacaucugcagcggcaucuucggcgacaaccccagacccaacgacaagaccggcagcugcggccccgugagcagcaacggcgccaacggcgugaagggcuucagcuucaaguacggcaacggcguguggaucggcagaaccaagagcaucagcagcagaaacggcuucgagaugaucugggaccccaacggcuggaccggcaccgacaacaacuucagcaucaagcaggacaucgugggcaucaacgaguggagcggcuacagcggcagcuucgugcagcaccccgagcugaccggccuggacugcaucagacccugcuucuggguggagcugaucagaggcagacccaaggagaacaccaucuggaccagcggcagcagcaucagcuucugcggcgugaacagcgacaccgugggcuggagcuggcccgacggcgccgagcugcccuucaccaucgacaaguga

SEQ ID NO: 180417 - RNA, 1410 nt, Artificial Sequence; identical to SEQ ID NO: 178346
  derived and/or modified CDS sequence (opt4) from neuraminidase__InfluenzaA__ADX98643

SEQ ID NO: 180418 - RNA, 1410 nt, Artificial Sequence; identical to SEQ ID NO: 176798
  derived and/or modified CDS sequence (opt4) from neuraminidase__InfluenzaA__ADX98653

SEQ ID NO: 180419 - RNA, 1410 nt, Artificial Sequence
  derived and/or modified CDS sequence (opt4) from neuraminidase__InfluenzaA__ADX98668
augaaccccaaccagaagaucaucaccaucggcagcaucugcaucaccaucggcauggccaaccugauccugcagaucggcaacaucaucagcaucuggaucagccacagcauccagcugggcaaccagaaccagaucgagaccugcaaccagagcgugaucaccuacgagaacaacaccugggugaaccagaccuacgugaacaucagcaacaccaacuucgccgccggccagagcguggugagcgugaagcuggccggcaacagcagccugugccccgugagcggcugggccaucuacagcaaggacaacagcaucagaaucggcagcaagggcgacguguucgugaucagagagcccuucaucagcugcagcccccuggagugcagaaccuucuuccugacccagggcgcccugcugaacgacaagcacagcaacggcaccaucaaggacagaagccccuacagaacccugaugagcugccccaucggcgaggugcccagccccuacaacagcagauucgagagcguggccuggagcgccagcgccugccacgacggcaucaacuggcugaccaucggcaucagcggccccgacaacggcgccguggccgugcugaaguacaacggcaucaucaccgacaccaucaagagcuggagaaacaacauccugagaacccaggagagcgagugcgccugcgugaacggcagcugcuucaccgugaugaccgacggccccagcgacggccaggccagcuacaagaucuucagaaucgagaagggcaagaucgugaagagcguggagaugaacgcccccaacuaccacuacgaggagugcagcugcuaccccgacagcagcgagaucaccugcgugugcagagacaacuggcacggcagcaacagacccugggugagcuucaaccagaaccuggaguaccagaucggcuacaucugcagcggcaucuucggcgacaaccccagacccaacgacaagaccggcagcugcggccccgugagcagcaacggcgccaacggcgugaagggcuucagcuucaaguacggcaacggcguguggaucggcagaaccaagagcaucagcagcagaaacggcuucgagaugaucugggaccccaacggcuggaccggcaccgacaacaacuucagcaucaagcaggacaucgugggcaucaacgaguggagcggcuacagcggcagcuucgugcagcaccccgagcugaccggccuggacugcaucagacccugcuucuggguggagcugaucagaggcagacccaaggagaacaccaucuggaccagcggcagcagcaucagcuucugcggcgugaacagcgacaccgugggcuggagcuggcccgacggcgccgagcugcccuucaccaucgacaaguga

SEQ ID NO: 180420 - RNA, 1410 nt, Artificial Sequence; identical to SEQ ID NO: 176798
  derived and/or modified CDS sequence (opt4) from neuraminidase__InfluenzaA__ADX98678

SEQ ID NO: 180421 - RNA, 1410 nt, Artificial Sequence; identical to SEQ ID NO: 176798
  derived and/or modified CDS sequence (opt4) from neuraminidase__InfluenzaA__ADX98698

SEQ ID NO: 180422 - RNA, 1410 nt, Artificial Sequence
  derived and/or modified CDS sequence (opt4) from neuraminidase__InfluenzaA__ADX98708
augaaccccaaccagaagaucaucaccaucggcagcgugugcaugaccaucggcauggccaaccugauccugcagaucggcaacaucaucagcaucuggaucagccacagcauccagcugggcaaccagaaccagaucgagaccugcaaccagagcgugaucaucuacgagaacaacaccugggugaaccagaccuacgugaacaucagcaacaccaacuucgccgccggccagagcguggugagcgugaagcuggccggcaacagcagccugugccccgugagcggcugggccaucuacagcaaggacaacagcaucagaaucggcagcaagggcgacguguucgugaucagagagcccuucaucagcugcagcccccuggagugcagaaccuucuuccugacccagggcgcccugcugaacgacaagcacagcaacggcaccaucaaggacagaagccccuacagaacccugaugagcugccccaucggcgaggugcccagccccuacaacagcagauucgagagcguggccuggagcgccagcgccugccacgacggcaucaacuggcugaccaucggcaucagcggccccgacaacggcgccguggccgugcugaaguacaacggcaucaucaccgacaccaucaagagcuggagaaacaacauccugagaacccaggagagcgagugcgccugcgugaacggcagcugcuucaccgugaugaccgacggccccagcgacggccaggccagcuacaagaucuucagaaucgagaagggcaagaucgugaagagcguggagaugaacgcccccaacuaccacuacgaggagugcagcugcuaccccgacagcagcgagaucaccugcgugugcagagacaacuggcacggcagcaacagacccugggugagcuucaaccagaaccuggaguaccagaucggcuacaucugcagcggcaucuucggcgacaaccccagacccaacgacaagaccggcagcugcggccccgugagcagcaacggcgccaacggcgugaagggcuucagcuucaaguacggcaacggcguguggaucggcagaaccaagagcaucagcagcagaaacggcuucgagaugaucugggaccccaacggcuggaccggcaccgacaacaacuucagcaucaagcaggacaucgugggcaucaacgaguggagcggcuacagcggcagcuucgugcagcaccccgagcugaccggccuggacugcaucagacccugcuucuggguggagcugaucagaggcagacccaaggagaacaccaucuggaccagcggcagcagcaucagcuucugcggcgugaacagcgacaccgugggcuggagcuggcccgacggcgccgagcugcccuucaccaucgacaaguga

SEQ ID NO: 180423 - RNA, 1410 nt, Artificial Sequence; identical to SEQ ID NO: 176798
  derived and/or modified CDS sequence (opt4) from neuraminidase__InfluenzaA__ADX98722

SEQ ID NO: 180424 - RNA, 1410 nt, Artificial Sequence; identical to SEQ ID NO: 176798
  derived and/or modified CDS sequence (opt4) from neuraminidase__InfluenzaA__ADX98732

SEQ ID NO: 180425 - RNA, 1410 nt, Artificial Sequence; identical to SEQ ID NO: 176798
  derived and/or modified CDS sequence (opt4) from neuraminidase__InfluenzaA__ADX98742

SEQ ID NO: 180426 - RNA, 1410 nt, Artificial Sequence; identical to SEQ ID NO: 178149
  derived and/or modified CDS sequence (opt4) from neuraminidase__InfluenzaA__ADX98751

SEQ ID NO: 180427 - RNA, 1410 nt, Artificial Sequence; identical to SEQ ID NO: 176798
  derived and/or modified CDS sequence (opt4) from neuraminidase__InfluenzaA__ADX98761

SEQ ID NO: 180428 - RNA, 1410 nt, Artificial Sequence
  derived and/or modified CDS sequence (opt4) from neuraminidase__InfluenzaA__ADX98770
augaaccccaaccagaagaucaucaccaucggcagcgugugcaugaccaucggcauggccaaccugauccugcagaucggcaacaucaucagcaucuggaucagccacagcauccagcugggcaaccagaaccagaucgagaccugcaaccagagcgugaucaccuacgagaacaacaccugggugaaccagaccuacgugaacaucagcaacaccaacuucgccgccggccagagcguggugagcgugaagcuggccggcaacagcagccugugccccgugagcggcugggccaucuacagcaaggacaacagcaucagaaucggcagcaagggcgacguguucgugaucagagagcccuucaucagcugcagcccccuggagugcagaaccuucuuccugacccagggcgcccugcugaacgacaagcacagcaacggcaccaucaaggacagaagccccuacagaacccugaugagcugccccaucggcgaggugcccagccccuacaacagcagauucgagagcguggccuggagcgccagcgccugccacgacggcaucaacuggcugaccaucggcaucagcggccccgacaacggcgccguggccgugcugaaguacaacggcaucaucaccgacaccaucaagagcuggagaaacaacauccugagaacccaggagagcgagugcgccugcgugaacggcagcugcuucaccgugaugaccgacggccccagcgacggccaggccagcuacaagaucuucagaaucgagaagggcaagaucgugaagagcguggagaugaacgcccccaacuaccacuacgaggagugcagcugcuaccccgacagcagcgagaucaccugcgugugcagagacaacuggcacggcagcaacagacccuggggcagcuucaaccagaaccuggaguaccagaucggcuacaucugcagcggcaucuucggcgacaaccccagacccaacgacaagaccggcagcugcggccccgugagcagcaacggcgccaacggcgugaagggcuucagcuucaaguacggcaacggcguguggaucggcagaaccaagagcaucagcagcagaaacggcuucgagaugaucugggaccccaacggcuggaccggcaccgacaacaacuucagcaucaagcaggacaucgugggcaucaacgaguggagcggcuacagcggcagcuucgugcagcaccccgagcugaccggccuggacugcaucagacccugcuucuggguggagcugaucagaggcagacccaaggagaacaccaucuggaccagcggcagcagcaucagcuucugcggcgugaacagcgacaccgugggcuggagcuggcccgacggcgccgagcugcccuucaccaucgacaaguga

SEQ ID NO: 180429 - RNA, 1410 nt, Artificial Sequence; identical to SEQ ID NO: 176798
  derived and/or modified CDS sequence (opt4) from neuraminidase__InfluenzaA__ADX98780

SEQ ID NO: 180430 - RNA, 1410 nt, Artificial Sequence
  derived and/or modified CDS sequence (opt4) from neuraminidase__InfluenzaA__ADX98788
augaaccccaaccagaagaucaucaccaucggcagcgugugcaugaccaucggcauggccaaccuggugcugcagaucggcaacaucaucagcaucuggaucagccacagcauccagcugggcaaccagaaccagaucgagaccugcaaccagagcgugaucaccuacgagaacaacaccugggugaaccagaccuacgugaacaucagcaacaccaacuucgccgccggccagagcguggugagcgugaagcuggccggcaacagcagccugugccccgugagcggcugggccaucuacagcaaggacaacagcaucagaaucggcagcaagggcgacguguucgugaucagagagcccuucaucagcugcagcccccuggagugcagaaccuucuuccugacccagggcgcccugcugaacgacaagcacagcaacggcaccaucaaggacagaagccccuacagaacccugaugagcugccccaucggcgaggugcccagccccuacaacagcagauucgagagcguggccuggagcgccagcgccugccacgacggcaucaacuggcugaccaucggcaucagcggccccgacaacggcgccguggccgugcugaaguacaacggcaucaucaccgacaccaucaagagcuggagaaacaacauccugagaacccaggagagcgagugcgccugcgugaacggcagcugcuucaccgugaugaccgacggccccagcgacggccaggccagcuacaagaucuucagaaucgagaagggcaagaucgugaagagcguggagaugaacgcccccaacuaccacuacgaggagugcagcugcuaccccgacagcagcgagaucaccugcgugugcagagacaacuggcacggcagcaacagacccugggugagcuucaaccagaaccuggaguaccagaucggcuacaucugcagcggcaucuucggcgacaaccccagacccaacgacaagaccggcagcugcggccccgugagcagcaacggcgccaacggcgugaagggcuucagcuucaaguacggcaacggcguguggaucggcagaaccaagagcaucagcagcagaaacggcuucgagaugaucugggaccccaacggcuggaccggcaccgacaacaaguucagcaucaagcaggacaucgugggcaucaacgaguggagcggcuacagcggcagcuucgugcagcaccccgagcugaccggccuggacugcaucagacccugcuucuggguggagcugaucagaggcagacccaaggagaacaccaucuggaccagcggcagcagcaucagcuucugcggcgugaacagcgacaccgugggcuggagcuggcccgacggcgccgagcugcccuucaccaucgacaaguga

SEQ ID NO: 180431 - RNA, 1410 nt, Artificial Sequence
  derived and/or modified CDS sequence (opt4) from neuraminidase__InfluenzaA__ADX98809
augaaccccaaccagaagaucaucaccaucggcagcgugugcaugaccaucggcauggccaaccugauccugcagaucggcaacaucauccugaucuggaucagccacagcauccagcugggcaaccagaaccagaucgagaccugcaaccagagcgugaucaccuacgagaacaacaccugggugaaccagaccuacgugaacaucagcaacaccaacuucgccgccggccagagcguggugagcgugaagcuggccggcaacagcagccugugccccgugagcggcugggccaucuacagcaaggacaacagcaucagaaucggcagcaagggcgacguguucgugaucagagagcccuucaucagcugcagcccccuggagugcagaaccuucuuccugacccagggcgcccugcugaacgacaagcacagcaacggcaccaucaaggacagaagccccuacagaacccugaugagcugccccaucggcgaggugcccagccccuacaacagcagauucgagagcguggccuggagcgccagcgccugccacgacggcaucaacuggcugaccaucggcaucagcggccccgacaacggcgccguggccgugcugaaguacaacggcaucaucaccgacaccaucaagagcuggagaaacaacauccugagaacccaggagagcgagugcgccugcgugaacggcagcugcuucaccgugaugaccgacggccccagcgacggccaggccagcuacaagaucuucagaaucgagaagggcaagaucgugaagagcguggagaugaacgcccccaacuaccacuacgaggagugcagcugcuaccccgacagcagcgagaucaccugcgugugcagagacaacuggcacggcagcaacagacccugggugagcuucaaccagaaccuggaguaccagaucggcuacaucugcagcggcaucuucggcgacaaccccagacccaacgacaagaccggcagcugcggccccgugagcagcaacggcgccaacggcgugaagggcuucagcuucaaguacggcaacggcguguggaucggcagaaccaagagcaucagcagcagaaacggcuucgagaugaucugggaccccaacggcuggaccggcaccgacaacaacuucagcaucaagcaggacaucgugggcaucaacgaguggagcggcuacagcggcagcuucgugcagcaccccgagcugaccggccuggacugcaucagacccugcuucuggguggagcugaucagaggcagacccaaggagaacaccaucuggaccagcggcagcagcaucagcuucugcggcgugaacagcgacaccgugggcuggagcuggcccgacggcgccgagcugcccuucaccaucgacaaguga

SEQ ID NO: 180432 - RNA, 1410 nt, Artificial Sequence; identical to SEQ ID NO: 176798
  derived and/or modified CDS sequence (opt4) from neuraminidase__InfluenzaA__ADX98821

SEQ ID NO: 180433 - RNA, 1410 nt, Artificial Sequence; identical to SEQ ID NO: 176798
  derived and/or modified CDS sequence (opt4) from neuraminidase__InfluenzaA__ADX98846

SEQ ID NO: 180434 - RNA, 1410 nt, Artificial Sequence
  derived and/or modified CDS sequence (opt4) from neuraminidase__InfluenzaA__ADX98856
augaaccccaaccagaagaucaugaccaucggcagcgugugcaugaccaucggcauggccaaccugauccugcagaucggcaacaucaucagcaucuggaucagccacagcauccagcugggcauccagaaccagaucgagaccugcaaccagagcgugaucaccuacgagaacaacaccugggugaaccagaccuacgugaacaucagcaacaccaacuucgccgccggccagagcguggugagcgugaagcuggccggcaacagcagccugugccccgugagcggcugggccaucuacagcaaggacaacagcaucagaaucggcagcaagggcgacguguucgugaucagagagcccuucaucagcugcagcccccuggagugcagaaccuucuuccugacccagggcgcccugcugaacgacaagcacagcaacggcaccaucaaggacagaagccccuacagaacccugaugagcugccccaucggcgaggugcccagccccuacaacagcagauucgagagcguggccuggagcgccagcgccugccacgacggcaucaacuggcugaccaucggcaucagcggccccgacaacggcgccguggccgugcugaaguacaacggcaucaucaccgacaccaucaagagcuggagaaacaacauccugagaacccaggagagcgagugcgccugcgugaacggcagcugcuucaccgugaugaccgacggccccagcgacggccaggccagcuacaagaucuucagaaucgagaagggcaagaucgugaagagcguggagaugaacgcccccaacuaccacuacgaggagugcagcugcuaccccgacagcagcgagaucaccugcgugugcagagacaacuggcacggcagcaacagacccugggugagcuucaaccagaaccuggaguaccagaucggcuacaucugcagcggcaucuucggcgacaaccccagacccaacgacaagaccggcagcugcggccccgugagcagcaacggcgccaacggcgugaagggcuucagcuucaaguacggcaacggcguguggaucggcagaaccaagagcaucagcagcagaaacggcuucgagaugaucugggaccccaacggcuggaccggcaccgacaacaacuucagcaucaagcaggacaucgugggcaucaacgaguggagcggcuacagcggcagcuucgugcagcaccccgagcugaccggccuggacugcaucagacccugcuucuggguggagcugaucagaggcagacccaaggagaacaccaucuggaccagcggcagcagcaucagcuucugcggcgugaacagcgacaccgugggcuggagcuggcccgacggcgccgagcugcccuucaccaucgacaaguga

SEQ ID NO: 180435 - RNA, 1410 nt, Artificial Sequence; identical to SEQ ID NO: 176798
  derived and/or modified CDS sequence (opt4) from neuraminidase__InfluenzaA__ADX98863

SEQ ID NO: 180436 - RNA, 1410 nt, Artificial Sequence; identical to SEQ ID NO: 176798
  derived and/or modified CDS sequence (opt4) from neuraminidase__InfluenzaA__ADX98873

SEQ ID NO: 180437 - RNA, 1410 nt, Artificial Sequence
  derived and/or modified CDS sequence (opt4) from neuraminidase__InfluenzaA__ADX98883
augaaccccaaccagaagaucaucaccaucggcagcgugugcaugaccaucggcauggccaaccugauccugcagaucggcaacaucaucagcaucuggaucagccacagcauccagcugggcaaccagaaccagaucgagaccugcaaccagagcgugaucaccuacgagaacaacaccugggugaaccagaccuacgugaacaucagcaacaccaacguggccgccggccagagcguggugagcgugaagcuggccggcaacagcagccugugccccgugagcggcugggccaucuacagcaaggacaacagcaucagaaucggcagcaagggcgacgccuucgugaucagagagcccuucaucagcugcagcccccuggagugcagaaccuucuuccugacccagggcgcccugcugaacgacaagcacagcaacggcaccaucaaggacagaagccccuacagaacccugaugagcugccccaucggcgaggugcccagccccuacaacagcagauucgagagcguggccuggagcgccagcgccugccacgacggcaucaacuggcugaccaucggcaucagcggccccgacaacggcgccguggccgugcugaaguacaacggcaucaucaccgacaccaucaagagcuggagaaacaacauccugagaacccaggagagcgagugcgccugcgugaacggcagcugcuucaccgugaugaccgacggccccagcgacggccaggccagcuacaagaucuucagaaucgagaagggcaagaucgugaagagcguggagaugaacgcccccaacuaccacuacgaggagugcagcugcuaccccgacagcagcgagaucaccugcgugugcagagacaacuggcacggcagcaacagacccugggugagcuucaaccagaaccuggaguaccagaucggcuacaucugcagcggcaucuucggcgacaaccccagacccaacgacaagaccggcagcugcggccccgugagcagcaacggcgccaacggcgugaagggcuucagcuucaaguacggcaacggcguguggaucggcagaaccaagagcaucagcagcagaagcggcuucgagaugaucugggaccccaacggcuggaccggcaccgacaacaacuucagcaucaagcaggacaucgugggcaucaacgaguggagcggcuacagcggcagcuucgugcagcaccccgagcugaccggccuggacugcaucagacccugcuucuggguggagcugaucagaggcagacccaaggagaacaccaucuggaccagcggcagcagcaucagcuucugcggcgugaacagcgacaccgugggcuggagcuggcccgacggcgccgagcugcccuucaccaucgacaaguga

SEQ ID NO: 180438 - RNA, 1410 nt, Artificial Sequence; identical to SEQ ID NO: 176798
  derived and/or modified CDS sequence (opt4) from neuraminidase__InfluenzaA__ADX98893

SEQ ID NO: 180439 - RNA, 1410 nt, Artificial Sequence; identical to SEQ ID NO: 176798
  derived and/or modified CDS sequence (opt4) from neuraminidase__InfluenzaA__ADX98903

SEQ ID NO: 180440 - RNA, 1410 nt, Artificial Sequence; identical to SEQ ID NO: 178351
  derived and/or modified CDS sequence (opt4) from neuraminidase__InfluenzaA__ADX98913

SEQ ID NO: 180441 - RNA, 1410 nt, Artificial Sequence; identical to SEQ ID NO: 178229
  derived and/or modified CDS sequence (opt4) from neuraminidase__InfluenzaA__ADX98923

SEQ ID NO: 180442 - RNA, 1410 nt, Artificial Sequence; identical to SEQ ID NO: 178235
  derived and/or modified CDS sequence (opt4) from neuraminidase__InfluenzaA__ADX98933

SEQ ID NO: 180443 - RNA, 1410 nt, Artificial Sequence; identical to SEQ ID NO: 176798
  derived and/or modified CDS sequence (opt4) from neuraminidase__InfluenzaA__ADX98943

SEQ ID NO: 180444 - RNA, 1410 nt, Artificial Sequence; identical to SEQ ID NO: 178755
  derived and/or modified CDS sequence (opt4) from neuraminidase__InfluenzaA__ADX98953

SEQ ID NO: 180445 - RNA, 1410 nt, Artificial Sequence; identical to SEQ ID NO: 176798
  derived and/or modified CDS sequence (opt4) from neuraminidase__InfluenzaA__ADX98963

SEQ ID NO: 180446 - RNA, 1410 nt, Artificial Sequence
  derived and/or modified CDS sequence (opt4) from neuraminidase__InfluenzaA__ADX98973
augaaccccaaccagaagaucaucaccaucggcagcgugugcaugaccaucggcauggccaaccugauccugcagaucggcaacaucaucagcaucuggaucagccacagcauccagcugggcaaccagaaccagaucgagaccugcaaccagagcgugaucaccuacgagaacaacaccugggugaaccagaccuacgugaacaucagcaacaccaacuucgccgccggccagagcguggugagcgugaagcuggccggcaacagcagccugugccccgugagcggcugggccaucuacagcaaggacaacagcaucagaaucggcagcaagggcgacguguucgugaucagagagcccuucaucagcugcagcccccuggagugcagaaccuucuuccugacccagggcgcccugcugaacgacaagcacagcaacggcaccaucaaggacagaagccccuacagaacccugaugaucugccccaucggcgaggugcccagccccuacaacagcagauucgagagcguggccuggagcgccagcgccugccacgacggcaucaacuggcugaccaucggcaucagcggccccgacaacggcgccguggccgugcugaaguacaacggcaucaucaccgacaccaucaagagcuggagaaacaacauccugagaacccaggagagcgagugcgccugcgugaacggcagcugcuucaccgugaugaccgacggccccagcgacggccaggccagcuacaagaucuucagaaucgagaagggcaagaucgugaagagcguggagaugaacgcccccaacuaccacuacgaggagugcagcugcuaccccgacagcagcgagaucaccugcgugugcagagacaacuggcacggcagcaacagacccugggugagcuucaaccagaaccuggaguaccagaucggcuacaucugcagcggcaucuucggcgacaaccccagacccaacgacaagaccggcagcugcggccccgugagcagcaacggcgccaacggcgugaagggcuucagcuucaaguacggcaacggcguguggaucggcagaaccaagagcaucagcagcagaaacggcuucgagaugaucugggaccccaacggcuggaccggcaccgacaacaacuucagcaucaagcaggacaucgugggcaucaacgaguggagcggcuacagcggcagcuucgugcagcaccccgagcugaccggccuggacugcaucagacccugcuucuggguggagcugaucagaggcagacccaaggagaacaccaucuggaccagcggcagcagcaucagcuucugcggcgugaacagcgacaccgugggcuggagcuggcccgacggcgccgagcugcccuucaccaucgacaaguga

SEQ ID NO: 180447 - RNA, 1410 nt, Artificial Sequence; identical to SEQ ID NO: 176798
  derived and/or modified CDS sequence (opt4) from neuraminidase__InfluenzaA__ADX98983

SEQ ID NO: 180448 - RNA, 1410 nt, Artificial Sequence; identical to SEQ ID NO: 176798
  derived and/or modified CDS sequence (opt4) from neuraminidase__InfluenzaA__ADX98993

SEQ ID NO: 180449 - RNA, 1410 nt, Artificial Sequence; identical to SEQ ID NO: 176798
  derived and/or modified CDS sequence (opt4) from neuraminidase__InfluenzaA__ADX99003

SEQ ID NO: 180450 - RNA, 1365 nt, Artificial Sequence
  derived and/or modified CDS sequence (opt4) from neuraminidase__InfluenzaA__ADX99584
augaaccccaaccagaagaucaccaccaucggcagcaucugccugguggugggccugaucagccugauccugcagaucggcaacaucaucagcaucuggaucagccacagcauccagaccggcagccagaaccacaccggcaucugcaaccagaacaucaucaccuacaagaacagcaccugggugaaggacaccaccagcgugauccugaccggcaacagcagccugugccccaucagaggcugggccaucuacagcaaggacaacagcaucagaaucggcagcaagggcgacguguucgugaucagagagcccuucaucagcugcagccaccuggagugcagaaccuucuuccugacccagggcgcccugcugaacgacaagcacagcaacggcaccgugaaggacagaagccccuacagagcccugaugagcugccccgugggcgaggcccccagccccuacaacagcagauucgagagcguggccuggagcgccagcgccugccacgacggcaugggcuggcugaccaucggcaucagcggccccgacaacggcgccguggccgugcugaaguacaacggcaucaucaccgagaccaucaagagcuggagaaagaagauccugagaacccaggagagcgagugcgccugcgugaacggcagcugcuucaccaucaugaccgacggccccagcgacggccuggccagcuacaagaucuucaagaucgagaagggcaaggugaccaagagcaucgagcugaacgcccccaacagccacuacgaggagugcagcugcuaccccgacaccggcaaggugaugugcgugugcagagacaacuggcacggcagcaacagacccugggugagcuucgaccagaaccuggacuaccagaucggcuacaucugcagcggcguguucggcgacaaccccagacccgaggacggcaccggcagcugcggccccguguacguggacggcgccaacggcgugaagggcuucagcuacagauacggcaacggcguguggaucggcagaaccaagagccacagcagcagacacggcuucgagaugaucugggaccccaacggcuggaccgagaccgacagcaaguucagcgugagacaggacgugguggccaugaccgacuggagcggcuacagcggcagcuucgugcagcaccccgagcugaccggccuggacugcaugagacccugcuucuggguggagcugaucagaggcagacccaaggagaagaccaucuggaccagcgccagcagcaucagcuucugcggcgugaacagcgacaccguggacuggagcuggcccgacggcgccgagcugcccuucagcaucgacaaguga

SEQ ID NO: 180451 - RNA, 1365 nt, Artificial Sequence; identical to SEQ ID NO: 180450
  derived and/or modified CDS sequence (opt4) from neuraminidase__InfluenzaA__ADX99595

SEQ ID NO: 180452 - RNA, 1365 nt, Artificial Sequence; identical to SEQ ID NO: 180450
  derived and/or modified CDS sequence (opt4) from neuraminidase__InfluenzaA__ADX99606

SEQ ID NO: 180453 - RNA, 1365 nt, Artificial Sequence; identical to SEQ ID NO: 180450
  derived and/or modified CDS sequence (opt4) from neuraminidase__InfluenzaA__ADX99617

SEQ ID NO: 180454 - RNA, 1365 nt, Artificial Sequence; identical to SEQ ID NO: 180450
  derived and/or modified CDS sequence (opt4) from neuraminidase__InfluenzaA__ADX99628

SEQ ID NO: 180455 - RNA, 1365 nt, Artificial Sequence; identical to SEQ ID NO: 180450
  derived and/or modified CDS sequence (opt4) from neuraminidase__InfluenzaA__ADX99639

SEQ ID NO: 180456 - RNA, 1365 nt, Artificial Sequence; identical to SEQ ID NO: 175779
  derived and/or modified CDS sequence (opt4) from neuraminidase__InfluenzaA__ADX99650

SEQ ID NO: 180457 - RNA, 1365 nt, Artificial Sequence; identical to SEQ ID NO: 175779
  derived and/or modified CDS sequence (opt4) from neuraminidase__InfluenzaA__ADX99672

SEQ ID NO: 180458 - RNA, 1365 nt, Artificial Sequence; identical to SEQ ID NO: 175779
  derived and/or modified CDS sequence (opt4) from neuraminidase__InfluenzaA__ADX99683

SEQ ID NO: 180459 - RNA, 1365 nt, Artificial Sequence; identical to SEQ ID NO: 175779
  derived and/or modified CDS sequence (opt4) from neuraminidase__InfluenzaA__ADX99694

SEQ ID NO: 180460 - RNA, 1365 nt, Artificial Sequence; identical to SEQ ID NO: 175779
  derived and/or modified CDS sequence (opt4) from neuraminidase__InfluenzaA__ADX99705

SEQ ID NO: 180461 - RNA, 1365 nt, Artificial Sequence; identical to SEQ ID NO: 175779
  derived and/or modified CDS sequence (opt4) from neuraminidase__InfluenzaA__ADX99846

SEQ ID NO: 180462 - RNA, 1365 nt, Artificial Sequence; identical to SEQ ID NO: 175779
  derived and/or modified CDS sequence (opt4) from neuraminidase__InfluenzaA__ADX99857

SEQ ID NO: 180463 - RNA, 1365 nt, Artificial Sequence; identical to SEQ ID NO: 175779
  derived and/or modified CDS sequence (opt4) from neuraminidase__InfluenzaA__ADX99868

SEQ ID NO: 180464 - RNA, 1365 nt, Artificial Sequence; identical to SEQ ID NO: 175779
  derived and/or modified CDS sequence (opt4) from neuraminidase__InfluenzaA__ADX99879

SEQ ID NO: 180465 - RNA, 1365 nt, Artificial Sequence; identical to SEQ ID NO: 175779
  derived and/or modified CDS sequence (opt4) from neuraminidase__InfluenzaA__ADX99890

SEQ ID NO: 180466 - RNA, 1365 nt, Artificial Sequence; identical to SEQ ID NO: 175779
  derived and/or modified CDS sequence (opt4) from neuraminidase__InfluenzaA__ADX99901

SEQ ID NO: 180467 - RNA, 1365 nt, Artificial Sequence
  derived and/or modified CDS sequence (opt4) from neuraminidase__InfluenzaA__ADX99912
augaaccccaaccagaagaucaucaccaucggcagcaucugccugguggugggccugaucagccugauccugcagaucggcaacaucaucagcaucuggaucagccacagcauccagaccggcagccagaaccacaccggcaucugcaaccagaacaucaucaccuacaagaacagcaccugggugaaggacaccaccagcgugauccugaccggcaacagcagccugugccccaucagaggcugggccaucuacagcaaggacaacagcaucagaaucggcagcaagggcgacguguucaucaucagagagcccuucaucagcugcagccaccuggagugcagaaccuucuuccugacccagggcgcccugcugaacgacaagcacagcagcggcaccgugaaggacagaagccccuacagagcccugaugagcugccccgugggcgaggcccccagccccuacaacagcagauucgagagcguggccuggagcgccagcgccugccacgacggcaugggcuggcugaccaucggcaucagcggccccgacaacggcgccguggccgugcugaaguacaacggcaucaucaccgagaccaucaagagcuggagaaagaagauccugagaacccaggagagcgagugcgccugcgugaacggcagcugcuucaccaucaugaccgacggccccagcgacggccuggccagcuacaagaucuucaagaucgagaagggcaaggugaccaagagcaucgagcugaacgcccccaacagccacuacgaggagugcagcugcuaccccgacaccggcaaggugaugugcgugugcagagacaacuggcacggcagcaacagacccugggugagcuucgaccagaaccuggacuaccagaucggcuacaucugcagcggcguguucggcgacaaccccagacccgaggacggcaccggcagcugcggccccguguacguggacggcgccaacggcgugaagggcuucagcuacagauacggcaacggcguguggaucggcagaaccaagagccacagcagcagacacggcuucgagaugaucugggaccccaacggcuggaccgagaccgacagcaaguucagcgugagacaggacgugguggccaugaccgacuggagcggcuacagcggcagcuucgugcagcaccccgagcugaccggccuggacugcaugagacccugcuucuggguggagcugaucagaggcagacccaaggagaagaccaucuggaccagcgccagcagcaucagcuucugcggcgugaacagcgacaccguggacuggagcuggcccgacggcgccgagcugcccuucagcaucgacaaguga

SEQ ID NO: 180468 - RNA, 1365 nt, Artificial Sequence; identical to SEQ ID NO: 175779
  derived and/or modified CDS sequence (opt4) from neuraminidase__InfluenzaA__ADX99923

SEQ ID NO: 180469 - RNA, 1365 nt, Artificial Sequence; identical to SEQ ID NO: 175779
  derived and/or modified CDS sequence (opt4) from neuraminidase__InfluenzaA__ADX99934

SEQ ID NO: 180470 - RNA, 1365 nt, Artificial Sequence; identical to SEQ ID NO: 175779
  derived and/or modified CDS sequence (opt4) from neuraminidase__InfluenzaA__ADX99956

SEQ ID NO: 180471 - RNA, 1365 nt, Artificial Sequence; identical to SEQ ID NO: 175779
  derived and/or modified CDS sequence (opt4) from neuraminidase__InfluenzaA__ADX99967

SEQ ID NO: 180472 - RNA, 1365 nt, Artificial Sequence; identical to SEQ ID NO: 175779
  derived and/or modified CDS sequence (opt4) from neuraminidase__InfluenzaA__ADX99978

SEQ ID NO: 180473 - RNA, 1365 nt, Artificial Sequence; identical to SEQ ID NO: 175779
  derived and/or modified CDS sequence (opt4) from neuraminidase__InfluenzaA__ADX99989

SEQ ID NO: 180474 - RNA, 1365 nt, Artificial Sequence; identical to SEQ ID NO: 175779
  derived and/or modified CDS sequence (opt4) from neuraminidase__InfluenzaA__ADY00001

SEQ ID NO: 180475 - RNA, 1365 nt, Artificial Sequence; identical to SEQ ID NO: 175779
  derived and/or modified CDS sequence (opt4) from neuraminidase__InfluenzaA__ADY00012

SEQ ID NO: 180476 - RNA, 1365 nt, Artificial Sequence; identical to SEQ ID NO: 175779
  derived and/or modified CDS sequence (opt4) from neuraminidase__InfluenzaA__ADY00023

SEQ ID NO: 180477 - RNA, 1413 nt, Artificial Sequence
  derived and/or modified CDS sequence (opt4) from neuraminidase__InfluenzaA__ADY04729
augaaccccaaccagaagaucaucaccaucggcagcaucagcaucgccaucggcaucaucagccugaugcugcagaucggcaacaucaucagcaucugggccagccacagcauccagaccggcagccagaaccacaccggcgugugcaaccagagaaucaucaccuacgagaacagcaccugggugaaccacaccuacgugaacaucaacaacaccaacgugaucgccggcaaggacaagaccagcgugaccauggccggcaacagcagccugugcagcaucagcggcugggccaucuacaccaaggacaacagcaucagaaucggcagcaagggcgacguguucgugaucagagagcccuucaucagcugcagccaccuggagugcagaaccuucuuccugacccagggcgcccugcugaacgacaagcacagcaacggcaccgugaaggacagaagccccuacagagcccugaugagcugcccccugggcgaggcccccagccccuacaacagcaaguucgagagcguggccuggagcgccagcgccugccacgacggcaugggcuggcugaccaucggcaucagcggccccgacaacggcgccguggccgugcugaaguacaacggcaucaucaccgagaccaucaagagcuggaagaagcagauccugagaacccaggagagcgagugcgugugcgugaacggcagcugcuucaccaucaugaccgacggccccagcaacggcgccgccagcuacaagaucuucaagaucgagaagggcaaggugaccaagagcaucgagcugaacgcccccaacuuccacuacgaggagugcagcugcuaccccgacaccggcaccgugaugugcgugugcagagacaacuggcacggcagcaacagacccugggugagcuucaaccagaaccuggacuaccagaucggcuacaucugcagcggcguguucggcgacaaccccagacccaaggacggcgagggcagcugcaaccccgugaccguggacggcgccaacggcgugaagggcuucagcuacaaguacggcaacggcguguggaucggcagaaccaagagcaacagacugagaaagggcuucgagaugaucugggaccccaacggcuggaccgacaccgacagcgacuucagcgugaagcaggacgugguggccaucaccgacuggagcggcuacagcggcagcuucgugcagcaccccgagcugaccggccuggacugcaucagacccugcuucuggguggagcuggugagaggccugcccaaggagaacaccaccaucuggaccagcggcagcagcaucagcuucugcggcgugaacagcgacaccgccaacuggagcuggcccgacggcgccgagcugcccuucaccaucgacaaguga

SEQ ID NO: 180478 - RNA, 1410 nt, Artificial Sequence; identical to SEQ ID NO: 179578
  derived and/or modified CDS sequence (opt4) from neuraminidase__InfluenzaA__ADY11828

SEQ ID NO: 180479 - RNA, 1410 nt, Artificial Sequence; identical to SEQ ID NO: 176659
  derived and/or modified CDS sequence (opt4) from neuraminidase__InfluenzaA__ADY11839

SEQ ID NO: 180480 - RNA, 1410 nt, Artificial Sequence; identical to SEQ ID NO: 176659
  derived and/or modified CDS sequence (opt4) from neuraminidase__InfluenzaA__ADY17657

SEQ ID NO: 180481 - RNA, 1410 nt, Artificial Sequence; identical to SEQ ID NO: 176659
  derived and/or modified CDS sequence (opt4) from neuraminidase__InfluenzaA__ADY17668

SEQ ID NO: 180482 - RNA, 1410 nt, Artificial Sequence; identical to SEQ ID NO: 176659
  derived and/or modified CDS sequence (opt4) from neuraminidase__InfluenzaA__ADY17679

SEQ ID NO: 180483 - RNA, 1410 nt, Artificial Sequence; identical to SEQ ID NO: 176659
  derived and/or modified CDS sequence (opt4) from neuraminidase__InfluenzaA__ADY17690

SEQ ID NO: 180484 - RNA, 1410 nt, Artificial Sequence; identical to SEQ ID NO: 176659
  derived and/or modified CDS sequence (opt4) from neuraminidase__InfluenzaA__ADY17701

SEQ ID NO: 180485 - RNA, 1410 nt, Artificial Sequence; identical to SEQ ID NO: 176798
  derived and/or modified CDS sequence (opt4) from neuraminidase__InfluenzaA__ADY38722

SEQ ID NO: 180486 - RNA, 1410 nt, Artificial Sequence; identical to SEQ ID NO: 178547
  derived and/or modified CDS sequence (opt4) from neuraminidase__InfluenzaA__ADY38723

SEQ ID NO: 180487 - RNA, 1410 nt, Artificial Sequence; identical to SEQ ID NO: 176798
  derived and/or modified CDS sequence (opt4) from neuraminidase__InfluenzaA__ADY38734

SEQ ID NO: 180488 - RNA, 1410 nt, Artificial Sequence; identical to SEQ ID NO: 178390
  derived and/or modified CDS sequence (opt4) from neuraminidase__InfluenzaA__ADY38753

SEQ ID NO: 180489 - RNA, 1410 nt, Artificial Sequence; identical to SEQ ID NO: 176798
  derived and/or modified CDS sequence (opt4) from neuraminidase__InfluenzaA__ADY38763

SEQ ID NO: 180490 - RNA, 1410 nt, Artificial Sequence; identical to SEQ ID NO: 176798
  derived and/or modified CDS sequence (opt4) from neuraminidase__InfluenzaA__ADZ04600

SEQ ID NO: 180491 - RNA, 1410 nt, Artificial Sequence; identical to SEQ ID NO: 176798
  derived and/or modified CDS sequence (opt4) from neuraminidase__InfluenzaA__ADZ04610

SEQ ID NO: 180492 - RNA, 1410 nt, Artificial Sequence; identical to SEQ ID NO: 176798
  derived and/or modified CDS sequence (opt4) from neuraminidase__InfluenzaA__ADZ04693

SEQ ID NO: 180493 - RNA, 1410 nt, Artificial Sequence; identical to SEQ ID NO: 176798
  derived and/or modified CDS sequence (opt4) from neuraminidase__InfluenzaA__ADZ04701

SEQ ID NO: 180494 - RNA, 1410 nt, Artificial Sequence; identical to SEQ ID NO: 176798
  derived and/or modified CDS sequence (opt4) from neuraminidase__InfluenzaA__ADZ04711

SEQ ID NO: 180495 - RNA, 1410 nt, Artificial Sequence
  derived and/or modified CDS sequence (opt4) from neuraminidase__InfluenzaA__ADZ05393
augaaccccaaccagaagaucaucaccaucgacagcgugugcaugaccaucggcauggccaaccugauccugcagaucggcaacaucaucagcaucuggaucagccacagcauccagcugggcaaccagaaccagaucgagaccugcaaccagagcgugaucaccuacgagaacaacaccugggugaaccagaccuacgugaacaucagcaacaccaacuucgccgccggccagagcguggugagcgugaagcuggccggcaacagcagccugugccccgugagcggcugggccaucuacagcaaggacaacagcgugagaaucggcagcaagggcgacguguucgugaucagagagcccuucaucagcugcagcccccuggagugcagaaccuucuuccugacccagggcgcccugcugaacgacaagcacagcaacggcaccaucaaggacagaagccccuacagaacccugaugagcugccccaucggcgaggugcccagccccuacaacagcagauucgagagcguggccuggagcgccagcgccugccacgacggcaucaacuggcugaccaucggcaucagcggccccgacaacggcgccguggccgugcugaaguacaacggcaucaucaccgacaccaucaagagcuggagaaacaacauccugagaacccaggagagcgagugcgccugcgugaacggcagcugcuucaccgugaugaccgacggccccagcaacggccaggccagcuacaagaucuucagaaucgagaagggcaagaucgugaagagcguggagaugaacgcccccaacuaccacuacgaggagugcagcugcuaccccgacagcagcgagaucaccugcgugugcagagacaacuggcacggcagcaacagacccugggugagcuucaaccagaaccuggaguaccagaucggcuacaucugcagcggcaucuucggcgacaaccccagacccaacgacaagaccggcagcugcggccccgugagcagcaacggcgccaacggcgugaagggcuucagcuucaaguacggcaacggcguguggaucggcagaaccaagagcaucagcagcagaaacggcuucgagaugaucugggaccccaacggcuggaccggcaccgacaacaacuucagcaucaagcaggacaucgugggcaucaacgaguggagcggcuacagcggcagcuucgugcagcaccccgagcugaccggccuggacugcaucagacccugcuucuggguggagcugaucagaggcagacccaaggagaacaccaucuggaccagcggcagcagcaucagcuucugcggcgugaacagcgacaccgugggcuggagcuggcccgacggcgccgagcugcccuucaccaucgacaaguga

SEQ ID NO: 180496 - RNA, 1413 nt, Artificial Sequence
  derived and/or modified CDS sequence (opt4) from neuraminidase__InfluenzaA__ADZ05837
augaaccccaaccagaagaucaucaccaucggcagcaucagcaucgccaucggcaucaucagccugaugcugcagaucggcaacaucaucagcaucugggccagccacagcauccagaccggcagccagaacaacaccggcaucugcaaccagagaaucaucaccugcgagaacagcaccugggugaaccacaccuacgugaacaucaacaacaccaacgugguggccggcgaggacaagaccagcgugacccuggccggcaacagcagccugugcagcaucagcggcugggccaucuacaccaaggacaacagcaucagaaucggcagcaagggcgacguguucgugaucagagagcccuucaucagcugcagccaccuggagugcagaaccuucuuccugacccagggcgcccugcugaacgacaagcacagcaacggcaccgugaaggacagaagccccuacagagcccugaugagcugcccccugggcgaggcccccagccccuacaacagcaaguucgagagcguggccuggagcgccagcgccugccacgacggcaugggcuggcugaccaucggcaucagcggccccgacaacggcgccguggccgugcugaaguacaacggcaucaucaccggcaccaucaagagcuggaagaagcagauccugagaacccaggagagcgagugcgugugcaugaacggcagcugcuucaccaucaugaccgacggccccagcaacaaggccgccagcuacaagaucuucaagaucgagaagggcaaggugaccaagagcaucgagcugaacgcccccaacuucuacuacgaggagugcagcugcuaccccgacaccggcaucgugaugugcgugugcagagacaacuggcacggcagcaacagacccugggugagcuucaaccagaaccuggacuaccagaucggcuacaucugcagcggcguguucggcgacaaccccagacccgaggacggcgagggcagcugcaaccccgugaccguggacggcgccaacggcgugaagggcuucagcuacaaguacggcaacggcguguggaucggcagaaccaagagcaacagacugagaaagggcuucgagaugaucugggaccccaacggcuggaccaacaccgacagcgacuucagcgugaagcaggacgugguggccaccaccgacuggagcggcuacagcggcagcuucgugcagcaccccgagcugaccggccuggacugcaucagacccugcuucuggguggagcuggugagaggccugcccagagagaacaccaccaucuggaccagcggcagcagcaucagcuucugcggcgugaacagcgacaccgccaacuggagcuggcccgacggcgccgagcugcccuucaccaucgacaaguga

SEQ ID NO: 180497 - RNA, 1413 nt, Artificial Sequence; identical to SEQ ID NO: 177521
  derived and/or modified CDS sequence (opt4) from neuraminidase__InfluenzaA__ADZ05848

SEQ ID NO: 180498 - RNA, 1410 nt, Artificial Sequence; identical to SEQ ID NO: 177965
  derived and/or modified CDS sequence (opt4) from neuraminidase__InfluenzaA__ADZ05858

SEQ ID NO: 180499 - RNA, 1410 nt, Artificial Sequence; identical to SEQ ID NO: 176798
  derived and/or modified CDS sequence (opt4) from neuraminidase__InfluenzaA__ADZ47841

SEQ ID NO: 180500 - RNA, 1410 nt, Artificial Sequence; identical to SEQ ID NO: 176798
  derived and/or modified CDS sequence (opt4) from neuraminidase__InfluenzaA__ADZ47851

SEQ ID NO: 180501 - RNA, 1410 nt, Artificial Sequence
  derived and/or modified CDS sequence (opt4) from neuraminidase__InfluenzaA__ADZ47861
augaaccccaaccagaagaucaucaccaucggcagcgugugcaugaccaucggccuggccaaccugauccugcagaucggcaacaucaucagcaucuggaucagccacagcauccagcugggcaaccagaaccagaucgagaccugcaaccagagcgugaucaccuacgagaacaacaccugggugaaccagaccuacgugaacaucagcaacaucaacuucgccgccggccagagcguggugagcgugaagcuggccggcaacagcagccugugccccgugagcggcugggccaucuacagcaaggacaacagcgugagaaucggcagcaagggcgacguguucgugaucagagagcccuucaucagcugcagcccccuggagugcagaaccuucuuccugacccagggcgcccugcugaacgacaagcacagcaacggcaccaucaaggacagaagccccuacagaacccugaugagcugccccaucggcgaggugcccagccccuacaacagcagauucgagagcguggccuggagcgccagcgccugccacgacggcaucaacuggcugaccaucggcaucagcggccccgacaacggcgccguggccgugcugaaguacaacggcaucaucaccgacaccaucaagagcuggagaaacaacauccugagaacccaggagagcgagugcgccugcgugaacggcagcugcuucaccgugaugaccgacggccccagcgacggccaggccagcuacaagaucuucagaaucgagaagggcaagaucgugaagagcguggagaugaacgcccccaacuaccacuacgaggagugcagcugcuaccccgacagcagcgagaucaccugcgugugcagagacaacuggcacggcagcaacagacccugggugagcuucaaccagaaccuggaguacagaaucggcuacaucugcagcggcaucuucggcgacaaccccagacccaacgacaagaccggcagcugcggccccgugagcagcaacggcgccaacggcgugaagggcuucagcuucaaguacggcaacggcguguggaucggcagaaccaagagcaucagcagcagaaacggcuucgagaugaucugggaccccaacggcuggaccggcaccgacaagaacuucagcaucaagcaggacaucgugggcaucaacgaguggagcggcuacagcggcagcuucgugcagcaccccgagcugaccggccuggacugcaucagacccugcuucuggguggagcugaucagaggcagacccaaggagaacaccaucuggaccagcggcagcagcaucagcuucugcggcgugaacagcgacaccgugggcuggagcuggcccgacggcgccgagcugcccuucaccaucgacaaguga

SEQ ID NO: 180502 - RNA, 1413 nt, Artificial Sequence
  derived and/or modified CDS sequence (opt4) from neuraminidase__InfluenzaA__ADZ53101
augaaccccaaccagaagaucaucaccaucggcagcaucagcaucgccaucggcaucaucagccugaugcugcagaucggcaacaucaucagcaucugggccagccacagcauccagaccggcagccagaacaacaccggcaucugcaaccagagaaucaucaccuacgagaacagcaccugggugaaccacaccuacgugaacaucaacaacaccaaggugguggccggcgaggacaagaccagcgugacccuggccggcaacagcagccugugcagcaucagcggcugggccaucaacaccaaggacaacagcaucagaaucggcagcaagggcgacguguucgugaucagagagcccuucaucagcugcagccaccuggagugcagaaccuucuuccugacccagggcgcccugcugaacgacaagcacagcaacggcaccgugaaggacagaagccccuacagagcccugaugagcugcccccugggcgaggcccccagccccuacaacagcaaguucgagagcguggccuggagcgccagcgccugccacgacggcaugggcuggcugaccaucggcaucagcggccccgacaacggcgccguggccgugcugaaguacaacggcaucaucaccggcaccaucaagagcuggaagaagcagauccugagaacccaggagagcgagugcgugugcaugaacggcagcugcuucaccaucaugaccgacggccccagcaacaaggccgccagcuacaagaucuucaagaucgagaagggcaaggugaccaagagcaucgagcugaacgcccccaacuucuacuacgaggagugcagcugcuaccccgacaccggcaucgugaugugcgugugcagagacaacuggcacggcagcaacagacccugggugagcuucaaccagaaccuggacuaccagaucggcuacaucugcagcggcguguucggcgacaaccccagacccgaggacggcgagggcagcugcaaccccgugaccguggacggcgccaacggcgugaagggcuucagcuacaaguacggcaacggcguguggaucggcagaaccaagagcaacagacugagaaagggcuucgagaugaucugggaccccaacggcuggaccaacaccgacagcgacuucagcgugaagcaggacgugguggccaucaccgacuggagcggcuacagcggcagcuucgugcagcaccccgagcugaccggccuggacugcaucagacccugcuucuggguggagcuggugagaggccugcccagagagaacaccaccaucuggaccagcggcagcagcaucagcuucugcggcgugaacagcgacaccgccaacuggagcuggcccgacggcgccgagcugcccuucaccaucgacaaguga

SEQ ID NO: 180503 - RNA, 1410 nt, Artificial Sequence
  derived and/or modified CDS sequence (opt4) from neuraminidase__InfluenzaA__ADZ53124
augaaccccaaccagaagaucaucaccaucggcagcgugugcaugaccaucggcauggccaaccugauccugcagaucggcaacaucaucagcaucuggaucagccacagcauccagcugggcaaccagaaccagaucgagaccugcaaccagagcgugaucaccuacgagaacaacaccugggugaaccagaccuacgugaacaucagcaacaccaacuucgccgccggccagagcguggugagcgugaagcuggccggcaacagcagccugugccccgugagcggcugggccaucuacagcaaggacaacagcaucagaaucggcagcaagggcgacguguucgugaucagagagcccuucaucagcugcagcccccuggagugcagaaccuucuuccugacccagggcgcccugcugaacgacaagcacagcaacggcaccaucaaggacagaagccccuacagaacccugaugagcugccccaucggcgaggugcccagccccuacaacagcagauucgagagcguggccuggagcgccagcgccugccacgacggcaucaacuggcugaccaucggcaucagcggccccgacaacggcgccguggccgugcugaaguacaacggcaucaucaccgacaccaucaagagcuggagaaacaacauccugagaacccaggagagcgagugcgccugcgugaacggcagcugcuucaccgugaugaccgacggccccagcgacggccaggccagcuacaagaucuucagaaucgagaagggcaagaucgugaagagcguggagaugaacgcccccaacuacuacuacgaggagugcagcugcuaccccgacagcagcgagaucaccugcgugugcagagacaacuggcacggcagcaacagacccugggugagcuucaaccagaaccuggaguaccagaucggcuacaucugcagcggcaucuucggcgacaaccccagacccaacgacaagaccggcagcugcggccccgugagcagcaacggcgccaacggcgugaagggcuucagcuucaaguacggcaacggcguguggaucggcagaaccaagagcaucagcagcagaaacggcuucgagaugaucugggaccccaacggcuggaccggcaccgacaacgacuucagcaucaagcaggacaucgugggcaucaacgaguggagcggcuacagcggcagcuucgugcagcaccccgagcugaccggccuggacugcaucagacccugcuucuggguggagcugaucagaggcagacccaaggagaacaccaucuggaccagcggcagcagcaucagcuucugcggcgugaacagcgacaccgugggcuggagcuggcccgacggcgccgagcugcccuucaccaucgacaaguga

SEQ ID NO: 180504 - RNA, 1410 nt, Artificial Sequence; identical to SEQ ID NO: 176798
  derived and/or modified CDS sequence (opt4) from neuraminidase__InfluenzaA__ADZ53130

SEQ ID NO: 180505 - RNA, 1410 nt, Artificial Sequence; identical to SEQ ID NO: 176788
  derived and/or modified CDS sequence (opt4) from neuraminidase__InfluenzaA__ADZ53132

SEQ ID NO: 180506 - RNA, 1410 nt, Artificial Sequence; identical to SEQ ID NO: 176798
  derived and/or modified CDS sequence (opt4) from neuraminidase__InfluenzaA__ADZ53134

SEQ ID NO: 180507 - RNA, 1410 nt, Artificial Sequence; identical to SEQ ID NO: 176798
  derived and/or modified CDS sequence (opt4) from neuraminidase__InfluenzaA__ADZ53136

SEQ ID NO: 180508 - RNA, 1410 nt, Artificial Sequence; identical to SEQ ID NO: 177152
  derived and/or modified CDS sequence (opt4) from neuraminidase__InfluenzaA__ADZ53137

SEQ ID NO: 180509 - RNA, 1410 nt, Artificial Sequence; identical to SEQ ID NO: 176798
  derived and/or modified CDS sequence (opt4) from neuraminidase__InfluenzaA__ADZ53139

SEQ ID NO: 180510 - RNA, 1410 nt, Artificial Sequence
  derived and/or modified CDS sequence (opt4) from neuraminidase__InfluenzaA__ADZ53141
augaaccccaaccagaagaucaucaccaucggcagcgugugcaugaccaucggcauggccaaccugauccugcagaucggcaacaucaucagcaucuggaucagccacagcauccagcugggcaaccagaaccagaucgagaccugcaaccagagcgugaucaccuacgagaacaacaccugggugaaccagaccuacgugaacaucagcaacaccaacuucgccgccggccagagcguggugagcgugaagcuggccggcaacagcagccugugccccgugagcggcugggccaucuacagcaaggacaacagcaucagaaucggcagcaagggcgacguguucgugaucagagagcccuucaucagcugcagcccccuggagugcagaaccuucuuccugacccagggcgcccugcugaacgacaagcacagcaacggcaccaucaaggacagaagccccuacagaacccugaugagcugccccaucggcgaggugcccagccccuacaacagcagauucgagagcguggccuggagcgccagcgccugccacgacggcaucaacuggcugaccaucggcaucagcggccccgacaacggcgccguggccgugcugaaguacaacggcaucaucaccgacaccaucaagagcuggagaaacaacauccugagaacccaggagagcgagugcgccugcgugaacggcagcugcuucaccgugaugaccgacggccccagcgacggccaggccagcuacaagaucuucagaaucgagaagggcaagaucgugaagagcguggagaugaacgcccccaacuaccacuacgaggagugcagcugcuaccccgacagcagcgagaucaccugcgugugcagagacaacuggcacggcagcaacagacccugggugagcuucaaccagaaccuggaguaccagaucggcuacaucugcagcggcaucuucggcgacaaccccagacccaacgacaagaccggcagcugcggccccgugagcagcaacggcgccaacggcgugaagggcuucagcuucaaguacggcaacggcguguggaucggcagaaccaagagcaucagcagcagaaacggcuucgagaugaucugggaccccaacggcuggaccggcaccgacaacgacuucagcaucaagcaggacaucgugggcaucaacgaguggagcggcuacagcggcagcuucgugcagcacagcgagcugaccggccuggacugcaucagacccugcuucuggguggagcugaucagaggcagacccaaggagaacaccaucuggaccagcggcagcagcaucagcuucugcggcgugaacagcgacaccgugggcuggagcuggcccgacggcgccgagcugcccuucaccaucgacaaguga

SEQ ID NO: 180511 - RNA, 1410 nt, Artificial Sequence; identical to SEQ ID NO: 176659
  derived and/or modified CDS sequence (opt4) from neuraminidase__InfluenzaA__AEA03712

SEQ ID NO: 180512 - RNA, 1410 nt, Artificial Sequence; identical to SEQ ID NO: 176659
  derived and/or modified CDS sequence (opt4) from neuraminidase__InfluenzaA__AEA03722

SEQ ID NO: 180513 - RNA, 1410 nt, Artificial Sequence; identical to SEQ ID NO: 176659
  derived and/or modified CDS sequence (opt4) from neuraminidase__InfluenzaA__AEA03744

SEQ ID NO: 180514 - RNA, 1410 nt, Artificial Sequence
  derived and/or modified CDS sequence (opt4) from neuraminidase__InfluenzaA__AEA03755
augaaccccaaccagaagaucaucaccaucggcagcgugagccugaccaucagcaccaucugcuucuucaugcagaucgccauccugaucaccaccgugacccugcacuucaagcaguacgaguucaacagcccccccaacaaccaggugaugcugugcgagcccaccaucaucgagagaaacaucaccgagaucguguaccugaccaacaccaccaucgagaaggagaucugccccaagcuggccgaguacagaaacuggagcaagccccagugcgacaucaccggcuucgcccccuucagcaaggacaacagcaucagacugagcgccggcggcgacaucugggugaccagagagcccuacgugagcugcgaccccgacaagugcuaccaguucgcccugggccagggcaccacccugaacaacgugcacagcaacaacaccgugagaggcagaacccccuacagaacccugcugaugaacgagcugggcgugcccuuccaccugggcaccaagcaggugugcaucgccuggagcagcagcagcugccacgacggcaaggccuggcugcacgugugcaucaccggcgacgacaagaacgccaccgccagcuucaucuacaacggcagacugguggacagcguggugagcuggagcaaggagauccugagaacccaggagagcgagugcgugugcaucaacggcaccugcaccguggugaugaccgacggcagcgccagcggcaaggccgacaccaagauccuguucaucgaggagggcaagaucgugcacaccagcacccugagcggcagcgcccagcacguggaggagugcagcugcuaccccagauaccccggcgugagaugcgugugcagagacaacuggaagggcagcaacagacccaucguggacaucaacaucaaggaccacagcaucgugagcagcuacgugugcagcggccuggugggcgacacccccagaaagaacgacagcagcagcagcagccacugccuggaccccaacaacgaggagggcggccacggcgugaagggcugggccuucgacgacggcaacgacguguggaugggcagaaccaucagcgagaagagcagacugggcuacgagaccuucaaggugaucgagggcuggagcaaccccaagagcaagcugcagaucaacagacaggugaucguggacagaggcaacagaagcggcuacagcggcaucuucagcguggagggcaagagcugcaucaacagaugcuucuacguggagcugaucagaggcagaaaggaggagaccgaggugcuguggaccagcaacagcaucgugguguucugcggcaccagcggcaccuacggcaccggcagcuggcccgacggcgccgacaucaaccugaugcccaucuga

SEQ ID NO: 180515 - RNA, 1410 nt, Artificial Sequence; identical to SEQ ID NO: 176659
  derived and/or modified CDS sequence (opt4) from neuraminidase__InfluenzaA__AEA03766

SEQ ID NO: 180516 - RNA, 1410 nt, Artificial Sequence; identical to SEQ ID NO: 176659
  derived and/or modified CDS sequence (opt4) from neuraminidase__InfluenzaA__AEA03796

SEQ ID NO: 180517 - RNA, 1410 nt, Artificial Sequence; identical to SEQ ID NO: 176659
  derived and/or modified CDS sequence (opt4) from neuraminidase__InfluenzaA__AEA03806

SEQ ID NO: 180518 - RNA, 1410 nt, Artificial Sequence
  derived and/or modified CDS sequence (opt4) from neuraminidase__InfluenzaA__AEA03817
augaaccccaaccagaagaucaucaccaucggcagcgugagccugaccaucagcaccaucugcuucuucaugcagaucgccauccugaucaccaccgugacccugcacuucaagcaguacgaguucaacagcccccccaacaaccaggugaugcugugcgagcccaccaucaucgagagaaacaucaccgagaucguguaccugaccaacaccaccaucgagaaggagaucugccccaagcuggccgaguacagaaacuggagcaagccccagugcgacaucaccggcuucgcccccuucagcaaggacaacagcaucagacugagcgccggcggcgacaucugggugaccagagagcccuacgugagcugcgaccccgacagaugcuaccaguucgcccugggccagggcaccacccugaacaacgugcacagcaacaacaccgugagagacagaacccccuacagaacccugcugaugaacgagcugggcgugcccuuccaccugggcaccaagcaggugugcaucgccuggagcagcagcagcugccacgacggcaaggccuggcugcacgugugcaucaccggcgacgacaagaacgccaccgccagcuucaucuacaacggcagacugguggacagcguggugagcuggagcaaggagauccugagaacccaggagagcgagugcgugugcaucaacggcaccugcaccguggugaugaccgacggcagcgccagcggcaaggccgacaccaagauccuguucaucgaggagggcaagaucgugcacaccagcacccugagcggcagcgcccagcacguggaggagugcagcugcuaccccagauaccccggcgugagaugcgugugcagagacaacuggaagggcagcaacagacccaucguggacaucaacaucaaggaccacagcaucgugagcagcuacgugugcagcggccuggugggcgacacccccagaaagaacgacagcagcagcagcagccacugccuggaccccaacaacgaggagggcggccacggcgugaagggcugggccuucgacgacggcaacgacguguggaugggcagaaccaucagcgagaagagcagacugggcuacgagaccuucaaggugaucgagggcuggagcaaccccaagagcaagcugcagaucaacagacaggugaucguggacagaggcaacagaagcggcuacagcggcaucuucagcguggagggcaagagcugcaucaacagaugcuucuacguggagcugaucagaggcagaaaggaggagaccgaggugcuguggaccagcaacagcaucgugguguucugcggcaccagcggcaccuacggcaccggcagcuggcccgacggcgccgacaucaaccugaugcccaucuga

SEQ ID NO: 180519 - RNA, 1410 nt, Artificial Sequence; identical to SEQ ID NO: 176659
  derived and/or modified CDS sequence (opt4) from neuraminidase__InfluenzaA__AEA03828

SEQ ID NO: 180520 - RNA, 1410 nt, Artificial Sequence; identical to SEQ ID NO: 176659
  derived and/or modified CDS sequence (opt4) from neuraminidase__InfluenzaA__AEA03838

SEQ ID NO: 180521 - RNA, 1410 nt, Artificial Sequence; identical to SEQ ID NO: 179815
  derived and/or modified CDS sequence (opt4) from neuraminidase__InfluenzaA__AEA03849

SEQ ID NO: 180522 - RNA, 1410 nt, Artificial Sequence; identical to SEQ ID NO: 176659
  derived and/or modified CDS sequence (opt4) from neuraminidase__InfluenzaA__AEA03860

SEQ ID NO: 180523 - RNA, 1410 nt, Artificial Sequence
  derived and/or modified CDS sequence (opt4) from neuraminidase__InfluenzaA__AEA03871
augaaccccaaccagaagaucaucaccaucggcagcgugagccugaccaucagcaccaucugcuucuucaugcagaucgccauccugaucaccaccgugacccugcacuucaagcaguacgaguucaacagcccccccaacaaccaggugaugcugugcgagcccaccaucaucgagagaaacaucaccgagaucguguaccugaccaacaccaccaucgagaaggagaucugccccaagcuggccgaguacagaaacuggagcaagccccagugcgacaucaccggcuucgcccccuucagcaaggacaacagcaucagacugagcgccggcggcgacaucugggugaccagagagcccuacgugagcugcgaccccgacaagugcuaccaguucgcccugggccagggcaccacccugaacaacgugcacagcaacaacaccgugagagacagaacccccuacagaacccugcugaugaacgagcugggcgugcccuuccaccugggcaccaagcaggugugcaucgccuggagcagcagcagcugccacgacggcaaggccuggcugcacgugugcaucaccggcgacgacaagaacgccaccgccagcuucaucuacaacggcagacugguggacagcguggugagcuggagcaaggagauccugagaacccaggagagcgagugcgugugcaucaacggcaccugcaccguggugaucaccgacggcagcgccagcggcaaggccgacaccaagauccuguucaucgaggagggcaagaucgugcacaccagcacccugagcggcagcgcccagcacguggaggagugcagcugcuaccccagauaccccggcgugagaugcgugugcagagacaacuggaagggcagcaacagacccaucguggacaucaacaucaaggaccacagcaucgugagcagcuacgugugcagcggccuggugggcgacacccccagaaagaacgacagcagcagcagcagccacugccuggaccccaacaacgaggagggcggccacggcgugaagggcugggccuucgacgacggcaacgacguguggaugggcagaaccaucagcgagaagagcagacugggcuacgagaccuucaaggugaucgagggcuggagcaaccccaagagcaagcugcagaucaacagacaggugaucguggacagaggcaacagaagcggcuacagcggcaucuucagcguggagggcaagagcugcaucaacagaugcuucuacguggagcugaucagaggcagaaaggaggagaccgaggugcuguggaccagcaacagcaucgugguguucugcggcaccagcggcaccuacggcaccggcagcuggcccgacggcgccgacaucaaccugaugcccaucuga

SEQ ID NO: 180524 - RNA, 1410 nt, Artificial Sequence; identical to SEQ ID NO: 176659
  derived and/or modified CDS sequence (opt4) from neuraminidase__InfluenzaA__AEA03879

SEQ ID NO: 180525 - RNA, 1410 nt, Artificial Sequence
  derived and/or modified CDS sequence (opt4) from neuraminidase__InfluenzaA__AEA03889
augaaccccaaccagaagaucaucaccaucggcagcgugagccugaccaucagcaccaucugcuucuucaugcagaucgccauccugaucaccaccgugacccugcacuucaagcaguacgaguucaacagcccccccaacaaccaggugaugcugugcgagcccaccaucaucgagagaaacaucaccgagaucguguaccugaccaacaccaccaucgagaaggagaucugccccaagcuggccgaguacagaaacuggagcaagccccagugcgacaucaccggcuucgcccccuucagcaaggacaacagcaucagacugagcgccggcggcgacaucugggugaccagagagcccuacgugagcugcgaccccgacaagugcuaccaguucgcccugggccagggcaccacccugaacaacgugcacagcaacaacaaggugagagacagaacccccuacagaacccugcugaugaacgagcugggcgugcccuuccaccugggcaccaagcaggugugcaucgccuggagcagcagcagcugccacgacggcaaggccuggcugcacgugugcaucaccggcgacgacaagaacgccaccgccagcuucaucuacaacggcagacugguggacagcguggugagcuggagcaaggagauccugagaacccaggagagcgagugcgugugcaucaacggcaccugcaccguggugaugaccgacggcagcgccagcggcaaggccgacaccaagauccuguucaucgaggagggcaagaucgugcacaccagcacccugagcggcagcgcccagcacguggaggagugcagcugcuaccccagauaccccggcgugagaugcgugugcagagacaacuggaagggcagcaacagacccaucguggacaucaacaucaaggaccacagcaucgugagcagcuacgugugcagcggccuggugggcgacacccccagaaagaacgacagcagcagcagcagccacugccuggaccccaacaacgaggagggcggccacggcgugaagggcugggccuucgacgacggcaacgacguguggaugggcagaaccaucagcgagaagagcagacugggcuacgagaccuucaaggugaucgagggcuggagcaaccccaagagcaagcugcagaucaacagacaggugaucguggacagaggcaacagaagcggcuacagcggcaucuucagcguggagggcaagagcugcaucaacagaugcuucuacguggagcugaucagaggcagaaaggaggagaccgaggugcuguggaccagcaacagcaucgugguguucugcggcaccagcggcaccuacggcaccggcagcuggcccgacggcgccgacaucaaccugaugcccaucuga

SEQ ID NO: 180526 - RNA, 1410 nt, Artificial Sequence
  derived and/or modified CDS sequence (opt4) from neuraminidase__InfluenzaA__AEA03898
augaaccccaaccagaagaucaucaccaucggcagcgugagccugaccaucagcaccaucugcuucuucaugcagaucgccauccugaucaccaccgugacccugcacuucaagcaguacgaguucaacagcccccccaacaaccaggugaugcugugcgagcccaccaucaucgagagaaacaucaccgagaucguguaccugaccaacaccaccaucgagaaggagaucugccccaagcuggccgaguacagaaacuggagcaagccccagugcgacaucaccggcuucgcccccuucagcaaggacaacagcaucagacugagcgccggcggcgacaucugggugaccagagagcccuacgugagcugcgaccccgacaagugcuaccaguucgcccugggccagggcaccacccugaacaacgugcacagcaacaacaccgugagagacagaacccccuacagaacccugcugaugaacgagcugggcgugcccuuccaccugggcaccaagcaggugugcaucgccuggagcagcagcagcugccacgacggcaaggccuggcugcacgugugcaucaccggcgacgacaagaacgccaccgccagcuucaucuacaacggcagacugguggacagcguggugagcuggagcaaggagauccugagaacccaggagagcgagugcgugugcaucaacggcaccugcaccguggugaugaccgacggcagcgccagcggcaaggccgacaccaagauccuguucaucgaggagggcaagaucgugcacaccagcacccugagcggcagcgcccagcacguggaggagugcagcugcuaccccagauaccccggcgugagaugcgugugcagagacaacuggaagggcagcaacagacccaucguggacaucaacaucaaggaccacagcaucgugagcagcuacgugugcagcggccuggugggcgacacccccagaaagagcgacagcagcagcagcagccacugccuggaccccaacaacgaggagggcggccacggcgugaagggcugggccuucgacgacggcaacgacguguggaugggcagaaccaucagcgagaagagcagacugggcuacgagaccuucaaggugaucgagggcuggagcaaccccaagagcaagcugcagaucaacagacaggugaucguggacagaggcaacagaagcggcuacagcggcaucuucagcguggagggcaagagcugcaucaacagaugcuucuacguggagcugaucagaggcagaaaggaggagaccgaggugcuguggaccagcaacagcaucgugguguucugcggcaccagcggcaccuacggcaccggcagcuggcccgacggcgccgacaucaaccugaugcccaucuga

SEQ ID NO: 180527 - RNA, 1410 nt, Artificial Sequence; identical to SEQ ID NO: 176659
  derived and/or modified CDS sequence (opt4) from neuraminidase__InfluenzaA__AEA03909

SEQ ID NO: 180528 - RNA, 1410 nt, Artificial Sequence
  derived and/or modified CDS sequence (opt4) from neuraminidase__InfluenzaA__AEA03924
augaaccccaaccagaagaucaucaccaucggcagcgugagccugaccaucagcaccaucugcuucuucaugcagaucgccauccugaucaccaccgugacccugcacuucaagcaguacgaguucaacagcccccccaacaaccaggugaugcugugcgagcccaccaucaucgagagaaacaucaccgagaucguguaccugaccaacaccaccaucgagaaggagaucugccccaagcuggccgaguacagaaacuggagcaagccccagugcgacaucaccggcuucgcccccuucagcaaggacaacagcaucagacugagcgccggcggcgacaucugggugaccagagagcccuacgugagcugcgaccccgacaagugcuaccaguucgcccugggccagggcaccacccugaacaacgugcacagcaacaacaccgugagagacagaacccccuacagaacccugcugaugaacgagcugggcgugcccuuccaccugggcaccaagcaggugugcaucgccuggagcagcagcagcugccacgacggcaaggccuggcugcacgugugcaucaccggcgacgacaagaacgccaccgccagcuucaucuacaacggcagacugguggacagcguggugagcuggagcaaggagauccugagaacccaggagagcgagugcgugugcaucaacggcaccugcaccguggugaugaccgacggcagcgccagcggcaaggccgacaccaagauccuguucaucgaggagggcaagaucauccacaccagcacccugagcggcagcgcccagcacguggaggagugcagcugcuaccccagauaccccggcgugagaugcgugugcagagacaacuggaagggcagcaacagacccaucguggacaucaacaucaaggaccacagcaucgugagcagcuacgugugcagcggccuggugggcgacacccccagaaagaacgacagcagcagcagcagccacugccuggaccccaacaacgaggagggcggccacggcgugaagggcugggccuucgacgacggcaacgacguguggaugggcagaaccaucagcgagaagagcagacugggcuacgagaccuucaaggugaucgagggcuggagcaaccccaagagcaagcugcagaucaacagacaggugaucguggacagaggcaacagaagcggcuacagcggcaucuucagcguggagggcaagagcugcaucaacagaugcuucuacguggagcugaucagaggcagaaaggaggagaccgaggugcuguggaccagcaacagcaucgugguguucugcggcaccagcggcaccuacggcaccggcagcuggcccgacggcgccgacaucaaccugaugcccaucuga

SEQ ID NO: 180529 - RNA, 1410 nt, Artificial Sequence; identical to SEQ ID NO: 176659
  derived and/or modified CDS sequence (opt4) from neuraminidase__InfluenzaA__AEA03935

SEQ ID NO: 180530 - RNA, 1410 nt, Artificial Sequence
  derived and/or modified CDS sequence (opt4) from neuraminidase__InfluenzaA__AEA03946
augaaccccaaccagaagaucaucaccaucggcagcgugagccugaccaucagcaccaucugcuucuucaugcagaucgccauccugaucaccaccgugacccugcacuucaagcaguacgaguucaacagcccccccaacaaccaggugaugcugugcgagcccaccaucaucgagagaaacaucaccgagaucguguaccugaccaacaccaccaucgagaaggagaucugccccaagcuggccgaguacagaaacuggagcaagccccagugcgacaucaccggcuucgcccccuucagcaaggacaacagcaucagacugagcgccggcggcgacaucugggugaccagagagcccuacgugagcugcgaccccgacaagugcuaccaguucgcccugggccagggcaccacccugaacaacgugcacagcaacaacaccgugagagacagaacccccuacagaacccugcugaugaacgagcugggcgugcccuuccaccugggcaccaagcaggugugcaucgccuggagcagcagcagcugccacgacggcaaggccuggcugcacgugugcaucaccggcgacgacaagaacgccaccgccagcuucaucuacaacggcagacugguggacagcguggugagcuggagcgaggagauccugagaacccaggagagcgagugcgugugcaucaacggcaccugcaccguggugaugaccgacggcagcgccagcggcaaggccgacaccaagauccuguucaucgaggagggcaagaucgugcacaccagcacccugagcggcagcgcccagcacguggaggagugcagcugcuaccccagauaccccggcgugagaugcgugugcagagacaacuggaagggcagcaacagacccaucguggacaucaacaucaaggaccacagcaucgugagcagcuacgugugcagcggccuggugggcgacacccccagaaagaacgacagcagcagcagcagccacugccuggaccccaacaacgaggagggcggccacggcgugaagggcugggccuucgacgacggcaacgacguguggaugggcagaaccaucagcgagaagagcagacugggcuacgagaccuucaaggugaucgagggcuggagcaaccccaagagcaagcugcagaucaacagacaggugaucguggacagaggcaacagaagcggcuacagcggcaucuucagcguggagggcaagagcugcaucaacagaugcuucuacguggagcugaucagaggcagaaaggaggagaccgaggugcuguggaccagcaacagcaucgugguguucugcggcaccagcggcaccuacggcaccggcagcuggcccgacggcgccgacaucaaccugaugcccaucuga

SEQ ID NO: 180531 - RNA, 1410 nt, Artificial Sequence
  derived and/or modified CDS sequence (opt4) from neuraminidase__InfluenzaA__AEA03957
augaaccccaaccagaagaucaucaccaucggcagcgugagccugaccaucagcaccaucugcuucuucaugcagaucgccauccugaucaccaccgugacccugcacuucaagcaguacgaguucaacagcccccccaacaaccaggugaugcugugcgagcccaccaucaucgagagaaacaucaccgagaucguguaccugaccaacaccaccaucgagaaggagaucugccccaagcuggccgaguacagaaacuggagcaagccccagugcgacaucaccggcuucgcccccuucagcaaggacaacagcaucagacugagcgccggcggcgacaucugggugaccagagagcccuacgugagcugcgaccccgacaagugcuaccaguucgcccugggccagggcaccacccugaacaacgugcacagcaacaacaccgugagagacagaacccccuacagaacccugcugaugaacgagcugggcgugcccuuccaccugggcaccaagcaggugugcaucgccuggagcagcagcagcugccacgacggcaaggccuggcugcacgugugcaucaccggcgacgacaagaacgccaccgccagcuucaucuacaacggcagacugguggacagcguggugagcuggagcaaggagauccugagaacccaggagagcgagugcgugugcaucaacggcaccugcaccguggugaugaccgacggcagcgccagcggcaaggccgacaccaagauccuguucaucgaggagggcaagaucgugcacaccagcacccugagcggcagcgcccagcacguggaggagugcagcugcuaccccagauaccccggcgugagaugcgugugcagagacaacuggaagggcagcaacagacccaucguggacaucaacaucaaggaccacagcaucgugagcagcuacgugugcagcggccuggugggcgacacccccagaaagaacgacagcagcagcagcagccacugccuggaccccaacaacgaggagggcggccacggcgugaagggcugggccuucgacgacggcaacgacguguggaugggcagaaccaucagcgagaagagcagacugggcuacgagaccuucaaggugaucgagggcuggagcaacagcaagagcaagcugcagaucaacagacaggugaucguggacagaggcaacagaagcggcuacagcggcaucuucagcguggagggcaagagcugcaucaacagaugcuucuacguggagcugaucagaggcagaaaggaggagaccgaggugcuguggaccagcaacagcaucgugguguucugcggcaccagcggcaccuacggcaccggcagcuggcccgacggcgccgacaucaaccugaugcccaucuga

SEQ ID NO: 180532 - RNA, 1410 nt, Artificial Sequence; identical to SEQ ID NO: 176659
  derived and/or modified CDS sequence (opt4) from neuraminidase__InfluenzaA__AEA03989

SEQ ID NO: 180533 - RNA, 1410 nt, Artificial Sequence; identical to SEQ ID NO: 179815
  derived and/or modified CDS sequence (opt4) from neuraminidase__InfluenzaA__AEA04000

SEQ ID NO: 180534 - RNA, 1410 nt, Artificial Sequence; identical to SEQ ID NO: 176659
  derived and/or modified CDS sequence (opt4) from neuraminidase__InfluenzaA__AEA04011

SEQ ID NO: 180535 - RNA, 1410 nt, Artificial Sequence; identical to SEQ ID NO: 179815
  derived and/or modified CDS sequence (opt4) from neuraminidase__InfluenzaA__AEA04022

SEQ ID NO: 180536 - RNA, 1410 nt, Artificial Sequence; identical to SEQ ID NO: 176659
  derived and/or modified CDS sequence (opt4) from neuraminidase__InfluenzaA__AEA04033

SEQ ID NO: 180537 - RNA, 1410 nt, Artificial Sequence; identical to SEQ ID NO: 176659
  derived and/or modified CDS sequence (opt4) from neuraminidase__InfluenzaA__AEA04044

SEQ ID NO: 180538 - RNA, 1410 nt, Artificial Sequence; identical to SEQ ID NO: 176659
  derived and/or modified CDS sequence (opt4) from neuraminidase__InfluenzaA__AEA04049

SEQ ID NO: 180539 - RNA, 1410 nt, Artificial Sequence; identical to SEQ ID NO: 176659
  derived and/or modified CDS sequence (opt4) from neuraminidase__InfluenzaA__AEA04059

SEQ ID NO: 180540 - RNA, 1410 nt, Artificial Sequence; identical to SEQ ID NO: 176659
  derived and/or modified CDS sequence (opt4) from neuraminidase__InfluenzaA__AEA04070

SEQ ID NO: 180541 - RNA, 1410 nt, Artificial Sequence; identical to SEQ ID NO: 179815
  derived and/or modified CDS sequence (opt4) from neuraminidase__InfluenzaA__AEA04081

SEQ ID NO: 180542 - RNA, 1410 nt, Artificial Sequence; identical to SEQ ID NO: 176659
  derived and/or modified CDS sequence (opt4) from neuraminidase__InfluenzaA__AEA04092

SEQ ID NO: 180543 - RNA, 1410 nt, Artificial Sequence; identical to SEQ ID NO: 176659
  derived and/or modified CDS sequence (opt4) from neuraminidase__InfluenzaA__AEA04103

SEQ ID NO: 180544 - RNA, 1410 nt, Artificial Sequence; identical to SEQ ID NO: 176659
  derived and/or modified CDS sequence (opt4) from neuraminidase__InfluenzaA__AEA04125

SEQ ID NO: 180545 - RNA, 1410 nt, Artificial Sequence; identical to SEQ ID NO: 176659
  derived and/or modified CDS sequence (opt4) from neuraminidase__InfluenzaA__AEA04133

SEQ ID NO: 180546 - RNA, 1410 nt, Artificial Sequence
  derived and/or modified CDS sequence (opt4) from neuraminidase__InfluenzaA__AEA04144
augaaccccaaccagaagaucaucaccaucggcagcgugagccugaccaucagcaccaucugcuucuucaugcagaucgccauccugaucaccaccgugacccugcacuucaagcaguacgaguucaacagcccccccaacaaccaggugaugcugugcgagcccaccaucaucgagagaaacaucaccgagaucguguaccugaccaacaccaccaucgagaaggagaucugccccaagcuggccgaguacagaaacuggagcaagccccagugcgacaucaccggcuucgcccccuucagcaaggacaacagcaucagacugagcgccggcggcgacaucugggugaccagagagcccuacgugagcugcgaccccgacaagugcuaccaguucgcccugggccagggcaccacccugaacaacgugcacagcaacaacaccgugagagacagaacccccuacagaacccugcugaugaacgagcugggcgugcccuuccaccugggcaccaagcaggugugcaucgccuggagcagcagcagcugccacgacggcaaggccuggcugcacgugugcaucaccggcgacgacaagaacgccaccgccagcuucaucuacaacggcagacugguggacagcguggugagcuggagcaaggagauccugagaacccaggagagcgagugcgugugcaucaacggcaccugcaccguggugaugaccgacggcagcgccagcggcaaggccgacaccaagauccuguucaucgaggagggcaagaucauccacaccagcacccugagcggcagcgcccagcacguggaggagugcagcugcuaccccagauaccccggcgugagaugcgugugcagagacaacuggaagggcagcaacagacccaucguggacaucaacaucaaggaccacagcaucgugagcagcuacgugugcagcggccuggugggcgacacccccagaaagaacgacagcagcagcagcagccacugccuggaccccaacaacgaggagggcggccacggcgugaagggcugggccuucgacgacggcaacgacguguggaugggcagaaccaucagcgagaagagcagacugggcuacgagaccuucaaggugaucgagggcuggagcaaccccaagagcaagcugcagaucaacagacaggugaucguggacagaggcaacagaagcggcuacagcggcaucuucagcguggagggcaagagcugcaucaacagaugcuucuacguggagcugaucagaggcagaaaggaggagaccgaggugcuguggaccagcaacagcaucaucguguucugcggcaccagcggcaccuacggcaccggcagcuggcccgacggcgccgacaucaaccugaugcccaucuga

SEQ ID NO: 180547 - RNA, 1410 nt, Artificial Sequence; identical to SEQ ID NO: 176659
  derived and/or modified CDS sequence (opt4) from neuraminidase__InfluenzaA__AEA04155

SEQ ID NO: 180548 - RNA, 1410 nt, Artificial Sequence; identical to SEQ ID NO: 176659
  derived and/or modified CDS sequence (opt4) from neuraminidase__InfluenzaA__AEA04166

SEQ ID NO: 180549 - RNA, 1410 nt, Artificial Sequence
  derived and/or modified CDS sequence (opt4) from neuraminidase__InfluenzaA__AEA04177
augaaccccaaccagaagaucaucaccaucggcagcgugagccugaccaucagcaccaucugcuucuucaugcagaucgccauccugaucaccaccgugacccugcacuucaagcaguacgaguucaacagcccccccaacaaccaggugaugcugugcgagcccaccaucaucgagagaaacaucaccgagaucguguaccugaccaacaccaccaucgagaaggagaucugccccaagcuggccgaguacagaaacuggagcaagccccagugcgacaucaccggcuucgcccccuucagcaaggacaacagcaucagacugagcgccggcggcgacaucugggugaccagagagcccuacgugagcugcgaccccgacaagugcuaccaguucgcccugggccagggcaccacccugaacaacgugcacagcaacaacaccgugagaaacagaacccccuacagaacccugcugaugaacgagcugggcgugcccuuccaccugggcaccaagcaggugugcaucgccuggagcagcagcagcugccacgacggcaaggccuggcugcacgugugcaucaccggcgacgacaagaacgccaccgccagcuucaucuacaacggcagacugguggacagcguggugagcuggagcaaggagauccugagaacccaggagagcgagugcgugugcaucaacggcaccugcaccguggugaugaccgacggcagcgccagcggcaaggccgacaccaagauccuguucaucgaggagggcaagaucgugcacaccagcacccugagcggcagcgcccagcacguggaggagugcagcugcuaccccagauaccccggcgugagaugcgugugcagagacaacuggaagggcagcaacagacccaucguggacaucaacaucaaggaccacagcaucgugagcagcuacgugugcagcggccuggugggcgacacccccagaaagaacgacagcagcagcagcagccacugccuggaccccaacaacgaggagggcggccacggcgugaagggcugggccuucgacgacggcaacgacguguggaugggcagaaccaucagcgagaagagcagacugggcuacgagaccuucaaggugaucgagggcuggagcaaccccaagagcaagcugcagaucaacagacaggugaucguggacagaggcaacagaagcggcuacagcggcaucuucagcguggagggcaagagcugcaucaacagaugcuucuacguggagcugaucagaggcagaaaggaggagaccgaggugcuguggaccagcaacagcaucgugguguucugcggcaccagcggcaccuacggcaccggcagcuggcccgacggcgccgacaucaaccugaugcccaucuga

SEQ ID NO: 180550 - RNA, 1410 nt, Artificial Sequence; identical to SEQ ID NO: 176659
  derived and/or modified CDS sequence (opt4) from neuraminidase__InfluenzaA__AEA04188

SEQ ID NO: 180551 - RNA, 1410 nt, Artificial Sequence; identical to SEQ ID NO: 177652
  derived and/or modified CDS sequence (opt4) from neuraminidase__InfluenzaA__AEA04199

SEQ ID NO: 180552 - RNA, 1410 nt, Artificial Sequence; identical to SEQ ID NO: 176659
  derived and/or modified CDS sequence (opt4) from neuraminidase__InfluenzaA__AEA04210

SEQ ID NO: 180553 - RNA, 1410 nt, Artificial Sequence; identical to SEQ ID NO: 177652
  derived and/or modified CDS sequence (opt4) from neuraminidase__InfluenzaA__AEA04229

SEQ ID NO: 180554 - RNA, 1410 nt, Artificial Sequence; identical to SEQ ID NO: 177652
  derived and/or modified CDS sequence (opt4) from neuraminidase__InfluenzaA__AEA04239

SEQ ID NO: 180555 - RNA, 1410 nt, Artificial Sequence
  derived and/or modified CDS sequence (opt4) from neuraminidase__InfluenzaA__AEA04250
augaaccccaaccagaagaucaucaccaucggcagcgugagccugaccaucagcaccaucugcuucuucaugcagaccgccauccugaucaccaccgugacccugcacuucaagcagugcgaguucaacagcccccccaacaaccaggugaugcugugcgagcccaccaucaucgagagaaacaucaccgagaucguguaccugaccaacaccaccaucgagaaggagaucugccccaagcuggccgaguacagaaacuggagcaagccccagugcgacaucaccggcuucgcccccuucagcaaggacaacagcaucagacugagcgccggcggcgacaucugggugaccagagagcccuacgugagcugcgaccccgacaagugcuaccaguucgcccugggccagggcaccacccugaacaacgugcacagcaacaacaccgugagagugagaacccccuacagaacccugcugaugaacgagcugggcgugcccuuccaccugggcaccaagcaggugugcaucgccuggagcagcagcagcugccacgacggcaaggccuggcugcacgugugcaucaccggcgacgacaagaacgccaccgccagcuucaucuacaacggcagacugguggacagcguggugagcuggagcaaggagauccugagaacccaggagagcgagugcgugugcaucaacggcaccugcaccguggugaugaccgacggcagcgccagcggcaaggccgacaccaagauccuguucaucgaggagggcaagaucgugcacaccagcacccugagcggcagcgcccagcacguggaggagugcagcugcuaccccagauaccccggcgugagaugcgugugcagagacaacuggaagggcagcaacagacccaucguggacaucaacaucaaggaccacagcaucgugagcagcuacgugugcagcggccuggugggcgacacccccagaaagaacgacagcagcagcagcagccacugccuggaccccaacaacgaggagggcggccacggcgugaagggcugggccuucgacgacggcaacgacguguggaugggcagaaccaucagcgagaagagcagacugggcuacgagaccuucaaggugaucgagggcuggagcaaccccaagagcaagcugcagaucaacagacaggugaucguggacagaggcaacagaagcggcuacagcggcaucuucagcguggagggcaagagcugcaucaacagaugcuucuacguggagcugaucagaggcagaaaggaggagaccgaggugcuguggaccagcaacagcaucgugguguucugcggcaccagcggcaccuacggcaccggcagcuggcccgacggcgccgacaucaaccugaugcccaucuga

SEQ ID NO: 180556 - RNA, 1410 nt, Artificial Sequence; identical to SEQ ID NO: 177652
  derived and/or modified CDS sequence (opt4) from neuraminidase__InfluenzaA__AEA04260

SEQ ID NO: 180557 - RNA, 1410 nt, Artificial Sequence
  derived and/or modified CDS sequence (opt4) from neuraminidase__InfluenzaA__AEA04268
augaaccccaaccagaagaucaucaccaucggcagcgugagccugaccaucagcaccaucugccuguucaugcagaccgccauccugaucaccaccgugacccugcacuucaagcagugcgaguucaacagcccccccaacaaccaggccaugcugugcgagcccaccaucaucgagagaaacaucaccgagaucguguaccugaccaacaccaccaucgagaaggagaucugccccaagcuggccgaguacagaaacuggagcaagccccagugcgacaucaccggcuucgcccccuucagcaaggacaacagcaucagacugagcgccggcggcgacaucugggugaccagagagcccuacgugagcugcgaccccgacaagugcuaccaguucgcccugggccagggcaccacccugaacaacgugcacagcaacaacaccgugagagacagaacccccuacagaacccugcugaugaacgagcugggcgugcccuuccaccugggcaccaagcaggugugcaucgccuggagcagcagcagcugccacgacggcaaggccuggcugcacgugugcaucaccggcgacgacaagaacgccaccgccagcuucaucuacaacggcagacugguggacagcguggugagcuggagcaaggagauccugagaacccaggagagcgagugcgugugcaucaacggcaccugcaccguggugaugaccgacggcagcgccagcggcaaggccgacaccaagauccuguucaucgaggagggcaagaucgugcacaccagcacccugagcggcagcgcccagcacguggaggagugcagcugcuaccccagauaccccggcgugagaugcgugugcagagacaacuggaagggcagcaacagacccaucguggacaucaacaucaaggaccacagcaucgugagcagcuacgugugcagcggccuggugggcgacacccccagaaagaacgacagcagcagcagcagccacugccuggaccccaacaacgaggagggcggccacggcgugaagggcugggccuucgacgacggcaacgacguguggaugggcagaaccaucagcgagaagagcagacugggcuacgagaccuucaaggugaucgagggcuggagcaaccccaagagcaagcugcagaucaacagacaggugaucguggacagaggcaacagaagcggcuacagcggcaucuucagcguggagggcaagagcugcaucaacagaugcuucuacguggagcugaucagaggcagaaaggaggagaccgaggugcuguggaccagcaacagcaucgugguguucugcggcaccagcggcaccuacggcaccggcagcuggcccgacggcgccgacaucaaccugaugcccaucuga

SEQ ID NO: 180558 - RNA, 1410 nt, Artificial Sequence; identical to SEQ ID NO: 177652
  derived and/or modified CDS sequence (opt4) from neuraminidase__InfluenzaA__AEA04276

SEQ ID NO: 180559 - RNA, 1410 nt, Artificial Sequence; identical to SEQ ID NO: 177652
  derived and/or modified CDS sequence (opt4) from neuraminidase__InfluenzaA__AEA04287

SEQ ID NO: 180560 - RNA, 1410 nt, Artificial Sequence; identical to SEQ ID NO: 177652
  derived and/or modified CDS sequence (opt4) from neuraminidase__InfluenzaA__AEA04298

SEQ ID NO: 180561 - RNA, 1410 nt, Artificial Sequence
  derived and/or modified CDS sequence (opt4) from neuraminidase__InfluenzaA__AEA04307
augaaccccaaccagaagaucaucaccaucggcagcgugagccugaccaucagcaccaucugcuucuucaugcagaccgccauccugaucaccaccgugacccugcacuucaagcagugcgaguucaacagcccccccaacaaccaggugaugcugugcgagcccaccaucaucgagagaaacaucaccgagaucguguaccugaccaacaccaccaucgagaaggagaucugccccaagcuggccgaguacagaaacuggagcaagccccagugcgacaucaccggcuucgcccccuucagcaaggacaacagcaucagacugagcgccggcggcgacaucugggugaccagagagcccuacgugagcugcgaccccgacaagugcuaccaguucgcccugggccagggcaccacccugaacaacgugcacagcaacaacaccgugagagacagaacccccuacagaacccugcugaugaacgagcugggcgugcccuuccaccugggcaccaagcaggugugcaucgccuggagcagcagcagcugccacgacggcaaggccuggcugcacgugugcaucaccggcgacgacaagaacgccaccgccagcuucaucuacaacggcagacugguggacagcguggugagcuggagcaaggagauccugagaacccaggagagcgagugcgugugcaucaacggcaccugcaccguggugaugaccgacggcagcgccagcggcaaggccgacaccaagauccuguucaucgaggagggcaagaucgugcacaccagcacccugagcggcagcgcccagcacguggaggagugcagcugcuaccccagauaccccgacgugagaugcgugugcagagacaacuggaagggcagcaacagacccaucguggacaucaacaucaaggaccacagcaucgugagcagcuacgugugcagcggccuggugggcgacacccccagaaagaacgacagcagcagcagcagccacugccuggaccccaacaacgaggagggcggccacggcgugaagggcugggccuucgacgacggcaacgacguguggaugggcagaaccaucagcgagaagagcagacugggcuacgagaccuucaaggugaucgagggcuggagcaaccccaagagcaagcugcagaucaacagacaggugaucguggacagaggcaacagaagcggcuacagcggcaucuucagcguggagggcaagagcugcaucaacagaugcuucuacguggagcugaucagaggcagaaaggaggagaccgaggugcuguggaccagcaacagcaucgugguguucugcggcaccagcggcaccuacggcaccggcagcuggcccgacggcgccgacaucaaccugaugcccaucuga

SEQ ID NO: 180562 - RNA, 1395 nt, Artificial Sequence
  derived and/or modified CDS sequence (opt4) from neuraminidase__InfluenzaA__AEA04357
augaaccccaaccagaagaucaucaccaucggcagcaucugcaugguggugggcaucaucagccugauccugcagaucggcaacaucgugagcaucuggaucagccacagcauccagaccggcaaccagaaccacaccggcaccugcgaccagagcaucaucaccuacaagaacagcaccugggugaaccagaccuacgugaacgugguggccggcaaggacaccaccagcgugauccuggccggcaacagcagccugugccccaucagaggcugggccaucuacagcaaggacaacggcgugagaaucggcagcaagggcgacguguucgugaucagagagcccuucaucagcugcagccaccuggagugcagaaccuucuuccugacccagggcgcccugcugaacgacaagcacagcaacggcaccgugaaggacagaagccccuacagagcccugaugagcugccccgugggcgaggcccccagccccuacaacagcagauucgagagcguggccuggagcgccagcgccugccacgacggcaugggcuggcugaccaucggcaucagcggccccgacgacggcgccguggccgugcugaaguacaacggcaucaucaccgagaccaucaagagcuggagaaaggagauccugagaacccaggagagcgagugcgugugcgugaacggcagcugcuucaccaucaugaccgacggccccagcggcggccccgccagcuacaagaucuucaagaucgagaagggcaaggugaccaagagcaucgagcuggacgcccccaacagccacuacgaggagugcagcugcuaccccgacaccagcaaggugaugugcgugugcagagacaacuggcacggcagcaacagacccugggugagcuucgaccagaaccuggacuaccagaugggcuacaucugcagcggcguguucggcgacaaccccagacccaaggacggcaagggcagcugcggccccguguacguggacggcgccaacggcgugaagggcuucagcuacaaguacggcaacggcguguggaucggcagaaccaagagcaucagcagcagacagggcuucgagaugaucugggaccccaacggcuggaccgagaccgacagcaacuucuucaccaagcaggacgugguggccgugaccgacuggagcggcuacagcggcagcuucgugcagcaccccgagcugaccggccuggacugcaugagacccugcuucuggguggagcugaucagaggcagacccaaggagaacaccaucuggaccagcggcagcagcaucagcuucugcggcgugaacagcgacaccguggacuggagcuggcccgacggcgccgagcugcccuucaccaucgacaaguga

SEQ ID NO: 180563 - RNA, 1410 nt, Artificial Sequence; identical to SEQ ID NO: 176527
  derived and/or modified CDS sequence (opt4) from neuraminidase__InfluenzaA__AEA04368

SEQ ID NO: 180564 - RNA, 1410 nt, Artificial Sequence
  derived and/or modified CDS sequence (opt4) from neuraminidase__InfluenzaA__AEA04379
augaaccccaaccagaagaccaucaccaucggcagcgugagccugaccaucgagaccgugugcuuccugaugcagaucgccauccuggccaccaccgugacccugcacuucaagcagcacgagugcgacagccccgccagcaaccaggugaugcccugcgagcccaucaucaucgagagaaacaucaccgagaucguguaccugaacaacaccaccaucgagaaggagaucugccccgaggugguggaguacagaaacuggagcaagccccagugccagaucaccggcuucgcccccuucagcaaggacaacagcaucagacugagcgccggcggcgacaucugggugaccagagagcccuacgugagcugcgaccccggcaagugcuaccaguucgcccugggccagggcaccacccuggacaacaagcacagcaacggcaccauccacgacagaaucccccacagaacccugcugaugaacgagcugggcgugcccuuccaccugggcaccaagcaggugugcguggccuggagcagcagcagcugccacgacggcaaggccuggcugcacgugugcgugaccggcgacgacagaaacgccaccgccagcuucaucuacgacggcagacugguggacagcaucggcagcuggagccagaacauccugagaacccaggagagcgagugcgugugcaucaacggcaccugcaccguggugaugaccgacggcagcgccagcggcagagccgacaccagaauccuguucaucaaggagggcaagaucgugcacaucagcccccugagcggcagcgcccagcacaucgaggagugcagcugcuaccccagauaccccgacgugagaugcaucugcagagacaacuggaagggcagcaacagacccgugaucgacaucaacauggaggacuacagcaucgacagcagcuacgugugcagcggccuggugggcgacacccccagaaacgacgacagcagcagcaacagcaagagcagagaccccaacaacgagagaggcaaccccggcgugaagggcugggccuucgacaacggcgacgacguguggaugggcagaaccaucagcaaggacagcagaagcggcuacgagaccuucaaggugaucggcggcuggagcacccccaacagcaagagccaggugaacagacaggugaucguggacaacaacaacuggagcggcuacagcggcaucuucagcguggagggcaagagcugcaucaacagaugcuucuacguggagcugaucagaggcagaccccaggagaccagagugugguggaccagcaacagcaucgugguguucugcggcaccagcggcaccuacggcaccggcagcuggcccgacggcgccaacaucaacuucaugcccaucuga

SEQ ID NO: 180565 - RNA, 1413 nt, Artificial Sequence; identical to SEQ ID NO: 180264
  derived and/or modified CDS sequence (opt4) from neuraminidase__InfluenzaA__AEA10295

SEQ ID NO: 180566 - RNA, 1410 nt, Artificial Sequence; identical to SEQ ID NO: 176798
  derived and/or modified CDS sequence (opt4) from neuraminidase__InfluenzaA__AEA10306

SEQ ID NO: 180567 - RNA, 1410 nt, Artificial Sequence; identical to SEQ ID NO: 180151
  derived and/or modified CDS sequence (opt4) from neuraminidase__InfluenzaA__AEA10316

SEQ ID NO: 180568 - RNA, 1410 nt, Artificial Sequence; identical to SEQ ID NO: 176798
  derived and/or modified CDS sequence (opt4) from neuraminidase__InfluenzaA__AEA10326

SEQ ID NO: 180569 - RNA, 1410 nt, Artificial Sequence; identical to SEQ ID NO: 178086
  derived and/or modified CDS sequence (opt4) from neuraminidase__InfluenzaA__AEA10335

SEQ ID NO: 180570 - RNA, 1410 nt, Artificial Sequence; identical to SEQ ID NO: 176798
  derived and/or modified CDS sequence (opt4) from neuraminidase__InfluenzaA__AEA10342

SEQ ID NO: 180571 - RNA, 1410 nt, Artificial Sequence
  derived and/or modified CDS sequence (opt4) from neuraminidase__InfluenzaA__AEA10352
augaaccccaaccagaagaucaucaccaucggcagcgugugcaugaccaucggcauggccaaccugauccugcagaucggcaacaucaucagcaucuggaucagccacagcauccagcugggcaaccagaaccagaucgagaccugcaaccagagcgugaucaccuacgagaacaacaccugggugaaccagaccuacgugaacaucagcaacaccaacuucgccgccggccagagcguggugagcgugaagcuggccggcaacagcagccugugccccgugagcggcugggccaucuacagcaaggacaacagcaucagaaucggcagcaagggcgacguguucgugaucagagagcccuucaucagcugcagcccccuggagugcagaaccuucuuccugacccagggcgcccugcugaacgacaagcacagcaacggcaccaucaaggacagaagccccuacagaacccugaugagcugccccaucggcgaggugcccagccccuacaacagcagauucgagagcguggccuggagcgccagcgccugccacgacggcaucaacuggcugaccaucggcaucagcggccccgacaacggcgccguggccgugcugaaguacaacggcaucaucaccgacaccaucaagagcuggagaaacaacauccugagaacccaggagagcgagugcgccugcaucaacggcagcugcuucaccgugaugaccgacggccccagcgacggccaggccagcuacaagaucuucagaaucgagaagggcaagaucgugaagagcguggagaugaacgcccccaacuaccacuacgaggagugcagcugcuaccccgacagcagcgagaucaccugcgugugcagagacaacuggcacggcagcaacagacccugggugagcuucaaccagaaccuggaguaccagaucggcuacaucugcagcggcaucuucggcgacaaccccagacccaacgacaagaccggcagcugcagccccgugagcagcaacggcgccaacggcgugaagggcuucagcuucaaguacggcaacggcguguggaucggcagaaccaagagcaucagcagcagaaacggcuucgagaugaucugggaccccaacggcuggaccggcaccgacaacaacuucagcaucaagcaggacaucgugggcaucaacgaguggagcggcuacagcggcagcuucgugcagcaccccgagcugaccggccuggacugcaucagacccugcuucuggguggagcugaucagaggcagacccaaggagaacaccaucuggaccagcggcagcagcaucagcuucugcggcgugaacagcgacaccgugggcuggagcuggcccgacggcgccgagcugcccuucaccaucgacaaguga

SEQ ID NO: 180572 - RNA, 1410 nt, Artificial Sequence; identical to SEQ ID NO: 176798
  derived and/or modified CDS sequence (opt4) from neuraminidase__InfluenzaA__AEA48991

SEQ ID NO: 180573 - RNA, 1410 nt, Artificial Sequence; identical to SEQ ID NO: 179470
  derived and/or modified CDS sequence (opt4) from neuraminidase__InfluenzaA__AEA72707

SEQ ID NO: 180574 - RNA, 1410 nt, Artificial Sequence; identical to SEQ ID NO: 179470
  derived and/or modified CDS sequence (opt4) from neuraminidase__InfluenzaA__AEA72718

SEQ ID NO: 180575 - RNA, 1410 nt, Artificial Sequence; identical to SEQ ID NO: 179470
  derived and/or modified CDS sequence (opt4) from neuraminidase__InfluenzaA__AEA72729

SEQ ID NO: 180576 - RNA, 1410 nt, Artificial Sequence
  derived and/or modified CDS sequence (opt4) from neuraminidase__InfluenzaA__AEA72742
augaaccccaaccagaagaucaucaccaucggcagcgugugcaugaccaucggcauggccaaccugauccugcagaucggcaacaucaucagcaucuggaucagccacagcauccagcugggcaaccagagccagaucgagaccugcaaccagagcgugaucaccuacgagaacaacaccugggugaaccagaccuacgugaacaucagcaacaccaacuucgccgccggccagagcguggugagcgugaagcuggccggcaacagcagccugugccccgugagcggcugggccaucuacagcaaggacaacagcaucagaaucggcagcaagggcgacguguucgugaucagagagcccuucaucagcugcagcccccuggagugcagaaccuucuuccugacccagggcgcccugcugaacgacaagcacagcaacggcaccaucaaggacagaagccccuacagaacccugaugagcugccccaucggcgaggugcccagccccuacaacagcagauucgagagcguggccuggagcgccagcgccugccacgacggcaucaacuggcugaccaucggcaucagcggccccgacaacggcgccguggccgugcugaaguacaacggcaucaucaccgacaccaucaagagcuggagaaacaacauccugagaacccaggagagcgagugcgccugcgugaacggcagcugcuucaccaucaugaccgacggccccagcgacggccaggccagcuacaagaucuucagaaucgagaagggcaagaucgugaagagcguggagaugaacgcccccaacuaccacuacgaggagugcagcugcuaccccgacagcagcgagaucaccugcgugugcagagacaacuggcacggcagcaacagacccugggugagcuucaaccagaaccuggaguaccagaucggcuacaucugcagcggcaucuucggcgacaaccccagacccaacgacaagaccggcagcugcggccccgugagcagcaacggcgccaacggcgugaagggcuucagcuucaaguacggcaacggcguguggaucggcagaaccaagagcaucagcagcagaaacggcuucgagaugaucugggaccccaacggcuggaccggcaccgacaacaacuucagcaucaagcaggacaucgugggcaucaacgaguggagcggcuacagcggcagcuucgugcagcaccccgagcugaccggccuggacugcaucagacccugcuucuggguggagcugaucagaggcagacccaaggagaacaccaucuggaccagcggcagcagcaucagcuucugcggcgugaacagcgacaccgugggcuggagcuggcccgacggcgccgagcugcccuucaccaucgacaaguga

SEQ ID NO: 180577 - RNA, 1410 nt, Artificial Sequence; identical to SEQ ID NO: 179073
  derived and/or modified CDS sequence (opt4) from neuraminidase__InfluenzaA__AEA72779

SEQ ID NO: 180578 - RNA, 1410 nt, Artificial Sequence
  derived and/or modified CDS sequence (opt4) from neuraminidase__InfluenzaA__AEA72789
augaaccccaaccagaagaucaucaccaucggcagcgugugcaugaccaucggcauggccaaccugauccugcagaucggcaacaucaucagcaucuggaucagccacagcauccagcugggcaaccagagccagaucgagaccugcaaccagagcgugaucaccuacgagaacaacaccugggugaaccagaccuacgugaacaucagcaacaccaacuucgccgccggccagagcguggugagcgugaagcuggccggcaacagcagccugugccccgugagcggcugggccaucuacagcaaggacgacagcaucagaaucggcagcaagggcgacguguucgugaucagagagcccuucaucagcugcagcccccuggagugcagaaccuucuuccugacccagggcgcccugcugaacgacaagcacagcaacggcaccaucaaggacagaagccccuacagaacccugaugagcugccccaucggcgaggugcccagccccuacaacagcagauucgagagcguggccuggagcgccagcgccugccacgacggcaucaacuggcugaccaucggcaucagcggccccgacaacggcgccguggccgugcugaaguacaacggcaucaucaccgacaccaucaagagcuggagaaacaacauccugagaacccaggagagcgagugcgccugcgugaacggcagcugcuucaccgugaugaccgacggccccagcgacggccaggccagcuacaagaucuucagaaucgagaagggcaagaucgugaagagcguggagaugaacgcccccaacuaccacuacgaggagugcagcugcuaccccgacagcagcgagaucaccugcgugugcagagacaacuggcacggcagcaacagacccugggugagcuucaaccagaaccuggaguaccagaucggcuacaucugcagcggcaucuucggcgacaaccccagacccaacgacaagaccggcagcugcggccccgugagcagcaacggcgccaacggcgugaagggcuucagcuucaaguacggcaacggcguguggaucggcagaaccaagagcaucagcagcagaaacggcuucgagaugaucugggaccccaacggcuggaccggcaccgacaacaacuucagcaucaagcaggacaucgugggcaucaacgaguggagcggcuacagcggcagcuucgugcagcaccccgagcugaccggccuggacugcaucagacccugcuucuggguggagcugaucagaggcagacccaaggagaacaccaucuggaccagcggcagcagcaucagcuucugcggcgugaacagcgacaccgugggcuggagcuggcccgacggcgccgagcugcccuucaccaucgacaaguga

SEQ ID NO: 180579 - RNA, 1410 nt, Artificial Sequence; identical to SEQ ID NO: 179470
  derived and/or modified CDS sequence (opt4) from neuraminidase__InfluenzaA__AEA73291

SEQ ID NO: 180580 - RNA, 1410 nt, Artificial Sequence; identical to SEQ ID NO: 179470
  derived and/or modified CDS sequence (opt4) from neuraminidase__InfluenzaA__AEA73302

SEQ ID NO: 180581 - RNA, 1410 nt, Artificial Sequence; identical to SEQ ID NO: 179470
  derived and/or modified CDS sequence (opt4) from neuraminidase__InfluenzaA__AEA73313

SEQ ID NO: 180582 - RNA, 1410 nt, Artificial Sequence; identical to SEQ ID NO: 179470
  derived and/or modified CDS sequence (opt4) from neuraminidase__InfluenzaA__AEA73324

SEQ ID NO: 180583 - RNA, 1410 nt, Artificial Sequence; identical to SEQ ID NO: 179470
  derived and/or modified CDS sequence (opt4) from neuraminidase__InfluenzaA__AEA73335

SEQ ID NO: 180584 - RNA, 1410 nt, Artificial Sequence; identical to SEQ ID NO: 179470
  derived and/or modified CDS sequence (opt4) from neuraminidase__InfluenzaA__AEA73346

SEQ ID NO: 180585 - RNA, 1410 nt, Artificial Sequence; identical to SEQ ID NO: 179470
  derived and/or modified CDS sequence (opt4) from neuraminidase__InfluenzaA__AEA73357

SEQ ID NO: 180586 - RNA, 1410 nt, Artificial Sequence; identical to SEQ ID NO: 179470
  derived and/or modified CDS sequence (opt4) from neuraminidase__InfluenzaA__AEA73368

SEQ ID NO: 180587 - RNA, 1410 nt, Artificial Sequence; identical to SEQ ID NO: 179470
  derived and/or modified CDS sequence (opt4) from neuraminidase__InfluenzaA__AEA73379

SEQ ID NO: 180588 - RNA, 1410 nt, Artificial Sequence; identical to SEQ ID NO: 179470
  derived and/or modified CDS sequence (opt4) from neuraminidase__InfluenzaA__AEA73390

SEQ ID NO: 180589 - RNA, 1410 nt, Artificial Sequence; identical to SEQ ID NO: 179470
  derived and/or modified CDS sequence (opt4) from neuraminidase__InfluenzaA__AEA73401

SEQ ID NO: 180590 - RNA, 1410 nt, Artificial Sequence; identical to SEQ ID NO: 179470
  derived and/or modified CDS sequence (opt4) from neuraminidase__InfluenzaA__AEA73412

SEQ ID NO: 180591 - RNA, 1410 nt, Artificial Sequence; identical to SEQ ID NO: 179470
  derived and/or modified CDS sequence (opt4) from neuraminidase__InfluenzaA__AEA73423

SEQ ID NO: 180592 - RNA, 1410 nt, Artificial Sequence; identical to SEQ ID NO: 179470
  derived and/or modified CDS sequence (opt4) from neuraminidase__InfluenzaA__AEA73455

SEQ ID NO: 180593 - RNA, 1410 nt, Artificial Sequence; identical to SEQ ID NO: 179470
  derived and/or modified CDS sequence (opt4) from neuraminidase__InfluenzaA__AEA73466

SEQ ID NO: 180594 - RNA, 1410 nt, Artificial Sequence
  derived and/or modified CDS sequence (opt4) from neuraminidase__InfluenzaA__AEA73477
augaaccccaaccagaagaucaucaccaucggcagcgugagccugaccaucagcaccaucugcuucuucaugcagaucgccauccugaucaccaccgugacccugcacuucaagcaguacaaguucaacagcccccccaacaaccaggugaugcugugcgagcccaccaucaucgagagaaacaucaccgagaucguguaccugaccaacaccaccaucgagaaggagaucugccccaagcuggccgaguacagaaacuggagcaagccccagugcgacaucaccggcuucgcccccuucagcaaggacaacagcaucagacugagcgccggcggcgacaucugggugaccagagagcccuacgugagcugcgaccccgacaagugcuaccaguucgcccugggccagggcaccacccugaacaacgugcacagcaacaacaccgugagagacagaacccccuacagaacccugcugaugaacgagcugggcgugcccuuccaccugggcaccaagcaggugugcaucgccuggagcagcagcagcugccacgacggcaaggccuggcugcacgugugcaucaccggcgacgacaagaacgccaccgccagcuucaucuacaacggcagacugguggacagcguggugagcuggagcaaggagauccugagaacccaggagagcgagugcgugugcaucaacggcaccugcaccguggugaugaccgacggcagcgccagcggcaaggccgacaccaagauccuguucaucgaggagggcaagaucgugcacaccagcacccugagcggcagcgcccagcacguggaggagugcagcugcuaccccagauaccccggcgugagaugcgugugcagagacaacuggaagggcagcaacagacccaucguggacaucaacaucaaggaccacagcaucgugagcagcuacgugugcagcggccuggugggcgacacccccagaaagaacgacagcagcagcagcagccacugccuggaccccaacaacgaggagggcggccacggcgugaagggcugggccuucgacgacggcaacgacguguggaugggcagaaccaucaacgagaccagcagacugggcuacgagaccuucaaggugaucgagggcuggagcaaccccaagagcaagcugcagaucaacagacaggugaucguggacagaggcaacagaagcggcuacagcggcaucuucagcguggagggcaagagcugcaucaacagaugcuucuacguggagcugaucagaggcagaaaggaggagaccaaggugcuguggaccagcaacagcaucgugguguucugcggcaccagcggcaccuacggcaccggcagcuggcccgacggcgccgaccugaaccugaugcccaucuga

SEQ ID NO: 180595 - RNA, 1410 nt, Artificial Sequence; identical to SEQ ID NO: 179470
  derived and/or modified CDS sequence (opt4) from neuraminidase__InfluenzaA__AEA73488

SEQ ID NO: 180596 - RNA, 1410 nt, Artificial Sequence
  derived and/or modified CDS sequence (opt4) from neuraminidase__InfluenzaA__AEA73499
augaaccccaaccagaagaucaucaccaucggcagcgugagccugaccaucagcaccaucugcuucuucaugcagaucgccauccugaucaccaccgugacccugcacuucaagcaguacaaguucaacagcccccccaacaaccaggugaugcugugcgagcccaccaucaucgagagaaacaucaccgagaucguguaccugaccaacaccaccaucgagaaggagaucugccccaagcuggccgaguacagaaacuggagcaagccccagugcgacaucaccggcuucgcccccuucagcaaggacaacagcaucagacugagcgccggcggcgacaucugggugaccagagagcccuacgugagcugcgaccccgacaagugcuaccaguucgcccugggccagggcaccaccaucaacaacgugcacagcaacaacaccgugagagacagaacccccuacagaacccugcugaugaacgagcugggcgugcccuuccaccugggcaccaagcaggugugcaucgccuggagcagcagcagcugccacgacggcaaggccuggcugcacgugugcaucaccggcgacgacaagaacgccaccgccagcuucaucuacaacggcagacugguggacagcguggugagcuggagcaaggagauccugagaacccaggagagcgagugcgugugcaucaacggcaccugcaccguggugaugaccgacggcagcgccagcggcaaggccgacaccaagauccuguucaucgaggagggcaagaucgugcacaccagcacccugagcggcagcgcccagcacguggaggagugcagcugcuaccccagauaccccggcgugagaugcgugugcagagacaacuggaagggcagcaacagacccaucguggacaucaacaucaaggaccacagcaucgugagcagcuacgugugcagcggccuggugggcgacacccccagaaagaacgacagcagcagcagcagccacugccuggaccccaacaacgaggagggcggccacggcgugaagggcugggccuucgacgacggcaacgacguguggaugggcagaaccaucaacgagaccagcagacugggcuacgagaccuucaaggugaucgagggcuggagcaaccccaagagcaagcugcagaucaacagacaggugaucguggacagaggcaacagaagcggcuacagcggcaucuucagcguggagggcaagagcugcaucaacagaugcuucuacguggagcugaucagaggcagaaaggaggagaccgaggugcuguggaccagcaacagcaucgugguguucugcggcaccagcggcaccuacggcaccggcagcuggcccgacggcgccgaccugaaccugaugcccaucuga

SEQ ID NO: 180597 - RNA, 1410 nt, Artificial Sequence; identical to SEQ ID NO: 179470
  derived and/or modified CDS sequence (opt4) from neuraminidase__InfluenzaA__AEA73510

SEQ ID NO: 180598 - RNA, 1410 nt, Artificial Sequence; identical to SEQ ID NO: 179470
  derived and/or modified CDS sequence (opt4) from neuraminidase__InfluenzaA__AEA73521

SEQ ID NO: 180599 - RNA, 1410 nt, Artificial Sequence; identical to SEQ ID NO: 179470
  derived and/or modified CDS sequence (opt4) from neuraminidase__InfluenzaA__AEA73532

SEQ ID NO: 180600 - RNA, 1410 nt, Artificial Sequence; identical to SEQ ID NO: 179470
  derived and/or modified CDS sequence (opt4) from neuraminidase__InfluenzaA__AEA73543

SEQ ID NO: 180601 - RNA, 1410 nt, Artificial Sequence; identical to SEQ ID NO: 179470
  derived and/or modified CDS sequence (opt4) from neuraminidase__InfluenzaA__AEA73554

SEQ ID NO: 180602 - RNA, 1410 nt, Artificial Sequence; identical to SEQ ID NO: 179470
  derived and/or modified CDS sequence (opt4) from neuraminidase__InfluenzaA__AEA73565

SEQ ID NO: 180603 - RNA, 1413 nt, Artificial Sequence; identical to SEQ ID NO: 177521
  derived and/or modified CDS sequence (opt4) from neuraminidase__InfluenzaA__AEA73576

SEQ ID NO: 180604 - RNA, 1413 nt, Artificial Sequence; identical to SEQ ID NO: 177521
  derived and/or modified CDS sequence (opt4) from neuraminidase__InfluenzaA__AEA73587

SEQ ID NO: 180605 - RNA, 1413 nt, Artificial Sequence; identical to SEQ ID NO: 180264
  derived and/or modified CDS sequence (opt4) from neuraminidase__InfluenzaA__AEA73598

SEQ ID NO: 180606 - RNA, 1413 nt, Artificial Sequence; identical to SEQ ID NO: 177521
  derived and/or modified CDS sequence (opt4) from neuraminidase__InfluenzaA__AEA73609

SEQ ID NO: 180607 - RNA, 1413 nt, Artificial Sequence; identical to SEQ ID NO: 177521
  derived and/or modified CDS sequence (opt4) from neuraminidase__InfluenzaA__AEA73620

SEQ ID NO: 180608 - RNA, 1413 nt, Artificial Sequence
  derived and/or modified CDS sequence (opt4) from neuraminidase__InfluenzaA__AEA73631
augaaccccaaccagaagaucaucaccaucggcagcaucagcaucgccaucggcaucaucagccugaugcugcagaucggcaacaucaucagcaucugggccagccacagcauccagaccggcagccagaacaacaccggcaucugcaaccagagaaucaucaccuacgagaacagcaccugggugaaccacaccuacgugaacaucaacaacaccaacgugguggccggcgaggacaagaccagcgugacccuggccggcaacagcagccugugcagcaucagcggcugggccaucuacaccaaggacaacagcaucagaaucggcagcaagggcgacguguucgugaucagagagcccuucaucagcugcagccaccuggagugcagaaccuucuuccugacccagggcgcccugcugaacgacaagcacagcaacggcaccgugaaggacagaagccccuacagagcccugaugagcugcccccugggcgaggcccccagccccuacaacagcaaguucgagagcguggccuggagcgccagcgccugccacgacggcaugggcuggcugaccaucggcaucagcggccccgacaacggcgccguggccgugcugaaguacaacggcaucaucaccggcaccaucaagagcuggaagaagcagauccugagaacccaggagagcgagugcgugugcaugaacggcagcugcuucaccaucaugaccgacggccccagcaacaaggccgccagcuacaagaucuucaagaucgagaagggcaaggugaccaagagcaucgagcugaacgcccccaacuucuacuacgaggagugcagcugcuaccccgacaccggcaucgugaugugcgugugcagagacaacuggcacggcagcaacagacccugggugagcuucaaccagaaccuggacuaccagaucggcuacaucugcagcggcguguucggcgacaaccccagacccgaggacggcgagggcagcugcaaccccgugaccguggacggcgccaacggcgugaagggcuucagcuacaaguacggcaacggcguguggaucggcagaaucaagagcaacagacugagaaagggcuucgagaugaucugggaccccaacggcuggaccaacaccgacagcgacuucagcgugaagcaggacgugguggccaucaccgacuggagcggcuacagcggcagcuucgugcagcaccccgagcugaccggccuggacugcaucagacccugcuucuggguggagcuggugagaggccugcccagagagaacaccaccaucuggaccagcggcagcagcaucagcuucugcggcgugaacagcgacaccgccaacuggagcuggcccgacggcgccgagcugcccuucaccaucgacaaguga

SEQ ID NO: 180609 - RNA, 1413 nt, Artificial Sequence
  derived and/or modified CDS sequence (opt4) from neuraminidase__InfluenzaA__AEA73642
augaaccccaaccagagaaucaucaccaucggcagcaucagcaucgccaucggcaucaucagccugaugcugcagaucggcaacaucaucagcaucugggccagccacagcauccagaccggcagccagaacaacaccggcaucugcaagcagagaaucaucaccuacgagaacagcaccugggugaaccacaccuacgugaacaucaacaacaccaacgugguggccggcgaggacaagaccagcgugacccuggccggcaacagcagccugugcagcaucagcggcugggccaucuacaccaaggacaacagcaucagaaucggcagcaagggcgacguguucgugaucagagagcccuucaucagcugcagccaccuggagugcagaaccuucuuccugacccagggcgcccugcugaacgacaagcacagcaacggcaccgccaaggacagaagccccuacagagcccugaugagcugcccccugggcgaggcccccagccccuacaacagcaaguucgagagcguggccuggagcgccagcgccugccacgacggcaugggcuggcugaccaucggcaucagcggccccgacaacggcgccguggccgugcugaaguacaacggcaucaucaccggcaccaucaagagcuggaagaagcagauccugagaacccaggagagcgagugcgugugcaugaacggcagcugcuucaccaucaugaccgacggccccagcaacaaggccgccagcuacaagaucuucaagaucgagaagggcaaggugaccaagagcaucgagcugaacgcccccaacuucuacuacgaggagugcagcugcuaccccgacaccggcaucgugaugugcgugugcagagacaacuggcacggcagcaacagacccugggugagcuucaaccagaaccuggacuaccagaucggcuacaucugcagcggcguguucggcgacaaccccagacccgaggacggcgagggcagcugcaaccccgugaccguggacggcgccaacggcgugaagggcuucagcuacaaguacggcaacggcguguggcugggcagaaccaagagcaacagacugagaaagggcuucgagaugaucugggaccccaacggcuggaccaacaccgacagcgacuucagcgugaagcaggacgugguggccaucaccgacuggagcggcuacagcggcagcuucgugcagcaccccgagcugaccggccuggacugcaucagacccugcuucuggguggagcuggugagaggccugcccagagagaacaccaccaucuggaccagcggcagcagcaucagcuucugcggcgugaacagcgacaccgccaacuggagcuggcccgacggcgccgagcugcccuucaccaucgacaaguga

SEQ ID NO: 180610 - RNA, 1413 nt, Artificial Sequence; identical to SEQ ID NO: 177521
  derived and/or modified CDS sequence (opt4) from neuraminidase__InfluenzaA__AEA73653

SEQ ID NO: 180611 - RNA, 1413 nt, Artificial Sequence
  derived and/or modified CDS sequence (opt4) from neuraminidase__InfluenzaA__AEA73664
augaaccccaaccagaagaucaucaccaucggcagcaucagcaucgccaucggcaucaucagccugaugcugcagaucggcaacaucaucagcaucugggccagccacagcauccagaccggcagccagaacaacaccggcaucugcaaccagagaaucaucaccuacgagaacagcaccugggugaaccacaccuacgugaacaucaacaacaccaacgugguggccggcgaggacaagaccagcgugacccuggccggcaacagcagccugugcagcaucagcggcugggccaucuacaccaaggacaacagcaucagaaucggcagcaagggcgacguguucgugaucagagagcccuucaucagcugcagccaccuggagugcagaaccuucuuccugacccagggcgcccugcugaacgacaagcacagcaacggcaccgugaaggacagaagccccuacagagcccugaugagcugcccccugggcgaggcccccagccccuacaacagcaaguucgagagcguggccuggagcgccagcgccugccacgacggcaugggcuggcugaccaucggcaucagcggccccgacaacggcgccguggccgugcugaaguacaacggcaucaucaccggcaccaucaagagcuggaagaagcagauccugagaacccaggagagcgagugcgugugcaugaacggcagcugcuucaccaucaugaccgacggccccagcaacaaggccgccagcuacaagaucuucaagaucgagaagggcaaggugaccaagagcaucgagcugaacgcccccaacuucuacuacgaggagugcagcugcuaccccgacaccggcaucgugaugugcgugugcagagacaacuggcacggcagcaacagacccugggugagcuucaaccagaaccuggacuaccagaucggcuacaucugcagcggcguguucggcgacaaccccagacccgaggacggcgagggcagcugcaaccccgugaccgugaacggcgccgacggcgugaagggcuucagcuacaaguacggcaacggcguguggaucggcagaaccaagagcaacagacugagaaagggcuucgagaugaucugggaccccaacggcuggaccaacaccgacagcgacuucagcgugaagcaggacgugguggccaucaccgacuggagcggcuacagcggcagcuucgugcagcaccccgagcugaccggccuggacugcaucagacccugcuucuggguggagcuggugagaggccugcccaaggagaacaccaccaucuggaccagcggcagcagcaucagcuucugcggcgugaacagcgacaccgccaacuggagcuggcccgacggcgccgagcugcccuucaccaucgacaaguga

SEQ ID NO: 180612 - RNA, 1413 nt, Artificial Sequence
  derived and/or modified CDS sequence (opt4) from neuraminidase__InfluenzaA__AEA73675
augaaccccaaccagaagaucaucaccaucggcagcaucagcaucgccaucggcaucaucagccugaugcugcagaucggcaacaucaucagcaucugggccagccacagcauccagaccggcagccagaacaacaccggcaucugcaaccagagaaucaucaccuacgagaacagcaccugggugaaccacaccuacgugaacaucaacaacaccaacgugguggccggcgaggacaagaccagcgugacccuggccggcaacagcagccugugcagcaucagcggcugggccaucuacaccaaggacaacagcaucagaaucggcagcaagggcgacguguucgugaucagagagcccuucaucagcugcagccaccuggagugcagaaccuucuuccugacccagggcgcccugcugaacgacaagcacagcaacggcaccgugaaggacagaagccccuacagagcccugaugagcugcccccugggcgaggcccccagccccuacaacagcaaguucgagagcguggccuggagcgccagcgccugccacgacggcaugggcuggcugaccaucggcaucagcggccccgacaacggcgccguggccgugcugaaguacaacggcaucaucaccggcaccaucaagagcuggaagaagcagauccugagaacccaggagagcgagugcgugugcaugaacggcagcugcuucaccaucaugaccgacggccccagcaacaaggccgccagcuacaagaucuucaagaucgagaagggcaaggugaccaagagcaucgagcugaacgcccccaacuucuacuacgaggagugcagcugcuaccccgacaccggcaucgugaugugcgugugcagagacaacuggcacggcagcaacagacccugggugagcuucaaccagaaccuggacuaccagaucggcuacaucugcagcggcguguucggcgacaaccccagacccgaggacggcgagggcagcugcaaccccgugaccguggacggcgccgacggcgugaagggcuucagcuacaaguacggcaacggcguguggaucggcagaaccaagagcaacagacugagaaagggcuucgagaugaucugggaccccaacggcuggaccaacaccgacagcgacuucagcgugaagcaggacgugguggccaucaccgacuggagcggcuacagcggcagcuucgugcagcaccccgagcugaccggccuggacugcaucagacccugcuucuggaucgagcuggugagaggccugcccagagagaacaccaccaucuggaccagcggcagcagcaucagcuucugcggcgugaacagcgacaccgccaacuggagcuggcccgacggcgccgagcugcccuucaccaucgacaaguga

SEQ ID NO: 180613 - RNA, 1413 nt, Artificial Sequence; identical to SEQ ID NO: 180264
  derived and/or modified CDS sequence (opt4) from neuraminidase__InfluenzaA__AEA73686

SEQ ID NO: 180614 - RNA, 1413 nt, Artificial Sequence
  derived and/or modified CDS sequence (opt4) from neuraminidase__InfluenzaA__AEA73697
augaaccccaaccagaagaucaucaccaucggcagcaucagcaucgccaucggcaucaucagccugaugcugcagaucggcaacaucaucagcaucugggccagccacagcauccagaccggcagccagaacaacaccggcaucugcaaccagagaaucaucaccuacgagaacagcaccugggugaaccacaccuacgugaacaucaacaacaccaacaucguggccggcgaggacaagaccagcgugacccuggccggcaacagcagccugugcagcaucagcggcugggccaucuacaccaaggacaacagcaucagaaucggcagcaagggcgacguguucgugaucagagagcccuucaucagcugcagccaccuggagugcagaaccuucuuccugacccagggcgcccugcugaacgacaagcacagcaacggcaccgugaaggacagaagccccuacagagcccugaugagcugcccccugggcgaggcccccagccccuacaacagcaaguucgagagcguggccuggagcgccagcgccugccacgacggcaugggcuggcugaccaucggcaucagcggccccgacaacggcgccguggccgugcugaaguacaacggcaucaucaccggcaccaucaagagcuggaagaagcagauccugagaacccaggagagcgagugcgugugcaugaacggcagcugcuucaccaucaugaccgacggccccagcaacaaggccgccagcuacaagaucuucaagaucgagaagggcaaggugaccaagagcguggagcugaacgcccccaacuucuacuacgaggagugcagcugcuaccccgacaccggcaucgugaugugcgugugcagagacaacuggcacggcagcaacagacccugggugagcuucaaccagaaccuggacuaccagaucggcuacaucugcagcggcguguucggcgacaaccccagacccgaggacggcgagggcagcugcaaccccgugaccgugaacggcgccgacggcgugaagggcuucagcuacaaguacggcaacggcguguggaucggcagaaccaagagcaacagacugagaaagggcuucgagaugaucugggaccccaacggcuggaccaacaccgacagcgacuucagcgugaagcaggacgugguggccaucaccgacuggagcggcuacagcggcagcuucgugcagcaccccgagcugaccggccuggacugcaucagacccugcuucuggguggagcuggugagaggccugcccagagagaacaccaccaucuggaccagcggcagcagcaucagcuucugcggcgugaacagcgacaccgccaacuggagcuggcccgacggcgccgagcugcccuucaccaucgacaaguga

SEQ ID NO: 180615 - RNA, 1413 nt, Artificial Sequence; identical to SEQ ID NO: 180265
  derived and/or modified CDS sequence (opt4) from neuraminidase__InfluenzaA__AEA73708

SEQ ID NO: 180616 - RNA, 1413 nt, Artificial Sequence; identical to SEQ ID NO: 177521
  derived and/or modified CDS sequence (opt4) from neuraminidase__InfluenzaA__AEA73719

SEQ ID NO: 180617 - RNA, 1413 nt, Artificial Sequence; identical to SEQ ID NO: 177521
  derived and/or modified CDS sequence (opt4) from neuraminidase__InfluenzaA__AEA73730

SEQ ID NO: 180618 - RNA, 1413 nt, Artificial Sequence; identical to SEQ ID NO: 177521
  derived and/or modified CDS sequence (opt4) from neuraminidase__InfluenzaA__AEA73741

SEQ ID NO: 180619 - RNA, 1413 nt, Artificial Sequence; identical to SEQ ID NO: 177521
  derived and/or modified CDS sequence (opt4) from neuraminidase__InfluenzaA__AEA73752

SEQ ID NO: 180620 - RNA, 1413 nt, Artificial Sequence; identical to SEQ ID NO: 180264
  derived and/or modified CDS sequence (opt4) from neuraminidase__InfluenzaA__AEA73763

SEQ ID NO: 180621 - RNA, 1410 nt, Artificial Sequence; identical to SEQ ID NO: 176798
  derived and/or modified CDS sequence (opt4) from neuraminidase__InfluenzaA__AEA73774

SEQ ID NO: 180622 - RNA, 1410 nt, Artificial Sequence; identical to SEQ ID NO: 176798
  derived and/or modified CDS sequence (opt4) from neuraminidase__InfluenzaA__AEA73784

SEQ ID NO: 180623 - RNA, 1410 nt, Artificial Sequence; identical to SEQ ID NO: 176798
  derived and/or modified CDS sequence (opt4) from neuraminidase__InfluenzaA__AEA73794

SEQ ID NO: 180624 - RNA, 1410 nt, Artificial Sequence; identical to SEQ ID NO: 176798
  derived and/or modified CDS sequence (opt4) from neuraminidase__InfluenzaA__AEA73804

SEQ ID NO: 180625 - RNA, 1410 nt, Artificial Sequence; identical to SEQ ID NO: 176798
  derived and/or modified CDS sequence (opt4) from neuraminidase__InfluenzaA__AEA73814

SEQ ID NO: 180626 - RNA, 1410 nt, Artificial Sequence; identical to SEQ ID NO: 176798
  derived and/or modified CDS sequence (opt4) from neuraminidase__InfluenzaA__AEA73824

SEQ ID NO: 180627 - RNA, 1410 nt, Artificial Sequence
  derived and/or modified CDS sequence (opt4) from neuraminidase__InfluenzaA__AEA73834
augaaccccaaccagaagaucaucaccaucggcagcaucugcaugaccaucggcauggccaaccugauccugcagaucggcaacaucaucagcaucuggaucagccacagcauccagcugggcaaccagaaccagaucgagaccugcaaccagagcgugaucaccuacgagaacaacaccugggugaaccagaccuacgugaacaucagcaacaccaacuucgccgccggccagagcguggugagcgugaagcuggccggcaacagcagccugugccccgugagcggcugggccaucuacagcaaggacaacagcaucagaaucggcagcaagggcgacguguucgugaucagagagcccuucaucagcugcagcccccuggagugcagaaccuucuuccugacccagggcgcccugcugaacgacaagcacagcaacggcaccaucaaggacagaagccccuacagaacccugaugagcugccccaucggcgaggugcccagccccuacaacagcagauucgagagcguggccuggagcgccagcgccugccacgacggcaucaacuggcugaccaucggcaucagcggccccgacaacggcgccguggccgugcugaaguacaacggcaucaucaccgacaccaucaagagcuggaagaacaacauccugagaacccaggagagcgagugcgccugcgugaacggcagcugcuucaccgugaugaccgacggccccagcgacggccaggccagcuacaagaucuucagaaucgagaagggcaagaucgugaagagcguggagaugaacgcccccaacuaccacuacgaggagugcagcugcuaccccgacagcagcgagaucaccugcgugugcagagacaacuggcacggcagcaacagacccugggugagcuucaaccagaaccuggaguaccagaucggcuacaucugcagcggcaucuucggcgacaaccccagacccaacgacaagaccggcagcugcggccccgugagcagcaacggcgccaacggcgugaagggcuucagcuucaaguacggcaacggcguguggaucggcagaaccaagagcaucagcagcagaaacggcuucgagaugaucugggaccccaacggcuggaccggcaccgacaacaacuucagcaucaagcaggacaucgugggcaucaacgaguggagcggcuacagcggcagcuucgugcagcaccccgagcugaccggccuggacugcaucagacccugcuucuggguggagcugaucagaggcagacccaaggagaacaccaucuggaccagcggcagcagcaucagcuucugcggcgugaacagcgacaccgugggcuggagcuggcccgacggcgccgagcugcccuucaccaucgacaaguga

SEQ ID NO: 180628 - RNA, 1410 nt, Artificial Sequence; identical to SEQ ID NO: 180160
  derived and/or modified CDS sequence (opt4) from neuraminidase__InfluenzaA__AEA73844

SEQ ID NO: 180629 - RNA, 1410 nt, Artificial Sequence; identical to SEQ ID NO: 176798
  derived and/or modified CDS sequence (opt4) from neuraminidase__InfluenzaA__AEA73854

SEQ ID NO: 180630 - RNA, 1410 nt, Artificial Sequence; identical to SEQ ID NO: 176798
  derived and/or modified CDS sequence (opt4) from neuraminidase__InfluenzaA__AEA73864

SEQ ID NO: 180631 - RNA, 1410 nt, Artificial Sequence; identical to SEQ ID NO: 178579
  derived and/or modified CDS sequence (opt4) from neuraminidase__InfluenzaA__AEA73874

SEQ ID NO: 180632 - RNA, 1410 nt, Artificial Sequence; identical to SEQ ID NO: 178579
  derived and/or modified CDS sequence (opt4) from neuraminidase__InfluenzaA__AEA73884

SEQ ID NO: 180633 - RNA, 1410 nt, Artificial Sequence; identical to SEQ ID NO: 180160
  derived and/or modified CDS sequence (opt4) from neuraminidase__InfluenzaA__AEA73894

SEQ ID NO: 180634 - RNA, 1410 nt, Artificial Sequence
  derived and/or modified CDS sequence (opt4) from neuraminidase__InfluenzaA__AEA73904
augaaccccaaccagaagaucaucaccaucggcagcgugugcaugaccaucggcauggccaaccuggugcugcagaucggcaacaucaucagcaucuggaucagccacagcauccagcugggcaaccagaaccagaucgagaccugcaaccagagcgugaucaccuacgagaacaacaccugggugaaccagaccuacgugaacaucagcaacaccaacuucgccgccggccagagcguggugagcgugaagcuggccggcaacagcagccugugccccgugagcggcugggccaucuacagcaaggacaacagcaucagaaucggcagcaagggcgacguguucgugaucagagagcccuucaucagcugcagcccccuggagugcagaaccuucuuccugacccagggcgcccugcugaacgacaagcacagcaacggcaccaucaaggacagaagccccuacagaacccugaugagcugccccaucggcgaggugcccagccccuacaacagcagauucgagagcguggccuggagcgccagcgccugccacgacggcaucaacuggcugaccaucggcaucagcggccccgacaacggcgccguggccgugcugaaguacaacggcaucaucaccgacaccaucaagagcuggagaaacaacauccugagaacccaggagagcgagugcgccugcgugaacggcagcugcuucaccgugaugaccgacggccccagcgacggccaggccagcuacaagaucuucagaaucgagaagggcaagaucgugaagagcguggagaugaacgcccccaacuaccacuacgaggagugcagcugcuaccccgacagcagcgagaucaccugcgugugcagagacaacuggcacggcagcaacagacccugggugagcuucaaccagaaccuggaguaccagaucggcuacaucugcagcggcaucuucggcgacaaccccagacccaacgacaagaccggcagcugcggccccgugagcagcaacggcgccaacggcgugaagggcuucagcuucaaguacggcaacggcguguggaucggcagaaccaagagcaucagcagcagaaacggcuucgagaugaucugggaccccaacggcuggaccggcaccgacaacaacuucagcaucaagcaggacaucaucggcaucaacgaguggagcggcuacagcggcagcuucgugcagcaccccgagcugaccggccuggacugcaucagacccugcuucuggguggagcugaucagaggcagacccaaggagaagaccaucuggaccagcggcagcagcaucagcuucugcggcgugaacagcgacaccgugggcuggagcuggcccgacggcgccgagcugcccuucaccaucgacaaguga

SEQ ID NO: 180635 - RNA, 1410 nt, Artificial Sequence; identical to SEQ ID NO: 176798
  derived and/or modified CDS sequence (opt4) from neuraminidase__InfluenzaA__AEA73914

SEQ ID NO: 180636 - RNA, 1410 nt, Artificial Sequence; identical to SEQ ID NO: 178579
  derived and/or modified CDS sequence (opt4) from neuraminidase__InfluenzaA__AEA73924

SEQ ID NO: 180637 - RNA, 1410 nt, Artificial Sequence; identical to SEQ ID NO: 180237
  derived and/or modified CDS sequence (opt4) from neuraminidase__InfluenzaA__AEA73934

SEQ ID NO: 180638 - RNA, 1410 nt, Artificial Sequence
  derived and/or modified CDS sequence (opt4) from neuraminidase__InfluenzaA__AEA73944
augaaccccaaccagaagaucaucaccaucggcagcgugugcaugaccaucggcauggccaaccugauccugcaggugggcaacaucaucagcaucuggaucagccacagcauccagcugggcaaccagaaccagaucgagaccugcaaccagagcgugaucaccuacgagaacaacaccugggugaaccagaccuacgugaacaucagcaacaccaacuucgccgccggccagagcguggugagcgugaagcuggccggcaacagcagccugugccccgugagcggcugggccaucuacagcaaggacaacagcaucagaaucggcagcaagggcgacguguucgugaucagagagcccuucaucagcugcagcccccuggagugcagaaccuucuuccugacccagggcgcccugcugaacgacaagcacagcaacggcaccaucaaggacagaagccccuacagaacccugaugagcugccccaucggcgaggugcccagccccuacaacagcagauucgagagcguggccuggagcgccagcgccugccacgacggcaucaacuggcugaccaucggcaucagcggccccgacaacggcgccguggccgugcugaaguacaacggcaucaucaccgacaccaucaagagcuggagaaacaacauccugagaacccaggagagcgagugcgccugcgugaacggcagcugcuucaccgugaugaccgacggccccagcgacggccaggccagcuacaagaucuucagaaucgagaagggcaagaucgugaagagcguggagaugaacgcccccaacuacuacuacgaggagugcagcugcuaccccgacagcagcgagaucaccugcgugugcagagacaacuggcacggcagcaacagacccugggugagcuucaaccagaaccuggaguaccagaucggcuacaucugcagcggcaucuucggcgacaaccccagacccaacgacaagaccggcagcugcggccccgugagcagcaacggcgccaacggcgugaagggcuucagcuucaaguacggcaacggcguguggaucggcagaaccaagagcaucagcagcagaaacggcuucgagaugaucugggaccccaacggcuggaccggcaccgacaacaacuucagcaucaagcaggacaucgugggcaucaacgaguggagcggcuacagcggcagcuucgugcagcaccccgagcugaccggccuggacugcaucagacccugcuucuggguggagcugaucagaggcagacccaaggagaacaccaucuggaccagcggcagcagcaucagcuucugcggcgugaacagcgacaccgugggcuggagcuggcccgacggcgccgagcugcccuucaccaucgacaaguga

SEQ ID NO: 180639 - RNA, 1410 nt, Artificial Sequence; identical to SEQ ID NO: 176798
  derived and/or modified CDS sequence (opt4) from neuraminidase__InfluenzaA__AEA73954

SEQ ID NO: 180640 - RNA, 1410 nt, Artificial Sequence; identical to SEQ ID NO: 176798
  derived and/or modified CDS sequence (opt4) from neuraminidase__InfluenzaA__AEA73964

SEQ ID NO: 180641 - RNA, 1410 nt, Artificial Sequence
  derived and/or modified CDS sequence (opt4) from neuraminidase__InfluenzaA__AEA73974
augaaccccaaccagaagaucaucaccaucggcagcgugugcaugaccaucggcauggccaaccugauccugcagaucggcaacaucaucagcaucuggaucagccacagcauccagcacggcaaccagaaccagaucgagaccugcaaccagagcgugaucaccuacgagaacaacaccugggugaaccagaccuacgugaacaucagcaacaccaacuucgccgccggccagagcguggugagcgugaagcuggccggcaacagcagccugugccccgugagcggcugggccaucuacagcaaggacaacagcaucagaaucggcagcaagggcgacguguucgugaucagagagcccuucaucagcugcagcccccuggagugcagaaccuucuuccugacccagggcgcccugcugaacgacaagcacagcaacggcaccaucaaggacagaagccccuacagaacccugaugagcugccccaucggcgaggugcccagccccuacaacagcagauucgagagcguggccuggagcgccagcgccugccacgacggcaucaacuggcugaccaucggcaucagcggccccgacaacggcgccguggccgugcugaaguacaacggcaucaucaccgacaccaucaagagcuggagaaacaacauccugagaacccaggagagcgagugcgccugcgugaacggcagcugcuucaccgugaugaccgacggccccagcgacggccaggccagcuacaagaucuucagaaucgagaagggcaagaucgugaagagcguggagaugaacgcccccaacuaccacuacgaggagugcagcugcuaccccgacagcagcgagaucaccugcgugugcagagacaacuggcacggcagcaacagacccugggugagcuucaaccagaaccuggaguaccagaucggcuacaucugcagcggcaucuucggcgacaaccccagacccaacgacaagaccggcagcugcggccccgugagcagcaacggcgccaacggcgugaagggcuucagcuucaaguacggcaacggcguguggaucggcagaaccaagagcaucagcagcagaaacggcuucgagaugaucugggaccccaacggcuggaccggcaccgacaacaacuucagcaucaagcaggacaucgugggcaucaacgaguggagcggcuacagcggcagcuucgugcagcaccccgagcugaccggccuggacugcaucagacccugcuucuggguggagcugaucagaggcagacccaaggagaacaccaucuggaccagcggcagcagcaucagcuucugcggcgugaacagcgacaccgugggcuggagcuggcccgacggcgccgagcugcccuucaccaucgacaaguga

SEQ ID NO: 180642 - RNA, 1410 nt, Artificial Sequence; identical to SEQ ID NO: 176798
  derived and/or modified CDS sequence (opt4) from neuraminidase__InfluenzaA__AEA73984

SEQ ID NO: 180643 - RNA, 1410 nt, Artificial Sequence; identical to SEQ ID NO: 178149
  derived and/or modified CDS sequence (opt4) from neuraminidase__InfluenzaA__AEA73994

SEQ ID NO: 180644 - RNA, 1410 nt, Artificial Sequence
  derived and/or modified CDS sequence (opt4) from neuraminidase__InfluenzaA__AEA74004
augaaccccaacaagaagaucaucaucaucggcagcgugugcaugaccaucggcauggccaaccugauccugcagaucggcaacaucaucagcaucuggaucagccacagcauccagcugggcaaccagaaccagaucgagaccugcaaccagagcgugaucaccuacgagaacaacaccugggugaaccagaccuacgugaacaucagcaacaccaacuucgccgccggccagagcguggugagcgugaagcuggccggcaacagcagccugugccccgugagcggcugggccaucuacagcaaggacaacagcaucagaaucggcagcaagggcgacguguucgugaucagagagcccuucaucagcugcagcccccuggagugcagaaccuucuuccugacccagggcgcccugcugaacgacaagcacagcaacggcaccaucaaggacagaagccccuacagaacccugaugagcugccccaucggcgaggugcccagccccuacaacagcagauucgagagcguggccuggagcgccagcgccugccacgacggcaucaacuggcugaccaucggcaucagcggccccgacaacggcgccguggccgugcugaaguacaacggcaucaucaccgacaccaucaagagcuggagaaacaacauccugagaacccaggagagcgagugcgccugcgugaacggcagcugcuucaccgugaugaccgacggccccagcgacggccaggccagcuacaagaucuucagaaucgagaagggcaagaucgugaagagcguggagaugaacgcccccaacuaccacuacgaggagugcagcugcuaccccgacagcagcgagaucaccugcgugugcagagacaacuggcacggcagcaacagacccugggugagcuucaaccagaaccuggaguaccagaucggcuacaucugcagcggcaucuucggcgacaaccccagacccaacgacaagaccggcagcugcggccccgugagcagcaacggcgccaacggcgugaagggcuucagcuucaaguacggcaacggcguguggaucggcagaaccaagagcaucagcagcagaaacggcuucgagaugaucugggaccccaacggcuggaccggcaccgacaacaacuucagcaucaagcaggacaucgugggcaucaacgaguggagcggcuacagcggcagcuucgugcagcaccccgagcugaccggccuggacugcaucagacccugcuucuggguggagcugaucagaggcagacccaaggagaacaccaucuggaccagcggcagcagcaucagcuucugcggcgugaacagcgacaccgugggcuggagcuggcccgacggcgccgagcugcccuucaccaucgacaaguga

SEQ ID NO: 180645 - RNA, 1410 nt, Artificial Sequence; identical to SEQ ID NO: 177975
  derived and/or modified CDS sequence (opt4) from neuraminidase__InfluenzaA__AEA74014

SEQ ID NO: 180646 - RNA, 1410 nt, Artificial Sequence; identical to SEQ ID NO: 177975
  derived and/or modified CDS sequence (opt4) from neuraminidase__InfluenzaA__AEA74024

SEQ ID NO: 180647 - RNA, 1410 nt, Artificial Sequence; identical to SEQ ID NO: 176798
  derived and/or modified CDS sequence (opt4) from neuraminidase__InfluenzaA__AEA74032

SEQ ID NO: 180648 - RNA, 1410 nt, Artificial Sequence; identical to SEQ ID NO: 176798
  derived and/or modified CDS sequence (opt4) from neuraminidase__InfluenzaA__AEA74034

SEQ ID NO: 180649 - RNA, 1410 nt, Artificial Sequence
  derived and/or modified CDS sequence (opt4) from neuraminidase__InfluenzaA__AEA77302
augaaccccaaccagaagaucaucaccaucggcagcgugagccugaccaucagcaccaucugcuucuucaugcagaucgccauccugaucaccaccgugacccugcacuucaagcaguacgaguucaacagcccccccaacaaccaggugaugcugugcgagcccaccaucaucgagagaaacaucaccgagaucguguaccugaccaacaccaccaucgagaaggagaagugccccaagcuggccgaguacagaaacuggagcaagccccagugcgacaucaccggcuucgcccccuucagcaaggacaacagcaucagacugagcgccggcggcgacaucugggugaccagagagcccuacgugagcugcgaccccgacaagugcuaccaguucgcccugggccagggcaccacccugaacaacgugcacagcaacaacaccgugagagacagaacccccuacagaacccugcugaugaacgagcugggcgugcccuuccaccugggcaccaagcaggugugcaucgccuggagcagcagcagcugccacgacggcaaggccuggcugcacgugugcaucaccggcgacgacaagaacgccaccgccagcuucaucuacaacggcagacugguggacagcguggugagcuggagcaaggagauccugagaacccaggagagcgagugcgugugcaucaacggcaccugcaccguggugaugaccgacggcagcgccagcggcaaggccgacaccaagauccuguucaucgaggagggcaagaucgugcacaccagcacccugagcggcagcgcccagcacguggaggagugcagcugcuaccccagauaccccggcgugagaugcgugugcagagacaacuggaagggcagcaacagacccaucguggacaucaacaucaaggaccacagcaucgugagcagcuacgugugcagcggccuggugggcgacacccccaagaagaacgacagcagcagcagcagccacugccuggaccccaacaacgaggagggcggccacggcgugaagggcugggccuucgacgacggcaacgacguguggaugggcagaaccaucagcgagaagagcagacugggcuacgagaccuucaaggugaucgagggcuggagcaaccccaagagcaagcugcagaucaacagacaggugaucguggacagaggcaacagaagcggcuacagcggcaucuucagcguggagggcaagagcugcaucaacagaugcuucuacguggagcugaucagaggcagaaaggaggagaccgaggugcuguggaccagcaacagcaucgugguguucugcggcaccagcggcaccuacggcaccggcagcuggcccgacggcgccgacaucaaccugaugcccaucuga

SEQ ID NO: 180650 - RNA, 1410 nt, Artificial Sequence; identical to SEQ ID NO: 180317
  derived and/or modified CDS sequence (opt4) from neuraminidase__InfluenzaA__AEB21318

SEQ ID NO: 180651 - RNA, 1410 nt, Artificial Sequence
  derived and/or modified CDS sequence (opt4) from neuraminidase__InfluenzaA__AEB21328
augaaccccaaccagaagaucaucaccaucggcagcgugugcaugaccaucggcauggccaaccugauccugcagaucggcaacaucaucagcaucuggaucagccacagcauccagcugggcaaccagagccagaucgagaccugcaaccagagcgugaucaccuacgagaacaacaccugggugaaccagaccuacgugaacaucagcaacaccaacuucgccgccggccagagcguggugagcgugaagcuggccggcaacagcagccugugccccgugagcggcugggccaucuacagcaaggacaacagcaucagaaucggcagcaagggcgacguguucgugaucagagagcccuucaucagcugcagcccccuggagugcagaaccuucuuccugacccagggcgcccugcugaacgacaagcacagcaacggcaccaucaaggacagaagccccuacagaacccugaugagcugccccaucggcgaggugcccagccccuacaacagcagauucgagagcguggccuggagcgccagcgccugccacgacggcuucaacuggcugaccaucggcaucagcggccccgacaacggcgccguggccgugcugaaguacaacggcaucaucaccgacaccaucaagagcuggagaaacaacauccugagaacccaggagagcgagugcgccugcgugaacggcagcugcuucaccaucaugaccgacggccccagcgacggccaggccagcuacaagaucuucagaaucgagaagggcaagaucgugaagagcguggagaugaacgcccccaacuaccacuacgaggagugcagcugcuaccccgacagcagcgagaucaccugcgugugcagagacaacuggcacggcagcaacagacccugggugagcuucaaccagaaccuggaguaccagaucggcuacaucugcagcggcaucuucggcgacaaccccagacccaacgacaagaccggcagcugcggccccgugagcagcaacggcgccaacggcgugaagggcuucagcuucaaguacggcaacggcguguggaucggcagaaccaagagcaucagcagcagaaagggcuucgagaugaucugggaccccaacggcuggaccggcaccgacaacaacuucagcaucaagcaggacaucgugggcaucaacgaguggagcggcuacagcggcagcuucgugcagcaccccgagcugaccggccuggacugcaucagacccugcuucuggguggagcugaucagaggcagacccaaggagaacaccaucuggaccagcggcagcagcaugagcuucugcggcgugaacagcgacaccgugggcuggagcuggcccgacggcgccgagcugcccuucaccaucgacaaguga

SEQ ID NO: 180652 - RNA, 1410 nt, Artificial Sequence; identical to SEQ ID NO: 180317
  derived and/or modified CDS sequence (opt4) from neuraminidase__InfluenzaA__AEB21340

SEQ ID NO: 180653 - RNA, 1410 nt, Artificial Sequence
  derived and/or modified CDS sequence (opt4) from neuraminidase__InfluenzaA__AEB21350
augaaccccaaccagaagaucaucaccaucggcagcgugugcaugaccaucggcauggccaaccugauccugcagaucggcaacaucaucagcaucuggaucagccacagcauccagcugggcaaccagagccagaucgagaccugcaaccagagcgugaucaccuacgagaacaacaccugggugaaccagaccuacgugaacaucagcaacaccaacuucgccgccggccagagcguggugagcgugaagcuggccggcaacagcagccugugccccgugagcggcugggccaucuacagcaaggacaacagcaucagaaucggcagcaagggcgacguguucgugaucagagagcccuucaucagcugcagccccagcgagugcagaaccuucuuccugacccagggcgcccugcugaacgacaagcacagcaacggcaccaucaaggacagaagccccuacagaacccugaugagcugccccaucggcgaggugcccagccccuacaacagcagauucgagagcguggccuggagcgccagcgccugccacgacggcaucaacuggcugaccaucggcaucagcggccccgacaacggcgccguggccgugcugaaguacaacggcaucaucaccgacaccaucaagagcuggagaaacaacauccugagaacccaggagagcgagugcgccugcgugaacggcagcugcuucaccaucaugaccgacggccccagcgacggccaggccagcuacaagaucuucagaaucgagaagggcaagaucgugaagagcguggagaugaacgcccccaacuaccacuacgaggagugcagcugcuaccccgacagcagcgagaucaccugcgugugcagagacaacuggcacggcagcaacagacccugggugagcuucaaccagaaccuggaguaccagaucggcuacaucugcagcggcaucuucggcgacaaccccagacccaacgacaagaccggcagcugcggccccgugagcagcaacggcgccaacggcgugaagggcuucagcuucaaguacggcaacggcguguggaucggcagaaccaagagcaucaucagcagaaagggcuucgagaugaucugggaccccaacggcuggaccggcaccgacaacaacuucagcaucaagcaggacaucgugggcaucaacgaguggagcggcuacagcggcagcuucgugcagcaccccgagcugaccggccuggacugcaucagacccugcuucuggguggagcugaucagaggcagacccaaggagaacaccaucuggaccagcggcagcagcaucagcuucugcggcgugaacagcgacaccgugggcuggagcuggcccgacggcgccgagcugcccuucaccaucgacaaguga

SEQ ID NO: 180654 - RNA, 1410 nt, Artificial Sequence; identical to SEQ ID NO: 180317
  derived and/or modified CDS sequence (opt4) from neuraminidase__InfluenzaA__AEB21360

SEQ ID NO: 180655 - RNA, 1410 nt, Artificial Sequence; identical to SEQ ID NO: 177665
  derived and/or modified CDS sequence (opt4) from neuraminidase__InfluenzaA__AEB40209

SEQ ID NO: 180656 - RNA, 1410 nt, Artificial Sequence; identical to SEQ ID NO: 176659
  derived and/or modified CDS sequence (opt4) from neuraminidase__InfluenzaA__AEB66898

SEQ ID NO: 180657 - RNA, 1413 nt, Artificial Sequence
  derived and/or modified CDS sequence (opt4) from neuraminidase__InfluenzaA__AEB71103
augaaccccaaccagaagaucaucaccaucggcagcgugagccugggccuggugguguucaacgugcugcugcacguggugagcaucaucgugaccgugguggugcugggcaacgacggcggcaacggcaucugcaacggcaccguggugaaggaguacaacgagaccgugagaaucgagagagugauccaguggcacaacaccagcgugguggaguacauccccuaccugaacggcggcaccuacaccaacaacaccgagagcgugugcgacgugaagggcuucgcccccuucagcaaggacaacggcgugagaaucggcagcagaggccacguguucgugaucagagagcccuucgugagcugcagccccagagagugcagaaccuucuuccugacccagggcagccugcugaacgacaagcacagcaacggcaccgugaaggacagaagccccuucaagacccugaugagcguggaggugggccagagccccaacguguaccaggccagauucgaggccguggccuggagcgccaccgccugccacgacggcaagaaguggaugaccaucggcgugaccggccccgacagcaaggccguggccguggugcacuacggcggcgugcccaccgacaucaucaacagcugggccggcgacauccugagaacccaggagagcagcugcaccugcauccagggcgacugcuacugggugaugaccgacggccccgccaacagacaggcccaguacagaaucuacaagagcaaccagggcaagaucaucggccagauggacaucaacuucaacggcggccacaucgaggagugcagcugcuaccccaacgacggcaagguggagugcgugugcagagacaacuggaccggcaccaacagacccgugcuggugaucagccccgaccugagcuacaaggugggcuaccugugcgccggccugcccagcgacacccccagaggcgaggacgcccaguucagcggcagcugcaccagccccgugggcggccagggcuacggcgugaagggcuucggcuucagacagggcaacgacguguggaugggcagaaccaucagcagaaccagcagaagcggcuucgaggugaucagagugaagaacggcuggacccagaccagcaaggagcagaucagaaagcagguggugguggacaaccugaacuggagcggcuacagcggcagcuucacccugcccaucgagcugagcggcaagagcugccuggugcccugcuucuggguggagaccaucagaggcaagcccgaggagaagaccaucuggaccagcagcagcagcaucgugaugugcggcguggacuacgagguggccgacuggagcuggcacgacggcgccauccugcccuucgacaucgacaagauguga

SEQ ID NO: 180658 - RNA, 1413 nt, Artificial Sequence; identical to SEQ ID NO: 178990
  derived and/or modified CDS sequence (opt4) from neuraminidase__InfluenzaA__AEB71899

SEQ ID NO: 180659 - RNA, 1410 nt, Artificial Sequence
  derived and/or modified CDS sequence (opt4) from neuraminidase__InfluenzaA__AEB71910
augaaccccaaccagaagaucaucaccaucggcagcgugugcaugaccaucggcauggccaaccugauccugcagaucggcaacaucaucagcaucuggaucagccacagcauccagcugggcaaccagaaccagaucgagaccugcaaccagagcgugaucaccuacgagaacaacaccugggugaaccagaccuacgugaacaucagcaacaccuacuucgccgccggccagagcguggugagcgugaagcuggccggcaacagcagccugugccccgugagcggcugggccaucuacagcaaggacaacagcaucagaaucggcagcaagggcgacguguucgugaucagagagcccuucaucagcugcagcccccuggagugcagaaccuucuuccugacccagggcgcccugcugaacgacaagcacagcaacggcaccaucaaggacagaagccccuacagaacccugaugagcugccccaucggcgaggugcccagccccuacaacagcagauucgagagcguggccuggagcgccagcgccugccacgacggcaucaacuggcugaccaucggcaucagcggccccgacaacggcgccguggccgugcugaaguacaacggcaucaucaccgacaccaucaagagcuggagaaacaacauccugagaacccaggagagcgagugcgccugcgugaacggcagcugcuucaccgugaugaccgacggccccagcgacggccaggccagcuacaagaucuucagaaucgagaagggcaagaucgugaagagcguggagaugaacgcccccaacuaccacuacgaggagugcagcugcuaccccgacagcagcgagaucaccugcgugugcagagacaacuggcacggcagcaacagacccugggugagcuucaaccagaaccuggaguaccagaucggcuacaucugcagcggcaucuucggcgacaaccccagacccaacgacaagaccggcagcugcggccccgugagcagcaacggcgccaacggcgugaagggcuucagcuucaaguacggcaacggcguguggaucggcagaaccaagagcaucagcagcagaaacggcuucgagaugaucugggaccccaacggcuggaccggcaccgacaacaacuucagcaucaagcaggacaucgugggcaucaacgaguggagcggcuacagcggcagcuucgugcagcaccccgagcugaccggccuggacugcaucagacccugcuucuggguggagcugaucagaggcagacccaaggagaacaccaucuggaccagcggcagcagcaucagcuucugcggcgugaacagcgacaccgugggcuggagcuggcccgacggcgccgagcugcccuucaccaucgacaaguga

SEQ ID NO: 180660 - RNA, 1410 nt, Artificial Sequence; identical to SEQ ID NO: 176798
  derived and/or modified CDS sequence (opt4) from neuraminidase__InfluenzaA__AEB71919

SEQ ID NO: 180661 - RNA, 1410 nt, Artificial Sequence; identical to SEQ ID NO: 178544
  derived and/or modified CDS sequence (opt4) from neuraminidase__InfluenzaA__AEB71928

SEQ ID NO: 180662 - RNA, 1410 nt, Artificial Sequence
  derived and/or modified CDS sequence (opt4) from neuraminidase__InfluenzaA__AEB71939
augaaccccaaccagaagaucaucaccaucggcagcgugagccugaccaucagcgccaucugcuucuucaugcagaucgccauccugaucaccaccgugacccugcacuucaagcaguacgaguucaacagcccccccaacaaccaggugaugcugugcgagcccaccaucaucgagagaaacaucaccgagaucguguaccugaccaacaccaccaucgagaaggagaucugccccaagcuggccgaguacagaaacuggagcaagccccagugcgacaucaccggcuucgcccccuucagcaaggacaacagcaucagacugagcgccggcggcgacaucugggugaccagagagcccuacgugagcugcgaccccgacaagugcuaccaguucgcccugggccagggcaccacccugaacaacgugcacagcaacaacaccgugagagacagaacccccuacagaacccugcugaugaacgagcugggcgugcccuuccaccugggcaccaagcaggugugcaucgccuggagcagcagcagcugccacgacggcaaggccuggcugcacgugugcaucaccggcgacgacaagaacgccaccgccagcuucaucuacaacggcagacugguggacagcguggugagcuggagcaaggagauccugagaacccaggagagcgagugcgugugcaucaacggcaccugcaccguggugaugaccgacggcagcgccagcggcaaggccgacaccaagauccuguucaucgaggagggcaagaucgugcacaccagcacccugagcggcagcgcccagcacguggaggagugcagcugcuaccccagauaccccggcgugagaugcgugugcagagacaacuggaagggcagcaacagacccaucguggacaucaacaucaaggaccacagcaucgugagcagcuacgugugcagcggccuggugggcgacacccccagaaagaacgacagcagcagcagcagccacugccuggaccccaacaacgaggagggcggccacggcgugaagggcugggccuucgacgacggcaacgacguguggaugggcagaaccaucagcgagaagagcagacugggcuacgagaccuucaaggugaucgagggcuggagcaaccacaagagcaagcugcagaucaacagacaggugaucguggacagaggcaacagaagcggcuacagcggcaucuucagcguggagggcaagagcugcaucaacagaugcuucuacguggagcugaucagaggcagaaaggaggagaccgaggugcuguggaccagcaacagcaucgugguguucugcggcaccagcggcaccuacggcaccggcagcuggcccgacggcgccgaccugaaccugaugcccaucuga

SEQ ID NO: 180663 - RNA, 1410 nt, Artificial Sequence
  derived and/or modified CDS sequence (opt4) from neuraminidase__InfluenzaA__AEB71950
augaaccccaaccagaagaucaucaccaucggcagcgugagccugaccaucagcaccaucugcuucuucaugcagaucgccauccugaucaccaccgugacccugcacuucaagcaguacgaguucaacagcccccccaacaaccaggugaugcugugcgagcccaccaucaucgagagaaacaucaccgagaucguguaccugaccaacaccaccaucgagaaggagaucugccccaagcuggccgaguacagaaacuggagcaagccccagugcgacaucaccggcuucgcccccuucagcaaggacaacagcaucagacugagcgccggcggcgacaucugggugaccagagagcccuacgugagcugcgaccccgacaagugcuaccaguucgcccugggccagggcaccacccugaacaacgugcacagcaacaacaccgugagagacagaacccccuacagaacccugcugaugaacgagcugggcgugcccuuccaccugggcaccaagcaggugugcaucgccuggagcagcagcagcugccacgacggcaaggccuggcugcacgugugcaucaccggcgacgacaagaacgccaccgccagcuucaucuacaacggcagacugguggacagcguggugagcuggagcaaggagauccugagaacccaggagagcgagugcgugugcaucaacggcaccugcaccguggugaugaccgacggcagcgccagcggcaaggccgacaccaagauccuguucaucgaggagggcaagaucgugcacaccagcacccugagcggcagcgcccagcacguggaggagugcagcugcuaccccagauaccccggcgugagaugcgugugcagagacaacuggaagggcagcaacagacccaucguggacaucaacaucaaggaccacagcaucgugagcagcuacgugugcagcggccuggugggcgacacccccagaaagaacgacagcagcagcagcagccacugccuggaccccaacaacgaggagggcgaccacggcgugaagggcugggccuucgacgacggcaacgacguguggaugggcagaaccaucagcgagaagagcagacugggcuacgagaccuucaaggugaucgagggcuggagcaaccacaagagcaagcugcagaucaacagacaggugaucguggacagaggcaacagaagcggcuacagcggcaucuucagcguggagggcaagagcugcaucaacagaugcuucuacguggagcugaucagaggcagaaaggaggagaccgaggugcuguggaccagcaacagcaucgugguguucugcggcaccagcggcaccuacggcaccggcagcuggcccgacggcgccgaccugaaccugaugcccaucuga

SEQ ID NO: 180664 - RNA, 1413 nt, Artificial Sequence; identical to SEQ ID NO: 179997
  derived and/or modified CDS sequence (opt4) from neuraminidase__InfluenzaA__AEB71961

SEQ ID NO: 180665 - RNA, 1410 nt, Artificial Sequence
  derived and/or modified CDS sequence (opt4) from neuraminidase__InfluenzaA__AEB71972
augaaccccaaccagaagaucaucaccaucggcagcgugagccugaccaucagcaccaucugcuucuucaugcagaucgccauccugaucaccaccgugacccugcacuucaagcaguacgaguucaacagcccccccaacaaccaggugaugcugugcgagcccaccaucaucgagagaaacaucaccgagaucguguaccugaccaacaccaccaucgugaaggagaucugccccaagcuggccgaguacagaaacuggagcaagccccagugcgacaucaccggcuucgcccccuucagcaaggacaacagcaucagacugagcgccggcggcgacaucugggugaccagagagcccuacgugagcugcgaccccgacaagugcuaccaguucgcccugggccagggcaccacccugaacaacgugcacagcaacaacaccgugagagacagaacccccuacagaacccugcugaugaacgagcugggcgugcccuuccaccugggcaccaagcaggugugcaucgccuggagcagcagcagcugccacgacggcaaggccuggcugcacgugugcaucaccggcgacgacaagaacgccaccgccagcuucaucuacaacggcagacugguggacagcguggugagcuggagcaaggagauccugagaacccaggagagcgagugcgugugcaucaacggcaccugcaccguggugaugaccgacggcagcgccagcggcaaggccgacaccaagauccuguucaucgaggagggcaagaucgugcacaccagcacccugagcggcagcgcccagcacguggaggagugcagcugcuaccccagauaccccggcgugagaugcgugugcagagacaacuggaagggcagcaacagacccaucguggacaucaacaucaaggaccacagcaucgugagcagcuacgugugcagcggccuggugggcgacacccccagaaagaacgacagcagcagcagcagccacugccuggaccccaacaacgaggagggcggccacggcgugaagggcugggccuucgacgacggcaacgacguguggaugggcagaaccaucagcgagaagagcagacugggcuacgagaccuucaaggugaucgagggcuggagcaaccccaagagcaagcugcagaucaacagacaggugaucguggacagaggcaacagaagcggcuacagcggcaucuucagcguggagggcaagagcugcaucaacagaugcuucuacguggagcugaucagaggcagaaaggaggagaccgaggugcuguggaccagcaacagcaucgugguguucugcggcaccagcggcaccuacggcaccggcagcuggcccgacggcgccgacaucaaccugaugcccaucuga

SEQ ID NO: 180666 - RNA, 1410 nt, Artificial Sequence
  derived and/or modified CDS sequence (opt4) from neuraminidase__InfluenzaA__AEB71983
augaaccccaaccagaagaucaucaccaucggcagcgugagccugaccaucagcaccaucugcuucuucaugcagaucgccauccugaucaccaccgugacccugcacuucaagcaguacgaguucaacagcccccccaacaaccaggugaugcugugcgagcccaccaucaucgagagaaacaucaccgagaucguguaccugaccaacaccaccaucgagaaggagaucugccccaagcuggccgaguacagaaacuggagcaagccccagugcgacaucaccggcuucgcccccuucagcaaggacaacagcaucagacugagcgccggcggcgacaucugggugaccagagagcccuacgugagcugcgaccccgacaagugcuaccaguucgcccugggccagggcaccacccugaacaacgugcacagcaacaacaccgugagagacagaacccccuacagaacccugcugaugaacgagcugggcgugcccuuccaccugggcaccaagcaggugugcaucgccuggagcagcagcagcugccacgacggcaaggccuggcugcacgugugcaucaccggcgacgacaagaacgccaccgccagcuucaucuacaacggcagacugguggacagcguggugagcuggagcaaggagauccugagaacccaggagagcgagugcgugugcaucaacggcaccugcaccguggugaugaccgacggcagcgccagcggcaaggccgacaccaagauccuguucaucgaggagggcaagaucgugcacaccagcacccugagcggcagcgcccagcacguggaggagugcagcugcuaccccagauaccccggcgugagaugcgugugcagagacaacuggaagggcagcaacagacccaucguggacaucaacaugaaggaccacagcaucgugagcagcuacgugugcagcggccuggugggcgacacccccagaagaaacgacagcagcagcagcagccacugccuggaccccaacaacgaggagggcggccacggcgugaagggcugggccuucgacgacggcaacgacguguggaugggcagaaccaucagcgagaagagcagacugggcuacgagaccuucaaggugaucgagggcuggagcaaccccaagagcaagcugcagaucaacagacaggugaucguggacagaggcaacagaagcggcuacagcggcaucuucagcguggagggcaagagcugcaucaacagaugcuucuacguggagcugaucagaggcagaaaggaggagaccgaggugcuguggaccagcaacagcaucgugguguucugcggcaccagcggcaccuacggcaccggcagcuggcccgacggcgccgacaucaaccugaugcccaucuga

SEQ ID NO: 180667 - RNA, 1413 nt, Artificial Sequence
  derived and/or modified CDS sequence (opt4) from neuraminidase__InfluenzaA__AEB71995
augaaccccaaccagaagaucaucaccaucggcagcaucagcaucgccaucggcaucaucagccugaugcugcagaucggcaacaucaucagcaucugggccagccacagcauccagaccggcagccagaacaacaccggcaucugcaaccagagaaucaucaccuacgagaacagcaccugggugaaccacaccuacaucaacaucaacaacaccaacgugguggccggcgaggacaagaccagcgugacccuggccggcaacagcagccugugcagcaucagcggcugggccaucuacaccaaggacaacagcaucagaaucggcagcaagggcgacguguucgugaucagagagcccuucaucagcugcagccaccuggagugcagaaccuucuuccugacccagggcgcccugcugaacgacaagcacagcaacggcaccgugaaggacagaagccccuacagagcccugaugagcugcccccugggcgaggcccccagccccuacaacagcaaguucgagagcguggccuggagcgccagcgccugccacgacggcaugggcuggcugaccaucggcaucagcggccccgacaacggcgccguggccgugcugaaguacaacggcaucaucaccggcaccaucaagagcuggaagaagcagauccugagaacccaggagagcgagugcgugugcaugaacggcagcugcuucaccaucaugaccgacggccccagcaacaaggccgccagcuacaagaucuucaagaucgagaagggcaaggugaccaagagcaucgagcugaacgcccccaacuucuacuacgaggagugcagcugcuaccccgacaccggcaucgugaugugcgugugcagagacaacuggcacggcagcaacagacccugggugagcuucaaccagaaccuggacuaccagaucggcuacaucugcagcggcguguucggcgacaaccccagacccgaggacggcgagggcagcugcaaccccgugaccgugaacggcgccgacggcgugaagggcuucagcuacaaguacggcaacggcguguggaucggcagaaccaagagcaacagacugagaaagggcuucgagaugaucugggaccccaacggcuggaccaacaccgacagcgacuucagcgugaagcaggacgugguggccaucaccgacuggagcggcuacagcggcagcuucgugcagcaccccgagcugaccggccuggagugcaucagacccugcuucuggguggagcuggugagaggccugcccagagagaacaccaccaucuggaccagcggcagcagcaucagcuucugcggcgugaacagcgacaccgccaacuggagcuggcccgacggcgccgagcugcccuucaccaucgacaaguga

SEQ ID NO: 180668 - RNA, 1413 nt, Artificial Sequence; identical to SEQ ID NO: 180265
  derived and/or modified CDS sequence (opt4) from neuraminidase__InfluenzaA__AEC13316

SEQ ID NO: 180669 - RNA, 1410 nt, Artificial Sequence; identical to SEQ ID NO: 176798
  derived and/or modified CDS sequence (opt4) from neuraminidase__InfluenzaA__AEC53262

SEQ ID NO: 180670 - RNA, 1410 nt, Artificial Sequence; identical to SEQ ID NO: 176798
  derived and/or modified CDS sequence (opt4) from neuraminidase__InfluenzaA__AEC53272

SEQ ID NO: 180671 - RNA, 1410 nt, Artificial Sequence; identical to SEQ ID NO: 176798
  derived and/or modified CDS sequence (opt4) from neuraminidase__InfluenzaA__AEC53282

SEQ ID NO: 180672 - RNA, 1410 nt, Artificial Sequence; identical to SEQ ID NO: 176798
  derived and/or modified CDS sequence (opt4) from neuraminidase__InfluenzaA__AEC53292

SEQ ID NO: 180673 - RNA, 1410 nt, Artificial Sequence
  derived and/or modified CDS sequence (opt4) from neuraminidase__InfluenzaA__AEC53302
augaaccccaaccagaagaucaucaccaucggcagcgugugcaugaccaucggcauggccaaccugauccugcagaucggcaacaucaucagcaucuggaucagccacagcauccagcugggcaaccagaaccagaucgagaccugcaaccagagcgugaucaccuacgagaacaacaccugggugaaccagaccuacgugaacaucagcaacaccaacuucgccgccggccagagcguggugagcgugaagcuggccggcaacagcagccugugccccgugagcggcugggccaucuacagcaaggacaacagcaucagaaucggcagcaagggcgacguguucgugaucagagagcccuucaucagcugcagcccccuggagugcagaaccuucuuccugacccagggcgcccugcugaacgacaagcacagcaacggcaccaucaaggacagaagccccuacagaacccugaugagcugccccaucggcgaggugcccagccccuacaacagcagauucgagagcguggccuggagcgccagcgccugccacgacggcaucaacuggcugaccaucggcaucagcggccccgacaacggcgccguggccgugcugaaguacaacggcaucaucaccgacaucaucaagagcuggagaaacaacauccugagaacccaggagagcgagugcgccugcgugaacggcagcugcuucaccgugaugaccgacggccccagcgacggccaggccagcuacaagaucuucagaaucgagaagggcaagaucgugaagagcguggagaugaacgcccccaacuaccacuacgaggagugcagcugcuaccccgacagcagcgagaucaccugcgugugcagagacaacuggcacggcagcaacagacccugggugagcuucaaccagaaccuggaguaccagaucggcuacaucugcagcggcaucuucggcgacaaccccagacccaacgacaagaccggcagcugcggccccgugagcagcaacggcgccaacggcgugaagggcuucagcuucaaguacggcaacggcguguggaucggcagaaccaagagcaucagcagcagaaacggcuucgagaugaucugggaccccaacggcuggaccggcaccgacaacaacuucagcaucaagcaggacaucgugggcaucaacgaguggagcggcuacagcggcagcuucgugcagcaccccgagcugaccggccuggacugcaucagacccugcuucuggguggagcugaucagaggcagacccaaggagaacaccaucuggaccagcggcagcagcaucagcuucugcggcgugaacagcgacaccgugggcuggagcuggcccgacggcgccgagcugcccuucaccaucgacaaguga

SEQ ID NO: 180674 - RNA, 1410 nt, Artificial Sequence; identical to SEQ ID NO: 176798
  derived and/or modified CDS sequence (opt4) from neuraminidase__InfluenzaA__AEC53350

SEQ ID NO: 180675 - RNA, 1410 nt, Artificial Sequence; identical to SEQ ID NO: 177506
  derived and/or modified CDS sequence (opt4) from neuraminidase__InfluenzaA__AEC53407

SEQ ID NO: 180676 - RNA, 1410 nt, Artificial Sequence; identical to SEQ ID NO: 176798
  derived and/or modified CDS sequence (opt4) from neuraminidase__InfluenzaA__AEC53427

SEQ ID NO: 180677 - RNA, 1410 nt, Artificial Sequence; identical to SEQ ID NO: 177624
  derived and/or modified CDS sequence (opt4) from neuraminidase__InfluenzaA__AED99967

SEQ ID NO: 180678 - RNA, 1410 nt, Artificial Sequence; identical to SEQ ID NO: 176788
  derived and/or modified CDS sequence (opt4) from neuraminidase__InfluenzaA__AEE27161

SEQ ID NO: 180679 - RNA, 1410 nt, Artificial Sequence; identical to SEQ ID NO: 176798
  derived and/or modified CDS sequence (opt4) from neuraminidase__InfluenzaA__AEE27170

SEQ ID NO: 180680 - RNA, 1410 nt, Artificial Sequence; identical to SEQ ID NO: 176788
  derived and/or modified CDS sequence (opt4) from neuraminidase__InfluenzaA__AEE27180

SEQ ID NO: 180681 - RNA, 1410 nt, Artificial Sequence
  derived and/or modified CDS sequence (opt4) from neuraminidase__InfluenzaA__AEE27190
augaaccccaaccagaagaucaucaccaucggcagcgugugcaugaccaucggcauggccaaccugauccugcagaucggcaacaucaucagcaucuggaucagccacagcauccagcugggcaaccagaaccagaucgagaccugcaaccagagcgugaucaccuacgagaacaacaccugggugaaccagaccuacgugaacaucagcaacaccaacuucgccgccggccagagcguggugagcgugaagcuggccggcaacagcagccugugccccgugagcggcugggccaucuacagcaaggacaacagcgugagaaucggcagcaagggcgacguguucgugaucagagagcccuucaucagcugcagcccccuggagugcagaaccuucuuccugacccagggcgcccugcugaacgacaagcacagcaacggcaccaucaaggacagaagccccuacagaacccugaugagcugccccaucggcgaggugcccagccccuacaacagcagauucgagagcguggccuggagcgccagcgccugccacgacggcaucaacuggcugaccaucggcaucagcggccccgacaacggcgccguggccgugcugaaguacaacggcgugaucaccgacaccaucaagagcuggagaaacaacauccugagaacccaggagagcgagugcgccugcgugaacggcagcugcuucaccgugaugaccgacggccccagcaacggccaggccagcuacaagaucuucaagaucgagaagggcaagaucgugaagagcguggagaugaacgcccccaacuaccacuacgaggagugcagcugcuaccccgacagcagcgagaucaccugcgugugcagagacaacuggcacggcagcaacagacccugggugagcuucaaccagaaccuggaguaccagaucggcuacaucugcagcggcaucuucggcgacaaccccagacccaacgacaagaccggcagcugcggccccgugagcagcaacggcgccaacggcgugaagggcuucagcuucaaguacggcaacggcguguggaucggcagaaccaagagcaucagcagcagaaacggcuucgagaugaucugggaccccaacggcuggaccggcaccgacaacaacuucagcaucaagcaggacaucgugggcaucaacgaguggagcggcuacagcggcagcuucgugcagcaccccgagcugaccggccuggacugcaucagacccugcuucuggguggagcugaucagaggcagacccaaggagaacaccaucuggaccagcggcagcagcaucagcuucugcggcgugaacagcgacaccgugggcuggagcuggcccgacggcgccgagcugcccuucaccaucgacaaguga

SEQ ID NO: 180682 - RNA, 1410 nt, Artificial Sequence; identical to SEQ ID NO: 178021
  derived and/or modified CDS sequence (opt4) from neuraminidase__InfluenzaA__AEE27200

SEQ ID NO: 180683 - RNA, 1410 nt, Artificial Sequence; identical to SEQ ID NO: 179857
  derived and/or modified CDS sequence (opt4) from neuraminidase__InfluenzaA__AEG64755

SEQ ID NO: 180684 - RNA, 1362 nt, Artificial Sequence
  derived and/or modified CDS sequence (opt4) from neuraminidase__InfluenzaA__AEG64765
augaaccccaaccagaagaucaucaccaucggcagcaucugcaugguggugggcaucaucagccugauccugcagaucggcaacaucaucagcaucuggaucagccacagcauccagaccggcaaccagaaccacaccggcaucugcaaccagggcaucaucaccuacaacgugguggccggccaggacagcaccagcgugauccugaccggcaacagcagccugugccccaucagaggcugggccauccacagcaaggacaacggcaucagaaucggcagcaagggcgacguguucgugaucagagagcccuucaucagcugcagccaccuggagugcagaaccuucuuccugacccagggcgcccugcugaacgacaagcacagcaacggcaccgugaaggacagaagccccuacagagcccugaugagcugccccgugggcgaggcccccagccccuacaacagcagauucgagagcguggccuggagcgccagcgccugccacgacggcaugggcuggcugaccaucggcaucagcggccccgacaacggcgccguggccgugcugaaguacaacggcaucaucaccgagaccaucaagagcuggagaaagaagauccugagaacccaggagagcgagugcaccugcgugaacggcagcugcuucaccaucaugaccgacggccccagcgacggccuggccagcuacaagaucuucaagaucgagaagggcaaggugaccaagagcaucgagcugaacgcccccaacagccacuacgaggagugcagcugcuaccccgacaccggcaaggugaugugcgugugcagagacaacuggcacggcagcaacagacccugggugagcuucgaccagaaccuggacuaccagaucggcuacaucugcagcggcguguucggcgacaaccccagacccaaggacggcaccggcagcugcggccccgugagcgccgacggcgccaacggcgugaagggcuucagcuacagauacggcaacggcguguggaucggcagaaccaagagcgacagcagcagacacggcuucgagaugaucugggaccccaacggcuggaccgagaccgacagcagauucagcgugagacaggacgugguggccaugaccgacagaagcggcuacagcggcagcuucgugcagcaccccgagcugaccggccuggacugcaugagacccugcuucuggguggagcugaucagaggcagacccgaggagaagaccaucuggaccagcggcagcaucaucagcuucugcggcgugaacagcgacaccguggacuggagcuggcccgacggcgccgagcugcccuucaccaucgacaaguga

SEQ ID NO: 180685 - RNA, 1410 nt, Artificial Sequence
  derived and/or modified CDS sequence (opt4) from neuraminidase__InfluenzaA__AEG64787
augaaccccaaccagaagaucaucaccaucggcagcgugugcaugaccaucggcauggccaaccugauccugcagaucggcaacaucaucagcaucuggaucagccacagcauccagcugggcaaccagaaccagaucgagaccugcaaccagagcgugaucaccuacgagaacaacaccugggugaaccagaccuacgugaacaucagcaacaccaacuucgccgccggccagagcguggugagcgugaagcuggccggcaacagcagccugugccccgugagcggcugggccaucuacagcaaggacaacagcaucagaaucggcagcaagggcgacguguucgugaucagagagcccuucaucagcugcagcccccuggagugcagaaccuucuuccugacccagggcgcccugcugaacgacaagcacagcaacggcaccaucaaggacagaagccccuacagaacccugaugagcugccccaucggcgaggugcccagccccuacaacagcagauucgagagcguggccuggagcgccagcgccugccacgacggcaucaacuggcugaccaucggcaucagcggccccgacaacggcgccguggccgugcugaaguacaacggcaucaucaccgacaccaucaagagcuggagaaacaacagacugagaacccaggagagcgagugcgccugcgugaacggcagcugcuucaccgugaugaccgacggccccagcgacggccaggccagcuacaagaucuucagaaucgagaagggcaagaucgugaagagcguggagaugaacgcccccaacuaccacuacgaggagugcagcugcuaccccgacagcagcgagaucaccugcgugugcagagacaacuggcacggcagcaacagacccugggugagcuucaaccagaaccuggaguaccagaucggcuacaucugcagcggcaucuucggcgacaaccccagacccaacgacaagaccggcagcugcggccccgugagcagcaacggcgccaacggcgugaagggcuucagcuucaaguacggcaacggcguguggaucggcagaaccaagagcaucagcagcagaaacggcuucgagaugaucugggaccccaacggcuggaccggcaccgacaacgacuucagcaucaagcaggacaucgugggcaucaacgaguggagcggcuacagcggcagcuucgugcagcaccccgagcugaccggccuggacugcaucagacccugcuucuggguggagcugaucagaggcagacccaaggagaacaccaucuggaccagcggcagcagcaucagcuucugcggcgugaacagcgacaccgugggcuggagcuggcccgacggcgccgagcugcccuucaccaucgacaaguga

SEQ ID NO: 180686 - RNA, 1410 nt, Artificial Sequence
  derived and/or modified CDS sequence (opt4) from neuraminidase__InfluenzaA__AEG64837
augaaccccaaccagaagaucaucaccaucggcagcgugagccugaccaucagcaccaucugcuucuucaugcagaucgccauccugaucaccaccgugacccugcacuucaagcaguacgaguucaacagcccccccaacaaccaggugaugcugugcgagcccaccaucaucgagagaaacaucaccgagaucguguaccugaccaacaccaccaucgagaaggagaucugccccaagcuggccgaguacagaaacuggagcaagccccagugcgacaucaccggcuucgcccccuucagcaaggacaacagcaucagacugagcgccggcggcgacaucugggugaccagagagcccuacgugagcugcgaccccgacaagugcuaccaguucgcccugggccagggcaccacccugaacaacgugcacagcaacaacaccgugagagacagaacccccuacagaacccugcugaugaacgagcugggcgugcccuuccaccugggcaccaagcaggugugcaucgccuggagcagcagcagcugccacgacggcaaggccuggcugcacgugugcaucaccggcgacgacaagaacgccaccgccagccugaucuacaacggcagacugguggacagcguggugagcuggagcaaggagauccugagaacccaggagagcgagugcgugugcaucaacggcaccugcaccguggugaugaccgacggcagcgccagcggcaaggccgacaccaagauccuguucaucgaggagggcaagaucgugcacaccagcacccugagcggcagcgcccagcacguggaggagugcagcugcuaccccagauaccccggcgugagaugcgugugcagagacaacuggaagggcagcaacagacccaucguggacaucaacaucaaggaccacagcaucgugagcagcuacgugugcagcggccuggugggcgacacccccagaaagaacgacagcagcagcagcagccacugccuggaccccaacaacgaggagggcggccacggcgugaagggcugggccuucgacgacggcaacgacguguggaugggcagaaccaucaacgagaccagcagacugggcuacgagaccuucaaggugaucgagggcuggagcaaccccaagagcaagcugcagaucaacagacaggugaucguggacagaggcaacagaagcggcuacagcggcaucuucagcguggagggcaagagcugcaucaacagaugcuucuacguggagcugaucagaggcagaaaggaggagaccgaggugcuguggaccagcaacagcaucgugguguucugcggcaccagcggcaccuacggcaccggcagcuggcccgacggcgccgaccugaaccugaugcccaucuga

SEQ ID NO: 180687 - RNA, 1410 nt, Artificial Sequence
  derived and/or modified CDS sequence (opt4) from neuraminidase__InfluenzaA__AEG64848
augaaccccaaccagaagaucaucaccaucggcagcgugagccugaccaucagcaccaucugcuucuucaugcagaucgccauccugaucaccaccgugacccugcacuucaagcaguacgaguucuacagcccccccaacaaccaggugaugcugugcgagcccaccaucaucgagagaaacaucaccgagaucguguaccugaccaacaccaccaucgagaaggagaucugccccaagcuggccgaguacagaaacuggcugaagccccagugcgacaucaccggcuucgcccccuucagcaaggacaacagcaucagacugagcgccggcggcgacaucugggugaccagagagcccuacgugagcugcgaccccgacaagugcuaccaguucgcccugggccagggcaccacccugaacaacgugcacagcaacaacaccgugagagacagaacccccuacagaacccugcugaugaacgagcugggcgugcccuuccaccugggcaccaagcaggugugcaucgccuggagcagcagcagcugccacgacggcaaggccuggcugcacgugugcaucaccggcgacgacaagaacgccaccgccagcuucaucuacaacggcagacugguggacagcguggugagcuggagcaaggagauccugagaacccaggagagcgagugcgugugcaucaacggcaccugcaccguggugaugaccgacggcagcgccagcggcaaggccgacaccaagauccuguucaucgaggagggcaagaucgugcacaccagcacccugagcggcagcgcccagcacguggaggagugcagcugcuaccccagauaccccggcgugagaugcgugugcagagacaacuggaagggcagcaacagacccaucguggacaucaacaucaaggaccacagcaucgugagcagcuacgugugcagcggccuggugggcgacacccccagaaagaacgacagcagcagcagcagccacugccuggaccccaacaacgaggagggcggccacggcgugaagggcugggccuucgacgacggcaacgacguguggaugggcagaaccaucaacgagaccagcagacugggcuacgagaccuucaaggugaucgagggcuggagcaaccccaagagcaagcugcagaucaacaagcaggugaucguggacagaggcaacagaagcggcuacagcggcaucuucagcguggagggcaagagcugcaucaacagaugcuucuacguggagcugaucagaggcagaaaggaggagaccgaggugcuguggaccagcaacagcaucgugguguucugcggcaccagcggcaccuacggcaccggcagcuggcccgacggcgccgaccugaaccugaugcccaucuga

SEQ ID NO: 180688 - RNA, 1410 nt, Artificial Sequence; identical to SEQ ID NO: 174293
  derived and/or modified CDS sequence (opt4) from neuraminidase__InfluenzaA__AEG64859

SEQ ID NO: 180689 - RNA, 1410 nt, Artificial Sequence; identical to SEQ ID NO: 174121
  derived and/or modified CDS sequence (opt4) from neuraminidase__InfluenzaA__AEG64870

SEQ ID NO: 180690 - RNA, 1410 nt, Artificial Sequence; identical to SEQ ID NO: 174313
  derived and/or modified CDS sequence (opt4) from neuraminidase__InfluenzaA__AEG64881

SEQ ID NO: 180691 - RNA, 1410 nt, Artificial Sequence; identical to SEQ ID NO: 174121
  derived and/or modified CDS sequence (opt4) from neuraminidase__InfluenzaA__AEG64892

SEQ ID NO: 180692 - RNA, 1410 nt, Artificial Sequence; identical to SEQ ID NO: 174197
  derived and/or modified CDS sequence (opt4) from neuraminidase__InfluenzaA__AEG64914

SEQ ID NO: 180693 - RNA, 1410 nt, Artificial Sequence; identical to SEQ ID NO: 174197
  derived and/or modified CDS sequence (opt4) from neuraminidase__InfluenzaA__AEG64925

SEQ ID NO: 180694 - RNA, 1410 nt, Artificial Sequence
  derived and/or modified CDS sequence (opt4) from neuraminidase__InfluenzaA__AEG64936
augaaccccaaccagaagaucaucaccaucggcagcgugagccugaccaucgccaccaucugcuuccugaugcagaucgccauccuggugaccaccgugacccugcacuucaagcagcacgagugcaacagcccccccaacaaccaggugaugcugugcgagcccaccaucaucgagagaaacaucaccgagaucguguaccugaccaacaccaccaucgagaaggagaucugccccaagcuggccgaguacagaaacuggagcaagccccagugcaacaucaccggcuucgcccccuucagcaaggacaacagcaucagacugagcgccggcggcgacaucugggugaccagagagcccuacgugagcugcgaccccgacaagugcuaccaguucgcccugggccagggcaccacccugaacaacggccacagcaacgacaccgugcacgacagaacccccuacagaacccugcugaugaacgagcugggcgugcccuuccaccugggcaccagacaggugugcaucgccuggagcagcagcagcugccacgacggcaaggccuggcugcacgugugcgugaccggcgaggacaagaacgccaccgccagcuucaucuacaacggcagacugguggacagcaucggcagcuggagcaagaagauccugagaacccaggagagcgagugcgugugcaucaacggcaccugcaccguggugaugaccgacggcagcgccagcggcaaggccgacaccaagauccuguucaucgaggagggcaagaucgugcacaucagcacccugagcggcagcgcccagcacguggaggagugcagcugcuaccccagauaccccggcgugagaugcgugugcagagacaacuggaagggcagcaacagacccaucguggacaucaacgugaaggacuacagcaucgugagcagcuacgugugcagcggccuggugggcgacacccccagaaagaacgacagcagcagcagcagccacugccuggaccccaacaacgaggagggcggccacggcgugaagggcugggccuucgacgacggcaacgacguguggaugggcagaaccaucagcgagaagcugagaagcggcuacgagaccuucaaggugaucgagggcuggagcaagcccaacagcaagcugcagaucaacagacaggugaucguggagagaggcaacagaagcggcuacagcggcaucuucagcguggagggcaagagcugcaucaacagaugcuucuacguggagcugaucagaggcagaaaggaggagaccgaggugugguggaccagcaacagcaucgugguguucugcggcaccagcggcaccuacggcaccggcagcuggcccgacggcgccgacaucaaccugaugcccaucuga

SEQ ID NO: 180695 - RNA, 1410 nt, Artificial Sequence; identical to SEQ ID NO: 174210
  derived and/or modified CDS sequence (opt4) from neuraminidase__InfluenzaA__AEG64947

SEQ ID NO: 180696 - RNA, 1410 nt, Artificial Sequence; identical to SEQ ID NO: 174197
  derived and/or modified CDS sequence (opt4) from neuraminidase__InfluenzaA__AEG64958

SEQ ID NO: 180697 - RNA, 1410 nt, Artificial Sequence; identical to SEQ ID NO: 174197
  derived and/or modified CDS sequence (opt4) from neuraminidase__InfluenzaA__AEG64969

SEQ ID NO: 180698 - RNA, 1410 nt, Artificial Sequence; identical to SEQ ID NO: 174197
  derived and/or modified CDS sequence (opt4) from neuraminidase__InfluenzaA__AEG64980

SEQ ID NO: 180699 - RNA, 1410 nt, Artificial Sequence
  derived and/or modified CDS sequence (opt4) from neuraminidase__InfluenzaA__AEG64991
augaaccccaaccagaagaucaucaccaucggcagcgugagccugaccaucagcaccaucugcuucuucaugcagaucgccauccugaucaccaccgugacccugcacuucaagcaguacgagagcaacagcccccccaacaaccaggugaugcugugcgagcccaccaucaucgagagaaacaucaccgagaucguguaccugaccaacaccaccaucgagaaggagaucugccccaagcuggccgaguacagaaacuggagcaagccccagugcaacaucaccggcuucgcccccuucagcaaggacaacagcaucagacugagcgccggcggcgacaucugggugaccagagagcccuacgugagcugcgaccccgacaagugcuaccaguucgcccugggccagggcaccacccugaacaacgugcacagcaacgacaccgugcacgacagaacccccuacagaacccugcugaugaacgagcugggcgugcccuuccaccugggcaccaagcaggugugcaucgccuggagcagcagcagcugccacgacggcaaggccuggcugcacgugugcgugaccggcgacgacaagaacgccaccgccagcuucaucuacaacggcagacugguggacagcaucgugagcuggagcaaggagauccugagaacccaggagagcgagugcgugugcaucaacggcaccugcaccguggugaugaccgacggcagcgccagcggcaaggccgacaccaagauccuguucaucgaggagggcaagaucgugcacaccagcacccugagcggcagcgcccagcacguggaggagugcagcugcuaccccagauaccccggcgugagaugcgugugcagagacaacuggaagggcagcaacagacccaucguggacaucaacaucaaggacuacagcaucgugagcagcuacgugugcagcggccuggugggcgacacccccagaaagaacgacagcagcagcagcagccacugccuggaccccaacaacgaggagggcggccacggcgugaagggcugggccuucgacgacggcaacgacguguggaugggcagaaccaucagcgagaagcugagaagcggcuacgagaccuucaaggugaucgagggcuggagcaaccccaacagcaagcugcagaccaacagacaggugaucguggacagaggcaacagaagcggcuacagcggcaucuucagcguggagggcaagagcugcaucaacagaugcuucuacguggagcugaucagaggcagaaaggaggagaccgaggugcuguggaccagcaacagcaucgugguguucugcggcaccagcggcaccuacggcaccggcagcuggcccgacggcgccgacaucaaccugaugcccaucuga

SEQ ID NO: 180700 - RNA, 1410 nt, Artificial Sequence; identical to SEQ ID NO: 174387
  derived and/or modified CDS sequence (opt4) from neuraminidase__InfluenzaA__AEG65002

SEQ ID NO: 180701 - RNA, 1410 nt, Artificial Sequence
  derived and/or modified CDS sequence (opt4) from neuraminidase__InfluenzaA__AEG65013
augaaccccaaccagaagaucaucaccaucggcagcgugagccugaccaucagcaccaucugcuucuucaugcagaucgccauccugaucaccaccgugacccugcacuucaagcaguacgaguucaacagcccccccaacaaccaggugaugcugugcgagcccaccaucaucgagagaaacaucaccgagaucguguaccugaccaacaccaccaucgagaaggagaucugccccaagcuggccgaguacagaaacuggagcaagccccagugcgacaucaccggcuucgcccccuucagcaaggacaacagcaucagacugagcgccggcggcgacaucugggugaccagagagcccuacgugagcugcgaccccgacaagugcuaccaguucgcccugggccagggcaccacccugaacaacgugcacagcaacgacaccgugcacgacagaacccccuacagaacccugcugaugaacgagcugggcgugcccuuccaccugggcaccaagcaggugugcaucgccuggagcagcagcagcugccacgacggcaaggccuggcugcacgugugcgugaccggcgacgacaagaacgccaccgccagcuucaucuacaacggcagacugguggacagcaucgugagcuggagcaaggacauccugagaacccaggagagcgagugcgugugcaucaacggcaccugcaccguggugaugaccgacggcagcgccagcggcaaggccgacaccaagauccuguucaucgaggagggcaagaucgugcacaccagcacccugagcggcagcgcccagcacguggaggagugcagcugcuaccccagauaccccggcgugagaugcgugugcagagacaacuggaagggcagcaacagacccaucguggacaucaacaucaaggacuacagcaucgugagcagcuacgugugcagcggccuggugggcgacacccccagaaagaacgacagcagcagcagcagccacugccuggaccccaacaacgaggagggcggccacggcgugaagggcugggccuucgacgacggcaacgacguguggaugggcagaaccaucagcgagaagcugagacugggcuacgagaccuucaaggugaucgagggcuggagcaaccccaacagcaagcugcagaccaacagacaggugaucguggagagaggcaacagaagcggcuacagcggcaucuucagcguggagggcaagagcugcaucaacagaugcuucuacguggagcugaucagaggcagaaaggaggagaccgaggugcuguggaccagcaacagcaucgugguguucugcggcaccagcggcaccuacggcaccggcagcuggcccgacggcgccgacaucaaccugaugcccaucuga

SEQ ID NO: 180702 - RNA, 1410 nt, Artificial Sequence
  derived and/or modified CDS sequence (opt4) from neuraminidase__InfluenzaA__AEG65024
augaaccccaaccagaagaucaucaccaucggcagcgugagccugaccaucagcaccaucugcuucuucaugcagaucgccauccugaucaccaccgugacccugcacuucaagcaguacgaguucaacagcccccccaacaaccacgugaugcugugcgagcccaccaucaucgagagaaacaucaccgagaucguguaccugaccaacaccaccaucgagaaggagaucugccccaagcuggccgaguacagaaacuggagcaagccccagugcgacaucaccggcuucgcccccuucagcaaggacaacagcaucagacugagcgccggcggcgacaucugggugaccagagagcccuacgugagcugcgaccccgacaagugcuaccaguucgcccugggccagggcaccacccugaacaacgugcacagcaacgacaccgugcacgacagaacccccuacagaacccugcugaugaacgagcugggcgugcccuuccaccugggcaccaagcaggugugcaucgccuggagcagcagcagcugccacgacggcaaggccuggcugcacgugugcgugaccggcgacgacaagaacgccaccgccagcuucaucuacaacggcagacugguggacagcaucgugagcuggagcaaggagauccugagaacccaggagagcgagugcgugugcaucaacggcaccugcaccguggugaugaccgacggcagcgccagcggcaaggccgacaccaagauccuguucaucgaggagggcaagaucgugcacaccagcacccugagcggcagcgcccagcacguggaggagugcagcugcuaccccagauaccccggcgugagaugcgugugcagagacaacuggaagggcagcaacagacccaucguggacaucaacaucaaggacuacagcaucgugagcagcuacgugugcagcggccuggugggcgacacccccagaaagaacgacagcagcagcagcagccacugccuggaccccaacaacgaggagggcggccacggcgugaagggcugggccuucgacgacggcaacgacguguggaugggcagaaccaucagcgagaagcugagacugggcuacgagaccuucaaggugaucgagggcuggagcaaccccaacagcaagcugcagaucaacagacaggugaucguggacagaggcaacagaagcggcuacagcggcaucuucagcguggagggcaagagcugcaucaacagaugcuucuacguggagcugaucagaggcagaaaggaggagaccgaggugcuguggaccagcaacagcaucgugguguucugcggcaccagcggcaccuacggcaccggcagcuggcccgacggcgccgacaucaaccugaugcccaucuga

SEQ ID NO: 180703 - RNA, 1410 nt, Artificial Sequence
  derived and/or modified CDS sequence (opt4) from neuraminidase__InfluenzaA__AEG65035
augaaccccaaccagaagaucaucaccaucggcagcgugagccugaccaucagcaccaucugcuucuucaugcagaucgccauccugaucaccaccgugacccugcacuucaagcaguacgaguucaacagcccccccaacaaccaggugaugcugugcgagcccaccaucaucgagagaaacaucaccgagaucguguaccugaccaacaccaccaucgagaaggaggugugccccaagcuggccgaguacagaaacuggagcaagccccagugcaacaucaccggcuucgcccccuucagcaaggacaacagcaucagacugagcgccggcggcgacaucugggugaccagagagcccuacgugagcugcgaccuggacaagugcuaccaguucgcccugggccagggcaccacccugaacaacgugcacagcaacgacaccgugcacgacagaacccccuacagaacccugcugaugaacgagcugggcgugcccuuccaccugggcaccaagcaggugugcaucgccuggagcagcagcagcugccacgacggcaaggccuggcugcacgugugcgugaccggcgacgacaagaacgccaccgccagcuucaucuacaacggcagacugguggacagcaucgugagcuggagcaaggagauccugagaacccaggagagcgagugcgugugcaucaacggcaccugcaccguggugaugaccgacggcagcgccagcggcaaggccgacaccaagauccuguucaucgaggagggcaagaucgugcacaccagcacccugagcggcagcgcccagcacguggaggagugcagcugcuaccccagauaccccggcgugagaugcgugugcagagacaacuggaagggcagcaacagacccaucguggacaucaacaucaaggacuacagcaucgugagcagcuacgugugcagcggccuggugggcgacacccccagaaagaacgacagcagcagcagcagccacugccuggaccccaacaacgaggagggcggccacggcgugaagggcugggccuucgacgacggcaacgacguguggaugggcagaaccaucagcgagaagcugagaagcggcuacgagaccuucaaggugaucgagggcuggagcaaccccaacagcaagcugcagaucaacagacaggugaucguggacagaggcaacagaagcggcuacagcggcaucuucagcguggagggcaagagcugcaucaacagaugcuucuacguggagcugaucagaggcagaaaggaggagaacgaggugcuguggaccagcaacagcaucgugguguucugcggcaccagcggcaccuacggcaccggcagcuggcccgacggcgccgacaucaaccugaugcccaucuga

SEQ ID NO: 180704 - RNA, 1410 nt, Artificial Sequence; identical to SEQ ID NO: 174772
  derived and/or modified CDS sequence (opt4) from neuraminidase__InfluenzaA__AEG65057

SEQ ID NO: 180705 - RNA, 1410 nt, Artificial Sequence; identical to SEQ ID NO: 175767
  derived and/or modified CDS sequence (opt4) from neuraminidase__InfluenzaA__AEG65068

SEQ ID NO: 180706 - RNA, 1410 nt, Artificial Sequence
  derived and/or modified CDS sequence (opt4) from neuraminidase__InfluenzaA__AEG65079
augaaccccaaccagaagaucaucaccaucggcagcgugagccugaccaucagcaccaucugcuucuucaugcagaucgccauccugaucaccaccgugacccugcacuucaagcaguacgaguucaacagcccccccaacaaccaggugaugcugugcgagcccaccaucaucgagagaaacaucaccgagaucguguaccugaccaacaccaccaucgagaaggagaucugccccaagcuggccgaguacagaaacuggagcaagccccagugcaacaucaccggcuucgcccccuucagcaaggacaacagcaucagacugagcgccggcggcgacaucugggugaccagagagcccuacgugagcugcgaccccgacaagugcuaccaguucgcccugggccagggcaccacccugaacaacgugcacagcaacgacaccgugcacgacagaacccccuacagaacccugcugaugaacgagcugggcgugcccuuccaccugggcaccaagcaggugugcaucgccuggagcagcagcagcugccacgacggcaaggccuggcugcacgugugcgugaccggcgacgacaagaacgccaccgccagcuucaucuacaacggcagacugguggacagcaucgugagcuggagcaaggagauccugagaacccaggagagcgagugcgugugcaucaacggcaccugcaccguggugaugaccgacggcagcgccagcggcaaggccgacaccaagauccuguucaucgaggagggcaagaucgugcacaccagcacccugagcggcagcgccaagcacguggaggagugcagcugcuaccccagauaccccggcgugagaugcgugugcagagacaacuggaagggcagcaacagacccaucguggacaucaacaucaaggacuacagcaucgugagcagcuacgugugcagcggccuggugggcgacacccccagaaagaacgacagcagcagcagcggccacugccuggaccccaacaacgaggagggcggccacggcgugaagggcugggccuucgacgacggcaacgacguguggaugggcagaaccaucagcgagaagcugagaagcggcuacgagaccuucaaggugaucgagggcuggagcaaccccaacagcaagcugcagaucaacagacaggugaucguggacagaggcaacagaagcggcuacagcggcaucuucagcguggagggcaagagcugcaucaacagaugcuucuacguggagcugaucagaggcagaaaggaggagaccgaggugcuguggaccagcaacagcaucgugguguucugcggcaccagcggcaccuacggcaccggcagcuggcccgacggcgccgacaucaaccugaugcccaucuga

SEQ ID NO: 180707 - RNA, 1410 nt, Artificial Sequence
  derived and/or modified CDS sequence (opt4) from neuraminidase__InfluenzaA__AEG65090
augaaccccaaccagaagaucaucaccaucggcagcgugagccugaccaucagcaccaucugcuucuucaugcagaucgccauccugaucaccaccgugacccugcacuucaagcaguacgaguucaacagcccccccaacaaccaggugaugcugugcgagcccaccaucaucgagagaaacaucaccgagaucguguaccugaccaacaccaccaucgagaaggagaucugccccaagcuggccgaguacagaaacuggagcaagccccagugcaacaucaccggcuucgcccccuucagcaaggacaacagcaucagacugagcgccggcggcgacaucugggugaccagagagcccuacgugagcugcgaccccgacaagugcuaccaguucgcccugggccagggcaccacccugaacaacgugcacagcaacgacaccgugcacgacagaacccccuacagaacccugcugaugaacgagcugggcgugcccuuccaccugggcaccaagcaggugugcaucgccuggagcagcagcagcugccacgacggcaaggccuggcugcacgugugcgugaccggcgacgacaagaacgccaccgccagcuucaucuacaacggcagacugguggacagcaucgugagcuggagcaaggagauccugagaacccaggagagcgagugcgugugcaucaacggcaccugcaccguggugaugaccgacggcagcgccagcggcaaggccgacaccaagauccuguucaucgaggagggcaagaucauccacaccagcacccugagcggcagcgcccagcacguggaggagugcagcugcuaccccagauaccccggcgugagaugcgugugcagagacaacuggaagggcagcaacagacccaucguggacaucaacaucaaggacuacagcaucgugagcagcuacgugugcagcggccuggugggcgacacccccagaaagaacgacagcagcagcagcagccacugccuggaccccaacaacgaggagggcggccacggcgugaagggcugggccuucgacgacggcaacgacguguggaugggcagaaccaucagcgagaagcugagaagcggcuacgagaccuucaaggugaucgagggcuggagcaaccccaacagcaagcugcagaucaacagacaggugaucguggacagaggcaacagaagcggcuacagcggcaucuucagcguggagggcaagagcugcaucaacagaugcuucuacguggagcugaucagaggcagaaaggaggagaccgaggugcuguggaccagcaacagcaucgugguguucugcggcaccagcggcaccuacggcaccggcagcuggcccgacggcgccgacaucagccugaugcccaucuga

SEQ ID NO: 180708 - RNA, 1410 nt, Artificial Sequence
  derived and/or modified CDS sequence (opt4) from neuraminidase__InfluenzaA__AEG65101
augaaccccaaccagaagaucaucaccaucggcagcgugagccugaccaucagcaccaucugcuucuucaugcagaucgccauccugaucaccaccgugacccugcacuucaagcaguacgaguucaacagcccccccgacaaccaggugaugcugugcgagcccaccaucaucgagagaaacaucaccgagaucguguaccugaccaacaccaccaucgagaaggagaucugccccaagcuggccgaguacagaaacuggagcaagccccagugcgacaucaccggcuucgcccccuucagcaaggacaacagcaucagacugagcgccggcggcgacaucugggugaccagagagcccuacgugagcugcgaccccgacaagugcuaccaguucgcccugggccagggcaccacccugaacaacgugcacagcaacgacaccgugcacgacagaacccccuacagaacccugcugaugaacgagcugggcgugcccuuccaccugggcaccaagcaggugugcaucgccuggagcagcagcagcugccacgacggcaaggccuggcugcacgugugcgugaccggcgacgacaagaacgccaccgccagcuucaucuacaacggcagacugguggacagcguggugagcuggagcaaggacauccugagaacccaggagagcgagugcgugugcaucaacggcaccugcaccguggugaugaccgacggcagcgccagcggcaaggccgacaccaagauccuguucaucgaggagggcaagaucgugcacaccagcacccugagcggcagcgcccagcacguggaggagugcagcugcuaccccagauaccccggcgugagaugcgugugcagagacaacuggaagggcagcaacagacccaucguggacaucaacaucaagaacuacagcaucgugagcagcuacgugugcagcggccuggugggcgacacccccagaaagaccgacagcagcagcagcagccacugccuggaccccaacaacgaggagggcggccacggcgugaagggcugggccuucgacgacggcaacgacguguggaugggcagaaccaucagcgagaagcugagacugggcuacgagaccuucaaggugaucgagggcuggagcaaccccaacagcaagcugcagaucaacagacaggugaucguggacagaggcaacagaagcggcuacagcggcaucuucagcguggagggcaagagcugcaucaacagaugcuucuacguggagcugaucagaggcagaaaggaggagaccgaggugcuguggaccagcaacagcaucgugguguucugcggcaccagcggcaccuacggcaccggcagcuggcccgacggcgccgacaucaaccugaugcccaucuga

SEQ ID NO: 180709 - RNA, 1410 nt, Artificial Sequence
  derived and/or modified CDS sequence (opt4) from neuraminidase__InfluenzaA__AEG65123
augaaccccaaccagaagaucaucaccaucggcagcgugagccugaccaucagcaccaucugcuucuucaugcagaucgccauccugaucaccaccgugacccugcacuucaagcaguacgaguucaacagcccccccaacaaccaggugaugcugugcgagcccaccaccaucgagagaaacaucaccgagaucguguaccugaccaacaccaccaucgagaaggagaucugccccaagcuggccgaguacagaaacuggagcaagccccagugcgacaucaccggcuucgcccccuucagcaaggacaacagcaucagacugagcgccggcggcgacaucugggugaccagagagcccuacgugagcugcgaccccgacaagugcuaccaguucgcccugggccagggcaccacccugaacaacgugcacagcaacgacaccgugcacgacagaacccccuacagaacccugcugaugaacgagcugggcgugcccuuccaccugggcaccaagcaggugugcaucgccuggagcagcagcagcugccacgacggcaaggccuggcugcacgugugcgugaccggcgacgacaagaacgccaccgccagcuucaucuacaacggcagacugguggacagcguggugagcuggagcaaggacauccugagaacccaggagagcgagugcgugugcaucaacggcaccugcaccguggugaugaccgacggcagcgccagcggcaaggccgacaccaagauccuguucaucgaggagggcaagaucgugcacaccagcacccugagcggcagcgcccagcacguggaggagugcagcugcuaccccagauaccccggcgugagaugcgugugcagagacaacuggaagggcagcaacagacccaucguggacaucaacaucaagaacuacagcaucgugagcagcuacgugugcagcggccuggugggcgacacccccagaaagaccgacagcagcagcagcagccacugccuggaccccaacaacgaggagggcggccacggcgugaagggcugggccuucgacgacggcaacgacguguggaugggcagaaccaucagcgagaagcugagacugggcuacgagaccuucaaggugaucgagggcuggagcaaccccaacagcaagcugcagaucaacagacaggugaucguggacagaggcaacagaagcggcuacagcggcaucuucagcguggagggcaagagcugcaucaacagaugcuucuacguggagcugaucagaggcagaaaggaggagaacgaggugcuguggaccagcaacagcaucgugguguucugcggcaccagcggcaccuacggcaccggcagcuggcccgacggcgccgacaucaaccugaugcccaucuga

SEQ ID NO: 180710 - RNA, 1410 nt, Artificial Sequence; identical to SEQ ID NO: 175767
  derived and/or modified CDS sequence (opt4) from neuraminidase__InfluenzaA__AEG65134

SEQ ID NO: 180711 - RNA, 1410 nt, Artificial Sequence
  derived and/or modified CDS sequence (opt4) from neuraminidase__InfluenzaA__AEG65145
augaaccccaaccagaagaucaucaccaucggcagcgugagccugaccaucgccaccaucugcuuccugaugcagaucgccauccuggugaccaccgugacccugcacuucaagcaguacgagugcaacagcccccccaacaaccaggugaugcugugcgagcccaccaucaucgagagaaacaucaccgagaucguguaccugaccaacaccaccaucgagaaggagaucugccccaagcuggccgaguacagaaacuggagcaagccccagugcaacaucaccggcuucgcccccuucagcaaggacaacagcaucagacugagcgccggcggcgacaucugggugaccagagagcccuacgugagcugcgaccccgacaagugcuaccaguucgcccugggccagggcaccacccugaacaacggccacagcaacgacaccgugcacgacagaacccccuacagaacccugcugaugaacgagcugggcgugcccuuccaccugggcaccagacaggugugcaucgccuggagcagcagcagcugccacgacggcaaggccuggcugcacgugugcgugaccggcgacgacgagaacgccaccgccagcuucaucuacaacggcagacugguggacagcaucggcagcuggagcaagaagauccugagaacccaggagagcgagugcgugugcaucaacggcaccugcaccguggugaugaccgacggcagcgccagcggcaaggccgacaccaagauccuguucaucgaggagggcaagaucgugcacaucagcacccugagcggcagcgcccagcacguggaggagugcagcugcuaccccagauaccccggcgugagaugcgugugcagagacaacuggaagggcagcaacagacccaucguggacaucaacgugaaggacuacagcaucgugagcagcuacgugugcagcggccuggugggcgacacccccagaaagaacgacagcuucagcaacagccacugccuggaccccaacaacgaggagggcggccacggcgugaagggcugggccuucgacgacggcaacgacguguggaugggcagaaccaucagcgagaagcugagaagcggcuacgagaccuucaaggugaucgagggcuggagcaagcccaacagcaagcugcagaucaacagacaggugaucguggagagaggcaacagaagcggcuacagcggcaucuucagcguggagggcaagagcugcaucaacagaugcuucuacguggagcugaucagaggcagaaaggaggagaccgaggugugguggaccagcaacagcaucgugguguucugcggcaccagcggcaccuacggcaccggcagcuggcccgacggcgccgacaucaaccugaugcccaucuga

SEQ ID NO: 180712 - RNA, 1410 nt, Artificial Sequence
  derived and/or modified CDS sequence (opt4) from neuraminidase__InfluenzaA__AEG65156
augaaccccaaccagaagaucaucaccaucggcagcgugagccugaccaucgccaccaucugcuuccugaugcagaucgccauccuggugaccaccgugacccugcacuucaagcaguacgagugcaacagcccccccaacaaccaggugaugcugugcgagcccaccaucaucgagagaaacaucaccgagaucguguaccugaccaacaccaccaucgagaaggagaucugccccaagcuggccgaguacagaaacuggagcaagccccagugcaacaucaccggcuucgcccccuucagcaaggacaacagcaucagacugagcgccggcggcgacaucugggugaccagagagcccuacgugagcugcgaccccgacaagugcuaccaguucgcccugggccagggcaccacccugaacaacggccacagcaacgacaccgugcacgacagaacccccuacagaacccugcugaugaacgagcugggcgugcccuuccaccugggcaccagacaggugugcaucgccuggagcagcagcagcugccacgacggcaaggccuggcugcacgugugcgugaccggcgacgacgagaacgccaccgccagcuucaucuacaacggcagacugguggacagcaucggcagcuggagcaagaagauccugagaacccaggagagcgagugcgugugcaucaacggcaccugcaccguggugaugaccgacggcagcgccagcggcaaggccgacaccaagauccuguucaucgaggagggcaagaucgugcacaccagcacccugagcggcagcgcccagcacguggaggagugcagcugcuaccccagauaccccggcgugagaugcgugugcagagacaacuggaagggcagcaacagacccaucguggacaucaacgugaaggacuacagcaucgugagcagcuacgugugcagcggccuggugggcgacacccccagaaagaacgacagcuucagcagcagccacugccuggaccccaacaacgaggagggcggccacggcgugaagggcugggccuucgacgacggcaacgacguguggaugggcagaaccaucagcgagaagcugagaagcggcuacgagaccuucaaggugaucgagggcuggagcaagcccaacagcaagcugcagaucaacagacaggugaucguggagagaggcaacagaagcggcuacagcggcaucuucagcguggagggcaagagcugcaucaacagaugcuucuacguggagcugaucagaggcagaaaggaggagaccgaggugugguggaccagcaacagcaucgugguguucugcggcaccagcggcaccuacggcaccggcagcuggcccgacggcgccgacaucaaccugaugcccaucuga

SEQ ID NO: 180713 - RNA, 1410 nt, Artificial Sequence
  derived and/or modified CDS sequence (opt4) from neuraminidase__InfluenzaA__AEG65167
augaaccccaaccagaagaucaucaccaucggcagcgugagccugaccaucgccaccaucugcuuccugaugcagaucgccauccuggugaccaccgugacccugcacuucaagcaguacgagugcaacagcccccccaacaaccaggugaugcugugcgagcccaccaucaucgagagaaacaucaccgagaucguguaccugaccaacaccaccaucgagaaggagaucugccccaagcuggccgaguacagaaacuggagcaagccccagugcaacaucaccggcuucgcccccuucagcaaggacaacagcaucagacugagcgccggcggcgacaucugggugaccagagagcccuacgugagcugcgaccccgacaagugcuaccaguucgcccugggccagggcaccacccugaacaacggccacagcaacgacaccgugcacgacagaacccccuacagaacccugcugaugaacgagcugggcgugcccuuccaccugggcaccagacaggugugcaucgccuggagcagcagcagcugccacgacggcaaggccuggcugcacgugugcgugaccggcgacgacgagaacgccaccgccagcuucaucuacaacggcagacugguggacagcaucggcagcuggagcaagaagauccugagaacccaggagagcgagugcgugugcaucaacggcaccugcaccguggugaugaccgacggcagcgccagcggcaaggccgacaccaagauccuguucaucgaggagggcaagaucgugcacaucagcacccugagcggcagcgccagacacguggaggagugcagcugcuaccccagauaccccggcgugagaugcgugugcagagacaacuggaagggcagcaacagacccaucguggacaucaacgugaaggacuacagcaucgugagcagcuacgugugcagcggccuggugggcgacacccccagaaagaacgacagcuucagcagcagccacugccuggaccccaacaacgaggagggcggccacggcgugaagggcugggccuucgacgacggcaacgacguguggaugggcagaaccaucagcgagaagcugagaagcggcuacgagaccuucaaggugaucgagggcuggagcaagcccaacagcaagcugcagaucaacagacaggugaucguggagagaggcaacagaagcggcuacagcggcaucuucagcguggagggcaagagcugcaucaacagaugcuucuacguggagcugaucagaggcagaaaggaggagaccgaggugugguggaccagcaacagcaucgugguguucugcggcaccagcggcaccuacggcaccggcagcuggcccgacggcgccgacaucaaccugaugcccaucuga

SEQ ID NO: 180714 - RNA, 1410 nt, Artificial Sequence
  derived and/or modified CDS sequence (opt4) from neuraminidase__InfluenzaA__AEG65178
augaaccccaaccagaagaucaucaccaucggcagcgugagccugaccaucgccaccaucugcuuccugaugcagaucgccauccuggugaccaccgugacccugcacuucaagcagcacgagugcaacagcccccccaacaaccaggugaugcugugcgagcccaccaucaucgagagaaacaucaccgagaucguguaccugaccaacaccaccaucgagaaggagaucugccccaagcuggccgaguacagaaacuggagcaagccccagugcaacaucaccggcuucgcccccuucagcaaggacaacagcaucagacugagcgccggcggcgacaucugggugaccagagagcccuacgugagcugcgaccccgacaagugcuaccaguucgcccugggccagggcaccacccugaacaacggccacagcaacaacaccgugcacgacagaacccccuacagaacccugcugaugaacgagcugggcgugcccuuccaccugggcaccagacaggugugcaucgccuggagcagcagcagcugccacgacggcaaggccuggcugcacgugugcgugaccggcgacgacaagaacgccaccgccagcuucaucuacaacggcagacugguggacagcaucggcagcuggagcaagaacauccugagaacccaggagagcgagugcgugugcaucaacggcaccugcaccguggugaugaccgacggcagcgccagcggcaaggccgacaccaagauccuguucaucgaggagggcaagaucgugcacaucagcacccugagcggcagcgcccagcacguggaggagugcagcugcuaccccagauaccccggcgugagaugcgugugcagagacaacuggaagggcagcaacagacccaucguggacaucaacgugaaggacuacagcaucgugagcagcuacgugugcagcggccuggugggcgacacccccagaaagaacgacagcuucagcagcagccacugccuggaccccaacaacgaggagggcggccacggcgugaagggcugggccuucgacgacggcaacgacguguggaugggcagaaccaucagcgagaagcugagaagcggcuacgagaccuucaaggugaucgagggcuggagcaagcccaacagcaagcugcagaucaacagacaggugaucguggagagaggcaacagaagcggcuacagcggcaucuucagcguggagggcaagagcugcaucaacagaugcuucuacguggagcugaucagaggcagaaaggaggagaccgaggugugguggaccagcaacagcaucgugguguucugcggcaccagcggcaccuacggcaccggcagcuggcccgacggcgccgacaucaaccugaugcccaucuga

SEQ ID NO: 180715 - RNA, 1410 nt, Artificial Sequence
  derived and/or modified CDS sequence (opt4) from neuraminidase__InfluenzaA__AEG65189
augaaccccaaccagaagaucaucaccaucggcagcgugagccugaccaucagcaccaucugcuucuucaugcagaucgccauccugaucaccaccgugacccugcacuucaagcaguacgaguucaacagcccccccaacaaccaggugaugcugugcgagcccaccaucaucgagagaaacaucaccgagaucguguaccugaccaacaccaccaucgagaaggagaucugccccaagcuggccgaguacagaaacuggagcaagccccagugcgacaucaccggcuucgcccccuucagcaaggacaacagcaucagacugagcgccggcggcgacaucugggugaccagagagcccuacgugagcugcgaccccgacaagugcuaccaguucgcccugggccagggcaccacccugaacaacgugcacagcaacgacaccgugcacgacagaacccccuacagaacccugcugaugaacgagcugggcgugcccuuccaccugggcaccaagcaggugugcaucgccuggagcagcagcagcugccacgacggcaaggccuggcugcacgugugcgugaccggcgacgacaagaacgccaccgccagcuucaucuacaacggcagacugguggacagcaucgugagcuggagcaaggagauccugagaacccaggagagcgagugcgugugcaucaacggcaccugcaccguggugaugaccgacggcagcgccagcggcaaggccgacaccaagauccuguucaucgaggagggcaagaucgugcacaccagcacccugagcggcagcgcccagcacguggaggagugcagcugcuaccccagauaccccggcgugagaugcgugugcagagacaacuggaagggcagcaacagacccaucguggacaucaacaucaacgacuacagcaucgugagcagcuacgugugcagcggccuggugggcgacacccccagaaagaacgacagcagcagcagcagccacugccuggaccccaacaacgaggagggcggccacggcgugaagggcugggccuucgacgacggcaacgacguguggaugggcagaaccaucagcgagaagcugagaagcggcuacgagaccuucaaggugaucgagggcuggagcaaccccaacagcaagcugcagaucaacagacaggugaucguggacagaggcaacagaagcggcuacagcggcaucuucagcguggagggcaagagcugcaucaacagaugcuucuacguggagcugaucagaggcagaaaggaggagaccgaggugcuguggaccagcaacagcaucgugguguucugcggcaccagcggcaccuacggcaccggcagcuggcccgacggcgccgacaucaaccugaugcccaucuga

SEQ ID NO: 180716 - RNA, 1410 nt, Artificial Sequence
  derived and/or modified CDS sequence (opt4) from neuraminidase__InfluenzaA__AEG65200
augaaccccaaccagaagaucaucaccaucggcagcgugagccugaccaucagcaccaucugcuucuucaugcagaucgccauccugaucaccaccgugacccugcacuucaagcaguacgaguucaacagcccccccaacaaccaggugaugcugugcgagcccaccaucaucgagagaaacaucaccgagaucguguaccugaccaacaccaccaucgagaaggagaucugccccaagcuggccgaguacagaaacuggagcaagccccagugcgacaucaccggcuucgcccccuucagcaaggacaacagcaucagacugagcgccggcggcgacaucugggugaccagagagcccuacgugagcugcgaccccgacaagugcuaccaguucgcccugggccagggcaccacccugaacaacgugcacagcaacgacaccgugcacgacagaacccccuacagaacccugcugaugaacgagcugggcgugcccuuccaccugggcaccaagcaggugugcaucgccuggagcagcagcagcugccacgacggcaaggccuggcugcacgugugcgugaccggcgacgacaagaacgccaccgccagcuucaucuacaacggcagacugguggacagcaucgugagcuggagcaaggaggugcugagaacccaggagagcgagugcgugugcaucaacggcaccugcaccguggugaugaccgacggcagcgccagcggcaaggccgacaccaagauccuguucaucgaggagggcaagaucgugcacaccagcacccugagcggcagcgcccagcacguggaggagugcagcugcuaccccagauaccccggcgugagaugcgugugcagagacaacuggaagggcagcaacagacccaucguggacaucaacaucaaggacuacagcaucgugagcagcuacgugugcagcggccuggugggcgacacccccagaaagaacgacagcagcagcagcagccacugccuggaccccaacaacgaggagggcggccacggcgugaagggcugggccuucgacgacggcaacgacguguggaugggcagaaccaucagcgagaagcugagaagcggcuacgagaccuucaaggugaucgagggcuggagcaaccccaacagcaagcugcagaccaacagacaggugaucguggacagaggcaacagaagcggcuacagcggcaucuucagcguggagggcaagagcugcaucaacagaugcuucuacguggagcugaucagaggcagaaaggaggagaccgaggugcuguggaccagcaacagcaucgugguguucugcggcaccagcggcaccuacggcaccggcagcuggcccgacggcgccgacaucaaccugaugcccaucuga

SEQ ID NO: 180717 - RNA, 1410 nt, Artificial Sequence; identical to SEQ ID NO: 174772
  derived and/or modified CDS sequence (opt4) from neuraminidase__InfluenzaA__AEG65211

SEQ ID NO: 180718 - RNA, 1410 nt, Artificial Sequence; identical to SEQ ID NO: 174774
  derived and/or modified CDS sequence (opt4) from neuraminidase__InfluenzaA__AEG65222

SEQ ID NO: 180719 - RNA, 1410 nt, Artificial Sequence
  derived and/or modified CDS sequence (opt4) from neuraminidase__InfluenzaA__AEG65233
augaaccccaaccagaagaucaucaccaucggcagcgugagccugaccaucagcaccaucugcuucuucaugcagaucgccauccugaucaccaccgugacccugcacuucaagcaguacgaguucaacagcccccccaacaaccaggugaugcugugcgagcccaccaucaucgagagaaacaucaccgagaucguguaccugaccaacaccaccaucgagaaggagaucugccccaagcuggccgaguacagaaacuggagcaagccccagugcgacaucaccggcuucgcccccuucagcaaggacaacagcaucagacugagcgccggcggcgacaucugggugaccagagagcccuacgugagcugcgaccccgacaagugcuaccaguucgcccugggccagggcaccacccugaacaacgugcacagcaacgacaccgugcacgacagaacccccuacagaacccugcugaugaacgagcugggcgugcccuuccaccugggcaccaagcaggugugcaucgccuggagcagcagcagcugccacgacggcaaggccuggcugcacgugugcgugaccggcgacgacaagaacgccaccgccagcuucaucuacaacggcagacugguggacagcaucgugagcuggagcaagaagauccugagaacccaggagagcgagugcgugugcaucaacggcaccugcaccguggugaugaccgacggcagcgccagcggcaaggccgacaccaagauccuguucaucgaggagggcaagaucgugcacaccagcacccugagcggcagcgcccagcacguggaggagugcagcugcuaccccagauaccccggcgugagaugcgugugcagagacaacuggaagggcagcaacagacccaucaucgacaucaacaucaaggacuacagcaucgugagcagcuacgugugcagcggccuggugggcgacacccccagaaagaacgacagcagcagcagcagccacugccuggaccccaacaacgaggagggcggccacggcgugaagggcugggccuucgacgacggcaacgacguguggaugggcagaaccaucagcgagaagcugagaagcggcuacgagaccuucaaggugaucgagggcuggagcaaccccaacagcaagcugcagaucaacagacaggugaucguggacagaggcaacagaagcggcuacagcggcaucuucagcguggagggcaagagcugcaucaacagaugcuucuacguggagcugaucagaggcagaaaggaggagaccgaggugcuguggaccagcaacagcaucgugguguucugcggcaccagcggcaccuacggcaccggcagcuggcccgacggcgccgacaucaaccugaugcccaucuga

SEQ ID NO: 180720 - RNA, 1410 nt, Artificial Sequence
  derived and/or modified CDS sequence (opt4) from neuraminidase__InfluenzaA__AEG65244
augaaccccaaccagaagaucaucaccaucggcagcgugagccugaccaucagcaccaucugcuucuucaugcagaucgccauccugaucaccaccgugacccugcacuucaagcaguacgaguucaacagcccccccaacaaccaggugaugcugugcgagcccaccaucaucgagagaaacaucaccgagaucguguaccugaccaacaccaccaucgagaaggagaucugccccaagcuggccgaguacagaaacuggagcaagccccagugcaacaucaccggcuucgcccccuucagcaaggacaacagcaucagacugagcgccggcggcgacaucugggugaccagagagcccuacgugagcugcgaccccgacaagugcuaccaguucgcccugggccagggcaccacccugaacaacgugcacagcaacgacaccgugcacgacagaacccccuacagaacccugcugaugaacgagcugggcgugcccuuccaccugggcacccagcaggugugcaucgccuggagcagcagcagcugccacgacggcaaggccuggcugcacgugugcgugaccggcgacgacgagaacgccaccgccagcuucaucuacaacggcagacugguggacagcaucgugagcuggagcaagaagauccugagaacccaggagagcgagugcgugugcaucaacggcaccugcaccguggugaugaccgacggcagcgccagcggcaaggccgacaccaagauccuguucaucgaggagggcaagaucgugcacaccagcacccugagcggcagcgcccagcacguggaggagugcagcugcuaccccagauaccccggcgugagaugcgugugcagagacaacuggaagggcagcaacagacccaucguggacaucaacaucaaggacuacagcaucgccagcagcuacgugugcagcggccuggugggcgacacccccagaaagaacgacagcagcagcagcagccacugccuggaccccaacaacgaggagggcggccacggcgugaagggcugggccuucgacgacggcaacgacguguggaugggcagaaccaucagcgagaagcugagaagcggcuacgagaccuucaaggugaucgagggcuggagcaaccccaacagcaagcugcagaucaacagacaggugaucguggacagaggcaacagaagcggcuacagcggcaucuucagcguggagggcaagagcugcaucaacagaugcuucuacguggagcugaucagaggcagaaaccaggagaccgaggugcuguggaccagcaacagcaucgugguguucugcggcaccagcggcaccuacggcaccggcagcuggcccgacggcgccgacaucaaccugaugcccaucuga

SEQ ID NO: 180721 - RNA, 1410 nt, Artificial Sequence; identical to SEQ ID NO: 174774
  derived and/or modified CDS sequence (opt4) from neuraminidase__InfluenzaA__AEG65255

SEQ ID NO: 180722 - RNA, 1410 nt, Artificial Sequence; identical to SEQ ID NO: 174651
  derived and/or modified CDS sequence (opt4) from neuraminidase__InfluenzaA__AEG65266

SEQ ID NO: 180723 - RNA, 1410 nt, Artificial Sequence; identical to SEQ ID NO: 174651
  derived and/or modified CDS sequence (opt4) from neuraminidase__InfluenzaA__AEG65277

SEQ ID NO: 180724 - RNA, 1410 nt, Artificial Sequence
  derived and/or modified CDS sequence (opt4) from neuraminidase__InfluenzaA__AEG65288
augaaccccaaccagaagaucaucaccaucggcagcgugagccugaccaucgccaccaucugcuuccugaugcagaucgccauccuggugaccaccgugacccugcacuucaagcagcacgagugcaacagcccccccaacaaccaggugaugcugugcgagcccaccaucaucgagagaaacaucaccgagaucguguaccugaccaacaccaccaucgagaaggagaucugccccaagcugguggaguacagaaacuggagcaagccccagugcaacaucaccggcuucgcccccuucagcaaggacaacagcaucagacugagcgccggcggcgacaucugggugaccagagagcccuacgugagcugcgaccccgacaagugcuaccaguucgcccugggccagggcaccacccugaacaacggccacagcaacgacaccgugcacgacagaacccccuacagaacccugcugaugaacgagcugggcgugcccuuccaccugggcaccagacaggugugcaucgccuggagcagcagcagcugccacgacggcaaggccuggcugcacgugugcgugaccggcgacgacaagaacgccaccgccagcuucaucuacaacggcagacugguggacagcaucggcagcuggagcaagaagauccugagaacccaggagagcgagugcgugugcaucaacggcaccugcaccguggugaugaccgacggcagcgccagcggcaaggccgacaccaagauccuguucaucgaggagggcaagaucgugcacaucagcacccugagcggcagcgcccagcacguggaggagugcagcugcuaccccagauaccccggcgugagaugcgugugcagagacaacuggaagggcagcaacagacccaucguggacaucaacgugaaggacuacagcaucgugagcagcuacgugugcagcggccuggugggcgacacccccagaaagaacaacagcuucagcagcagccacugccuggaccccaacaacgaggagggcggccacggcgugaagggcugggccuucgacgacggcaacgacguguggaugggcagaaccaucagcgagaagcugagaagcggcuacgagaccuucaaggugaucgagggcuggagcaagcccaacagcaagcugcagaucaacagacaggugaucguggagagaggcaacagaagcggcuacagcggcaucuucagcguggagggcaagagcugcaucaacagaugcuucuacguggagcugaucagaggcagaaaggaggagaccgaggugugguggaccagcaacagcaucgugguguucugcggcaccagcggcaccuacggcaccggcagcuggcccgacggcgccgacaucaaccugaugcccaucuga

SEQ ID NO: 180725 - RNA, 1410 nt, Artificial Sequence; identical to SEQ ID NO: 174651
  derived and/or modified CDS sequence (opt4) from neuraminidase__InfluenzaA__AEG65299

SEQ ID NO: 180726 - RNA, 1410 nt, Artificial Sequence; identical to SEQ ID NO: 174774
  derived and/or modified CDS sequence (opt4) from neuraminidase__InfluenzaA__AEG65310

SEQ ID NO: 180727 - RNA, 1410 nt, Artificial Sequence; identical to SEQ ID NO: 174774
  derived and/or modified CDS sequence (opt4) from neuraminidase__InfluenzaA__AEG65321

SEQ ID NO: 180728 - RNA, 1410 nt, Artificial Sequence; identical to SEQ ID NO: 174774
  derived and/or modified CDS sequence (opt4) from neuraminidase__InfluenzaA__AEG65332

SEQ ID NO: 180729 - RNA, 1410 nt, Artificial Sequence; identical to SEQ ID NO: 174774
  derived and/or modified CDS sequence (opt4) from neuraminidase__InfluenzaA__AEG65354

SEQ ID NO: 180730 - RNA, 1410 nt, Artificial Sequence; identical to SEQ ID NO: 174774
  derived and/or modified CDS sequence (opt4) from neuraminidase__InfluenzaA__AEG65365

SEQ ID NO: 180731 - RNA, 1410 nt, Artificial Sequence
  derived and/or modified CDS sequence (opt4) from neuraminidase__InfluenzaA__AEG65376
augaaccccaaccagaagaucaucaccaucggcagcgugagccugaccaucagcaccaucugcuucuucaugcagaucgccauccugaucaccaccgugacccugcacuucaagcaguacgaguucaacagcccccccaacaaccaggugaugcugugcgagcccaccaucaucgagagaaacaucaccgagaucguguaccugaccaacaccaccaucgagaaggagaucugccccaagcuggccgaguacagaaacuggagcaagccccagugcaacaucaccggcuucgcccccuucagcaaggacaacagcaucagacugagcgccggcggcgacaucugggugaccagagagcccuacgugagcugcgaccccgacaagugcuaccaguucgcccugggccagggcaccacccugaacaacgugcacagcaacgacaccgugcacgacagaacccccuacagaacccugcugaugaacgagcugggcgugcccuuccaccugggcacccagcaggugugcaucgccuggagcagcagcagcugccacgacggcaaggccuggcugcacgugugcgugaccggcgacgacgagaacgccaccgccagcuucaucuacaacggcagacugguggacagcaucgugagcuggagcaagaagauccugagaacccaggagagcgagugcgugugcaucaacggcaccugcaccguggugaugaccgacggcagcgccagcggcaaggccgacaccaagauccuguucaucgaggagggcaagaucgugcacaccagcacccugagcggcagcgcccagcacguggaggagugcagcugcuaccccagauaccccggcgugagaugcgugugcagagacaacuggaagggcagcaacagacccaucguggacaucaacaucaaggacuacagcaucgugagcagcuacgugugcagcggccuggugggcgacacccccagaaagaacgacagcagcagcagcagccacugccuggaccccaacaacgaggagggcggccacggcgugaagggcugggccuucgacgacggcaacgacguguggaugggcagaaccaucagcgagaagcugagaagcggcuacgagaccuucaaggugaucgagggcuggagcaaccccaacagcaagcugcagaucaacagacaggugaucguggacagaggcaacagaagcggcuacagcggcaucuucagcguggagggcaagagcugcaucaacagaugcuucuacguggagcugaucagaggcagaaaccaggagaccgaggugcuguggaccagcaacagcaucgugguguucugcggcaccagcggcaccuacggcaccggcagcuggcccgacggcgccgacaucaaccugaugcccaucuga

SEQ ID NO: 180732 - RNA, 1410 nt, Artificial Sequence; identical to SEQ ID NO: 174651
  derived and/or modified CDS sequence (opt4) from neuraminidase__InfluenzaA__AEG65387

SEQ ID NO: 180733 - RNA, 1410 nt, Artificial Sequence; identical to SEQ ID NO: 174651
  derived and/or modified CDS sequence (opt4) from neuraminidase__InfluenzaA__AEG65398

SEQ ID NO: 180734 - RNA, 1410 nt, Artificial Sequence; identical to SEQ ID NO: 174651
  derived and/or modified CDS sequence (opt4) from neuraminidase__InfluenzaA__AEG65409

SEQ ID NO: 180735 - RNA, 1410 nt, Artificial Sequence; identical to SEQ ID NO: 174651
  derived and/or modified CDS sequence (opt4) from neuraminidase__InfluenzaA__AEG65420

SEQ ID NO: 180736 - RNA, 1410 nt, Artificial Sequence; identical to SEQ ID NO: 174651
  derived and/or modified CDS sequence (opt4) from neuraminidase__InfluenzaA__AEG65431

SEQ ID NO: 180737 - RNA, 1410 nt, Artificial Sequence; identical to SEQ ID NO: 174772
  derived and/or modified CDS sequence (opt4) from neuraminidase__InfluenzaA__AEG65442

SEQ ID NO: 180738 - RNA, 1410 nt, Artificial Sequence; identical to SEQ ID NO: 174774
  derived and/or modified CDS sequence (opt4) from neuraminidase__InfluenzaA__AEG65453

SEQ ID NO: 180739 - RNA, 1410 nt, Artificial Sequence; identical to SEQ ID NO: 174774
  derived and/or modified CDS sequence (opt4) from neuraminidase__InfluenzaA__AEG65464

SEQ ID NO: 180740 - RNA, 1410 nt, Artificial Sequence; identical to SEQ ID NO: 174774
  derived and/or modified CDS sequence (opt4) from neuraminidase__InfluenzaA__AEG65475

SEQ ID NO: 180741 - RNA, 1410 nt, Artificial Sequence
  derived and/or modified CDS sequence (opt4) from neuraminidase__InfluenzaA__AEG65486
augaaccccaaccagaagaucaucaccaucggcagcgugagccugaccaucagcaccaucugcuucuucaugcagaucgccauccugaucaccaccgugacccugcacuucaagcaguacgaguucaacagcccccccaacaaccaggugaugcugugcgagcccaccaucaucgagagaaacaucaccgagaucguguaccugaccaacaccaccaucgagaaggagaucugccccaagcuggccgagcacagaaacuggagcaagccccagugcgacaucaccggcuucgcccccuucagcaaggacaacagcaucagacugagcgccggcggcgacaucugggugaccagagagcccuacgugagcugcgaccccgacaagugcuaccaguucgcccugggccagggcaccacccugaacaacgugcacagcaacgacaccgugcacgacagaacccccuacagaacccugcugaugaacgagcugggcgugcccuuccaccugggcaccaagcaggugugcaucgccuggagcagcagcagcugccacgacggcaaggccuggcugcacgugugcgugaccggcgacgacaagaacgccaccgccagcuucaucuacaacggcagacugguggacagcaucgugagcuggagcaagaagauccugagaacccaggagagcgagugcgugugcaucaacggcaccugcaccguggugaugaccgacggcagcgccagcggcaaggccgacaccaagauccuguucaucgaggagggcaagaucgugcacaccagcacccugagcggcagcgcccagcacguggaggagugcagcugcuaccccagauaccccggcgugagaugcgugugcagagacaacuggaagggcagcaacagacccaucguggacaucaacaucaaggacuacagcaucgugagcagcuacgugugcagcggccuggugggcgacacccccagaaagaacgacagcagcagcagcagccacugccuggaccccaacaacgaggagggcggccacggcgugaagggcugggccuucgacgacggcaacgacguguggaugggcagaaccaucagcgagaagcugagaagcggcuacgagaccuucaaggugaucgagggcuggagcaaccccaacagcaagcugcagaucaacagacaggugaucguggacagaggcaacagaagcggcuacagcggcaucuucagcguggagggcaagagcugcaucaacagaugcuucuacguggagcugaucagaggcagaaaggaggagaccgaggugcuguggaccagcaacagcaucgugguguucugcggcaccagcggcaccuacggcaccggcagcuggcccgacggcgccgacaucaaccugaugcccaucuga

SEQ ID NO: 180742 - RNA, 1410 nt, Artificial Sequence; identical to SEQ ID NO: 174774
  derived and/or modified CDS sequence (opt4) from neuraminidase__InfluenzaA__AEG65497

SEQ ID NO: 180743 - RNA, 1410 nt, Artificial Sequence; identical to SEQ ID NO: 174774
  derived and/or modified CDS sequence (opt4) from neuraminidase__InfluenzaA__AEG65508

SEQ ID NO: 180744 - RNA, 1410 nt, Artificial Sequence; identical to SEQ ID NO: 174774
  derived and/or modified CDS sequence (opt4) from neuraminidase__InfluenzaA__AEG65519

SEQ ID NO: 180745 - RNA, 1410 nt, Artificial Sequence; identical to SEQ ID NO: 174774
  derived and/or modified CDS sequence (opt4) from neuraminidase__InfluenzaA__AEG65530

SEQ ID NO: 180746 - RNA, 1410 nt, Artificial Sequence; identical to SEQ ID NO: 174774
  derived and/or modified CDS sequence (opt4) from neuraminidase__InfluenzaA__AEG65541

SEQ ID NO: 180747 - RNA, 1410 nt, Artificial Sequence
  derived and/or modified CDS sequence (opt4) from neuraminidase__InfluenzaA__AEG65563
augaaccccaaccagaagaucaucaccaucggcagcgugagccugaccaucagcaccaucugcuucuucaugcagaucgccauccugaucaccaccgugacccugcacuucaagcaguacgaguucaacagcccccccaacaaccaggugaugcugugcgagcccaccaucaucgagagaaacaucaccgagaucguguaccugaccaacaccaccaucgagaaggagaucugccccaagcuggccgaguacagaaacuggagcaagccccagugcgacaucaccggcuucgcccccuucagcaaggacaacagcaucagacugagcgccggcggcgacaucugggugaccagagagcccuacgugagcugcgaccccgacagaugcuaccaguucgcccugggccagggcaccacccugaacaacgugcacagcaacgacaccgugcacgacagaacccccuacagaacccugcugaugaacgagcugggcgugcccuuccaccugggcaccaagcaggugugcaucgccuggagcagcagcagcugccacgacggcaaggccuggcugcacgugugcgugaccggcgacgacaagaacgccaccgccagcuucaucuacaacggcagacugguggacagcaucgugagcuggagcaagaagauccugagaacccaggagagcgagugcgugugcaucaacggcaccugcaccguggugaugaccgacggcagcgccagcggcaaggccgacaccaagauccuguucaucgaggagggcaagaucgugcacaccagcacccugagcggcagcgcccagcacguggaggagugcagcugcuaccccagauaccccggcgugagaugcgugugcagagacaacuggaagggcagcaacagacccaucguggacaucaacaucaaggacuacagcaucgugagcagcuacgugugcagcggccuggugggcgacacccccagaaagaacgacagcagcagcagcagccacugccuggaccccaacaacgaggagggcggccacggcgugaagggcugggccuucgacgacggcaacgacguguggaugggcagaaccaucagcgagaagcugagaagcggcuacgagaccuucaaggugaucgagggcuggagcaaccccaacagcaagcugcagaucaacagacaggugaucguggacagaggcaacagaagcggcuacagcggcaucuucagcguggagggcaagagcugcaucaacagaugcuucuacguggagcugaucagaggcagaaaggaggagaccgaggugcuguggaccagcaacagcaucgugguguucugcggcaccagcggcaccuacggcaccggcagcuggcccgacggcgccgacaucaaccugaugcccaucuga

SEQ ID NO: 180748 - RNA, 1410 nt, Artificial Sequence
  derived and/or modified CDS sequence (opt4) from neuraminidase__InfluenzaA__AEG65574
augaaccccaaccagaagaucaucaccaucggcagcgugagccugaccaucagcaccaucugcuucuucaugcagaucgccauccugaucaccaccgugacccugcacuucaagcaguacgaguucaacagcccccccaacaaccaggugaugcugugcgagcccaccaucaucgagagaaacaucaccgagaucguguaccugaccaacaccaccaucgagaaggagaucugccccaagcuggccgaguacagaagcuggagcaagccccagugcgacaucaccggcuucgcccccuucagcaaggacaacagcaucagacugagcgccggcggcgacaucugggugaccagagagcccuacgugagcugcgaccccgacagaugcuaccaguucgcccugggccagggcaccacccugaacaacgugcacagcaacgacaccgugcacgacagaacccccuacagaacccugcugaugaacgagcugggcgugcccuuccaccugggcaccaagcaggugugcaucgccuggagcagcagcagcugccacgacggcaaggccuggcugcacgugugcgugaccggcgacgacaagaacgccaccgccagcuucaucuacaacggcagacugguggacagcaucgugagcuggagcaagaagauccugagaacccaggagagcgagugcgugugcaucaacggcaccugcaccguggugaugaccgacggcagcgccagcggcaaggccgacaccaagauccuguucaucgaggagggcaagaucgugcacaccagcacccugagcggcagcgcccagcacguggaggagugcagcugcuaccccagauaccccggcgugagaugcgugugcagagacaacuggaagggcagcaacagacccaucguggacaucaacaucaaggacuacagcaucgugagcagcuacgugugcagcggccuggugggcgacacccccagaaagaacgacagcagcagcagcagccacugccuggaccccaacaacgaggagggcggccacggcgugaagggcugggccuucgacgacggcaacgacguguggaugggcagaaccaucagcgagaagcugagaagcggcuacgagaccuucaaggugaucgagggcuggagcaaccccaacagcaagcugcagaucaacagacaggugaucguggacagaggcaacagaagcggcuacagcggcaucuucagcguggagggcaagagcugcaucaacagaugcuucuacguggagcugaucagaggcagaaaggaggagaccgaggugcuguggaccagcaacagcaucgugguguucugcggcaccagcggcaccuacggcaccggcagcuggcccgacggcgccgacaucaaccugaugcccaucuga

SEQ ID NO: 180749 - RNA, 1410 nt, Artificial Sequence; identical to SEQ ID NO: 180747
  derived and/or modified CDS sequence (opt4) from neuraminidase__InfluenzaA__AEG65585

SEQ ID NO: 180750 - RNA, 1410 nt, Artificial Sequence; identical to SEQ ID NO: 180747
  derived and/or modified CDS sequence (opt4) from neuraminidase__InfluenzaA__AEG65596

SEQ ID NO: 180751 - RNA, 1410 nt, Artificial Sequence
  derived and/or modified CDS sequence (opt4) from neuraminidase__InfluenzaA__AEG65607
augaaccccaaccagaagaucaucaccaucggcagcgugagccugaccaucagcaccaucugcuucuucaugcagaucgccauccugaucaccaccgugacccugcacuucaagcaguacgaguucaacagcccccccaacaaccaggugaugcugugcgagcccaccaucaucgagagaaacaucaccgagaucguguaccugaccaacaccaccaucgagaaggagaucugccccaagcuggccgaguacagaaacuggagcaagccccagugcgacaucaccggcuucgcccccuucagcaaggacaacagcaucagacugagcgccggcggcgacaucugggugaccagagagcccuacgugagcugcgaccccgacaagugcuaccaguucgcccugggccagggcaccacccugaacaacgugcacagcaacgacaccgugcacgacagaacccccuacagaacccugcugaugaacgagcugggcgugcccuuccaccugggcaccaagcaggugugcaucgccuggagcagcagcagcugccacgacggcaaggccuggcugcacgugugcgugaccggcgacgacaagaacgccaccgccagcuucaucuacaacggcagacugguggacagcaucgugagcuggagcaagaagauccugagaacccaggagagcgagugcgugugcaucaacggcaccugcaccguggugaugaccgacggcagcgccagcggcaaggccgacaccaagauccuguucaucgaggagggcaagaucgugcacaccagcacccugagcggcagcgcccagcacguggaggagugcagcugcuaccccagauaccccggcgugagaugcgugugcagagacaacuggaagggcagcaacagacccaucguggacaucaacaucaaggacuacagcaucgccagcagcuacgugugcagcggccuggugggcgacacccccagaaagaacgacagcagcagcagcagccacugccuggaccccaacaacgaggagggcggccacggcgugaagggcugggccuucgacgacggcaacgacguguggaugggcagaaccaucagcgagaagcugagaagcggcuacgagaccuucaaggugaucgagggcuggagcaaccccaacagcaagcugcagaucaacagacaggugaucguggacagaggcaacagaagcggcuacagcggcaucuucagcguggagggcaagagcugcaucaacagaugcuucuacguggagcugaucagaggcagaaaggaggagaccgaggugcuguggaccagcaacagcaucgugguguucugcggcaccagcggcaccuacggcaccggcagcuggcccgacggcgccgacaucaaccugaugcccaucuga

SEQ ID NO: 180752 - RNA, 1410 nt, Artificial Sequence
  derived and/or modified CDS sequence (opt4) from neuraminidase__InfluenzaA__AEG65629
augaaccccaaccagaagaucaucaccaucggcagcgugagccugaccaucagcaccaucugcuucuucaugcagaucgccauccugaucaccaccgugacccugcacuucaagcaguacgaguucaacagcccccccaacaaccaggugaugcugugcgagcccaccaucaucgagagaaacaucaccgagaucguguaccugaccaacaccaccaucgagaaggagaucugccccaagcuggccgaguacagaaacuggagcaagccccagugcgacaucaccggcuucgcccccuucagcaaggacaacagcaucagacugagcgccggcggcgacaucugggugaccagagagcccuacgugagcugcgaccccgacaagugcuaccaguucgcccugggccagggcaccacccugaacaacgugcacagcaacgacaccgugcacgacagaacccccuacagaacccugcugaugaacgagcugggcgugcccuuccaccugggcaccaagcaggugugcaucgccuggagcagcagcagcugccacgacggcaaggccuggcugcacgugugcgugaccggcgacgacaagaacgccaccgccagcuucaucuacaacggcagacugguggacagcaucgugagcuggagcaaggagauccugagaacccaggagagcgagugcgugugcaucaacggcaccugcaccguggugaugaccgacggcagcgccagcggcaaggccgacaccaagauccuguucaucgaggagggcaagaucgugcacaccagcacccugagcggcagcgcccagcacguggaggagugcagcugcuaccccagauaccccggcgugagaugcgugugcagagacaacuggaagggcagcaacagacccaucguggacaucaacaucaaggacuacagcaucgugagcagcuacgugugcagcggccuggugggcgacacccccagaaagaacgacagcagcagcagcagccacugccuggaccccaacgacgaggagggcggccacggcgugaagggcugggccuucgacgacggcaacgacguguggaugggcagaaccaucagcgagaagcugagaagcggcuacgagaccuucaaggugaucgagggcuggagcaaccccaacagcaagcugcagaucaacagacaggugaucguggacagaggcaacagaagcggcuacagcggcaucuucagcguggagggcaagagcugcaucaacagaugcuucuacguggagcugaucagaggcagaaaggaggagaucgaggugcuguggaccagcaacagcaucgugguguucugcggcaccagcggcaccuacggcaccggcagcuggcccgacggcgccgacaucaaccugaugcccaucuga

SEQ ID NO: 180753 - RNA, 1410 nt, Artificial Sequence; identical to SEQ ID NO: 180752
  derived and/or modified CDS sequence (opt4) from neuraminidase__InfluenzaA__AEG65640

SEQ ID NO: 180754 - RNA, 1410 nt, Artificial Sequence; identical to SEQ ID NO: 174195
  derived and/or modified CDS sequence (opt4) from neuraminidase__InfluenzaA__AEG65651

SEQ ID NO: 180755 - RNA, 1410 nt, Artificial Sequence; identical to SEQ ID NO: 174774
  derived and/or modified CDS sequence (opt4) from neuraminidase__InfluenzaA__AEG65662

SEQ ID NO: 180756 - RNA, 1410 nt, Artificial Sequence; identical to SEQ ID NO: 174774
  derived and/or modified CDS sequence (opt4) from neuraminidase__InfluenzaA__AEG65673

SEQ ID NO: 180757 - RNA, 1410 nt, Artificial Sequence; identical to SEQ ID NO: 174774
  derived and/or modified CDS sequence (opt4) from neuraminidase__InfluenzaA__AEG65684

SEQ ID NO: 180758 - RNA, 1410 nt, Artificial Sequence; identical to SEQ ID NO: 180731
  derived and/or modified CDS sequence (opt4) from neuraminidase__InfluenzaA__AEG65695

SEQ ID NO: 180759 - RNA, 1410 nt, Artificial Sequence
  derived and/or modified CDS sequence (opt4) from neuraminidase__InfluenzaA__AEG65706
augaaccccaaccagaagaucaucaccaucggcagcgugagccugaccaucagcaccaucugcuucuucaugcagaucgccauccugaucaccaccgugacccugcacuucaagcaguacgaguucaacagcccccccaacaaccaggugaugcugugcgagcccaccaucaucgagagaaacaucaccgagaucguguaccugaccaacaccaccaucgagaaggagaucugccccaagcuggccgaguacagaaacuggagcaagccccagugcaacaucaccggcuucgcccccuucagcaaggacaacagcaucagacugagcgccggcggcgacaucugggugaccagagagcccuacgugagcugcgaccccgacaagugcuaccaguucgcccugggccagggcaccacccugaacaacgugcacagcaacgacaccgugcacgacagaacccccuacagaacccugcugaugaacgagcugggcgugcccuuccaccugggcaccaagcaggugugcaucgccuggagcagcagcagcugccacgacggcaaggccuggcugcacgugugcgugaccggcgacgacaagaacgccaccgccagcuucaucuacaacggcagacugguggacagcaucgugagcuggagcaaggagauccugagaacccaggagagcgagugcgugugcaucaacggcaccugcaccguggugaugaccgacggcagcgccagcggcaaggccgacaccaagauccuguucaucgaggagggcaagaucgugcacaccagcacccugagcggcagcgcccagcacguggaggagugcagcugcuaccccagauaccccggcgugagaugcgugugcagagacaacuggaagggcagcaacagacccaucguggacaucaacaucaaggacuacagcaucgugagcagcuacgugugcagcggccuggugggcgacacccccagaaagaacgacagcagcagcagcagccacugccuggaccccaacaacgaggagggcggccacggcgugaagggcugggccuucgacgacggcaacgacguguggaugggcagaaccaucagcgagaagcugagaagcggcuacgagaccuucaaggugaucgagggcuggagcaaccccaacagcaagcugcagaucaacagacaggugaucguggacagaggcaacagaagcggcuacagcggcaucuucagcguggagggcaagagcugcaucaacagaugcuucuacguggagcugaucagaggcagaaaggaggagaacgaggugcuguggaccagcaacagcaucgugguguucugcggcaccagcggcaccuacggcaccggcagcuggcccgacggcgccgacaucaaccugaugcccaucuga

SEQ ID NO: 180760 - RNA, 1410 nt, Artificial Sequence
  derived and/or modified CDS sequence (opt4) from neuraminidase__InfluenzaA__AEG65728
augaaccccaaccagaagaucaucaccaucggcagcgugagccugaccaucagcaccaucugcuucuucaugcagaucgccauccugaucaccaccgugacccugcacuucaagcaguacgaguucaacagcccccccaacaaccaggugaugcugugcgagcccaccaucaucgagagaaacaucaccgagaucguguaccugaccaacaccaccaucgagaaggagaucugccccaagcuggccgaguacagaaacuggagcaagccccagugcaacaucaccggcuucgcccccuucagcaaggacaacagcaucagacugagcgccggcggcgacaucugggugaccagagagcccuacgugagcugcgaccccgacaagugcuaccaguucgcccugggccagggcaccacccugaacaacgugcacagcaacgacaccgugcacgacagaacccccuacagaacccugcugaugaacgagcugggcgugcccuuccaccugggcaccaagcaggugugcaucgccuggagcagcagcagcugccacgacggcaaggccuggcugcacgugugcgugaccggcgacgacaagaacgccaccgccagcuucaucuacaacggcagacugguggacagcaucgugagcuggagcaaggagauccugagaacccaggagagcgagugcgugugcaucaacggcaccugcaccguggugaugaccgacggcagcgccagcggcaaggccgacaccaagauccuguucaucgaggagggcaagaucgugcacaccagcacccugagcggcagcgcccagcacguggaggagugcagcugcuaccccagauaccccggcgugagaugcgugugcagagacaacuggaagggcagcaacagacccaucguggacaucaacaucaaggacuacagcaucgugagcagcuacgugugcagcggccuggugggcgacacccccagaaagaacgacagcagcagcagcagccacugccuggaccccaacaacgaggagggcggccacggcgugaagggcugggccuucgacgacggcaacgacguguggaugggcagaaccaucagcgagaagcugagaagcggcuacgagaccuucaaggugaucgagggcuggagcaaccccaacagcaagcugcagaucaacagacaggugaucguggacagaggcaacagaagcggcuacagcggcaucuucagcguggagggcaagagcugcaucaacagaugcuucuacguggagcugaucagaggcagaaaggaggagaccgaggugcuguggaccagcaacagcaucgugguguucugcggcaccagcggcaccuacggcaccggcagcuggcccgacggcgccgagaucaaccugaugcccaucuga

SEQ ID NO: 180761 - RNA, 1410 nt, Artificial Sequence
  derived and/or modified CDS sequence (opt4) from neuraminidase__InfluenzaA__AEG65739
augaaccccaaccagaagaucaucaccaucggcagcgugagccugaccaucagcaccaucugcuucuucaugcagaucgccauccugaucaccaccgugacccugcacuucaagcaguacgaguucagcagcccccccaacaaccaggugaugcccugcgagcccaccaucaucgagagaaacaucaccgagaucguguaccugaccaacaccaccaucgagaaggagaucugccccaagcuggccgaguacagaaacuggagcaagccccagugcgacaucaccggcuucgcccccuucagcaaggacaacagcaucagacugagcgccggcggcgacaucugggugaccagagagcccuacgugagcugcgaccccgacaagugcuaccaguucgcccugggccagggcaccacccugaacaacgugcacagcaacgacaccgugcacgacagaacccccuacagaacccugcugaugaacgagcugggcgugcccuuccaccugggcaccaagcaggugugcaucgccuggagcagcagcagcugccacgacggcaaggccuggcugcacgugugcgugaccggcgacgacaagaacgccaccgccagcuucaucuacaacggcagacugguggacagcaucgugagcuggagcaaggagauccugagaacccaggagagcgagugcgugugcaucaacggcaccugcaccguggugaugaccgacggcagcgccagcggcaaggccgacaccaagauccuguucaucgaggagggcaagaucgugcacaccagcacccugagcggcagcgcccagcacguggaggagugcagcugcuaccccagauaccccggcgugagaugcgugugcagagacaacuggaagggcagcaacagacccaucguggacaucaacaugaaggacuacagcaucgugagcagcuacgugugcagcggccuggugggcgacacccccagaaagaacgacagcagcagcagcagccacugccuggaccccaacaacgaggagggcggccacggcgugaagggcugggccuucgacgacggcaacgacguguggaugggcagaaccaucagcgagaagcugagaagcggcuacgagaccuucaaggugaucgagggcuggagcaaccccaacagcaagcugcagaucaacagacaggugaucguggacagaggcaacagaagcggcuacagcggcaucuucagcguggagggcaagagcugcaucaacagaugcuucuacguggagcugaucagaggcagaaaggaggagaccgaggugcuguggaccagcaacagcaucgugguguucugcggcaccagcggcaccuacggcaccggcagcuggcccgacggcgccgacaucaaccugaugcccaucuga

SEQ ID NO: 180762 - RNA, 1410 nt, Artificial Sequence; identical to SEQ ID NO: 176624
  derived and/or modified CDS sequence (opt4) from neuraminidase__InfluenzaA__AEG65750

SEQ ID NO: 180763 - RNA, 1410 nt, Artificial Sequence; identical to SEQ ID NO: 180760
  derived and/or modified CDS sequence (opt4) from neuraminidase__InfluenzaA__AEG65761

SEQ ID NO: 180764 - RNA, 1410 nt, Artificial Sequence
  derived and/or modified CDS sequence (opt4) from neuraminidase__InfluenzaA__AEG65772
augaaccccaaccagaagaucaucaccaucggcagcgugagccugaccaucagcaccaucugcuucuucaugcagaccgccauccugaucaccaccgugacccugcacuucaagcaguacgaguucaacagcccccccaacaaccaggugaugcugugcgagcccaccaucaucgagagaaacaucaccgagaucguguaccugaccaacaccaccaucgagaaggagaugugccccaagcuggccgaguacagaaacuggagcaagccccagugcgacaucaccggcuucgcccccuucagcaaggacaacagcaucagacugagcgccggcggcgacaucugggugaccagagagcccuacgugagcugcgaccccgacaagugcuaccaguucgcccugggccagggcaccacccugaacaacgugcacagcaacgacaccgugcacgacagaacccccuacagaacccugcugaugaacgagcugggcgugcccuuccaccugggcaccaagcaggugugcaucgccuggagcagcagcagcugccacgacggcaaggccuggcugcacgugugcgugaccggcgacgacaagaacgccaccgccagcuucaucuacaacggcagacugguggacagcaucgugagcuggagcaagaagauccugagaacccaggagagcgagugcgugugcaucaacggcaccugcaccguggugaugaccgacggcagcgccagcggcaaggccgacaccaagauccuguucaucgaggagggcaagaucauccacaccagcacccugagcggcagcgcccagcacguggaggagugcagcugcuaccccagauaccccggcgugagaugcgugugcagagacaacuggaagggcagcaacagacccaucguggacaucaacaucaaggacuacagcaucgugagcagcuacgugugcagcggccuggugggcgacacccccagaaagaacgacagcagcagcagcagccacugccuggaccccaacaacgaggagggcggccacggcgugaagggcugggccuucgacgacggcaacgacguguggaugggcagaaccaucagcgagaagcugagaagcggcuacgagaccuucaaggugaucgagggcuggagcaagcccaacagcaagcugcagaucaacagacaggugaucguggacagaggcaacagaagcggcuacagcggcaucuucagcguggagggcaagagcugcaucaacagaugcuucuacguggagcugaucagaggcagaaaggaggagaccgaggugcuguggaccagcaacagcaucgugguguucugcggcaccagcggcaccuacggcaccggcagcuggcccgacggcgccgacaucaaccugaugcccaucuga

SEQ ID NO: 180765 - RNA, 1410 nt, Artificial Sequence; identical to SEQ ID NO: 179578
  derived and/or modified CDS sequence (opt4) from neuraminidase__InfluenzaA__AEG65783

SEQ ID NO: 180766 - RNA, 1410 nt, Artificial Sequence
  derived and/or modified CDS sequence (opt4) from neuraminidase__InfluenzaA__AEG65794
augaaccccaaccagaagaucaucaccaucggcagcgugagccugaccaucagcaccaucugcuucuucaugcagaucgccauccugaucaccaccaucacccugcacuucaagcaguacgaguucaacagcccccccaacaaccaggugaugcugugcgagcccaccaucaucgagagaaacaucaccgagaucguguaccugaccaacaccaccaucgagaaggagaucugccccaagcuggccgaguacagaaacuggagcaagccccagugcgacaucaccggcuucgcccccuucagcaaggacaacagcaucagacugagcgccggcggcgacaucugggugaccagagagcccuacgugagcugcgaccccgacaagugcuaccaguucgcccugggccagggcaccacccugaacaacgugcacagcaacaacaccgugagagacagaacccccuacagaacccugcugaugaacgagcugggcgugcccuuccaccugggcaccaagcaggugugcaucgccuggagcagcagcagcugccacgacggcaaggccuggcugcacgugugcaucaccggcgacgacaagaacgccaccgccagcuucaucuacaacggcagacugguggacagcguggugagcuggagcaaggagauccugagaacccaggagagcgagugcgugugcaucaacggcaccugcaccguggugaugaccgacggcagcgccagcggcaaggccgacaccaagauccuguucaucgaggagggcaagaucgugcacaccagcacccugagcggcagcgcccagcacguggaggagugcagcugcuaccccagauaccccggcgugagaugcgugugcagagacaacuggaagggcagcaacagacccaucguggacaucaacaucaaggaccacagcaucgugagcagcuacgugugcagcggccuggugggcgacacccccagaaagaacgacagcagcagcagcagccacugccuggaccccaacaacgaggagggcggccacggcgugaagggcugggccuucgacgacggcaacgacguguggaugggcagaaccaucaacgagaccagcagacugggcuacgagaccuucaaggugaucgagggcuggagcaaccccaagagcaagcugcagaucaacagacaggugaucguggacaagggcaacagaagcggcuacagcggcaucuucagcguggagggcaagagcugcaucaacagaugcuucuacguggagcugaucagaggcagaaaggaggagaccgaggugcuguggaccagcaacagcaucgugguguucugcggcaccagcggcaccuacggcaccggcagcuggcccgacggcgccgaccugaaccugaugcccaucuga

SEQ ID NO: 180767 - RNA, 1410 nt, Artificial Sequence; identical to SEQ ID NO: 179578
  derived and/or modified CDS sequence (opt4) from neuraminidase__InfluenzaA__AEG65805

SEQ ID NO: 180768 - RNA, 1410 nt, Artificial Sequence
  derived and/or modified CDS sequence (opt4) from neuraminidase__InfluenzaA__AEG65816
augaaccccaaccagaagaucaucaccaucggcagcgugagccugaccaucagcaccaucugcuucuucaugcagaucgccauccugaucaccaccgugacccugcacuucaagcaguacgaguucaacagcccccccaacaaccaggugaugcugugcgagcccaccaucaucgagagaaacaucaccgagaucguguaccugaccaacaccaccaucgagaaggagaucugccccaagcuggccgaguacagaaacuggagcaagccccagugcgacaucaccggcuucgcccccuucagcaaggacaacagcaucagacugagcgccggcggcgacaucugggugaccagagagcccuacgugagcugcgaccccgacaagugcuaccaguucgcccugggccagggcaccacccugaacaacgugcacagcaacaacaccgugagagacagaacccccuacagaacccugcugaugaacgagcugggcgugcccuuccaccugggcaccaagcaggugugcaucgccuggagcagcagcagcugccacgacggcaaggccuggcugcacgugugcaucaccggcgacgacaagaacgccaccgccagcuucaucuacaacggcagacugguggacagcguggugagcuggagcaaggagauccugagaacccaggagagcgagugcgugugcaucaacggcaccugcaccguggugaugaccgacggcagcgccagcggcgaggccgacaccaagauccuguucaucgaggagggcaagaucgugcacaccagcacccugagcggcagcgcccagcacguggaggagugcagcugcuaccccagauaccccggcgugagaugcgugugcagagacaacuggaagggcagcaacagacccaucguggacaucaacaucaaggaccacagcaucgugagcagcuacgugugcagcggccuggugggcgacacccccagaaagaacgacagcagcagcagcagccacugccuggaccccaacaacgaggagggcggccacggcgugaagggcugggccuucgacgacggcaacgacguguggaugggcagaaccaucaacgagaccagcagacugggcuacgagaccuucaaggugaucgagggcuggagcaaccccaagagcaagcugcagaucaacagacaggugaucguggacagaggcaacagaagcggcuacagcggcaucuucagcguggagggcaagagcugcaucaacagaugcuucuacguggagcugaucagaggcagaaaggaggagaccgaggugcuguggaccagcaacagcaucgugguguucugcggcaccagcggcaccuacggcaccggcagcuggcccgacggcgccgaccugaaccugaugcccaucuga

SEQ ID NO: 180769 - RNA, 1410 nt, Artificial Sequence
  derived and/or modified CDS sequence (opt4) from neuraminidase__InfluenzaA__AEG79808
augaaccccaaccagaagaucaucaccaucggcagcgugugcaugaccaucggcauggccaaccugauccugcagaucggcaacaucaucagcaucuggaucagccacagcauccagcugggcaaccagaaccagaucgagaccugcaaccagagcgugaucaccuacgagaacaacaccugggugaaccagaccuacgugaacaucagcaacaccaacuucgccgccggccagagcguggugagcgugaagcuggccggcaacagcagccugugccccgugagcggcugggccaucuacagcaaggacaacagcaucagaaucggcagcaagggcgacguguucgugaucagagagcccuucaucagcugcagcccccuggagugcagaaccuucuuccugacccagggcgcccugcugaacgacaagcacagcaacggcaccaucaaggacagaagccccuacagaacccugaugagcugccccaucggcgaggugcccagccccuacaacagcagauucgagagcguggccuggagcgccagcgccugccacgacggcaucaacuggcugaccaucggcaucagcggccccgacaacggcgccguggccgugcugaaguacaacggcaucaucaccgacaccaucaagagcuggagaaacaacauccugagaacccaggagagcgagugcgccugcgugaacggcagcugcuucaccaucaugaccgacggccccagcgacggccaggccagcuacaagaucuucagaaucgagaagggcaagaucgugaagagcguggagaugaacgcccccaacuaccacuacgaggagugcagcugcuaccccgacagcagcgagaucaccugcgugugcagagacaacuggcacggcagcaacagacccugggugagcuucaaccagaaccuggaguaccagaucggcuacaucugcagcggcaucuucggcgacaaccccagacccaacgacaagaccggcagcugcggccccgugagcagcaacggcgccaacggcgugaagggcuucagcuucaaguacggcaacggcguguggaucggcagaaccaagagcaucagcagcagaaagggcuucgagaugaucugggaccccaacggcuggaccggcaccgacaacaacuucagcaucaagcaggacaucgugggcaucaacgaguggagcggcuacagcggcagcuucgugcagcaccccgagcugaccggccuggacugcaucagacccugcuucuggguggagcugaucagaggcagacccaaggagaacaccaucuggaccagcggcagcagcaucagcuucugcggcgugaacagcgacaccgugggcuggagcuggcccgacggcgccgagcugcccuucaccaucgacaaguga

SEQ ID NO: 180770 - RNA, 1410 nt, Artificial Sequence; identical to SEQ ID NO: 180769
  derived and/or modified CDS sequence (opt4) from neuraminidase__InfluenzaA__AEG79814

SEQ ID NO: 180771 - RNA, 1410 nt, Artificial Sequence
  derived and/or modified CDS sequence (opt4) from neuraminidase__InfluenzaA__AEG79826
augaaccccaaccagaagaucaucaccaucagcagcgugugcaugaccaucggcauggccaaccugauccugcagaucggcaacaucaucagcaucuggaucagccacagcauccagcugggcaaccagaaccagaucgagaccugcaaccagagcgugaucaccuacgagaacaacaccugggugaaccagaccuacgugaacaucagcaacaccaacuucgccgccggccagagcguggugagcgugaagcuggccggcaacagcagccugugccccgugagcggcugggccaucuacagcaaggacaacagcaucagaaucggcagcaagggcgacguguucgugaucagagagcccuucaucagcugcagcccccuggagugcagaaccuucuuccugacccagggcgcccugcugaacgacaagcacagcaacggcaccaucaaggacagaagccccuacagaacccugaugagcugccccaucggcgaggugcccagccccuacaacagcagauucgagagcguggccuggagcgccagcgccugccacgacggcaucaacuggcugaccaucggcaucagcggccccgacaacggcgccguggccgugcugaaguacaacggcaucaucaccgacaccaucaagagcuggagaaacaacauccugagaacccaggagagcgagugcgccugcgugaacggcagcugcuucaccaucaugaccgacggccccagcgacggccaggccagcuacaagaucuucagaaucgagaagggcaagaucgugaagagcguggagaugaacgcccccaacuaccacuacgaggagugcagcugcuaccccgacagcagcgagaucaccugcgugugcagagacaacuggcacggcagcaacagacccugggugagcuucaaccagaaccuggaguaccagaucggcuacaucugcagcggcaucuucggcgacaaccccagacccaacgacaagaccggcagcugcggccccgugagcagcaacggcgccaacggcgugaagggcuucagcuucaaguacggcaacggcguguggaucggcagaaccaagagcaucagcagcagaaagggcuucgagaugaucugggaccccaacggcuggaccggcaccgacaacaacuucagcaucaagcaggacaucgugggcaucaacgaguggagcggcuacagcggcagcuucgugcagcaccccgagcugaccggccuggacugcaucagacccugcuucuggguggagcugaucagaggcagacccaaggagaacaccaucuggaccagcggcagcagcaucagcuucugcggcgugaacagcgacaccaugggcuggagcuggcccgacggcgccgagcugcccuucaccaucgacaaguga

SEQ ID NO: 180772 - RNA, 1410 nt, Artificial Sequence
  derived and/or modified CDS sequence (opt4) from neuraminidase__InfluenzaA__AEG79830
augaaccccaaccagaagaucaucaccaucagcagcgugugcaugaccaucggcauggccaaccugauccugcagaucggcaacaucaucagcaucuggaucagccacagcauccagcugggcaaccagaaccagaucgagaccugcaaccagagcgugaucaccuacgagaacaacaccugggugaaccagaccuacgugaacaucagcaacaccaacuucgccgccggccagagcguggugagcgugaagcuggccggcaacagcagccugugccccgugagcggcugggccaucuacagcaaggacaacagcaucagaaucggcagcaagggcgacguguucgugaucagagagcccuucaucagcugcagcccccuggagugcagaaccuucuuccugacccagggcgcccugcugaacgacaagcacagcaacggcaccaucaaggacagaagccccuacagaacccugaugagcugccccaucggcgaggugcccagccccuacaacagcagauucgagagcguggccuggagcgccagcgccugccacgacggcaucaacuggcugaccaucggcaucagcggccccgacaacggcgccguggccgugcugaaguacaacggcaucaucaccgacaccaucaagagcuggagaaacaacauccugagaacccaggagagcgagugcgccugcgugaacggcagcugcuucaccgugaugaccgacggccccagcgacggccaggccagcuacaagaucuucagaaucgagaagggcaagaucgugaagagcguggagaugaacgcccccaacuaccacuacgaggagugcagcugcuaccccgacagcagcgagaucaccugcgugugcagagacaacuggcacggcagcaacagacccugggugagcuucaaccagaaccuggaguaccagaucggcuacaucugcagcggcaucuucggcgacaaccccagacccaacgacaagaccggcagcugcggccccgugagcagcaacggcgccaacggcgugaagggcuucagcuucaaguacggcaacggcguguggaucggcagaaccaagagcaucagcagcagaaagggcuucgagaugaucugggaccccaacggcuggaccggcaccgacaacaacuucagcaucaagcaggacaucgugggcaucaacgaguggagcggcuacagcggcagcuucgugcagcaccccgagcugaccggccuggacugcaucagacccugcuucuggguggagcugaucagaggcagacccaaggagaacaccaucuggaccagcggcagcagcaucagcuucugcggcgugaacagcgacaccgugggcuggagcuggcccgacggcgccgagcugcccuucaccaucgacaaguga

SEQ ID NO: 180773 - RNA, 1410 nt, Artificial Sequence; identical to SEQ ID NO: 180317
  derived and/or modified CDS sequence (opt4) from neuraminidase__InfluenzaA__AEG79836

SEQ ID NO: 180774 - RNA, 1410 nt, Artificial Sequence
  derived and/or modified CDS sequence (opt4) from neuraminidase__InfluenzaA__AEH59356
augaaccccaaccagaagaucaucaccaucggcagcgugugcaugaccaucggcauggccaaccugauccugcagaucggcaacaucaucagcaucuggaucagccacagcauccagcugggcaaccagaaccagaucgagaccugcaaccagagcgugaucaccuacgagaacaacaccugggugaaccagaccuacgugaacaucagcaacaccaacuucgccgccggccagagcguggugagcgugaagcuggccggcaacagcagccugugccccgugagcggcugggccaucuacagcaaggacaacagcaucagaaucggcagcaagggcgacguguucgugaucagagagcccuucaucagcugcagcccccuggagugcagaaccuucuuccugacccagggcacccugcugaacgacaagcacagcaacggcaccaucaaggacagaagccccuacagaacccugaugagcugccccaucggcgaggugcccagccccuacaacagcagauucgagagcguggccuggagcgccagcgccugccacgacggcaucaacuggcugaccaucggcaucagcggccccgacaacggcgccguggccgugcugaaguacaacggcaucaucaccgacaccaucaagagcuggagaaacaacauccugagaacccaggagagcgagugcgccugcgugaacggcagcugcuucaccaucaugaccgacggccccagcgacggccaggccagcuacaagaucuucagaaucgagaagggcaagaucgugaagagcguggagaugaacgcccccaacuacuacuacgaggagugcagcugcuaccccgacagcagcgagaucaccugcgugugcagagacaacuggcacggcagcaacagacccugggugagcuucaaccagaaccuggaguaccagaucggcuacaucugcagcggcaucuucggcgacaaccccagacccaacgacaagaccggcagcugcggccccgugagcagcaacggcgccaacggcgugaagggcuucagcuucaaguacggcaacggcguguggaucggcagaaccaagagcaucagcagcagaaagggcuucgagaugaucugggaccccaacggcuggaccggcaccgacaacaacuucagcaucaagcaggacaucgugggcaucaacgaguggagcggcuacagcggcagcuucgugcagcaccccgagcugaccggccuggacugcaucagacccugcuucuggguggagcugaucagaggcagacccaaggagaacaccguguggaccagcggcagcagcaucagcuucugcggcgugaacagcgacaccgugggcuggagcuggcccgacggcgccgagcugcccuucaccaucgacaaguga

SEQ ID NO: 180775 - RNA, 1410 nt, Artificial Sequence; identical to SEQ ID NO: 180769
  derived and/or modified CDS sequence (opt4) from neuraminidase__InfluenzaA__AEH59360

SEQ ID NO: 180776 - RNA, 1410 nt, Artificial Sequence
  derived and/or modified CDS sequence (opt4) from neuraminidase__InfluenzaA__AEH59364
augaaccccaaccagaagaucaucaccaucggcagcgugugcaugaccaucggcauggccaaccugauccugcagaucggcaacaucaucagcaucuggaucagccacagcauccagcugggcaaccagaaccagaucgagaccugcaaccagagcgugaucaccuacgagaacaacaccugggugaaccagaccuacgugaacaucagcaacaccaacuucgccgccggccagagcguggugagcgugaagcuggccggcaacagcagccugugccccgugagcggcugggccaucuacagcaaggacaacagcaucagaaucggcagcaagggcgacguguucgugaucagagagcccuucaucagcugcagcccccuggagugcagaaccuucuuccugacccagggcgcccugcugaacgacaagcacagcaacggcaccaucaaggacagaagccccuacagaacccugaugagcugccccaucggcgaggugcccagccccuacaacagcagauucgagagcguggccuggagcgccagcgccugccacgacggcaucaacuggcugaccaucggcaucagcggccccgacaacggcgccguggccgugcugaaguacaacggcaucaucaccgacaccaucaagagcuggagaaacaacauccugagaacccaggagagcgagugcgccugcgugaacggcagcugcuucaccgugaugaccgacggccccaacgacggccaggccagcuacaagaucuucagaaucgagaagggcaagaucgugaagagcguggagaugaacgcccccaacuaccacuacgaggagugcagcugcuaccccgacagcagcgagaucaccugcgugugcagagacaacuggcacggcgccaacagacccugggugagcuucaaccagaaccuggaguaccagaucggcuacaucugcagcggcaucuucggcgacaaccccagacccaacgacaagaccggcagcugcggccccgugagcagcaacggcgccaacggcgugaagggcuucagcuucaaguacggcaacggcguguggaucggcagaaccaagagcaucagcagcagaaacggcuucgagaugaucugggaccccaacggcuggaccggcaccgacaacaacuucagcaucaagcaggacaucgugggcaucaacgaguggagcggcuacagcggcagcuucgugcagcaccccgagcugaccggccuggacugcaucagacccugcuucuggguggagcugaucagaggcagacccaaggagaacaccaucuggaccagcggcagcagcaucagcuucugcggcgugaacagcgacaccgugggcuggagcuggcccgacggcgccgagcugcccuucaccaucgacaaguga

SEQ ID NO: 180777 - RNA, 1410 nt, Artificial Sequence
  derived and/or modified CDS sequence (opt4) from neuraminidase__InfluenzaA__AEH59366
augaaccccaaccagaagaucaucaccaucggcagcgugugcaugaccaucggcauggccaaccugauccugcagaucggcaacaucaucagcaucuggaucagccacagcauccagcugggcaaccagaaccagaucgagaccugcaaccagagcgugaucaccuacgagaacaacaccugggugaaccagaccuacgugaacaucagcaacaccaacuucgccgccggccagagcguggugagcgugaagcuggccggcaacagcagccugugccccgugagcggcugggccaucuacagcaaggacaacagcaucagaaucggcagcaagggcgacguguucgugaucagagagcccuucaucagcugcagcccccuggagugcagaaccuucuuccugacccagggcgcccugcugaacgacaagcacagcaacggcaccaucaaggacagaagccccuacagaacccugaugagcugccccaucggcggcgugcccagccccuacaacagcagauucgagagcguggccuggagcgccagcgccugccacgacggcaucaacuggcugaccaucggcaucagcggccccgacaacggcgccguggccgugcugaaguacaacggcaucaucaccgacaccaucaagagcuggagaaacaacauccugagaacccaggagagcgagugcgccugcgugaacggcagcugcuucaccaucaugaccgacggccccagcgacggccaggccagcuacaagaucuucagaaucgagaagggcaagaucgugaagagcguggagaugaacgcccccaacuaccacuacgaggagugcagcugcuaccccgacagcagcgagaucaccugcgugugcagagacaacuggcacggcagcaacagacccugggugagcuucaaccagaaccuggaguaccagaucggcuacaucugcagcggcaucuucggcgacaaccccagacccaacgacaagaccggcagcugcggccccgugagcagcaacggcgccaacggcgugaagggcuucagcuucaaguacggcaacggcguguggaucggcagaaccaagagcaucagcagcagaaagggcuucgagaugaucugggaccccaacggcuggaccggcaccgacaacaacuucagcaucaagcaggacaucgugggcaucaacgaguggagcggcuacagcggcagcuucgugcagcaccccgagcugaccggccuggacugcaucagacccugcuucuggguggagcugaucagaggcagacccaaggagaacaccaucuggaccagcggcagcagcaucagcuucugcggcgugaacagcgacaccgugggcuggagcuggcccgacggcgccgagcugcccuucaccaucgacaaguga

SEQ ID NO: 180778 - RNA, 1410 nt, Artificial Sequence; identical to SEQ ID NO: 180769
  derived and/or modified CDS sequence (opt4) from neuraminidase__InfluenzaA__AEH59368

SEQ ID NO: 180779 - RNA, 1410 nt, Artificial Sequence; identical to SEQ ID NO: 180317
  derived and/or modified CDS sequence (opt4) from neuraminidase__InfluenzaA__AEH59370

SEQ ID NO: 180780 - RNA, 1410 nt, Artificial Sequence; identical to SEQ ID NO: 180776
  derived and/or modified CDS sequence (opt4) from neuraminidase__InfluenzaA__AEH59372

SEQ ID NO: 180781 - RNA, 1410 nt, Artificial Sequence; identical to SEQ ID NO: 180776
  derived and/or modified CDS sequence (opt4) from neuraminidase__InfluenzaA__AEH59376

SEQ ID NO: 180782 - RNA, 1410 nt, Artificial Sequence; identical to SEQ ID NO: 180317
  derived and/or modified CDS sequence (opt4) from neuraminidase__InfluenzaA__AEH59378

SEQ ID NO: 180783 - RNA, 1410 nt, Artificial Sequence; identical to SEQ ID NO: 180776
  derived and/or modified CDS sequence (opt4) from neuraminidase__InfluenzaA__AEH59382

SEQ ID NO: 180784 - RNA, 1410 nt, Artificial Sequence
  derived and/or modified CDS sequence (opt4) from neuraminidase__InfluenzaA__AEH59384
augaaccccaaccagaagaucaucaccaucggcagcgugugcaugaccaucggcauggccaaccugauccugcagaucggcaacaucaucagcaucuggaucagccacagcauccagcugggcaaccagagccagaucgagaccugcaaccagagcgugaucaccuacgagaacaacaccugggugaaccagaccuacgugaacaucagcaacaccaacuucgccgccggccagagcguggugagcgugaagcuggccggcaacagcagccugugccccgugagcggcugggccaucuacagcaaggacaacagcaucagaaucggcagcaagggcgacguguucgugaucagagagcccuucaucagcugcagcccccuggagugcagaaccuucuuccugacccagggcgcccugcugaacgacaagcacagcaacggcaccaucaaggacagaagccccuacagaacccugaugagcugccccaucggcgaggugcccagccccuacaacagcagauucgagagcguggccuggagcgccagcgccugccacgacggcaucaacuggcugaccaucggcaucagcggccccgacaacggcgccguggccgugcugaaguacaacggcaucaucaccgacaccaucaagagcuggagaaacaacauccugagaacccaggagagcgagugcgccugcgugaacggcagcugcuucaccaucaugaccgacggccccagcgacggccaggccagcuacaagaucuucagaaucgagaagggcagaaucgugaagagcguggagaugaacgcccccaacuaccacuacgaggagugcagcugcuaccccgacagcagcgagaucaccugcgugugcagagacaacuggcacggcagcaacagacccugggugagcuucaaccagaaccuggaguaccagaucggcuacaucugcagcggcaucuucggcgacaaccccagacccaacgacaagaccggcagcugcggccccgugagcagcaacggcgccaacggcgugaagggcuucagcuucaaguacggcaacggcguguggaucggcagaaccaagagcaucagcagcagaaagggcuucgagaugaucugggaccccaacggcuggaccggcaccgacaacaacuucagcaucaagcaggacaucgugggcaucaacgaguggagcggcuacagcggcagcuucgugcagcaccccgagcugaccggccuggacugcaucagacccugcuucuggguggagcugaucagaggcagacccaaggagaacaccaucuggaccagcggcagcagcaucagcuucugcggcgugaacagcgacaccgugggcuggagcuggcccgacggcgccgagcugcccuucaccaucgacaaguga

SEQ ID NO: 180785 - RNA, 1410 nt, Artificial Sequence
  derived and/or modified CDS sequence (opt4) from neuraminidase__InfluenzaA__AEH59386
augaaccccaaccagaagaucaucaccaucggcagcgugugcaugaccaucggcauggccaaccugauccugcagaucggcaacaucaucagcaucuggaucagccacagcauccagaucggcaaccagaaccagaucgagaccugcaaccagagcgugaucaccuacgagaacaacaccugggugaaccagaccuacgugaacaucagcaacaccaacuucgccgccggccagagcguggugagcgugaagcuggccggcaacagcagccugugccccgugagcggcugggccaucuacagcaaggacaacagcaucagaaucggcagcaagggcgacguguucgugaucagagagcccuucaucagcugcagcccccuggagugcagaaccuucuuccugacccagggcgcccugcugaacgacaagcacagcaacggcaccaucaaggacagaagccccuacagaacccugaugagcugccccaucggcgaggugcccagccccuacaacagcagauucgagagcguggccuggagcgccagcgccugccacgacggcaucaacuggcugaccaucggcaucagcggccccgacaacggcgccguggccgugcugaaguacaacggcaucaucaccgacaccaucaagagcuggagaaacaacauccugagaacccaggagagcgagugcgccugcgugaacggcagcugcuucaccaucaugaccgacggccccagcgacggccaggccagcuacaagaucuucagaaucgagaagggcaagaucgugaagagcguggagaugaacgcccccaacuaccacuacgaggagugcagcugcuaccccgacagcagcgagaucaccugcgugugcagagacaacuggcacggcagcaacagacccugggugagcuucaaccagaaccuggaguaccagaucggcuacaucugcagcggcaucuucggcgacaaccccagacccaacgacaagaccggcagcugcggccccgugagcagcaacggcgccaacggcgugaagggcuucagcuucaaguacggcaacggcguguggaucggcagaaccaagagcaucagcagcagaaagggcuucgagaugaucugggaccccaacggcuggaccggcaccgacaacaacuucagcaucaagcaggacaucgugggcaucaacgaguggagcggcuacagcggcagcuucgugcagcaccccgagcugaccggccuggacugcaucagacccugcuucuggguggagcugaucagaggcagacccaaggagaacaccaucuggaccagcggcagcagcaucagcuucugcggcgugaacagcgacaccgugggcuggagcuggcccgacggcgccgagcugcccuucaccaucgacaaguga

SEQ ID NO: 180786 - RNA, 1410 nt, Artificial Sequence; identical to SEQ ID NO: 180776
  derived and/or modified CDS sequence (opt4) from neuraminidase__InfluenzaA__AEH59388

SEQ ID NO: 180787 - RNA, 1410 nt, Artificial Sequence
  derived and/or modified CDS sequence (opt4) from neuraminidase__InfluenzaA__AEH59390
augaaccccaaccagaagaucaucaccaucggcagcgugugcaugaccaucggcauggccaaccugauccugcagaucggcaacaucaucagcaucuggaucagccacagcauccagcugggcaaccagagccagaucgagaccugcaaccagagcgugaucaccuacgagaacaacaccugggugaaccagaccuacgugaacaucagcaacaccaacuucgccgccggccagagcguggugagcgugaagcuggccggcaacagcagccugugccccgugagcggcugggccaucuacagcaaggacaacagcaucagaaucggcagcaagggcgacguguucgugaucagagagcccuucaucagcugcagcccccuggagugcagaaccuucuuccugacccagggcgcccugcugaacgacaagcacagcaacggcaccaucaaggacagaagccccuacagaacccugaugagcugccccaucggcgaggugcccagccccuacaacagcagauucgagagcguggccuggagcgccagcgccugccacgacggcaucaacuggcugaccaucggcaucagcggccccgacaacggcgccguggccgugcugaaguacaacggcaucaucaccgacaccaucaagagcuggagaaacaacauccugagaacccaggagagcgagugcgccugcgugaacggcagcugcuucaccaucaugaccgacggccccagcgacggccaggccagcuacaagaucuucagaaucgagaagggcaagaucgugaagagcguggagaugaacgcccccaacuaccacuacgaggagugcagcugcuaccccgacagcagcgagaucaccugcgugugcagagacaacuggcacggcagcaacagacccugggugagcuucaaccagaaccuggaguaccagaucggcuacaucugcagcggcaucuucggcgacaaccccagacccaacgacaagaccggcagcugcggccccgugagcagcaacggcgccaacggcgugaagggcuucagcuucaaguacggcaacggcguguggaucggcagaaccaagagcaucagcagcagaaagggcuucgagaugaucugggaccccaacggcuggaccggcaccgacaacaacuucagcaucaagcaggacaucgugggccugaacgaguggagcggcuacagcggcagcuucgugcagcaccccgagcugaccggccuggacugcaucagacccugcuucuggguggagcugaucagaggccugcccaaggagaacaccaucuggaccagcggcagcagcaucagcuucugcggcgugaacagcgacaccgugggcuggagcuggcccgacggcgccgagcugcccuucaccaucgacaaguga

SEQ ID NO: 180788 - RNA, 1410 nt, Artificial Sequence; identical to SEQ ID NO: 180776
  derived and/or modified CDS sequence (opt4) from neuraminidase__InfluenzaA__AEH59392

SEQ ID NO: 180789 - RNA, 1410 nt, Artificial Sequence; identical to SEQ ID NO: 180776
  derived and/or modified CDS sequence (opt4) from neuraminidase__InfluenzaA__AEH59396

SEQ ID NO: 180790 - RNA, 1410 nt, Artificial Sequence
  derived and/or modified CDS sequence (opt4) from neuraminidase__InfluenzaA__AEH59398
augaaccccaaccagaagaucaucaccaucggcagcgugugcaugaccaucggcguggccaaccugauccugcagaucggcaacaucaucagcaucuggaucagccacagcauccagcugggcaaccagaaccagaucgagaccugcaaccagagcgugaucaccuacgagaacaacaccugggugaaccagaccuacgugaacaucagcaacaccaacuucgccgccggccagagcguggugagcgugaagcuggccggcaacagcagccugugccccgugagcggcugggccaucuacagcaaggacaacagcaucagaaucggcagcaagggcgacguguucgugaucagagagcccuucaucagcugcagcccccuggagugcagaaccuucuuccugacccagggcgcccugcugaacgacaagcacagcaacggcaccaucaaggacagaagccccuacagaacccugaugagcugccccaucggcgaggugcccagccccuacaacagcagauucgagagcguggccuggagcgccagcgccugccacgacggcaucaacuggcugaccaucggcaucagcggccccgacaacggcgccguggccgugcugaaguacaacggcaucaucaccgacaccaucaagagcuggagaaacuacauccugagaacccaggagagcgagugcgccugcgugaacggcagcugcuucaccaucaugaccgacggccccagcgacggccaggccagcuacaagaucuucagaaucgagaagggcaagguggugaagagcguggagaugaacgcccccaacuaccacuacgaggagugcagcugcuaccccgacagcagcgagaucaccugcgugugcagagacaacuggcacggcagcaacagacccugggugagcuucaaccagaaccuggaguaccagaucggcuacaucugcagcggcaucuucggcgacaaccccagacccaacgacaagaccggcagcugcggccccgugagcagcaacggcgccaacggcgugaagggcuucagcuucaaguacggcaacggcguguggaucggcagaaccaagagcaucagcagcagaaagggcuucgagaugaucugggaccccaacggcuggaccggcaccgacaacaacuucagcaucaagcaggacaucaucggcaucaacgaguggagcggcuacagcggcagcuucgugcagcaccccgagcugaccggccuggacugcaucagacccugcuucuggguggagcugaucagaggcagacccaaggagaacaccaucuggaccagcggcagcagcaucagcuucugcggcgugaacagcgacaccgugggcuggagcuggcccgacggcgccgagcugcccuucaccaucgacaaguga

SEQ ID NO: 180791 - RNA, 1410 nt, Artificial Sequence
  derived and/or modified CDS sequence (opt4) from neuraminidase__InfluenzaA__AEH59400
augaaccccaaccagaagaucaucaccaucggcagcgugugcaugaccaucggcauggccaaccugauccugcagaucggcaacaucaucagcaucuggaucagccacagcauccagcugggcaaccagagccagaucgagaccugcaaccagagcgugaucaccuacgagaacaacaccugggugaaccagaccuacgugaacaucagcaacaccaacuucgccgccggccagagcguggugagcgugaagcuggccggcaacagcagccugugccccgugagcggcugggccaucuacagcaaggacaacagcaucagaaucggcagcaagggcgacguguucgugaucagagagcccuucaucagcugcagcccccuggagugcagaaccuucuuccugacccagggcgcccugcugaacgacaagcacagcaacggcaccaucaaggacagaagccccuacagaacccugaugagcugccccaucggcgaggugcccagccccuacaacagcagauucgagagcguggccuggagcgccagcgccugccacgacggcaucaacuggcugaccaucggcaucagcggccccgacaacggcgccguggccgugcugaaguacaacggcaucaucaccgacaccaucaagagcuggagaaacaacauccugagaacccaggagagcgagugcgccugcgugaacggcagcugcuucaccgugaugaccgacggccccaacgacggccaggccagcuacaagaucuucagaaucgagaagggcaagaucgugaagagcguggagaugaacgcccccaacuaccacuacgaggagugcagcugcuaccccgacagcagcgagaucaccugcgugugcagagacaacuggcacggcgccaacagacccugggugagcuucaaccagaaccuggaguaccagaucggcuacaucugcagcggcaucuucggcgacaaccccagacccaacgacaagaccggcagcugcggccccgugagcagcaacggcgccaacggcgugaagggcuucagcuucaaguacggcaacggcguguggaucggcagaaccaagagcaucagcagcagaaacggcuucgagaugaucugggaccccaacggcuggaccggcaccgacaacaacuucagcaucaagcaggacaucgugggcaucaacgaguggagcggcuacagcggcagcuucgugcagcaccccgagcugaccggccuggacugcaucagacccugcuucuggguggagcugaucagaggcagacccaaggagaacaccaucuggaccagcggcagcagcaucagcuucugcggcgugaacagcgacaccgugggcuggagcuggcccgacggcgccgagcugcccuucaccaucgacaaguga

SEQ ID NO: 180792 - RNA, 1410 nt, Artificial Sequence
  derived and/or modified CDS sequence (opt4) from neuraminidase__InfluenzaA__AEH59402
augaaccccaaccagaagaucaucaccaucggcagcgugugcaugaccaucggcauggccaaccugauccugcagaucggcaacaucaucagcaucuggaucagccacagcauccagcugggcaaccagaaccagaucgagaccugcaaccagagcgugaucaccuacgagaacaacaccugggugaaccagaccuacgugaacaucagcaacaccaacuucgccgccggccagagcguggugagcgugaagcuggccggcaacagcagccugugccccgugagcggcugggccaucuacagcaaggacaacagcaucagaaucggcagcaagggcgacguguucgugaucagagagcccuucaucagcugcagcccccuggagugcagaaccuucuuccugacccagggcgcccugcugaacgacaagcacagcaacggcaccaucaaggacagaagccccuacagaacccugaugagcugccccaucggcgaggugcccagccccuacaacagcagauucgagagcguggccuggagcgccagcgccugccacgacggcaucaacuggcugaccaucggcaucagcggccccgacaacggcgccguggccgugcugaaguacaacggcaucaucaccgacaccaucaagagcuggagaaacaacauccugagaacccaggagagcgagugcgccugcgugaacggcagcugcuucaccgugaugaccgacggccccaacgacggccaggccagcuacaagaucuucagaaucgagaagggcaagaucgugaagagcguggagaugaacgcccccaacuaccacuacgaggagugcagcugcuaccccgacagcagcgagaucaccugcgugugcagagacaacuggcacggcgccaacagacccugggugagcuucaaccagaaccuggaguaccagaucggcuacaucugcagcggcaucuucggcgacaaccccagacccaacgacaagaccggcagcugcggccccgugagcagcaacggcgccaacggcgugaagggcuucagcuucaaguacggcaacggcguguggaucggcagaaccaagagcaucagcagcagaaacggcuucgagaugaucugggaccccaacggcuggaccgagaccgacaacaacuucagcaucaagcaggacaucgugggcaucaacgaguggagcggcuacagcggcagcuucgugcagcaccccgagcugaccggccuggacugcaucagacccugcuucuggguggagcugaucagaggcagacccaaggagaacaccaucuggaccagcggcagcagcaucagcuucugcggcgugaacagcgacaccgugggcuggagcuggcccgacggcgccgagcugcccuucaccaucgacaaguga

SEQ ID NO: 180793 - RNA, 1410 nt, Artificial Sequence
  derived and/or modified CDS sequence (opt4) from neuraminidase__InfluenzaA__AEH59404
augaaccccaaccagaagaucaucaccaucggcagcgccugcaugaccaucggcauggccaaccugauccugcagaucggcaacaucaucagcaucuggaucagccacagcauccagcugggcaaccagagccagaucgagaccugcaaccagagcgugaucaccuacgagaacaacaccugggugaaccagaccuacgugaacaucagcaacaccaacuucgccgccggccagcccguggugagcgugaagcuggccggcaacagcagccugugccccgugagcggcugggccaucuacagcaaggacaacagcaucagaaucggcagcaagggcgacguguucgugaucagagagcccuucaucagcugcagcccccuggagugcagaaccuucuuccugacccagggcgcccugcugaacgacaagcacagcaacggcaccaucaaggacagaagccccuacagaacccugaugagcugccccaucggcgaggugcccagccccuacaacagcagauucgagagcguggccuggagcgccagcgccugccacgacggcaucaacuggcugaccaucggcaucagcggccccgacaacggcgccguggccgugcugaaguacaacggcaucaucaccgacaccaucaagagcuggagaaacaacauccugagaacccaggagagcgagugcgccugcgugaacggcagcugcuucaccaucaugaccgacggccccagcgacggccaggccagcuacaagaucuucagaaucgagaagggcaagaucgugaagagcguggagaugaacgcccccaacuaccacuacgaggagugcagcugcuaccccgacagcagcgagaucaccugcgugugcagagacaacuggcacggcagcaacagacccugggugagcuucaaccagaaccuggaguaccagaucggcuacaucugcagcggcaucuucggcgacaaccccagacccaacgacaagaccggcagcugcggccccgugagcagcaacggcgccaacggcgugaagggcuucagcuucaaguacggcaacggcguguggaucggcagaaccaagagcaucagcagcagaaagggcuucgagaugaucugggaccccaacggcuggaccggcaccgacaacaacuucagcaucaagcaggacaucgugggcaucaacgaguggagcggcuacagcggcagcuucgugcagcaccccgagcugaccggccuggacugcaucagacccugcuucuggguggagcugaucagaggcagacccaaggagaacaccaucuggaccagcggcagcagcaucagcuucugcggcgugaacagcgacaccgugggcuggagcuggcccgacggcgccgagcugcccuucaccaucgacaaguga

SEQ ID NO: 180794 - RNA, 1410 nt, Artificial Sequence
  derived and/or modified CDS sequence (opt4) from neuraminidase__InfluenzaA__AEH59406
augaaccccaaccagaagaucaucaccaucggcagcgugugcaugaccaucggcauggccaaccugauccugcagaucggcaacaucaucagcaucuggaucagccacagcauccagcugggcaaccagagccagaucgagaccugcaaccagagcgugaucaccuacgagaacaacaccugggugaaccagaccuacgugaacaucagcaacaccaacuucgccgccggccagagcguggugagcgugaagcuggccggcaacagcagccugugccccgugagcggcugggccaucuacagcaaggacaacagcaucagaaucggcagcaagggcgacguguucgugaucagagagcccuucaucagcugcagcccccuggagugcagaaccuucuuccugacccagggcgcccugcugaacgacaagcacagcaacggcaccaucaaggacagaagccccuacagaacccugaugagcugccccaucggcgaggugcccagccccuacaacagcagauucgagagcguggccuggagcgccagcgccugccacgacggcaucaacuggcugaccaucggcaucagcggccccgacaacggcgccguggccgugcugaaguacaacggcaucaucaccgacaccaucaagagcuggagaaacaacauccugagaacccaggagagcgagugcgccugcgugaacggcagcugcuucaccaucaugaccgacggccccagcgacggccaggccagcuacaagaucuucagaaucgagaagggcaagaucgugaagagcguggagaugaacgcccccaccuaccacuacgaggagugcagcugcuaccccgacagcagcgagaucaccugcgugugcagagacaacuggcacggcagcaacagacccugggugagcuucaaccagaaccuggaguaccagaucggcuacaucugcagcggcaucuucggcgacaaccccagacccaacgacaagaccggcagcugcggccccgugagcuucaacggcgccaacggcgugaagggcuucagcuucaaguacggcaacggcguguggaucggcagaaccaagagcaucagcagcagaaagggcuucgagaugaucugggaccccaacggcuggaccggcaccgacaacaacuucagcaucaagcaggacaucgugggcaucgacgaguggagcggcuacagcggcagcuucgugcagcaccccgagcugaccggccuggacugcaucagacccugcuucuggguggagcugaucagaggcagacccaaggagaacaccaucuggaccagcggcagcagcaucagcuucugcggcgugaacagcgacaccgugggcuggagcuggcccgacggcgccgagcugcccuucaccaucgacaaguga

SEQ ID NO: 180795 - RNA, 1410 nt, Artificial Sequence; identical to SEQ ID NO: 180317
  derived and/or modified CDS sequence (opt4) from neuraminidase__InfluenzaA__AEH59408

SEQ ID NO: 180796 - RNA, 1410 nt, Artificial Sequence
  derived and/or modified CDS sequence (opt4) from neuraminidase__InfluenzaA__AEH59412
augaaccccaaccagaagaucaucaccaucggcagcgugugcaugaccaucggcauggccaaccugauccugcagaucggcaacaucaucagcaucuggaucagccacagcauccagcugggcaaccagagccagaucgagaccugcaaccagagcgugaucaccuacgagaacaacaccugggugaaccagaccuacgugaacaucagcaacaccaacuucgccgccggccagagcguggugagcgugaagcuggccggcaacagcagccugugccccgugagcggcugggccaucuacagcaaggacaacagcaucagaaucggcagcaagggcgacguguucgugaucagagagcccuucaucagcugcagcccccuggagugcagaaccuucuuccugacccagggcgcccugcugaacgacaagcacagcaacggcaccaucaaggacagaagccccuacagaacccugaugagcugccccaucggcgaggugcccagccccuacaacagcagauucgagagcguggccuggagcgccagcgccugccacgacggcaucaacuggcugaccaucggcaucagcggccccgacaacggcgccguggccgugcugaaguacaacggcaucaucaccgacaccaucagaagcuggagaaacaacauccugagaacccaggagagcgagugcgccugcgugaacggcagcugcuucaccaucaugaccgacggccccagcgacggccaggccagcuacaagaucuucagaaucgagaagggcaagaucaucaagagcguggagaugaacgcccccaacuaccacuacgaggagugcagcugcuaccccgacagcagcgagaucaccugcgugugcagagacaacuggcacggcagcaacagacccugggugagcuucaaccagaaccuggaguaccagaucggcuacaucugcagcggcaucuucggcgacaaccccagacccaacgacaagaccggcagcugcggccccgugcugagcaacggcgccaacggcgugaagggcuucagcuucaaguacggcaacggcguguggaucggcagaaccaagagcaucagcagcagaaagggcuucgagaugaucugggaccccaacggcuggaccggcaccgacaacaacuucagcaucaagcaggacaucgugggcaucaacgaguggagcggcuacagcggcagcuucgugcagcaccccgagcugaccggccuggacugcaucagacccugcuucuggguggagcugaucagaggcagacccaaggagaacaccaucuggaccagcggcagcagcaucagcuucugcggcgugaacagcgacaccgugggcuggagcuggcccgacggcgccgagcugcccuucaccaucgacaaguga

SEQ ID NO: 180797 - RNA, 1410 nt, Artificial Sequence; identical to SEQ ID NO: 180769
  derived and/or modified CDS sequence (opt4) from neuraminidase__InfluenzaA__AEH59416

SEQ ID NO: 180798 - RNA, 1410 nt, Artificial Sequence; identical to SEQ ID NO: 176798
  derived and/or modified CDS sequence (opt4) from neuraminidase__InfluenzaA__AEH59584

SEQ ID NO: 180799 - RNA, 1410 nt, Artificial Sequence; identical to SEQ ID NO: 176798
  derived and/or modified CDS sequence (opt4) from neuraminidase__InfluenzaA__AEH59586

SEQ ID NO: 180800 - RNA, 1410 nt, Artificial Sequence; identical to SEQ ID NO: 176798
  derived and/or modified CDS sequence (opt4) from neuraminidase__InfluenzaA__AEH59588

SEQ ID NO: 180801 - RNA, 1410 nt, Artificial Sequence; identical to SEQ ID NO: 176798
  derived and/or modified CDS sequence (opt4) from neuraminidase__InfluenzaA__AEH59592

SEQ ID NO: 180802 - RNA, 1410 nt, Artificial Sequence; identical to SEQ ID NO: 176798
  derived and/or modified CDS sequence (opt4) from neuraminidase__InfluenzaA__AEH59594

SEQ ID NO: 180803 - RNA, 1410 nt, Artificial Sequence; identical to SEQ ID NO: 176798
  derived and/or modified CDS sequence (opt4) from neuraminidase__InfluenzaA__AEH59596

SEQ ID NO: 180804 - RNA, 1410 nt, Artificial Sequence; identical to SEQ ID NO: 176798
  derived and/or modified CDS sequence (opt4) from neuraminidase__InfluenzaA__AEH59598

SEQ ID NO: 180805 - RNA, 1410 nt, Artificial Sequence; identical to SEQ ID NO: 176798
  derived and/or modified CDS sequence (opt4) from neuraminidase__InfluenzaA__AEH59600

SEQ ID NO: 180806 - RNA, 1410 nt, Artificial Sequence
  derived and/or modified CDS sequence (opt4) from neuraminidase__InfluenzaA__AEH59602
augaaccccaaccagaagaucaucaccaucggcagcgugugcaugaccaucggcauggccaaccugauccugcagaucggcaacaucaucagcaucuggaucagccacagcauccagcugggcagccagaaccagaucgagaccugcaaccagagcgugaucaccuacgagaacaacaccugggugaaccagaccuacgugaacaucagcaacaccaacuucgccgccggccagagcguggugagcgugaagcuggccggcaacagcagccugugccccgugagcggcugggccaucuacagcaaggacaacagcaucagaaucggcagcaagggcgacguguucgugaucagagagcccuucaucagcugcagcccccuggagugcagaaccuucuuccugacccagggcgcccugcugaacgacaagcacagcaacggcaccaucaaggacagaagccccuacagaacccugaugagcugccccaucggcgaggugcccagccccuacaacagcagauucgagagcguggccuggagcgccagcgccugccacgacggcaucaacuggcugaccaucggcaucagcggccccgacaacggcgccguggccgugcugaaguacaacggcaucaucaccgacaccaucaagagcuggagaaacaacauccugagaacccaggagagcgagugcgccugcgugaacggcagcugcuucaccgugaugaccgacggccccagcgacggccaggccagcuacaagaucuucagaaucgagaagggcaagaucgugaagagcguggagaugaacgcccccaacuaccacuacgaggagugcagcugcuaccccgacagcagcgagaucaccugcgugugcagagacaacuggcacggcagcaacagacccugggugagcuucaaccagaaccuggaguaccagaucggcuacaucugcagcggcaucuucggcgacaaccccagacccaacgacaagaccggcagcugcggccccgugagcagcaacggcgccaacggcgugaagggcuucagcuucaaguacggcaacggcguguggaucggcagaaccaagagcaucagcagcagaaacggcuucgagaugaucugggaccccaacggcuggaccggcaccgacaacaacuucagcaucaagcaggacaucgugggcaucaacgaguggagcggcuacagcggcagcuucgugcagcaccccgagcugaccggccuggacugcaucagacccugcuucuggguggagcugaucagaggcagacccaaggagaacaccaucuggaccagcggcagcagcaucagcuucugcggcgugaacagcgacaccgugggcuggagcuggcccgacggcgccgagcugcccuucaccaucgacaaguga

SEQ ID NO: 180807 - RNA, 1410 nt, Artificial Sequence; identical to SEQ ID NO: 176798
  derived and/or modified CDS sequence (opt4) from neuraminidase__InfluenzaA__AEH59606

SEQ ID NO: 180808 - RNA, 1410 nt, Artificial Sequence; identical to SEQ ID NO: 176798
  derived and/or modified CDS sequence (opt4) from neuraminidase__InfluenzaA__AEH59616

SEQ ID NO: 180809 - RNA, 1410 nt, Artificial Sequence; identical to SEQ ID NO: 176798
  derived and/or modified CDS sequence (opt4) from neuraminidase__InfluenzaA__AEH59626

SEQ ID NO: 180810 - RNA, 1413 nt, Artificial Sequence; identical to SEQ ID NO: 177521
  derived and/or modified CDS sequence (opt4) from neuraminidase__InfluenzaA__AEH77262

SEQ ID NO: 180811 - RNA, 1410 nt, Artificial Sequence
  derived and/or modified CDS sequence (opt4) from neuraminidase__InfluenzaA__AEH77273
augaaccccaaccagaagaucaucaccaucggcagcgugugcaugaccaucggcauggccaaccugauccugcagaucggcaacaucaccagcaucuggaucagccacagcauccagcugggcaaccagaaccagaucgagaccugcaaccagagcgugaucaccuacgagaacaacaccugggugaaccagaccuacgugaacaucagcaacaccaacuucgccgccggccagagcguggugagcgugaagcuggccggcaacagcagccugugccccgugagcggcugggccaucuacagcaaggacaacagcaucagaaucggcagcaagggcgacguguucgugaucagagagcccuucaucagcugcagcccccuggagugcagaaccuucuuccugacccagggcgcccugcugaacgacaagcacagcaacggcaccaucaaggacagaagccccuacagaacccugaugagcugccccaucggcgaggugcccagccccuacaacagcagauucgagagcguggccuggagcgccagcgccugccacgacggcaucaacuggcugaccaucggcaucagcggccccgacaacggcgccguggccgugcugaaguacaacggcaucaucaccgacaccaucaagagcuggagaaacaacauccugagaacccaggagagcgagugcgccugcgugaacggcagcugcuucaccgugaugaccgacggccccagcgacggccaggccagcuacaagaucuucagaaucgagaagggcaagaucgugaagagcguggagaugaacgcccccaacuaccacuacgaggagugcagcugcuaccccgacagcagcgagaucaccugcgugugcagagacaacuggcacggcagcaacagacccugggugagcuucaaccagaaccuggaguaccagaucggcuacaucugcagcggcaucuucggcgacaaccccagacccaacgacaagaccggcagcugcggccccgugagcagcaacggcgccaacggcgugaagggcuucagcuucaaguacggcaacggcguguggaucggcagaaccaagagcaucagcagcagaaacggcuucgagaugaucugggaccccaacggcuggaccggcaccgacaacaacuucagcaucaagcaggacaucgugggcaucaacgaguggagcggcuacagcggcagcuucgugcagcaccccgagcugaccggccuggacugcaucagacccugcuucuggguggagcugaucagaggcagacccaaggagaacaccaucuggaccagcggcagcagcaucagcuucugcggcgugaacagcgacaccgugggcuggagcuggcccgacggcgccgagcugcccuucaccaucgacaaguga

SEQ ID NO: 180812 - RNA, 1410 nt, Artificial Sequence
  derived and/or modified CDS sequence (opt4) from neuraminidase__InfluenzaA__AEH77282
augaaccccaaccagaagaucaucaccaucggcagcgugagccugaccaucgccaccaucugcuuccugaugcagaucgccauccuggugaccaccgugacccugcacuucaagcagcacgagugcaacagcccccccaacaaccaggugaugcugugcgagcccaccaucaucgagagaaacaucaccgagaucguguaccugaccaacaccaccaucgagaaggagaucugccccaagcuggccgaguacagaaacuggagcaagccccagugcaacaucaccggcuucgcccccuucagcaaggacaacagcaucagacugagcgccggcggcgacaucugggugaccagagagcccuacgugagcugcgaccccgacaagugcuaccaguucgcccugggccagggcaccacccugaacaacggccacagcaacgacaccgugcacgacagaacccccuacagaacccugcugaugaacgagcugggcgugcccuuccaccugggcaccagacaggugugcaucgccuggagcagcagcagcugccacgacggcaaggccuggcugcacgugugcgugaccggcgacgacaagaacgccaccgccagcuucaucuacaacggcagacugguggacagcaucggcagcuggagcaagaagauccugagaacccaggagagcgagugcgugugcaucaacggcaccugcaccguggugaugaccgacggcagcgccagcggcaaggccgacaccaagauccuguucguggaggagggcaagaucgugcacaucagcacccugagcggcagcgcccagcacguggaggagugcagcugcuaccccagauaccccggcgugagaugcgugugcagagacaacuggaagggcagcaacagacccaucguggacaucaacgugaaggacuacagcaucgugagcagcuacgugugcagcggccuggugggcgacacccccagaaagaacgacagcagcagcagcagccacugccuggaccccaacaacgaggagggcggccacggcgugaagggcugggccuucgacgacggcaacgacguguggaugggcagaaccaucagcgagaagcugagaagcggcuacgagaccuucaaggugaucgagggcuggagcaagcccaacagcaagcugcagaucaacagacaggugaucguggagagaggcaacagaagcggcuacagcggcaucuucagcguggagggcaagagcugcaucaacagaugcuucuacguggagcugaucagaggcagaaaggaggagaccgaggugugguggaccagcaacagcaucgugguguucugcggcaccagcggcaccuacggcaccggcagcuggcccgacggcgccgacaucaaccugaugcccaucuga

SEQ ID NO: 180813 - RNA, 1410 nt, Artificial Sequence; identical to SEQ ID NO: 176798
  derived and/or modified CDS sequence (opt4) from neuraminidase__InfluenzaA__AEI29218

SEQ ID NO: 180814 - RNA, 1410 nt, Artificial Sequence; identical to SEQ ID NO: 178165
  derived and/or modified CDS sequence (opt4) from neuraminidase__InfluenzaA__AEI29228

SEQ ID NO: 180815 - RNA, 1410 nt, Artificial Sequence; identical to SEQ ID NO: 174197
  derived and/or modified CDS sequence (opt4) from neuraminidase__InfluenzaA__AEI54350

SEQ ID NO: 180816 - RNA, 1410 nt, Artificial Sequence; identical to SEQ ID NO: 174210
  derived and/or modified CDS sequence (opt4) from neuraminidase__InfluenzaA__AEI54361

SEQ ID NO: 180817 - RNA, 1410 nt, Artificial Sequence; identical to SEQ ID NO: 174774
  derived and/or modified CDS sequence (opt4) from neuraminidase__InfluenzaA__AEI54372

SEQ ID NO: 180818 - RNA, 1410 nt, Artificial Sequence; identical to SEQ ID NO: 174651
  derived and/or modified CDS sequence (opt4) from neuraminidase__InfluenzaA__AEI54383

SEQ ID NO: 180819 - RNA, 1410 nt, Artificial Sequence; identical to SEQ ID NO: 174774
  derived and/or modified CDS sequence (opt4) from neuraminidase__InfluenzaA__AEI54394

SEQ ID NO: 180820 - RNA, 1410 nt, Artificial Sequence; identical to SEQ ID NO: 175944
  derived and/or modified CDS sequence (opt4) from neuraminidase__InfluenzaA__AEI54416

SEQ ID NO: 180821 - RNA, 1410 nt, Artificial Sequence; identical to SEQ ID NO: 180764
  derived and/or modified CDS sequence (opt4) from neuraminidase__InfluenzaA__AEI54427

SEQ ID NO: 180822 - RNA, 1410 nt, Artificial Sequence; identical to SEQ ID NO: 179578
  derived and/or modified CDS sequence (opt4) from neuraminidase__InfluenzaA__AEI54438

SEQ ID NO: 180823 - RNA, 1410 nt, Artificial Sequence; identical to SEQ ID NO: 179578
  derived and/or modified CDS sequence (opt4) from neuraminidase__InfluenzaA__AEI54449

SEQ ID NO: 180824 - RNA, 1410 nt, Artificial Sequence; identical to SEQ ID NO: 179578
  derived and/or modified CDS sequence (opt4) from neuraminidase__InfluenzaA__AEI54460

SEQ ID NO: 180825 - RNA, 1410 nt, Artificial Sequence
  derived and/or modified CDS sequence (opt4) from neuraminidase__InfluenzaA__AEI54471
augaaccccaaccagaagaucaucaccaucggcagcgugagccugaccaucagcaccaucugcuucuucaugcagaucgccgugcugaucaccaccgugacccugcacuucaagcaguacaaguucaacagcccccccaacaaccaggugaugcugugcgagcccaccaucaucgagagaaacaucaccgagaucguguaccugaccaacaccaccaucgagaaggagaucugccccaagcuggccgaguacagaaacuggagcaagccccagugcgacaucaccggcuucgcccccuucagcaaggacaacagcaucagacugagcgccggcggcgacaucugggugaccagagagcccuacgugagcugcgaccccgacaagugcuaccaguucgcccugggccagggcaccacccugaacaacgugcacagcaacaacaccgugagagacagaacccccuacagaacccugcugaugaacgagcugggcgugcccuuccaccugggcaccaagcaggugugcaucgccuggagcagcagcagcugccacgacggcaaggccuggcugcacgugugcaucaccggcgacgacaagaacgccaccgccagcuucaucuacaacggcagacugguggacagcguggugagcuggagcaaggagauccugagaacccaggagagcgagugcgugugcaucaacggcaccugcaccguggugaugaccgacggcagcgccagcggcaaggccgacaccaagauccuguucaucgaggagggcaagaucgugcacaccagcacccugagcggcagcgcccagcacguggaggagugcagcugcuaccccagauaccccggcgugagaugcgugugcagagacaacuggaagggcagcaacagacccaucguggacaucaacaucaaggaccacagcaucgugagcagcuacgugugcagcggccuggugggcgacacccccagaaagaacgacagcagcagcagcagccacugccuggaccccaacaacgaggagggcggccacggcgugaagggcugggccuucgacgacggcaacgacguguggaugggcagaaccaucaacgagaccagcagacugggcuacgagaccuucaaggugaucgagggcuggagcaaccccaagagcaagcugcagaucaacagacaggugaucguggacagaggcaacagaagcggcuacagcggcaucuucagcguggagggcaagagcugcaucaacagaugcuucuacguggagcugaucagaggcagaaaggaggagaccgaggugcuguggaccagcaacagcaucgugguguucugcggcaccagcggcaccuacggcaccggcagcuggcccgacggcgccgaccugaaccugaugcccaucuga

SEQ ID NO: 180826 - RNA, 1410 nt, Artificial Sequence; identical to SEQ ID NO: 179470
  derived and/or modified CDS sequence (opt4) from neuraminidase__InfluenzaA__AEI54482

SEQ ID NO: 180827 - RNA, 1410 nt, Artificial Sequence
  derived and/or modified CDS sequence (opt4) from neuraminidase__InfluenzaA__AEI54493
augaaccccaaccagaagaucaucaccaucggcagcgugagccugaccaucagcaccaucugcuucuucaugcagaucgccauccugaucaccaccgugacccugcacuucaagcaguacgaguucaacagcccccccaacaaccaggugaugcugugcgagcccaccaucaucgagagaaacaucaccgagaucguguaccugaccaacaccaccaucgagaaggagaucugccccaagcuggccgaguacagaaacuggagcaagccccagugcgacaucaccggcuucgcccccuucagcaaggacaacagcaucagacugagcgccggcggcgacaucugggugaccagagagcccuacgugagcugcgaccccgacaagugcuaccaguucgcccugggccagggcaccacccugaacaacgugcacagcaacaacaccgugagagacagaacccccuacagaacccugcugaugaacgagcugggcgugcccuuccaccugggcaccaagcaggugugcaucgccuggagcagcagcagcugccacgacggcaaggccuggcugcacgugugcaucaccggcgacgacaagaacgccaccgccagcuucaucuacaacggcagacugguggacagcguggugagcuggagcaaggagauccugagaacccaggagagcgagugcgugugcaucaacggcaccugcaccguggugaugaccgacggcagcgccagcggcaaggccgacaccaagauccuguucaucgaggagggcaagaucgugcacaccagcacccugagcggcagcgcccagcacguggaggagugcagcugcuaccccagauaccccggcgugagaugcgugugcagagacaacuggaagggcagcaacagacccaucguggacaucaacaucaaggaccacagcaucgugagcagcuacgugugcagcggccuggugggcgacacccccagaaagaacgacagcagcagcagcagccacugccuggaccccaacaacgaggagggcggccacggcgugaagggcugggccuucgacgacggcaacgacguguggaugggcagaaccaucaacgagaccagcagacugggcuacgagaccuucaaggugaucgagggcuggagcaaccccaagagcaagcugcagaucaacagacaggugaucguggacagaggcaacagaagcggcuacagcggcaucuucagcguggagggcaagagcugcaucaacagaugcuucuacguggagcugaucagaggcagaaaggaggagaccgaggugcuguggaccagcaacagcaucgugguguucugcggcaccagcggcaccuacggcaccggcagcuggcccgacggcgccgaccugaaccugaugagcaucuga

SEQ ID NO: 180828 - RNA, 1410 nt, Artificial Sequence; identical to SEQ ID NO: 179578
  derived and/or modified CDS sequence (opt4) from neuraminidase__InfluenzaA__AEI54504

SEQ ID NO: 180829 - RNA, 1410 nt, Artificial Sequence; identical to SEQ ID NO: 179098
  derived and/or modified CDS sequence (opt4) from neuraminidase__InfluenzaA__AEI59982

SEQ ID NO: 180830 - RNA, 1413 nt, Artificial Sequence; identical to SEQ ID NO: 179996
  derived and/or modified CDS sequence (opt4) from neuraminidase__InfluenzaA__AEI59993

SEQ ID NO: 180831 - RNA, 1413 nt, Artificial Sequence; identical to SEQ ID NO: 179992
  derived and/or modified CDS sequence (opt4) from neuraminidase__InfluenzaA__AEI60004

SEQ ID NO: 180832 - RNA, 1410 nt, Artificial Sequence
  derived and/or modified CDS sequence (opt4) from neuraminidase__InfluenzaA__AEI60015
augaaccccaaccagaagaucaucaccaucggcagcgugagccugaccaucagcaccaucugcuucuucaugcagaucgccauccugaucaccaccgugacccugcacuucaagcaguacgaguucaacagcccccccaacaaccaggugaugcugugcgagcccaccaucaucgagagaaacaucaccgagaucguguaccugaccaacaccaccaucgagaaggagaucugccccaagcuggccgaguacagaaacuggagcaagccccagugcgacaucaccggcuucgcccccuucagcaaggacaacagcaucagacugagcgccggcggcgacaucugggugaccagagagcccuacgugagcugcgaccccgacaagugcuaccaguucgcccugggccagggcaccacccugaacaacgugcacagcaacaacaccgugagagacagaacccccuacagaacccugcugaugaacgagcugggcgugcccuuccaccugggcaccaagcaggugugcaucgccuggagcagcagcagcugccacgacggcaaggccuggcugcacgugugcaucaccggcgacgacaagaacgccaccgccagcuucaucuacaacggcagacugguggacagcguggugagcuggagcaaggagauccugagaacccaggagagcgagugcgugugcaucaacggcaccugcaccguggugaugaccgacggcagcgccagcggcaaggccgacaccaagauccuguucaucgaggagggcaagaucgugcacaccagcacccugagcggcagcgcccagcacguggaggagugcagcugcuaccccagauaccccggcgugagaugcgugugcagagacaacuggaagggcagcaacagacccaucguggacaucaacaucaaggaccacagcaucgugagcagcuacgugugcagcggccuggugggcgacacccccagaaagaacgacagcagcagcagcggccacugccuggaccccaacaacgaggagggcggcaacggcgugaagggcugggccuucgacgacggcaacgacguguggaugggcagaaccaucagcgagaagagcagacugggcuacgagaccuucaaggugaucgagggcuggagcaaccacaagagcaagcugcagaucaacagacaggugaucguggacagaggcaacagaagcggcuacagcggcaucuucagcguggagggcaagagcugcaucaacagaugcuucuacguggagcugaucagaggcagaaaggaggagaccgaggugcuguggaccagcaacagcaucgugguguucugcggcaccagcggcaccuacggcaccggcagcuggcccgacggcgccgaccugaaccugaugcccaucuga

SEQ ID NO: 180833 - RNA, 1410 nt, Artificial Sequence; identical to SEQ ID NO: 178544
  derived and/or modified CDS sequence (opt4) from neuraminidase__InfluenzaA__AEI60026

SEQ ID NO: 180834 - RNA, 1410 nt, Artificial Sequence
  derived and/or modified CDS sequence (opt4) from neuraminidase__InfluenzaA__AEI60037
augaaccccaaccagaagaucaucaccaucggcagcgugagccugaccaucagcaccaucugcuucuucaugcagaucgccauccugaucaccaccgugacccugcacuucaagcaguacgaguucaacagcccccccaacaaccaggugaugcugugcgagcccaccaucaucgagagaaacaucaccgagaucguguaccugaccaacaccaccaucgagaaggagaucugccccaagcuggccgaguacagaaacuggagcaagccccagugcgacaucaccggcuucgcccccuucagcaaggacaacagcaucagacugagcgccggcggcgacaucugggugaccagagagcccuacgugagcugcgaccccgacaagugcuaccaguucgcccugggccagggcaccacccugaacaacgugcacagcaacaacaccgugagagacagaacccccuacagaacccugcugaugaacgagcugggcgugcccuuccaccugggcaccaagcaggugugcaucgccuggagcagcagcagcugccacgacggcaaggccuggcugcacgugugcaucaccggcgacgacaagaacgccaccgccagcuucaucuacaacggcagacugguggacagcguggugagcuggagcaaggagauccugagaacccaggagagcgagugcgugugcaucaacggcaccugcaccguggugaugaccgacggcagcgccagcggcaaggccgacaccaagauccuguucaucgaggagggcaagaucgugcacaccagcacccugagcggcagcgcccagcacguggaggagugcagcugcuaccccagauaccccggcgugagaugcgugugcagagacaacuggaagggcagcaacagacccaucguggacaucaacaucaaggaccacagcaucgugagcagcuacgugugcagcggccuggugggcgacacccccagaagaaacgacagcagcagcagcagccacugccuggaccccaacaacgaggagggcggccacggcgugaagggcugggccuucgacgacggcaacgacguguggaugggcagaaccaucagcgagaagagcagacugggcuacgagaccuucaaggugaucgagggcuggagcaaccacaagagcaagcugcagaucaacagacaggugaucguggacagaggcaacagaagcggcuacagcggcaucuucagcguggagggcaagagcugcaucaacagaugcuucuacguggagcugaucagaggcagaaaggaggagaccgaggugcuguggaccagcaacagcaucgugguguucugcggcaccagcggcaccuacggcaccggcagcuggcccgacggcgccgaccugaaccugaugcccaucuga

SEQ ID NO: 180835 - RNA, 1410 nt, Artificial Sequence
  derived and/or modified CDS sequence (opt4) from neuraminidase__InfluenzaA__AEI60048
augaaccccaaccagaagaucaucaccaucggcagcgugagccugaccaucagcaccaucugcuucuucaugcagaucgccauccugaucaccaccgugacccugcacuucaagcaguacgaguucaacagcccccccaacaaccaggugaugcugugcgcccccaccaucaucgagagaaacaucaccgagaucguguaccugaccaacaccaccaucgagaaggagaucugccccaagcuggccgaguacagaaacuggagcaagccccagugcgacaucaccggcuucgcccccuucagcaaggacaacagcaucagacugagcgccggcggcgacaucugggugaccagagagcccuacgugagcugcgaccccgacaagugcuaccaguucgcccugggccagggcaccacccugaacaacgugcacagcaacaacaccgugagagacagaacccccuacagaacccugcugaugaacgagcugggcgugcccuuccaccugggcaccaagcaggugugcaucgccuggagcagcagcagcugccacgacggcaaggccuggcugcacgugugcaucaccggcgacgacaagaacgccaccgccagcuucaucuacaacggcagacugguggacagcguggugagcuggagcaaggagauccugagaacccaggagagcgagugcgugugcaucaacggcaccugcaccguggugaugaccgacggcagcgccagcggcaaggccgacaccaagauccuguucaucgaggagggcaagaucgugcacaccagcacccugagcggcagcgcccagcacguggaggagugcagcugcuaccccagauaccccggcgugagaugcgugugcagagacaacuggaagggcagcaacagacccaucguggacaucaacaucaaggaccacagcaucgugagcagcuacgugugcagcggccuggugggcgacacccccagaaagaacgacagcagcagcagcagccacugccuggaccccaacaacgaggagggcggccacggcgugaagggcugggccuucgacgacggcaacgacguguggaugggcagaaccaucagcgagaagagcagacugggcuacgagaccuucaaggugaucgagggcuggagcaaccccaagagcaagcugcagaucaacagacaggugaucguggacagaggcaacagaagcggcuacagcggcaucuucagcguggagggcaagagcugcaucaacagaugcuucuacguggagcugaucagaggcagaaaggaggagaccgaggugcuguggaccagcaacagcaucgugguguucugcggcaccagcggcaccuacggcaccggcagcuggcccgacggcgccgacaucaaccugaugcccaucuga

SEQ ID NO: 180836 - RNA, 1410 nt, Artificial Sequence
  derived and/or modified CDS sequence (opt4) from neuraminidase__InfluenzaA__AEI60089
augaaccccaaccagaagaucaucaccaucggcagcgugugcaugaccaucggcauggccaaccugauccugcagaucggcaacaucaucagcaucuggaucagccacagcauccagcugggcaaccagaaccagaucgagaccugcaaccagagcgugaucaccuacgagaacaacaccugggugaaccagaccuacgugaacaucagcaacaccaacuucgccgccggccagagcguggugagcgugaagcuggccggcaacagcagccugugccccgugagcggcugggccaucuacagcaaggacaacagcaucagaaucggcagcaagggcgacguguucgugaucagagagcccuucaucagcugcagcccccuggagugcagaaccuucuuccugacccagggcgcccugcugaacgacaagcacagcaacggcaccaucaaggacagaagccccuacagaacccugaugagcugccccaucggcgaggugcccagccccuacaacagcagauucgagagcguggccuggagcgccagcgccugccacgacggcaucaacuggcugaccaucggcaucagcggccccgacaacggcgccguggccgugcugaaguacaacggcaucaucaccgacaccaucaagagcuggagaaacaacauccugagaacccaggagagcgagugcgccugcgugaacggcagcugcuucaccaucaugaccgacggccccagcgacggccaggccagcuacaagaucuucagaaucgagaagggcaagaucgugaagagcguggagaugaacgcccccaacuacuacuacgaggagugcagcugcuaccccgacagcagcgagaucaccugcgugugcagagacaacuggcacggcagcaacagacccugggugagcuucaaccagaaccuggaguaccagaucggcuacaucugcagcggcaucuucggcgacaaccccagacccaacgacaagaccggcagcugcggccccgugagcagcaacggcgccaacggcgugaagggcuucagcuucaaguacggcaacggcguguggaucggcagaaccaagagcaucagcagcagaaagggcuucgagaugaucugggaccccaacggcuggaccggcaccgacaacaacuucagcaucaagcaggacaucgugggcaucaacgaguggagcggcuacagcggcagcuucgugcagcaccccgagcugaccggccuggacugcaucagacccugcuucuggguggagcugaucagaggcagacccaaggagaacaccaucuggaccagcggcagcagcaucagcuucugcggcgugaacagcgacaccgugggcuggagcuggcccgacggcgccgagcugcccuucaccaucgacaaguga

SEQ ID NO: 180837 - RNA, 1410 nt, Artificial Sequence; identical to SEQ ID NO: 180769
  derived and/or modified CDS sequence (opt4) from neuraminidase__InfluenzaA__AEI60099

SEQ ID NO: 180838 - RNA, 1410 nt, Artificial Sequence
  derived and/or modified CDS sequence (opt4) from neuraminidase__InfluenzaA__AEI60111
augaaccccaaccagaagaucaucaccaucggcagcaucagccugaccaucgccaccaucugcuuccugaugcagaucgccauccuggugaccaccgugacccugcacuucaagcaguacaagugcaacagcccccccaacaacagagugaugcugugcgagcccaccaucaucgagagaaacaucaccgagaucguguaccugaccaacaccaccaucgagaaggagaucugccccaagcuggccgaguacagaaacuggagcaagccccagugcaacaucaagggcuucgcccccuucagcaaggacaacagcaucagacugagcgccggcggcgacaucugggugaccagagagcccuacgugagcugcgaccccgacaagugcuaccaguucgcccugggccagggcaccacccugaacaacggccacagcaacgacaccgugcacgacagaacccccuacagaacccugcugaugaacgagcugggcgugcccuuccaccugggcaccagacaggugugcaucgccuggagcagcagcagcugccacgacggcaaggccuggcugcacgugugcaucaccggcgacgacgagaacgccaccgccagcuucaucuacaacggcagacugguggacagcaucggcagcuggagcaagaagauccugagaacccaggagagcgagugcgugugcaucaacggcaccugcaccguggugaugaccgacggcagcgccagcggcaaggccgacaccaagauccuguucaucgaggagggcaagaucgugcacaucagcacccugagcggcagcgcccagcacguggaggagugcagcugcuaccccagauaccccggcgugagaugcgugugcagagacaacuggaagggcagcaacagacccaucguggacaucaacgugagagacuacagcaucgugagcagcuacgugugcagcggccuggugggcgacacccccagaaagaacgacagcuucagcagcagccacugccuggaccccaacaacgaggagggcggccacggcgugaagggcugggccuucgacgacggcaacgacguguggaugggcagaaccaucagcgagaagcugagaagcggcuacgagaccuucaaggugaucgagggcuggagcaagcccaacagcaagcugcaggugaacagacaggugaucguggagagaggcaacagaagcggcuacagcggcaucuucagcguggagggcaagagcugcaucaacagaugcuucuacguggagcugaucagaggcagaaaggaggagaccaaggugugguggaccagcaacagcaucgugguguucugcggcaccagcggcaccuacggcaccggcagcuggcccgacggcgccgacaucaacaucaugcccaucuga

SEQ ID NO: 180839 - RNA, 1410 nt, Artificial Sequence; identical to SEQ ID NO: 176798
  derived and/or modified CDS sequence (opt4) from neuraminidase__InfluenzaA__AEI73669

SEQ ID NO: 180840 - RNA, 1410 nt, Artificial Sequence
  derived and/or modified CDS sequence (opt4) from neuraminidase__InfluenzaA__AEI86727
augaaccccaaccagaagaucaucaccaucggcagcgugugcaucaccaucggcauggccaaccugauccugcagaucggcaacaucaucagcaucuggaucagccacagcauccagcugggcaaccagaaccagaucgagaccugcaaccagagcgugaucaccuacgagaacaacaccugggugaaccagaccuacgugaacaucagcaacaccaacuucgccgccggccagagcguggugagcgugaagcuggccggcaacagcagccugugccccgugagcggcugggccaucuacagcaaggacaacagcaucagaaucggcagcaagggcgacguguucgugaucagagagcccuucaucagcugcagcccccuggagugcagaaccuucuuccugacccagggcgcccugcugaacgacaagcacagcaacggcaccaucaaggacagaagccccuacagaacccugaugagcugccccaucggcgaggugcccagccccuacaacagcaaguucgagagcguggccuggagcgccagcgccugccacgacggcaucagcuggcugaccaucggcaucagcggccccgacaacggcgccguggccgugcugaaguacaacggcaucaucaccgacaccaucaagagcuggagaaacaacauccugagaacccaggagagcgagugcgccugcgugaacggcagcugcuucaccgugaugaccgacggccccagcgacggccaggccagcuacaagaucuucagaaucgagaagggcaagaucgugaagagcguggagaugaacgcccccaacuaccacuacgaggagugcagcugcuaccccgacagcagcgagaucaccugcgugugcagagacaacuggcacggcagcaacagacccugggugagcuucaaccagaaccuggaguaccagaucggcuacaucugcagcggcaucuucggcgacaaccccagacccaacgacaagaccggcagcugcggccccgugagcagcaacggcgccaacggcgugaagggcuucagcuucaaguacggcaacggcguguggaucggcagaaccaagagcaucagcagcagaaacggcuucgagaugaucugggaccccaacggcuggaccggcaccgacaacaacuucagcaucaagcaggacaucgugggcaucaacgaguggagcggcuacagcggcagcuucgugcagcaccccgagcugaccggccuggacugcaucagacccugcuucuggguggagcugaucagaggcagacccaaggagaacaccaucuggaccagcggcagcagcaucagcuucugcggcgugaacagcgacaccgugggcuggagcuggcccgacggcgccgagcugcccuucaccaucgacaaguga

SEQ ID NO: 180841 - RNA, 1410 nt, Artificial Sequence
  derived and/or modified CDS sequence (opt4) from neuraminidase__InfluenzaA__AEI86737
augaaccccaaccagaagaucaucaccaucggcagcgugugcaugaccaucggcauggccaaccugauccugcagaucggcaacaucaucagcaucuggaucagccacagcauccagcugggcaaccagaaccagaucgagaccugcaaccagagcgugaucaccuacgagaacaagaccugggugaaccagaccuacgugaacaucagcaacaccaacuucgccgccggccagagcguggugagcgugaagcuggccggcaacagcagccugugccccgugagcggcugggccaucuacagcaaggacaacagcaucagaaucggcagcaagggcgacguguucgugaucagagagcccuucaucagcugcagcccccuggagugcagaaccuucuuccugacccagggcgcccugcugaacgacaagcacagcaacggcaccaucaaggacagaagccccuacagaacccugaugagcugccccaucggcgaggugcccagccccuacaacagcagauucgagagcguggccuggagcgccagcgccugccacgacggcaucaacuggcugaccaucggcaucagcggccccgacaacggcgccguggccgugcugaaguacaacggcaucaucaccgacaccaucaagagcuggagaaacaacauccugagaacccaggagagcgagugcgccugcgugaacggcagcugcuucaccgugaugaccgacggccccagcgacggccaggccagcuacaagaucuucagaaucgagaagggcaagguggugaagagcguggagaugaacgcccccaacuaccacuacgaggagugcagcugcuaccccgacagcagcgagaucaccugcgugugcagagacaacuggcacggcagcaacagacccugggugagcuucaaccagaaccuggaguaccagaucggcuacaucugcagcggcaucuucggcgacaaccccagacccaacgacaagaccggcagcugcggccccgugagcagcaacggcgccaacggcgugaagggcuucagcuucaaguacggcaacggcguguggaucggcagaaccaagagcaucagcagcagaaacggcuucgagaugaucugggaccccaacggcuggaccggcaccgacaacaacuucagcaucaagcaggacaucgugggcaucaacgaguggagcggcuacagcggcagcuucgugcagcaccccgagcugaccggccuggacugcaucagacccugcuucuggguggagcugaucagaggcagacccaaggagaacaccaucuggaccagcggcagcagcaucagcuucugcggcgugaacagcgacaccgugggcuggagcuggcccgacggcgccgagcugcccuucaccaucgacaaguga

SEQ ID NO: 180842 - RNA, 1410 nt, Artificial Sequence
  derived and/or modified CDS sequence (opt4) from neuraminidase__InfluenzaA__AEI86757
augaaccccaaccagaagaucaucaccaucggcagcgugugcaucaccaucggcauggccaaccugauccugcagaucggcaacaucaucagcaucuggaucagccacagcauccagcugggcaaccagaaccagaucgagaccugcaaccagagcgugaucaccuacgagaacaacaccugggugaaccagaccuacgugaacaucagcaacaccaacuucgccgccggccagagcguggugagcgugaagcuggccggcaacagcagccugugccccgugagcggcugggccaucuacagcaaggacaacagcaucagaaucggcagcaagggcgacguguucgugaucagagagcccuucaucagcugcagcccccuggagugcagaaccuucuuccugacccagggcgcccugcugaacgacaagcacagcaacggcaccaucaaggacagaagccccuacagaacccugaugagcugccccaucggcgaggugcccagccccuacaacagcagauucgagagcguggccuggagcgccagcgccugccacgacggcaucagcuggcugaccaucggcaucagcggccccgacaacggcgccguggccgugcugaaguacaacggcaucaucaccgacaccaucaagagcuggagaaacaacauccugagaacccaggagagcgagugcgccugcgugaacggcagcugcuucaccgugaugaccgacggccccagcgacggccaggccagcuacaagaucuucagaaucgagaagggcaagaucgugaagagcguggagaugaacgcccccaacuaccacuacgaggagugcagcugcuaccccgacagcagcgagaucaccugcgugugcagagacaacuggcacggcagcaacagacccugggugagcuucaaccagaaccuggaguaccagaucggcuacaucugcagcggcaucuucggcgacaaccccagacccaacgacaagaccggcagcugcggccccgugagcagcaacggcgccaacggcgugaagggcuucagcuucaaguacggcaacggcguguggaucggcagaaccaagagcaucaucagcagaaacggcuucgagaugaucugggaccccaacggcuggaccggcaccgacaacaacuucagcaucaagcaggacaucgugggcaucaacgaguggagcggcuacagcggcagcuucgugcagcaccccgagcugaccggccuggacugcaucagacccugcuucuggguggagcugaucagaggcagacccaaggagaacaccaucuggaccagcggcagcagcaucagcuucugcggcgugaacagcgacaccgugggcuggagcuggcccgacggcgccgagcugcccuucaccaucgacaaguga

SEQ ID NO: 180843 - RNA, 1410 nt, Artificial Sequence
  derived and/or modified CDS sequence (opt4) from neuraminidase__InfluenzaA__AEI86767
augaaccccaaccagaagaucaucaccaucggcagcgugugcaucaccaucggcauggccaaccugauccugcagaucggcaacaucaucagcaucuggaucagccacagcauccagcugggcaaccagaaccagaucgagaccugcaaccagagcgugaucaccuacgagaacaacaccugggugaaccagaccuacgugaacaucagcaacaccaacuucgccgccggccagagcguggugagcgugaagcuggccggcaacagcagccugugccccgugagcggcugggccaucuacagcaaggacaacagcaucagaaucggcagcaagggcgacguguucgugaucagagagcccuucaucagcugcagcccccuggagugcagaaccuucuuccugacccagggcgcccugcugaacgacaagcacagcaacggcaccaucaaggacagaagccccuacagaacccugaugagcugccccaucggcgaggugcccagccccuacaacagcagauucgagagcguggccuggagcgccagcgccugccacgacggcaucagcuggcugaccaucggcaucagcggccccgacaacggcgccguggccgugcugaaguacaacggcaucaucaccgacaccaucaagagcuggagaaacaacauccugagaacccaggagagcgagugcgccugcgugaacggcagcugcuucaccgugaugaccgacggccccagcgacggccaggccagcuacaagaucuucagaaucgagaagggcaagaucgugaagagcguggagaugaacgcccccaacuaccacuacgaggagugcagcugcuaccccgacagcagcgagaucaccugcgugugcagagacaacuggcacggcagcaacagacccugggugagcuucaaccacaaccuggaguaccagaucggcuacaucugcagcggcaucuucggcgacaaccccagacccaacgacaagaccggcagcugcggccccgugagcagcaacggcgccaacggcgugaagggcuucagcuucaaguacggcaacggcguguggaucggcagaaccaagagcaucagcagcagaaacggcuucgagaugaucugggaccccaacggcuggaccggcaccgacaacaacuucagcaucaagcaggacaucgugggcaucaacgaguggagcggcuacagcggcagcuucgugcagcaccccgagcugaccggccuggacugcaucagacccugcuucuggguggagcugaucagaggcagacccaaggagaacaccaucuggaccagcggcagcagcaucagcuucugcggcgugaacagcgacaccgugggcuggagcuggcccgacggcgccgagcugcccuucaccaucgacaaguga

SEQ ID NO: 180844 - RNA, 1410 nt, Artificial Sequence; identical to SEQ ID NO: 180843
  derived and/or modified CDS sequence (opt4) from neuraminidase__InfluenzaA__AEI86777

SEQ ID NO: 180845 - RNA, 1410 nt, Artificial Sequence
  derived and/or modified CDS sequence (opt4) from neuraminidase__InfluenzaA__AEI86787
augaaccccaaccagaagaucaucaccaucggcagcgugugcaugaccaucggcauggccaaccugaugcugcagaucggcaacaucaucagcaucuggaucagccacagcauccagcugggcaaccagaaccagaucgagaccugcaaccagagcgugaucaccuacgagaacaacaccugggugaaccagaccuacgugaacaucagcaacaccaacuucgccgccggccagagcguggugagcgugaagcuggccggcaacagcagccugugccccgugagcggcugggccaucuacagcaaggacaacagcaucagaaucggcagcaagggcgacguguucgugaucagagagcccuucaucagcugcagcccccuggagugcagaaccuucuuccugacccagggcgcccugcugaacgacaagcacagcaacggcaccaucaaggacagaagccccuacagaacccugaugagcugccccaucggcgaggugcccagccccuacaacagcagauucgagagcguggccuggagcgccagcgccugccacgacggcaucaacuggcugaccaucggcaucagcggccccgacaacggcgccguggccgugcugaaguacaacggcaucaucaccgacaccaucaagagcuggagaaacaacauccugagaacccaggagagcgagugcgccugcgugaacggcagcugcuucaccgugaugaccgacggccccagcgacggccaggccagcuacaagaucuucagaaucgagaagggcaagaucgugaagagcguggagaugaacgcccccaacuaccacuacgaggagugcagcugcuaccccgacagcagcgagaucaccugcgugugcagagacaacuggcacggcagcaacagacccugggugagcuucaaccagaaccuggaguaccagaucggcuacaucugcagcggcaucuucggcgacaaccccagacccaacgacaagaccggcagcugcggccccgugagcagcaacggcgccaacggcgugaagggcuucagcuucaaguacggcaacggcguguggaucggcagaaccaagagcaucagcagcagaaacggcuucgagaugaucugggaccccaacggcuggaccggcaccgacaacaacuucagcaucaagcaggacaucgugggcaucaacgaguggagcggcuacagcggcagcuucgugcagcaccccgagcugaccggccuggacugcaucagacccugcuucuggguggagcugaucagaggcagacccaaggagaacaccaucuggaccagcggcagcagcaucagcuucugcggcgugaacagcgacaccgugggcuggagcuggcccgacggcgccgagcugcccuucaccaucgacaaguga

SEQ ID NO: 180846 - RNA, 1410 nt, Artificial Sequence
  derived and/or modified CDS sequence (opt4) from neuraminidase__InfluenzaA__AEI86797
augaaccccaaccagaagaucaucaccaucggcagcgugugcaucaccaucggcauggccaaccugauccugcagaucggcaacaucaucagcaucuggaucagccacagcauccagcugggcaaccagaaccagaucgagaccugcaaccagagcgugaucaccuacgagaacaacaccugggugaaccagaccuacgugaacaucagcaacaccaacuucgccgccggccagagcguggugagcgugaagcuggccggcaacagcagccugugccccgugagcggcugggccaucuacagcaaggacaacagcaucagaaucggcagcaagggcgacguguucgugaucagagagcccuucaucagcugcagcccccuggagugcagaaccuucuuccugacccagggcgcccugcugaacgacaagcacagcaacggcaccaucaaggacagaagccccuacagaacccugaugagcugccccaucggcgaggugcccagccccuacaacagcagauucgagagcguggccuggagcgccagcgccugccacgacggcaucagcuggcugaccaucggcaucagcggccccgacaacggcgccguggccgugcugaaguacaacggcaucaucaccgacaccaucaagagcuggagaaacaacauccugagaacccaggagagcgagugcgccugcgugaacggcagcugcuucaccgugaugaccgacggccccagcgacggccaggccagcuacaagaucuucagaaucgagaagggcaagaucgugaagagcguggagaugaacgcccccaacuaccacuacgaggagugcagcugcuaccccgacagcagcgagaucaccugcgugugcagagacaacuggcacggcagcaacagacccugggugagcuucaaccagaaccuggaguaccagaucggcuacaucugcagcggcaucuucggcgacaaccccagacccaacgacaagaccggcagcugcggccccgugagcagcaacggcgccaacggcgugaagggcuucagcuucaaguacggcaacggcguguggaucggcagaaccaagagcaucagcagcagaaacggcuucgagaugaucugggaccccaacggcuggaccggcaccgacaacaacuucagcaucaagcaggacaucgugggcaucaacgaguggagcggcuacagcggcagcuucgugcagcaccccgagcugaccggccuggacugcaucagacccugcuucuggguggagcugaucagaggcagacccaaggagaacaccaucuggaccagcggcagcagcaucagcuucugcggcgugaacagcgacaccgugggcuggagcuggcccgacggcgccgagcugcccuucaccaucgacaaguga

SEQ ID NO: 180847 - RNA, 1410 nt, Artificial Sequence
  derived and/or modified CDS sequence (opt4) from neuraminidase__InfluenzaA__AEI86807
augaaccccaaccagaagaucaucaccaucggcagcgugugcaugaccaucggcauggccaaccugauccugcagaucggcaacaucaucagcaucuggaucagccacagcauccagcugggcaaccagaaccagaucgagaccugcaaccagagcgugaucaccuacgagaacaacaccugggugaaccagaccuacgugaacaucagcaacaccaacuucgccgccggccagagcguggugagcgugaagcuggccggcaacagcagccugugccccgugagcggcugggccaucuacagcaaggacaacagcaucagaaucggcagcaagggcgacguguucgugaucagagagcccuucaucagcugcagcccccuggagugcagaaccuucuuccugacccagggcgcccugcugaacgacaagcacagcaacggcaccaucaaggacagaagccccuacagaacccugaugagcugccccaucggcgaggugcccagccccuacaacagcagauucgagagcguggccuggagcgccagcgccugccacgacggcaucaacuggcugaccaucggcaucagcggccccgacaacggcgccguggccgugcugaaguacaacggcaucaucaccgacaccaucaagagcuggagaaacaacauccugagaacccaggagagcgagugcgccugcgugaacggcagcugcuucaccgugaugaccgacggccccagcgacggccaggccagcuacaagaucuucagaaucgagaagggcaagaucgugaagagcguggagaugaacgcccccaacuaccacuacgaggagugcagcugcuaccccgacagcagcaagaucaccugcgugugcagagacaacuggcacggcagcaacagacccugggugagcuucaaccagaaccuggaguaccagaucggcuacaucugcagcggcaucuucggcgacaaccccagacccaacgacaagaccggcagcugcggccccgugagcagcaacggcgccaacggcgugaagggcuucagcuucaaguacggcaacggcguguggaucggcagaaccaagagcaucagcagcagaaacggcuucgagaugaucugggaccccaacggcuggaccggcaccgacaacaacuucagcaucaagcaggacaucgugggcaucaacgaguggagcggcuacagcggcagcuucgugcagcaccccgagcugaccggccuggacugcaucagacccugcuucuggguggagcugaucagaggcagacccaaggagaacaccaucuggaccagcggcagcagcaucagcuucugcggcgugaacagcgacaccgugggcuggagcuggcccgacggcgccgagcugcccuucaucaucgacaaguga

SEQ ID NO: 180848 - RNA, 1410 nt, Artificial Sequence; identical to SEQ ID NO: 180843
  derived and/or modified CDS sequence (opt4) from neuraminidase__InfluenzaA__AEI86817

SEQ ID NO: 180849 - RNA, 1410 nt, Artificial Sequence
  derived and/or modified CDS sequence (opt4) from neuraminidase__InfluenzaA__AEI86827
augaaccccaaccagaagaucaucaccaucggcagcgugugcaucaccaucggcauggccaaccugauccugcagaucggcaacaucaucagcaucuggaucagccacagcauccagcugggcaaccagaaccagaucgagaccugcaaccagagcgugaucaccuacgagaacaacaccugggugaaccagaccuacgugaacaucagcaacaccaacuucgccgccggccagagcguggugagcgugaagcuggccggcaacagcagccugugccccgugagcggcugggccaucuacagcaaggacaacagcaucagaaucggcagcaagggcgacguguucgugaucagagagcccuucaucagcugcagcccccuggagugcagaaccuucuuccugacccagggcgcccugcugaacgacaagcacagcaacggcaccaucaaggacagaagccccuacagaacccugaugagcugccccaucggcgaggugcccagccccuacaacagcagauucgagagcguggccuggagcgccagcgccugccacgacggcaucagcuggcugaccaucggcaucagcggccccgacaacggcgccguggccgugcugaaguacaacggcaucaucaccgacaccaucaagagcuggagaaacaacauccugagaacccaggagagcgagugcgccugcgugaacggcagcugcuucaccgugaugaccgacggccccagcgacggccaggccagcuacaagaucuucagaaucgagaagggcaagaucgugaagagcguggagaugaacgcccccaacuaccacuacgaggagugcagcugcuaccccgacagcagcgagaucaccugcgugugcagagacaacuggcacggcagcaacagacccugggugagcuucaaccacaaccuggaguaccagaucggcuacaucugcagcggcaucuucggcgacaaccccagacccaacgacaagaccggcagcugcggccccgugagcagcaacggcgccaacggcgugaagggcuucagcuucaaguacggcaacggcguguggaucggcagaaccaagagcaccagcagcagaaacggcuucgagaugaucugggaccccaacggcuggaccggcaccgacaacaacuucagcaucaagcaggacaucgugggcaucaacgaguggagcggcuacagcggcagcuucgugcagcaccccgagcugaccggccugaacugcaucagacccugcuucuggguggagcugaucagaggcagacccaaggagaacaccaucuggaccagcggcagcagcaucagcuucugcggcgugaacagcgacaccgugggcuggagcuggcccgacggcgccgagcugcccuucaccaucgacaaguga

SEQ ID NO: 180850 - RNA, 1410 nt, Artificial Sequence; identical to SEQ ID NO: 180846
  derived and/or modified CDS sequence (opt4) from neuraminidase__InfluenzaA__AEI86837

SEQ ID NO: 180851 - RNA, 1410 nt, Artificial Sequence; identical to SEQ ID NO: 180317
  derived and/or modified CDS sequence (opt4) from neuraminidase__InfluenzaA__AEI86847

SEQ ID NO: 180852 - RNA, 1410 nt, Artificial Sequence
  derived and/or modified CDS sequence (opt4) from neuraminidase__InfluenzaA__AEI86867
augaaccccaaccagaagaucaucaccaucggcagcgugugcaugaccaucggcauggccaaccugauccugcagaucggcaacaucaucagcaucuggaucagccacagcauccagcugggcaaccagaaccagaucgagaccugcaaccagagcgugaucaccuacgagaacaacaccugggugaaccagaccuacgugaacaucagcaacaccaaccuggccgccggccagagcguggugagcgugaagcuggccggcaacagcagccugugccccgugagcggcugggccaucuacagcaaggacaacagcaucagaaucggcagcaagggcgacguguucgugaucagagagcccuucaucagcugcagcccccuggagugcagaaccuucuuccugacccagggcgcccugcugaacgacaagcacagcaacggcaccaucaaggacagaagccccuacagaacccugaugagcugccccaucggcgaggugcccagccccuacaacagcaaguucgagagcguggccuggagcgccagcgccugccacgacggcaucaacuggcugaccaucggcaucagcggccccgacaacggcgccguggccgugcugaaguacaacggcaucaucaccgacaccaucaagagcuggagaaacaacauccugagaacccaggagagcgagugcgccugcgugaacggcagcugcuucaccaucaugaccgacggccccagcgacggccaggccagcuacaagaucuucagaaucgagaagggcaagaucgugaagagcguggagaugaacgcccccaacuaccacuacgaggagugcagcugcuaccccgacagcagcgagaucaccugcgugugcagagacaacuggcacggcagcaacagacccugggugagcuucaaccagaaccuggaguaccagaucggcuacaucugcagcggcaucuucggcgacaaccccagacccaacgacaagaccggcagcugcggccccgugagcagcaacggcgccaacggcgugaagggcuucagcuucaaguacggcaacggcguguggaucggcagaaccaagagcaucagcagcagaaagggcuucgagaugaucugggaccccaacggcuggaccggcaccgacaacaacuucagcaucaagcaggacaucgugggcaucaacgaguggagcggcuacagcggcagcuucgugcagcaccccgagcugaccggccuggacugcaucagacccugcuucuggguggagcugaucagaggcagacccaaggagaacaccaucuggaccagcggcagcagcaucagcuucugcggcgugaacagcgacaccgugggcuggagcuggcccgacggcgccgagcugcccuucaccaucgacaaguga

SEQ ID NO: 180853 - RNA, 1410 nt, Artificial Sequence; identical to SEQ ID NO: 180846
  derived and/or modified CDS sequence (opt4) from neuraminidase__InfluenzaA__AEI86887

SEQ ID NO: 180854 - RNA, 1410 nt, Artificial Sequence; identical to SEQ ID NO: 180846
  derived and/or modified CDS sequence (opt4) from neuraminidase__InfluenzaA__AEI86897

SEQ ID NO: 180855 - RNA, 1410 nt, Artificial Sequence
  derived and/or modified CDS sequence (opt4) from neuraminidase__InfluenzaA__AEI86907
augaaccccaaccagaagaucaucaccaucggcagcgugugcaugaccaucggcauggccaaccugauccugcagaucggcaacaucaucagcaucuggaucagccacagcauccagcugggcaaccagaaccagaucgagaccugcaaccagagcgugaucaccuacgagaacaacaccugggugaaccagaccuacgugaacaucagcaacaccaacuucgccgccggccagagcguggugagcgugaagcuggccggcaacagcagccugugccccgugagcggcugggccaucuacagcaaggacaacagcaucagaaucggcagcaagggcgacguguucgugaucagagagcccuucaucagcugcagcccccuggagugcagaaccuucuuccugacccagggcgcccugcugaacgacauccacagcaacggcaccaucaaggacagaagccccuacagaacccugaugagcugccccaucggcgaggugcccagccccuacaacagcagauucgagagcguggccuggagcgccagcgccugccacgacggcaucaacuggcugaccaucggcaucagcggccccgacaacggcgccguggccgugcugaaguacaacggcaucaucaccgacaccaucaagagcuggagaaacaacauccugagaacccaggagagcgagugcgccugcgugaacggcagcugcuucaccaucaugaccgacggccccagcgacggccaggccagcuacaagaucuucagaaucgagaagggcaagaucgugaagagcguggagaugaacgcccccaacuaccacuacgaggagugcagcugcuaccccgacagcagcgagaucaccugcgugugcagagacaacuggcacggcagcaacagacccugggugagcuucaaccagaaccuggaguaccagaucggcuacaucugcagcggcaucuucggcgacaaccccagacccaacgacaagaccggcagcugcggccccgugagcagcaacggcgccaacggcgugaagggcuucagcuucaaguacggcaacggcguguggaucggcagaaccaagagcaucagcagcagaaagggcuucgagaugaucugggaccccaacggcuggaccggcaccgacaacaacuucagcaucaagcaggacaucgugggcaucaacgaguggagcggcuacagcggcagcuucgugcagcaccccgagcugaccggccuggacugcaucagacccugcuucuggguggagcugaucagaggcagacccaaggagaacaccaucuggaccagcggcagcagcaucagcuucugcggcgugaacagcgacaccgugggcuggagcuggcccgacggcgccgagcugcccuucaccaucgacaaguga

SEQ ID NO: 180856 - RNA, 1410 nt, Artificial Sequence
  derived and/or modified CDS sequence (opt4) from neuraminidase__InfluenzaA__AEI86917
augaaccccaaccagaagaucaucaccaucggcagcaucugcaugaccaucggcauggccaaccugauccugcagaucggcaacaucaucagcaucuggaucagccacagcauccagcugggcaaccagaaccagaucgagaccugcaaccagagcgugaucaccuacgagaacaacaccugggugaaccagaccuacgugaacaucagcaacaccaacuucgccgccggccagagcguggugagcgugaagcuggccggcaacagcagccugugccccgugagcggcugggccaucuacagcaaggacaacagcaucagaaucggcagcaagggcgacguguucgugaucagagagcccuucaucagcugcagcccccuggagugcagaaccuucuuccugacccagggcgcccugcugaacgacaagcacagcaacggcaccaucaaggacagaagccccuacagaacccugaugagcugccccaucggcgaggugcccagccccuacaacagcagauucgagagcguggccuggagcgccagcgccugccacgacggcaucaacuggcugaccaucggcaucagcggccccgacaacggcgccguggccgugcugaaguacaacggcaucaucaccgacaccaucaagagcuggagaaacaacauccugagaacccaggagagcgagugcgccugcgugaacggcagcugcuucaccaucaugaccgacggccccagcgacggccaggccagcuacaagaucuucagaaucgagaagggcaagaucgugaagagcguggagaugaacgcccccaacuaccacuacgaggagugcagcugcuaccccgacagcagcgagaucaccugcgugugcagagacaacuggcacggcagcaacagacccugggugagcuucaaccagaaccuggaguaccagaucggcuacaucugcagcggcaucuucggcgacaaccccagacccaacgacaagaccggcagcugcggccccgugagcagcaacggcgccaacggcgugaagggcuucagcuucaaguacggcaacggcguguggaucggcagaaccaagagcaucagcagcagaaagggcuucgagaugaucugggaccccaacggcuggaccggcaccgacaacaacuucagcaucaagcaggacaucgugggcaucaacgaguggagcggcuacagcggcagcuucgugcagcaccccgagcugaccggccuggacugcaucagacccugcuucuggguggagcugaucagaggcagacccaaggagaacaccaucuggaccagcggcagcagcaucagcuucugcggcgugaacagcgacaccgugggcuggagcuggcccgacggcgccgagcugcccuucaccaucgacaaguga

SEQ ID NO: 180857 - RNA, 1410 nt, Artificial Sequence; identical to SEQ ID NO: 180769
  derived and/or modified CDS sequence (opt4) from neuraminidase__InfluenzaA__AEI86927

SEQ ID NO: 180858 - RNA, 1410 nt, Artificial Sequence; identical to SEQ ID NO: 180843
  derived and/or modified CDS sequence (opt4) from neuraminidase__InfluenzaA__AEI86937

SEQ ID NO: 180859 - RNA, 1410 nt, Artificial Sequence
  derived and/or modified CDS sequence (opt4) from neuraminidase__InfluenzaA__AEI86947
augaaccccaaccagaagaucaucaccaucggcagcgugugcaugaccaucggcauggccaaccugauccugcagaucggcaacaucaucagcaucuggaucagccacagcauccagcugggcaacaagaaccagaucgagaccugcaaccagagcgugaucaccuacgagaacaacaccugggugaaccagaccuacgugaacaucagcaacaccaacuucgccgccggccagagcguggugagcgugaagcuggccggcaacagcagccugugccccgugagcggcugggccaucuacagcaaggacaacagcaucagaaucggcagcaagggcgacguguucgugaucagagagcccuucaucagcugcagcccccuggagugcagaaccuucuuccugacccagggcgcccugcugaacgacaagcacagcaacggcaccaucaaggacagaagccccuacagaacccugaugagcugccccaucggcgaggugcccagccccuacaacagcagauucgagagcguggccuggagcgccagcgccugccacgacggcaucaacuggcugaccaucggcaucagcggccccgacaacggcgccguggccgugcugaaguacaacggcaucaucaccgacaccaucaagagcuggagaaacaacauccugagaacccaggagagcgagugcgccugcgugaacggcagcugcuucaccgugaugaccgacggccccagcgacggccaggccagcuacaagaucuucagaaucgagaagggcaagaucgugaagagcguggagaugaacgcccccaacuaccacuacgaggagugcagcugcuaccccgacagcagcgagaucaccugcgugugcagagacaacuggcacggcagcaacagacccugggugagcuucaaccagaaccuggaguaccagaucggcuacaucugcagcggcaucuucggcgacaaccccagacccaacgacaagaccggcagcugcggccccgugagcagcaacggcgccaacggcgugaagggcuucagcuucaaguacggcaacggcguguggaucggcagaaccaagagcaucagcagcagaaacggcuucgagaugaucugggaccccaacggcuggaccggcaccgacaacaacuucagcaucaagcaggacaucgugggcaucaaggaguggagcggcuacagcggcagcuucgugcagcaccccgagcugaccggccuggacugcaucagacccugcuucuggguggagcugaucagaggcagacccaaggagaacaccaucuggaccagcggcagcagcaucagcuucugcggcgugaacagcgacaccgugggcuggagcuggcccgacggcgccgagcugcccuucaccaucgacaaguga

SEQ ID NO: 180860 - RNA, 1410 nt, Artificial Sequence
  derived and/or modified CDS sequence (opt4) from neuraminidase__InfluenzaA__AEI86967
augaaccccaaccagaagaucaucaccaucggcagcgugugcaugaccaucggcauggccaaccugauccugcagaucggcaacaucaucagcaucuggaucagccacagcauccagcugggcaaccagaaccagaucgagaccugcaaccagagcgugaucaccuacgagaacaacaccugggugaaccagaccuacgugaacaucagcaacaccaacuucgccgccggccagagcguggugagcgugaagcuggccggcaacagcagccugugccccgugagcggcugggccaucuacagcaaggacaacagcaucagaaucggcagcaagggcgacgccuucgugaucagagagcccuucaucagcugcagcccccuggagugcagaaccuucuuccugacccagggcgcccugcugaacgacaagcacagcaacggcaccaucaaggacagaagccccuacagaacccugaugagcugccccaucggcgaggugcccagccccuacaacagcagauucgagagcguggccuggagcgccagcgccugccacgacggcaucaacuggcugaccaucggcaucagcggccccgacaacggcgccguggccgugcugaaguacaacggcaucaucaccgacaccaucaagagcuggagaaacaacauccugagaacccaggagagcgagugcgccugcgugaacggcagcugcuucaccaucaugaccgacggccccagcgacggccaggccagcuacaagaucuucagaaucgagaagggcaagaucgugaagagcguggagaugaacgcccccaacuaccacuacgaggagugcagcugcuaccccgacagcagcgagaucaccugcgugugcagagacaacuggcacggcagcaacagacccugggugagcuucaaccagaaccuggaguaccagaucggcuacaucugcagcggcaucuucggcgacaaccccagacccaacgacaagaccggcagcugcggccccgugagcagcaacggcgccaacggcgugaagggcuucagcuucaaguacggcaacggcguguggaucggcagaaccaagagcaucagcagcagaaagggcuucgagaugaucugggaccccaacggcuggaccggcaccgacaacaacuucagcaucaagcaggacaucgugggcaucaacgaguggagcggcuacagcggcagcuucgugcagcaccccgagcugaccggccuggacugcaucagacccugcuucuggguggagcugaucagaggcagacccaaggagaacaccaucuggaccagcggcagcagcaucagcuucugcggcgugaacagcgacaccgugggcuggagcuggcccgacggcgccgagcugcccuucaccaucgacaaguga

SEQ ID NO: 180861 - RNA, 1410 nt, Artificial Sequence
  derived and/or modified CDS sequence (opt4) from neuraminidase__InfluenzaA__AEI86977
augaaccccaaccagaagaucaucaccaucggcagcgugugcaugaccaucggcauggccaaccugauccugcagaucggcaacaucaucagcaucuggaucagccacagcauccagcugggcaaccagaaccagaucggcaccugcaaccagagcgugaucaccuacgagaacaacaccugggugaaccagaccuacgugaacaucagcaacaccaacuucgccgccggccagagcguggugagcgugaagcuggccggcaacagcagccugugccccgugagcggcugggccaucuacagcaaggacaacagcaucagaaucggcagcaagggcgacguguucgugaucagagagcccuucaucagcugcagcccccuggagugcagaaccuucuuccugacccagggcgcccugcugaacgacaagcacagcaacggcaccaucaaggacagaagccccuacagaacccugaugagcugccccaucggcgaggugcccagccccuacaacagcagauucgagagcguggccuggagcgccagcgccugccacgacggcaucaacuggcugaccaucggcaucagcggccccgacaacggcgccguggccgugcugaaguacaacggcaucaucaccgacaccaucaagagcuggagaaacaacauccugagaacccaggagagcgagugcaccugcgugaacggcagcugcuucaccgugaugaccgacggccccagcgacggccaggccagcuacaagaucuucaagaucgagaagggcaagaucgugaagagcguggagaugaacgcccccaacuaccacuacgaggagugcagcugcuaccccgacagcagcgagaucaccugcgugugcagagacaacuggcacggcagcaacagacccugggugagcuucaaccagaaccuggaguaccagaucggcuacaucugcagcggcaucuucggcgacaaccccagacccaacgacaagaccggcagcugcggccccgugagcagcaacggcgccaacggcgugaagggcuucagcuucaaguacggcaacggcguguggaucggcagaaccaagagcaucagcagcagaaacggcuucgagaugaucugggaccccaacggcuggaccggcaccgacaacaacuucagcaucaagcaggacaucgugggcaucaacgaguggagcggcuacagcggcagcuucgugcagcaccccgagcugaccggccuggacugcaucagacccugcuucuggguggagcugaucagaggcagacccaaggagaacaccaucuggaccagcggcagcagcaucagcuucugcggcgugaacagcgacaccgugggcuggagcuggcccgacggcgccgagcugcccuucaccaucgacaaguga

SEQ ID NO: 180862 - RNA, 1410 nt, Artificial Sequence
  derived and/or modified CDS sequence (opt4) from neuraminidase__InfluenzaA__AEI86997
augaaccccaaccagaagaucaucaccaucggcagcgugugcaugaccaucggcauggccaaccugauccugcagaucggcaacaucaucagcaucuggaucagccacagcauccagcugggcaaccagaaccagaucgagaccugcaaccagagcgugaucaccuacgagaacaacaccugggugaaccagaccuacgugaacaucagcaacaccaacuucgccgccggccagagcguggugagcgugaagcuggccggcaacagcagccugugccccgugagcggcugggccaucuacagcaaggacaacagcaucagaaucggcagcaagggcgacguguucgugaucagagagcccuucaucagcugcagcccccuggagugcagaaccuucuuccugacccagggcgcccugcugaacgacaagcacagcaacggcaccaucaaggacagaagccccuacagaacccugaugagcugccccaucggcgaggugcccagccccuacaacagcagauucgagagcguggccuggagcgccagcgccugccacgacggcaucaacuggcugaccaucggcaucagcggccccgacaacggcgccguggccgugcugaaguacaacggcaucaucaccgacaccaucaagagcuggagaaacaacauccugagaacccaggagagcgagugcgccugcgugaacggcagcugcuucaccgugaugaccgacggccccagcgacggccaggccagcuacaagaucuucagaaucgagaagggcaagaucgugaagagcguggagaugaacgcccccaacuaccacuacgaggagugcagcugcuaccccgacagcagcgagaucaccugcgugugcagagacaacuggcacggcagcaacagacccugggugagcuucaaccagaaccuggaguaccagaucggcuacaucugcagcggcaucuucggcgacaaccccagacccaacgacaagaccggcagcugcggccccgugagcagcaacggcgccaacggcgugaagggcuucagcuucaaguacggcaacggcguguggaucggcagaaccaagagcaucagcagcagaaacggcuucgagaugaucugggaccccaacggcuggaccggcaccgacaacaacuucagcaucaagcaggacaucgugggcaucaaggaguggagcggcuacagcggcagcuucgugcagcaccccgagcugaccggccuggacugcaucagacccugcuucuggguggagcugaucagaggcagacccaaggagaacaccaucuggaccagcggcagcaucaucagcuucugcggcgugaacagcgacaccgugggcuggagcuggcccgacggcgccgagcugcccuucaccaucgacaaguga

SEQ ID NO: 180863 - RNA, 1410 nt, Artificial Sequence
  derived and/or modified CDS sequence (opt4) from neuraminidase__InfluenzaA__AEI87007
augaaccccaaccagaagaucaucaccaucggcagcgugugcaucaccaucggcauggccaaccugauccugcagaucggcaacaucaucagcaucuggaucagccacagcauccagcugggcaaccagaaccagaucgagaccugcaaccagagcgugaucaccuacgagaacaacaccugggugaaccagaccuacgugaacaucagcaacaccaacuucgccgccggccagagcguggugagcgugaagcuggccggcaacagcagccugugccccgugagcggcugggccaucuacagcaaggacaacagcaucagaaucggcagcaagggcgacguguucgugaucagagagcccuucaucagcugcagcagccuggagugcagaaccuucuuccugacccagggcgcccugcugaacgacaagcacagcaacggcaccaucaaggacagaagccccuacagaacccugaugagcugccccaucggcgaggugcccagccccuacaacagcagauucgagagcguggccuggagcgccagcgccugccacgacggcaucagcuggcugaccaucggcaucagcggccccgacaacggcgccguggccgugcugaaguacaacggcaucaucaccgacaccaucaagagcuggagaaacaacauccugagaacccaggagagcgagugcgccugcgugaacggcagcugcuucaccgugaugaccgacggccccagcgacggccaggccagcuacaagaucuucagaaucgagaagggcaagaucgugaagagcguggagaugaacgcccccaacuaccacuacgaggagugcagcugcuaccccgacagcagcgagaucaccugcgugugcagagacaacuggcacggcagcaacagacccugggugagcuucaaccagaaccuggaguaccagaucggcuacaucugcagcggcaucuucggcgacaaccccagacccaacgacaagaccggcagcugcggccccgugagcagcaacggcgccaacggcgugaagggcuucagcuucaaguacggcaacggcguguggaucggcagaaccaagagcaucagcagcagaaacggcuucgagaugaucugggaccccaacggcuggaccggcaccgacaacaacuucagcaucaagcaggacaucgugggcaucaacgaguggagcggcuacagcggcagcuucgugcagcaccccgagcugaccggccuggacugcaucagacccugcuucuggguggagcugaucagaggcagacccaaggagaacaccaucuggaccagcggcagcagcaucagcuucugcggcgugaacagcgacaccgugggcuggagcuggcccgacggcgccgagcugcccuucaccaucgacaaguga

SEQ ID NO: 180864 - RNA, 1410 nt, Artificial Sequence
  derived and/or modified CDS sequence (opt4) from neuraminidase__InfluenzaA__AEI87017
augaaccccaaccagaagaucaucaccaucggcagcgugugcaugaccaucggcauggccaaccugauccugcagaucggcaacaucaucagcaucuggaucagccacagcauccagcugggcaaccagaaccagaucgagaccugcaaccagagcgugaucaccuacgagaacaacaccugggugaaccagaccuacgugaacaucagcaacaccaacuucgccgccggccagagcguggugagcgugaagcuggccggcaacagcagccugugccccgugagcggcugggccaucuacagcaaggacaacagcaucagaaucggcagcaagggcgacguguucgugaucagagagcccuucaucagcugcagcccccuggagugcagaaccuucuuccugacccagggcgcccugcugaacgacaagcacagcaacggcaccaucaaggacagaagccccuacagaacccugaugagcugccccaucggcgaggugcccagccccuacaacagcagauucgagagcguggccuggagcgccagcgccugccacgacggcaucaacuggcugaccaucggcaucagcggccccgacaacggcgccguggccgugcugaaguacaacggcaucaucaccgacaccaucaagagcuggagaaacaacauccugagaacccaggagagcgagugcgccugcgugaacggcagcugcuucaccgugaugaccgacggccccagcgacggccaggccagcuacaagaucuucagaaucgagaagggcaagaucgugaagagcguggagaugaacgcccccaacuaccacuacgaggagugcagcugcuaccccgacagcagcgagaucaccugcgugugcagagacaacuggcacggcagcaacagacccugggugagcuucaaccagaaccuggaguaccagaucggcuacaucugcagcggcaucuucggcgacaaccccagacccaacgacaagaccggcagcugcggccccgugagcagcaacggcgccaacggcgugaagggcuucagcuucaaguacggcaacggcguguggaucggcagaaccaagagcaucagcagcagaaacggcuucgagaugaucugggaccccaacggcuggaccggcaccgacaacaacuucagcaucaagcaggacaucgugggcaucaacgaguggagcggcuacagcggcagcuucgugcagcaccccgagcugaccggccuggacugcaucagacccugcuucuggguggagcugaucagaggcagacccaaggagaacaccaucuggaccagcggcagcagcaucagcuucugcggcgugaacggcgacaccggcggcuggagcuggcccgacggcgccgagcugcccuucaccaucgacaaguga

SEQ ID NO: 180865 - RNA, 1410 nt, Artificial Sequence; identical to SEQ ID NO: 180769
  derived and/or modified CDS sequence (opt4) from neuraminidase__InfluenzaA__AEI87027

SEQ ID NO: 180866 - RNA, 1410 nt, Artificial Sequence; identical to SEQ ID NO: 180862
  derived and/or modified CDS sequence (opt4) from neuraminidase__InfluenzaA__AEI87037

SEQ ID NO: 180867 - RNA, 1410 nt, Artificial Sequence; identical to SEQ ID NO: 180846
  derived and/or modified CDS sequence (opt4) from neuraminidase__InfluenzaA__AEI87047

SEQ ID NO: 180868 - RNA, 1410 nt, Artificial Sequence
  derived and/or modified CDS sequence (opt4) from neuraminidase__InfluenzaA__AEI87057
augaaccccaaccagaagaucaucaccaucggcagcgugugcaugaccaucggcauggccaaccugauccugcagaucggcaacaucaucagcaucuggaucagccacagcauccagcugggcaaccagaaccagaucgagaccugcaaccagagcgugaucaccuacgagaacaacaccugggugaaccagaccuacgugaacaucagcaacaccaacuucgccgccggccagagcguggugagcgugaagcuggccggcaacagcagccugugccccgugagcggcugggccaucuacagcaaggacaacagcaucagaaucggcagcaagggcgacguguucgugaucagagagcccuucaucagcugcagcccccuggagugcagaaccuucuuccugacccagggcgcccugcugaacgacaagcacagcaacggcaccaucaaggacagaagccccuacagaacccugaugagcugccccaucggcgaggugcccagccccuacaacagcagauucgagagcguggccuggagcgccagcgccugccacgacggcaucaacuggcugaccaucggcaucagcggccccgacaacggcgccguggccgugcugaaguacaacggcaucaucaccgacaccaucaagagcuggagaaacaacauccugagaacccaggagagcgagugcgccugcgugaacggcagcugcuucaccgugaugaccgacggccccagcgacggccaggccagcuacaagaucuucagaaucgagaagggcaagaucgugaagagcguggagaugaacgcccccaacuaccacuacgaggagugcagcugcuaccccgacagcagcgagaucaccugcgugugcagagacaacuggcacggcagcaacagacccugggugagcuucaaccagaaccuggaguaccagaucggcuacaucugcagcggcaucuucggcgacaaccccagacccaacgacaagaccggcagcugcggccccgugagcagcaacggcgccaacggcgugaagggcuucagcuucaaguacggcaacggcguguggaucggcagaaccaagagcaucagcagcagaaacggcuucgagaugaucugggaccccaacggcuggaccggcaccgacaacaacuucagcaucaagcaggacaucgugggcaucaaggaguggagcggcuacagcggcagcuucgugcagcaccccgagcugaccggccuggacugcaucagacccugcuucuggguggagcugaucagaggcagacccaaggagaacaccaucuggaccagcggcagcagcaucagcuucugcggcgugaacagcgacaccgugggcuggagcuggcccgacggcgccgagcugcccuucaccaucgacaaguga

SEQ ID NO: 180869 - RNA, 1410 nt, Artificial Sequence; identical to SEQ ID NO: 180317
  derived and/or modified CDS sequence (opt4) from neuraminidase__InfluenzaA__AEI87067

SEQ ID NO: 180870 - RNA, 1410 nt, Artificial Sequence
  derived and/or modified CDS sequence (opt4) from neuraminidase__InfluenzaA__AEI87077
augaaccccaaccagaagaucaucaccaucggcagcaucugcaugaccaucggcauggccaaccugauccugcagaucggcaacaucaucagcaucuggaucagccacagcauccaguucggcaaccagaaccagaucggcaccugcaaccagagcgugaucaccuacgagaacaacaccugggugaaccagaccuacgugaacaucagcaacaccaacuucgccgccggccagagcguggugagcgugaagcuggccggcaacagcagccugugccccgugagcggcugggccaucuacagcaaggacaacagcaucagaaucggcagcaagggcgacguguucgugaucagagagcccuucaucagcugcagcccccuggagugcagaaccuucuuccugacccagggcgcccugcugaacgacaagcacagcaacggcaccaucaaggacagaagccccuacagaacccugaugagcugccccaucggcgaggugcccagccccuacaacagcagauucgagagcguggccuggagcgccagcgccugccacgacggcaucaacuggcugaccaucggcaucagcggccccgacaacggcgccguggccgugcugaaguacaacggcaucaucaccgacaccaucaagagcuggagaaacaacauccugagaacccaggagagcgagugcgccugcgugaacggcagcugcuucaccaucaugaccgacggccccagcgacggccaggccagcuacaagaucuucagaaucgagaagggcaagaucgugaagagcguggagaugaacgcccccaacuaccacuacgaggagugcagcugcuaccccgacagcagcgagaucaccugcgugugcagagacaacuggcacggcagcaacagacccugggugagcuucaaccagaaccuggaguaccagaucggcuacaucugcagcggcaucuucggcgacaaccccagacccaacgacaagaccggcagcugcggccccgugagcagcaacggcgccaacggcgugaagggcuucagcuucaaguacggcaacggcguguggaucggcagaaccaagagcaucagcagcagaaagggcuucgagaugaucugggaccccaacggcuggaccggcaccgacaacaacuucagcaucaagcaggacaucgugggcaucaacgaguggagcggcuacagcggcagcuucgugcagcaccccgagcugaccggccuggacugcaucagacccugcuucuggguggagcugaucagaggcagacccaaggagaacaccaucuggaccagcggcagcagcaucagcuucugcggcgugaacagcgacaccgugggcuggagcuggcccgacggcgccgagcugcccuucaccaucgacaaguga

SEQ ID NO: 180871 - RNA, 1410 nt, Artificial Sequence
  derived and/or modified CDS sequence (opt4) from neuraminidase__InfluenzaA__AEI87087
augaaccccaaccagaagaucaucaccaucggcagcgugugcaugaccaucggcauggccaaccugauccugcagaucggcaacaucaucagcaucuggaucagccacagcauccagcugggcaaccagaaccagaucgagaccugcaaccagagcgugaucaccuacgagaacaacaccugggugaaccagaccuacgugaacaucagcaacaccaacuucgccgccggccagagcguggugagcgugaagcuggccggcaacagcagccugugccccaucagcggcugggccaucuacagcaaggacaacagcaucagaaucggcagcaagggcgacguguucgugaucagagagcccuucaucagcugcagcccccuggagugcagaaccuucuuccugacccagggcgcccugcugaacgacaagcacagcaacggcaccaucaaggacagaagccccuacagaacccugaugagcugccccaucggcgaggugcccagccccuacaacagcagauucgagagcguggccuggagcgccagcgccugccacgacggcaucaacuggcugaccaucggcaucagcggccccgacaacggcgccguggccgugcugaaguacaacggcaucaucaccgacaccaucaagagcuggagaaacaacauccugagaacccaggagagcgagugcgccugcgugaacggcagcugcuucaccgugaugaccgacggccccagcgacggccaggccagcuacaagaucuucagaaucgagaagggcaagaucgugaagagcguggagaugaacgcccccaacuaccacuacgaggagugcagcugcuaccccgacagcagcgagaucaccugcgugugcagagacaacuggcacggcagcaacagacccugggugagcuucaaccagaaccuggaguaccagaucggcuacaucugcagcggcaucuucggcgacaaccccagacccaacgacaagaccggcagcugcggccccgugagcagcaacggcgccaacggcgugaagggcuucagcuucaaguacggcaacggcguguggaucggcagaaccaagagcaucagcagcagaaacggcuucgagaugaucugggaccccaacggcuggaccggcaccgacaacaacuucagcaucaagcaggacaucgugggcaucaaggaguggagcggcuacagcggcagcuucgugcagcaccccgagcugaccggccuggacugcaucagacccugcuucuggguggagcugaucagaggcagacccaaggagaacaccaucuggaccagcggcagcaucaucagcuucugcagcgugaacagcgacaccgugggcuggagcuggcccgacggcgccgagcugcccuucaccaucgacaaguga

SEQ ID NO: 180872 - RNA, 1410 nt, Artificial Sequence; identical to SEQ ID NO: 180843
  derived and/or modified CDS sequence (opt4) from neuraminidase__InfluenzaA__AEI87097

SEQ ID NO: 180873 - RNA, 1410 nt, Artificial Sequence; identical to SEQ ID NO: 180843
  derived and/or modified CDS sequence (opt4) from neuraminidase__InfluenzaA__AEI87107

SEQ ID NO: 180874 - RNA, 1413 nt, Artificial Sequence
  derived and/or modified CDS sequence (opt4) from neuraminidase__InfluenzaA__AEI91968
augaaccccaaccagaagaucaucaccaucggcagcaucagcaucgccaucggcaucaucagccugaugcugcagaucggcaacaucaucagcaucugggccagccacagcauccagaccggcagccagaacaacaccggcaucugcaaccagagaaucaucaccuacgagaacagcaccugggugaaccacaccuacgugaacaucaacaacaccaacgugguggccggcgaggacaagaccagcgugacccuggccggcaacagcagccugugcagcaucagcggcugggccaucuacaccaaggacaacagcaucagaaucggcagcaagggcgacguguucgugaucagagagcccuucaucagcugcagccaccuggagugcagaaccuucuuccugacccagggcgcccugcugaacgacaagcacagcaacggcaccgugaaggacagaagccccuacagagcccugaugagcugcccccugggcgaggcccccagccccuacaacagcaaguucgagagcguggccuggagcgccagcgccugccacgacggcaugggcuggcugaccaucggcaucagcggccccgacaacggcgccguggccgugcugaaguacaacggcaucaucaccggcaccaucaagagcuggaagaagcagauccugagaacccaggagagcgagugcgugugcaugaacggcagcugcuucaccaucaugaccgacggccccagcaacaaggccgccagcuacaagaucuucaagaucgagaagggcaaggugaccaagagcaucgagcugaacgcccccaacuucuacuacgaggagugcagcugcuaccccgacaccggcaucgugaugugcgugugcagagacaacuggcacggcagcaacagacccugggugagcuucaaccagaaccuggacuaccagaucggcuacaucugcagcggcguguucggcgacaaccccagacccgaggacggcgagggcagcugcaaccccgugaccguggacggcgccaacggcgugaagggcuucagcuacaaguacggcaacggcguguggaucggcagaaccaagagcaacagacugagaaagggcuucgagaugaucugggaccccaacggcuggaccaacaccgacagcgacuucagcgugaagcaggacgugguggccaucaccgacuggagcggcuacagcggcagcuucgugcagcaccccgagcugaccggccuggacugcaucaagcccugcuucuggguggagcuggugagaggccugcccagagagaacaccaccaucuggaccagcggcagcagcaucagcuucugcggcgugaacagcgacaccgccaacuggagcuggcccgacggcgccgagcugcccuucaccaucgacaaguga

SEQ ID NO: 180875 - RNA, 1410 nt, Artificial Sequence; identical to SEQ ID NO: 176798
  derived and/or modified CDS sequence (opt4) from neuraminidase__InfluenzaA__AEI91983

SEQ ID NO: 180876 - RNA, 1410 nt, Artificial Sequence; identical to SEQ ID NO: 179284
  derived and/or modified CDS sequence (opt4) from neuraminidase__InfluenzaA__AEI91984

SEQ ID NO: 180877 - RNA, 1410 nt, Artificial Sequence
  derived and/or modified CDS sequence (opt4) from neuraminidase__InfluenzaA__AEI92004
augaaccccaaccagaagaucaucaccaucggcagcgugugcaugaccaucggcauggccaaccugauccugcagaucggcaacaucaucagcaucuggaucagccacagcauccagcugggcaaccagaaccagaucgagaccugcaaccagagcgugaucaccuacgagaacaacaccugggugaaccagaccuacgugaacaucagcaacaccaacuucgccgccggccagagcguggugagcgugaagcuggccggcaacagcagccugugccccgugagcggcugggccaucuacagcaaggacaacagcaucagaaucggcagcaagggcgacguguucgugaucagagagcccuucaucagcugcagcccccuggagugcagaaccuucuuccugacccagggcgcccugcugaacgacaagcacagcaacggcaccaucaaggacagaagccccuacagaacccugaugagcugccccaucggcgaggugcccagccccuacaacagcagauucgagagcguggccuggagcgccagcgccugccacgacggcaucaacuggcugaccaucggcaucagcggccccgacaacggcgccguggccgugcugaaguacaacggcaucaucaccgacaccaucaagagcuggagaaacaacauccugagaacccaggagagcgagugcgccugcgugaacggcagcugcuucaccgugaugaccgacggccccagcgacggccaggccagcuacaagaucuucagaaucgagaagggcaagaucgugaagagcguggagaugaacgcccccaacuaccacuacgaggagugcagcugcuaccccgacagcagcgagaucaccugcgugugcagagacaacuggcacggcagcaacagacccugggugagcuucaaccagaaccuggaguaccagaucggcuacaucugcagcggcaucuucggcgacaaccccagacccaacgacaagaccggcagcugcggccccgugagcagcaacggcgccuacggcgugaagggcuucagcuucaaguacggcaacggcguguggaucggcagaaccaagagcaucagcagcagaaacggcuucgagaugaucugggaccccaacggcuggaccggcaccgacaacaacuucagcaucaagcaggacaucgugggcaucaacgaguggagcggcuacagcggcagcuucgugcagcaccccgagcugaccggccuggacugcaucagacccugcuucuggguggagcugaucagaggcagacccaaggagaacaccaucuggaccagcggcagcagcaucagcuucugcggcgugaacagcgacaccgugggcuggagcuggcccgacggcgccgagcugcccuucaccaucgacaaguga

SEQ ID NO: 180878 - RNA, 1413 nt, Artificial Sequence
  derived and/or modified CDS sequence (opt4) from neuraminidase__InfluenzaA__AEI92023
augaaccccaaccagaagaucaucaccaucggcagcaucagcaucgccaucggcaucaucagccugaugcugcagaucggcaacaucaucagcaucugggccagccacagcauccagaccggcagccagaacaacaccggcaucugcaaccagaagaucaucaccuacgagaacagcaccugggugaaccacaccuacgugaacaucaacaacaccaacgugguggccggcgaggacaagaccagcgugacccuggccggcaacagcagccugugcagcaucagcggcugggccaucuacaccaaggacaacagcaucagaaucggcagcaagggcgacguguucgugaucagagagcccuucaucagcugcagccaccuggagugcagaaccuucuuccugacccagggcgcccugcugaacgacaagcacagcaacggcaccgugaaggacagaagccccuacagagcccugaugagcugcccccugggcgaggcccccagccccuacaacagcaaguucgagagcguggccuggagcgccagcgccugccacgacggcaugggcuggcugaccaucggcaucagcggccccgacaacggcgccguggccgugcugaaguacaacggcaucaucaccggcaccaucaagagcuggaagaagcagauccugagaacccaggagagcgagugcgugugcaugaacggcagcugcuucaccaucaugaccgacggccccagcaacaaggccgccagcuacaagaucuucaagaucgagaagggcaaggugaccaagagcaucgagcugaacgcccccaacuucuacuacgaggagugcagcugcuaccccgacaccggcaucgugaugugcgugugcagagacaacuggcacggcagcaacagacccugggugagcuucaaccagaaccuggacuaccagaucggcuacaucugcagcggcguguucggcgacaaccccagacccgaggacggcgagggcagcugcaaccccgugaccguggacggcaccaacggcgugaagggcuucagcuacaaguacggcaacggcguguggaucggcagaaccaagagcaacagacugagaaagggcuucgagaugaucugggaccccaacggcuggaccaacaccgacagcgacuucagcgugaagcaggacgugguggccaucaccgacuggagcggcuacagcggcagcuucgugcagcaccccgagcugaccggccuggacugcaucagacccugcuucuggguggagcuggugagaggccugcccagagagaacaccaccaucuggaccagcggcagcagcaucagcuucugcggcgugaacagcgacaccgccaacuggagcuggcccgacggcgccgagcugcccuucaccaucgacaaguga

SEQ ID NO: 180879 - RNA, 1410 nt, Artificial Sequence
  derived and/or modified CDS sequence (opt4) from neuraminidase__InfluenzaA__AEJ10403
augaaccccaaccagaagaucaucaccaucggcagcgugugcaucaccaucggcauggccaaccugauccugcagaucggcaacaucaucagcaucuggaucagccacagcauccagcugggcaaccagaaccagaucgagaccugcaaccagagcgugaucaccuacgagaacaacaccugggugaaccagaccuacgugaacaucagcaacaccaacuucgccgccggccagagcguggugagcgugaagcuggccggcaacagcagccugugccccgugagcggcugggccaucuacagcaaggacaacagcaucagaaucggcagcaagggcgacguguucgugaucagagagcccuucaucagcugcagcccccuggagugcagaaccuucuuccugacccagggcgcccugcugaacgacaagcacagcaacggcaccaucaaggacagaagccccuacagaacccugaugagcugccccaucggcgaggugcccagccccuacaacagcagauucgagagcguggccuggagcgccagcgccugccacgacggcaucagcuggcugaccaucggcaucagcggccccgacaacggcgccguggccgugcugaaguacaacggcaucaucaccgacaccaucaagagcuggagaaacaacauccugagaacccaggagagcgagugcgccugcgugaacggcagcugcuucaccgugaugaccgacggccccagcgacggccaggccagcuacaagaucuucagaaucgagaagggcaagaucgugaagagcguggagaugaacgcccccaacuaccacuacgaggagugcagcugcuaccccgacagcagcgagaucaccugcgugugcagagacaacuggcacggcagcaacagacccugggugagcuucaaccagaaccuggaguaccagaucggcuacaucugcagcggcaucuucggcgacaaccccagacccaacgacaagaccggcagcugcggccccgugagcgccaacggcgccaacggcgugaagggcuucagcuucaaguacggcaacggcguguggaucggcagaaccaagagcaucagcagcagaaacggcuucgagaugaucugggaccccaacggcuggaccggcaccgacaacaacuucagcaucaagcaggacaucgugggcaucaacgaguggagcggcuacagcggcagcuucgugcagcaccccgagcugaccggccuggacugcaucagacccugcuucuggguggagcugaucagaggcagacccaaggagaacaccaucuggaccagcggcagcagcaucagcuucugcggcgugaacagcgacaccgugggcuggagcuggcccgacggcgccgagcugcccuucaccaucgacaaguga

SEQ ID NO: 180880 - RNA, 1410 nt, Artificial Sequence; identical to SEQ ID NO: 180846
  derived and/or modified CDS sequence (opt4) from neuraminidase__InfluenzaA__AEJ10413

SEQ ID NO: 180881 - RNA, 1410 nt, Artificial Sequence; identical to SEQ ID NO: 180868
  derived and/or modified CDS sequence (opt4) from neuraminidase__InfluenzaA__AEJ10423

SEQ ID NO: 180882 - RNA, 1410 nt, Artificial Sequence
  derived and/or modified CDS sequence (opt4) from neuraminidase__InfluenzaA__AEJ10433
augaaccccaaccagaagaucaucaccaucggcagcgugugcaugaccaucggcauggccaaccugauccugcagaucggcaacaucaucagcaucuggaucagccacagcauccagcugggcaaccagaaccagaucgagaccugcaaccagagcgugaucaccuacgagaacaacaccugggugaaccagaccuacgugaacaucagcaacaccaacuucgccgccggccagagcguggugagcgugaagcuggccggcaacagcagccugugccccgugagcggcugggccaucuacagcaaggacaacagcaucagaaucggcagcaagggcgacguguucgugaucagagagcccuucaucagcugcagcccccuggagugcagaaccuucuuccugacccagggcgcccugcugaacgacaagcacagcaacggcaccaucaaggacagaagccccuacagaacccugaugagcugccccaucggcgaggugcccagccccuacaacagcagauucgagagcguggccuggagcgccagcgccugccacgacggcaucaacuggcugaccaucggcaucagcggccccgacaacggcgccguggccgugcugaaguacaacggcaucaucaccgacaccaucaagagcuggagaaacaacauccugagaacccaggagagcgagugcgccugcgugaacggcagcugcuucaccgugaugaccgacggccccagcgacggccaggccagcuacaagaucuucagaaucgagaagggcaagaucgugaagagcguggagaugaacgcccccaacuaccacuacgaggagugcagcugcuaccccgacagcagcgagaucaccugcgugugcagagacaacuggcacggcagcaacagacccugggugagcuucaaccagaaccuggaguacagaaucggcuacaucugcagcggcaucuucggcgacaaccccagacccaacgacaagaccggcagcugcggccccgugagcagcaacggcgccaacggcgugaagggcuucagcuucaaguacggcaacggcguguggaucggcagaaccaagagcaucagcagcagaaacggcuucgagaugaucugggaccccaacggcuggaccggcaccgacaacaacuucagcaucaagcaggacaucaucggcaucaacgaguggagcggcuacagcggcagcuucgugcagcaccccgagcugaccggccuggacugcaucagacccugcuucuggguggagcugaucagaggcagacccaaggagaacaccaucuggaccagcggcagcagcaucagcuucugcggcgugaacagcggcaccgugggcuggagcuggcccgacggcgccgagcugcccuucaccaucgacaaguga

SEQ ID NO: 180883 - RNA, 1410 nt, Artificial Sequence; identical to SEQ ID NO: 180317
  derived and/or modified CDS sequence (opt4) from neuraminidase__InfluenzaA__AEJ10443

SEQ ID NO: 180884 - RNA, 1410 nt, Artificial Sequence; identical to SEQ ID NO: 180317
  derived and/or modified CDS sequence (opt4) from neuraminidase__InfluenzaA__AEJ10453

SEQ ID NO: 180885 - RNA, 1410 nt, Artificial Sequence; identical to SEQ ID NO: 180769
  derived and/or modified CDS sequence (opt4) from neuraminidase__InfluenzaA__AEJ10463

SEQ ID NO: 180886 - RNA, 1410 nt, Artificial Sequence
  derived and/or modified CDS sequence (opt4) from neuraminidase__InfluenzaA__AEJ10473
augaaccccaaccagaagaucaucaccaucggcagcgugugcaugaccaucggcauggccaaccugauccugcagaucggcaacaucaucagcaucuggaucagccacagcauccagcugggcaaccagaaccagaucgagaccugcaaccagagcgugaucaccuacgagaacaagaccugggugaaccagaccuacgugaacaucagcaacaccaacuucgccgccggccagagcguggugagcgugaagcuggccggcaacagcagccugugccccgugagcggcugggccaucuacagcaaggacaacagcaucagaaucggcagcaagggcgacguguucgugaucagagagcccuucaucagcugcagcccccuggagugcagaaccuucuuccugacccagggcgcccugcugaacgacaagcacagcaacggcaccaucaaggacagaagccccuacagaacccugaugagcugccccaucggcgaggugcccagccccuacaacagcagauucgagagcguggccuggagcgccagcgccugccacgacggcaucaacuggcugaccaucggcaucagcggccccgacaacggcgccguggccgugcugaaguacaacggcaucaucaccgacaccaucaagagcuggagaaacaacauccugagaacccaggagagcgagugcgccugcgugaacggcagcugcuucaccgugaugaccgacggccccagcgacggccaggccagcuacaagaucuucagaaucgagaagggcaagaucgugaagagcguggagaugaacgcccccaacuaccacuacgaggagugcagcugcuaccccgacagcagcgagaucaccugcgugugcagagacaacuggcacggcagcaacagacccugggugagcuucaaccagaaccuggaguaccagaucggcuacaucugcagcggcaucuucggcgacaaccccagacccaacgacaagaccggcagcugcggccccgugagcagcaacggcgccaacggcgugaagggcuucagcuucaaguacggcaacggcguguggaucggcagaaccaagagcaucagcagcagaaacggcuucgagaugaucugggaccccaacggcuggaccggcaccgacaacaaguucagcaucaagcaggacaucgugggcaucaacgaguggagcggcuacagcggcagcuucgugcagcaccccgagcugaccggccugaacugcaucagacccugcuucuggguggagcugaucagaggcagacccaaggagaacaccaucuggaccagcggcagcagcaucagcuucugcggcgugaacagcgacaccgugggcuggagcuggcccgacggcgccgagcugcccuucaccaucgacaaguga

SEQ ID NO: 180887 - RNA, 1410 nt, Artificial Sequence; identical to SEQ ID NO: 180317
  derived and/or modified CDS sequence (opt4) from neuraminidase__InfluenzaA__AEJ10503

SEQ ID NO: 180888 - RNA, 1410 nt, Artificial Sequence; identical to SEQ ID NO: 176798
  derived and/or modified CDS sequence (opt4) from neuraminidase__InfluenzaA__AEJ10523

SEQ ID NO: 180889 - RNA, 1410 nt, Artificial Sequence; identical to SEQ ID NO: 176798
  derived and/or modified CDS sequence (opt4) from neuraminidase__InfluenzaA__AEJ10533

SEQ ID NO: 180890 - RNA, 1410 nt, Artificial Sequence; identical to SEQ ID NO: 176798
  derived and/or modified CDS sequence (opt4) from neuraminidase__InfluenzaA__AEJ10543

SEQ ID NO: 180891 - RNA, 1410 nt, Artificial Sequence; identical to SEQ ID NO: 176798
  derived and/or modified CDS sequence (opt4) from neuraminidase__InfluenzaA__AEJ10553

SEQ ID NO: 180892 - RNA, 1410 nt, Artificial Sequence; identical to SEQ ID NO: 179073
  derived and/or modified CDS sequence (opt4) from neuraminidase__InfluenzaA__AEJ10563

SEQ ID NO: 180893 - RNA, 1410 nt, Artificial Sequence; identical to SEQ ID NO: 179073
  derived and/or modified CDS sequence (opt4) from neuraminidase__InfluenzaA__AEJ10573

SEQ ID NO: 180894 - RNA, 1410 nt, Artificial Sequence; identical to SEQ ID NO: 179073
  derived and/or modified CDS sequence (opt4) from neuraminidase__InfluenzaA__AEJ10583

SEQ ID NO: 180895 - RNA, 1410 nt, Artificial Sequence
  derived and/or modified CDS sequence (opt4) from neuraminidase__InfluenzaA__AEJ36305
augaaccccaaccagaagaucaucaccaucggcagcgugugcaugaccaucggcauggccaaccugauccugcagaucggcaacaucaucagcaucuggaucagccacagcauccagcugggcaaccagaaccagaucgagaccugcaaccagagcgugaucaccuacgagaacaacaccugggugaaccagaccuacgugaacaucagcaacaccaacuucgccgccggccagagcguggugagcgugaagcuggccggcaacagcagccugugccccgugagcggcugggccaucuacagcaaggacaacagcaucagaaucggcagcaagggcgacguguucgugaucagagagcccuucaucagcugcagcccccuggagugcagaaccuucuuccugacccagggcgcccugcugaacgacaagcacagcaacggcaccaucaaggacagaagccccuacagaacccugaugagcugccccaucggcgaggugcccagccccuacaacagcagauucgagagcguggccuggagcgccagcgccugccacgacggcaucaacuggcugaccaucggcaucagcggccccgacaacggcgccguggccgugcugaaguacaacggcaucaucaccgacaccaucaagagcuggagaaacaacauccugagaacccaggagagcgagugcgccugcgugaacggcagcugcuucaccgugaugaccgacggccccagcgacggccaggccagcuacaagaucuucagaaucgagaagggcaagaucgugaagagcguggagaugaacgcccccaacuaccacuacgaggagugcagcugcuaccccgacagcagcgagaucaccugcgugugcagagacaacuggcacggcagcaacagacccugggugagcuucaaccagaaccuggaguaccagaucggcuacaucugcagcggcaucuucggcgacaaccccagacccaacgacaagaccggcagcugcggccccgugagcagcaacggcgccaacggcgugaagggcuucagcuucaaguacggcaacggcguguggaucggcagaaccaagagcaccagcagcagaaacggcuucgagaugaucugggaccccaacggcuggaccggcaccgacaacagcuucagcaucaagcaggacaucgugggcaucaacgaguggagcggcuacagcggcagcuucgugcagcaccccgagcugaccggccuggacugcaucagacccugcuucuggguggagcugaucagaggcagacccaaggagaacaccaucuggaccagcggcagcagcaucagcuucugcggcgugaacagcgacaccgugggcuggagcuggcccgacggcgccgagcugcccuucaccaucgacaaguga

SEQ ID NO: 180896 - RNA, 1410 nt, Artificial Sequence; identical to SEQ ID NO: 176798
  derived and/or modified CDS sequence (opt4) from neuraminidase__InfluenzaA__AEJ37856

SEQ ID NO: 180897 - RNA, 1410 nt, Artificial Sequence; identical to SEQ ID NO: 176798
  derived and/or modified CDS sequence (opt4) from neuraminidase__InfluenzaA__AEJ37866

SEQ ID NO: 180898 - RNA, 1410 nt, Artificial Sequence; identical to SEQ ID NO: 176798
  derived and/or modified CDS sequence (opt4) from neuraminidase__InfluenzaA__AEJ37876

SEQ ID NO: 180899 - RNA, 1410 nt, Artificial Sequence; identical to SEQ ID NO: 180846
  derived and/or modified CDS sequence (opt4) from neuraminidase__InfluenzaA__AEJ37886

SEQ ID NO: 180900 - RNA, 1410 nt, Artificial Sequence
  derived and/or modified CDS sequence (opt4) from neuraminidase__InfluenzaA__AEJ37896
augaaccccaaccagaagaucaucaccaucggcagcgugugcaucaccaucggcauggccaaccugauccugcagaucggcaacaucaucagcaucuggaucagccacagcauccagcugggcaaccagaaccagaucgagaccugcaaccagagcgugaucaccuacgagaacaacaccugggugaaccagaccuacgugaacaucagcaacaccaacuucgccgccggccagagcguggugagcgugaagcuggccggcaacagcagccugugccccgugagcggcugggccaucuacagcaaggacaacagcaucagaaucggcagcaagggcgacguguucgugaucagagagcccuucaucagcugcagcccccuggagugcagaaccuucuuccugacccagggcgcccugcugaacgacaagcacagcaacggcaccaucaaggacagaagccccuacagaacccugaugagcugccccaucggcgaggugcccagccccuacaacagcagauucgagagcguggccuggagcgccagcgccugccacgacggcaucagcuggcugaccaucggcaucagcggccccgacaacggcgccguggccgugcugaaguacaacggcaucaucaccgacaccaucaagagcuggagaaacaacauccugagaacccaggagagcgagugcgccugcgugaacggcagcugcuucaccgugaugaccgacggccccagcgacggccaggccagcuacaagaucuucagaaucgagaagggcagaaucgugaagagcguggagaugaacgcccccaacuaccacuacgaggagugcagcugcuaccccgacagcagcgagaucaccugcgugugcagagacaacuggcacggcagcaacagacccugggugagcuucaaccagaaccuggaguaccagaucggcuacaucugcagcggcaucuucggcgacaaccccagacccaacgacaagaccggcagcugcggccccgugagcagcaacggcgccaacggcgugaagggcuucagcuucaaguacggcaacggcguguggaucggcagaaccaagagcaucagcagcagaaacggcuucgagaugaucugggaccccaacggcuggaccggcaccgacaacaacuucagcaucaagcaggacaucgugggcaucaacgaguggagcggcuacagcggcagcuucgugcagcaccccgagcugaccggccuggacugcaucagacccugcuucuggguggagcugaucagaggcagacccaaggagaacaccaucuggaccagcggcagcagcaucagcuucugcggcgugaacagcgacaccgugggcuggagcuggcccgacggcgccgagcugcccuucaccaucgacaaguga

SEQ ID NO: 180901 - RNA, 1410 nt, Artificial Sequence; identical to SEQ ID NO: 180846
  derived and/or modified CDS sequence (opt4) from neuraminidase__InfluenzaA__AEJ37906

SEQ ID NO: 180902 - RNA, 1410 nt, Artificial Sequence; identical to SEQ ID NO: 180846
  derived and/or modified CDS sequence (opt4) from neuraminidase__InfluenzaA__AEJ37916

SEQ ID NO: 180903 - RNA, 1410 nt, Artificial Sequence; identical to SEQ ID NO: 180846
  derived and/or modified CDS sequence (opt4) from neuraminidase__InfluenzaA__AEJ37926

SEQ ID NO: 180904 - RNA, 1410 nt, Artificial Sequence; identical to SEQ ID NO: 178700
  derived and/or modified CDS sequence (opt4) from neuraminidase__InfluenzaA__AEJ37936

SEQ ID NO: 180905 - RNA, 1410 nt, Artificial Sequence; identical to SEQ ID NO: 176798
  derived and/or modified CDS sequence (opt4) from neuraminidase__InfluenzaA__AEJ37946

SEQ ID NO: 180906 - RNA, 1410 nt, Artificial Sequence; identical to SEQ ID NO: 180846
  derived and/or modified CDS sequence (opt4) from neuraminidase__InfluenzaA__AEJ37956

SEQ ID NO: 180907 - RNA, 1410 nt, Artificial Sequence; identical to SEQ ID NO: 180846
  derived and/or modified CDS sequence (opt4) from neuraminidase__InfluenzaA__AEJ37966

SEQ ID NO: 180908 - RNA, 1410 nt, Artificial Sequence; identical to SEQ ID NO: 176798
  derived and/or modified CDS sequence (opt4) from neuraminidase__InfluenzaA__AEJ37976

SEQ ID NO: 180909 - RNA, 1410 nt, Artificial Sequence; identical to SEQ ID NO: 180846
  derived and/or modified CDS sequence (opt4) from neuraminidase__InfluenzaA__AEJ37986

SEQ ID NO: 180910 - RNA, 1410 nt, Artificial Sequence; identical to SEQ ID NO: 179470
  derived and/or modified CDS sequence (opt4) from neuraminidase__InfluenzaA__AEK21372

SEQ ID NO: 180911 - RNA, 1413 nt, Artificial Sequence; identical to SEQ ID NO: 180264
  derived and/or modified CDS sequence (opt4) from neuraminidase__InfluenzaA__AEK21383

SEQ ID NO: 180912 - RNA, 1410 nt, Artificial Sequence; identical to SEQ ID NO: 178700
  derived and/or modified CDS sequence (opt4) from neuraminidase__InfluenzaA__AEK21399

SEQ ID NO: 180913 - RNA, 1410 nt, Artificial Sequence; identical to SEQ ID NO: 176798
  derived and/or modified CDS sequence (opt4) from neuraminidase__InfluenzaA__AEK21409

SEQ ID NO: 180914 - RNA, 1410 nt, Artificial Sequence; identical to SEQ ID NO: 180769
  derived and/or modified CDS sequence (opt4) from neuraminidase__InfluenzaA__AEK21419

SEQ ID NO: 180915 - RNA, 1410 nt, Artificial Sequence; identical to SEQ ID NO: 180846
  derived and/or modified CDS sequence (opt4) from neuraminidase__InfluenzaA__AEK21429

SEQ ID NO: 180916 - RNA, 1410 nt, Artificial Sequence
  derived and/or modified CDS sequence (opt4) from neuraminidase__InfluenzaA__AEK21439
augaaccccaaccagaagaucaucaccaucggcagcgugugcaugaccaucggcauggccaaccugauccugcagaucggcaacaucaucagcaucuggaucagccacagcauccagcugggcaaccagaaccagaucgagaccugcaaccagagcgugaucaccuacgagaacaacaccugggugaaccagaccuacgugaacaucagcaacaccaacuucgccgccggccagagcguggugagcgugaagcuggccggcaacagcagccugugccccgugagcggcugggccaucuacagcaaggacaacagcaucagaaucggcagcaagggcgacguguucgugaucagagagcccuucaucagcugcagcccccuggagugcagaaccuucuuccugacccagggcgcccugcugaacgacaagcacagcaacggcaccaucaaggacagaagccccuacagaacccugaugagcugccccaucggcgaggugcccagccccuacaacagcagauucgagagcguggccuggagcgccagcgccugccacgacggcaucaacuggcugaccaucggcaucagcggccccgacaacggcgccguggccgugcugaaguacaacggcaucaucaccgacaccaucaagagcuggagaaacaacauccugagaacccaggagagcgagugcgccugcgugaacggcagcugcuucaccgugaugaccgacggccccagcgacggccaggccagcuacaagaucuucagaaucgagaagggcaagaucgugaagagcguggagaugaacgcccccaacuaccacuacgaggagugcagcugcuaccccgacagcagcgagaucaccugcgugugcagagacaacuggcacggcagcaacagacccugggugagcuucaaccagaaccuggaguaccagaucggcuacaucugcagcggcaucuucggcgacaaccccagacccaacgacaagaccggcagcugcggccccgugagcagcaacggcgccaacggcgugaagggcuucagcuucaaguacggcaacggcguguggaucggcagaaccaagagcaucagcagcagaaacggcuucgagaugaucugggaccccaacggcuggaccggcaccgacaacaacuucagcaagaagcaggacaucgugggcaucaacgaguggagcggcuacagcggcagcuucgugcagcaccccgagcugaccggccuggacugcaucagacccugcuucuggguggagcugaucagaggcagacccaaggagaacaccaucuggaccagcggcagcagcaucagcuucugcggcgugaacagcgacaccgugggcuggagcuggcccgacggcgccgagcugcccuucaccaucgacaaguga

SEQ ID NO: 180917 - RNA, 1410 nt, Artificial Sequence; identical to SEQ ID NO: 180846
  derived and/or modified CDS sequence (opt4) from neuraminidase__InfluenzaA__AEK21449

SEQ ID NO: 180918 - RNA, 1410 nt, Artificial Sequence; identical to SEQ ID NO: 178700
  derived and/or modified CDS sequence (opt4) from neuraminidase__InfluenzaA__AEK21459

SEQ ID NO: 180919 - RNA, 1410 nt, Artificial Sequence; identical to SEQ ID NO: 180846
  derived and/or modified CDS sequence (opt4) from neuraminidase__InfluenzaA__AEK21469

SEQ ID NO: 180920 - RNA, 1410 nt, Artificial Sequence; identical to SEQ ID NO: 180846
  derived and/or modified CDS sequence (opt4) from neuraminidase__InfluenzaA__AEK21479

SEQ ID NO: 180921 - RNA, 1410 nt, Artificial Sequence; identical to SEQ ID NO: 176798
  derived and/or modified CDS sequence (opt4) from neuraminidase__InfluenzaA__AEK21489

SEQ ID NO: 180922 - RNA, 1410 nt, Artificial Sequence; identical to SEQ ID NO: 180514
  derived and/or modified CDS sequence (opt4) from neuraminidase__InfluenzaA__AEK28776

SEQ ID NO: 180923 - RNA, 1410 nt, Artificial Sequence
  derived and/or modified CDS sequence (opt4) from neuraminidase__InfluenzaA__AEK28787
augaaccccaaccagaagaucaucaccaucggcagcgugagccugaccaucagcaccaucugcuucuucaugcagaucgccauccugaucaccaccgugacccugcacuucaagcaguacgaguucuacagcccccccaacaaccaggugaugcugugcgagcccaccaucaucgagagaaacaucaccgagaucguguaccugaccaacaccaccaucgagaaggagaucugccccaagcuggccgaguacagaaacuggagcaagccccagugcgacaucaccggcuucgcccccuucagcaaggacaacagcaucagacugagcgccggcggcgacaucugggugaccagagagcccuacgugagcugcgaccccgacaagugcuaccaguucgcccugggccagggcaccacccugaacaacgugcacagcaacaacaccgugagagacagaacccccuacagaacccugcugaugaacgagcugggcgugcccuuccaccugggcaccaagcaggugugcaucgccuggagcagcagcagcugccacgacggcaaggccuggcugcacgugugcaucaccggcgacgacaagaacgccaccgccagcuucaucuacaacggcagacugguggacagcguggugagcuggagcaaggagauccugagaacccaggagagcgagugcgugugcaucaacggcaccugcaccguggugaugaccgacggcagcgccagcggcaaggccgacaccaagauccuguucaucgaggagggcaagaucgugcacaccagcacccugagcggcagcgcccagcacguggaggagugcagcugcuaccccagauaccccggcgugagaugcgugugcagagacaacuggaagggcagcaacagacccaucguggacaucaacaucaaggaccacagcaucgugagcagcuacgugugcagcggccuggugggcgacacccccagaaagaacgacagcagcagcagcagccacugccuggaccccaacaacgaggagggcggccacggcgugaagggcugggccuucgacgacggcaacgacguguggaugggcagaaccaucaacgagaccagcagacugggcuacgagaccuucaaggugaucgagggcuggagcaaccccaagagcaagcugcagaucaacagacaggugaucguggacagaggcaacagaagcggcuacagcggcaucuucagcguggagggcagaagcugcaucaacagaugcuucuacguggagcugaucagaggcagaaaggaggagaccgaggugcuguggaccagcaacagcaucgugguguucugcggcaccagcggcaccuacggcaccggcagcuggcccgacggcgccgaccugaaccugaugcccaucuga

SEQ ID NO: 180924 - RNA, 1410 nt, Artificial Sequence
  derived and/or modified CDS sequence (opt4) from neuraminidase__InfluenzaA__AEK28798
augaaccccaaccagaagaucaucaccaucggcagcgugagccugaccaucagcaccaucugcuucuucaugcagaucgccauccugaucaccaccgugacccugcacuucaagcaguacgaguucaacagcccccccaacaaccaggugaugcugugcgagcccaccaucaucgagagaaacaucaccgagaucguguaccugaccaacaccaccaucgagaaggagaucugccccaagcuggccgaguacagaaacuggagcaagccccagugcgacaucaccggcuucgcccccuucagcaaggacaacagcaucagacugagcgccggcggcgacaucugggugaccagagagcccuacgugagcugcgaccccgacaagugcuaccaguucgcccugggccagggcaccacccugaacaacgugcacagcaacaacaccgugagagacagaacccccuacagaacccugcugaugaacgagcugggcgugcccuuccaccugggcaccaagcaggugugcaucgccuggagcagcagcagcugccacgacggcaaggccuggcugcacgugugcaucaccggcgacgacaagaacgccaccgccagcuucaucuacaacggcagacugguggacagcguggugagcuggagcaaggagauccugagaacccaggagagcgagugcgugugcaucaacggcaccugcaccguggugaugaccgacggcaacgccagcggcaaggccgacaccaagauccuguucaucgaggagggcaagaucgugcacaccagcacccugagcggcagcgcccagcacguggaggagugcagcugcuaccccagauaccccggcgugagaugcgugugcagagacaacuggaagggcagcaacagacccaucguggacaucaacaucaaggaccacagcaucgugagcagcuacgugugcagcggccuggugggcgacacccccagaaagaacgacagcagcagcagcagccacugcagcgaccccaacaacgaggagggcggccacggcgugaagggcugggccuucgacgacggcaacgacguguggaugggcagaaccaucagcgagaagagcagacugggcuacgagaccuucaaggugaucgagggcuggagcaaccccaagagcaagcugcagaucaacagacaggugaucguggacagaggcaacagaagcggcuacagcggcaucuucagcguggagggcaagagcugcaucaacagaugcuucuacguggagcugaucagaggcagaaaggaggagaccgaggugcuguggaccagcaacagcaucgugguguucugcggcaccagcggcaccuacggcaccggcagcuggcccgacggcgccgacaucaaccugaugcccaucuga

SEQ ID NO: 180925 - RNA, 1410 nt, Artificial Sequence
  derived and/or modified CDS sequence (opt4) from neuraminidase__InfluenzaA__AEK28809
augaaccccaaccagaagaucaucaccaucggcagcgugagccugaccaucagcaccaucugcuucuucaugcagaucgccauccugaucaccaccgugaccgugcacuucaagcaguacgaguucaacagcccccccaacaaccaggugaugcugugcgagcccaccaucaucgagagaaacaucaccgagaucguguaccugaccaacaccaccaucgagaaggagaucugccccaagcuggccgaguacagaaacuggagcaagccccagugcgacaucaccggcuucgcccccuucagcaaggacaacagcaucagacugagcgccggcggcgacaucugggugaccagagagcccuacgugagcugcgaccccgacaagugcuaccaguucgcccugggccagggcaccacccugaacaacgugcacagcaacaacaaggugagagacagaacccccuacagaacccugcugaugaacgagcugggcgugcccuuccaccugggcaccaagcaggugugcaucgccuggagcagcagcagcugccacgacggcaaggccuggcugcacgugugcaucaccggcgacgacaagaacgccaccgccagcuucaucuacaacggcagacugguggacagcguggugagcuggagcaaggagauccugagaacccaggagagcgagugcgugugcaucaacggcaccugcaccguggugaugaccgacggcagcgccagcggcaaggccgacaccaagauccuguucaucgaggagggcaagaucgugcacaccagcacccugagcggcagcgcccagcacguggaggagugcagcugcuaccccagauaccccggcgugagaugcgugugcagagacaacuggaagggcagcaacagacccaucguggacaucaacaucaaggaccacagcaucgugagcagcuacgugugcagcggccuggugggcgacacccccagaaagaacgacagcagcagcagcagccacugccuggaccccaacaacgaggagggcggccacggcgugaagggcugggccuucgacgacggcaacgacguguggaugggcagaaccaucagcgagaagagcagacugggcuacgagaccuucaaggugaucgagggcuggagcaaccccaagagcaagcugcagaucaacagacaggugaucguggacagaggcaacagaagcggcuacagcggcaucuucagcguggagggcaagagcugcaucaacagaugcuucuacguggagcugaucagaggcagaaaggaggagaccgaggugcuguggaccagcaacagcaucgugguguucugcggcaccagcggcaccuacggcaccggcagcuggcccgacggcgccgacaucaaccugaugcccaucuga

SEQ ID NO: 180926 - RNA, 1410 nt, Artificial Sequence
  derived and/or modified CDS sequence (opt4) from neuraminidase__InfluenzaA__AEK28819
augaaccccaaccagaagaucaucaccaucggcagcgugagccugaccaucagcaccaucugcuucuucaugcagaucgccauccugaucaccaccgugacccugcacuucaagcaguacgaguucaacuacccccccaacaaccaggugaugcugugcgagcccaccaucaucgagagaaacaucaccgagaucguguaccugaccaacaccaccaucgagaaggagaucugccccaagcuggccgaguacagaaacuggagcaagccccagugcgacaucaccggcuucgcccccuucagcaaggacaacagcaucagacugagcgccggcggcgacaucugggugaccagagagcccuacgugagcugcgaccccgacaagugcuaccaguucgcccugggccagggcaccacccugaacaacgugcacagcaacaacaccgugagagagagaacccccuacagaacccugcugaugaacgagcugggcgugcccuuccaccugggcaccaagcaggugugcaucgccuggagcagcagcagcugccacgacggcaaggccuggcugcacgugugcaucaccggcgacgacaagaacgccaccgccagcuucaucuacaacggcagacugguggacagcguggugagcuggagcaaggagauccugagaacccaggagagcgagugcgugugcaucaacggcaccugcaccguggugaugaccgacggcagcgccagcggcaaggccgacaccaagauccuguucaucgaggagggcaagaucgugcacaccagcacccugagcggcagcgcccagcacguggaggagugcagcugcuaccccagauaccccggcgugagaugcgugugcagagacaacuggaagggcagcaacagacccaucguggacaucaacaucaaggaccacagcaucgugagcagcuacgugugcagcggccuggugggcgacacccccagaaagaacgacagcagcagcagcagccacugccuggaccccaacaacgaggagggcggccacggcgugaagggcugggccuucgacgacggcaacgacguguggaugggcagaaccaucagcgagaagagcagacugggcuacgagaccuucaaggugaucgagggcuggagcaaccccaagagcaagcugcagaucaacagacaggugaucguggacagaggcaacagaagcggcuacagcggcaucuucagcguggagggcaagagcugcaucaacagaugcuucuacguggagcugaucagaggcagaaaggaggagaccgaggugcuguggaccagcaacagcaucgugguguucugcggcaccagcggcaccuacggcaccggcagcuggcccgacggcgccgacaucaaccugaugcccaucuga

SEQ ID NO: 180927 - RNA, 1410 nt, Artificial Sequence
  derived and/or modified CDS sequence (opt4) from neuraminidase__InfluenzaA__AEK28830
augaaccccaaccagaagaucaucaccaucggcagcgugagccugaccaucagcaccaucugcuucuucaugcagaucgccauccugaucaccaccgugacccugcacuucaagcaguacgaguucaacagcccccccaacaaccaggugaugcugugcgagcccaccaucaucgagagaaacaucaccgagaucguguaccugaccaacaccaccaucgagaaggagaucugccccaaccuggccgaguacagaaacuggagcaagccccagugcgacaucaccggcuucgcccccuucagcaaggacaacagcaucagacugagcgccggcggcgacaucugggugaccagagagcccuacgugagcugcgaccccgacaagugcuaccaguucgcccugggccagggcaccacccugaacaacgugcacagcaacaacaccgugagaggcagaacccccuacagaacccugcugaugaacgagcugggcgugcccuuccaccugggcaccaagcaggugugcaucgccuggagcagcagcagcugccacgacggcaaggccuggcugcacgugugcaucaccggcgacgacaagaacgccaccgccagcuucaucuacaacggcagacugguggacagcguggugagcuggagcaaggagauccugagaacccaggagagcgagugcgugugcaucaacggcaccugcaccguggugaugaccgacggcagcgccagcggcaaggccgacaccaagauccuguucaucgaggagggcaagaucgugcacaccagcacccugagcggcagcgcccagcacguggaggagugcagcugcuaccccagauaccccggcgugagaugcgugugcagagacaacuggaagggcagcaacagacccaucguggacaucaacaucaaggaccacagcaucgugagcagcuacgugugcagcggccuggugggcgacacccccagaaagaacgacagcagcagcagcagccacugccuggaccccaacaacgaggagggcggccacggcgugaagggcugggccuucgacgacggcaacgacguguggaugggcagaaccaucagcgagaagagcagacugggcuacgagaccuucaaggugaucgagggcuggagcaaccccaagagcaagcugcagaucaacagacaggugaucguggacagaggcaacagaagcggcuacagcggcaucuucagcguggagggcaagagcugcaucaacagaugcuucuacguggagcugaucagaggcagaaaggaggagaccgaggugcuguggaccagcaacagcaucgugguguucugcggcaccagcggcaccuacggcaccggcagcuggcccgacggcgccgacaucaaccugaugcccaucuga

SEQ ID NO: 180928 - RNA, 1410 nt, Artificial Sequence
  derived and/or modified CDS sequence (opt4) from neuraminidase__InfluenzaA__AEK28841
augaaccccaaccagaagaucaucaccaucggcagcgugagccugaccaucagcaccaucugcuucuucaugcagaucgccauccugaucaccaccgugacccugcacuucaagcaguacgaguucaacagcccccccaacaaccaggugaugcugugcgagcccaccaucaucgagagaaacaucaccgagaucguguaccugaccaacaccaccaucgagaaggagaucugccccaagcuggccgaguacagaaacuggagcaagccccagugcgacaucaccggcuucgcccccuucagcaaggacaacagcaucagacugagcgccggcggcgacaucugggugaccagagagcccuacgugagcugcgaccccgacaagugcuaccaguucgcccugggccagggcaccaccgugaacaacgugcacagcaacaacaccgugagaggcagaacccccuacagaacccugcugaugaacgagcugggcgugcccuuccaccugggcaccaagcaggugugcaucgccuggagcagcagcagcugccacgacggcaaggccuggcugcacgugugcaucaccggcgacgacaagaacgccaccgccagcuucaucuacaacggcagacugguggacagcguggugagcuggagcaaggagauccugagaacccaggagagcgagugcgugugcaucaacggcaccugcaccguggugaugaccgacggcagcgccagcggcaaggccgacaccaagauccuguucaucgaggagggcaagaucgugcacaccagcacccugagcggcagcgcccagcacguggaggagugcagcugcuaccccagauaccccggcgugagaugcgugugcagagacaacuggaagggcagcaacagacccaucguggacaucaacaucaaggaccacagcaucgugagcagcuacgugugcagcggccuggugggcgacacccccagaaagaacgacagcagcagcagcagccacugccuggaccccaacaacgaggagggcggccacggcgugaagggcugggccuucgacgacggcaacgacguguggaugggcagaaccaucagcgagaagagcagacugggcuacgagaccuucaaggugaucgagggcuggagcaaccacaagagcaagcugcagaucaacagacaggugaucguggacagaggcaacagaagcggcuacagcggcaucuucagcguggagggcaagagcugcaucaacagaugcuucuacguggagcugaucagaggcagaaaggaggagaccgaggugcuguggaccagcaacagcaucgugguguucugcggcaccagcggcaccuacggcaccggcagcuggcccgacggcgccgaccugaaccugaugcccaucuga

SEQ ID NO: 180929 - RNA, 1410 nt, Artificial Sequence
  derived and/or modified CDS sequence (opt4) from neuraminidase__InfluenzaA__AEK28852
augaaccccaaccagaagaucaucaccaucggcagcgugagccugaccaucagcaccaucugcuucuucaugcagaucgccauccugaucaccaccgugacccugcacuucaagcaguacgaguucaacagcccccccaacaaccaggugaugcugugcgagcccaccaucaucgagaagaacaucaccgagaucguguaccugaccaacaccaccaucgagaaggagaucugccccaagcuggccgaguacagaaacuggagcaagccccagugcgacaucaccggcuucgcccccuucagcaaggacaacagcaucagacugagcgccggcggcgacaucugggugaccagagagcccuacgugagcugcgaccccgacaagugcuaccaguucgcccugggccagggcaccacccugaacaacgugcacagcaacaacagagugagagacagaacccccuacagaacccugcugaugaacgagcugggcgugcccuuccaccugggcaccaagcaggugugcaucgccuggagcagcagcagcugccacgacggcaaggccuggcugcacgugugcaucaccggcgacgacaagaacgccaccgccagcuucaucuacaacggcagacugguggacagcguggugagcuggagcaaggagauccugagaacccaggagagcgagugcgugugcaucaacggcaccugcaccguggugaugaccgacggcagcgccagcggcaaggccgacaccaagauccuguucaucgaggagggcaagaucgugcacaccagcacccugagcggcagcgcccagcacguggaggagugcagcugcuaccccagauaccccggcgugagaugcgugugcagagacaacuggaagggcagcaacagacccaucguggacaucaacaucaaggaccacagcaucgugagcagcuacgugugcagcggccuggugggcgacacccccagaaagaacgacagcagcagcagcagccacugccuggaccccaacaacgaggagggcggccacggcgugaagggcugggccuucgacgacggcaacgacguguggaugggcagaaccaucagcgagaagagcagacugggcuacgagaccuucaaggugaucgagggcuggagcaaccccaagagcaagcugcagaucaacagacaggugaucguggacagaggcaacagaagcggcuacagcggcaucuucagcguggagggcaagagcugcaucaacagaugcuucuacguggagcugaucagaggcagaaaggaggagaccgaggugcuguggaccagcaacagcaucgugguguucugcggcaccagcggcaccuacggcaccggcagcuggcccgacggcgccgacaucaaccugaugcccaucuga

SEQ ID NO: 180930 - RNA, 1410 nt, Artificial Sequence; identical to SEQ ID NO: 178544
  derived and/or modified CDS sequence (opt4) from neuraminidase__InfluenzaA__AEK28863

SEQ ID NO: 180931 - RNA, 1410 nt, Artificial Sequence
  derived and/or modified CDS sequence (opt4) from neuraminidase__InfluenzaA__AEK28874
augaaccccaaccagaagaucaucaccaucggcagcgugagccugaccaucagcaccaucugcuucuucaugcagaucgccauccugaucaccaccgugacccugcacuucaagcaguacgaguucaacagcccccccaacaaccaggugaugcugugcgagcccaccaucaucgagagaaacaucaccgagaucguguaccugaccaacaccaccaucgagaaggagaucugccccaagcuggccgaguacagaaacuggagcaagccccagugcgacaucaccggcuucgcccccuucagcaaggacaacagcaucagacugagcgccggcggcgacaucugggugaccagagagcccuacgugagcugcgaccccgacaagugcuaccaguucgcccugggccagggcaccacccugaacaacgugcacagcaacaacaaggugagagacagaacccccuacagaacccugcugaugaacgagcugggcgugcccuuccaccugggcaccaagcaggugugcaucgccuggagcagcagcagcugccacgacggcaaggccuggcugcacgugugcaucaccggcgacgacaagaacgccaccgccagcuucaucuacaacggcagacugguggacagcguggugagcuggagcaaggagauccugagaacccaggagagcgagugcgugugcaucaacggcaccugcaccguggugaugaccgacggcagcgccagcggcaaggccgacaccaagauccuguucaucgaggagggcaagaucgugcacaccagcacccugagcggcagcgcccagcacguggaggagugcagcugcuaccccagauaccccggcgugagaugcgugugcagagacaacuggaagggcagcaacagacccaucguggacaucaacaucaaggaccacagcaucgugagcagcuacgugugcagcggccuggugggcgacacccccagaaagaacgacagcagcagcagcagccacugccuggaccccaacaacgaggagggcggccacggcgugaagggcugggccuucgacgacggcaacgacguguggaugggcagaaccaucagcgagaagagcagacugggcuacgagaccuucaaggugaucgagggcuggagcaaccacaagagcaagcugcagaucaacagacaggugaucguggacagaggcaacagaagcggcuacagcggcaucuucagcguggagggcaagagcugcaucaacagaugcuucuacguggagcugaucagaggcagaaaggaggagaccgaggugcuguggaccagcaacagcaucgugguguucugcggcaccagcggcaccuacggcaccggcagcuggcccgacggcgccgaccugaaccugaugcccaucuga

SEQ ID NO: 180932 - RNA, 1410 nt, Artificial Sequence
  derived and/or modified CDS sequence (opt4) from neuraminidase__InfluenzaA__AEK28885
augaaccccaaccagaagaucaucaccaucggcagcgugagccugaccaucagcaccaucugcuucuucaugcagaucgccauccugaucaccaccgugacccugcacuucaagcaguacgaguucaaccugccccccaacaaccaggugaugcugugcgagcccaccaucaucgagagaaacaucaccgagaucguguaccugaccaacaccaccaucgagaaggagaucugccccaagcuggccgaguacagaaacuggagcaagccccagugcgacaucaccggcuucgcccccuucagcaaggacaacagcaucagacugagcgccggcggcgacaucugggugaccagagagcccuacgugagcugcgaccccgacaagugcuaccaguucgcccugggccagggcaccacccugaacaacgugcacagcaacaacaccgugagagacagaacccccuacagaacccugcugaugaacgagcugggcgugcccuuccaccugggcaccaagcaggugugcaucgccuggagcagcagcagcugccacgacggcaaggccuggcugcacgugugcaucaccggcgacgacaagaacgccaccgccagcuucaucuacaacggcagacugguggacagcguggugagcuggagcaaggagauccugagaacccaggagagcgagugcgugugcaucaacggcaccugcaccguggugaugaccgacggcagcgccagcggcaaggccgacaccaagauccuguucaucgaggagggcaagaucgugcacaccagcacccugagcggcagcgcccagcacguggaggagugcagcugcuaccccagauaccccggcgugagaugcgugugcagagacaacuggaagggcagcaacagacccaucguggacaucaacaucaaggaccacagcaucgugagcagcuacgugugcagcggccuggugggcgacacccccagaaagaacgacagcagcagcagcagccacugccuggaccccaacaacgaggagggcggccacggcgugaagggcugggccuucgacgacggcaacgacguguggaugggcagaaccaucagcgagaagagcagacugggcuacgagaccuucaaggugaucgagggcuggagcaaccccaagagcaagcugcagaucaacagacaggugaucguggacagaggcaacagaagcggcuacagcggcaucuucagcguggagggcaagagcugcaucaacagaugcuucuacguggagcugaucagaggcagaaaggaggagaccgaggugcuguggaccagcaacagcaucgugguguucugcggcaccagcggcaccuacggcaccggcagcuggcccgacggcgccgacaucaaccugaugcccaucuga

SEQ ID NO: 180933 - RNA, 1410 nt, Artificial Sequence; identical to SEQ ID NO: 178669
  derived and/or modified CDS sequence (opt4) from neuraminidase__InfluenzaA__AEK28896

SEQ ID NO: 180934 - RNA, 1410 nt, Artificial Sequence
  derived and/or modified CDS sequence (opt4) from neuraminidase__InfluenzaA__AEK28907
augaaccccaaccagaagaucaucaccaucggcagcgugagccugaccaucagcaccaucugcuucuucaugcagaucgccauccugaucaccaccgugacccugcacuucaagcaguacgaguucaacagcccccccaacaaccaggugaugcugugcgagcccaccaucaucgagaagaacaucaccgagaucguguaccugaccaacaccaccaucgagaaggagaucugccccagacuggccgaguacagaaacuggagcaagccccagugcgacaucaccggcuucgcccccuucagcaaggacaacagcaucagacugagcgccggcggcgacaucugggugaccagagagcccuacgugagcugcgaccccgacaagugcuaccaguucgcccugggccagggcaccacccugaacaacgugcacagcaacaacaccgugagagacagaacccccuacagaacccugcugaugaacgagcugggcgugcccuuccaccugggcaccaagcaggugugcaucgccuggagcagcagcagcugccacgacggcaaggccuggcugcacgugugcaucaccggcgacgacaagaacgccaccgccagcuucaucuacaacggcagacugguggacagcguggugagcuggagcaaggagauccugagaacccaggagagcgagugcgugugcaucaacggcaccugcaccguggugaugaccgacggcagcgccagcggcaaggccgacaccaagauccuguucaucgaggagggcaagaucgugcacaccagcacccugagcggcagcgcccagcacguggaggagugcagcugcuaccccagauaccccggcgugagaugcgugugcagagacaacuggaagggcagcaacagacccaucguggacaucaacaucaaggaccacagcaucgugagcagcuacgugugcagcggccuggugggcgacacccccagaaagaacgacagcagcagcagcagccacugccuggaccccaacaacgaggagggcggccacggcgugaagggcugggccuucgacgacggcaacgacguguggaugggcagaaccaucagcgagaagagcagacugggcuacgagaccuucaaggugaucgagggcuggagcaaccccaagagcaagcugcagaucaacagacaggugaucguggacagaggcaacagaagcggcuacagcggcaucuucagcguggagggcaagagcugcaucaacagaugcuucuacguggagcugaucagaggcagaaaggaggagaccgaggugcuguggaccagcaacagcaucgugguguucugcggcaccagcggcaccuacggcaccggcagcuggcccgacggcgccgacaucaaccugaugcccaucuga

SEQ ID NO: 180935 - RNA, 1410 nt, Artificial Sequence; identical to SEQ ID NO: 176659
  derived and/or modified CDS sequence (opt4) from neuraminidase__InfluenzaA__AEK28918

SEQ ID NO: 180936 - RNA, 1410 nt, Artificial Sequence; identical to SEQ ID NO: 177965
  derived and/or modified CDS sequence (opt4) from neuraminidase__InfluenzaA__AEK28929

SEQ ID NO: 180937 - RNA, 1410 nt, Artificial Sequence
  derived and/or modified CDS sequence (opt4) from neuraminidase__InfluenzaA__AEK28951
augaaccccaaccagaagaucaucaccaucggcagcgugagccugaccaucagcaccaucugcuucuucaugcagaucgccauccugaucaccaccgugacccugcacuucaagcaguacgaguucaacagcccccccaacaaccaggugaugcugugcgagcccaccaucaucgagagaaacaucaccgagaucguguaccugaccaacaccaccaucgagaaggagaucugccccaagcuggccgaguacagaaacuggagcaagccccagugcgacaucaccggcuucgcccccuucagcaaggacaacagcaucagacugagcgccggcggcgacaucugggugaccagagagcccuacgugagcugcgaccccgacaagugcuaccaguucgcccugggccagggcaccacccugaacaacgugcacagcaacaacaccgugagagacagaacccccuacagaacccugcugaugaacgagcugggcgugcccuuccaccugggcaccaagcaggugugcaucgccuggagcagcagcagcugccacgacggcaaggccuggcugcacgugugcaucaccggcgacgacaagaacgccaccgccagcuucaucuacaacggcagacugguggacagcguggugagcuggagcaaggagauccugagaacccaggagagcgagugcgugugcaucaacggcaccugcaccguggugaugaccgacggcagcgccagcggcaaggccgacaccaagauccuguucaucgaggagggcaagaucgugcacaccagcacccugagcggcagcgcccagcacguggaggagugcagcugcuaccccagauaccccggcgugagaugcgugugcagagacaacuggaagggcagcaacagacccaucguggacaucaacaucaaggaccacagcaucgugagcagcuacgugugcagcggccuggugggcgacacccccagaaagaacgacagcagcagcagcagccacugccuggaccccaacaacgaggagggcggccacggcgugaagggcugggccuucgacgacggcaacgacguguggaugggcagaaccaucagcgagaagagcagaagcggcuacgagaccuucaaggugaucgagggcuggagcaaccacaagagcaagcugcagaucaacagacaggugaucguggacagaggcaacagaagcggcuacagcggcaucuucagcguggagggcaagagcugcaucaacagaugcuucuacguggagcugaucagaggcagaaaggaggagaccgaggcccuguggaccagcaacagcaucgugguguucugcggcaccagcggcaccuacggcaccggcagcuggcccgacggcgccgaccugaaccugaugcccaucuga

SEQ ID NO: 180938 - RNA, 1410 nt, Artificial Sequence
  derived and/or modified CDS sequence (opt4) from neuraminidase__InfluenzaA__AEK28962
augaaccccaaccagaagaucaucaccaucggcagcgugagccugaccaucagcaccaucugcuucuucaugcagaucgccauccugaucaccaccgugacccugcacuucaagcaguacgaguucaacagcccccccaacaaccaggugaugcugugcgagcccaccaucaucgagagaaacaucaccgagaucguguaccccaccaacaccaccaucgagaaggagaucugccccaagcuggccgaguacagaaacuggagcaagccccagugcgacaucaccggcuucgcccccuucagcaaggacaacagcaucagacugagcgccggcggcgacaucugggugaccagagagcccuacgugagcugcgaccccgacaagugcuaccaguucgcccugggccagggcaccacccugaacaacgugcacagcaacaacaccgugagagacagaacccccuacagaacccugcugaugaacgagcugggcgugcccuuccaccugggcaccaagcaggugugcaucgccuggagcagcagcagcugccacgacggcaaggccuggcugcacgugugcaucaccggcgacgacaagaacgccaccgccagcuucaucuacaacggcagacugguggacagcguggugagcuggagcaaggagauccugagaacccaggagagcgagugcgugugcaucaacggcaccugcaccguggugaugaccgacggcagcgccagcggcaaggccgacaccaagauccuguucaucgaggagggcaagaucgugcacaccagcacccugagcggcagcgcccagcacguggaggagugcagcugcuaccccagauaccccggcgugagaugcgugugcagagacaacuggaagggcagcaacagacccaucguggacaucaacaucaaggaccacagcaucgugagcagcuacgugugcagcggccuggugggcgacacccccagaaagaacgacagcagcagcagcagccacugccuggaccccaacaacgaggagggcggccacggcgugaagggcugggccuucgacgacggcaacgacguguggaugggcagaaccaucagcgagaagagcagacugggcuacgagaccuucaaggugaucgagggcuggagcaaccccaagagcaagcugcagaucaacagacaggugaucguggacagaggcaacagaagcggcuacagcggcaucuucagcguggagggcaagagcugcaucaacagaugcuucuacguggagcugaucagaggcagaaaggaggagaccgaggugcuguggaccagcaacagcaucgugguguucugcggcaccagcggcaccuacggcaccggcagcuggcccgacggcgccgacaucaaccugaugcccaucuga

SEQ ID NO: 180939 - RNA, 1410 nt, Artificial Sequence
  derived and/or modified CDS sequence (opt4) from neuraminidase__InfluenzaA__AEK28973
augaaccccaaccagaagaucaucaccaucggcagcgugagccugaccaucagcaccaucugcuucuucaugcagaucgccauccugaucaccaccgugacccugcacuucaagcaguacgaguucaacagcccccccaacaaccaggugaugcugugcgagcccaccaucaucgagagaaacaucaccgagaucguguaccugaccaacaccaccaucgagaaggagaucugccccaagcuggccgaguacagaaacuggagcaagccccagugcgacaucaccggcuucgcccccuucagcaaggacaacagcaucagacugagcgccggcggcgacaucugggugaccagagagcccuacgugagcugcgaccccgacaagugcuaccaguucgcccugggccagggcaccacccugaacaacgugcacagcaacaacaccgugagagacagaacccccuacagaacccugcugaugaacgagcugggcgugcccuuccaccugggcaccaagcaggugugcaucgccuggagcagcagcagcugccacgacggcaaggccuggcugcacgugugcaucaccggcgacgacaagaacgccaccgccagcuucaucuacaacggcagacugguggacagcguggugagcuggagcaaggagauccugagaacccaggagagcgagugcgugugcaucaacggcaccugcaccguggugaugaccgacggcagcgccagcggcaaggccgacaccaagauccuguucaucgaggagggcaagaucgugcacaccagcacccugagcggcagcgcccagcacguggaggagugcagcugcuaccccagauaccccggcgugagaugcgugugcagagacaacuggaagggcagcaacagacccaucguggacaucaacaucaaggaccacagcaucgugagcagcuacgugugcagcggccuggugggcgacacccccagaaagaacgacagcagcagcagcagccacugccuggaccccaacaacgaggagggcggccacggcgugaagggcugggccuucgacgacggcaacgacguguggaugggcagaaccaucagcgagaagagcagacugggcuacgagaccuucaaggugaucgagggcuggagcaaccacaagagcaagcugcagaucaacagacaggugaucguggacagaggcaacagaagcggcuacagcggcaucuucagcguggagggcaagagcugcaucaacagaugcuucuacguggagcugaucagaggcagaaaggaggagaccgaggugcuguggaccagcaacagcaucgugguguucugcggcaccagcggcaccuacggcaccggcagcuggcccgacggcgccgaccugaacuucaugcccaucuga

SEQ ID NO: 180940 - RNA, 1410 nt, Artificial Sequence
  derived and/or modified CDS sequence (opt4) from neuraminidase__InfluenzaA__AEK28984
augaaccccaaccagaagaucaucaccaucggcagcgugagccugaccaucagcaccaucugcuucuucaugcagaucgccauccugaucaccaccgugacccugcacuucaagcaguacgaguucaacagcccccccaacaaccaggugaugcugugcgagcccaccaucaucgagagaaacaucaccgagaucguguaccugaccaacaccaccaucgagaaggagaucugccccaagcuggccgaguacagaaacuggagcaagccccagugcgacaucaccggcuucgcccccuucagcaaggacaacagcgugagacugagcgccggcggcgacaucugggugaccagagagcccuacgugagcugcgaccccgacaagugcuaccaguucgcccugggccagggcaccacccugaacaacgugcacagcaacaacaccgugagagacagaacccccuacagaacccugcugaugaacgagcugggcgugcccuuccaccugggcaccaagcaggugugcaucgccuggagcagcagcagcugccacgacggcaaggccuggcugcacgugugcaucaccggcgacgacaagaacgccaccgccagcuucaucuacaacggcagacugguggacagcguggugagcuggagcaaggagauccugagaacccaggagagcgagugcgugugcaucaacggcaccugcaccguggugaugaccgacggcagcgccagcggcaaggccgacaccaagauccuguucaucgaggagggcaagaucgugcacaccagcacccugagcggcagcgcccagcacguggaggagugcagcugcuaccccagauaccccggcgugagaugcgugugcagagacaacuggaagggcagcaacagacccaucguggacaucaacaucaaggaccacagcaucgugagcagcuacgugugcagcggccuggugggcgacacccccagaaagaacgacagcagcagcagcagccacugccuggaccccaacaacgaggagggcggccacggcgugaagggcugggccuucgacgacggcaacgacguguggaugggcagaaccaucagcgagaagagcagacugggcuacgagaccuucaaggugaucgagggcuggagcaaccccaagagcaagcugcagaucaacagacaggugaucguggacagaggcaacagaagcggcuacagcggcaucuucagcguggagggcaagagcugcaucaacagaugcuucuacguggagcugaucagaggcagaaaggaggagaccgaggugcuguggaccagcaacagcaucgugguguucugcggcaccagcggcaccuacggcaccggcagcuggcccgacggcgccgacaucaaccugaugcccaucuga

SEQ ID NO: 180941 - RNA, 1410 nt, Artificial Sequence; identical to SEQ ID NO: 180940
  derived and/or modified CDS sequence (opt4) from neuraminidase__InfluenzaA__AEK28995

SEQ ID NO: 180942 - RNA, 1410 nt, Artificial Sequence; identical to SEQ ID NO: 179578
  derived and/or modified CDS sequence (opt4) from neuraminidase__InfluenzaA__AEK29006

SEQ ID NO: 180943 - RNA, 1410 nt, Artificial Sequence
  derived and/or modified CDS sequence (opt4) from neuraminidase__InfluenzaA__AEK29028
augaaccccaaccagaagaucaucaccaucggcagcgugagccugaccaucagcaccaucugcuucuucaugcagaucgccauccugaucaccaccgugacccugcacuucaagcaguacgaguucaacagcccccccaacaaccaggugaugcugugcgagcccaccaucaucgagagaaacaucaccgagaucguguaccugaccaacaccaccaucgagaaggagaucugccccaagcuggccgaguacagaaacuggagcaagccccagugcgacaucaccggcuucgcccccuucagcaaggacaacagcaucagacugagcgccggcggcgacaucugggugaccagagagcccuacgugagcugcgaccccaacaagugcuaccaguucgcccugggccagggcaccacccugaacaacgugcacagcaacaacaccgugagagacagaacccccuacagaacccugcugaugaacgagcugggcgugcccuuccaccugggcaccaagcaggugugcaucgccuggagcagcagcagcugccacgacggcaaggccuggcugcacgugugcaucaccggcgacgacaagaacgccaccgccagcuucaucuacaacggcagacugguggacagcguggugagcuggagcaaggagauccugagaacccaggagagcgagugcgugugcaucaacggcaccugcaccguggugaugaccgacggcagcgccagcggcaaggccgacaccaagauccuguucaucgaggagggcaagaucgugcacaccagcacccugagcggcagcgcccagcacguggaggagugcagcugcuaccccagauaccccggcgugagaugcgugugcagagacaacuggaagggcagcaacagacccaucguggacaucaacaugaaggaccacagcaucgugagcagcuacgugugcagcggccuggugggcgacacccccagaaagaacgacagcagcagcagcagccacugcuucgaccccaacgacgaggagggcggccacggcgugaagggcugggccuucgacgacggcaacgacguguggaugggcagaaccaucagcgagaagagcagacugggcuacgagaccuucaaggugaucgagggcuggagcaaccccaagagcaagcugcagaucaacagacaggugaucguggacagaggcaacagaagcggcuacagcggcaucuucagcguggagggcaagagcugcaucaacagaugcuucuacguggagcugaucagaggcagaaaggaggagaccgaggugcuguggaccagcaacagcaucgugguguucugcggcaccagcggcaccuacggcaccggcagcuggcccgacggcgccgacaucaaccugaugcccaucuga

SEQ ID NO: 180944 - RNA, 1410 nt, Artificial Sequence
  derived and/or modified CDS sequence (opt4) from neuraminidase__InfluenzaA__AEK29050
augaaccccaaccagaagaucaucaccaucggcagcgugagccugaccaucagcaccaucugcuucuucaugcagaucgccauccugaucaccaccgugacccugcacuucaagcaguacgaguucaaccccccccccaacaaccaggugaugcugugcgagcccaccaucaucgagagaaacaucaccgagaucguguaccugaccaacaccaccaucgagaaggagaucugccccaagcuggccgaguacagaaacuggagcaagccccagugcgacaucaccggcuucgcccccuucagcaaggacaacagcaucagacugagcgccggcggcgacaucugggugaccagagagcccuacgugagcugcgaccccgacaagugcuaccaguucgcccugggccagggcaccacccugaacaacgugcacagcaacaacaccgugagagacagaacccccuacagaacccugcugaugaacgagcugggcgugcccuuccaccugggcaccaagcaggugugcaucgccuggagcagcagcagcugccacgacggcaaggccuggcugcacgugugcaucaccggcgacgacaagaacgccaccgccagcuucaucuacaacggcagacugguggacagcguggugagcuggagcaaggagauccugagaacccaggagagcgagugcgugugcaucaacggcaccugcaccguggugaugaccgacggcagcgccagcggcaaggccgacaccaagauccuguucaucgaggagggcaagaucgugcacaccagcacccugagcggcagcgcccagcacguggaggagugcagcugcuaccccagauaccccggcgugagaugcgugugcagagacaacuggaagggcagcaacagacccaucguggacaucaacaucaaggaccacagcaucgugagcagcuacgugugcagcggccuggugggcgacacccccagaaagaacgacagcagcagcagcagccacugccuggaccccaacaacgaggagggcggccacggcgugaagggcugggccuucgacgacggcaacgacguguggaugggcagaaccaucaacgagaccagcagacugggcuacgagaccuucaaggugaucgagggcuggagcaaccccaagagcaagcugcagaucaacagacaggugaucguggacagaggcaacagaagcggcuacagcggcaucuucagcguggagggcaagagcugcaucaacagaugcuucuacguggagcugaucagaggcagaaaggaggagaccgaggugcuguggaccagcaacagcaucgugguguucugcggcaccagcggcaccuacggcaccggcagcuggcccgacggcgccgaccugaaccugaugcccaucuga

SEQ ID NO: 180945 - RNA, 1410 nt, Artificial Sequence
  derived and/or modified CDS sequence (opt4) from neuraminidase__InfluenzaA__AEK29061
augaaccccaaccagaagaucaucaccaucggcagcgugagccugaccaucagcaccaucugcuucuucauccagaucgccauccugaucaccaccgugacccugcacuucaagcaguacgaguucaacagcccccccaacaaccaggugaugcugugcgagcccaccaucaucgagaagaacaucaccgagaucguguaccugaccaacaccaccaucgagaaggagaucugccccaagcuggccgaguacagaaacuggagcaagccccagugcgacaucaccggcuucgcccccuucagcaaggacaacagcaucagacugagcgccggcggcgacaucugggugaccagagagcccuacgugagcugcgaccccgacaagugcuaccaguucgcccugggccagggcaccacccugaacaacgugcacagcaacaacaucgugagagacagaacccccuacagaacccugcugaugaacgagcugggcgugcccuuccaccugggcaccaagcaggugugcaucgccuggagcagcagcagcugccacgacggcaaggccuggcugcacgugugcaucaccggcgacgacaagaacgccaccgccagcuucaucuacaacggcagacugguggacagcguggugagcuggagcaaggagauccugagaacccaggagagcgagugcgugugcaucaacggcaccugcaccguggugaugaccgacggcagcgccagcggcaaggccgacaccaagauccuguucaucgaggagggcaagaucgugcacaccagcacccugagcggcagcgcccagcacguggaggagugcagcugcuaccccagauaccccggcgugagaugcgugugcagagacaacuggaagggcagcaacagacccaucguggacaucaacaucaaggaccacagcaucgugagcagcuacgugugcagcggccuggugggcgacacccccagaaagaacgacagcagcagcagcagccacugccuggaccccaacaacgaggagggcggccacggcgugaagggcugggccuucgacgacggcaacgacguguggaugggcagaaccaucaacgagaccagcagacugggcuacgagaccuucaaggugaucgagggcuggagcaaccccaagagcaagcugcagaucaacagacaggugaucguggacagaggcaacagaagcggcuacagcggcaucuucagcguggagggcaagagcugcaucaacagaugcuucuacguggagcugaucagaggcagaaaggaggagaccgaggugcuguggaccagcaacagcaucgugguguucugcggcaccagcggcaccuacggcaccggcagcuggcccgacggcgccgaccugaaccugaugcccaucuga

SEQ ID NO: 180946 - RNA, 1410 nt, Artificial Sequence
  derived and/or modified CDS sequence (opt4) from neuraminidase__InfluenzaA__AEK29083
augaaccccaaccagaagaucaucaccaucggcagcgugagccugaccaucagcaccaucugcuucuucauccagaucgccauccugaucaccaccgugacccugcacuucaagcaguacgaguucaacagcccccccaacaaccaggugaugcugugcgagcccaccaucaucgagaagaacaucaccgagaucguguaccugaccaacaccaccaucgagaaggagaucugccccaagcuggccgaguacagaaacuggagcaagccccagugcgacaucaccggcuucgcccccuucagcaaggacaacagcaucagacugagcgccggcggcgacaucugggugaccagagagcccuacgugagcugcgaccccgacaagugcuaccaguucgcccugggccagggcaccacccugaacaacgugcacagcaacaacaccgugagagacagaacccccuacagaacccugcugaugaacgagcugggcgugcccuuccaccugggcaccaagcaggugugcaucgccuggagcagcagcagcugccacgacggcaaggccuggcugcacgugugcaucaccggcgacgacaagaacgccaccgccagcuucaucuacaacggcagacugguggacagcguggugagcuggagcaaggagauccugagaacccaggagagcgagugcgugugcaucaacggcaccugcaccguggugaugaccgacggcagcgccagcggcaaggccgacaccaagauccuguucaucgaggagggcaagaucgugcacaccagcacccugagcggcagcgcccagcacguggaggagugcagcugcuaccccagauaccccggcgugagaugcgugugcagagacaacuggaagggcagcaacagacccaucguggacaucaacaucaaggaccacagcaucgugagcagcuacgugugcagcggccuggugggcgacacccccagaaagaacgacagcagcagcagcagccacugccuggaccccaacaacgaggagggcggccacggcgugaagggcugggccuucgacgacggcaacgacguguggaugggcagaaccaucaacgagaccagcagacugggcuacgagaccuucaaggugaucgagggcuggagcaaccccaagagcaagcugcagaucaacagacaggugaucguggacagaggcaacagaagcggcuacagcggcaucuucagcguggagggcaagagcugcaucaacagaugcuucuacguggagcugaucagaggcagaaaggaggagaccgaggugcuguggaccagcaacagcaucgugguguucugcggcaccagcggcaccuacggcaccggcagcuggcccgacggcgccgaccugaaccugaugcccaucuga

SEQ ID NO: 180947 - RNA, 1410 nt, Artificial Sequence; identical to SEQ ID NO: 179470
  derived and/or modified CDS sequence (opt4) from neuraminidase__InfluenzaA__AEK29094

SEQ ID NO: 180948 - RNA, 1410 nt, Artificial Sequence; identical to SEQ ID NO: 179578
  derived and/or modified CDS sequence (opt4) from neuraminidase__InfluenzaA__AEK29127

SEQ ID NO: 180949 - RNA, 1410 nt, Artificial Sequence; identical to SEQ ID NO: 179578
  derived and/or modified CDS sequence (opt4) from neuraminidase__InfluenzaA__AEK29138

SEQ ID NO: 180950 - RNA, 1410 nt, Artificial Sequence
  derived and/or modified CDS sequence (opt4) from neuraminidase__InfluenzaA__AEK29182
augaaccccaaccagaagaucaucaccaucggcagcgugagccugaccaucagcaccaucugcuucuucaugcagaucgccauccugaucaccaccgugacccugcacuucaagcaguacgaguucaacagcccccccaacaaccaggugaugcugugcgagcccaccaucaucgagagaaacaucaccgagaucguguaccugaccaacaccaccaucgagaaggagaucugccccaagcuggccgaguacagaaacuggagcaagccccagugcgacaucaccggcuucgcccccuucagcaaggacaacagcaucagacugagcgccggcggcgacaucugggugaccagagagcccuacgugagcugcgaccccgacaagugcuaccaguucgcccugggccagggcaccacccugaacaacgugcacagcaacaacaccgugagagacagaacccccuacagaacccugcugaugaacgagcugggcgugcccuuccaccugggcaccaagcaggugugcaucgccuggagcagcagcagcugccacgacggcaaggccuggcugcacgugugcaucaccggcgacgacaagaacgccaccgccagcuucaucuacaacggcagacugguggacagcguggugagcuggagcaaggagauccugagaacccaggagagcgagugcgugugcaucaacggcaccugcaccguggugaugaccgacggcagcgccagcggcaaggccgacaccaagauccuguucaucgaggagggcaagaucgugcacaccagcacccugagcggcagcgcccagcacguggaggagugcagcugcuaccccagauaccccggcgugagaugcgugugcagagacaacuggaagggcagcaacagacccaucguggacaucaacaucaaggaccacagcaucgugagcagcuacgugugcagcggccuggugggcgacacccccagaaagaacgacagcagcagcagcagccacugccuggaccccaacaacgaggagggcggccacggcgugaagggcugggccuucgacgacggcaacgacguguggaugggcagaaccaucaacgagaccagcagacugggcuacgagaccuucaaggugaucgagggcuggagcaaccccaagagcaagcugcaggugaacagacaggugaucguggacagaggcaacagaagcggcuacagcggcaucuucagcguggagggcaagagcugcaucaacagaugcuucuacguggagcugaucagaggcagaaaggaggagaccgaggugcuguggaccagcaacagcaucgugguguucugcggcaccagcggcaccuacggcaccggcagcuggcccgacggcgccgaccugaaccugaugcccaucuga

SEQ ID NO: 180951 - RNA, 1410 nt, Artificial Sequence
  derived and/or modified CDS sequence (opt4) from neuraminidase__InfluenzaA__AEK29204
augaaccccaaccagaagaucaucaccaucggcagcgugagccugaccaucagcaccaucugcuucuucaugcagaucgccauccugaucaccaccgugacccugcacuucaagcaguacgaguucaacagcccccccaacaaccaggugaugcugugcgagcccaccaucaucgagagaaacaucaccgagaucguguaccugaccaacaccaccaucgagaaggagaucugccccaagcuggccgaguacagaaacuggagcaagccccagugcgacaucaccggcuucgcccccuucagcaaggacaacagcaucagacugagcgccggcggcgacaucugggugaccagagagcccuacgugagcugcgaccccgacaagugcuaccaguucgcccugggccagggcaccacccugaacaacgugcacagcaacaacaccgugagagacagaacccccuacagaacccugcugaugaacgagcugggcgugcccuuccaccugggcaccaagcaggugugcaucgccuggagcagcagcagcugccacgacggcaaggccuggcugcacgugugcaucaccggcgacgacaagaacgccaccgccagcuucaucuacaacggcagacugguggacagcguggugagcuggagcaaggagauccugagaacccaggagagcgagugcgugugcaucaacggcaccugcaccguggugaugaccgacggcagcgccagcggcaaggccaacaccaaggugcuguucaucgaggagggcaagaucgugcacaccagcacccugagcggcagcgcccagcacguggaggagugcagcugcuaccccagauaccccggcgugagaugcgugugcagagacaacuggaagggcagcaacagacccaucguggacaucaacaucaaggaccacagcaucgugagcagcuacgugugcagcggccuggugggcgacacccccagaaagaacgacagcagcagcagcagccacugccuggaccccaacaacgaggagggcggccacggcgugaagggcugggccuucgacgacggcaacgacguguggaugggcagaaccaucaacgagaccagcagacugggcuacgagaccuucaaggugaucgagggcuggagcaaccccaagagcaagcugcagaucaacagacaggugaucguggacagaggcaacagaagcggcuacagcggcaucuucagcguggagggcaagagcugcaucaacagaugcuucuacguggagcugaucagaggcagaaaggaggagaccgaggugcuguggaccagcaacagcaucgugguguucugcggcaccagcggcaccuacggcaccggcagcuggcccgacggcgccgaccugaaccugaugcccaucuga

SEQ ID NO: 180952 - RNA, 1410 nt, Artificial Sequence
  derived and/or modified CDS sequence (opt4) from neuraminidase__InfluenzaA__AEK29215
augaaccccaaccagaagaucaucaccaucggcagcgugagccugaccaucagcaccaucugcuucuucaugcagaucgccauccugaucaccaccgugacccugcacuucaagcaguacgaguucaacagcccccccaacaaccaggugaugcugugcgagcccaccaucaucgagagaaacaucaccgagaucguguaccugaccaacaccaccaucgagaaggagaucugccccaagcuggccgaguacagaaacuggagcaagccccagugcgacaucaccggcuucgcccccuucagcaaggacaacagcaucagacugagcgccggcggcgacaucugggugaccagagagcccuacgugagcugcgaccccgacaagugcuaccaguucgcccugggccagggcaccacccugaacaacgugcacagcaacaacaccgugagaaacagaacccccuacagaacccugcugaugaacgagcugggcgugcccuuccaccugggcaccaagcaggugugcaucgccuggagcagcagcagcugccacgacggcaaggccuggcugcacgugugcaucaccggcgacgacaagaacgccaccgccagcuucaucuacaacggcagacugguggacagcguggugagcuggagcaaggagauccugagaacccaggagagcgagugcgugugcaucaacggcaccugcaccguggugaugaccgacggcagcgccagcggcaaggccgacaccaagauccuguucaucgaggagggcaagaucgugcacaccagcacccugagcggcagcgcccagcacguggaggagugcagcugcuaccccagauaccccggcgugagaugcgugugcagagacaacuggaagggcagcaacagacccaucguggacaucaacaucaaggaccacagcaucgugagcagcuacgugugcagcggccuggugggcgacacccccagaaagaacgacagcagcagcagcagccacugccuggaccccaacaacgaggagggcggccacggcgugaagggcugggccuucgacgacggcaacgacguguggaugggcagaaccaucaacgagaccagcagacugggcuacgagaccuucaaggugaucgagggcuggagcaaccccaagagcaagcugcagaucaacagacaggugaucguggacagaggcgacagaagcggcuacagcggcaucuucagcguggagggcaagagcugcaucaacagaugcuucuacguggagcugaucagaggcagaaaggaggagaccgaggugcuguggaccagcaacagcaucgugguguucugcggcaccagcggcaccuacggcaccggcagcuggcccgacggcgccgaccugaaccugaugcccaucuga

SEQ ID NO: 180953 - RNA, 1410 nt, Artificial Sequence; identical to SEQ ID NO: 180951
  derived and/or modified CDS sequence (opt4) from neuraminidase__InfluenzaA__AEK29237

SEQ ID NO: 180954 - RNA, 1410 nt, Artificial Sequence; identical to SEQ ID NO: 179578
  derived and/or modified CDS sequence (opt4) from neuraminidase__InfluenzaA__AEK29248

SEQ ID NO: 180955 - RNA, 1410 nt, Artificial Sequence; identical to SEQ ID NO: 179578
  derived and/or modified CDS sequence (opt4) from neuraminidase__InfluenzaA__AEK29259

SEQ ID NO: 180956 - RNA, 1410 nt, Artificial Sequence; identical to SEQ ID NO: 179578
  derived and/or modified CDS sequence (opt4) from neuraminidase__InfluenzaA__AEK29270

SEQ ID NO: 180957 - RNA, 1413 nt, Artificial Sequence
  derived and/or modified CDS sequence (opt4) from neuraminidase__InfluenzaA__AEK59839
augaaccccaaccagaagaucaucaccaucggcagcaucagcaucgccaucggcaucaucagccugaugcugcagaucggcaacaucaucagcaucugggccagccacagcauccagaccggcagccagaaccacaccggcaucugcaaccagagaaucaucaccuacgagaacagcaccugggugaaccacaccuacgugaacaucaacaacaccaacgugguggccggcaaggacaagaccagcgugacccuggccggcaacagcagccugugcagcaucagcggcugggccaucuacaccaaggacaacagcaucagaaucggcagcaagggcgacguguucgugaucagagagcccuucaucagcugcagccaccuggagugcagaaccuucuuccugacccagggcgcccugcugaacgacaagcacagcaacggcaccgugaaggacagaagccccuacagagcccugaugagcugcccccugggcgaggcccccagccccuacaacagcaaguucgagagcguggccuggagcgccagcgccugccacgacggccugggcuggcugaccaucggcaucagcggccccgacaacggcgccguggccgugcugaaguacaacggcaucaucaccggcaccaucaagagcuggaagaagcagauccugagaacccaggagagcgagugcgugugcaugaacggcagcugcuucaccaucaugaccgacggccccagcaacggcgccgccagcuacaagaucuucaagaucgagaagggcaaggugaccaagagcaucgagcugaacgcccccaacuuccacuacgaggagugcagcugcuaccccgacaccggcaucgugaugugcgugugcagagacaacuggcacggcagcaacagacccugggugagcuucaaccagaaccuggacuaccagaucggcuacaucugcagcggcguguucggcgacaaccccagacccaaggacggcgagggcagcugcaaccccgugaccguggacggcgccgacggcgugaagggcuucagcuacaaguacgacaacggcguguggaucggcagaaccaagagcaacagacugagaaagggcuucgagaugaucugggaccccaacggcuggaccaacaccgacagcgacuucagcgugaagcaggacgugguggccaucaccgacuggagcggcuacagcggcagcuucgugcagcaccccgagcugaccggccuggacugcaucagacccugcuucuggguggagcuggugagaggccugcccagagagaacaccaccaucuggaccagcggcagcagcaucagcuucugcggcgugaacagcgacaccgccaacuggagcuggcccgacggcgccgagcugcccuucaccaucgacaaguga

SEQ ID NO: 180958 - RNA, 1410 nt, Artificial Sequence
  derived and/or modified CDS sequence (opt4) from neuraminidase__InfluenzaA__AEK98375
augaaccccaaccagaagaucaucaccaucggcagcgugagccugaccaucagcaccaucugcuucuucaugcagaucgccauccugaucaccaccgugacccugcacuucaagcaguacgaguucaacagcccccccaacaaccaggugaugcugugcgagcccaccaucaucgagagaaacaucaccgagaucguguaccugaccaacaccaccaucgagaaggagaucugccccaagcuggccgaguacagaaacuggagcaagccccagugcgacaucaccggcuucgcccccuucagcaaggacaacagcaucagacugagcgccggcggcgacaucugggugaccagagagcccuacgugagcugcgaccccgacaagugcuaccaguucgcccugggccagggcaccacccugaacaacgugcacagcaacgacaccgugagagacagaacccccuacagaacccugcugaugaacgagcugggcgugcccuuccaccugggcaccaagcaggugugcaucgccuggagcagcagcagcugccacgacggcaaggccuggcugcacgugugcaucaccggcgacgacaagaacgccaccgccagcuucaucuacaacggcagacugguggacagcaucgugagcuggagcaaggagauccugagaacccaggagagcgagugcgugugcaucaacggcaccugcaccguggugaugaccgacggcagcgccagcggcgaggccgacaccaagauccuguucaucgaggagggcaagaucgugcacaccagcacccugagcggcagcgcccagcacguggaggagugcagcugcuaccccagauaccccggcgugagaugcgugugcagagacaacuggaagggcagcaacagacccaucguggacaucaacaucaaggaccacagcaucgugagcagcuacgugugcagcggccuggugggcgacacccccagaaagaacgacagcagcagcagcagccacugccuggaccccaacaacgaggagggcggccacggcgugaagggcugggccuucgacgacggcaacgacguguggaugggcagaaccaucagcgagaagagcagacugggcuacgagaccuucaaggugaucgagggcuggagcaaccccaagagcaagcugcagaccaacagacaggugaucguggacagaggcaacagaagcggcuacagcggcaucuucagcguggagggcaagagcugcaucaacagaugcuucuacguggagcugaucagaggcagaaaggaggagaccgaggugcuguggaccagcaacagcaucgugguguucugcggcaccagcggcaccuacggcaccggcagcuggcccgacggcgccgacaucaaccugaugcccaucuga

SEQ ID NO: 180959 - RNA, 1410 nt, Artificial Sequence; identical to SEQ ID NO: 176659
  derived and/or modified CDS sequence (opt4) from neuraminidase__InfluenzaA__AEK98377

SEQ ID NO: 180960 - RNA, 1410 nt, Artificial Sequence; identical to SEQ ID NO: 176101
  derived and/or modified CDS sequence (opt4) from neuraminidase__InfluenzaA__AEK98379

SEQ ID NO: 180961 - RNA, 1410 nt, Artificial Sequence
  derived and/or modified CDS sequence (opt4) from neuraminidase__InfluenzaA__AEK98381
augaaccccaaccagaagaucaucaccaucggcagcgugagccugaccaucagcaccaucugcuucuucaugcagaucgccauccugaucaccaccgugacccugcacuucaagcaguacgaguucaacagcccccccaacaaccaggugaugcugugcgagcccaccaucaucgagagaaacaucaccgagaucguguaccugaccaacaccaccaucgagaaggagaucugccccaagcuggccgaguacagaaacuggagcaagccccagugcgacaucaccggcuucgcccccuucagcaaggacaacagcaucagacugagcgccggcggcgacaucugggugaccagagagcccuacgugagcugcgaccccgacaagugcuaccaguucgcccugggccagggcaccacccugaacaacgugcacagcaacgacaccgugagagacagaacccccuacagaacccugcugaugaacgagcugggcgugcccuuccaccugggcaccaagcaggugugcaucgccuggagcagcagcagcugccacgacggcgaggccuggcugcacgugugcaucaccggcgacgacaagaacgccaccgccagcuucaucuacaacggcagacugguggacagcaucgugagcuggagcaaggagauccugagaacccaggagagcgagugcgugugcaucaacggcaccugcaccguggugaugaccgacggcagcgccagcggcgaggccgacaccaagauccuguucaucgaggagggcaagaucgugcacaccagcacccugagcggcagcgcccagcacguggaggagugcagcugcuaccccagauaccccggcgugagaugcgugugcagagacaacuggaagggcagcaacagacccaucguggacaucaacaucaaggaccacagcaucgugagcagcuacgugugcagcggccuggugggcgacacccccagaaagaacgacagcagcagcagcagccacugccuggaccccaacaacgaggagggcggccacggcgugaagggcugggccuucgacgacggcaacgacguguggaugggcagaaccaucagcgagaagagcagacugggcuacgagaccuucaaggugaucgagggcuggagcaaccccaagagcaagcugcagaucaacagacaggugaucguggacagaggcaacagaagcggcuacagcggcaucuucagcguggagggcaagagcugcaucaacagaugcuucuacguggagcugaucagaggcagaaaggaggagaccgaggugcuguggaccagcaacagcaucgugguguucugcggcaccagcggcaccuacggcaccggcagcuggcccgacggcgccgacaucaaccugaugcccaucuga

SEQ ID NO: 180962 - RNA, 1410 nt, Artificial Sequence; identical to SEQ ID NO: 176101
  derived and/or modified CDS sequence (opt4) from neuraminidase__InfluenzaA__AEK98383

SEQ ID NO: 180963 - RNA, 1410 nt, Artificial Sequence; identical to SEQ ID NO: 176659
  derived and/or modified CDS sequence (opt4) from neuraminidase__InfluenzaA__AEK98385

SEQ ID NO: 180964 - RNA, 1410 nt, Artificial Sequence
  derived and/or modified CDS sequence (opt4) from neuraminidase__InfluenzaA__AEK98387
augaaccccaaccagaagaucaucaccaucggcagcgugagccugaccaucagcaccaucugcuucuucaugcagaucgccauccugaucaccaccgugacccugcacuucaagcaguacgaguucaacagcccccccaacaaccaggugaugcugugcgagcccaccaucaucgagagaaacaucaccgagaucguguaccugaccaacaccaccaucgagaaggagaucugccccaagcuggccgaguacagaaacuggagcaagccccagugcgacaucaccggcuucgcccccuucagcaaggacaacagcaucagacugagcgccggcggcgacaucugggugaccagagagcccuacgugagcugcgaccccgacaagugcuaccaguucgcccugggccagggcaccacccugaacaacgugcacagcaacaacaccgugagagacagaacccccuacagaacccugcugaugaacgagcugggcgugcccuuccaccugggcaccaagcaggugugcaucgccuggagcagcagcagcugccacgacggcaaggccuggcugcacgugugcaucaccggcgacgacaagaacgccaccgccagcuucaucuacaacggcagacugaucgacagcguggugagcuggagcaaggagauccugagaacccaggagagcgagugcgugugcaucaacggcaccugcaccguggugaugaccgacggcagcgccagcggcaaggccgacaccaagauccuguucaucgaggagggcaagaucgugcacaccagcacccugagcggcagcgcccagcacguggaggagugcagcugcuaccccagauaccccggcgugagaugcgugugcagagacaacuggaagggcagcaacagacccaucguggacaucaacaucaaggaccacagcaucgugagcagcuacgugugcagcggccuggugggcgacacccccagaaagaacgacagcagcagcagcagccacugccuggaccccaacaacgaggagggcggccacggcgugaagggcugggccuucgacgacggcaacgacguguggaugggcagaaccaucaacgagaccagcagacugggcuacgagaccuucaaggugaucgagggcuggagcaaccccaagagcaagcugcagaucaacagacaggugaucguggacagaggcaacagaagcggcuacagcggcaucuucagcguggagggcaagagcugcaucaacagaugcuucuacguggagcugaucagaggcagaaaggaggagaccgaggugcuguggaccagcaacagcaucgugguguucugcggcaccagcggcaccuacggcaccggcagcuggcccgacggcgccgaccugaaccugaugcccaucuga

SEQ ID NO: 180965 - RNA, 1410 nt, Artificial Sequence; identical to SEQ ID NO: 176659
  derived and/or modified CDS sequence (opt4) from neuraminidase__InfluenzaA__AEK98389

SEQ ID NO: 180966 - RNA, 1410 nt, Artificial Sequence
  derived and/or modified CDS sequence (opt4) from neuraminidase__InfluenzaA__AEK98393
augaaccccaaccagaagaucaucaccaucggcagcgugagccugaccaucagcaccaucugcuucuucaugcagaucgccauccugaucaccaccgugacccugcacuucaagcaguacgaguucaacagcccccccaacaaccaggugaugcugugcgagcccaccaucaucgagagaaacaucaccgagaucguguaccugaccaacaccaccaucgagaaggagaucugccccaagcuggccgaguacagaaacuggagcaagccccagugcgacaucaccggcuucgcccccuucagcaaggacaacagcaucagacugagcgccggcggcgacaucugggugaccagagagcccuacgugagcugcgaccccgacaagugcuaccaguucgcccugggccagggcaccacccugaacaacgugcacagcaacaacaccgugagagacagaacccccuacagaacccugcugaugaacgagcugggcgugcccuuccaccugggcaccaagcaggugugcaucgccuggagcagcagcagcugccacgacggcaaggccuggcugcacgugugcaucaccggcgacgacaagaacgccaccgccagcuucaucuacaacggcagacugguggacagcguggugagcuggagcaaggagauccugagaacccaggagagcgagugcgugugcaucaacggcaccugcaccguggugaugaccgacggcagcgccagcggcaaggccgacaccaagauccuguucaucgaggagggcaagaucgugcacaccagcacccugagcggcagcgcccagcacguggaggagugcagcugcuaccccagauaccccggcgugagaugcgugugcagagacaacuggaagggcagcaacagacccaucguggacaucaacaucaaggaccacagcaucgccagcagcuacgugugcagcggccuggugggcgacacccccagaaagaacgacagcagcagcagcagccacugccuggaccccaacaacgaggagggcggccacggcgugaagggcugggccuucgacgacggcaacgacguguggaugggcagaaccaucaacgagaccagcagacugggcuacgagaccuucaaggugaucgagggcuggagcaaccccaagagcaagcugcagaucaacagacaggugaucguggacagaggcaacagaagcggcuacagcggcaucuucagcguggagggcaagagcugcaucaacagaugcuucuacguggagcugaucagaggcagaaaggaggagaccgaggugcuguggaccagcaacagcaucgugguguucugcggcaccagcggcaccuacggcaccggcagcuggcccgacggcgccgaccugaaccugaugcccaucuga

SEQ ID NO: 180967 - RNA, 1410 nt, Artificial Sequence; identical to SEQ ID NO: 179578
  derived and/or modified CDS sequence (opt4) from neuraminidase__InfluenzaA__AEK98395

SEQ ID NO: 180968 - RNA, 1410 nt, Artificial Sequence
  derived and/or modified CDS sequence (opt4) from neuraminidase__InfluenzaA__AEK98397
augaaccccaaccagaagaucaucaccaucggcagcgugagccugaccaucagcaccaucugcuucuucaugcagaucgccauccugaucaccaccgugacccugcacuucaagcaguacgaguucaacagcccccccaacaaccaggugaugcugugcgagcccaccaucaucgagagaaacaucaccgagaucguguaccugaccaacaccaccaucgagaaggagaucugccccaagcuggccgaguacagaaacuggagcaagccccagugcgacaucaccggcuucgcccccuucagcaaggacaacagcaucagacugagcgccggcggcgacaucugggugaccagagagcccuacgugagcugcgaccccaacaagugcuaccaguucgcccugggccagggcaccacccugaacaacgugcacagcaacaacaccgugagagacagaacccccuacagaacccugcugaugaacgagcugggcgugcccuuccaccugggcaccaagcaggugugcaucgccuggagcagcagcagcugccacgacggcaaggccuggcugcacgugugcaucaccggcgacgacaagaacgccaccgccagcuucaucuacaacggcagacugguggacagcguggugagcuggagcaaggagauccugagaacccaggagagcgagugcgugugcaucaacggcaccugcaccguggugaugaccgacggcagcgccagcggcaaggccgacaccaagauccuguucaucgaggagggcaagaucgugcacaccagcacccugagcggcagcgcccagcacguggaggagugcagcugcuaccccagauaccccggcgugagaugcgugugcagagacaacuggaagggcagcaacagacccaucguggacaucaacaugaaggaccacagcaucgugagcagcuacgugugcagcggccuggugggcgacacccccagaaagaacgacagcagcagcagcagccacugccuggaccccaacaacgaggagggcggccacggcgugaagggcugggccuucgacgacggcaacgacguguggaugggcagaaccaucagcgagaagagcagacugggcuacgagaccuucaaggugaucgagggcuggagcaaccccaagagcaagcugcagaucaacagacaggugaucguggacagaggcaacagaagcggcuacagcggcaucuucagcguggagggcaagagcugcaucaacagaugcuucuacguggagcugaucagaggcagaaaggaggagaccgaggugcuguggaccagcaacagcaucgugguguucugcggcaccagcggcaccuacggcaccggcagcuggcccgacggcgccgacaucaacuucaugcccaucuga

SEQ ID NO: 180969 - RNA, 1410 nt, Artificial Sequence; identical to SEQ ID NO: 176659
  derived and/or modified CDS sequence (opt4) from neuraminidase__InfluenzaA__AEK98399

SEQ ID NO: 180970 - RNA, 1410 nt, Artificial Sequence; identical to SEQ ID NO: 176572
  derived and/or modified CDS sequence (opt4) from neuraminidase__InfluenzaA__AEK98403

SEQ ID NO: 180971 - RNA, 1410 nt, Artificial Sequence
  derived and/or modified CDS sequence (opt4) from neuraminidase__InfluenzaA__AEK98405
augaaccccaaccagaagaucaucaccaucggcagcgugagccugaccaucagcaccaucugcuucuucaugcagaucgccauccugaucaccaccgugacccugcacuucaagcaguacgaguucaacagcccccccaacaaccaggugaugcugugcgagcccaccaucaucgagagaaacaucaccgagaucguguaccugaccaacaccaccaucgagaaggagaucugccccaagcuggccgaguacagaaacuggagcaagccccagugcgacaucaccggcuucgcccccuucagcaaggacaacagcaucagacugagcgccggcggcgacaucugggugaccagagagcccuacgugagcugcgaccccgacaagugcuaccaguucgcccugggccagggcaccacccugaacaacgugcacagcaacaacaccgugagagacagaacccccuacagaacccugcugaugaacgagcugggcgugcccuuccaccugggcaccaagcaggugugcaucgccuggagcagcagcagcugccacgacggcaaggccuggcugcacgugugcaucaccggcgacgacaagaacgccaccgccagcuucaucuacaacggcagacugguggacagcaucgugagcuggagcaaggagauccugagaacccaggagagcgagugcgugugcaucaacggcaccugcaccguggugaugaccgacggcagcgccagcggcaaggccgacaccaagauccuguucaucgaggagggcaagaucgugcacaccagcacccugagcggcagcgcccagcacguggaggagugcagcugcuaccccagauaccccggcgugagaugcgugugcagagacaacuggaagggcagcaacagacccaucguggacaucaacaucaaggaccacagcaucgugagcagcuacgugugcagcggccuggugggcgacacccccagaaagaacgacagcagcagcagcagccacugccuggaccccaacaacgaggagggcggccacggcgugaagggcugggccuucgacgacggcaacgacguguggaugggcagaaccaucagcgagaagagcagacugggcuacgagaccuucaaggugaucgagggcuggagcaaccccaagagcaagcugcagaucaacagacaggugaucguggacagagacaacagaagcggcuacagcggcaucuucagcguggagggcaagagcugcaucaacagaugcuucuacguggagcugaucagaggcagaaaggaggagaccgaggugcuguggaccagcaacagcaucgugguguucugcggcaccagcggcaccuacggcaccggcagcuggcccgacggcgccgacaucaaccugaugcccaucuga

SEQ ID NO: 180972 - RNA, 1410 nt, Artificial Sequence
  derived and/or modified CDS sequence (opt4) from neuraminidase__InfluenzaA__AEK98407
augaaccccaaccagaagaucaucaccaucggcagcgugagccugaccaucagcaccaucugcuucuucaugcagaucgccauccugaucaccaccgugacccugcacuucaagcaguacgaguucaacagcccccccaacaaccaggugaugcugugcgagcccaccaucaucgagagaaacaucaccgagaucguguaccugaccaacaccaccaucgagaaggagaucugccccaagcuggccgaguacagaaacuggagcaagccccagugcgacaucaccggcuucgcccccuucagcaaggacaacagcaucagacugagcgccggcggcgacaucugggugaccagagagcccuacgugagcugcgaccccgacaagugcuaccaguucgcccugggccagggcaccacccugaacaacgugcacagcaacaacaccgugagagugagaacccccuacagaacccugcugaugaacgagcugggcgugcccuuccaccugggcaccaagcaggugugcaucgccuggagcagcagcagcugccacgacggcaaggccuggcugcacgugugcaucaccggcgacgacaagaacgccaccgccagcuucaucuacaacggcagacugguggacagcaucgugagcuggagcaaggagauccugagaacccaggagagcgagugcgugugcaucaacggcaccugcaccguggugaugaccgacggcagcgccagcggcaaggccgacaccaagauccuguucaucgaggagggcaagaucgugcacaccagcacccugagcggcagcgcccagcacguggaggagugcagcugcuaccccagauaccccggcgugagaugcgugugcagagacaacuggaagggcagcaacagacccaucguggacaucaacaucaaggaccacagcaucgugagcagcuacgugugcagcggccuggugggcgacacccccagaaagaacgacagcagcagcagcagccacugccuggaccccaacaacgaggagggcggccacggcgugaagggcugggccuucgacgacggcaacgacguguggaugggcagaaccaucagcgagaagagcagacugggcuacgagaccuucaaggugaucgagggcuggagcaaccccaagagcaagcugcagaucaacagacaggugaucguggacagagacaacagaagcggcuacagcggcaucuucagcguggagggcaagagcugcaucaacagaugcuucuacguggagcugaucagaggcagaaaggaggagaccgaggugcuguggaccagcaacagcaucgugguguucugcggcaccagcggcaccuacggcaccggcagcuggcccgacggcgccgacaucaaccugaugcccaucuga

SEQ ID NO: 180973 - RNA, 1410 nt, Artificial Sequence; identical to SEQ ID NO: 174387
  derived and/or modified CDS sequence (opt4) from neuraminidase__InfluenzaA__AEL11690

SEQ ID NO: 180974 - RNA, 1410 nt, Artificial Sequence; identical to SEQ ID NO: 179073
  derived and/or modified CDS sequence (opt4) from neuraminidase__InfluenzaA__AEL89300

SEQ ID NO: 180975 - RNA, 1410 nt, Artificial Sequence; identical to SEQ ID NO: 179073
  derived and/or modified CDS sequence (opt4) from neuraminidase__InfluenzaA__AEL89310

SEQ ID NO: 180976 - RNA, 1410 nt, Artificial Sequence; identical to SEQ ID NO: 179073
  derived and/or modified CDS sequence (opt4) from neuraminidase__InfluenzaA__AEL89320

SEQ ID NO: 180977 - RNA, 1410 nt, Artificial Sequence; identical to SEQ ID NO: 179073
  derived and/or modified CDS sequence (opt4) from neuraminidase__InfluenzaA__AEL89330

SEQ ID NO: 180978 - RNA, 1410 nt, Artificial Sequence; identical to SEQ ID NO: 179073
  derived and/or modified CDS sequence (opt4) from neuraminidase__InfluenzaA__AEL89340

SEQ ID NO: 180979 - RNA, 1410 nt, Artificial Sequence; identical to SEQ ID NO: 179073
  derived and/or modified CDS sequence (opt4) from neuraminidase__InfluenzaA__AEL89350

SEQ ID NO: 180980 - RNA, 1410 nt, Artificial Sequence; identical to SEQ ID NO: 179073
  derived and/or modified CDS sequence (opt4) from neuraminidase__InfluenzaA__AEL89360

SEQ ID NO: 180981 - RNA, 1410 nt, Artificial Sequence; identical to SEQ ID NO: 179073
  derived and/or modified CDS sequence (opt4) from neuraminidase__InfluenzaA__AEL89370

SEQ ID NO: 180982 - RNA, 1410 nt, Artificial Sequence; identical to SEQ ID NO: 179073
  derived and/or modified CDS sequence (opt4) from neuraminidase__InfluenzaA__AEL89394

SEQ ID NO: 180983 - RNA, 1410 nt, Artificial Sequence; identical to SEQ ID NO: 179073
  derived and/or modified CDS sequence (opt4) from neuraminidase__InfluenzaA__AEL89404

SEQ ID NO: 180984 - RNA, 1410 nt, Artificial Sequence; identical to SEQ ID NO: 179073
  derived and/or modified CDS sequence (opt4) from neuraminidase__InfluenzaA__AEL89414

SEQ ID NO: 180985 - RNA, 1410 nt, Artificial Sequence; identical to SEQ ID NO: 179073
  derived and/or modified CDS sequence (opt4) from neuraminidase__InfluenzaA__AEL89424

SEQ ID NO: 180986 - RNA, 1410 nt, Artificial Sequence; identical to SEQ ID NO: 179073
  derived and/or modified CDS sequence (opt4) from neuraminidase__InfluenzaA__AEL89434

SEQ ID NO: 180987 - RNA, 1410 nt, Artificial Sequence; identical to SEQ ID NO: 179073
  derived and/or modified CDS sequence (opt4) from neuraminidase__InfluenzaA__AEL89444

SEQ ID NO: 180988 - RNA, 1410 nt, Artificial Sequence; identical to SEQ ID NO: 179073
  derived and/or modified CDS sequence (opt4) from neuraminidase__InfluenzaA__AEL89454

SEQ ID NO: 180989 - RNA, 1410 nt, Artificial Sequence; identical to SEQ ID NO: 179073
  derived and/or modified CDS sequence (opt4) from neuraminidase__InfluenzaA__AEL89464

SEQ ID NO: 180990 - RNA, 1410 nt, Artificial Sequence; identical to SEQ ID NO: 179073
  derived and/or modified CDS sequence (opt4) from neuraminidase__InfluenzaA__AEL89474

SEQ ID NO: 180991 - RNA, 1410 nt, Artificial Sequence
  derived and/or modified CDS sequence (opt4) from neuraminidase__InfluenzaA__AEL89484
augaaccccaaccagaagaucaucaccaucggcagcgugugcaugaccaucggcauggccaaccugaugcugcagaucggcaacaucaucagcaucuggaucagccacagcauccagcugggcaaccagaaccagaucgagaccugcaaccagagcgugaucaccuacgagaacaacaccugggugaaccagaccuacgugaacaucagcaacaccaacuucgccgccggccagagcguggugagcgugaagcuggccggcaacagcagccugugccccgugagcggcugggccaucuacagcaaggacaacagcaucagaaucggcagcaagggcgacguguucgugaucagagagcccuucaucagcugcagcccccuggagugcagaaccuucuuccugacccagggcgcccugcugaacgacaagcacagcaacggcaccaucaaggacagaagccccuacagaacccugaugagcugccccaucggcgaggugcccagccccuacaacagcagauucgagagcguggccuggagcgccagcgccugccacgacggcaucaacuggcugaccaucggcaucagcggccccgacaacggcgccguggccgugcugaaguacaacggcaucaucaccgacaccaucaagagcuggagaaacaacauccugagaacccaggagagcgagugcgccugcgugaacggcagcugcuucaccgugaugaccgacggccccagcgacggccaggccagcuacaagaucuucagaaucgagaagggcaagaucgugaagagcguggagaucaacgcccccaacuaccacuacgaggagugcagcugcuaccccgacagcagcgagaucaccugcgugugcagagacaacuggcacggcagcaacagacccugggugagcuucaaccagaaccuggaguaccagaucggcuacaucugcagcggcaucuucggcgacaaccccagacccaacgacaagaccggcagcugcggccccgugagcagcaacggcgccaacggcgugaagggcuucagcuucaaguacggcaacggcguguggaucggcagaaccaagagcaucagcagcagaaacggcuucgagaugaucugggaccccaacggcuggaccggcaccgacaacaacuucagcaucaagcaggacaucgugggcaucaacgaguggagcggcuacagcggcagcuucgugcagcaccccgagcugaccggccuggacugcaucagacccugcuucuggguggagcugaucagaggcagacccaaggagaacaccaucuggaccagcggcagcagcaucagcuucugcggcgugaacagcgacaccgugggcuggagcuggcccgacggcgccgagcugcccuucaccaucgacaaguga

SEQ ID NO: 180992 - RNA, 1410 nt, Artificial Sequence; identical to SEQ ID NO: 180862
  derived and/or modified CDS sequence (opt4) from neuraminidase__InfluenzaA__AEL89494

SEQ ID NO: 180993 - RNA, 1410 nt, Artificial Sequence; identical to SEQ ID NO: 180868
  derived and/or modified CDS sequence (opt4) from neuraminidase__InfluenzaA__AEL89514

SEQ ID NO: 180994 - RNA, 1410 nt, Artificial Sequence; identical to SEQ ID NO: 180846
  derived and/or modified CDS sequence (opt4) from neuraminidase__InfluenzaA__AEL89524

SEQ ID NO: 180995 - RNA, 1410 nt, Artificial Sequence
  derived and/or modified CDS sequence (opt4) from neuraminidase__InfluenzaA__AEL89534
augaaccccaaccagaagaucaucaccaucggcagcgugugcaugaccaucggcauggccaaccugauccugcagaucggcaacaucaucagcaucuggaucagccacagcauccagcugggcaaccagaaccagaucggcaccugcaaccagagcgugaucaccuacgagaacaacaccugggugaaccagaccuacgugaacaucagcaacaccaacuucgccgccggccagagcguggugagcgugaagcuggccggcaacagcagccugugccccgugagcggcugggccaucuacagcaaggacaacagcaucagaaucggcagcaagggcgacguguucgugaucagagagcccuucaucagcugcagcccccuggagugcagaaccuucuuccugacccagggcgcccugcugaacgacaagcacagcaacggcaccaucaaggacagaagccccuacagaacccugaugagcugccccaucggcgaggugcccagccccuacaacagcagauucgagagcguggccuggagcgccagcgccugccacgacggcaucaacuggcugaccaucggcaucagcggccccgacaacggcgccguggccgugcugaaguacaacggcaucaucaccgacaccaucaagagcuggagaaacaacauccugagaacccaggagagcgagugcgccugcgugaacggcagcugcuucaccgugaugaccgacggccccagcgacggccaggccagcuacaagaucuucagaaucgagaagggcaagaucgugaagagcguggagaucaacgcccccaacuaccacuacgaggagugcagcugcuaccccgacagcagcgagaucaccugcgugugcagagacaacuggcacggcagcaacagacccugggugagcuucaaccagaaccuggaguaccagaucggcuacaucugcagcggcaucuucggcgacaaccccagacccaacgacaagaccggcagcugcggccccgugagcagcaacggcgccaacggcgugaagggcuucagcuucaaguacggcaacggcguguggaucggcagaaccaagagcaucagcagcagaaacggcuucgagaugaucugggaccccaacggcuggaccggcaccgacaacaacuucagcaagaagcaggacaucgugggcaucaacgaguggagcggcuacagcggcagcuucgugcagcaccccgagcugaccggccuggacugcaucagacccugcuucuggguggagcugaucagaggcagacccaaggagaacaccaucuggaccagcggcagcagcaucagcuucugcggcgugaacagcgacaccgugggcuggagcuggcccgacggcgccgagcugcccuucaccaucgacaaguga

SEQ ID NO: 180996 - RNA, 1410 nt, Artificial Sequence; identical to SEQ ID NO: 180868
  derived and/or modified CDS sequence (opt4) from neuraminidase__InfluenzaA__AEL89544

SEQ ID NO: 180997 - RNA, 1410 nt, Artificial Sequence; identical to SEQ ID NO: 180868
  derived and/or modified CDS sequence (opt4) from neuraminidase__InfluenzaA__AEL89554

SEQ ID NO: 180998 - RNA, 1410 nt, Artificial Sequence
  derived and/or modified CDS sequence (opt4) from neuraminidase__InfluenzaA__AEL89564
augaaccccaaccagaagaucaucaccaucggcagcgugugcaucaccaucggcauggccaaccugauccugcagaucggcaacaucaucagcaucuggaucagccacagcauccagcugggcaaccagaaccagaucgagaccugcaaccagagcguggugaccuacgagaacaacaccugggugaaccagaccuacgugaacaucagcaacaccaacuucgccgccggccagagcguggugagcgugaagcuggccggcaacagcagccugugccccgugagcggcugggccaucuacagcaaggacaacagcaucagaaucggcagcaagggcgacguguucgugaucagagagcccuucaucagcugcagcccccuggagugcagaaccuucuuccugacccagggcgcccugcugaacgacaagcacagcaacggcaccaucaaggacagaagccccuacagaacccugaugagcugccccaucggcgaggugcccagccccuacaacagcagauucgagagcguggccuggagcgccagcgccugccacgacggcaucagcuggcugaccaucggcaucagcggccccgacaacggcgccguggccgugcugaaguacaacggcaucaucaccgacaccaucaagagcuggagaaacaacauccugagaacccaggagagcgagugcgccugcgugaacggcagcugcuucaccgugaugaccgacggccccagcgacggccaggccagcuacaagaucuucagaaucgagaagggcaagaucgugaagagcguggagaugaacgcccccaacuaccacuacgaggagugcagcugcuaccccgacagcagcgagaucaccugcgugugcagagacaacuggcacggcagcaacagacccugggugagcuucaaccagaaccuggaguaccagaucggcuacaucugcagcggcaucuucggcgacaaccccagacccaacgacaagaccggcagcugcggccccgugagcagcaacggcgccaacggcgugaagggcuucagcuucaaguacggcaacggcguguggaucggcagaaccaagagcaucagcagcagaaacggcuucgagaugaucugggaccccaacggcuggaccggcaccgacaacaacuucagcaucaagcaggacaucgugggcaucaacgaguggagcggcuacagcggcagcuucgugcagcaccccgagcugaccggccuggacugcaucagacccugcuucuggguggagcugaucagaggcagacccaaggagaacaccaucuggaccagcggcagcagcaucagcuucugcggcgugaacagcgacaccgugggcuggagcuggcccgacggcgccgagcugcccuucaccaucgacaaguga

SEQ ID NO: 180999 - RNA, 1410 nt, Artificial Sequence; identical to SEQ ID NO: 180868
  derived and/or modified CDS sequence (opt4) from neuraminidase__InfluenzaA__AEL89574

SEQ ID NO: 181000 - RNA, 1410 nt, Artificial Sequence; identical to SEQ ID NO: 180868
  derived and/or modified CDS sequence (opt4) from neuraminidase__InfluenzaA__AEL89584

SEQ ID NO: 181001 - RNA, 1410 nt, Artificial Sequence; identical to SEQ ID NO: 177815
  derived and/or modified CDS sequence (opt4) from neuraminidase__InfluenzaA__AEL89604

SEQ ID NO: 181002 - RNA, 1410 nt, Artificial Sequence; identical to SEQ ID NO: 180317
  derived and/or modified CDS sequence (opt4) from neuraminidase__InfluenzaA__AEL89624

SEQ ID NO: 181003 - RNA, 1410 nt, Artificial Sequence
  derived and/or modified CDS sequence (opt4) from neuraminidase__InfluenzaA__AEL89634
augaaccccaaccagaagaucaucaccaucggcagcgugugcaucaccaucggcauggccaaccugauccugcagaucggcaacaucaucagcaucuggaucagccacagcauccagcugggcaaccagaaccagaucgagaccugcaaccagagcgugaucaccuacgagaacaacaccugggugaaccagaccuacgugaacaucagcaacaccaacuucgccgccggccagagcguggugagcgugaagcuggccggcaacagcagccugugccccgugagcggcugggccaucuacagcaaggacaacagcaucagaaucggcagcaagggcgacguguucgugaucagagagcccuucaucagcugcagcccccuggagugcagaaccuucuuccugacccagggcgcccugcugaacgacaagcacagcaacggcaccaucaaggacagaagccccuacagaacccugaugagcugccccaucggcgaggugcccagccccuacaacagcagauucgagagcguggccuggagcgccagcgccugccacgacggcaucagcuggcugaccaucggcaucagcggccccgacaacggcgccguggccgugcugaaguacaacggcaucaucaccgacaccaucaagagcuggagaaacaacauccugagaacccaggagagcgagugcgccugcgugaacggcagcugcuucaccgugaugaccgacggccccagcgacggccaggccagcuacaagaucuucagaaucgagaagggcaagaucgugaagagcguggagaugaacgcccccaacuaccacuacgaggagugcagcugcuaccccgacagcagcgagaucaccugcgugugcagagacaacuggcacggcagcaacagacccugggugagcuucaaccagaaccuggaguaccagaucggcuacaucugcagcggcaucuucggcgacaaccccagacccaacgacaagaccggcagcugcggccccgugagcagcaacggcgccaacggcgugaagggcuucagcuacaaguacggcaacggcguguggaucggcagaaccaagagcaucagcagcagaaacggcuucgagaugaucugggaccccaacggcuggaccggcaccgacaacaacuucagcaucaagcaggacaucgugggcaucaacgaguggagcggcuacagcggcagcuucgugcagcaccccgagcugaccggccuggacugcaucagacccugcuucuggguggagcugaucagaggcagacccaaggagaacaccaucuggaccagcggcagcagcaucagcuucugcggcgugaacagcgacaccgugggcuggagcuggcccgacggcgccgagcugcccuucaccaucgacaaguga

SEQ ID NO: 181004 - RNA, 1410 nt, Artificial Sequence; identical to SEQ ID NO: 179073
  derived and/or modified CDS sequence (opt4) from neuraminidase__InfluenzaA__AEL89644

SEQ ID NO: 181005 - RNA, 1410 nt, Artificial Sequence; identical to SEQ ID NO: 180769
  derived and/or modified CDS sequence (opt4) from neuraminidase__InfluenzaA__AEL89654

SEQ ID NO: 181006 - RNA, 1410 nt, Artificial Sequence; identical to SEQ ID NO: 180317
  derived and/or modified CDS sequence (opt4) from neuraminidase__InfluenzaA__AEL89664

SEQ ID NO: 181007 - RNA, 1410 nt, Artificial Sequence; identical to SEQ ID NO: 180317
  derived and/or modified CDS sequence (opt4) from neuraminidase__InfluenzaA__AEL89674

SEQ ID NO: 181008 - RNA, 1410 nt, Artificial Sequence; identical to SEQ ID NO: 180317
  derived and/or modified CDS sequence (opt4) from neuraminidase__InfluenzaA__AEL89694

SEQ ID NO: 181009 - RNA, 1410 nt, Artificial Sequence
  derived and/or modified CDS sequence (opt4) from neuraminidase__InfluenzaA__AEL89704
augaaccccaaccagaagaucaucaccaucggcagcgugugcaugaccaucggcauggccaaccugauccugcagaucggcaacaucauccugaucuggaucagccacagcauccagcugggcaaccagaaccagaucgagaccugcaaccagagcgugaucaccuacgagaacaacaccugggugaaccagaccuacgugaacaucagcaacaccaacuucgccgccggccagagcguggugagcgugaagcuggccggcaacagcagccugugccccgugagcggcugggccaucuacagcaaggacaacagcaucagaaucggcagcaagggcgacguguucgugaucagagagcccuucaucagcugcagcccccuggagugcagaaccuucuuccugacccagggcgcccugcugaacgacaagcacagcaacggcaccaucaaggacagaagccccuacagaacccugaugagcugccccaucggcgaggugcccagccccuacaacagcagauucgagagcguggccuggagcgccagcgccugccacgacggcaucaacuggcugaccaucggcaucagcggccccgacaacggcgccguggccgugcugaaguacaacggcaucaucaccgacaccaucaagagcuggagaaacaacauccugagaacccaggagagcgagugcgccugcgugaacggcagcugcuucaccgugaugaccgacggccccaacgacggccaggccagcuacaagaucuucagaaucgagaagggcaagaucgugaagagcguggagaugaacgcccccaacuaccacuacgaggagugcagcugcuaccccgacagcagcgagaucaccugcgugugcagagacaacuggcacggcagcaacagacccugggugagcuucaaccagaaccuggaguaccagaucggcuacaucugcagcggcaucuucggcgacaaccccagacccaacgacaagaccggcagcugcggccccgugagcagcaacggcgccaacggcgugaagggcuucagcuucaaguacggcaacggcguguggaucggcagaaccaagagcaucagcagcagaaacggcuucgagaugaucugggaccccaacggcuggaccggcaccgacaacaacuucagcgugaagcaggacaucaucggcaucaacgaguggagcggcuacagcggcagcuucgugcagcaccccgagcugaccggccuggacugcaucagacccugcuucuggguggagcugaucagaggcagacccaaggagaacaccaucuggaccagcggcagcagcaucagcuucugcggcgugaacagcgacaccgugggcuggagcuggcccgacggcgccgagcugcccuucaccaucgacaaguga

SEQ ID NO: 181010 - RNA, 1410 nt, Artificial Sequence; identical to SEQ ID NO: 181009
  derived and/or modified CDS sequence (opt4) from neuraminidase__InfluenzaA__AEL89714

SEQ ID NO: 181011 - RNA, 1410 nt, Artificial Sequence; identical to SEQ ID NO: 180317
  derived and/or modified CDS sequence (opt4) from neuraminidase__InfluenzaA__AEL89744

SEQ ID NO: 181012 - RNA, 1410 nt, Artificial Sequence
  derived and/or modified CDS sequence (opt4) from neuraminidase__InfluenzaA__AEL89754
augaaccccaaccagaagaucaucaccaucggcagcgugugcaucaccaucggcauggccaaccugauccugcagaucggcaacaucaucagcaucuggaucagccacagcauccagcugggcaaccagaaccagaucgagaccugcaaccagagcgugaucaccuacgagaacaacaccugggugaaccagaccuacgugaacaucagcaacaccaacuucgccgccggccagagcguggugagcgugaagcuggccggcaacagcagccugugccccgugagcggcugggccaucuacagcaaggacaacagcaucagaaucggcagcaagggcgacguguucgugaucagagagcccuucaucagcugcagcccccuggagugcagaaccuucuuccugacccagggcgcccugcugaacgacaagcacagcaacggcaccaucaaggacagaagccccuacagaacccugaugagcugccccaucggcgaggugcccagccccuacaacagcagauucgagagcguggccuggagcgccagcgccugccacgacggcaucagcuggcugaccaucggcaucagcggccccgacaacggcgccguggccgugcugaaguacaacggcaucaucaccgacaccaucaagagcuggagaaacaacauccugagaacccaggagagcgagugcgccugcgugaacggcagcugcuucaccgugaugaccgacggccccagcgacggccaggccagcuacaagaucuucagaaucgagaagggcaagaucgugaagagcguggagaugaacgcccccaacuaccacuacgaggagugcagcugcuaccccgacagcagcgagaucaccugcgugugcagagacaacuggcacggcagcaacagacccugggugagcuucaaccagaaccuggaguaccagaucggcuacaucugcagcggcaucuucggcgacaaccccagacccaacgacaagaccggcagcugcggccccgugagcagcaacggcgccaacggcgugaagggcuucagcuucaaguacggcaacggcguguggaucggcagaaccaagagcaucagcagcagaaacggcuucgagaugaucugggaccccaacggcuggaccggcaccgacaacaacuucagcaucaagcaggacaucgugggcaucaacgaguggagcggcuacagcggcagcuucgugcagcaccccgagcugaccggccuggacugcaucagacccugcuucuggguggagcugaucagaggcagacccaaggagaacaccaucuggaccagcggcagcagcaucagcuucugcggcgugaacagcgacaccgugggcuggagcuggcccgacggcgccgagcugcccuucaucaucgacaaguga

SEQ ID NO: 181013 - RNA, 1410 nt, Artificial Sequence; identical to SEQ ID NO: 179073
  derived and/or modified CDS sequence (opt4) from neuraminidase__InfluenzaA__AEL89774

SEQ ID NO: 181014 - RNA, 1410 nt, Artificial Sequence
  derived and/or modified CDS sequence (opt4) from neuraminidase__InfluenzaA__AEL89784
augaaccccaaccagaagaucaucaccaucggcagcgugugcaugaccaucggcauggccaaccugauccugcagaucggcaacaucaucagcaucuggaucagccacagcauccagcugggcaaccagaaccagaucgagaccugcaaccagagcgugaucaccuacgagaacaacaccugggugaaccagaccuacgugaacaucagcaacaccaacuucgccgccggccagagcguggugagcgugaagcuggccggcaacagcagccugugccccgugagcggcugggccaucuacagcaaggacaacagcaucagaaucggcagcaagggcgacguguucgugaucagagagcccuucaucagcugcagcccccuggagugcagaaccuucuuccugacccagggcgcccugcugaacgacaagcacagcaacggcaccaucaaggacagaagccccuacagaacccugaugagcugccccaucggcgaggugcccagccccuacaacagcagauucgagagcguggccuggagcgccagcgccugccacgacggcaucaacuggcugaccaucggcaucagcggccccgacaacggcgccguggccgugcugaaguacaacggcaucaucaccgacaccaucaagagcuggagaaacaacauccugagaacccaggagagcgagugcgccugcgugaacggcagcugcuucaccgugaugaccgacggccccagcgacggccaggccagcuacaagaucuucagaaucgagaagggcaagaucgugaagagcguggagaugaacgcccccaacuaccacuacgaggagugcagcugcuaccccgacagcagcgagaucaccugcgugugcagagacaacuggcacggcagcaacagacccugggugagcuucaaccagaaccuggaguaccagaucggcuacaucugcagcggcaucuucggcgacaaccccagacccaacgacaagaccggcagcugcggccccgugagcagcaacggcgccaacggcgugaagggcuucagcuucaaguacggcaacggcguguggaucggcagaaccaagagcaucagccugagaaacggcuucgagaugaucugggaccccaacggcuggaccggcaccgacaacaacuucagcgugaagcaggacaucaucggcaucaacgaguggagcggcuacagcggcagcuucgugcagcaccccgagcugaccggccuggacugcaucagacccugcuucuggguggagcugaucagaggcagacccaaggagaacaccaucuggaccagcggcagcagcaucagcuucugcggcgugaacagcgacaccgugggcuggagcuggcccgacggcgccgagcugcccuucaccaucgacaaguga

SEQ ID NO: 181015 - RNA, 1410 nt, Artificial Sequence
  derived and/or modified CDS sequence (opt4) from neuraminidase__InfluenzaA__AEL89794
augaaccccaaccagaagaucaucaccaucggcagcgugugcaugaccaucggcauggccaaccugauccugcagaucggcaacaucaucagcaucuggaucagccacagcauccagcugggcaaccagagccagaucgagaccugcaaccagagcgugaucaccuacgagaacaacaccugggugaaccagaccuacgugaacaucagcaacaccaacuucgccgccggccagagcguggugagcgugaagcuggccggcaacagcagccugugccccgugagcggcugggccaucuacagcaaggacaacagcaucagaaucggcagcaagggcgacguguucgugaucagagagcccuucaucagcugcagcccccuggagugcagaaccuucuuccugacccagggcgcccugcugaacgacaagcacagcaacggcaccaucaaggacagaagccccuacagaacccugaugagcugccccaucggcgaggugcccagccccuacaacagcagauucgagagcguggccuggagcgccagcgccugccacgacggcaucaacuggcugaccaucggcaucagcggccccgacaacggcgccguggccgugcugaaguacaacggcaucaucaccgacaccaucaagagcuggagaaacaacauccugagaacccaggagagcgagugcgccugcgugaacggcagcugcuucaccaucaugaccgacggccccagcgacggccaggccagcuacaagaucuucagaaucgagaagggcaagaucgugaagagcguggagaugaacgcccccaacuaccacuacgaggagugcagcugcuaccccgacagcagcgagaucaccugcgugugcagagacaacuggcacggcagcaacagacccugggugagcuucaaccagaaccuggaguaccagaucggcuacaucugcagcggcaucuucggcgacaaccccagacccaacgacaagaccggcagcugcggccccgugagcagcaacggcgccaacggcgugaagggcuucagcuucaaguacggcaacggcguguggaucggcagaaccaagagcaucagcagcagaaagggcuucgagaugaucugggaccccaacggcuggaccggcaccgacaacaacuucagcaucaagcaggacaucgugggcaucaacgaguggagcggcuacagcggcagcuucgugcagcaccccgagcugaccggccuggacugcaucagacccugcuucuggguggagcugaucagaggcagacccaaggagaacaccaucuggaccagcggcagcagcaucagcuucugcggcgugaacagcgacgccgugggcuggagcuggcccgacggcgccgagcugcccuucaccaucgacaaguga

SEQ ID NO: 181016 - RNA, 1410 nt, Artificial Sequence; identical to SEQ ID NO: 180769
  derived and/or modified CDS sequence (opt4) from neuraminidase__InfluenzaA__AEL89804

SEQ ID NO: 181017 - RNA, 1410 nt, Artificial Sequence
  derived and/or modified CDS sequence (opt4) from neuraminidase__InfluenzaA__AEL89815
augaaccccaaccagaagaucaucaccaucggcagcgugugcaugaccaucggcauggccaaccugauccugcagaucggcaacaucaucagcaucuggaucagccacagcauccagcugggcaaccagaaccagaucgagaccugcaaccagagcgugaucaccuacgagaacaacaccugggugaaccagaccuacgugaacaucagcaacaccaacuucgccgccggccagagcguggugagcgugaagcuggccggcaacagcagccugugccccgugagcggcugggccaucuacagcaaggacaacagcaucagaaucggcagcaagggcgacguguucgugaucagagagcccuucaucagcugcagcccccuggagugcagaaccuucuuccugacccagggcgcccugcugaacgacaagcacagcaacggcaccaucaaggacagaagccccuacagaacccugaugagcugccccaucggcgaggugcccagccccuacaacagcagauucgagagcguggccuggagcgccagcgccugccacgacggcaucaacuggcugaccaucggcaucagcggccccgacaacggcgccguggccgugcugaaguacaacggcaucaucaccgacaccaucaagagcuggagaaacaacauccugagaacccaggagagcgagugcgccugcgugaacggcagcugcuucaccgugaugaccgacggccccagcgacggccaggccagcuacaagaucuucagaaucgagaagggcaagaucgugaagagcguggagaugaacgcccccaacuaccacuacgaggagugcagcugcuaccccgacagcagcgagaucaccugcgugugcagagacaacuggcacggcagcaacagacccugggugagcuucaaccagaaccuggaguaccagaucggcuacaucugcagcggcaucuucggcgacaaccccagacccaacgacaagaccggcagcugcggccccgugagcagcaacggcgccaacggcgugaagggcuucagcuucaaguacggcaacggcguguggaucggcagaaccaagagcaucagcagcagaaacggcuucgagaugaucugggaccccaacggcuggaccggcaccgacaacaacuucagcgugaagcaggacaucaucggcaucaacgaguggagcggcuacagcggcagcuucgugcagcaccccgagcugaccggccuggacugcaucagacccugcuucuggguggagcugaucagaggcagacccaaggagaacaccaucuggaccagcggcagcagcaucagcuucugcggcgugaacagcgacaccgugggcuggagcuggcccgacggcgccgagcugcccuucaccaucgacaaguga

SEQ ID NO: 181018 - RNA, 1410 nt, Artificial Sequence
  derived and/or modified CDS sequence (opt4) from neuraminidase__InfluenzaA__AEL89825
augaaccccaaccagaagaucaucaccaucggcagcgugugcaugaccaucggcauggccaaccugauccugcagaucggcaacaucaucagcaucuggaucagccacagcauccagcugggcaaccagaaccagaucgagaccugcaaccagagcgugaucaccuacgagaacaacaccugggugaaccagaccuacgugaacaucagcaacaccaacuucgccgccggccagagcguggugagcgugaagcuggccggcaacagcagccugugccccgugagcggcugggccaucuacagcaaggacaacagcaucagaaucggcagcaagggcgacguguucgugaucagagagcccuucaucagcugcagcccccuggagugcagaaccuucuuccugacccagggcgcccugcugaacgacaagcacagcaacggcaccaucaaggacagaagccccuacagaacccugaugagcugccccaucggcgaggugcccagccccuacaacagcagauucgagagcguggccuggagcgccagcgccugccacgacggcaucaacuggcugaccaucggcaucagcggccccgacaacggcgccguggccgugcugaaguacaacggcaucaucaccgacaccaucaagagcuggagaaacaacauccugagaacccaggagagcgagugcgccugcgugaacggcagcugcuucaccgugaugaccgacggccccagcgacggccaggccagcuacaagaucuucagaaucgagaagggcaagaucgugaagagcguggagaugaacgcccccaacuaccacuacgaggagugcagcugcuaccccgacagcagcgagaucaccugcgugugcagagacaacuggcacggcgccaacagacccugggugagcuucaaccagaaccuggaguaccagaucggcuacaucugcagcggcaucuucggcgacaaccccagacccaacgacaagaccggcagcugcggccccgugagcagcaacggcgccaacggcgugaagggcuucagcuucaaguacggcaacggcguguggaucggcagaaccaagagcaucagcagcagaaacggcuucgagaugaucugggaccccaacggcuggaccggcaccgacaacaacuucagcaucaagcaggacaucgugggcaucaacgaguggagcggcuacagcggcagcuucgugcagcaccccgagcugaccggccuggacugcaucagacccugcuucuggguggagcugaucagaggcagacccaaggagaacaccaucuggaccagcggcagcagcaucagcuucugcggcgugaacagcgacaccgugggcuggagcuggcccgacggcgccgagcugcccuucaccaucgacaaguga

SEQ ID NO: 181019 - RNA, 1410 nt, Artificial Sequence
  derived and/or modified CDS sequence (opt4) from neuraminidase__InfluenzaA__AEL89835
augaaccccaaccagaagaucaucaccaucggcagcgugugcaugaccaucggcauggccaaccugauccugcagaucggcaacaucaucagcaucuggaucagccacagcauccagcugggcaaccagagccagaucgagaccugcaaccagagcgugaucaccuacgagaacaacaccugggugaaccagaccuacgugaacaucagcaacaccaacuucgccgccggccagagcguggugagcgugaagcuggccggcaacagcagccugugccccgugagcggcugggccaucuacagcaaggacaacagcaucagaaucggcagcaagggcgacguguucgugaucagagagcccuucaucagcugcagcccccuggagugcagaaccuucuuccugacccagggcgcccugcugaacgacaagcacagcaacggcaccaucaaggacagaagccccuacagaacccugaugagcugccccaucggcgaggugcccagccccuacaacagcagauucgagagcguggccuggagcgccagcgccugccacgacggcaucaacuggcugaccaucggcaucagcggccccgacaacggcgccguggccgugcugaaguacaacggcaucaucaccgacaccaucaagagcuggagaaacaacauccugagaacccaggagagcgagugcgugugcgugaacggcagcugcuucaccaucaugaccgacggccccagcgacggccaggccagcuacaagaucuucagaaucgagaagggcaagaucgugaagagcguggagaugaacgcccccaacuaccacuacgaggagugcagcugcuaccccgacagcagcgagaucaccugcgugugcagagacaacuggcacggcagcaacagacccugggugagcuucaaccagaaccuggaguaccagaucggcuacaucugcagcggcaucuucggcgacaaccccagacccaacgacaagaccggcagcugcggccccgugagcagcaacggcgccaacggcgugaagggcuucagcuucaaguacggcaacggcguguggaucggcagaaccaagagcaucagcagcagaaagggcuucgagaugaucugggaccccaacggcuggaccggcaccgacaacaacuucagcaucaagcaggacaucgugggcaucaacgaguggagcggcuacagcggcagcuucgugcagcaccccgagcugaccggccuggacugcaucagacccugcuucuggguggagcugaucagaggcagacccaaggagaacaccaucuggaccagcggcagcagcaucagcuucugcggcgugaacagcgacaccgugggcuggagcuggcccgacggcgccgagcugcccuucaccaucgacaaguga

SEQ ID NO: 181020 - RNA, 1410 nt, Artificial Sequence
  derived and/or modified CDS sequence (opt4) from neuraminidase__InfluenzaA__AEL89845
augaaccccaaccagaagaucaucaccaucggcagcgugugcaugaccaucggcauggccaaccugauccugcagaucggcaacaucaucagcaucuggaucagccacagcauccagcugggcaacaagaaccagaucgagaccugcaaccagagcgugaucaccuacgagaacaacaccugggugaaccagaccuacgugaacaucagcaacaccaacuucgccaccggccagagcguggugagcgugaagcuggccggcaacagcagccugugccccgugagcggcugggccaucuacagcaaggacaacagcaucagaaucggcagcaagggcgacguguucgugaucagagagcccuucaucagcugcagcccccuggagugcagaaccuucuuccugacccagggcgcccugcugaacgacaagcacagcaacggcaccaucaaggacagaagccccuacagaacccugaugagcugccccaucggcgaggcccccagccccuacaacagcagauucgagagcguggccuggagcgccagcgccugccacgacggcaucaacuggcugaccaucggcaucagcggccccgacaacggcgccguggccgugcugaaguacaacggcaucaucaccgacaccaucaagagcuggagaaacaacauccugagaacccaggagagcgagugcgccugcgugaacggcagcugcuucaccgugaugaccgacggccccagcgacggccaggccagcuacaagaucuucagaaucgagaagggcaagaucgugaagagcguggagaugaacgcccccaacuaccacuacgaggagugcagcugcuaccccgacagcagcgagaucaccugcgugugcagagacaacuggcacggcagcaacagacccugggugagcuucaaccagaaccuggaguaccagaucggcuacaucugcagcggcaucuucggcgacaaccccagacccaacgacaagaagggcagcugcggccccgugagcagcaacggcgccaacggcgugaagggcuucagcuucaaguacggcaacggcguguggaucggcagaaccaagagcaucagcagcagaaacggcuucgagaugaucugggaccccaacggcuggaccggcaccgacaacaacuucagcaucaagcaggacaucgugggcaucaacgaguggagcggcuacagcggcagcuucgugcagcaccccgagcugaccggccuggacugcaucagacccugcuucuggguggagcugaucagaggcagacccaaggagaacaccaucuggaccagcggcagcagcaucagcuucugcggcgugaacagcgacaccgugggcuggagcuggcccgacggcgccgagcugcccuucaccaucgacaaguga

SEQ ID NO: 181021 - RNA, 1410 nt, Artificial Sequence; identical to SEQ ID NO: 181018
  derived and/or modified CDS sequence (opt4) from neuraminidase__InfluenzaA__AEL89855

SEQ ID NO: 181022 - RNA, 1410 nt, Artificial Sequence; identical to SEQ ID NO: 180317
  derived and/or modified CDS sequence (opt4) from neuraminidase__InfluenzaA__AEL93581

SEQ ID NO: 181023 - RNA, 1410 nt, Artificial Sequence
  derived and/or modified CDS sequence (opt4) from neuraminidase__InfluenzaA__AEL93591
augaaccccaaccagaagaucaucaccaucggcagcgugugcaugaccaucggcauggccaaccugauccugcagaucggcaacaucaucagcaucuggaucagccacagcauccagcugggcaaccagaaccagaucgagaccugcaaccagagcgugaucaccuacgagaacaacaccugggugaaccagaccuacgugaacaucagcaacaccaacuucgccgccggccagagcguggugagcgugaaccuggccggcaacagcagccugugccccgugagcggcugggccaucuacagcaaggacaacagcaucagaaucggcagcaagggcgacguguucgugaucagagagcccuucaucagcugcagcccccuggagugcagaaccuucuuccugacccagggcgcccugcugaacgacaagcacagcaacggcaccaucaaggacagaagccccuacagaacccugaugagcugccccaucggcgaggugcccagccccuacaacagcagauucgagagcguggccuggagcgccagcgccugccacgacggcaucaacuggcugaccaucggcaucagcggccccgacaacggcgccguggccgugcugaaguacaacggcaucaucaccgacaccaucaagagcuggagaaacaacauccugagaacccaggagagcgagugcgccugcgugaacggcagcugcuucaccaucaugaccgacggccccagcgacggccaggccagcuacaagaucuucagaaucgagaagggcaagaucgugaagagcguggagaugaacgcccccaacuaccacuacgaggagugcagcugcuaccccgacagcagcgagaucaccugcgugugcagagacaacuggcacggcagcaacagacccugggugagcuucaaccagaaccuggaguaccagaucggcuacaucugcagcggcaucuucggcgacaaccccagacccaacgacaagaccggcagcugcggccccgugagcagcaacggcgccaacggcgugaagggcuucagcuucaaguacggcaacggcguguggaucggcagaaccaagagcaucagcagcagaaagggcuucgagaugaucugggaccccaacggcuggaccggcaccgacaacaacuucagcaucaagcaggacaucgugggcaucaacgaguggagcggcuacagcggcagcuucgugcagcaccccgagcugaccggccuggacugcaucagacccugcuucuggguggagcugaucagaggcagacccaaggagaacaccaucuggaccagcggcagcagcaucagcuucugcggcgugaacagcgacaccgugggcuggagcuggcccgacggcgccgagcugcccuucaccaucgacaaguga

SEQ ID NO: 181024 - RNA, 1410 nt, Artificial Sequence; identical to SEQ ID NO: 180769
  derived and/or modified CDS sequence (opt4) from neuraminidase__InfluenzaA__AEL93601

SEQ ID NO: 181025 - RNA, 1410 nt, Artificial Sequence; identical to SEQ ID NO: 180317
  derived and/or modified CDS sequence (opt4) from neuraminidase__InfluenzaA__AEL93611

SEQ ID NO: 181026 - RNA, 1410 nt, Artificial Sequence; identical to SEQ ID NO: 180317
  derived and/or modified CDS sequence (opt4) from neuraminidase__InfluenzaA__AEL93621

SEQ ID NO: 181027 - RNA, 1410 nt, Artificial Sequence; identical to SEQ ID NO: 180317
  derived and/or modified CDS sequence (opt4) from neuraminidase__InfluenzaA__AEL93631

SEQ ID NO: 181028 - RNA, 1410 nt, Artificial Sequence
  derived and/or modified CDS sequence (opt4) from neuraminidase__InfluenzaA__AEL93641
augaaccccaaccagaagaucaucaccaucggcagcgugugcaucaccaucggcauggccaaccugauccugcagaucggcaacaucaucagcaucuggaucagccacagcauccagcugggcaaccagaaccagaucgagaccugcaaccagagcgugaucaccuacgagaacaacaccugggugaaccagaccuacgugaacaucagcaacaccaacuucgccgccggccagagcguggugagcgugaagcuggccggcaacagcagccugugccccgugagcggcugggccaucuacagcaaggacaacagcaucagaaucggcagcaagggcgacguguucgugaucagagagcccuucaucagcugcagcccccuggagugcagaaccuucuuccugacccagggcgcccugcugaacgacaagcacagcaacggcaccaucaaggacagaagccccuacagaacccugaugagcugccccaucggcgaggugcccagccccuacaacagcagauucgagagcguggccuggagcgccagcgccugccacgacggcaucagcuggcugaccaucggcaucagcggccccgacaacggcgccguggccgugcugaaguacaacggcaucaucaccgacaccaucaagagcuggagaaacaacauccugagaacccaggagagcgagugcgccugcgugaacggcagcugcuucaccgugaugaccgacggccccagcgacggccaggccagcuacaagaucuucagaaucgagaagggcaagaucgugaagagcguggagaugaacgcccccaacuaccacuacgaggagugcagcugcuaccccgacagcagcgagaucaccugcgugugcagagacaacuggcacggcagcaacagacccugggugagcuucaaccacaaccuggaguaccagaucggcuacaucugcagcggcaucuucggcgacaaccccagacccaacgacaagaccggcagcugcggccccgugagcagcaacggcgccaacggcgugaagggcuucagcuucaaguacggcaacggcguguggaucggcagaaccaagagcaucagcagcagaaacggcuucgagaugaucugggaccccaacggcuggaccggcaccgacaacaacuucagcaucaagcaggacaucgugggcaucaacgaguggagcggcuacagcggcagcuucgugcagcaccccgagcugaccggccuggacugcaucagacccugcuucuggguggagcugaucagaggccagcccaaggagaacaccaucuggaccagcggcagcagcaucagcuucugcggcgugaacagcgacaccgugggcuggagcuggcccgacggcgccgagcugcccuucaccaucgacaaguga

SEQ ID NO: 181029 - RNA, 1410 nt, Artificial Sequence; identical to SEQ ID NO: 180868
  derived and/or modified CDS sequence (opt4) from neuraminidase__InfluenzaA__AEL94890

SEQ ID NO: 181030 - RNA, 1410 nt, Artificial Sequence
  derived and/or modified CDS sequence (opt4) from neuraminidase__InfluenzaA__AEL95429
augaaccccaaccagaagaucaucaccaucggcagcgugugcaugaccaucggcauggccaaccugauccugcagaucggcaacaucaucagcaucuggaucagccacagcauccagcugggcaaccagagccagaucgagaccugcaaccagagcgugaucaccuacgagaacaacaccugggugaaccagaccuacgugaacaucagcaacaccaacuucgccgccggccagagcguggugagcgugaagcuggccggcaacagcagccugugccccgugagcggcugggccaucuacagcaaggacaacagcaucagaaucggcagcaagggcgacguguucgugaucagagagcccuucaucagcugcagcccccuggagugcagaaccuucuuccugacccagggcgcccugcugaacgacaagcacagcaacggcaccaucaaggacagaagcccccacagaacccugaugagcugccccaucggcgaggugcccagccccuacaacagcagauucgagagcguggccuggagcgccagcgccugccacgacggcaucaacuggcugaccaucggcaucagcggccccgacaacggcgccguggccgugcugaaguacaacggcaucaucaccgacaccaucaagagcuggagaaacaacauccugagaacccaggagagcgagugcgccugcgugaacggcagcugcuucaccaucaugaccgacggccccagcgacggccaggccagcuacaagaucuucagaaucgagaagggcaagaucgugaagagcguggagaugaacgcccccaacuaccacuacgaggagugcagcugcuaccccgacagcagcgagaucaccugcgugugcagagacaacuggcacggcagcaacagacccugggugagcuucaaccagaaccuggaguaccagaucggcuacaucugcagcggcaucuucggcgacaaccccagacccaacgacaagaccggcagcugcggccccgugagcagcaacggcgccaacggcgugaagggcuucagcuucaaguacggcaacggcguguggaucggcagaaccaagagcaucagcagcagaaagggcuucgagaugaucugggaccccaacggcuggaccggcaccgacaacaacuucagcaucaagcaggacaucgugggcaucaacgaguggagcggcuacagcggcagcuucgugcagcaccccgagcugaccggccuggacugcaucagacccugcuucuggguggagcugaucagaggcagacccaaggagaacaccaucuggaccagcggcagcagcaucagcuucugcggcgugaacagcgacaccgugggcuggagcuggcccgacggcgccgagcugcccuucaccaucgacaaguga

SEQ ID NO: 181031 - RNA, 1410 nt, Artificial Sequence
  derived and/or modified CDS sequence (opt4) from neuraminidase__InfluenzaA__AEL97634
augaaccccaaccagaagaucaucaccaucggcagcgugugcaugaccaucggcauggccaaccugauccugcagaucggcaacaucaucagcaucugggugagccacagcauccagcugggcaaccagaaccagaucgagaccugcaaccagagcgugaucaccuacgagaacaacaccugggugaaccagaccuacgugaacaucagcaacaccaacuucgccgccggccagagcguggugagcgugaagcuggccggcaacagcagccugugccccgugagcggcugggccaucuacagcaaggacaacagcaucagaaucggcagcaagggcgacguguucgugaucagagagcccuucaucagcugcagcccccuggagugcagaaccuucuuccugacccagggcgcccugcugaacgacaagcacagcaacggcaccaucaaggacagaagccccuacagaacccugaugagcugccccaucggcgaggugcccagccccuacaacagcagauucgagagcguggccuggagcgccagcgccugccacgacggcaucaacuggcugaccaucggcaucagcggccccgacaacggcgccguggccgugcugaaguacaacggcaucaucaccgacaccaucaagagcuggagaaacaacauccugagaacccaggagagcgagugcgccugcgugaacggcagcugcuucaccgugaugaccgacggccccagcgacggccaggccagcuacaagaucuucagaaucgagaagggcaagaucgugaagagcguggagaugaacgcccccaacuaccacuacgaggagugcagcugcuaccccgacagcagcgagaucaccugcgugugcagagacaacuggcacggcagcaacagacccugggugagcuucaaccagaaccuggaguaccagaucggcuacaucugcagcggcaucuucggcgacaaccccagacccaacgacaagaccggcagcugcggccccgugagcagcaacggcgccaacggcgugaagggcuucagcuucaaguacggcaacggcguguggaucggcagaaccaagagcaucagcagcagaaacggcuucgagaugaucugggaccccaacggcuggaccggcaccgacaacaacuucagcaucaagcaggacaucgugggcgugaacgaguggagcggcuacagcggcagcuucgugcagcaccccgagcugaccggccuggacugcaucagacccugcuucuggguggagcugaucagaggcagacccaaggagaacaccaucuggaccagcggcagcagcaucagcuucugcggcgugaacagcgacaccgugggcuggagcuggcccgacggcgccgagcugcccuucaccaucgacaaguga

SEQ ID NO: 181032 - RNA, 1410 nt, Artificial Sequence; identical to SEQ ID NO: 176798
  derived and/or modified CDS sequence (opt4) from neuraminidase__InfluenzaA__AEL99667

SEQ ID NO: 181033 - RNA, 1410 nt, Artificial Sequence; identical to SEQ ID NO: 176798
  derived and/or modified CDS sequence (opt4) from neuraminidase__InfluenzaA__AEL99677

SEQ ID NO: 181034 - RNA, 1410 nt, Artificial Sequence; identical to SEQ ID NO: 175836
  derived and/or modified CDS sequence (opt4) from neuraminidase__InfluenzaA__AEM53471

SEQ ID NO: 181035 - RNA, 1413 nt, Artificial Sequence; identical to SEQ ID NO: 176513
  derived and/or modified CDS sequence (opt4) from neuraminidase__InfluenzaA__AEM60040

SEQ ID NO: 181036 - RNA, 1413 nt, Artificial Sequence; identical to SEQ ID NO: 176103
  derived and/or modified CDS sequence (opt4) from neuraminidase__InfluenzaA__AEM60061

SEQ ID NO: 181037 - RNA, 1410 nt, Artificial Sequence
  derived and/or modified CDS sequence (opt4) from neuraminidase__InfluenzaA__AEM60072
augaaccccaaccagaagaucaucaccaucggcagcgugagccugaccaucgccaccaucugcuuccugaugcagaucgccauccuggugaccaccgugacccugcacuucaagcaguacgagugcagcagcccccccaacaaccaggugaugcccugcgagcccaccaucaucgagagaaacaucaccgagaucguguaccugaccaacaccaccaucgagaaggagaucugccccaagcugguggaguacagaaacuggagcaagccccagugcaagaucaccggcuucgcccccuucagcaaggacaacagcaucagacugagcgccggcggcgacaucugggugaccagagagcccuacgugagcugcgaccccggcaagugcuaccaguucgcccugggccagggcaccacccugaacaacagacacagcaacgacaccgugcacgacagaacccccuacagaacccugcugaugaacgagcugggcgugcccuuccaccugggcaccaagcaggugugcaucgccuggagcagcagcagcugccacgacggcaaggccuggcugcacgugugcgugaccggccacgacgagaacgccaccgccagcuucaucuacgacggcagacugguggacagcaucggcagcuggagcaagaacauccugagaacccaggagagcgagugcgugugcaucaacggcaccugcaccguggugaugaccgacggcagcgccagcgagagagccgacaccaagauccuguucaucgaggagggcaagaucgugcacaucagcccccugagcggcagcgcccagcacguggaggagugcagcugcuaccccagauaccccggcgugagaugcgugugcagagacaacuggaagggcagcaacagacccaucguggacaucaacgugaaggacuacagcaucgugagcagcuacgugugcagcggccuggugggcgacacccccagaaagaacgacagaagcagcagcagcuacugcagaaaccccaacaacgagaagggcagccacggcgugaagggcugggccuucgacgacggcaacgacguguggaugggcagaaccaucggcgaggagcugagaagcggcuacgagaccuucaaggugaucggcggcuggagcacccccaacagcaagcugcagaucaacagacaggugaucguggacagcggcaacagaagcggcuacagcggcaucuucagcguggagggcaagagcugcaucaacagaugcuucuacguggagcugaucagaggcagagagcaggagaccagagugugguggaccagcaacagcaucgugguguucugcggcaccagcggcaccuacggcaccggcagcuggcccgacggcgccgacaucaaccugaugcccaucuga

SEQ ID NO: 181038 - RNA, 1410 nt, Artificial Sequence; identical to SEQ ID NO: 176798
  derived and/or modified CDS sequence (opt4) from neuraminidase__InfluenzaA__AEM62774

SEQ ID NO: 181039 - RNA, 1410 nt, Artificial Sequence; identical to SEQ ID NO: 176798
  derived and/or modified CDS sequence (opt4) from neuraminidase__InfluenzaA__AEM62783

SEQ ID NO: 181040 - RNA, 1410 nt, Artificial Sequence
  derived and/or modified CDS sequence (opt4) from neuraminidase__InfluenzaA__AEM62792
augaaccccaaccagaagaucaucaccaucggcagcgugugcaugaccaucggcauggccaaccugauccugcagaucggcaacaucaucagcaucuggaucagccacagcauccagcugggcagccagaaccagaucgagaccugcaaccagagcgugaucaccuacgagaacaacaccugggugaaccagaccuacgugaacaucagcaacaccaacuucgccgccggccagagcgugaucagcgugagacuggccggcaacagcagccugugccccgugagcggcugggccaucuacagcaaggacaacagcaucagaaucggcagcaagggcgacguguucgugaucagagagcccuucaucagcugcagcccccuggagugcagaaccuucuuccugacccagggcgcccugcugaacgacaagcacagcaacggcaccaucaaggacagaagccccuacagaacccugaugagcugccccaucggcgaggugcccagccccuacaacagcagauucgagagcguggccuggagcgccagcgccugccacgacggcaucaacuggcugaccaucggcaucagcggccccgacaacggcgccguggccgugcugaaguacaacggcaucaucaccgacaccaucaagagcuggagaaacaacauccugagaacccaggagagcgagugcgccugcgugaacggcagcugcuucaccgugaugaccgacggccccagcgacggccaggccagcuacaagaucuucagaaucgagaagggcaagaucgugaagagcguggagaugaacgcccccaacuaccacuacgaggagugcagcugcuaccccgacagcagcgagaucaccugcgugugcagagacaacuggcacggcagcaacagacccugggugagcuucaaccagaaccuggaguaccagaucggcuacaucugcagcggcaucuucggcgacaaccccagacccaacgacaagaccggcagcugcggccccgugagcagcaacggcgccaacggcgugaagggcuucagcuucaaguacggcaacggcguguggaucggcagaaccaagagcaucagcagcagaaacggcuucgagaugaucugggaccccaacggcuggaccggcaccgacaacaacuucagcaucaagcaggacaucaucggcaucaacgaguggagcggcuacagcggcagcuucgugcagcaccccgagcugaccggccuggacugcaucagacccugcuucuggguggagcugaucagaggcagacccaaggagaacaccaucuggaccagcggcagcagcaucagcuucugcggcgugaacagcgacaccgugggcuggagcuggcccgacggcgccgagcugcccuucaccaucgacaaguga

SEQ ID NO: 181041 - RNA, 1410 nt, Artificial Sequence; identical to SEQ ID NO: 176798
  derived and/or modified CDS sequence (opt4) from neuraminidase__InfluenzaA__AEM62801

SEQ ID NO: 181042 - RNA, 1410 nt, Artificial Sequence
  derived and/or modified CDS sequence (opt4) from neuraminidase__InfluenzaA__AEM62810
augaaccccaaccagaagaucaucaccaucggcagcgugugcaugaccaucggcaugggcaaccugauccugcagaucggcaacaucaucagcaucuggaucagccacagcauccagcugggcaaccagaaccagaucgagaccugcaaccagagcgugaucaccuacgagaacaacaccugggugaaccagaccuacgugaacaucagcaacaccaacuucgccgccggccagagcguggugagcgugaagcuggccggcaacagcagccugugccccgugagcggcugggccaucuacagcaaggacaacagcaucagaaucggcagcaagggcgacguguucgugaucagagagcccuucaucagcugcagcccccuggagugcagaaccuucuuccugacccagggcgcccugcugaacgacaagcacagcaacggcaccaucaaggacagaagccccuacagaacccugaugagcugccccaucggcgaggugcccagccccuacaacagcagauucgagagcguggccuggagcgccagcgccugccacgacggcaucaacuggcugaccaucggcaucagcggccccgacaacggcgccguggccgugcugaaguacaacggcaucaucaccgacaccaucaagagcuggagaaacaacauccugagaacccaggagagcgagugcgccugcgugaacggcagcugcuucaccgugaugaccgacggccccagcgacggccaggccagcuacaagaucuucagaaucgagaagggcaagaucgugaagagcguggagaugaacgcccccaacuaccacuacgaggagugcagcugcuaccccgacagcagcgagaucaccugcgugugcagagacaacuggcacggcagcaacagacccugggugagcuucaaccagaaccuggaguaccagaucggcuacaucugcagcggcaucuucggcgacaaccccagacccaacgacaagaccggcagcugcggccccgugagcagcaacggcgccaacggcgugaagggcuucagcuucaaguacggcaacggcguguggaucggcagaaccaagagcaucagcagcagaaacggcuucgagaugaucugggaccccaacggcuggaccggcaccgacaacaacuucagcaucaagcaggacaucgugggcaucaacgaguggagcggcuacagcggcagcuucgugcagcaccccgagcugaccggccuggacugcaucagacccugcuucuggguggagcugaucagaggcagacccaaggagaacaccaucuggaccagcggcagcagcaucagcuucugcggcgugaacagcgacaccgugggcuggagcuggcccgacggcgccgagcugcccuucaccaucgacaaguga

SEQ ID NO: 181043 - RNA, 1410 nt, Artificial Sequence
  derived and/or modified CDS sequence (opt4) from neuraminidase__InfluenzaA__AEM62819
augaaccccaaccagaagaucaucaccaucggcagcgugugcaugaccaucggcauggccaaccugauccugcagaucggcaacaucaucagcaucuggaucagccacagcauccagcugggcaaccagaaccagaucgagaccugcaaccagagcgugaucaccuacgagaacgacaccugggugaaccagaccuacgugaacaucagcaacaccaacuucgccgccggccagagcguggugagcgugaagcuggccggcaacagcagccugugccccgugagcggcugggccaucuacagcaaggacaacagcaucagaaucggcagcaagggcgacguguucgugaucagagagcccuucaucagcugcagcccccuggagugcagaaccuucuuccugacccagggcgcccugcugaacgacaagcacagcaacggcaccaucaaggacagaagccccuacagaacccugaugagcugccccaucggcgaggugcccagccccuacaacagcagauucgagagcguggccuggagcgccagcgccugccacgacggcaucaacuggcugaccaucggcaucagcggccccgacaacggcgccguggccgugcugaaguacaacggcaucaucaccgacaccaucaagagcuggagaaacaacauccugagaacccaggagagcgagugcgccugcgugaacggcagcugcuucaccgugaugaccgacggccccagcgacggccaggccagcuacaagaucuucagaaucgagaagggcaagaucgugaagagcguggagaugaacgcccccaacuaccacuacgaggagugcagcugcuaccccgacagcagcgagaucaccugcgugugcagagacaacuggcacggcagcaacagacccugggugagcuucaaccagaaccuggaguaccagaucggcuacaucugcagcggcaucuucggcgacaaccccagacccaacgacaagaccggcagcugcggccccgugagcagcaacggcgccaacggcgugaagggcuucagcuucaaguacggcaacggcguguggaucggcagaaccaagagcaucagcagcagaaacggcuucgagaugaucugggaccccaacggcuggaccggcaccgacaacaacuucagcaucaagcaggacaucgugggcaucaacgaguggagcggcuacagcggcagcuucgugcagcaccccgagcugaccggccuggacugcaucagacccugcuucuggguggagcugaucagaggcagacccaaggagaacaccaucuggaccagcggcagcagcaucagcuucugcggcgugaacagcgacaccgugggcuggagcuggcccgacggcgccgagcugcccuucaccaucgacaaguga

SEQ ID NO: 181044 - RNA, 1410 nt, Artificial Sequence; identical to SEQ ID NO: 176798
  derived and/or modified CDS sequence (opt4) from neuraminidase__InfluenzaA__AEM62828

SEQ ID NO: 181045 - RNA, 1410 nt, Artificial Sequence; identical to SEQ ID NO: 177381
  derived and/or modified CDS sequence (opt4) from neuraminidase__InfluenzaA__AEM62837

SEQ ID NO: 181046 - RNA, 1410 nt, Artificial Sequence; identical to SEQ ID NO: 176798
  derived and/or modified CDS sequence (opt4) from neuraminidase__InfluenzaA__AEM62846

SEQ ID NO: 181047 - RNA, 1410 nt, Artificial Sequence
  derived and/or modified CDS sequence (opt4) from neuraminidase__InfluenzaA__AEM62855
augaaccccaaccagaagaucaucaccaucggcagcgugugcaucaccaucggcauggccaaccugauccugcagaucggcaacaucaucagcaucuggaucagccacagcauccagcugggcaaccagaaccagaucgagaccugcaaccagagcgugaucaccuacgagaacaacaccugggugaaccagaccuacgugaacaucagcaacaccaacuucgccgccggccagagcguggugagcgugaagcuggccggcaacagcagccugugccccgugagcggcugggccaucuacagcaaggacaacagcgugagaaucggcagcaagggcgacguguucgugaucagagagcccuucaucagcugcagcccccuggagugcagaaccuucuuccugacccagggcgcccugcugaacgacaagcacagcaacggcaccaucaaggacagaagccccuacagaacccugaugagcugccccaucggcgaggugcccagccccuacaacagcagauucgagagcguggccuggagcgccagcgccugccacgacggcaucaacuggcugaccaucggcaucagcggccccgacaacggcgccguggccgugcugaaguacaacggcaucaucaccgacaccaucaagagcuggagaaacaacauccugagaacccaggagagcgagugcgccugcgugaacggcagcugcuucaccgugaugaccgacggccccagcaacggccaggccagcuacaagaucuucagaaucgagaagggcaagaucgugaagagcguggagaugaacgcccccaacuaccacuacgaggagugcagcugcuaccccgacagcggcgagaucaccugcgugugcagagacaacuggcacggcagcaacagacccugggugagcuucaaccagaaccuggaguaccagaucggcuacaucugcagcggcaucuucggcgacaaccccagacccaacgacaagaccggcagcugcggccccgugagcagcaacggcgccaacggcgugaagggcuucagcuucaaguacggcaacggcguguggaucggcagaaccaagagcaucagcagcagaaacggcuucgagaugaucugggaccccaacggcuggaccggcaccgacaacaacuucagcaucaagcaggacaucgugggcaucaacgaguggagcggcuacagcggcagcuucgugcagcaccccgagcugaccggccuggacugcaucagacccugcuucuggguggagcugaucagaggcagacccaaggagaacaccaucuggaccagcggcagcagcaucagcuucugcggcgugaacagcgacaccgugggcuggagcuggcccgacggcgccgagcugcccuucaccaucgacaaguga

SEQ ID NO: 181048 - RNA, 1410 nt, Artificial Sequence
  derived and/or modified CDS sequence (opt4) from neuraminidase__InfluenzaA__AEM62864
augaaccccaaccagaagaucaucaccaucggcagcgugugcaugaccaucggcauggccaaccugauccugcagaucggcaacaucaucagcaucuggaucagccacagcauccagcugggcaaccagaaccagaucgagaccugcaaccagagcgugaucaccuacgagaacaacaccugggugaaccagaccuacgugaacaucagcaacaccaacuucgccgccggccagagcguggugagcgugaagcuggccggcaacagcagccugugccccgugagcggcugggccaucuacagcaaggacaacagcaucagaaucggcagcaagggcgacguguucgugaucagagagcccuucaucagcugcagcccccuggagugcagaaccuucuuccugacccagggcgcccugcugaacgacaagcacagcaacggcaccaucaaggacagaagccccuacagaacccugaugagcugccccaucggcgaggugcccagccccuacaacagcagauucgagagcguggccuggagcgccagcgccugccacgacggcaucaacuggcugaccaucggcaucuucggccccgacaacggcgccguggccgugcugaaguacaacggcaucaucaccgacaccaucaagagcuggagaaacaacauccugagaacccaggagagcgagugcgccugcgugaacggcagcugcuucaccgugaugaccgacggccccagcgacggccaggccagcuacaagaucuucagaaucgagaagggcaagaucgugaagagcguggagaugaacgcccccaacuaccacuacgaggagugcagcugcuaccccgacagcagcgagaucaccugcgugugcagagacaacuggcacggcagcaacagacccugggugagcuucaaccagaaccuggaguaccagaucggcuacaucugcagcggcaucuucggcgacaaccccagacccaacgacaagaccggcagcugcggccccgugagcagcaacggcgccaacggcgugaagggcuucagcuucaaguacggcaacggcguguggaucggcagaaccaagagcaucagcagcagaaacggcuucgagaugaucugggaccccaacggcuggaccggcaccgacaacaacuucagcaucaagcaggacaucgugggcaucaacgaguggagcggcuacagcggcagcuucgugcagcaccccgagcugaccggccuggacugcaucagacccugcuucuggguggagcugaucagaggcagacccaaggagaacaccaucuggaccagcggcagcagcaucagcuucugcggcgugaacagcgacaccgugggcuggagcuggcccgacggcgccgagcugcccuucaccaucgacaaguga

SEQ ID NO: 181049 - RNA, 1410 nt, Artificial Sequence
  derived and/or modified CDS sequence (opt4) from neuraminidase__InfluenzaA__AEM62872
augaaccccaaccagaagaucaucaccaucggcagcgugugcaugaccaucggcauggccaaccugauccugcagaucggcaacaucaucagcaucuggaucagccacagcauccagcugggcaaccagaaccagaucgagaccugcaaccagagcgugaucaccuacgagaacaacaccugggugaaccagaccuacgugaacaucagcaacaccaacuucgccgccggccagagcguggugagcgugaagcuggccggcaacagcagccugugccccgugagcggcugggccaucuacagcaaggacaacagcaucagaaucggcagcaagggcgacguguucgugaucagagagcccuucaucagcugcagcccccuggagugcagaaccuucuuccugacccagggcgcccugcugaacgacaagcacagcaacggcaccaucaaggacagaagccccuacagaacccugaugagcugccccaucggcgaggugcccagccccuacaacagcagauucgagagcguggccuggagcgccagcgccugccacgacggcaucaacuggcugaccaucggcaucagcggccccgacaacggcgccguggccgugcugaaguacaacggcaucaucaccgacaccaucaagagcuggagaaacaacauccugagaacccaggagagcgagugcgccugcgugaacggcagcugcuucaccgugaugaccgacggccccagcgacggccaggccagcuacaagaucuucagaaucgagaagggcaagaucgugaagagcguggagaugaacgcccccaacuaccacuacgaggagugcagcugcuaccccgacagcagcgagaucaccugcgugugcagagacaacuggcacggcagcaacagacccugggugagcuucaaccagaaccuggaguaccagaucggcuacaucugcagcggcaucuucggcgacaaccccagacccaacgacaagaccggcagcugcggccccgugagcuucaacggcgccaacggcgugaagggcuucagcuucaaguacggcaacggcguguggaucggcagaaccaagagcaucagcagcagaaacggcuucgagaugaucugggaccccaacggcuggaccggcaccgacaacaacuucagcaucaagcaggacaucgugggcaucaacgaguggagcggcuacagcggcagcuucgugcagcaccccgagcugaccggccuggacugcaucagacccugcuucuggguggagcugaucagaggcagacccaaggagaacaccaucuggaccagcggcagcagcaucagcuucugcggcgugaacagcgacaccgugggcuggagcuggcccgacggcgccgagcugcccuucaccaucgacaaguga

SEQ ID NO: 181050 - RNA, 1410 nt, Artificial Sequence; identical to SEQ ID NO: 176798
  derived and/or modified CDS sequence (opt4) from neuraminidase__InfluenzaA__AEM92310

SEQ ID NO: 181051 - RNA, 1410 nt, Artificial Sequence; identical to SEQ ID NO: 178260
  derived and/or modified CDS sequence (opt4) from neuraminidase__InfluenzaA__AEM92320

SEQ ID NO: 181052 - RNA, 1410 nt, Artificial Sequence
  derived and/or modified CDS sequence (opt4) from neuraminidase__InfluenzaA__AEM92340
augaaccccaaccagaagaucaucaccaucggcagcgugugcaugaccaucggcauggccaaccugauccugcagaucggcaacaucaucagcaucuggaucagccacagcauccagcugggcaaccagaaccagaucgagaccugcaaccagagcgugaucaccuacgagaacaacaccugggugaaccagaccuacgugaacaucagcaacaccaacuucgccgccggccagagcguggugagcgugaagcuggccggcaacagcagccugugccccgugagcggcugggccaucuacagcaaggacaacagcaucagaaucggcagcaagggcgacguguucgugaucagagagcccuucaucagcugcagcccccuggagugcagaaccuucuuccugacccagggcgcccugcugaacgacaagcacagcaacggcaccaucaaggacagaagccccuacagaacccugaugagcugccccaucggcgaggugcccagccccuacaacagcagauucgagagcguggccuggagcgccagcgccugccacgacggcaucaacuggcugaccaucggcaucagcggccccgacaacggcgccguggccgugcugaaguacaacggcaucaucaccgacaccaucaagagcuggagaaacaacauccugagaacccaggagagcgagugcgccugcgugaacggcagcugcuucaccaucaugaccgacggccccagcgacggccaggccagcuacaagaucuucagaaucgagaagggcaagaucgugaagagcguggagaugaacgcccccaacuaccacuacgaggagugcagcugcuaccccgacagcagcgagaucaccugcgugugcagagacaacuggcacggcagcaacagacccugggugagcuucaaccagaaccuggaguaccagaucggcuacaucugcagcggcaucuucggcgacaaccccagacccaacgacaagaccggcagcugcggccccgugagcagcaacggcgccaacggcgugaagggcuucagcuucaaguacggcaacggcguguggaucggcagaaccaagagcaucagcagcagaaagggcuucgagaugaucugggaccccaacggcuggaccagaaccgacaacaacuucagcaucaagcaggacaucgugggcaucaacgaguggagcggcuacagcggcagcuucgugcagcaccccgagcugaccggccuggacugcaucagacccugcuucuggguggagcugaucagaggcagacccaaggagaacaccaucuggaccagcggcagcagcaucagcuucugcggcgugaacagcgacaccgugggcuggagcuggcccgacggcgccgagcugcccuucaccaucgacaaguga

SEQ ID NO: 181053 - RNA, 1410 nt, Artificial Sequence; identical to SEQ ID NO: 178260
  derived and/or modified CDS sequence (opt4) from neuraminidase__InfluenzaA__AEM92350

SEQ ID NO: 181054 - RNA, 1410 nt, Artificial Sequence
  derived and/or modified CDS sequence (opt4) from neuraminidase__InfluenzaA__AEM92360
augaaccccaaccagaagaucaucaccaucggcagcgugugcaugaccaucggcauggccaaccugauccugcagaucggcaacaucaucagcaucuggaucagccacagcauccagcugggcaaccagaaccagaucgagaccugcaaccagagcgugaucaccuacgagaacaacaccugggugaaccagaccuacgugaacaucagcaacaccaacuucgccgccgagcagagcguggugagcgugaagcuggccggcaacagcagccugugccccgugagcggcugggccaucuacagcaaggacaacagcaucagaaucggcagcaagggcgacguguucgugaucagagagcccuucaucagcugcagcccccuggagugcagaaccuucuuccugacccagggcgcccugcugaacgacaagcacagcaacggcaccaucaaggacagaagccccuacagaacccugaugagcugccccaucggcgaggugcccagccccuacaacagcagauucgagagcguggccuggagcgccagcgccugccacgacggcaucaacuggcugaccaucggcaucagcggccccgacaacggcgccguggccgugcugaaguacaacggcaucaucaccgacaccaucaagagcuggagaaacaacauccugagaacccaggagagcgagugcgccugcgugaacggcagcugcuucaccaucaugaccgacggccccagcgacggccaggccagcuacaagaucuucagaaucgagaagggcaagaucgugaagagcguggagaugaacgcccccaacuaccacuacgaggagugcagcugcuaccccgacagcagcgagaucaccugcgugugcagagacaacuggcacggcagcaacagacccugggugagcuucaaccagaaccuggaguaccagaucggcuacaucugcagcggcaucuucggcgacaaccccagacccaacgacaagaccggcagcugcggccccgugagcagcaacggcgccaacggcgugaagggcuucagcuucaaguacggcaacggcguguggaucggcagaaccaagagcaucagcagcagaaagggcuucgagaugaucugggaccccaacggcuggaccggcaccgacaacaacuucagcaucaagcaggacaucgugggcaucaacgaguggagcggcuacagcggcagcuucgugcagcaccccgagcugaccggccuggacugcaucagacccugcuucuggguggagcugaucagaggcagacccaaggagaacaccaucuggaccagcggcagcagcaucagcuucugcggcgugaacagcgacaccgugggcuggagcuggcccgacggcgccgagcugcccuucaccaucgacaaguga

SEQ ID NO: 181055 - RNA, 1410 nt, Artificial Sequence; identical to SEQ ID NO: 181052
  derived and/or modified CDS sequence (opt4) from neuraminidase__InfluenzaA__AEM92370

SEQ ID NO: 181056 - RNA, 1410 nt, Artificial Sequence; identical to SEQ ID NO: 181052
  derived and/or modified CDS sequence (opt4) from neuraminidase__InfluenzaA__AEM92380

SEQ ID NO: 181057 - RNA, 1410 nt, Artificial Sequence
  derived and/or modified CDS sequence (opt4) from neuraminidase__InfluenzaA__AEM92399
augaaccccaaccagaagaucaucaccaucggcagcgugugcaugaccaucggcauggccaaccugauccugcagaucggcaacaucaucagcaucuggaucagccacagcauccagcugggcaaccagaaccagaucgagaccugcaaccagagcgugaucaccuacgagaacaacaccugggugaaccagaccuacgugaacaucagcaacaccaacuucgccgccggccagagcguggugagcgugaagcuggccggcaacagcagccugugccccgugagcggcugggccaucuacagcaaggacaacagcaucagaaucggcagcaagggcgacguguucgugaucagagagcccuucaucagcugcagcccccuggagugcagaaccuucuuccugacccagggcgcccugcugaacgacaagcacagcaacggcaccaucaaggacagaagccccuacagaacccugaugagcugccccaucggcgaggugcccagccccuacaacagcagauucgagagcguggccuggagcgccagcgccugccacgacggcaccaacuggcugaccaucggcaucagcggccccgacaacggcgccguggccgugcugaaguacaacggcaucaucaccgacaccaucaagagcuggagaaacaacauccugagaacccaggagagcgagugcgccugcgugaacggcagcugcuucaccgugaugaccgacggccccagcgacggccaggccagcuacaagaucuucagaaucgagaagggcaagaucgugaagagcguggagaugaacgcccccaacuaccacuacgaggagugcagcugcuaccccgacagcagcgagaucaccugcgugugcagagacaacuggcacggcagcaacagacccugggugagcuucaaccagaaccuggaguaccagaucggcuacaucugcagcggcaucuucggcgacaaccccagacccaacgacaagaccggcagcugcggccccgugcugagcaacggcgccaacggcgugaagggcuucagcuucaaguacggcaacggcguguggaucggcagaaccaagagcaucagcagcagaaacggcuucgagaugaucugggaccccaacggcuggaccggcaccgacaacaacuucagcaucaagcaggacaucgugggcaucaacgaguggagcggcuacagcggcagcuucgugcagcaccccgagcugaccggccuggacugcaucagacccugcuucuggguggagcugaucagaggcagacccaaggagaacaccaucuggaccagcggcagcagcaucagcuucugcggcgugaacagcgacaccgugggcuggagcuggcccgacggcgccgagcugcccuucaccaucgacaaguga

SEQ ID NO: 181058 - RNA, 1410 nt, Artificial Sequence; identical to SEQ ID NO: 181057
  derived and/or modified CDS sequence (opt4) from neuraminidase__InfluenzaA__AEM92409

SEQ ID NO: 181059 - RNA, 1410 nt, Artificial Sequence; identical to SEQ ID NO: 177222
  derived and/or modified CDS sequence (opt4) from neuraminidase__InfluenzaA__AEM92419

SEQ ID NO: 181060 - RNA, 1410 nt, Artificial Sequence
  derived and/or modified CDS sequence (opt4) from neuraminidase__InfluenzaA__AEM92430
augaaccccaaccagaagaucaugaccaucggcagcgugugcaugaccaucggcauggccaaccugauccugcagaucggcaacaucaucagcaucuggaucagccacagcauccagcugggcaaccagaaccagaucgagaccugcaaccagagcgugaucaccuacgagaacaacaccugggugaaccagaccuacgugaacaucagcaacaccaacuucgccgccggccagagcguggugagcgugaagcuggccggcaacagcagccugugccccgugagcggcugggccaucuacagcaaggacaacagcaucagaaucggcagcaagggcgacguguucgugaucagagagcccuucaucagcugcagcccccuggagugcagaaccuucuuccugacccagggcgcccugcugaacgacaagcacagcaacggcaccaucaaggacagaagccccuacagaacccugaugagcugccccaucggcgaggugcccagccccuacaacagcagauucgagagcguggccuggagcgccagcgccugccacgacggcaucaacuggcugaccaucggcaucagcggccccgacaacggcgccguggccgugcugaaguacaacggcaucaucaccgacaccaucaagagcuggagaaacaacauccugagaacccaggagagcgagugcgccugcgugaacggcagcugcuucaccgugaugaccgacggccccagcgacggccaggccagcuacaagaucuucagaaucgagaagggcaagaucgugaagagcguggagaugaacgcccccaacuaccacuacgaggagugcagcugcuaccccgacagcagcgagaucaccugcgugugcagagacaacuggcacggcagcaacagacccugggugagcuucaaccagaaccuggaguaccagaucggcuacaucugcagcggcaucuucggcgacaaccccagacccaacgacaagaccggcagcugcggccccgugagcagcaacggcgccaacggcgugaagggcuucagcuucaaguacggcaacggcguguggaucggcagaaccaagagcaucagcagcagaaacggcuucgagaugaucugggaccccaacggcuggaccggcaccgacaacaacuucagcaucaagcaggacaucgugggcaucaacgaguggagcggcuacagcggcagcuucgugcagcaccccgagcugaccggccuggacugcaucagacccugcuucuggguggagcugaucagaggcagacccaaggagaacaccaucuggaccagcggcagcagcaucagcuucugcggcgugaacagcgacaccgugggcuggagcuggcccgacggcgccgagcugcccuucaccaucgacaaguga

SEQ ID NO: 181061 - RNA, 1410 nt, Artificial Sequence
  derived and/or modified CDS sequence (opt4) from neuraminidase__InfluenzaA__AEM92440
augaaccccaaccagaagaucaucaccaucggcagcgugugcaucaccaucggcauggccaaccugauccugcagaucggcaacaucaucagcaucuggaucagccacagcauccagcugggcaaccagagccagaucgagaccugcaaccagagcgugaucaccuacgagaacaacaccugggugaaccagaccuacgugaacaucagcaacaccaacuucgccgccggccagagcguggugagcgugaagcuggccggcaacagcagccugugccccgugagcggcugggccaucuacagcaaggacaacagcaucagaaucggcagcaagggcgacguguucgugaucagagagcccuucaucagcugcagcccccuggagugcagaaccuucuuccugacccagggcgcccugcugaacgacaagcacagcaacggcaccaucaaggacagaagccccuacagaacccugaugagcugccccaucggcgaggugcccagccccuacaacagcagauucgagagcguggccuggagcgccagcgccugccacgacggcaucaacuggcugaccaucggcaucagcggccccgacaacggcgccguggccgugcugaaguacaacggcaucaucaccgacaccaucaagagcuggagaaacaacauccugagaacccaggagagcgagugcgccugcgugaacggcagcugcuucaccaucaugaccgacggccccagcgacggccaggccagcuacaagaucuucagaaucgagaagggcaagaucgugaagagcguggagaugaucgcccccaacuaccacuacgaggagugcagcugcuaccccgacagcagcgagaucaccugcgugugcagagacaacuggcacggcagcaacagacccugggugagcuucaaccagaaccuggaguaccagaucggcuacaucugcagcggcaucuucggcgacaaccccagacccaacgacaagaccggcagcugcggccccgugagcagcaacggcgccaacggcgugaagggcuucagcuucaaguacggcaacggcguguggaucggcagaaccaagagcaucagcagcagaaagggcuucgagaugaucugggaccccaacggcuggaccggcaccgacaacaacuucagcaucaagcaggacaucgugggcaucaacgaguggagcggcuacagcggcagcuucgugcagcaccccgagcugaccggccuggacugcaucagacccugcuucuggguggagcugaucagaggcagacccaaggagaacaccaucuggaccagcggcagcagcaucagcuucugcggcgugaacagcgacaccgugggcuggagcuggcccgacggcgccgagcugcccuucaccaucgacaaguga

SEQ ID NO: 181062 - RNA, 1410 nt, Artificial Sequence; identical to SEQ ID NO: 181018
  derived and/or modified CDS sequence (opt4) from neuraminidase__InfluenzaA__AEM92450

SEQ ID NO: 181063 - RNA, 1410 nt, Artificial Sequence; identical to SEQ ID NO: 181018
  derived and/or modified CDS sequence (opt4) from neuraminidase__InfluenzaA__AEM92460

SEQ ID NO: 181064 - RNA, 1410 nt, Artificial Sequence; identical to SEQ ID NO: 180769
  derived and/or modified CDS sequence (opt4) from neuraminidase__InfluenzaA__AEM92470

SEQ ID NO: 181065 - RNA, 1410 nt, Artificial Sequence; identical to SEQ ID NO: 180769
  derived and/or modified CDS sequence (opt4) from neuraminidase__InfluenzaA__AEM92480

SEQ ID NO: 181066 - RNA, 1410 nt, Artificial Sequence
  derived and/or modified CDS sequence (opt4) from neuraminidase__InfluenzaA__AEM92490
augaaccccaaccagaagaucaucaccaucggcagcgugugcaugaucaucggcauggccaaccugaugcugcagaucggcaacaucaucagcaucuggaucagccacagcauccagcugggcaaccagaaccagaucgagaccugcaaccagagcgugaucaccuacgagaacaacaccugggugaaccagaccuacgugaacaucagcaacaccaacuucgccgccggccagagcguggugagcgugaagcuggccggcaacagcagccugugccccgugagcggcugggccaucuacagcaaggacaacagcaucagaaucggcagcaagggcgacguguucgugaucagagagcccuucaucagcugcagcccccuggagugcagaaccuucuuccugacccagggcgcccugcugaacgacaagcacagcaacggcaccaucaaggacagaagccccuacagaacccugaugagcugccccaucggcgaggugcccagccccuacaacagcagauucgagagcguggccuggagcgccagcgccugccacgacggcaucaacuggcugaccaucggcaucagcggccccgacaacggcgccguggccgugcugaaguacaacggcaucaucaccgacaccaucaagagcuggagaaacaacauccugagaacccaggagagcgagugcgccugcgugaacggcagcugcuucaccaucaugaccgacggccccagcgacggccaggccagcuacaagaucuucagaaucgagaagggcaagaucgugaagagcguggagaugaacgcccccaacuaccacuacgaggagugcagcugcuaccccgacagcagcgagaucaccugcgugugcagagacaacuggcacggcagcaacagacccugggugagcuucaaccagaaccuggaguaccagaucggcuacaucugcagcggcaucuucggcgacaaccccagacccaacgacaagaccggcagcugcggccccgugagcagcaacggcgccaacggcgugaagggcuucagcuucaaguacggcaacggcguguggaucggcagaaccaagagcaucagcagcagaaacggcuucgagaugaucugggaccccaacggcuggaccggcaccgacaacaacuucagcaucaagcaggacaucgugggcaucaacgaguggagcggcuacagcggcagcuucgugcagcaccccgagcugaccggccuggacugcaucagacccugcuucuggguggagcugaucagaggcagacccaaggagaacaccaucuggaccagcggcagcagcaucagcuucugcggcgugaacagcgacaccgugggcuggagcuggcccgacggcgccgagcugcccuucaccaucgacaaguga

SEQ ID NO: 181067 - RNA, 1410 nt, Artificial Sequence
  derived and/or modified CDS sequence (opt4) from neuraminidase__InfluenzaA__AEM92500
augaaccccaaccagaagaucaucaccaucggcagcgugugcaugaucaucggcauggccaaccugaugcugcagaucggcaacaucaucagcaucuggaucagccacagcauccagcugggcaaccagaaccagaucgagaccugcaaccagagcgugaucaccuacgagaacaacaccugggugaaccagaccuacgugaacaucagcaacaccaacuucgccgccggccagagcguggugagcgugaagcuggccggcaacagcagccugugccccgugagcggcugggccaucuacagcaaggacaacagcaucagaaucggcagcaagggcgacguguucgugaucagagagcccuucaucagcugcagcccccuggagugcagaaccuucuuccugacccagggcgcccugcugaacgacaagcacagcaacggcaccaucaaggacagaagccccuacagaacccugaugagcugccccaucggcgaggugcccagccccuacaacagcagauucgagagcguggccuggagcgccagcgccugccacgacggcaucaacuggcugaccaucggcaucagcggccccgacaacggcgccguggccgugcugaaguacaacggcaucaucaccgacaccaucaagagcuggagaaacaacauccugagaacccaggagagcgagugcgccugcgugaacggcagcugcuucaccaucaugaccgacggccccagcgacggccaggccagcuacaagaucuucagaaucgagaagggcaagaucgugaagagcguggagaugaacgcccccaacuaccacuacgaggagugcagcugcuaccccgacagcagcgagaucaccugcgugugcagagacaacuggcacggcagcaacagacccugggugagcuucaaccagaaccuggaguaccagaugggcuacaucugcagcggcaucuucggcgacaaccccagacccaacgacaagaccggcagcugcggccccgugagcagcaacggcgccaacggcgugaagggcuucagcuucaaguacggcaacggcguguggaucggcagaaccaagagcaucagcagcagaaacggcuucgagaugaucugggaccccaacggcuggaccggcaccgacaacaaguucagcaucaagcaggacaucgugggcaucaacgaguggagcggcuacagcggcagcuucgugcagcaccccgagcugaccggccuggacugcaucagacccugcuucuggguggagcugaucagaggcagacccaaggagaacaccaucuggaccagcggcagcagcaucagcuucugcggcgugaacagcgacaccgugggcuggagcuggcccgacggcgccgagcugcccuucaccaucgacaaguga

SEQ ID NO: 181068 - RNA, 1410 nt, Artificial Sequence
  derived and/or modified CDS sequence (opt4) from neuraminidase__InfluenzaA__AEM92520
augaaccccaaccagaagaucaucaccaucggcagcgugugcaugaccaucggcauggccaaccugaugcugcagaucggcaacaucaucagcaucuggaucagccacagcauccagcugggcaaccagaaccagaucgagaccugcaaccagagcgugaucaccuacgagaacaacaccugggugaaccagaccuacgugaacaucagcaacaccaacuucgccgccggccagagcguggugagcgugaagcuggccggcaacagcagccugugccccgugagcggcugggccaucuacagcaaggacaacagcaucagaaucggcagcaagggcgacguguucgugaucagagagcccuucaucagcugcagcccccuggagugcagaaccuucuuccugacccagggcgcccugcugaacgacaagcacagcaacggcaccaucaaggacagaagccccuacagaacccugaugagcugccccaucggcgaggugcccagccccuacaacagcagauucgagagcguggccuggagcgccagcgccugccacgacggcaucaacuggcugaccaucggcaucagcggccccgacaacggcgccguggccgugcugaaguacaacggcaucaucaccgacaccaucaagagcuggagaaacaacauccugagaacccaggagagcgagugcgccugcgugaacggcagcugcuucaccgugaugaccgacggccccagcgacggccaggccagcuacaagaucuucagaaucgagaagggcaagaucgugaagagcguggagaugaacgcccccaacuaccacuacgaggagugcagcugcuaccccgacagcagcgagaucaccugcgugugcagagacaacuggcacggcagcaacagacccugggugagcuucaaccagaaccuggaguaccagaucggcuacaucugcagcggcaucuucggcgacaaccccagacccaacgacaagaccggcagcugcggccccgugagcagcaacggcgccaacggcgugaagggcuucagcuucaaguacggcaacggcguguggaucggcagaaccaagagcaucagcagcagaaacggcuucgagaugaucugggaccccaacggcuggaccggcaccgacaacaacuucagcaucaagcaggacaucaucggcaucaacgaguggagcggcuacagcggcagcuucgugcagcaccccgagcugaccggccuggacugcaucagacccugcuucuggguggagcugaucagaggcagacccaaggagaacaccaucuggaccagcggcagcagcaucagcuucugcggcgugaacagcgacaccgugggcuggagcuggcccgacggcgccgagcugcccuucaccaucgacaaguga

SEQ ID NO: 181069 - RNA, 1410 nt, Artificial Sequence; identical to SEQ ID NO: 180769
  derived and/or modified CDS sequence (opt4) from neuraminidase__InfluenzaA__AEM92550

SEQ ID NO: 181070 - RNA, 1410 nt, Artificial Sequence
  derived and/or modified CDS sequence (opt4) from neuraminidase__InfluenzaA__AEM92570
augaaccccaaccagaagaucaucaccaucggcagcgugugcaugaccaucggcauggccaaccugauccugcagaucggcaacaucaucagcaucuggaucagccacagcauccagcugggcaaccagaaccagaucgagaccugcaaccagagcgugaucaccuacgagaacaacaccugggugaaccagaccuacgugaacaucagcaacaccaacuucgccgccggccagagcguggugagcgugaagcuggccggcaacagcagccugugccccgugagcggcugggccaucuacagcaaggacaacagcaucagaaucggcagcaagggcaacguguucgugaucagagagcccuucaucagcugcagcccccuggagugcagaaccuucuuccugacccagggcgcccugcugaacgacaagcacagcaacggcaccaucaaggacagaagccccuacagaacccugaugagcugccccaucggcgaggugcccagccccuacaacagcagauucgagagcguggccuggagcgccagcgccugccacgacggcaucaacuggcugaccaucggcaucagcggccccgacaacggcgccguggccgugcugaaguacaacggcaucaucaccgacaccaucaagagcuggagaaacaacauccugagaacccaggagagcgagugcgccugcgugaacggcagcugcuucaccaucaugaccgacggccccagcgacggccaggccagcuacaagaucuucagaaucgagaagggcaagaucgugaagagcguggagaugaacgcccccaacuaccacuacgaggagugcagcugcuaccccgacagcagcgagaucaccugcgugugcagagacaacuggcacggcagcaacagacccugggugagcuucaaccagaaccuggaguaccagaucggcuacaucugcagcggcaucuucggcgacaaccccagacccaacgacaagaccggcagcugcggccccgugagcagcaacggcgccaacggcgugaagggcuucagcuucaaguacggcaacggcguguggaucggcagaaccaagagcaucagcagcagaaagggcuucgagaugaucugggaccccaacggcuggaccggcaccgacaacaacuucagcaucaagcaggacaucgugggcaucaacgaguggagcggcuacagcggcagcuucgugcagcaccccgagcugaccggccuggacugcaucagacccugcuucuggguggagcugaucagaggcagacccaaggagaacaccaucuggaccagcggcagcagcaucagcuucugcggcgugaacagcgacaccgugggcuggagcuggcccgacggcgccgagcugcccuucaccaucgacaaguga

SEQ ID NO: 181071 - RNA, 1410 nt, Artificial Sequence
  derived and/or modified CDS sequence (opt4) from neuraminidase__InfluenzaA__AEM92580
augaaccccaaccagaagaucaucaccaucggcagcgugugcaugaccaucggcauggccaaccugauccugcagaucggcaacaucaucagcaucuggaucagccacagcauccagcugggcaaccagaaccagaucgagaccugcaaccagagcgugaucaccuacgagaacaacaccugggugaaccagaccuacgugaacaucagcaacaccaacuucgccgccggccagagcguggugagcgugaagcuggccggcaacagcagccugugccccgugagcggcugggccaucuacagcaaggacaacagcaucagaaucggcagcaagggcgacguguucgugaucagagagcccuucaucagcugcagcccccuggagugcagaaccuucuuccugacccagggcgcccugcugaacgacaagcacagcaacggcaccaucaaggacagaagccccuacagaacccugaugagcugccccaucggcgaggugcccagccccuacaacagcagauucgagagcguggccuggagcgccagcgccugccacgacggcaucaacuggcugaccaucggcaucagcggccccgacaacggcgccguggccgugcugaaguacaacggcaucaucaccgacaccaucaagagcuggagaaacaacauccugagaacccaggagagcgagugcgccugcgugaacggcagcugcuucaccaucaugaccgacggccccagcaacggccaggccagcuacaagaucuucagaaucgagaagggcaagaucgugaagagcguggagaugaacgcccccaacuaccacuacgaggagugcagcugcuaccccgacagcagcgagaucaccugcgugugcagagacaacuggcacggcagcaacagacccugggugagcuucaaccagaaccuggaguaccagaucggcuacaucugcagcggcaucuucggcgacaaccccagacccaacgacaagaccggcagcugcggccccgugagcagcaacggcgccaacggcgugaagggcuucagcuucaaguacggcaacggcguguggaucggcagaaccaagagcaucagcagcagaaagggcuucgagaugaucugggaccccaacggcuggaccggcaccgacaacaacuucagcaucaagcaggacaucgugggcaucaacgaguggagcggcuacagcggcagcuucgugcagcaccccgagcugaccggccuggacugcaucagacccugcuucuggguggagcugaucagaggcagacccaaggagaacaccaucuggaccagcggcagcagcaucagcuucugcggcgugaacagcgacaccgugggcuggagcuggcccgacggcgccgagcugcccuucaccaucgacaaguga

SEQ ID NO: 181072 - RNA, 1410 nt, Artificial Sequence; identical to SEQ ID NO: 180769
  derived and/or modified CDS sequence (opt4) from neuraminidase__InfluenzaA__AEM92590

SEQ ID NO: 181073 - RNA, 1410 nt, Artificial Sequence; identical to SEQ ID NO: 180769
  derived and/or modified CDS sequence (opt4) from neuraminidase__InfluenzaA__AEM92600

SEQ ID NO: 181074 - RNA, 1410 nt, Artificial Sequence
  derived and/or modified CDS sequence (opt4) from neuraminidase__InfluenzaA__AEM92610
augaaccccaaccagaagaucaucaccaucggcagcgugugcaugaccaucggcauggccaaccugaugcugcagaucggcaacaucaucagcaucuggaucagccacagcauccagcugggcaaccagaaccagaucgagaccugcaaccagagcgugaucaccuacgagaacaacaccugggugaaccagaccuacgugaacaucagcaacaccaacuucgccgccggccagagcguggugagcgugaagcuggccggcaacagcagccugugccccgugagcggcugggccaucuacagcaaggacaacagcaucagaaucggcagcaagggcgacguguucgugaucagagagcccuucaucagcugcagcccccuggagugcagaaccuucuuccugacccagggcgcccugcugaacgacaagcacagcaacggcaccaucaaggacagaagccccuacagaacccugaugagcugccccaucggcgaggugcccagccccuacaacagcagauucgagagcguggccuggagcgccagcgccugccacgacggcaucaacuggcugaccaucggcaucagcggccccgacaacggcgccguggccgugcugaaguacaacggcaucaucaccgacaccaucaagagcuggagaaacaacauccugagaacccaggagagcgagugcgccugcgugaacggcagcugcuucaccgugaugaccgacggccccagcgacggccaggccagcuacaagaucuucagaaucgagaagggcaagaucgugaagagcguggagaugaacgcccccaacuaccacuacgaggagugcagcugcuaccccgacagcagcgagaucaccugcgugugcagagacaacuggcacggcagcaacagacccugggugagcuucaaccagaaccuggaguaccagaucggcuacaucugcagcggcaucuucggcgacaaccccagacccaacgacaagaccggcagcugcggccccgugagcagcaacggcgccaacggcgugaagggcuucagcuucaaguacggcaacggcguguggaucggcagaaccaagagcaucagcagcagaaacggcuucgagaugaucugggaccccaacggcuggaccggcaccgacaacaacuucagcaucaagcaggacaucgugggcaucaacgaguggagcggcuacagcggcagcuucgugcagcaccccgagcugaccggccuggacugcaucagacccugcuucuggguggagcugaucagaggcagacccaaggagaacaccaucuggaccagcggcagcagcaucagcuucugcggcgugaacagcgacaccgugagcuggagcuggcccgacggcgccgagcugcccuucaccaucgacaaguga

SEQ ID NO: 181075 - RNA, 1410 nt, Artificial Sequence
  derived and/or modified CDS sequence (opt4) from neuraminidase__InfluenzaA__AEM92620
augaaccccaaccagaagaucaucaccaucggcagcgugugcaugaucaucggcauggccaaccugaugcugcagaucggcaacaucaucagcaucuggaucagccacagcauccagcugggcaaccagaaccagaucgagaccugcaaccagagcgugaucaccuacgagaacaacaccugggugaaccagaccuacgugaacaucagcaacaccaacuucgccgccggccagagcguggugagcgugaagcuggccggcaacagcagccugugccccgugagcggcugggccaucuacagcaaggacaacagcaucagaaucggcagcaagggcgacguguucgugaucagagagcccuucaucagcugcagcccccuggagugcagaaccuucuuccugacccagggcgcccugcuggacgacaagcacagcaacggcaccaucaaggacagaagccccuacagaacccugaugagcugccccaucggcgaggugcccagccccuacaacagcagauucgagagcguggccuggagcgccagcgccugccacgacggcaucaacuggcugaccaucggcaucagcggccccgacaacggcgccguggccgugcugaaguacaacggcaucaucaccgacaccaucaagagcuggagaaacaacauccugagaacccaggagagcgagugcgccugcgugaacggcagcugcuucaccaucaugaccgacggccccagcgacggccaggccagcuacaagaucuucagaaucgagaagggcaagaucgugaagagcguggagaugaacgcccccaacuaccacuacgaggagugcagcugcuaccccgacagcagcgagaucaccugcgugugcagagacaacuggcacggcagcaacagacccugggugagcuucaaccagaaccuggaguaccagaugggcuacaucugcagcggcaucuucggcgacaaccccagacccaacgacaagaccggcagcugcggccccgugagcagcaacggcgccaacggcgugaagggcuucagcuucaaguacggcaacggcguguggaucggcagaaccaagagcaucagcagcagaaacggcuucgagaugaucugggaccccaacggcuggaccggcaccgacaacaaguucagcaucaagcaggacaucgugggcaucaacgaguggagcggcuacagcggcagcuucgugcagcaccccgagcugaccggccuggacugcaucagacccugcuucuggguggagcugaucagaggcagacccaaggagaacaccaucuggaccagcggcagcagcaucagcuucugcggcgugaacagcgacaccgugggcuggagcuggcccgacggcgccgagcugcccuucaccaucgacaaguga

SEQ ID NO: 181076 - RNA, 1410 nt, Artificial Sequence
  derived and/or modified CDS sequence (opt4) from neuraminidase__InfluenzaA__AEM92650
augaaccccaaccagaagaucaucaccaucggcagcgugugcaugaccaucggcauggccaaccugauccugcagaucggcaacaucaucagcaucuggaucagccacagcauccagcugggcaaccagaaccagaucgagaccugcaaccagagcgugaucaccuacgagaacaacaccugggugaaccagaccuacgugaacaucagcaacaccaacuucgccgccggccagagcguggugagcgugaagcuggccggcaacagcagccugugccccgugagcggcugggccaucuacagcaaggacaacagcgugagaaucggcagcaagggcgacguguucgugaucagagagcccuucaucagcugcagcccccuggagugcagaaccuucuuccugacccagggcgcccugcugaacgacaagcacagcaacggcaccaucaaggacagaagccccuacagaacccugaugagcugccccaucggcgaggugcccagccccuacaacagcagauucgagagcguggccuggagcgccagcgccugccacgacggcaucaacuggcugaccaucggcaucagcggccccgacaacggcgccguggccgugcugaaguacaacggcaucaucaccgacaccaucaagagcuggagaaacaacauccugagaacccaggagagcgagugcgccugcgugaacggcagcugcuucaccgugaugaccgacggccccagcgacggccaggccagcuacaagaucuucagaaucgagaagggcaagaucgugaagagcguggagaugaacgcccccaacuaccacuacgaggagugcagcugcuaccccgacagcagcgagaucaccugcgugugcagagacaacuggcacggcagcaacagacccugggugagcuucaaccagaaccuggaguaccagaucggcuacaucugcagcggcaucuucggcgacaaccccagacccaacgacaagaccggcagcugcggccccgugagcagcaacggcgccaacggcgugaagggcuucagcuucaaguacggcaacggcguguggaucggcagaaccaagagcaucagcagcagaaacggcuucgagaugaucugggaccccaacggcuggaccggcaccgacaccaaguucagcaucaagcaggacaucgugggcaucaacgaguggagcggcuacagcggcagcuucgugcagcaccccgagcugaccggccuggacugcaucagacccugcuucuggguggagcugaucagaggcagacccaaggagaacaccaucuggaccagcggcagcagcaucagcuucugcggcgugaacagcgacaccgugggcuggagcuggcccgacggcgccgagcugcccuucaccaucgacaaguga

SEQ ID NO: 181077 - RNA, 1410 nt, Artificial Sequence; identical to SEQ ID NO: 179470
  derived and/or modified CDS sequence (opt4) from neuraminidase__InfluenzaA__AEM98410

SEQ ID NO: 181078 - RNA, 1410 nt, Artificial Sequence; identical to SEQ ID NO: 179470
  derived and/or modified CDS sequence (opt4) from neuraminidase__InfluenzaA__AEM98421

SEQ ID NO: 181079 - RNA, 1410 nt, Artificial Sequence; identical to SEQ ID NO: 179470
  derived and/or modified CDS sequence (opt4) from neuraminidase__InfluenzaA__AEM98432

SEQ ID NO: 181080 - RNA, 1410 nt, Artificial Sequence; identical to SEQ ID NO: 180846
  derived and/or modified CDS sequence (opt4) from neuraminidase__InfluenzaA__AEN55401

SEQ ID NO: 181081 - RNA, 1410 nt, Artificial Sequence; identical to SEQ ID NO: 179073
  derived and/or modified CDS sequence (opt4) from neuraminidase__InfluenzaA__AEN55411

SEQ ID NO: 181082 - RNA, 1410 nt, Artificial Sequence
  derived and/or modified CDS sequence (opt4) from neuraminidase__InfluenzaA__AEN55421
augaaccccaaccagaagaucaucaccaucggcagcgugugcaugaccaucggcauggccaaccugauccugcagaucggcaacaucaucagcaucuggaucagccacagcauccagcugggcaaccagagccagaucgagaccugcaaccagagcgugaucaccuacgagaacaacaccugggugaaccagaccuacgugaacaucagcaacaccaacuucgccgccagacagagcguggugagcgugaagcuggccggcaacagcagccugugccccgugagcggcugggccaucuacagcaaggacaacagcaucagaaucggcagcaagggcgacguguucgugaucagagagcccuucaucagcugcagcccccuggagugcagaaccuucuuccugacccagggcgcccugcugaacgacaagcacagcaacggcaccaucaaggacagaagccccuacagaacccugaugagcugccccaucggcgaggugcccagccccuacaacagcagauucgagagcguggccuggagcgccagcgccugccacgacggcaucaacuggcugaccaucggcaucagcggccccgacaacggcgccguggccgugcugaaguacaacggcaucaucaccgacaccaucaagagcuggagaaacaacauccugagaacccaggagagcgagugcgugugcgugaacggcagcugcuucaccaucaugaccgacggccccagcgacggccaggccagcuacaagaucuucagaaucgagaagggcaagaucgugaagagcguggagaugaacgcccccaacuaccacuacgaggagugcagcugcuaccccgacagcagcgagaucaccugcgugugcagagacaacuggcacggcagcaacagacccugggugagcuucaaccagaaccuggaguaccagaucggcuacaucugcagcggcaucuucggcgacaaccccagacccaacgacaagaccggcagcugcggccccgugagcagcaacggcgccaacggcgugaagggcuucagcuucaaguacggcaacggcguguggaucggcagaaccaagagcaucagcagcagaaagggcuucgagaugaucugggaccccaacggcuggaccggcaccgacaacaacuucagcaucaagcaggacaucgugggcaucaacgaguggagcggcuacagcggcagcuucgugcagcaccccgagcugaccggccuggacugcaucagacccugcuucuggguggagcugaucagaggcagacccaaggagaacaccaucuggaccagcggcagcagcaucagcuucugcggcgugaacagcgacaccgugggcuggagcuggcccgacggcgccgagcugcccuucaccaucgacaaguga

SEQ ID NO: 181083 - RNA, 1410 nt, Artificial Sequence
  derived and/or modified CDS sequence (opt4) from neuraminidase__InfluenzaA__AEN55466
augaaccccaaccagaagaucaucaccaucggcagcgugugcaucaccaucggcauggccaaccugauccugcagaucggcaacaccaucagcaucuggaucagccacagcauccagcugggcaaccagaaccagaucgagaccugcaaccagagcgugaucaccuacgagaacaacaccugggugaaccagaccuacgugaacaucagcaacaccaacuucgccgccggccagagcguggugagcgugaagcuggccggcaacagcagccugugccccgugagcggcugggccaucuacagcaaggacaacagcaucagaaucggcagcaagggcgacguguucgugaucagagagcccuucaucagcugcagcccccuggagugcagaaccuucuuccugacccagggcgcccugcugaacgacaagcacagcaacggcaccaucaaggacagaagccccuacagaacccugaugagcugccccaucggcgaggugcccagccccuacaacagcagauucgagagcguggccuggagcgccagcgccugccacgacggcaucagcuggcugaccaucggcaucagcggccccgacaacggcgccguggccgugcugaaguacaacggcaucaucaccgacaccaucaagagcuggagaaacaacauccugagaacccaggagagcgagugcgccugcgugaacggcagcugcuucaccgugaugaccgacggccccagcgacggccaggccagcuacaagaucuucagaaucgagaagggcaagaucgugaagagcguggagaugaacgcccccaacuaccacuacgaggagugcagcugcuaccccgacagcagcgagaucaccugcgugugcagagacaacuggcacggcagcaacagacccugggugagcuucaaccagaaccuggaguaccagaucggcuacaucugcagcggcaucuucggcgacaaccccagacccaacgacaagaccggcagcugcggccccgugagcagcaacggcgccaacggcgugaagggcuucagcuucaaguacggcaacggcguguggaucggcagaaccaagagcaucagcagcagaaacggcuucgagaugaucugggaccccaacggcuggaccggcaccgacaacaacuucagcaucaagcaggacaucgugggcaucaacgaguggagcggcuacagcggcagcuucgugcagcaccccgagcugaccggccuggacugcaucagacccugcuucuggguggagcugaucagaggcagacccaaggagaacaccaucuggaccagcggcagcagcaucagcuucugcggcgugaacagcgacaccgugggcuggagcuggcccgacggcgccgagcugcccuucaccaucgacaaguga

SEQ ID NO: 181084 - RNA, 1410 nt, Artificial Sequence
  derived and/or modified CDS sequence (opt4) from neuraminidase__InfluenzaA__AEN55476
augaaccccaaccagaagaucaucaccaucggcagcgugugcaugaccaucggcauggccaaccugauccugcagaucggcaacaucaucagcaucuggaucagccacagcauccagcugggcaaccagagccagaucgagaccugcaaccagagcgugaucaccuacgagaacaacaccugggugaaccagaccuacgugaacaucagcaacaccaacuucgccgccggccagagcguggugagcgugaagcuggccggcaacagcagccugugccccgugagcggcugggccaucuacagcaaggacaacagcaucagaaucggcagcaagggcgacguguucgugaucagagagcccuucaucagcugcagcccccuggagugcagaaccuucuuccugacccagggcgcccugcugaacgacaagcacagcaacggcaccaucaaggacagaagccccuacagaacccugaugagcugccccaucggcgaggugcccagccccuacaacagcagauucgagagcguggccuggagcgccagcgccugccacgacggcaucaacuggcugaccaucggcaucagcggccccgacaacggcgccguggccgugcugaaguacaacggcaucaucaccgacaccaucaagagcuggagaaacaacauccugagaacccaggagagcgagugcgccugcgugaacggcagcugcuucaccaucaugaccgacggccccagcgacggccaggccagcuacaagaucuucagaaucgagaagggcaagaucgugaagagcguggagaugaacgcccccaacuaccacuacgaggagugcagcugcuaccccgacagcagcgagaucaccugcgugugcagagacaacuggcacggcagcaacagacccugggugagcuucaaccagaaccuggaguaccagaucggcuacaucugcagcggcaucuucggcgacaaccccagacccaacgacaagaccggcagcugcggccccgugagcagcaacggcgccaacggcgugaagggcuucagcuucaaguacggcaacggcguguggaucggcagaaccaagagcaucagcagcagaaagggcuucgagaugaucugggaccccaacggcuggaccggcaccgacaacaacuucagcaucaagcaggacaucgugggcaucaacgaguggagcggcuacagcggcagcuucgugcagcaccccgagcugaccggccuggacugcaucagacccugcuucuggguggagcugaucagaggcagacccaaggagaacaccaucuggaccagcggcagcagcaucagcuucugcggcgugaacagcgacaccgugagcuggagcuggcccgacggcgccgagcugcccuucaccaucgacaaguga

SEQ ID NO: 181085 - RNA, 1410 nt, Artificial Sequence; identical to SEQ ID NO: 180317
  derived and/or modified CDS sequence (opt4) from neuraminidase__InfluenzaA__AEN55486

SEQ ID NO: 181086 - RNA, 1410 nt, Artificial Sequence; identical to SEQ ID NO: 180317
  derived and/or modified CDS sequence (opt4) from neuraminidase__InfluenzaA__AEN55506

SEQ ID NO: 181087 - RNA, 1410 nt, Artificial Sequence
  derived and/or modified CDS sequence (opt4) from neuraminidase__InfluenzaA__AEN55516
augaaccccaaccagaagaucaucaccaucggcagcgugugcaugaccaucggcauggccaaccugauccugcagaucggcaacaucaucagcaucuggaucagccacagcauccagcugggcaaccagagccagaucgagaccugcaaccagagcgugaucaccuacgagaacaacaccugggugaaccagaccuacgugaacaucagcaacaccaacuucgccgccggccagagcguggugagcgugaagcuggccggcaacagcagccugugccccgugagcggcugggccaucuacagcaaggacaacagcaucagaaucggcagcagaggcgacguguucgugaucagagagcccuucaucagcugcagcccccuggagugcagaaccuucuuccugacccagggcgcccugcugaacgacaagcacagcaacggcaccaucaaggacagaagccccuacagaacccugaugagcugccccaucggcgaggugcccagccccuacaacagcagauucgagagcguggccuggagcgccagcgccugccacgacggcaucaacuggcugaccaucggcaucagcggccccgacaacggcgccguggccgugcugaaguacaacggcaucaucaccgacaccaucaagagcuggagaaacaacauccugagaacccaggagagcgagugcgccugcgugaacggcagcugcuucaccaucaugaccgacggccccagcgacggccaggccagcuacaagaucuucagaaucgagaagggcaagaucgugaagagcguggagaugaacgcccccaacuaccacuacgaggagugcagcugcuaccccgacagcagcgagaucaccugcgugugcagagacaacuggcacggcagcaacagacccugggugagcuucaaccagaaccuggaguaccagaucggcuacaucugcagcggcaucuucggcgacaaccccagacccaacgacaagaccggcagcugcggccccgugagcagcaacggcgccaacggcgugaagggcuucagcuucaaguacggcaacggcguguggaucggcagaaccaagagcaucagcagcagaaagggcuucgagaugaucugggaccccaacggcuggaccggcaccgacaacaacuucagcaucaagcaggacaucgugggcaucaacgaguggagcggcuacagcggcagcuucgugcagcaccccgagcugaccggccuggacugcaucagacccugcuucuggguggagcugaucagaggcagacccaaggagaacaccaucuggaccagcggcagcagcaucagcuucugcggcgugaacagcgacaccgugggcuggagcuggcccgacggcgccgagcugcccuucaccaucgacaaguga

SEQ ID NO: 181088 - RNA, 1410 nt, Artificial Sequence; identical to SEQ ID NO: 180317
  derived and/or modified CDS sequence (opt4) from neuraminidase__InfluenzaA__AEN55526

SEQ ID NO: 181089 - RNA, 1410 nt, Artificial Sequence; identical to SEQ ID NO: 180846
  derived and/or modified CDS sequence (opt4) from neuraminidase__InfluenzaA__AEN69429

SEQ ID NO: 181090 - RNA, 1410 nt, Artificial Sequence; identical to SEQ ID NO: 180843
  derived and/or modified CDS sequence (opt4) from neuraminidase__InfluenzaA__AEN69438

SEQ ID NO: 181091 - RNA, 1410 nt, Artificial Sequence; identical to SEQ ID NO: 179073
  derived and/or modified CDS sequence (opt4) from neuraminidase__InfluenzaA__AEN69484

SEQ ID NO: 181092 - RNA, 1410 nt, Artificial Sequence; identical to SEQ ID NO: 176745
  derived and/or modified CDS sequence (opt4) from neuraminidase__InfluenzaA__AEO01627

SEQ ID NO: 181093 - RNA, 1410 nt, Artificial Sequence; identical to SEQ ID NO: 176745
  derived and/or modified CDS sequence (opt4) from neuraminidase__InfluenzaA__AEO01638

SEQ ID NO: 181094 - RNA, 1410 nt, Artificial Sequence
  derived and/or modified CDS sequence (opt4) from neuraminidase__InfluenzaA__AEO01644
augaaccccaaccagaagaucaucaccaucggcagcgugagccugaccaucagcaccaucugcuucuucaugcagaucgccauccugaucaccaccgugacccugcacuucaagcaguacgaguucaacagcccccccaacaaccaggugaugcugugcgagcccaccaucaucgagagaaacaucaccgagaucguguaccugaccaacaccaccaucgagaaggagaucugccccaagcuggccgaguacagaaacuggagcaagccccagugcgacaucaccggcuucgcccccuucagcaaggacaacagcaucagacugagcgccggcggcgacaucugggugaccagagagcccuacgugagcugcgaccccgacaagugcuaccaguucgcccugggccagggcaccacccugaacaacgugcacagcaacgacaccgugagagacagaacccccuacagaacccugcugaugaacgagcugggcgugcccuuccaccugggcaccaagcaggugugcaucgccuggagcagcagcagcugccacgacggcaaggccuggcugcacgugugcaucaccggcgacgacaagaacgccaccgccagcuucaucuacaacggcagacugguggacagcaucgugagcuggagcaaggagauccugagaacccaggagagcgagugcgugugcaucaacggcaccugcaccguggugaugaccgacggcagcgccagcggcaaggccgacaccaagauccuguucaucgaggagggcaagaucgugcacaccagcacccugagcggcagcgcccagcacguggaggagugcagcugcuaccccagauaccccggcgugagaugcgugugcagagacaacuggaagggcagcaacagacccaucguggacaucaacaucaaggaccacagcaucgugagcagcuacgugugcagcggccuggugggcgacacccccagaaagaccgacagcagcagcagcggccacugccuggaccccaacaacgaggagggcggccacggcgugaagggcugggccuucgacgacggcaacgacguguggaugggcagaaccaucagcgagaagagcagacugggcuacgagaccuucaaggugaucgagggcuggagcaaccccaagagcaagcugcagaucaacagacaggugaucguggacagaggcaacagaagcggcuacagcggcaucuucagcguggagggcaagagcugcaucaacagaugcuucuacguggagcugaucagaggcagaaaggaggagaccgaggugcuguggaccagcaacagcaucgugguguucugcggcaccagcggcaccuacggcaccggcagcuggcccgacggcgccgacaucaaccugaugcccaucuga

SEQ ID NO: 181095 - RNA, 1410 nt, Artificial Sequence
  derived and/or modified CDS sequence (opt4) from neuraminidase__InfluenzaA__AEO01654
augaaccccaaccagaagaucaucaccaucggcagcgugagccugaccaucagcaccaucugcuucuucaugcagaucgccauccugaucaccaccgugacccugcacuucaagcaguacgaguucaacagcccccccaacaaccaggugaugcugugcgagcccaccaucaucgagagaaacaucaccgagaucguguaccugaccaacaccaccaucgagaaggagaucugccccaagcuggccgaguacagaaacuggagcaagccccagugcgacaucaccggcuucgcccccuucagcaaggacaacagcaucagacugagcgccggcggcgacaucugggugaccagagagcccuacgugagcugcgaccccgacaagugcuaccaguucgcccugggccagggcaccacccugaacaacgugcacagcaacgacaccgugagagacagaacccccuacagaacccugcugaugaacgagcugggcgugcccuuccaccugggcaccaagcaggugugcaucgccuggagcagcagcagcugccacgacggcaaggccuggcugcacgugugcaucaccggcgacgacaagaacgccaccgccagcuucaucuacaacggcagacugguggacagcaucgugagcuggagcaaggacauccugagaacccaggagagcgagugcgugugcaucaacggcaccugcaccguggugaugaccgacggcagcgccagcggcaaggccgacaccaagauccuguucaucgaggagggcaagaucgugcacaccagcacccugagcggcagcgcccagcacguggaggagugcagcugcuaccccagauaccccggcgugagaugcgugugcagagacaacuggaagggcagcaacagacccaucguggacaucaacaucaaggaccacagcaucgugagcagcuacgugugcagcggccuggugggcgacacccccagaaagaacgacagcagcagcagcggccacugccuggaccccaacaacgaggagggcggccacggcgugaagggcugggccuucgacgacggcaacgacguguggaugggcagaaccaucagcgagaagagcagacugggcuacgagaccuucaaggugaucgagggcuggagcaaccccaagagcaagcugcagaucaacagacaggugaucguggacagaggcaacagaagcggcuacagcggcaucuucagcguggagggcaagagcugcaucaacagaugcuucuacguggagcugaucagaggcagaaaggaggagaccaaggugcuguggaccagcaacagcaucgugguguucugcggcaccagcggcaccuacggcaccggcagcuggcccgacggcgccgagaucaaccugaugcccaucuga

SEQ ID NO: 181096 - RNA, 1413 nt, Artificial Sequence; identical to SEQ ID NO: 176692
  derived and/or modified CDS sequence (opt4) from neuraminidase__InfluenzaA__AEO01665

SEQ ID NO: 181097 - RNA, 1413 nt, Artificial Sequence
  derived and/or modified CDS sequence (opt4) from neuraminidase__InfluenzaA__AEO01676
augaaccccaaccagaagaucaucaccaucggcagcaucagcaucgccaucggcaucaucagccugaugcugcagaucggcaacaucaucagcaucugggccagccacagcauccagaccggcagccagaacaacaccggcaucugcaaccagagaaucaucaccuacgagaacagcaccugggugaaccacaccuacgugaacaucaacaacaccaacgugguggccggcgaggacaagaccagcgugacccuggccggcaacagcagccugugcagcaucagcggcugggccaucuacaccaaggacaacagcaucagaaucggcagcaagggcgacguguucgugaucagagagcccuucaucagcugcagccaccuggagugcagaaccuucuuccugacccagggcgcccugcugaacgacaagcacagcaacggcaccgugaaggacagaagccccuacagagcccugaugagcugcccccugggcgaggcccccagccccuacaacagcaaguucgagagcguggccuggagcgccagcgccugccacgacggcaugggcuggcugaccaucggcaucagcggccccgacaacggcgccguggccgugcugaaguacaacggcaucaucaccggcaccaucaagagcuggaagaagcagauccugagaacccaggagagcgagugcgugugcaugaacggcagcugcuucaccaucaugaccgacggccccagcaacaaggccgccagcuacaagaucuucaagaucgagaagggcaaggugaccaagagcaucgagcugaacgcccccaacuuccacuacgaggagugcagcugcuaccccgacaccggcaucgugaugugcgugugcagagacaacuggcacggcagcaacagacccugggugagcuucaaccagaaccuggacuaccagaucggcuacaucugcagcggcguguucggcgacaaccccagacccgaggacggcgagggcagcugcaaccccgugaccguggacggcgccaacggcgugaagggcuucagcuacaaguacgacaacggcguguggaucggcagaaccaagagcaacagacugagaaagggcuucgagaugaucugggaccccaacggcuggaccaacaccgacagcgacuucagcgugaagcaggacgugguggccaucaccgacuggagcggcuacagcggcagcuucgugcagcaccccgagcugaccggccuggacugcaucagacccugcuucuggguggagcuggugagaggccugcccagagagaacaccaccaucuggaccagcggcagcagcaucuucuucagaggcgacaacagcgacaccgccaacuggagcuggcccgacggcgccgagaugaccuucaccaucgacaaguga

SEQ ID NO: 181098 - RNA, 1410 nt, Artificial Sequence; identical to SEQ ID NO: 176745
  derived and/or modified CDS sequence (opt4) from neuraminidase__InfluenzaA__AEO01693

SEQ ID NO: 181099 - RNA, 1413 nt, Artificial Sequence; identical to SEQ ID NO: 176692
  derived and/or modified CDS sequence (opt4) from neuraminidase__InfluenzaA__AEO01711

SEQ ID NO: 181100 - RNA, 1410 nt, Artificial Sequence; identical to SEQ ID NO: 180868
  derived and/or modified CDS sequence (opt4) from neuraminidase__InfluenzaA__AEO37533

SEQ ID NO: 181101 - RNA, 1410 nt, Artificial Sequence
  derived and/or modified CDS sequence (opt4) from neuraminidase__InfluenzaA__AEO37543
augaaccccaaccagaagaucaucaccaucggcagcgugugcaugaccaucggcauggccaaccugauccugcagaucggcaacaucaucagcaucuggaucagccacagcauccagcugggcaaccagaaccagaucgagcccugcaaccagagcgugaucaccuacgagaacaacaccugggugaaccagaccuacgugaacaucagcaacaccaacuucgccgccggccagagcguggugagcgugaagcuggccggcaacagcagccugugccccgugagcggcugggccaucuacagcaaggacaacagcaucagaaucggcagcaagggcgacguguucgugaucagagagcccuucaucagcugcagcccccuggagugcagaaccuucuuccugacccagggcgcccugcugaacgacaagcacagcaacggcaccaucaaggacagaagccccuacagaacccugaugagcugccccaucggcgaggugcccagccccuacaacagcagauucgagagcguggccuggagcgccagcgccugccacgacggcaucaacuggcugaccaucggcaucagcggccccgacaacggcgccguggccgugcugaaguacaacggcaucaucaccgacaccaucaagagcuggagaaacaacauccugagaacccaggagagcgagugcgccugcgugaacggcagcugcuucaccgugaugaccgacggccccagcgacggccaggccagcuacaagaucuucagaaucgagaagggcaagaucgugaagagcguggagaugaacgcccccaacuaccacuacgaggagugcagcugcuaccccgacagcagcgagaucaccugcgugugcagagacaacuggcacggcagcaacagacccugggugagcuucaaccagaaccuggaguaccagaucggcuacaucugcagcggcaucuucggcgacaaccccagacccaacgacaagaccggcagcugcggccccgugagcagcaacggcgccaacggcgugaagggcuucagcuucaaguacggcaacggcguguggaucggcagaaccaagagcaucagcagcagaaacggcuucgagaugaucugggaccccaacggcuggaccggcaccgacaacaacuucagcgugaagcaggacaucaucggcaucaacgaguggagcggcuacagcggcagcuucgugcagcaccccgagcugaccggccuggacugcaucagacccugcuucuggguggagcugaucagaggcagacccaaggagaacaccaucuggaccagcggcagcagcaucagcuucugcggcgugaacagcgacaccgugggcuggagcuggcccgacggcgccgagcugcccuucaccaucgacaaguga

SEQ ID NO: 181102 - RNA, 1410 nt, Artificial Sequence; identical to SEQ ID NO: 180317
  derived and/or modified CDS sequence (opt4) from neuraminidase__InfluenzaA__AEO72179

SEQ ID NO: 181103 - RNA, 1350 nt, Artificial Sequence
  derived and/or modified CDS sequence (opt4) from neuraminidase__InfluenzaA__AEO88957
augaaccccaaccagaagaucaucaccaucggcagcaucugcauggugaucggcaucgugagccugaugcugcagaucggcaacaugaucagcaucugggugagccacagcacccagaccggcaaccagcaccaggccgagcccaucagaaacaccaacuuccugaccgagaacgccguggccagcgugacccuggccggcaacagcagccugugccccaucagaggcugggccgugcacagcaaggacaacagcaucagaaucggcagcaagggcgacguguucgugaucagagagcccuucaucagcugcagccaccuggagugcagaaccuucuuccugacccagggcgcccugcugaacgacaagcacagcaacggcaccgugaaggacagaagcccccacagaacccugaugagcugccccgugggcgaggcccccagccccuacaacagcagauucgagagcguggccuggagcgccagcgccugccacgacggcaccagcuggcugaccaucggcaucagcggccccgacaacggcgccguggccgugcugaaguacaacggcaucaucaccgacaccaucaagagcuggagaaacaacauccugagaacccaggagagcgagugcgccugcgugaacggcagcugcuucaccgugaugaccgacggccccagcaacggccaggccagcuacaagaucuucaagauggagaagggcaagguggugaagagcguggagcugaacgcccccaacuaccacuacgaggagugcagcugcuaccccgacgccggcgagaucaucugcgugugcagagacaacuggcacggcagcaacagacccugggugagcuucaaccagaaccuggaguaccagaucggcuacaucugcagcggcguguucggcgacaaccccagacccaacgacggcaccggcagcugcggccccgugagccccaacggcgccuacggcaucaagggcuucagcuucaaguacggcaacggcguguggaucggcagaaccaagagcaccaacagcagaagcggcuucgagaugaucugggaccccaacggcuggaccggcaccgacagcaacuucagcgugaagcaggacaucguggccaucaccgacuggagcggcuacagcggcagcuucgugcagcaccccgagcugaccggccuggacugcaucagacccugcuucuggguggagcugaucagaggcagacccaaggagagcaccaucuggaccagcggcagcagcaucagcuucugcggcgugaacagcgacaccgugagcuggagcuggcccgacggcgccgagcugcccuucaccaucgacaaguga

SEQ ID NO: 181104 - RNA, 1350 nt, Artificial Sequence
  derived and/or modified CDS sequence (opt4) from neuraminidase__InfluenzaA__AEO88965
augaaccccaaccagaagaucaucaccaucggcagcaucugcauggugaucgagaucgugagccugaugcugcagaucggcaacaugaucagcaucugggugagccacagcauccagaccaagaaccagagacaggccgagcccaucagcaacaccaaguuccugaccgagaaggccguggccagcgugacccuggccggcaacagcagccugugccccaucagcggcugggccgugcacagcaaggacaacagcaucagaaucggcagcaagggcgacguguucgugaucagagagcccuucaucagcugcagccaccuggagugcagaaccuucuuccugacccagggcgcccugcugaacgacaagcacagcaacggcaccgugaaggacagaagcccccacagaacccugaugagcugccccgugggcgaggcccccagccccuacaacagcagauucgagagcguggccuggagcgccagcgccugccacgacggcaccagcuggcugaccaucggcaucagcggccccgacaacggcgccguggccgugcugaaguacaacggcaucaucaccgacaccaucaagagcuggagaaacaacauccugagaacccaggagagcgagugcgccugcgugaacggcagcugcuucaccgugaugaccgacggccccagcaacggccaggccagcuacaagaucuucaagauggagaagggcaagguggugaagagcguggagcuggacgcccccaacuaccacuacgaggagugcagcugcuaccccgacgccggcgagaucaccugcgugugcagagacaacuggcacggcagcaacagacccugggugagcuucaaccagaaccuggaguaccagaucggcuacaucugcagcggcguguucggcgacaaccccagacccaacgacggcaccggcagcugcggccccgugagccccaacggcgccuacggcgugaagggcuucagcuucaaguacggcaacggcguguggaucggcagaaccaagagcaccaacagcagaagcggcuucgagaugaucugggaccccaacggcuggaccggcaccgacagcagcuucagcgugaagcaggacaucguggccaucaccgacuggagcggcuacagcggcagcuucgugcagcaccccgagcugaccggccugaacugcaucagacccugcuucuggguggagcuggugagaggcagacccaaggagagcaccaucuggaccagcggcagcagcaucagcuucugcggcgugaacagcgacaccgugggcuggagcuggcccgacggcgccgagcugcccuucaccaucgacaaguga

SEQ ID NO: 181105 - RNA, 1350 nt, Artificial Sequence
  derived and/or modified CDS sequence (opt4) from neuraminidase__InfluenzaA__AEO88973
augaaccccaaccagaagaucaucaccaucggcagcaucugcauggugaucggcaucgugagccugaugcugcagaucggcaacaugaucagccugugggugagccacagcauccagaccggcaaccagcaccagguggagcccaucagcaacaccaacuuccugaccgagaaggccguggccagcgugacccuggccggcaacagcagccugugccccaucagaggcugggccgugcacagcaaggacaacagcaucagaaucggcagcaagggcgacguguucgugaucagagagcccuucaucagcugcagccaccuggagugcagaaccuucuuccugacccagggcgcccugcugaacgacaagcacagcaacggcaccgugaaggacagaagcccccacagaacccugaugagcugccccgugggcgaggcccccagccccuacaacagcagauucgagagcguggccuggagcgccagcgccugccacgacggcaccagcuggcugaccaucggcaucagcggccccgacaacggcgccguggccgugcugaaguacaacggcaugaucaccgacaccaucaagagcuggagaaacaacauccugagaacccaggagagcgagugcgccugcgugaacggcagcugcuucaccgugaugaccgacggccccagcaacggccaggccagcuacaagaucuucaagauggagaagggcagaguggugaagagcguggagcuggacgcccccaacuaccacuacgaggagugcagcugcuaccccgacgccggcgagaucaccugcgugugcagagacaacuggcacggcagcaacagacccugggugagcuucaaccagaaccuggaguaccagaucggcuacaucugcagcggcguguucggcgacaaccccagacccaacgacggcaccggcagcugcggccccgugagccccaacggcgccuacggcgugaagggcuucagcuucaaguacggcaacggcguguggaucggcagaaccaagagccccaacagcagaagcggcuucgagaugaucugggaccccaacggcuggaucgagaccgacagcagcuucagcgugaagcaggacaucguggccaucaccgacuggagcggcuacagcggcagcuucgugcagcaccccgagcugaccggccuggacugcaucagacccugcuucuggguggagcugaucagaggcagacccaaggagagcaccaucuggaccagcggcagcagcaucagcuucugcggcgugaacagcgacaccgugagcuggagcuggcccgacggcgccgagcugcccuucaccaucgacaaguga

SEQ ID NO: 181106 - RNA, 1350 nt, Artificial Sequence
  derived and/or modified CDS sequence (opt4) from neuraminidase__InfluenzaA__AEO88982
augaaccccaaccagaagaucaucaccaucggcagcaucugcauggugaucggcaucgugagccugaugcugcagaucggcaacaugaucagcaucugggugagccacagcauccagaccggcaaccagcaccaggccgagcccaucagaaacaccaacuuccugaccgagaacgccguggccagcgugacccuggccggcaacagcagccugugccccgugagaggcugggccgugcacagcaaggacaacagcaucagaaucggcagcaagggcgacguguucgugaucagagagcccuucaucagcugcagccaccuggagugcagaaccuucuuccugacccagggcgcccugcugaacgacaagcacagcaacggcaccgugaaggacagaagcccccacagaacccugaugagcugccccgugggcgaggcccccagccccuacaacagcagauucgagagcguggccuggagcgccagcgccugccacgacggcaccagcuggcugaccaucggcaucagcggccccgacaacggcgccguggccgugcugaaguacaacggcaucaucaccgacaccaucaagagcuggagaaacaacauccugagaacccaggagagcgagugcgccugcgugaacggcagcugcuucaccgugaugaccgacggccccagcaacggccaggccagcuacaagaucuucaagauggagaagggcaagguggugaagagcguggagcugaacgcccccaacuaccacuacgaggagugcagcugcuaccccgacgccggcgagaucaccugcgugugcagagacaacuggcacggcagcaacagacccugggugagcuucaaccagaaccuggaguaccagaucggcuacaucugcagcggcaucuucggcgacaaccccagaccccacgacggcaccggcagcugcggccccgugagccccaacggcgccuacggcaucaagggcuucagcuucaaguacggcaacggcguguggaucggcagaaccaagagcaccaacagcagaagcggcuucgagaugaucugggaccccaacggcuggaccggcaccgacagcaacuucagcgugaagcaggacaucguggccaucaccgacuggagcggcuacagcggcagcuucgugcagcaccccgagcugaccggccuggacugcaucagacccugcuucuggguggagcugaucagaggcagacccaaggagagcaccaucuggaccagcggcagcagcaucagcuucugcggcgugaacagcgacaccgugagcuggagcuggcccgacgacgccgagcugcccuucaccaucgacaaguga

SEQ ID NO: 181107 - RNA, 1350 nt, Artificial Sequence
  derived and/or modified CDS sequence (opt4) from neuraminidase__InfluenzaA__AEO88990
augaaccccaaccagaagaucaucaccaucggcagcaucugcauggugaucggcaucgugagccugaugcugcagaucggcaacaugaucagcaucugggugagccacagcauccagaccggcaaccagcaccaggccgagcccaucagaaacaccaacuuccugaccgagaacgccguggccagcgugacccuggccggcaacagcagccugugccccgugagaggcugggccgugcacagcaaggacaacagcaucagaaucggcagcaagggcgacguguucgugaucagagagcccuucaucagcugcagccaccuggagugcagaaccuucuuccugacccagggcgcccugcugaacgacaagcacagcaacggcaccgugaaggacagaagcccccacagaacccugaugagcugccccgugggcgaggcccccagccccuacaacagcagauucgagagcguggccuggagcgccagcgccugccacgacggcaccagcuggcugaccaucggcaucagcggccccgacaacggcgccguggccgugcugaaguacaacggcaucaucaccgacaccaucaagagcuggagaaacaacauccugagaacccaggagagcgagugcgccugcgugaacggcagcugcuucaccgugaugaccgacggccccagcaacggccaggccagcuacaagaucuucaagauggagaagggcaagguggugaagagcguggagcugaacgcccccaacuaccacuacgaggagugcagcugcuaccccgacgccggcgagaucaccugcgugugcagagacaacuggcacggcagcaacagacccugggugagcuucaaccagaaccuggaguaccagaucggcuacaucugcagcggcguguucggcgacaaccccagacccaacgacggcaccggcagcugcggccccgugagccccaacggcgccuacggcaucaagggcuucagcuucaaguacggcaacggcguguggaucggcagaaccaagagcaccaacagcagaagcggcuucgagaugaucugggaccccaacggcuggaccggcaccgacagcaacuucagcgugaagcaggacaucguggccaucaccgacuggagcggcuacagcggcagcuucgugcagcaccccgagcugaccggccuggacugcaucagacccugcuucuggguggagcugaucagaggcagacccaaggagagcaccaucuggaccagcggcagcagcaucagcuucugcggcgugaacagcgacaccgugagcuggagcuggcccgacgacgccgagcugcccuucaccaucgacaaguga

SEQ ID NO: 181108 - RNA, 1350 nt, Artificial Sequence
  derived and/or modified CDS sequence (opt4) from neuraminidase__InfluenzaA__AEO88998
augaaccccaaccagaagaucaucaccaucggcagcaucugcauggugaucggcaucgugagccugaugcugcagaucggcaacaugaucagcaucugggugagccacagcauccagaccggcaaccagcaccaggccgagcccaucagaaacaccaacuuccugaccgagaacgccguggccagcgugacccuggccggcaacagcagccugugccccaucagaggcugggccgugcacagcaaggacaacagcaucagaaucggcagcaagggcgacguguucgugaucagagagcccuucaucagcugcagccaccuggagugcagaaccuucuuccugacccagggcgcccugcugaacgacaagcacagcaacggcaccgugaaggacagaagcccccacagaacccugaugagcugccccgugggcgaggcccccagccccuacaacagcagauucgagagcguggccuggagcgccagcgccugccacgacggcaccagcuggcugaccaucggcaucagcggccccgacaacggcgccguggccgugcugaaguacaacggcaucaucaccgacaccaucaagagcuggagaaacaacauccugagaacccaggagagcgagugcgccugcgugaacggcagcugcuucaccgugaugaccgacggccccagcaacgagcaggccagcuacaagaucuucaagauggagaagggcaagguggugaagagcguggagcugaacgcccccaacuaccacuacgaggagugcagcugcuaccccgacgccggcgagaucaucugcgugugcagagacaacuggcacggcagcaacagacccugggugagcuucaaccagaaccuggaguaccagaucggcuacaucugcagcggcguguucggcgacaaccccagacccaacgacggcaccggcagcugcggccccgugagccccaacggcgccuacggcaucaagggcuucagcuucaaguacggcaacggcguguggaucggcagaaccaagagcaccaacagcagaagcggcuucgagaugaucugggaccccaacggcuggaccggcaccgacagcaacuucagcgugaagcaggacaucguggccaucaccgacuggagcggcuacagcggcagcuucgugcagcaccccgagcugaccggccuggacugcaucagacccugcuucuggguggagcugaucagaggcagacccaaggagagcaccaucuggaccagcggcagcagcaucagcuucugcggcgugaacagcgacaccgugagcuggagcuggcccgacggcgccgagcugcccuucaccaucgacaaguga

SEQ ID NO: 181109 - RNA, 1350 nt, Artificial Sequence
  derived and/or modified CDS sequence (opt4) from neuraminidase__InfluenzaA__AEO89006
augaaccccaaccagaagaucaucaccaucggcagcaucugcauggugaucggcaucgugagccugaugcugcagaucggcaacaugaucagcaucugggugagccacagcauccagaccggcaaccagcaccaggccgagcccaucagaaacaccaacuuccugaccgagaacgccguggccagcgugacccuggccggcaacagcagccugugccccgugagaggcugggccgugcacagcaaggacaacagcaucagaaucggcagcaagggcgacguguucgugaucagagagcccuucaucagcugcagccaccuggagugcagaaccuucuuccugacccagggcgcccugcugaacgacaagcacagcaacggcaccgugaaggacagaagcccccacagaacccugaugagcugccccgugggcgaggcccccagccccuacaacagcagauucgagagcguggccuggagcgccagcgccugccacgacggcaccagcuggcugaccaucggcaucagcggccccgacaacggcgccguggccgugcugaaguacaacggcaucaucaccgacaccaucaagagcuggagaaacaacauccugagaacccaggagagcgagugcgccugcgugaacggcagcugcuucaccgugaugaccgacggccccagcaacggccaggccagcuacaagaucuucaagauggagaagggcaagguggugaagagcguggagcugaacgcccccaacuaccacuacgaggagugcagcugcuaccccgacgccggcgagaucaccugcgugugcagagacaacuggcacggcagcaacagacccugggugagcuucaaccagaaccuggaguaccagaucggcuacaucugcagcggcguguucggcgacaaccccagacccaacgacggcaccggcagcugcggccccgugagccccaacggcgccuacggcaucaagggcuucagcuucaaguacggcaacggcguguggaucggcagaaccaagagcaccaacagcagaagcggcuucgagaugaucugggaccccaacggcuggaccggcaccgacagcgacuucagcgugaagcaggacaucaucgccaucaccgacuggagcggcuacagcggcagcuucgugcagcaccccgagcugaccggccuggacugcaucagacccugcuucuggguggagcugaucagaggcagacccaaggagagcaccaucuggaccagcggcagcagcaucagcuucugcggcgugaacagcgacaccgugagcuggagcuggcccgacggcgccgagcugcccuucaccaucgacaaguga

SEQ ID NO: 181110 - RNA, 1350 nt, Artificial Sequence
  derived and/or modified CDS sequence (opt4) from neuraminidase__InfluenzaA__AEO89023
augaaccccaaccagaagaucaucaccaucggcagcaucugcauggugaucggcaucgugagccugaugcugcagaucggcaacauggugagccugugggugagccacagcauccagaccggcaaccagcaccagguggagcccaucagcaacaccaacuuccugaccgagaaggccguggccagcgugacccuggccggcaacagcagccugugccccaucagaggcugggccgugcacagcaaggacaacagcaucagaaucggcagcaagggcgacguguucgugaucagagagcccuucaucagcugcagccaccuggagugcagaaccuucuuccugacccagggcgcccugcugaacgacaagcacagcaacggcaccgugaaggacagaagcccccacagaacccugaugagcugccccgugggcgaggcccccagccccuacaacagcagauucgagagcguggccuggagcgccagcgccugccacgacggcaccagcuggcugaccaucggcaucagcggccccgacaacggcgccguggccgugcugaaguacaacggcaugaucaccgacaccaucaagagcuggagaaacaacauccugagaacccaggagagcgagugcgccugcgugaacggcagcugcuucaccgugaugaccgacggccccagcaacggccaggccagcuacaagaucuucaagauggagaagggcaagguggugaagagcguggagcuggacgcccccaacuaccacuacgaggagugcagcugcuaccccgacgccggcgagaucaccugcgugugcagagacaacuggcacggcagcaacagacccugggugagcuucaaccagaaccuggaguaccagaucggcuacaucugcagcggcguguucggcgacaaccccagacccaacgacggcaccggcagcugcggccccgugagccccaacggcgccuacggcgugaagggcuucagcuucaaguacggcaacggcguguggaucggcagaaccaagagccccagcagcagaagcggcuucgagaugaucugggaccccaacggcuggaccgagaccgacagcagcuucagcgugaagcaggacaucguggccaucaccgacuggagcggcuacagcggcagcuucgugcagcaccccgagcugaccggccuggacugcaucagacccugcuucuggguggagcugaucagaggcagacccaaggagagcaccaucuggaccagcggcagcagcaucagcuucugcggcgugaacagcgacaccgugagcuggagcuggcccgacggcgccgagcugcccuucaccaucgacaaguga

SEQ ID NO: 181111 - RNA, 1350 nt, Artificial Sequence
  derived and/or modified CDS sequence (opt4) from neuraminidase__InfluenzaA__AEO89032
augaaccccaaccagaagaucaucaccaucggcagcaucugcauggugaucggcaucgugagccugaugcugcagaucggcaacaugaucagcaucugggugagccacagcauccagaccggcaaccagcaccaggccgagcccaucagaaacaccaacuuccugaccgagaacgccguggccagcgugacccuggccggcaacagcagccugugccccgugagaggcugggccgugcacagcaaggacaacagcaucagaaucggcagcaagggcgacguguucgugaucagagagcccuucaucagcugcagccaccuggagugcagaaccuucuuccugacccagggcgcccugcugaacgacaagcacagcaacggcaccgugaaggacagaagcccccacagaacccugaugagcugccccgugggcgaggcccccagccccuacaacagcagauucgagagcguggccuggagcgccagcgccugccacgacggcaccagcuggcugaccaucggcaucagcggccccgacaacggcgccguggccgugcugaaguacaacggcaucaucaccgacaccaucaagagcuggagaaacaacauccugagaacccaggagagcgagugcgccugcgugaacggcagcugcuucaccgugaugaccgacggccccagcaacggccaggccagcuacaagaucuucaagauggagaagggcaagguggugaagagcguggagcugaacgcccccaacuaccacuacgaggagugcagcugcuaccccgacgccggcgagaucaccugcgugugcagagacaacuggcacggcagcaacagacccugggugagcuucaaccagaaccuggaguaccagaucggcuacaucugcagcggcguguucggcgacaaccccagacccaacgacggcaccggcagcugcggccccgugagccccaacggcgccuacggcaucaagggcuucagcuucaaguacggcaacggcguguggaucggcagaaccaagagcaccaacagcagaagcggcuucgagaugaucugggaccccaacggcuggaccggcaccgacagcaacuucagcgugaagcaggacaucguggccaucaccgacuggagcggcuacagcggcagcuucgugcagcaccccgagcugaccggccuggacugcaucagacccugcuucuggguggagcugaucagaggcagacccaaggagagcaccaucuggaccagcggcagcagcaucagcuucugcggcgugaacagcgacaccgugagcuggagcuggcccgacggcgccgagcugcccuucaccaucgacaaguga

SEQ ID NO: 181112 - RNA, 1350 nt, Artificial Sequence
  derived and/or modified CDS sequence (opt4) from neuraminidase__InfluenzaA__AEO89041
augaaccccaaccagaagaucaucaccaucggcagcaucugcauggugaucggccuggugagccugaugcugcagaucggcaacaugaucagcaucugggugagccacagcauccagaccggcaaccagcaccaggccgagcccaucagaaacaccaacuuccugaccgagaacgccguggccagcgugacccuggccggcaacagcagccugugccccgugagaggcugggccgugcacagcaaggacaacagcaucagaaucggcagcaagggcgacguguucgugaucagagagcccuucaucagcugcagccaccuggagugcagaaccuucuuccugacccagggcgcccugcugaacgacaagcacagcaacggcaccgugaaggacagaagcccccacagaacccugaugagcugccccgugggcgaggcccccagccccuacaacagcagauucgagagcguggccuggagcgccagcgccugccacgacggcaccagcuggcugaccaucggcaucagcggccccgacaacggcgccguggccgugcugaaguacaacggcaucaucaccgacaccaucaagagcuggagaaacaacauccugagaacccaggagagcgagugcgccugcgugaacggcagcugcuucaccgugaugaccgacggccccagcaacggccaggccagcuacaagaucuucaagauggagaagggcaagguggugaagagcguggagcugaacgcccccaacuaccacuacgaggagugcagcugcuaccccgacgccggcgagaucaccugcgugugcagagacaacuggcacggcagcaacagacccugggugagcuucaaccagaaccuggaguaccagaucggcuacaucugcagcggcguguucggcgacaaccccagacccaacgacggcaccggcagcugcggccccgugagccccaacggcgccuacggcaucaagggcuucagcuucaaguacggcaacggcguguggaucggcagaaccaagagcaccaacagcagaagcggcuucgagaugaucugggaccccaacggcuggaccggcaccgacagcaacuucagcgugaagcaggacaucguggccaucaccgacuggagcggcuacagcggcagcuucgugcagcaccccgagcugaccggccuggacugcaucagacccugcuucuggaucgagcugaucagaggcagacccaaggagagcaccaucuggaccagcggcagcagcaucagcuucugcggcgugaacagcgacaccgugagcuggagcuggcccgacggcgccgagcugcccuucaccaucgacaaguga

SEQ ID NO: 181113 - RNA, 1350 nt, Artificial Sequence
  derived and/or modified CDS sequence (opt4) from neuraminidase__InfluenzaA__AEO89050
augaaccccaaccagaagaucaucaccaucggcagcaucugcauggugaucggcaucgugagccugaugcugcagaucggcaacaugaucagcaucugggugagccacagcauccagaccggcaaccagcaccaggccgagcccaucagaaacaccaacuuccugaccgagaacgccguggccagcgugacccuggccggcaacagcagccugugccccaucagaggcugggccgugcacagcaaggacaacagcaucagaaucggcagcaagggcgacguguucgugaucagagagcccuucaucagcugcagccaccuggagugcagaaccuucuuccugacccagggcgcccugcugaacgacaagcacagcaacggcaccgugaaggacagaagcccccacagaacccugaugagcugccccaugggcgaggcccccagccccuacaacagcagauucgagagcguggccuggagcgccagcgccugccacgacggcaccagcuggcugaccaucggcaucagcggccccgacaacggcgccguggccgugcugaaguacaacggcaucaucaccgacaccaucaagagcuggagaaacaacauccugagaacccaggagagcgagugcgccugcgugaacggcagcugcuucaccgugaugaccgacggccccagcaacggccaggccagcuacaagaucuucaagauggagaagggcaagguggugaagagcguggagcugaacgcccccaacuaccacuacgaggagugcagcugcuaccccgacgccggcgagaucaucugcgugugcagagacaacuggcacggcagcaacagacccugggugagcuucaaccagaaccuggaguaccagaucggcuacaucugcagcggcguguucggcgacaaccccagacccaacgacggcaccggcagcugcggccccgugagccccaacggcgccuacggcaucaagggcuucagcuucaaguacggcaacggcguguggaucggcagaaccaagagcaccaacagcagaagcggcuucgagaugaucugggaccccaacggcuggaccggcaccgacagcgacuucagcgugaagcaggacaucguggccaucaccgacuggagcggcuacagcggcagcuucgugcagcaccccgagcugaccggccuggacugcaucagacccugcuucuggguggagcugaucagaggcagacccaaggagagcaccaucuggaccagcggcagcagcaucagcuucugcggcgugaacagcgacaccgugagcuggagcuggcccgacggcgccgagcugcccuucaccaucgacaaguga

SEQ ID NO: 181114 - RNA, 1350 nt, Artificial Sequence
  derived and/or modified CDS sequence (opt4) from neuraminidase__InfluenzaA__AEO89058
augaaccccaaccagaagaucaucaccaucggcagcaucugcauggugaucggcaucgugagccugaugcugcagaucggcaacaugaucagcaucugggugagccacagcauccagaccggcaaccagagacaggccgagcccaucagcaacaccaaguuccugaccgagaaggccguggccagcgugacccuggccggcaacagcagccugugccccaucagcggcugggccguguacagcaaggacaacagcaucagaaucggcagcagaggcgacguguucgugaucagagagcccuucaucagcugcagccaccuggagugcagaaccuucuuccugacccagggcgcccugcugaacgacaagcacagcaacggcaccgugaaggacagaagcccccacagaacccugaugagcugccccgugggcgaggcccccagccccuacaacagcagauucgagagcguggccuggagcgccagcgccugccacgacggcaccagcuggcugaccaucggcaucagcggccccgacaacggcgccguggccgugcugaaguacaacggcaucaucaccgacaccaucaagagcuggagaaacaacauccugagaacccaggagagcgagugcgccugcgugaacggcagcugcuucaccgugaugaccgacggccccagcaacggccaggccagcuacaagaucuucaagauggagaagggcaagguggugaagagcguggagcuggacgcccccaacuaccacuacgaggagugcagcugcuaccccgacgccggcgagaucaccugcgugugcagagacaacuggcacggcagcaacagacccugggugagcuucaaccagaaccuggacuaccagaucggcuacaucugcagcggcguguucggcgacaaccccagacccaacgacggcaccggcagcugcggccccgugagccccaacggcgccuacggcgugaagggcuucagcuucaaguacggcaacggcguguggaucggcagaaccaagagcaccaacagcagaagcggcuucgagaugaucugggaccccaacggcuggaccggcaccgacagcagcuucagcgugaagcaggacaucguggccaucaccgacuggagcggcuacagcggcagcuucgugcagcaccccgagcugaccggccuggacugcaucagacccugcuucuggguggagcugaucagaggcagacccaaggagagcaccaucuggaccagcggcagcagcaucagcuucugcggcgugaacagcgacaccgugagcuggagcuggcccgacggcgccgagcugcccuucaccaucgacaaguga

SEQ ID NO: 181115 - RNA, 1350 nt, Artificial Sequence
  derived and/or modified CDS sequence (opt4) from neuraminidase__InfluenzaA__AEO89075
augaaccccaaccagaagaucaucaccaucggcagcaucugcauggugaucggcaucgugagccugaugcugcagaucggcaacaugaucagcaucugggugagccacagcauccagagaggcaaccugaaccagguggagcccaucagcaacaccaacuuccugaccgagaaggccguggccagcgugacccuggccggcaacagcagccugugccccaucagaggcugggccauccacagcaaggacaacagcaucagaaucggcagcaagggcgacguguucgugaucagagagcccuucaucagcugcagccaccuggagugcagaaccuucuuccugacccagggcgcccugcugaacgacaagcacagcaacggcaccgugaaggacagaagcccccacagaacccugaugagcugccccgugggcgaggugcccagccccuacaacagcagauucgagagcguggccuggagcgccagcgccugccacgacggcaccagcuggcugaccaucggcaucagcggccccgacaacggcgccguggccguggugaaguacaacggcaucaucaccgacaccaucaagagcuggagaaacaacauccugagaacccaggagagcgagugcgccugcgugaacggcagcugcuucaccgugaugaccgacggccccagcaacggccaggccagcuacaagaucuucaagauggagaagggcaaggugaucaagagcguggagcuggacgcccccaacuaccacuacgaggagugcagcugcuaccccgacgccggcgagaucaccugcgugugcagagacaacuggcacggcagcaacagacccugggugagcuucaaccagaaccuggaguaccagaucggcuacaucugcagcggcguguucggcgacaaccccagacccaacgacggcaccggcagcugcggccccgugagccccaacggcgccuacggcgugaagggcuucagcuucaaguacggcaacggcguguggaucggcagaaccaagagccccaacagcagaagcggcuucgagaugaucugggaccccaacggcuggagcgagaccgacagcagcuucagcgugaagcaggacaucguggccaucaccgacuggagcggcuacagcggcagcuucgugcagcaccccgagcugaccggccuggacugcaucagacccugcuucuggguggagcugaucagaggcagacccaaggagagcaccaucuggaccagcggcagcagcaucagcuucugcggcgugaacagcgacaccgugagcuggagcuggcccgacggcgccgagcugcccuucaccaucgacaaguga

SEQ ID NO: 181116 - RNA, 1350 nt, Artificial Sequence
  derived and/or modified CDS sequence (opt4) from neuraminidase__InfluenzaA__AEO89084
augaaccccaaccagaagaucaucaccaucggcagcaucugcauggugaucggcaucgugagccugaugcugcagaucggcaacaugaucagcaucuggaucagcuacagcauccagaccggcaaccagcaccaggccgagcccaccagaaacgccaccuuccugaccgagaacgccguggccagcgugacccuggccggcaacagcagccugugccccgugagaggcugggccgugcacagcaaggacaacagcaucagaaucggcagcaagggcgacguguucgugaucagagagcccuucaucagcugcagccaccuggagugcagaaccuucuuccugacccagggcgcccugcugaacgacaagcacagcaacggcaccgugaaggacagaagcccccacagaacccugaugagcugccccgugggcgaggcccccagccccuacaacagcagauucgagagcguggccuggagcgccagcgccugccacgacggcaccagcuggcugaccaucggcaucagcggccccgacaacggcgccguggccgugcugaaguacaacggcaucaucaccgacaccaucaagagcuggagaaacaacauccugagaacccaggagagcgagugcgccugcgugaacggcagcugcuucaccgugaugaccgacggccccagcgacggccaggccagcuacaagaucuucaagauggagaagggcaagguggugaagagcguggagcugaucgcccccaacuaccacuacgaggagugcagcugcuaccccgacgccggcgagaucaccugcgugugcagagacaacuggcacggcagcaacagacccugggugagcuucaaccagaaccuggaguaccagaucggcuacaucugcagcggcguguucggcgacaaccccagacccaacgacggcaccggcagcugcggccccgugagccccaacggcgccuacggcaucaagggcuucagcuucaaguacggcaacggcguguggaucggcagaaccaagagcaccaacagcagaagcggcuucgagaugaucugggaccccaacggcuggaccgagaccgacagcaacuucagcgugaagcaggacaucguggccaucaccgacuggagcggcuacagcggcagcuucgugcagcaccccgagcugaccggccuggacugcaucagacccugcuucuggguggagcugaucagaggcagacccaaggagagcaccaucuggaccagcggcagcagcaucagcuucugcggcgugaacagcgacaccgugagcuggagcuggcccgacggcgccgagcugcccuucaccaucgacaaguga

SEQ ID NO: 181117 - RNA, 1350 nt, Artificial Sequence
  derived and/or modified CDS sequence (opt4) from neuraminidase__InfluenzaA__AEO89093
augaaccccaaccagaagaucaucaccaucggcagcaucugcauggugaucggcaucgugagccugaugcugcagaucggcaacaugaucagccugugggugagccacagcauccagaccggcaaccagcaccagguggagcccaucagcaacaccaacuuccugguggagaaggccguggccagcgugacccuggccggcaacagcagccugugccccaucagaggcugggccgugcacagcaaggacaacagcaucagaaucggcagcaagggcgacguguucgugaucagagagcccuucaucagcugcagccaccuggagugcagaaccuucuuccugacccagggcgcccugcugaacgacaagcacagcaacggcaccgugaaggacagaagcccccacagaacccugaugagcugccccgugggcgaggcccccagccccuacaacagcagauucgagagcguggccuggagcgccagcgccugccacgacggcaccagcuggcugaccaucggcaucagcggccccgacaacggcgccguggccgugcugaaguacaacggcaugaucaccgacaccaucaagagcuggagaaacaacauccugagaacccaggagagcgagugcgccugcgugaacggcagcugcuucaccgugaugaccgacggccccagcaacggccaggccagcuacaagaucuucaagauggagaagggcagaguggugaagagcguggagcuggacgcccccaacuaccacuacgaggagugcagcugcuaccccgacgccggcgagaucaccugcgugugcagagacaacuggcacggcagcaacagacccugggugagcuucaaccagaaccuggaguaccagaucggcuacaucugcagcggcguguucggcgacaaccccagacccaacgacggcaccggcagcugcggccccgugagcagcaacggcgccuacggcgugaagggcuucagcuucaaguacggcaacggcguguggaucggcagaaccaagagccccaacagcagaagcggcuucgagaugaucugggaccccaacggcuggaccgagaccgacagcagcuucagcgugaagcaggacaucguggccaucaccgacuggagcggcuacagcggcagcuucgugcagcaccccgagcugaccggccuggacugcaucagacccugcuucuggguggagcugaucagaggcagacccaaggagagcaccaucuggaccagcggcagcagcaucagcuucugcggcgugaacagcgacaccgugagcuggagcuggcccgacggcgccgagcugcccuucaccaucgacaaguga

SEQ ID NO: 181118 - RNA, 1350 nt, Artificial Sequence
  derived and/or modified CDS sequence (opt4) from neuraminidase__InfluenzaA__AEO89102
augaaccccaaccagaagaucaucaccaucggcagcaucugcauggugaucggcaucgugagccugaugcugcagaucggcaacaugaucagcaucuggaucagccacagcauccagaccggcaaccagaaccagguggagcccaucagcaacaccaacuuccugaccgagaaggccguggccagcgugauccuggccggcaacagcagccugugccccaucagaggcugggccauccacagcaaggacaacagcaucagaaucggcagcaagggcgacguguucgugaucagagagcccuucaucagcugcagccaccuggagugcagaaccuucuuccugacccagggcgcccugcugaacgacaagcacagcaacggcaccgugaaggacagaagcccccacagaacccugaugagcugccccgugggcgaggcccccagccccuacaacagcagauucgagagcguggccuggagcgccagcgccugccacgacggcaccagcuggcugaccaucggcaucagcggccccgacagcggcgccguggccgugcugaaguacaacggcaucaucaccgacaccaucaagagcuggagaaacaacauccugagaacccaggagagcgagugcgccugcgugaacggcagcugcuucaccgugaugaccgacggccccagcaacggccaggccagcuacaagaucuucaagauggagaagggcaaggugaucaagagcguggagcuggacgcccccaacuaccacuacgaggagugcagcugcuaccccgacgccggcgagaucaccugcgugugcagagacaacuggcacggcagcaacagacccugggugagcuucaaccagaaccuggaguaccagaucggcuacaucugcagcggcguguucggcgacaaccccagacccaacgacggcaccggcagcugcggccccgugagccacaacggcgccuacggcgugaagggcuucagcuucaaguacggcaacggcguguggaucggcagaaccaagagccccaacagcagaagcggcuucgagaugaucugggaccccaacggcuggagcgagaccgacagcagcuucagcgugaagcaggacaucguggccaucaccgacuggagcggcuacagcggcagcuucgugcagcaccccgagcugaccggccuggacugcaucagacccugcuucuggguggagcugaucagaggcagacccaaggagagcaccguguggaccagcggcagcagcaucagcuucugcggcgugaacagcgacaccgugagcuggagcuggcccgacggcgccgagcugcccuucaccaucgacaaguga

SEQ ID NO: 181119 - RNA, 1350 nt, Artificial Sequence
  derived and/or modified CDS sequence (opt4) from neuraminidase__InfluenzaA__AEO89111
augaaccccaaccagaagaucaucaccaucggcagcaucugcauggugaucggcaucgugagccugaugcugcagaucggcaacaucaucagcaucugggugagccacagcauccagaccggcaaccagcaccaggacgagcccaucagaaacgccaacgugcugaccgagaacgccguggccagcgugacccuggccggcaacagcagccugugccccgugagaggcugggccgugcacagcaaggacaacagcaucagaaucggcagcaagggcgacguguucgugaucagagagcccuucaucagcugcagccaccuggagugcagaaccuucuuccugacccagggcgcccugcugaacgacaagcacagcaacggcaccgugaaggacagaagcccccacagaacccugaugagcugccccgugggcgaggcccccagccccuacaacagcagauucgagagcguggccuggagcgccagcgccugccacgacggcaccagcuggcugaccaucggcaucagcggccccgacaacggcgccguggccgugcugaaguacaacggcaucaucaccgacaccaucaagagcuggagaaacaacauccugagaacccaggagagcgagugcgccugcgugaacggcagcugcuucaccgugaugaccgacggccccagcaacggccaggccagcuacaagaucuucaagauggagaagggcaagguggugaagagcguggagcugaacgcccccaacuaccacuacgaggagugcagcugcuaccccgacgccggcgagaucaccugcgugugcagagacaacuggcacggcagcaacagacccugggugagcuucaaccagaaccuggaguaccagaucggcuacaucugcagcggcguguucggcgacaaccccagacccaacgacggcaccggcagcugcgaccccgugagccccaacggcgccuacggcaucaagggcuucagcuucaaguacggcaacggcguguggaucggcagaaccaagagcaccaacagcagaagcggcuucgagaugaucugggaccccaacggcuggaccgagaccgacagcaacuucagcgugaagcaggacaucguggccaucaccgacuggagcggcuacagcggcagcuucgugcagcaccccgagcugaccggccuggacugcaucagacccugcuucuggguggagcugaucagaggcagacccaaggagagcaccaucuggaccagcggcagcagcaucagcuucugcggcgugaacagcgacaccgugagcuggagcuggcccgacggcgccgagcugcccuucaccaucgacaaguga

SEQ ID NO: 181120 - RNA, 1350 nt, Artificial Sequence
  derived and/or modified CDS sequence (opt4) from neuraminidase__InfluenzaA__AEO89120
augaaccccaaccagaagaucaucaccaucggcagcaucugcauggugaucggcaucgugagccugaugcugcagaucggcaacaugaucagcaucugggugagccacagcauccagaccggcaaccagcaccaggccgagcccaucagaaacgccagcuuccugaccgagaacgccguggccagcgugacccuggccggcaacagcagccugugccccgugagaggcugggccgugcacagcaaggacaacagcaucagaaucggcagcaagggcgacguguucgugaucagagagcccuucaucagcugcagccaccuggagugcagaaccuucuuccugacccagggcgcccugcugaacgacaagcacagcaacggcaccgugaaggacagaagcccccacagaacccugaugagcugccccgugggcgaggcccccagccccuacaacagcagauucgagagcguggccuggagcgccagcgccugccacgacggcaucagcuggcugaccaucggcaucagcggccccgacaacggcgccguggccgugcugaaguacaacggcaucaucaccgacaccaucaagagcuggagaaacaacauccugagaacccaggagagcgagugcgccugcgugaacggcagcugcuucaccgugaugaccgacggccccagcaacggccaggccagcuacaagaucuucaagauggagaagggcaagguggugaagagcguggagcugaacgcccccaacuaccacuacgaggagugcagcugcuaccccgacgccggcgagaucaccugcgugugcagagacaacuggcacggcagcaacagacccugggugagcuucaaccagaaccuggaguaccagaucggcuacaucugcagcggcguguucggcgacaaccccagacccaacgacggcaccggcagcugcggccccgugagccccaacggcgccuacggcaucaagggcuucagcuucaaguacggcaacggcguguggaucggcagaaccaagagcaccaacagcagaagcggcuucgagaugaucugggaccccaacggcugggccgagaccgacagcaacuucagcgugaagcaggacaucguggccaucaccgacuggagcggcuacagcggcagcuucgugcagcaccccgagcugaccggccuggacugcaucagacccugcuucuggguggagcugaucagaggcagacccaaggagggcaccaucuggaccagcggcagcagcaucagcuucugcggcgugaacagcgacaccgugagcuggagcuggcccgacggcgccgagcugcccuucaccaucgacaaguga

SEQ ID NO: 181121 - RNA, 1350 nt, Artificial Sequence
  derived and/or modified CDS sequence (opt4) from neuraminidase__InfluenzaA__AEO89129
augaaccccaaccagaagaucaucaccaucggcagcaucugcauggugaucggcaucgugagccugaugcugcagaucggcaacaucaucagcaucugggugagccacagcacccagaccggcaaccagcaccaggacgagcccaucagaaacgccaacuuccugaccgagaacgccguggccagcgugacccuggccggcaacagcagccugugccccgugagaggcugggccgugcacagcaaggacaacagcaucagagugggcagcaagggcgacguguucgugaucagagagcccuucaucagcugcagccaccuggagugcagaaccuucuuccugacccagggcgcccugcugaacgacaagcacagcaacggcaccgugaaggacagaagcccccacagaacccugaugagcugccccgugggcgaggcccccagccccuacaacagcagauucgagagcguggccuggagcgccagcgccugccacgacggcaccagcuggcugaccaucggcaucagcggccccgacaacggcgccguggccgugcugaaguacaacggcaucaucaccgacaccaucaagagcuggagaaacaacauccugagaacccaggagagcgagugcgccugcgugaacggcagcugcuucaccgugaugaccgacggccccagcaacggccaggccagcuacaagaucuucaagauggagaagggcaagguggugaagagcguggagcugaacgcccccaacuaccacuacgaggagugcagcugcuaccccgacgccggcgagaucaccugcgugugcagagacaacuggcacggcagcaacagacccugggugagcuucaaccagaaccuggaguaccagaucggcuacaucugcagcggcguguucggcgacaaccccagacccaacgacggcaccggcagcugcgaccccgugagccccaacggcgccuacggcaucaagggcuucagcuucaaguacggcaacggcguguggaucggcagaaccaagagcaccaacagcagaagcggcuucgagaugaucugggaccccaacggcuggaccgagaccgacagcaacuucagcgugaagcaggacaucguggccaucaccgacuggagcggcuacagcggcagcuucgugcagcaccccgagcugaccggccuggacugcaucagacccugcuucuggguggagcugaucagaggcagacccaaggagagcaccaucuggaccagcggcagcagcaucagcuucugcggcgugaacagcgacaccgugagcuggagcuggcccgacggcgccgagcugcccuucaccaucgacaaguga

SEQ ID NO: 181122 - RNA, 1350 nt, Artificial Sequence
  derived and/or modified CDS sequence (opt4) from neuraminidase__InfluenzaA__AEO89138
augaaccccaaccagaagaucaucaccaucggcagcaucugcauggugaccggcaucgugagccugaugcugcagaucggcaacaucaucagcaugugggugagccacagcauccagaccagaaaccagcaccaggccgagcccaucagaaacaccaacuuccugaccgagaacgccguggccagcgugacccugaccggcaacagcagccugugccccaucagaggcugggccgugcacagcaaggacaacagcaucagaaucggcagcaagggcgacguguucgugaucagagagcccuucaucagcugcagccaccuggagugcagaaccuucuuccugacccagggcgcccugcugaacgacaagcacagcaacggcaccgugaaggacagaagcccccacagaacccugaugagcugccccgugggcgaggcccccagccccuacaacagcagauucgagagcguggccuggagcgccagcgccugccacgacggcaccagcuggcugaccaucggcaucagcggccccgacaacggcgccguggccgugcugaaguacaacggcaucaucaccgacaccaucaagagcuggagaaacaacauccugagaacccaggagagcgagugcgccugcgugaacggcagcugcuucaccgugaugaccgacggccccagcaacggccaggccagcuacaagaucuucaagauggagaagggcaagguggugaagagcguggagcugaacgcccccaacuaccacuacgaggagugcagcugcuaccccgacgccggcgagaucaucugcgugugcagagacaacuggcacggcagcaacagacccugggugagcuucaaccagaaccuggaguaccagaucggcuacaucugcagcggcguguucggcgacaaccccagacccaacgacggcaccggcagcugcggccccgugagccccaacggcgccuacggcaucaagggcuucagcuucaaguacggcaacggcguguggaucggcagaaccaagagcaccaacagcagaagcggcuucgagaugaucugggaccccaacggcuggaccggcaccgacaacgacuucagcgugaagcaggacaucguggccaucaccgacuggagcggcuacagcggcagcuucgugcagcaccccgagcugaccggccuggacugcaucagacccugcuucuggguggagcugaucagaggcagacccaaggagagcaccguguggaccagcggcagcagcaucagcuucugcggcgugaacagcgacaccgugagcuggagcuggcccgacggcgccgagcugcccuucaccaucgacaaguga

SEQ ID NO: 181123 - RNA, 1350 nt, Artificial Sequence
  derived and/or modified CDS sequence (opt4) from neuraminidase__InfluenzaA__AEO89156
augaaccccaaccagaagaucaucaccaucggcagcaucugcauggugaccggcaucgugagccugaugcugcagaucggcaacaucaccagcaugugggugagccacagcauccagaccagaaaccagcaccaggccgagcccaucagaaacaccaacuuccugaccgagaacgccguggccagcgugacccuggccggcaacagcagccugugccccaucagaggcugggccgugcacagcaaggacaacagcaucagaaucggcagcaagggcgacguguucgugaucagagagcccuucaucagcugcagccaccuggagugcagaaccuucuuccugacccagggcgcccugcugaacgacaagcacagcaacggcaccgugaaggacagaagcccccacagaacccugaugagcugccccgugggcgaggcccccagccccuacaacagcagauucgagagcguggccuggagcgccagcgccugccacgacggcaccagcuggcugaccaucggcaucagcggccccgacaacggcgccguggccgugcugaaguacaacggcaucaucaccgacaccaucaagagcuggagaaacaacauccugagaacccaggagagcgagugcgccugcgugaacggcagcugcuucaccgugaugaccgacggccccagcaacggccaggccagcuacaagaucuucaagauggagaagggcaagguggugaagagcguggagcugaacgcccccaacuaccacuacgaggagugcagcugcuaccccgacgccggcgagaucaucugcgugugcagagacaacuggcacggcagcaacagacccugggugagcuucaaccagaaccuggaguaccagaucggcuacaucugcagcggcguguucggcgacaaccccagacccaacgacggcaccggcagcugcggccccgugagccccaacggcgccuacggcaucaagggcuucagcuucaaguacggcaacggcguguggaucggcagaaccaagagcaccaacagcagaagcggcuucgagaugaucugggaccccaacggcuggaccggcaccgacagcgacuucagcgugaagcaggacaucguggccaucaccgacuggagcggcuacagcggcagcuucgugcagcaccccgagcugaccggccuggacugcaucagacccugcuucuggguggagcugaucagaggcagacccaaggagagcaccaucuggaccagcggcagcagcaucagcuucugcggcgugaacagcgacaccgugagcuggagcuggcccgacggcgccgagcugcccuucaccaucgacaaguga

SEQ ID NO: 181124 - RNA, 1350 nt, Artificial Sequence
  derived and/or modified CDS sequence (opt4) from neuraminidase__InfluenzaA__AEO89174
augaaccccaaccagaagaucaucaccaucggcagcaucugcauggugaccggcaucgugagccugaugcugcagaucggcaacaucaucagcaugugggugagccacagcauccagaccagaaaccagcaccaggccgagcccaucagaaacaccaacuuccugaccgagaacgccguggccagcgugacccuggccggcaacagcagccugugccccaucagaggcugggccgugcacagcaaggacaacagcaucagaaucggcagcaagggcgacguguucgugaucagagagcccuucaucagcugcagccaccuggagugcagaaccuucuuccugacccagggcgcccugcugaacgacaagcacagcaacggcaccgugaaggacagaagcccccacagaacccugaugagcugccccgugggcgaggcccccagccccuacaacagcagauucgagagcguggccuggagcgccagcgccugccacgacggcaccagcuggcugaccaucggcaucagcggccccgacaacggcgccguggccgugcugaaguacaacggcaucaucaccgacaccaucaagagcuggagaaacaacauccugagaacccaggagagcgagugcgccugcgugaacggcagcugcuucaccgugaugaccgacggccccagcaacggccaggccagcuacaagaucuucaagauggagaagggcaagguggugaagagcguggagcugaacgcccccaacuaccacuacgaggagugcagcugcuaccccgacgccggcgagaucaucugcgugugcagagacaacuggcacggcagcaacagacccugggugagcuucaaccagaaccuggaguaccagaucggcuacaucugcagcggcguguucggcgacaaccccagacccaacgacggcaccggcagcugcggccccgugagccccaacggcgccuacggcaucaagggcuucagcuucaaguacggcaacggcguguggaucggcagaaccaagagcaccaacagcagaagcggcuucgagaugaucugggaccccaacggcuggaccggcaccgacagcgacuucagcgugaagcaggacaucguggccaucaccgacuggagcggcuacagcggcagcuucgugcagcaccccgagcugaccggccuggacugcaucagacccugcuucuggguggagcugaucagaggcagacccaaggagagcaccaucuggaccagcggcagcagcaucagcuucugcggcgugaacagcgacaccgugagcuggagcuggcccgacggcgccgagcugcccuucaccaucgacaaguga

SEQ ID NO: 181125 - RNA, 1350 nt, Artificial Sequence
  derived and/or modified CDS sequence (opt4) from neuraminidase__InfluenzaA__AEO89183
augaaccccaaccagaagaucgugaccaucggcagcaucugcauggugaucggcaucgugagccugaugcugcagaucggcaacaugaucagcaucugggugagccacagcauccagaccggcaaccagcaccagaccgagcccaucagaaacaccaacuuccugaccgagaacaccguggccagcgugacccuggccggcaacagcagccugugccccaucagaggcugggccgugcacagcaaggacaacagcaucagaaucggcagcaagggcgacguguucgugaucagagagcccuucaucagcugcagccaccuggagugcagaaccuucuuccugacccagggcgcccugcugaacgacaagcacagcaacggcaccgugaaggacagaagcccccacagaacccugaugagcugccccaucggcgaggcccccagccccuacaacagcagauucgagagcguggccuggagcgccagcgccugccacgacggcaccagcuggcugaccaucggcaucagcggccccgacaacggcgccguggccgugcugaaguacaacggcaucaucaccgacaccaucaagagcuggagaaacaacauccugagaacccaggagagcgagugcgccugcgugaacggcagcugcuucaccgugaugaccgacggccccagcaacggccaggccagcuacaagaucuucaagauggagaagggcaagguggugaagagcguggagcugaacgcccccaacuaccacuacgaggagugcagcugcuaccccgacgccggcgagaucaucugcgugugcagagacaacuggcacggcagcaacagacccugggugagcuucaaccagaaccuggaguaccagaucggcuacaucugcagcggcguguucggcgacaaccccagacccaacgacggcaagggcagcugcggccccgugagccccaacggcgccuacggcgugaagggcuucagcuucaaguacggcaacggcguguggaucggcagaaccaagagcacccacagcagaagcggcuucgagaugaucugggaccccaacggcuggaccggcaccgacagcgaguucagcaugaagcaggacaucguggccaucaccgacuggagcggcuacagcggcagcuucgugcagcaccccgagcugaccggccuggacugcaucagacccugcuucuggguggagcugaucagaggcagacccaaggagagcaccaucuggaccagcggcagcagcaucagcuucugcggcgugaacagcgacaccgugagcuggagcuggcccgacggcgccgagcugcccuucaccaucgacaaguga

SEQ ID NO: 181126 - RNA, 1350 nt, Artificial Sequence
  derived and/or modified CDS sequence (opt4) from neuraminidase__InfluenzaA__AEO89205
augaaccccacccagaagaucaucaccaucggcagcaucugcauggugaucggcaucgugagccugaugcugcagaucggcaacaugaucagcaucugggugagccacagcauccagaccggcaaccagcaccaggccgagcccaucagaaacgccagcuuccugaccgagaacgccguggccagcgugacccuggccggcaacagcagccugugccccgugagaggcugggccgugcacagcaaggacaacagcaucagaaucggcagcaagggcgacguguucgugaucagagagcccuucaucagcugcagccaccuggagugcagaaccuucuuccugacccagggcgcccugcugaacgacaagcacagcaacggcaccgugaaggacagaagcccccacagaacccugaugagcugccccgugggcgaggcccccagccccuacaacagcagauucgagagcguggccuggagcgccagcgccugccacgacggcaucagcuggcugaccaucggcaucagcggccccgacaacggcgccguggccgugcugaaguacaacggcaucaucaccgacaccaucaagagcuggagaaacaacauccugagaacccaggagagcgagugcgccugcgugaacggcagcugcuucaccgugaugaccgacggccccagcaacggccaggccagcuacaagaucuucaagauggagaagggcaagguggugaagagcguggagcugaacgcccccaacuaccacuacgaggagugcagcugcuaccccgacgccggcgagaucaccugcgugugcagagacaacuggcacggcagcaacagacccugggugagcuucaaccagaaccuggaguaccagaucggcuacaucugcagcggcguguucggcgacaaccccagacccaacgacggcaccggcagcugcggccccgugagccccaacggcgccuacggcaucaagggcuucagcuucaaguacggcaacggcguguggaucggcagaaccaagagcaccaacagcagaagcggcuucgagaugaucugggaccccaacggcugggccgagaccgacagcaacuucagcgugaagcaggacaucguggccaucaccgacuggagcggcuacagcggcagcuucgugcagcaccccgagcugaccggccuggacugcaucagacccugcuucuggguggagcugaucagaggcagacccaaggagggcaccaucuggaccagcggcagcagcaucagcuucugcggcgugaacagcgacaccgugagcuggagcuggcccgacggcgccgagcugcccuucaccaucgacaaguga

SEQ ID NO: 181127 - RNA, 1350 nt, Artificial Sequence
  derived and/or modified CDS sequence (opt4) from neuraminidase__InfluenzaA__AEO89215
augaaccccaaccagaagaucaucaccaucggcagcaucugcauggccaucggcaucgugagccugaugcugcagaucggcaacaugaucagcaucugggugagccacagcauccagaccggcaaccagcaccaggccgagcccaucagaaacgccagcuuccugaccgagaacgccguggccagcgugacccuggccggcaacagcagccugugccccgugagaggcugggccgugcacagcaaggacaacagcaucagaaucggcagcaagggcgacguguucgugaucagagagcccuucaucagcugcagccaccuggagugcagaaccuucuuccugacccagggcgcccugcugaacgacaagcacagcaacggcaccgugaaggacagaagcccccacagaacccugaugagcugccccgugggcgaggcccccagccccuacaacagcagauucgagagcguggccuggagcgccagcgccugccacgacggcaucagcuggcugaccaucggcaucagcggccccgacaacggcgccguggccgugcugaaguacaacggcaucaucaccgacaccaucaagagcuggagaaacaacauccugagaacccaggagagcgagugcgccugcgugaacggcagcugcuucaccgugaugaccgacggccccagcaacggccaggccagcuacaagaucuucaagauggagaagggcaagguggugaagagcguggagcugaacgcccccaacuaccacuacgaggagugcagcugcuaccccgacgccggcgagaucaccugcgugugcagagacaacuggcacggcagcaacagacccugggugagcuucaaccagaaccuggaguaccagaucggcuacaucugcagcggcguguucggcgacaaccccagacccaacgacggcaccggcagcugcggccccgugagccccaacggcgccuacggcaucaagggcuucagcuucaaguacggcaacggcguguggaucggcagaaccaagagcaccaacagcagaagcggcuucgagaugaucugggaccccaacggcugggccgagaccgacagcaacuucagcgugaagcaggacaucguggccaucaccgacuggagcggcuacagcggcagcuucgugcagcaccccgagcugaccggccuggacugcaucagacccugcuucuggguggagcugaucagaggcagacccaaggagggcaccaucuggaccagcggcagcagcaucagcuucugcggcgugaacagcgacaccgugagcuggagcuggcccgacggcgccgagcugcccuucaccaucgacaaguga

SEQ ID NO: 181128 - RNA, 1350 nt, Artificial Sequence
  derived and/or modified CDS sequence (opt4) from neuraminidase__InfluenzaA__AEO89226
augaaccccacccagaagaucaucaccaucggcagcaucugcauggccaucggcaucgugagccugaugcugcagaucggcaacaugaucagcaucugggugagccacagcauccagaccggcaaccagcaccaggccgagcccaucagaaacgccagcuuccugaccgagaacgccguggccagcgugacccuggccggcaacagcagccugugccccgugagaggcugggccgugcacagcaaggacaacagcaucagaaucggcagcaagggcgacguguucgugaucagagagcccuucaucagcugcagccaccuggagugcagaaccuucuuccugacccagggcgcccugcugaacgacaagcacagcaacggcaccgugaaggacagaagcccccacagaacccugaugagcugccccgugggcgaggcccccagccccuacaacagcagauucgagagcguggccuggagcgccagcgccugccacgacggcaucagcuggcugaccaucggcaucagcggccccgacaacggcgccguggccgugcugaaguacaacggcaucaucaccgacaccaucaagagcuggagaaacaacauccugagaacccaggagagcgagugcgccugcgugaacggcagcugcuucaccgugaugaccgacggccccagcaacggccaggccagcuacaagaucuucaagauggagaagggcaagguggugaagagcguggagcugaacgcccccaacuaccacuacgaggagugcagcugcuaccccgacgccggcgagaucaccugcgugugcagagacaacuggcacggcagcaacagacccugggugagcuucaaccagaaccuggaguaccagaucggcuacaucugcagcggcguguucggcgacaaccccagacccaacgacggcaccggcagcugcggccccgugagccccaacggcgccuacggcaucaagggcuucagcuucaaguacggcaacggcguguggaucggcagaaccaagagcaccaacagcagaagcggcuucgagaugaucugggaccccaacggcugggccgagaccgacagcaacuucagcgugaagcaggacaucguggccaucaccgacuggagcggcuacagcggcagcuucgugcagcaccccgagcugaccggccuggacugcaucagacccugcuucuggguggagcugaucagaggcagacccaaggagggcaccaucuggaccagcggcagcagcaucagcuucugcggcgugaacagcgacaccgugagcuggagcuggcccgacggcgccgagcugcccuucaccaucgacaaguga

SEQ ID NO: 181129 - RNA, 1350 nt, Artificial Sequence
  derived and/or modified CDS sequence (opt4) from neuraminidase__InfluenzaA__AEO89237
augaaccccaaccagaagaucaucaccaucggcagcaucugcauggugaucggcaucgugagccugaugcugcagaucggcaacaucaucagcaugugggugagccacagcauccagaccagaaaccagcaccaggccgagcccaucagaaacaccaacuuccugaccgagaacgccguggccagcgugacccuggccggcaacagcagccugugccccaucagaggcugggccgugcacagcaaggacaacagcaucagaaucggcagcaagggcgacguguucgugaucagagagcccuucaucagcugcagccaccuggagugcagaaccuucuuccugacccagggcgcccugcugaacgacaagcacagcaacggcaccgugaaggacagaagcccccacagaacccugaugagcugccccgugggcgaggcccccagccccuacaacagcagauucgagagcguggccuggagcgccagcgccugccacgacggcaccagcuggcugaccaucggcaucagcggccccgacaacggcgccguggccgugcugaaguacaacggcaucaucaccgacaccaucaagagcuggagaaacaacauccugagaacccaggagagcgagugcgccugcgugaacggcagcugcuucaccgugaugaccgacggccccagcaacggccaggccagcuacaagaucuucaagauggagaagggcaagguggugaagagcguggagcugaacgcccccaacuaccacuacgaggagugcagcugcuaccccgacgccggcgagaucaucugcgugugcagagacaacuggcacggcagcaacagacccugggugagcuucaaccagaaccuggaguaccagaucggcuacaucugcagcggcguguucggcgacaaccccagacccaacgacggcaccggcagcugcggccccgugagccccaacggcgccuacggcaucaagggcuucagcuucaaguacggcaacggcguguggaucggcagaaccaagagcaccaacagcagaagcggcuucgagaugaucugggaccccaacggcuggaccggcaccgacagcgacuucagcgugaagcaggacaucguggccaucaccgacuggagcggcuacagcggcagcuucgugcagcaccccgagcugaccggccuggacugcaucagacccugcuucuggguggagcugaucagaggcagacccaaggagagcaccaucuggaccagcggcagcagcaucagcuucugcggcgugaacagcgacaccgugagcuggagcuggcccgacggcgccgagcugcccuucaccaucgacaaguga

SEQ ID NO: 181130 - RNA, 1350 nt, Artificial Sequence
  derived and/or modified CDS sequence (opt4) from neuraminidase__InfluenzaA__AEO89248
augaaccccaaccagaagaucaucaccaucggcagcaucugcauggugaucggcaucgugagccugaugcugcagaucggcaacaucaucagcaucugggugagccacagcuuccagaccagagugcagcaccaggccgagcccaucagaaacaccaacuuccugaccgagaacgccguggccagcgugacccuggccggcaacagcagccugugccccaucagaggcugggccgugcacagcaaggacaacagcaucagaaucggcagcaagggcgacguguucgugaucagagagcccuucaucagcugcagccaccuggagugcagaaccuucuuccugacccagggcgcccugcugaacgacaagcacagcaacggcaccgugaaggacagaagcccccacagaacccugaugagcugccccgugggcgaggcccccagccccuacaacagcagauucgagagcguggccuggagcgccagcgccugccacgacggcaccagcuggcugaccaucggcaucagcggccccgacaacggcgccguggccgugcugaaguacaacggcaucaucaccgacaccaucaagagcuggagaaacaacauccugagaacccaggagagcgagugcgccugcgugaacggcagcugcuucaccgugaugaccgacggccccagcaacggccaggccagcuacaagaucuucaagaugaagaagggcaagguggugaagagcguggagcugaacgcccccaacuaccacuacgaggagugcagcugcuaccccgacgccggcgagaucaucugcgugugcagagacaacuggcacggcagcaacagacccugggugagcuucaaccagaaccuggaguaccagaucggcuacaucugcagcggcguguucggcgacaaccccagacccaacgacggcaccggcagcugcggccccgugagccccaacggcgccuacggcaucaagggcuucagcuucaaguacggcaacggcguguggaucggcagaaccaagagcaccaacagcagaagcggcuucgagaugaucugggaccccaacggcuggaccggcaccgacagcgacuucagcaugaagcaggacaucguggccaucaccgacuggagcggcuacagcggcagcuucgugcagcaccccgagcugaccggccuggacugcaucagacccugcuucuggguggagcugaucagaggcagacccaaggagagcaccaucuggaccagcggcagcagcaucagcuucugcggcgugaacagcgacaccgugagcuggagcuggcccgacggcgccgagcugcccuucaccaucgacaaguga

SEQ ID NO: 181131 - RNA, 1350 nt, Artificial Sequence
  derived and/or modified CDS sequence (opt4) from neuraminidase__InfluenzaA__AEO89270
augaaccccaaccagaagaucaucaccaucggcagcaucugcauggugaccggcaucgugagccugaugcugcagaucggcaacaucaccagcaugugggugagccacagcauccagaccagaaaccagcaccaggccgagcccaucagaaacaccaacuuccugaccgagaacgccguggccagcgugacccuggccggcaacagcagccugugccccaucagaggcugggccgugcacagcaaggacaacagcaucagaaucggcagcaagggcgacguguucgugaucagagagcccuucaucagcugcagccaccuggagugcagaaccuucuuccugacccagggcgcccugcugaacgacaagcacagcaacggcaccgugaaggacagaagcccccacagaacccugaugagcugccccgugggcgaggcccccagccccuacaacagcagauucgagagcguggccuggagcgccagcgccugccacgacggcaccagcuggcugaccaucggcaucagcggccccgacaacggcgccguggccgugcugaaguacaacggcaucaucaccgacaccaucaagagcuggagaaacaacauccugagaacccaggagagcgagugcgccugcgugaacggcagcugcuucaccgugaugaccgacggccccagcaacggccaggccagcuacaagaucuucaagauggagaagggcaagguggugaagagcguggagcugaacgcccccaacuaccacuacgaggagugcagcugcuaccccgacgccggcgagaucaucugcgugugcagagacaacuggcacggcagcaacagacccugggugagcuucaaccagaaccuggaguaccagaucggcuacaucugcagcggcguguucggcgacaaccccagacccaacgacggcaccggcagcugcggccccgugagccccaacggcgccuacggcaucaagggcuucagcuucaaguacggcaacggcguguggaucggcagaaccaagagcaccaacagcagaagcggcuucgagaugaucugggaccccaacggcuggaccggcaccgacagcgacuucagcgugaagcaggacaucguggccaucaccgacuggagcggcuacagcggcagcuucgugcagcaccccgagcugaccggccuggacugcaucagacccugcuucuggguggagcugaucagaggcagacccaaggagagcaccaucuggaccagcggcagcagcaucagcuucugcggcgugaacagcgacaccgugggcuggagcuggcccgacggcgccgagcugcccuucaccaucgacaaguga

SEQ ID NO: 181132 - RNA, 1350 nt, Artificial Sequence
  derived and/or modified CDS sequence (opt4) from neuraminidase__InfluenzaA__AEO89281
augaaccccaaccagaagaucaucaccaucggcagcaucugcaugguggugggcaucgugagccugaugcugcagaucggcaacaucgugagcaucugggugagccacagcauccagaccggccaccagcagcaggccgagcccaucaagaacaccaacuuccugaccaagaacgccguggccagcgugacccuggccggcaacagcagccugugccccaucagaggcugggccgugcacagcaaggacaacagcaucagaaucggcagcaagggcgacguguucgugaucagagagcccuucaucagcugcagccaccuggagugcagaaccuucuuccugacccagggcgcccugcugaacgacaagcacagcaacggcaccgugaaggacagaagcccccacagaacccugaugagcugccccgugggcgaggcccccagccccuacaacagcagauucgagagcguggccuggagcgccagcgccugccacgacggcaccagcuggcugaccaucggcaucagcggccccgacaacggcgccguggccgugcugaaguacaacggcaucaucaccgacaccaucaagagcuggagaaacaacacccugagaacccaggagagcgagugcgccugcgugaacggcagcugcuucaccgugaugaccgacggccccagcaacggccaggccagcuacaagaucuucaagauggagaagggcaagguggugaagagcgccgagcugaacgcccccaacuaccacuacgaggagugcagcugcuaccccgacgccggcgagaucaucugcgugugcagagacaacuggcacggcagcaacagacccugggugagcuucaaccagaaccuggaguaccagaucggcuacaucugcagcggcguguucggcgacaaccccagacccaacgacggcaccggcagcugcggccccgugagccccaacggcgccuacggcaucaagggcuucagcuucaaguacggcaacggcguguggaucggcagaaccaagagcaccaacagcagaagcggcuucgagaugaucugggaccccaacggcuggaccggcaccgacagcaacuucagcaugaagcaggacaucguggccaucaccgaguggagcggcuacagcggcagcuucgugcagcaccccgagcugaccggccuggacugcaucagacccugcuucuggguggagcugaucagaggcagacccaaggagagcaccaucuggaccagcggcagcagcaucagcuucugcggcgugaacagcgacaccgugagcuggagcuggcccgacggcgccgagcugcccuucaccaucgacaaguga

SEQ ID NO: 181133 - RNA, 1350 nt, Artificial Sequence
  derived and/or modified CDS sequence (opt4) from neuraminidase__InfluenzaA__AEO89291
augaaccccaaccagaagaucaucaccaucggcagcaucugcaugguggugggcaucgugagccugaugcugcagaucggcaacaucgugagcaucugggugagccacagcauccagaccggccaccagcagcaggccgagcccaucaagaacaccaacuuccugaccgagaacgccguggccagcgugacccuggccggcaacagcagccugugccccaucagaggcugggccgugcacagcaaggacaacagcaucagaaucggcagcaagggcgacguguucgugaucagagagcccuucaucagcugcagccaccuggagugcagaaccuucuuccugacccagggcgcccugcugaacgacaagcacagcaacggcaccgugaaggacagaagcccccacagaacccugaugagcugccccgugggcgaggcccccagccccuacaacagcagauucgagagcguggccuggagcgccagcgccugccacgacggcaccagcuggcugaccaucggcaucagcggccccgacaacggcgccguggccgugcugaaguacaacggcaucaucaccgacaccaucaagagcuggagaaacaacauccugagaacccaggagagcgagugcgccugcgugaacggcagcugcuucaccgugaugaccgacggccccagcaacggccaggccagcuacaagaucuucaagauggagaagggcaagguggugaagagcgccgagcugaacgcccccaacuaccacuacgaggagugcagcugcuaccccgacgccggcgagaucaucugcgugugcagagacaacuggcacggcagcaacagacccugggugagcuucaaccagaaccuggaguaccagaucggcuacaucugcagcggcguguucggcgacaaccccagacccaacgacggcaccggcagcugcggccccgugagccccaacggcgccuacggcaucaagggcuucagcuucaaguacggcaacggcguguggaucggcagaaccaagagcaccaacagcagaagcggcuucgagaugaucugggaccccaacggcuggaccggcaccgacagcaacuucagcaugaagcaggacaucguggccaucaccgaguggagcggcuacagcggcagcuucgugcagcaccccgagcugaccggccuggacugcaucagacccugcuucuggguggagcugaucagaggcagacccaaggagagcaccaucuggaccagcggcagcagcaucagcuucugcggcgugaacagcgacaccgugagcuggagcuggcccgacggcgccgagcugcccuucaccaucgacaaguga

SEQ ID NO: 181134 - RNA, 1350 nt, Artificial Sequence
  derived and/or modified CDS sequence (opt4) from neuraminidase__InfluenzaA__AEO89302
augaaccccaaccagaagaucaucaccaucggcagcaucugcauggugaucggcaucgugagccugaugcugcagaucggcaacaucaucagcaucugggugagccacagcauccagaccggcaaccagcaccaggacgagcccaucagaaacgccaacuuccugaccgagaacgccguggccagcgugacccuggccggcaacagcagccugugccccgugagaggcugggccgugcacagcaaggacaacagcaucagaaucggcagcaagggcgacguguucgugaucagagagcccuucaucagcugcagccaccuggagugcagaaccuucuuccugacccagggcgcccugcugaacgacaagcacagcaacggcaccgugaaggacagaagcccccacagaacccugaugagcugccccgugggcgaggcccccagccccuacaacagcagauucgagagcguggccuggagcgccagcgccugccacgacggcaccagcuggcugaccaucggcaucagcggccccgacaacggcgccguggccgugcugaaguacaacggcaucaucaccgacaccaucaagagcuggagaaacaacauccugagaacccaggagagcgagugcgccugcgugaacggcagcugcuucaccgugaugaccgacggccccagcaacggccaggccagcuacaagaucuucaagauggagaagggcaagguggugagaagcguggagcugaacgcccccaacuaccacuacgaggagugcagcugcuaccccgacgccggcgagaucaccugcgugugcagagacaacuggcacggcagcaacagacccugggugagcuucaaccagaaccuggaguaccagaucggcuacaucugcagcggcguguucggcgacaaccccagacccaacgacggcaccggcagcugcgaccccgugagccccaacggcgccuacggcaucaagggcuucagcuucaaguacggcaacggcguguggaucggcagaaccaagagcaccaacagcagaagcggcuucgagaugaucugggaccccaacggcuggaccgagaccgacagcgacuucagcgugaagcaggacaucguggccaucaccgacuggagcggcuacagcggcagcuucgugcagcaccccgagcugaccggccuggacugcaucagacccugcuucuggguggagcugaucagaggcagacccaaggagagcaccaucuggaccagcggcagcagcaucagcuucugcggcgugagcagcgacaccgugagcuggagcuggcccgacggcgccgagcugcccuucaccaucgacaaguga

SEQ ID NO: 181135 - RNA, 1410 nt, Artificial Sequence; identical to SEQ ID NO: 176117
  derived and/or modified CDS sequence (opt4) from neuraminidase__InfluenzaA__AEO99218

SEQ ID NO: 181136 - RNA, 1410 nt, Artificial Sequence
  derived and/or modified CDS sequence (opt4) from neuraminidase__InfluenzaA__AEQ49739
augaaccccaaccagaagaucaucaccaucggcagcgugugcaugaccaucggcauggccaaccugauccugcagaucggcaacaucaucagcaucuggaucagccacagcauccagcugggcaaccagagccagaucgagaccugcaaccagagcgugaucaccuacgagaacaacaccugggugaaccagaccuacgugaacaucagcaacaccaacuucgccgccggccagagcguggugagcgugaagcuggccggcaacagcagccugugccccgugagcggcugggccaucuacagcaaggacaacagcaucagaaucggcagcaagggcgacguguucgugaucagagagcccuucaucagcugcagcccccuggagugcagaaccuucuuccugacccagggcgcccugcugaacgacaagcacagcaacggcaccaucaaggacagaagccccuacagaacccugaugagcugccccaucggcgaggugcccagccccuacaacagcagauucgagagcguggccuggagcgccagcgccugccacgacggcaucaacuggcugaccaucggcaucagcggccccgacaacggcgccguggccgugcugaaguacaacggcaucaucaccgacaccaucaagagcuggagaaacaacauccugagaacccaggagagcgagugcgccugcgugaacggcagcugcuucaccaucaugaccgacggccccagcgacggccaggccagcuacaagaucuucagaaucgagaagggcaagaucgugaagagcguggagaugaacgcccccaacuaccacuacgaggagugcagcugcuaccccgacagcagcgaggugaccugcgugugcagagacaacuggcacggcagcaacagacccugggugagcuucaaccagaaccuggaguaccagaucggcuacaucugcagcggcaucuucggcgacaaccccagacccaacgacaagaccggcagcugcggccccgugagcagcaacggcgccaacggcgugaagggcuucagcuucaaguacggcaacggcguguggaucggcagaaccaagagcaucagcagcagaaagggcuucgagaugaucugggaccccaacggcuggaccggcaccgacaacaacuucagcaucaagcaggacaucgugggcaucaacgaguggagcggcuacagcggcagcuucgugcagcaccccgagcugaccggcauggacugcaucagacccugcuucuggguggagcugaucagaggcagacccaaggagaacaccaucuggaccagcggcagcagcaucagcuucugcggcgugaacagcgacaccgugggcuggagcuggcccgacggcgccgagcugcccuucaccaucgacaaguga

SEQ ID NO: 181137 - RNA, 1410 nt, Artificial Sequence; identical to SEQ ID NO: 180317
  derived and/or modified CDS sequence (opt4) from neuraminidase__InfluenzaA__AEQ49740

SEQ ID NO: 181138 - RNA, 1410 nt, Artificial Sequence
  derived and/or modified CDS sequence (opt4) from neuraminidase__InfluenzaA__AEQ49741
augaaccccaaccagaagaucaucaccaucggcagcgugugcaugaccaucggcauggccaaccugauccugcagaucggcaacaucaucagcaucuggaucagccacagcauccagcugggcaaccagagccagaucgagaccugcaaccagagcgugaucaccuacgagaacaacaccugggugaaccagaccuacgugaacaucagcaacaccaacuucgccgccggccagagcguggugagcgugaagcuggccggcaacagcagccugugccccgugagcggcugggccaucuacagcaaggacaacagcaucagaaucggcagcaagggcgacguguucgugaucagagagcccuucaucagcugcagcccccuggagugcagaaccuucuuccugacccagggcgcccugcugaacgacaagcacagcaacggcaccaucaaggacagaagccccuacagaacccugaugagcugccccaucggcgaggugcccagccccuacaacagcagauucgagagcguggccuggagcgccagcgccugccacgacggcaucaacuggcugaccaucggcaucagcggccccgacaacggcgccguggccgugcugaaguacaacggcaucaucaccgacaccaucaagagcuggagaaacaacauccugagaacccaggagagcgagugcgccugcgugaacggcagcugcuucaccaucaugaccgacggccccagcgacggccaggccagcuacaagaucuucagaaucgagaagggcaagaucgugaagagcguggagaugaacgcccccaacuaccacuacgaggagugcagcugcuaccccgacagcagcgagaucaccugcgugugcagagacaacuggcacggcagcaacagacccugggugagcuucaaccagaaccuggaguaccagaucggcuacaucugcagcggcaucuucggcgacaaccccagacccaacgacaagaccggcagcugcggccccgugagcagcaacggcgccaacggcgugaagggcuucagcuucaaguacggcaacggcguguggaucggcagaaccaagagcaucagcagcagaaagggcuucgagaugaucugggaccccaacggcuggaccggcaccgacaacaacuucagcaucaagcaggacaucgugggcaucaacgaguggagcggcuacagcggcagcuucgugcagcaccccgagcugaccggcauggacugcaucagacccugcuucuggguggagcugaucagaggcagacccaaggagaacaccaucuggaccagcggcagcagcaucagcuucugcggcgugaacagcgacaccgugggcuggagcuggcccgacggcgccgagcugcccuucaccaucgacaaguga

SEQ ID NO: 181139 - RNA, 1410 nt, Artificial Sequence
  derived and/or modified CDS sequence (opt4) from neuraminidase__InfluenzaA__AEQ49742
augaaccccaaccagaagaucaucaccaucggcagcgugugcaugaccaucggcauggccaaccugauccugcagaucggcaacaucaucagcaucuggaucagccacagcauccagcugggcaaccagagccagaucgagaccugcaaccagagcgugaucaccuacgagaacaacaccugggugaaccagaccuacgugaacaucagcaacaccaacuucgccgccggccagagcguggugagcgugaagcuggccggcaacagcagccugugccccgugagcggcugggccauccacagcaaggacaacagcaucagaaucggcagcaagggcgacguguucgugaucagagagcccuucaucagcugcagcccccuggagugcagaaccuucuuccugacccagggcgcccugcugaacgacaagcacagcaacggcaccaucaaggacagaagccccuacagaacccugaugagcugccccaucggcgaggugcccagccccuacaacagcagauucgagagcguggccuggagcgccagcgccugccacgacggcaucaacuggcugaccaucggcaucagcggccccgacaacggcgccguggccgugcugaaguacaacggcaucaucaccgacaccaucaagagcuggagaaacaacauccugagaacccaggagagcgagugcgccugcgugaacggcagcugcuucaccaucaugaccgacggccccagcgacggccaggccagcuacaagaucuucagaaucgagaagggcaagaucgugaagagcguggagaugaacgcccccaacuaccacuacgaggagugcagcugcuaccccgacagcagcgagaucaccugcgugugcagagacaacuggcacggcagcaacagacccugggugagcuucaaccagaaccuggaguaccagaucggcuacaucugcagcggcaucuucggcgacaaccccagacccaacgacaagaccggcagcugcggccccgugagcagcaacggcgccaacggcgugaagggcuucagcuucaaguacggcaacggcguguggaucggcagaaccaagagcaucagcagcagaaagggcuucgagaugaucugggaccccaacggcuggaccggcaccgacaacaacuucagcaucaagcaggacaucgugggcaucaacgaguggagcggcuacagcggcagcuucgugcagcaccccgagcugaccggcauggacugcaucagacccugcuucuggguggagcugaucagaggcagacccaaggagaacaccaucuggaccagcggcagcagcaucagcuucugcggcgugaacagcgacaccgugggcuggagcuggcccgacggcgccgagcugcccuucaccaucgacaaguga

SEQ ID NO: 181140 - RNA, 1410 nt, Artificial Sequence
  derived and/or modified CDS sequence (opt4) from neuraminidase__InfluenzaA__AEQ49743
augaaccccaaccagaagaucaucaccaucggcagcgugugcaugaccaucggcauggccaaccugauccugcagaucggcaacaucaucagcaucuggaucagccacagcauccagcugggcaaccagagccagaucgagaccugcaaccagagcgugaucaccuacgagaacaacaccugggugaaccagaccuacgugaacaucagcaacaccaacuucgccgccggccagagcguggugagcgugaagcuggccggcaacagcagccugugccccgugagcggcugggccaucuacagcaaggacaacagcaucagaaucggcagcaagggcgacguguucgugaucagagagcccuucaucagcugcagcccccuggagugcagaaccuucuuccugacccagggcgcccugcugaacgacaagcacagcaacggcaccaucaaggacagaagccccuacagaacccugaugagcugccccaucggcgaggugcccagccccuacaacagcagauucgagagcguggccuggagcgccagcgccugccacgacggcaucaacuggcugaccaucggcaucagcggccccgacaacggcgccguggccgugcugaaguacaacggcaucaucaccgacaccaucaagagcuggagaaacaacauccugagaacccaggagagcgagugcgccugcgugaacggcagcugcuucaccaucaugaccgacggccccagcgacggccaggccagcuacaagaucuucagaaucgagaagggcaagaucgugaagagcguggagaugaacgcccccaacuaccacuacgaggagugcagcugcuaccccgacagcagcgagaucaccugcgugugcagagacaacuggcacggcagcaacagacccugggugagcuucaaccagaaccuggaguaccagaucggcuacaucugcagcggcaucuucggcgacaaccccagacccaacgacaagaccggcagcugcggccccgugagcagcaacggcgccaacggcgugaagggcuucagcuucaaguacggcaacggcguguggaucggcagaaccaagagcaucagcagcagaaagggcuucgagaugaucugggaccccaacggcuggaccggcaccgacaacaacuucagcaucaagcaggacaucgugggcaccaacgaguggagcggcuacagcggcagcuucgugcagcaccccgagcugaccggccuggacugcaucagacccugcuucuggguggagcugaucagaggcagacccaaggagaacaccaucuggaccagcggcagcagcaucagcuucugcggcgugaacagcgacaccgugggcuggagcuggcccgacggcgccgagcugcccuucaccaucgacaacuga

SEQ ID NO: 181141 - RNA, 1410 nt, Artificial Sequence
  derived and/or modified CDS sequence (opt4) from neuraminidase__InfluenzaA__AEQ49744
augaaccccaaccagaagaucaucaccaucggcagcgugugcaugaccaucggcauggccaaccugauccugcagaucggcaacaucaucagcaucuggaucagccacagcauccagcugggcaaccagagccagaucgagaccugcaaccagagcgugaucaccuacgagaacaacaccugggugaaccagaccuacgugaacaucagcaacaccaacuucgccgccggccagagcguggugagcgugaagcuggccggcaacagcagccugugccccgugagcggcugggccaucuacagcaaggacaacagcaucagaaucggcagcaagggcgacguguucgugaucagagagcccuucaucagcugcagcccccuggagugcagaaccuucuuccugacccagggcgcccuggugaacgacaagcacagcaacggcaccaucaaggacagaagccccuacagaacccugaugagcugccccaucggcgaggugcccagccccuacaacagcagauucgagagcguggccuggagcgccagcgccugccacgacggcaucaacuggcugaccaucggcaucagcggccccgacaacggcgccguggccgugcugaaguacaacggcaucaucaccgacaccaucaagagcuggagaaacaacaucuucagaacccaggagagcgagugcgccugcgugaacggcagcugcuucaccaucaugaccgacggccccagcgacggccaggccagcuacaagaucuucagaaucgagaagggcaagaucgugaagagcguggagaugaacgcccccaacuaccacuacgaggagugcagcugcuaccccgacagcagcgagaucaccugcgugugcagagacaacuggcacggcagcaacagacccugggugagcuucaaccaggaccuggaguaccagaucggcuacaucugcagcggcaucuucggcgacaaccccagacccaacgacaagaccggcagcugcggccccgugagcagcaacggcgccaacggcgugaagggcuucagcuucaaguacggcaacggcguguggaucggcagaaccaagagcaucagcagcagaaagggcuucgagaugaucugggaccccaacggcuggaccggcaccgacaacaacuucagcaucaagcagaacaucgugggcaucaacgaguggagcggcuacagcggcagcuucgugcagcaccccgagcugaccggccuggacugcaucagacccugcuucuggguggagcugaucagaggcagacccaaggagaacaccaucuggaccagcggcagcagcaucagcuucugcggcgugaacagcgacaccgugggcuggagcuggcccgacggcgccgagcugcccuucaccaucgacaaguga

SEQ ID NO: 181142 - RNA, 1410 nt, Artificial Sequence; identical to SEQ ID NO: 181138
  derived and/or modified CDS sequence (opt4) from neuraminidase__InfluenzaA__AEQ49745

SEQ ID NO: 181143 - RNA, 1410 nt, Artificial Sequence; identical to SEQ ID NO: 181138
  derived and/or modified CDS sequence (opt4) from neuraminidase__InfluenzaA__AEQ49746

SEQ ID NO: 181144 - RNA, 1410 nt, Artificial Sequence; identical to SEQ ID NO: 181138
  derived and/or modified CDS sequence (opt4) from neuraminidase__InfluenzaA__AEQ49747

SEQ ID NO: 181145 - RNA, 1410 nt, Artificial Sequence; identical to SEQ ID NO: 180317
  derived and/or modified CDS sequence (opt4) from neuraminidase__InfluenzaA__AEQ49748

SEQ ID NO: 181146 - RNA, 1410 nt, Artificial Sequence; identical to SEQ ID NO: 181138
  derived and/or modified CDS sequence (opt4) from neuraminidase__InfluenzaA__AEQ49749

SEQ ID NO: 181147 - RNA, 1410 nt, Artificial Sequence
  derived and/or modified CDS sequence (opt4) from neuraminidase__InfluenzaA__AEQ49750
augaaccccaaccagaagaucaucaccaucggcagcgugugcaugaccaucggcauggccaaccugauccugcagaucggcaacaucaucagcaucuggaucagccacagcauccagcugggcaaccagagccagaucgagaccugcaaccagagcgugaucaccuacgagaacaacaccugggugaaccagaccuacgugaacaucagcaacaccaacuucgccgccggccagagcguggugagcgugaagcuggccggcaacagcagccugugccccgugagcggcugggccaucuacagcaaggacaacagcaucagaaucggcagcaagggcgacguguucgugaucagagagcccuucaucagcugcagcccccuggagugcagaaccuucuuccugacccagggcgcccugcugaacgacaaccacagcaacggcaccaucaaggacagaagccccuacagaacccugaugagcugccccaucggcgaggugcccagccccuacaacagcagauucgagagcguggccuggagcgccagcgccugccacgacggcaucaacuggcugaccaucggcaucagcggccccgacaacggcgccguggccgugcugaaguacaacggcaucaucaccgacaccaucaagagcuggagaaacaacauccugagaacccaggagagcgagugcgccugcgugaacggcagcugcuucaccaucaugaccgacggccccagcgacggccaggccagcuacaagaucuucagaaucgagaagggcaagaucgugaagagcguggagaugaacgcccccaacuaccacuacgaggagugcagcugcuaccccgacagcagcgagaucaccugcgugugcagagacaacuggcacggcagcaacagacccugggugagcuucaaccagaaccuggaguaccagaucggcuacaucugcagcggcaucuucggcgacaaccccagacccaacgacaagaccggcagcugcggccccgugagcagcaacggcgccaacggcgugaagggcuucagcuucaaguacggcaacggcguguggaucggcagaaccaagaacaucagcagcagaaagggcuucgagaugaucugggaccccaacggcuggaccggcaccgacaacaacuucagcaucaagcaggacaucgugggcaucaacgaguggagcggcuacagcggcagcuucgugcagcaccccgagcugaccggccuggacugcaucagacccugcuucuggguggagcugaucagaggcagacccaaggagaacaccaucuggaccagcggcagcagcaucagcuucugcggcgugaacagcgacaccgugggcuggagcuggcccgacggcgccgagcugcccuucaccaucgacaaguga

SEQ ID NO: 181148 - RNA, 1410 nt, Artificial Sequence
  derived and/or modified CDS sequence (opt4) from neuraminidase__InfluenzaA__AEQ49751
augaaccccaaccagaagaucaucaccaucggcagcgugugcaugaccaucggcauggccaaccugauccugcagaucggcaacaucaucagcaucuggaucagccacagcuuccagcugggcaaccagagccagaucgagaccugcaaccagagcgugaucaccuacgagaacaacaccugggugaaccagaccuacgugaacaucagcaacaccaacuucgccgccggccagagcguggugagcgugaagcuggccggcaacagcagccugugccccgugagcggcugggccaucuacagcaaggacaacagcaucagaaucggcagcaagggcgacguguucgugaucagagagcccuucaucagcugcagcccccuggagugcagaaccuucuuccugacccagggcgcccugcugaacgacaaccacagcaacggcaccaucaaggacagaagccccuacagaacccugaugagcugccccaucggcgaggugcccagccccuacaacagcagauucgagagcguggccuggagcgccagcgccugccacgacggcaucaacuggcugaccaucggcaucagcggccccgacaacggcgccguggccgugcugaaguacaacggcaucaucaccgacaccaucaagagcuggagaaacaacauccugagaacccaggagagcgagugcgccugcgugaacggcagcugcuucaccaucaugaccgacggccccagcgacggccaggccagcuacaagaucuucagaaucgagaagggcaagaucgugaagagcguggagaugaacgcccccaacuaccacuacgaggagugcagcugcuaccccgacagcagcgagaucaccugcgugugcagagacaacuggcacggcagcaacagacccugggugagcuucaaccagaaccuggaguaccagaucggcuacaucugcagcggcaucuucggcgacaaccccagacccaacgacaagaccggcagcugcggccccgugagcagcaacggcgccaacggcgugaagggcuucagcuucaaguacggcaacggcguguggaucggcagaaccaagagcaucagcagcagaaagggcuucgagaugaucugggaccccaacggcuggaccggcaccgacaacaacuucagcaucaagcaggacaucgugggcaucaacgaguggagcggcuacagcggcagcuucgugcagcaccccgagcugaccggcauggacugcaucagacccugcuucuggguggagcugaucagaggcagacccaaggagaacaccaucuggaccagcggcagcagcaucagcuucugcggcgugaacagcgacaccgugggcuggagcuggcccgacggcgccgagcugcccuucaccaucgacaaguga

SEQ ID NO: 181149 - RNA, 1410 nt, Artificial Sequence
  derived and/or modified CDS sequence (opt4) from neuraminidase__InfluenzaA__AEQ49752
augaaccccaaccagaagaucaucaccaucggcagcgugugcaugaccaucggcauggccaaccugauccugcagaucggcaacaucaucagcaucuggaucagccacagcauccagcugggcaaccagagccagaucggcaccugcaaccagagcgugaucaccuacgagaacaacaccugggugaaccagaccuacgugaacaucagcaacaccaacuucgccgccggccagagcguggugagcgugaagcuggccggcaacagcagccugugccccgugagcggcugggccaucuacagcaaggacaacagcaucagaaucggcagcaagggcgacguguucgugaucagagagcccuucaucagcugcagcccccuggagugcagaaccuucuuccugacccagggcgcccugcugaacgacaagcacagcaacggcaccaucaaggacagaagccccuacagaacccugaugagcugccccaucggcgaggugcccagccccuacaacagcagauucgagagcguggccuggagcgccagcgccugccacgacggcaucaacuggcugaccaucggcaucagcggccccgacaacggcgccguggccgugcugaaguacaacggcaucaucaccgacaccaucaagagcuggagaaacaacauccugagaacccaggagagcgagugcgccugcgugaacggcagcugcuucaccaucaugaccgacggccccagcgacggccaggccagcuacaagaucuucagaaucgagaagggcaagaucgugaagagcguggagaugaacgcccccaacuacuacuacgaggagugcagcugcuaccccgacagcagcgagaucaccugcgugugcagagacaacuggcacggcagcaacagacccugggugagcuucaaccagaaccuggaguaccagaucggcuacaucugcagcggcaucuucggcgacaaccccagacccaacgacaagaccggcagcugcggccccgugagcagcaacggcgccaacggcgugaagggcuucagcuucaaguacggcaacggcguguggaucggcagaaccaagagcaucagcagcagaaagggcuucgagaugaucugggaccccaacggcuggaccggcaccgacaacaacuucagcaucaagcaggacaucgugggcaucaacgaguggagcggcuacagcggcagcuucgugcagcaccccgagcugaccggcauggacugcaucagacccugcuucuggguggagcugaucagaggcagacccaaggagaacaccaucuggaccagcggcagcagcaucagcuucugcggcgugaacagcgacaccgugggcuggagcuggcccgacggcgccgagcugcccuucaccaucgacaaguga

SEQ ID NO: 181150 - RNA, 1410 nt, Artificial Sequence
  derived and/or modified CDS sequence (opt4) from neuraminidase__InfluenzaA__AEQ49753
augaaccccaaccagaagaucaucaccaucggcagcgugugcaugaccaucggcauggccaaccugauccugcagaucggcaacaucaucagcaucuggaucagccacagcauccagcugggcaaccagagccagaucgagaccugcaaccagagcgugaucaccuacgagaacaacaccugggugaaccagaccuacgugaacaucagcaacaccaacuucgccgccggccagagcguggugagcgugaagcuggccggcaacagcagccugugccccgugagcggcugggccaucuacagcaaggacaacagcaucagaaucggcagcaagggcgacguguucgugaucagagagcccuucaucagcugcagcccccuggagugcagaaccuucuuccugacccagggcgcccugcugaacgacaagcacagcaacggcaccaucaaggacagaagccccuacagaacccugaugagcugccccaucggcgaggugcccagccccuacaacagcagauucgagagcguggccuggagcgccagcgccugccacgacggcaucaacuggcugaccaucggcaucagcggccccgacaacggcgccguggccgugcugaaguacaacggcaucaucaccgacaccaucaagagcuggagaaacaacauccugagaacccaggagagcgagugcgccugcgugaacggcagcugcuucaccaucaugaccgacggccccagcgacggccaggccagcuacaagaucuucagaaucgagaagggcaagaucgugaagagcguggagaugaacgcccccaacuaccacuacgaggagugcagcugcuaccccgacagcagcgagaucaccugcgugugcagagacaacuggcacggcagcaacagacccugggugagcuucaaccagaaccuggaguaccagaucggcuacaucugcagcggcaucuucggcgacaaccccagacccaacgacaagaccggcagcugcggccccgugagcagcaacggcgccaacggcgugaagggcuucagcuucaaguacggcaacggcguguggaucggcagaaccaagagcaucagcagcagaaagggcuucgagaugaucugggaccccaacggcuggaccggcaccgacaacaacuucagcaucaagcaggacaucgugggcaucaacgaguggagcggcuacagcggcagcuucgugcagcaccccgagcugaccggcauggacugcaucagacccugcuucuggguggagcugaucagaggcagacccaaggagaacaccaucuggaccagcggcagcagcaucagcuucugcggcgugaacagcgacaccguggacuggagcuggcccgacggcgccgagcugcccuucaccaucgacaaguga

SEQ ID NO: 181151 - RNA, 1410 nt, Artificial Sequence
  derived and/or modified CDS sequence (opt4) from neuraminidase__InfluenzaA__AEQ49754
augaaccccaaccagaagaucaucaccaucggcagcgugugcaugaccaucggcauggccaaccugauccugcagaucggcaacaucaucagcaucuggaucagccacagcauccagcugggcaaccagagccagaucgagaccugcaaccagagcgugaucaccuacgagaacaacaccugggugaaccagaccuacgugaacaucagcaacaccaacuucgccgccggccagagcguggugagcgugaagcuggccggcaacagcagccugugccccgugagcggcugggccaucuacagcaaggacaacagcaucagaaucggcagcaagggcgacguguucgugaucagagagcccuucaucagcugcagcccccuggagugcagaaccuucuuccugacccagggcgcccugcugaacgacaagcacagcaacggcaccaucaaggacagaagccccuacagaacccugaugagcugccccaucggcgaggugcccagccccuacaacagcagauucgagagcguggccuggagcgccagcgccugccacgacggcaucaacuggcugaccaucggcaucagcggccccgacaacggcgccguggccgugcugaaguacaacggcaucaucaccgacaccaucaagagcuggagaaacaacauccugagaacccaggagagcgagugcgccugcgugaacggcagcugcuucaccaucaugaccgacggccccagcgacggccaggccagcuacaagaucuucagaaucgagaagggcaagaucgugaagagcguggagaugaacgcccccaacuaccacuacgaggagugcagcugcuaccccgacagcagcgagaucaccugcgugugcagagacaacuggcacggcagcaacagacccugggugagcuucaaccagaaccuggaguaccagaucggcuacaucugcagcggcaucuucggcgacaaccccagacccaacgacaagaccggcagcugcggccccgugagcagcaacggcgccaacggcgugaagggcuucagcuucaaguacggcaacggcguguggaucggcagaaccaagagcaucagcagcagaaagggcuucgagaugaucugggaccccaacggcuggaccggcaccgacaacaacuucagcaucaagcaggacaucgugggcaucaacgaguggagcggcuacagcggcagcuucgugcagcaccccgagcugaccggccuggacugcaucagacccugcuucuggguggagcugaucagaggcagacccaaggagaacaccaucuggaccagcggcagcagcaucagcuucugcggcgugaacagcaacaccgugggcuggagcuggcccgacggcgccgagcugcccuucaccaucgacaaguga

SEQ ID NO: 181152 - RNA, 1410 nt, Artificial Sequence; identical to SEQ ID NO: 181138
  derived and/or modified CDS sequence (opt4) from neuraminidase__InfluenzaA__AEQ49755

SEQ ID NO: 181153 - RNA, 1410 nt, Artificial Sequence
  derived and/or modified CDS sequence (opt4) from neuraminidase__InfluenzaA__AEQ49756
augaaccccaaccagaagaucaucaccaucggcagcgugugcaugaccaucggcauggccaaccugauccugcagaucggcaacaucaucagcaucuggaucagccacagcauccagcugggcaaccagagccagguggagaccugcaaccagagcgugaucaccuacgagaacaacaccugggugaaccagaccuacgugaacaucagcaacaccaacuucgccgccggccagagcguggugagcgugaagcuggccggcaacagcagccugugccccgugagcggcugggccaucuacagcaaggacaacagcaucagaaucggcagcaagggcgacguguucgugaucagagagcccuucaucagcugcagcccccuggagugcagaaccuucuuccugacccagggcgcccugcugaacgacaagcacagcaacggcaccaucaaggacagaagccccuacagaacccugaugagcugccccaucggcgaggugcccagccccuacaacagcagauucgagagcguggccuggagcgccagcgccugccacgacggcaucaacuggcugaccaucggcaucagcggccccgacaacggcgccguggccgugcugaaguacaacggcaucaucaccgacaccaucaagagcuggagaaacaacauccugagaacccaggagagcgagugcgccugcgugaacggcagcugcuucaccaucaugaccgacggccccagcgacggccaggccagcuacaagaucuucagaaucgagaagggcaagaucgugaagagcguggagaugaacgcccccaacuaccacuacgaggagugcagcugcuaccccgacagcagcgagaucaccugcgugugcagagacaacuggcacggcagcaacagacccugggugagcuucaaccagaaccuggaguaccagaucggcuacaucugcagcggcaucuucggcgacaaccccagacccaacgacaagaccggcagcugcggccccgugagcagcaacggcgccaacggcgugaagggcuucagcuucaaguacggcaacggcguguggaucggcagaaccaagagcaucagcagcagaaagggcuucgagaugaucugggaccccaacggcuggaccggcaccgacaacaacuucagcaucaagcaggacaucgugggcaucaacgaguggagcggcuacagcggcagcuucgugcagcaccccgagcugaccggccuggacugcaucagacccugcuucuggguggagcugaucagaggcagacccaaggagaacaccaucuggaccagcggcagcagcaucagcuucugcggcgugaacagcgacaccgugggcuggagcuggcccgacggcgccgagcugcccuucaccaucgacaaguga

SEQ ID NO: 181154 - RNA, 1410 nt, Artificial Sequence; identical to SEQ ID NO: 181138
  derived and/or modified CDS sequence (opt4) from neuraminidase__InfluenzaA__AEQ49757

SEQ ID NO: 181155 - RNA, 1410 nt, Artificial Sequence
  derived and/or modified CDS sequence (opt4) from neuraminidase__InfluenzaA__AEQ49758
augaaccccaaccagaagaucaucaccaucggcagcgugugcaugaccaucggcauggccaaccugauccugcagaucggcaacaucaucagcaucuggaucagccacagcauccagcugggcaaccacagccagaucgagaccugcaaccagagcgugaucaccuacgagaacaacaccugggugaaccagaccuacgugaacaucagcaacaccaacuucgccgccggccagagcguggugagcgugaagcuggccggcaacagcagccugugccccgugagcggcugggccaucuacagcaaggacaacagcaucagaaucggcagcaagggcgacguguucgugaucagagagcccuucaucagcugcagcccccuggagugcagaaccuucuuccugacccagggcgcccugcugaacgacaagcacagcaacggcaccaucaaggacagaagccccuacagaacccugaugagcugccccaucggcgaggugcccagccccuacaacagcagauucgagagcguggccuggagcgccagcgccugccacgacggcaucaacuggcugaccaucggcaucagcggccccgacaacggcgccguggccgugcugaaguacaacggcaucaucaccgacaccaucaagagcuggagaaacaacauccugagaacccaggagagcgagugcgccugcgugaacggcagcugcuucaccaucaugaccgacggccccagcgacggccaggccagcuacaagaucuucagaaucgagaagggcaagaucgugaagagcguggagaugaacgcccccaacuacuacuacgaggagugcagcugcuaccccgacagcagcgagaucaccugcgugugcagagacaacuggcacggcagcaacagacccugggugagcuucaaccagaaccuggaguaccagaucggcuacaucugcagcggcaucuucggcgacaaccccagacccaacgacaagaccggcagcugcggccccgugagcagcaacggcgccaacggcgugaagggcuucagcuucaaguacggcaacggcguguggaucggcagaaccaagagcaucagcagcagaaagggcuucgagaugaucugggaccccaacggcugggccggcaccgacaacaacuucagcaucaagcaggacaucgugggcaucaacgaguggagcggcuacagcggcagcuucgugcagcaccccgagcugaccggccuggacugcaucagacccugcuucuggguggagcugaucagaggcagacccaaggagaacaccaucuggaccagcggcagcagcaucagcuucugcggcgugaacagcgacaccgugggcuggagcuggcccgacggcgccgagcugcccuucaccaucgacaaguga

SEQ ID NO: 181156 - RNA, 1410 nt, Artificial Sequence; identical to SEQ ID NO: 181138
  derived and/or modified CDS sequence (opt4) from neuraminidase__InfluenzaA__AEQ49759

SEQ ID NO: 181157 - RNA, 1410 nt, Artificial Sequence; identical to SEQ ID NO: 181138
  derived and/or modified CDS sequence (opt4) from neuraminidase__InfluenzaA__AEQ49760

SEQ ID NO: 181158 - RNA, 1410 nt, Artificial Sequence
  derived and/or modified CDS sequence (opt4) from neuraminidase__InfluenzaA__AEQ49761
augaaccccaaccagaagaucaucaccaucggcagcgugugcaugaccaucggcauggccaaccugauccugcagaucggcaacaucaucagcaucuggaucagccacagcauccagcugggcaaccagagccagaucgagaccugcaaccagagcgugaucaccuacgagaacaacaccuggcugaaccagaccuacgugaacaucagcaacaccaacuucgccgccggccagagcguggugagcgugaagcuggccggcaacagcagccugugccccgugagcggcugggccaucuacagcaaggacaacagcaucagaaucggcagcaagggcgacguguucgugaucagagagcccuucaucagcugcagccccagcgagugcagaaccuucuuccugacccagggcgcccugcugaacgacaagcacagcaacggcaccaucaaggacagaagccccuacagaacccugaugagcugccccaucggcgaggugcccagccccuacaacagcagauucgagagcguggccuggagcgccagcgccugccacgacggcaucaacuggcugaccaucggcaucagcggccccgacaacggcgccguggccgugcugaaguacaacggcaucaucaccgacaccaucaagagcuggagaaacaacauccugagaacccaggagagcgagugcgccugcgugaacggcagcugcuucaccaucaugaccgacggccccagcgacggccaggccagcuacaagaucuucagaaucgagaagggcaagaucgugaagagcguggagaugaacgcccccaacuaccacuacgaggagugcagcugcuaccccgacagcagcgagaucaccugcgugugcagagacaacuggcacggcagcaacagacccugggugagcuucaaccagaaccuggaguaccagaucggcuacaucugcagcggcaucuucggcgacaaccccagacccaacgacaagaccggcagcugcggccccgugagcagcaacggcgccaacggcgugaagggcuucagcuucaaguacggcaacggcguguggaucggcagaaccaagagcaucagcagcagaaagggcuucgagaugaucugggaccccaacggcuggaccggcaccgacaacaacuucagcaucaagcaggacaucgugggcaucaacgaguggagcggcuacagcggcagcuucgugcagcaccccgagcugaccggccuggacugcaucagacccugcuucuggguggagcugaucagaggcagaagcaaggagaacaccaucuggaccagcggcagcagcaucagcuucugcggcgugaacagcgacaccgugggcuggagcuggcccgacggcgccgagcugcccuucaccaucgacaaguga

SEQ ID NO: 181159 - RNA, 1410 nt, Artificial Sequence
  derived and/or modified CDS sequence (opt4) from neuraminidase__InfluenzaA__AEQ49762
augaaccccaaccagaagaucaucaccaucggcagcgugugcaugaccaucggcauggccaaccugauccugcagaucggcaacaucaucagcaucuggaucagccacagcauccagcugggcaaccagagccagaucgagaccugcaaccagagcgugaucaccuacgagaacaacaccuggaucaaccagaccuacgugaacaucagcaacaccaacuucgccgccggccagagcguggugagcgugaagcuggccggcaacagcagccugugccccgugagcggcugggccaucuacagcaaggacaacagcaucagaaucggcagcaagggcgacguguucgugaucagagagcccuucaucagcugcagcccccuggagugcagaaccuucuuccugacccagggcgcccugcugaacgacaagcacagcaacggcaccaucaaggacagaagccccuacagaacccugaugagcugccccaucggcgaggugcccagccccuacaacagcagauucgagagcguggccuggagcgccagcgccugccacgacggcaucaacuggcugaccaucggcaucagcggccccgacaacggcgccguggccgugcugaaguacaacggcaucaucaccgacaccaucaagagcuggagaaacaacauccugagaacccaggagagcgagugcgccugcgugaacggcagcugcuucaucaucaugaccgacggccccagcgacggccaggccagcuacaagaucuucagaaucgagaagggcaagaucgugaagagcguggagaugaacgcccccaacuaccacuacgaggagugcagcugcuaccccgacagcagcgagaucaccugcgugugcagagacaacuggcacggcagcaacagacccugggugagcuucaaccagaaccuggaguaccagaucggcuacaucugcagcggcaucuucggcgacaaccccagacccaacgacaagaccggcagcugcggccccgugagcagcaacggcgccaacggcgugaagggcuucagcuucaaguacggcaacggcguguggaucggcagaaccaagagcaucagcagcagaaagggcuucgagaugaucugggaccccaacggcuggaccggcaccgacaacaacuucagcaucaagcaggacaucgugggcaucaacgaguggagcggcuacagcggcagcuucgugcagcaccccgagcugaccggccuggacugcaucagacccugcuucuggguggagcugaucagaggcagacccaaggagaacaccaucuggaccagcggcagcagcaucagcuucugcggcgugaacagcgacaccgugggcuggagcuggcccgacggcgccgagcugcccuucaccaucgacaaguga

SEQ ID NO: 181160 - RNA, 1410 nt, Artificial Sequence; identical to SEQ ID NO: 181138
  derived and/or modified CDS sequence (opt4) from neuraminidase__InfluenzaA__AEQ49763

SEQ ID NO: 181161 - RNA, 1410 nt, Artificial Sequence; identical to SEQ ID NO: 181138
  derived and/or modified CDS sequence (opt4) from neuraminidase__InfluenzaA__AEQ49764

SEQ ID NO: 181162 - RNA, 1410 nt, Artificial Sequence; identical to SEQ ID NO: 181138
  derived and/or modified CDS sequence (opt4) from neuraminidase__InfluenzaA__AEQ49765

SEQ ID NO: 181163 - RNA, 1410 nt, Artificial Sequence
  derived and/or modified CDS sequence (opt4) from neuraminidase__InfluenzaA__AEQ49766
augaaccccaaccagaagaucaucaccaucggcagcgugugcaugaccaucggcauggccaaccugauccugcagaucggcaacaucaucagcaucuggaucagccacagcauccagcugggcaaccagagccagaucgagaccugcaaccagagcgugaucaccuacgagaacaacaccugggugaaccagaccuacgugaacaucagcaacaccaacuucgccgccggccagagcguggugagcgugaagcugaccggcaacagcagccugugccccgugagcggcugggccaucuacagcaaggacaacagcaucagaaucggcagcaagggcgacguguucgugaucagagagcccuucaucagcugcagcccccuggagugcagaaccuucuuccugacccagggcgcccugcugaacgacaagcacagcaacggcaccaucaaggacagaagccccuacagaacccugaugagcugccccaucggcgaggugcccagccccuacaacagcagauucgagagcguggccuggagcgccagcgccugccacgacggcaucaacuggcugaccaucggcaucagcggccccgacaacggcgccguggccgugcugaaguacaacggcaucaucaccgacaccaucaagagcuggagaaacaacauccugagaacccaggagagcgagugcgccugcgugaacggcagcugcuucaccaucaugaccgacggccccagcgacggccaggccagcuacaagaucuucagaaucgagaagggcaagaucgugaagagcguggagaugaacgcccccaacuaccacuacgaggagugcagcugcuaccccgacagcagcgagaucaccugcgugugcagagacaacuggcacggcagcaacagacccugggugagcuucaaccagaaccuggaguaccagaucggcuacaucugcagcggcaucuucggcgacaaccccagacccaacgacaagaccggcagcugcggccccgugagcagcaacggcgccaacggcgugaagggcuucagcuucaaguacggcaacggcguguggaucggcagaaccaagagcaucagcagcagaaagggcuucgagaugaucugggaccccaacggcuggaccggcaccgacaacaacuucagcaucaagcaggacaucgugggcaucaacgaguggagcggcuacagcggcagcuucgugcagcaccccgagcugaccggccuggacugcaucagacccugcuucuggguggagcugaucagaggcagacccaaggagaacaccaucuggaccagcggcagcagcaucagcuucugcggcgugaacagcgacaccgugggcuggagcuggcccgacggcgccgagcugcccuucaccaucgacaaguga

SEQ ID NO: 181164 - RNA, 1410 nt, Artificial Sequence
  derived and/or modified CDS sequence (opt4) from neuraminidase__InfluenzaA__AEQ49767
augaaccccaaccagaagaucaucaccaucggcagcgugugcaugaccaucggcauggccaaccugauccugcagaucggcaacaucaucagcaucuggaucagccacagcauccagcugggcaaccagagccagaucgagaccugcaaccagagcgugaucaccuacgagaacaacaccugggugaaccagaccuacgugaacaucagcaacaccaacuucgccgccggccagagcguggugagcgugaagcuggccggcaacagcagccugugccccgugagcggcugggccaucuacagcaaggacaacagcaucagaaucggcagcaagggcgacguguucgugaucagagagcccuucaucagcugcagcccccuggagugcagaaccuucuuccugacccagggcgcccugcugaacgacaagcacagcaacggcaccaucaaggacagaagccccuacagaacccugaugagcugccccaucggcgaggugcccagccccuacaacagcagauucgagagcguggccuggagcgccagcgccugccacgacggcaucaacuggcugaccaucggcaucagcggccccgacaacggcgccguggccgugcugaaguacaacggcaucaucaccgacaccaucaagagcuggagaaacaacauccugagaacccaggagagcgagugcgccugcgugaacggcagcugcuucaccaucaugaccgacggccccagcgacggccaggccagcuacaagaucuucaagaucgagaagggcaagaucgugaagagcguggagaugaacgcccccaacuaccacuacgaggagugcagcugcuaccccgacagcagcgagaucaccugcgugugcagagacaacuggcacggcagcaacagacccugggugagcuucaaccagaaccuggaguaccagaucggcuacaucugcagcggcaucuucggcgacaaccccagacccaacgacaagaccggcagcugcggccccgugagcagcaacggcgccaacggcgugaagggcuucagcuacaaguacggcaacggcguguggaucggcagaaccaagagcaucagcagcagaaagggcuucgagaugaucugggaccccaacggcuggaccggcaccgacaacaacuucagcaucaagcaggacaucgugggcaucaacgaguggagcggcuacagcggcagcuucgugcagcaccccgagcugaccggcaugggcugcaucagacccugcuucuggguggagcugaucagaggcagacccaaggagaacaccaucuggaccagcggcagcagcaucagcuucugcggcgugaacagcgacaccgugggcuggagcuggcccgacggcgccgagcugcccuucaccaucgacaaguga

SEQ ID NO: 181165 - RNA, 1410 nt, Artificial Sequence; identical to SEQ ID NO: 180317
  derived and/or modified CDS sequence (opt4) from neuraminidase__InfluenzaA__AEQ49768

SEQ ID NO: 181166 - RNA, 1410 nt, Artificial Sequence; identical to SEQ ID NO: 181138
  derived and/or modified CDS sequence (opt4) from neuraminidase__InfluenzaA__AEQ49769

SEQ ID NO: 181167 - RNA, 1410 nt, Artificial Sequence
  derived and/or modified CDS sequence (opt4) from neuraminidase__InfluenzaA__AEQ49770
augaaccccaaccagaagaucaucaccaucggcagcgugugcaugaccaucggcauggccaaccugauccugcagaucggcaacaucaucagcguguggaucagccacagcauccagcugggcaaccagaaccagaccgagaccugcaaccagagcgugaucaccuacgagaacaacaccugggugaaccagaccuacgugaacaucagcaacaccaacuucgccgccggccagagcguggugagcgugaagcuggccggcaacagcagccugugccccgugagcggcugggccaucuacagcaaggacaacagcaucagaaucggcagcaagggcgacguguucgugaucagagagcccuucaucagcugcagcccccuggagugcagaaccuucuuccugacccagggcgcccugcugaacgacaagcacagcaacggcaccaucaaggacagaagccccuacagaacccugaugagcugccccaucggcgaggugcccagccccuacaacagcagauucgagagcguggccuggagcgccagcgccugccacgacggcaucaacuggcugaccaucggcaucagcggccccgacaacggcgccguggccgugcugaaguacaacggcaucaucaccgacaccaucaagagcuggagaaacaacauccugagaacccaggagagcgagugcgccugcgugaacggcagcugcuucaccgugaugaccgacggccccagcgacggccaggccagcuacaagaucuucagaaucgagaagggcaagaucgugaagagcguggagaugaacgcccccaacuaccacuacgaggagugcagcugcuaccccgacagcagcgagaucaccugcgugugcagagacaacuggcacggcagcaacagacccugggugagcuucaaccagaaccuggaguacagaaucggcuacaucugcagcggcaucuucggcgacaaccccagacccaacgacaagaccggcagcugcggccccgugagcagcaacggcgccaacggcgugaagggcuucagcuucaaguacggcaacggcguguggaucggcagaaccaagagcaucagcagcagaaacggcuucgagaugaucugggaccccaacggcuggaccggcaccgacaacaacuucagcaucaagcaggacaucaucggcaucaacgaguggagcggcuacagcggcagcuucgugcagcaccccgagcugaccggccuggacugcaucagacccugcuucuggguggagcugaucagaggcagacccaaggagaacaccaucuggaccagcggcagcagcaucagcuucugcggcgugaacagcgacaccgugggcuggagcuggcccgacggcgccgagcugcccuucaccguggacaaguga

SEQ ID NO: 181168 - RNA, 1410 nt, Artificial Sequence; identical to SEQ ID NO: 181151
  derived and/or modified CDS sequence (opt4) from neuraminidase__InfluenzaA__AEQ49771

SEQ ID NO: 181169 - RNA, 1410 nt, Artificial Sequence; identical to SEQ ID NO: 180317
  derived and/or modified CDS sequence (opt4) from neuraminidase__InfluenzaA__AEQ49772

SEQ ID NO: 181170 - RNA, 1410 nt, Artificial Sequence
  derived and/or modified CDS sequence (opt4) from neuraminidase__InfluenzaA__AEQ49773
augaaccccaaccagaagaucaucaccaucggcagcaucugcaugaccaucggcauggccaaccugauccugcagaucggcaacaucaucagcaucuggaucagccacagcauccagcugggcaaccagagccagaucgagaccugcaaccagagcgugaucaccuacgagaacaacaccugggugaaccagaccuacgugaacaucagcaacaccaacuucgccgccggccagagcguggugagcgugaagcuggccggcaacagcagccugugccccgugagcggcugggccaucuacagcaaggacaacagcaucagaaucggcagcaagggcgacguguucgugaucagagagcccuucaucagcugcagcccccuggagugcagaaccuucuuccugacccagggcgcccugcugaacgacaagcacagcaacggcaccaucaaggacagaagccccuacagaacccugaugagcugccccaucggcgaggugcccagccccuacaacagcagauucgagagcguggccuggagcgccagcgccugccacgacggcaucaacuggcugaccaucggcaucagcggccccgacaacggcgccguggccgugcugaaguacaacggcaucaucaccgacaccaucaagagcuggagaaacaacauccugagaacccaggagagcgagugcgccugcgugaacggcagcugcuucaccaucaugaccgacggccccagcgacggccaggccagcuacaagaucuucagaaucgagaagggcaagaucgugaagagcguggagaugaacgcccccaacuaccacuacgaggagugcagcugcuaccccgacagcagcgagaucaccugcgugugcagagacaacuggcacggcagcaacagacccugggugagcuucaaccagaaccuggaguaccagaucggcuacaucugcagcggcaucuucggcgacaaccccagacccaacgacaagaccggcagcugcggccccgugagcagcaacggcgccaacggcgugaagggcuucagcuucaaguacggcaacggcguguggaucggcagaaccaagagcaucagcagcagaaagggcuucgagaugaucugggaccccaacggcuggaccggcaccgacaacaacuucagcaucaagcaggacaucgugggcaucaacgaguggagcggcuacagcggcagcuucgugcagcaccccgagcugaccggccuggacugcaucagacccugcuucuggguggagcugaucagaggcagacccaaggagaacaccaucuggaccagcggcagcagcaucagcuucugcggcgugaacagcaacaccgugggcuggagcuggcccgacggcgccgagcugcccuucaccaucgacaaguga

SEQ ID NO: 181171 - RNA, 1410 nt, Artificial Sequence
  derived and/or modified CDS sequence (opt4) from neuraminidase__InfluenzaA__AEQ49774
augaaccccaaccagaagaucaucaccaucggcagcgugugcaugaccaucggcauggccaaccugauccugcagaucggcaacaucaucagcaucuggaucagccacagcauccagcugggcaaccagagccagaucgagaccugcaaccagagcgugaucaccuacgaguacaacaccugggugaaccagaccuacaucaacaucagcaacaccaacuucgccgccggccagagcguggugagcgugaagcuggugggcaacagcagccugugccccgugagcggcugggccaucuacagcaaggacaacagcaucagaaucggcagcaagggcgacguguucgugaucagagagcccuucaucagcugcagcccccuggagugcagaaccuucuuccugacccagggcgcccugcugaacgacaagcacagcaacggcaccaucaaggacagaagccccuacagaacccugaugagcugccccaucggcgaggugcccagccccuacaacagcagauucgagagcguggccuggagcgccagcgccugccacgacggcaucaacuggcugaccaucggcaucagcggccccgacaacggcgccguggccgugcugaaguacaacggcaucaucaccgacaccaucaagagcuggagaaacaacauccugagaacccaggagagcgagugcgccugcgugaacggcagcugcuucaccaucaugaccgacggccccagcgacggccaggccagcuacaagaucuucagaaucgagaagggcaagaucgugaagagcguggagaugaacgcccccaacuaccacuacgaggagugcagcugcuaccccgacagcagcgagaucaccugcgugugcagagacaacuggcacggcagcaacagacccugggugagcuucaaccagaaccuggaguaccagaucggcuacaucugcagcggcaucuucggcgacaaccccagacccaacgacaagaccggcagcugcggccccgugagcagcaacggcgccaacggcgugaagggcuucagcuucaaguacggcaacggcguguggaucggcagaaccaagagcaucagcagcagaaagggcuacgagaugaucugggaccccaacggcuggaccggcaccgacaacaacuucagcaucaagcaggacaucgugggcaucaacgaguggagcggcuacagcggcagcuucgugcagcaccccgagcugaccggcauggacugcaucagacccugcuucuggguggagcugaucagaggcagacccaaggagaacaccaucuggaccagcggcagcagcaucagcuucugcggcgugaacagcgacaccgugggcuggagcuggcccgacggcgccgagcugcccuucaccaucgacaaguga

SEQ ID NO: 181172 - RNA, 1410 nt, Artificial Sequence; identical to SEQ ID NO: 180317
  derived and/or modified CDS sequence (opt4) from neuraminidase__InfluenzaA__AEQ49775

SEQ ID NO: 181173 - RNA, 1410 nt, Artificial Sequence
  derived and/or modified CDS sequence (opt4) from neuraminidase__InfluenzaA__AEQ49776
augaaccccaaccagaagaucaucaccaucggcagcgugugcaugaccaucggcauggccaaccugauccugcagaucggcaacaucaucagcaucuggaucagccacagcauccagcugggcaaccagagccagaucgagaccugcaaccagagcgugaucaccuacgagaacaacaccugggugaaccagaccuacgugaacaucagcaacaccaacuucgccgccggccagagcguggugagcgugaagcuggccggcaacagcagccugugccccgugagcggcugggccaucuacagcaaggacaacagcaucagaaucggcagcaagggcgacguguucgugaucagagagcccuucaucagcugcagccccagcgagugcagaaccuucuuccugacccagggcgcccugcugaacgacaagcacagcaacggcaccaucaaggacagaagccccuacagaacccugaugagcugccccaucggcgaggugcccagccccuacaacagcagauucgagagcguggccuggagcgccagcgccugccacgacggcaucaacuggcugaccaucggcaucagcggccccgacaacggcgccguggccgugcugaaguacaacggcaucaucaccgacaccaucaagagcuggagaaacaacauccugagaacccaggagagcgagugcgccugcgugaacggcagcugcuucaccaucaugaccgacggccccagcgacggccaggccagcuacaagaucuucagaaucgagaagggcaagaucgugaagagcguggagaugaacgcccccaacuaccacuacgaggagugcagcugcuaccccgacagcagcgagaucaccugcgugugcagagacaacuggcacggcagcaacagacccugggugagcuucaaccagaaccuggaguaccagaucggcuacaucugcagcggcaucuucggcgacaaccccagacccaacgacaagaccggcagcugcggccccgugagcagcaacggcgccaacggcgugaagggcuucagcuucaaguacggcaacggcguguggaucggcagaaccaagagcaucagcagcagaaagggcuucgagaugaucugggaccccaacggcuggaccggcaccgacaacaacuucagcaucaagcaggacaucgugggcaucaacgaguggagcggcuacagcggcagcuucgugcagcaccccgagcugaccggccuggacugcaucagacccugcuucuggguggagcugaucagaggcagacccaccgagaacaccaucuggaccagcggcagcagcaucagcuucugcggcgugaacagcgacaccgugggcuggagcuggcccgacggcgccgagcugcccuucaccaucgacaaguga

SEQ ID NO: 181174 - RNA, 1410 nt, Artificial Sequence; identical to SEQ ID NO: 181138
  derived and/or modified CDS sequence (opt4) from neuraminidase__InfluenzaA__AEQ49777

SEQ ID NO: 181175 - RNA, 1410 nt, Artificial Sequence
  derived and/or modified CDS sequence (opt4) from neuraminidase__InfluenzaA__AEQ49778
augaaccccaaccagaagaucaucaccaucggcagcgugugcaugaccaucggcauggccaaccugauccugcagaucggcaacaucaucagcaucuggaucagccacagcauccagcugggcaaccagagccagaucgagaccugcaaccagagcgugaucaccuacgagaacaacaccuggaucaaccagaccuacgugaacaucagcaacaccaacuucgccgccgugcagagcguggugagcgugaagcuggccggcaacagcacccugugccccgugagcggcugggccaucuacagcaaggacaacagcaucagaaucggcagcaagggcgacguguucgugaucagagagcccuucaucagcugcagcccccuggagugcagaaccuucuuccugacccagggcgcccugcugaacgacaagcacagcaacggcaccaucaaggacagaagccccuacagaacccugaugagcugccccaucggcgaggugcccagccccuacaacagcagauucgagagcguggccuggagcgccagcgccugccacgacggcaucaacuggcugaccaucggcaucagcggccccgacaacggcgccguggccgugcugaaguacaacggcaucaucaccgacaccaucaagagcuggagaaacaacauccugagaacccaggagagcgagugcgccugcgugaacggcagcugcuucaccaucaugaccgacggccccagcgacggccaggccagcuacaagaucuucagaaucgagaagggcaagaucgugaagagcguggagaugaacgcccccaacuaccacuacgaggagugcagcugcuaccccgacagcagcgagaucaccugcgugugcagagacaacuggcacggcagcaacagacccugggugagcuucaaccagaaccuggaguaccagaucggcuacaucugcagcggcaucuucggcgacaaccccagacccaacgacaagaccggcagcugcggccccgugagcagcaacggcgccaacggcgugaagggcuucagcuucaaguacggcaacggcguguggaucggcagaaccaagagcaucagcagcagaaagggcuucgagaugaucugggaccccaacggcuggaccggcaccgacaacaacuucagcaucaagcaggacaucgugggcaucaacgaguggagcggcuacagcggcagcuucgugcagcaccccgagcugaccggccuggacugcaucagacccugcuucuggguggagcugaucagaggcagacccaaggagaacaccaucuggaccagcggcagcagcaucagcuucugcggcgugaacagcgacaccgugggcuggagcuggcccgacggcgccgagcugcccuucaccaucgacaaguga

SEQ ID NO: 181176 - RNA, 1410 nt, Artificial Sequence
  derived and/or modified CDS sequence (opt4) from neuraminidase__InfluenzaA__AEQ49779
augaaccccaaccagaagaucaucaccaucggcagcgugugcaugaccaucggcauggccaaccugauccugcagaucggcaacaucaucagcaucuggaucagccacagcauccagcugggcaaccagaaccagaccgagaccugcaaccagagcgugaucaccuacgagaacaacaccugggugaaccagaccuacgugaacaucagcaacaccaacuucgccgccggccagagcguggugagcgugaagcuggccggcaacagcagccugugccccgugagcggcugggccaucuacagcaaggacaacagcaucagaaucggcagcaagggcgacguguucgugaucagagagcccuucaucagcugcagcccccuggagugcagaaccuucuuccugacccagggcgcccugcugaacgacaagcacagcaacggcaccaucaaggacagaagccccuacagaacccugaugagcugccccaucggcgaggugcccagccccuacaacagcagauucgagagcguggccuggagcgccagcgccugccacgacggcaucaacuggcugaccaucggcaucagcggccccgacaacggcgccguggccgugcugaaguacaacggcaucaucaccgacaccaucaagagcuggagaaacaacauccugagaacccaggagagcgagugcgccugcgugaacggcagcugcuucaccgugaugaccgacggccccagcgacggccaggccagcuacaagaucuucagaaucgagaagggcaagaucgugaagagcguggagaugaacgcccccaacuaccacuacgaggagugcagcugcuaccccgacagcagcgagaucaccugcgugugcagagacaacuggcacggcagcaacagacccugggugagcuucaaccagaaccuggaguacagaaucggcuacaucugcagcggcaucuucggcgacaaccccagacccaacgacaagaccggcagcugcggccccgugagcagcaacggcgccaacggcgugaagggcuucagcuucaaguacggcaacggcguguggaucggcagaaccaagagcaucagcagcagaaacggcuucgagaugaucugggaccccaacggcuggaccggcaccgacaacaacuucagcaucaagcaggacaucaucggcaucaacgaguggagcggcuacagcggcagcuucgugcagcaccccgagcugaccggccuggacugcaucagacccugcuucuggguggagcugaucagaggcagacccaaggagaacaccaucuggaccagcggcagcagcaucagcuucugcggcgugaacagcgacaccgugggcuggagcuggcccgacggcgccgagcugcccuucaccguggacaaguga

SEQ ID NO: 181177 - RNA, 1410 nt, Artificial Sequence; identical to SEQ ID NO: 180317
  derived and/or modified CDS sequence (opt4) from neuraminidase__InfluenzaA__AEQ49780

SEQ ID NO: 181178 - RNA, 1410 nt, Artificial Sequence; identical to SEQ ID NO: 180317
  derived and/or modified CDS sequence (opt4) from neuraminidase__InfluenzaA__AEQ49781

SEQ ID NO: 181179 - RNA, 1410 nt, Artificial Sequence; identical to SEQ ID NO: 181138
  derived and/or modified CDS sequence (opt4) from neuraminidase__InfluenzaA__AEQ49782

SEQ ID NO: 181180 - RNA, 1410 nt, Artificial Sequence
  derived and/or modified CDS sequence (opt4) from neuraminidase__InfluenzaA__AEQ49783
augaaccccaaccagaagaucaucaccaucggcagcgccugcaugaccaucggcauggccaaccugauccugcagaucggcaacaucaucagcaucuggaucagccacagcauccagcugggcaaccagagccagaucgagaccugcaaccagagcgugaucaccuacgagaacaacaccugggugaaccagaccuacgugaacaucagcaacaccaacuucgccgccggccagagcguggugagcgugaagcuggccggcaacagcagccugugccccgugagcggcugggccaucuacagcaaggacaacagcaucagaaucggcagcaagggcgacguguucgugaucagagagcccuucaucagcugcagcccccuggagugcagaaccuucuuccugacccagggcgcccugcugaacgacaagcacagcaacggcaccaucaaggacagaagccccuacagaacccugaugagcugccccaucggcgaggugcccagccccuacaacagcagauucgagagcguggccuggagcgccagcgccugccacgacggcaucaacuggcugaccaucggcaucagcggccccgacaacggcgccguggccgugcugaaguacaacggcaucaucaccgacaccaucaagagcuggagaaacaacauccugagaacccaggagagcgagugcgccugcgugaacggcagcugcuucaccaucaugaccgacggccccagcgacggccaggccagcuacaagaucuucagaaucgagaagggcaagaucgugaagagcguggagaugaacgcccccaacuaccacuacgaggagugcagcugcuaccccgacagcagcgagaucaccugcgugugcagagacaacuggcacggcagcaacagacccugggugagcuucaaccagaaccuggaguaccagaucggcuacaucugcagcggcaucuucggcgacaaccccagacccaacgacaagaccggcagcugcggccccgugagcagcaacggcgccaacggcgugaagggcuucagcuucaaguacggcaacggcguguggaucggcagaaccaagagcaucagcagcagaaagggcuucgagaugaucugggaccccaacggcuggaccggcaccgacaacaacuucagcaucaagcaggacaucgugggcaucaacgaguggagcggcuacagcggcagcuucgugcagcaccccgagcugaccggccuggacugcaucagacccugcuucuggguggagcugaucagaggcagacccaaggagaacaccaucuggaccagcggcagcagcaucagcuucugcggcgugaacagcgacaccgugggcuggagcuggcccgacggcgccgagcugcccuucaccaucgacaaguga

SEQ ID NO: 181181 - RNA, 1410 nt, Artificial Sequence
  derived and/or modified CDS sequence (opt4) from neuraminidase__InfluenzaA__AEQ49785
augaaccccaaccagaagaucaucaccaucggcagcgugagccugaccaucagcaccaucugcuucuucaugcagaucgccauccugaucaccaccgugacccugcacuucaagcaguacgaguucaacagcccccccaacaaccaggugaugcugugcgagcccaccaucaucgagagaaacaucaccgagaucguguaccugaccaacaccaccaucgagaaggagaucugccccaagcuggccgaguacagaaacuggagcaagccccagugcgacaucaccggcuucgcccccuucagcaaggacaacagcaucagacugagcgccggcggcgacaucugggugaccagagagcccuacgugagcugcgaccccaacaagugcuaccaguucgcccugggccagggcaccacccugaacaacgugcacagcaacaacaccgugagagacagaacccccuacagaacccugcugaugaacgagcugggcgugcccuuccaccugggcaccaagcaggugugcaucgccuggagcagcagcagcugccacgacggcaaggccuggcugcacgugugcaucaccggcgacgacaagaacgccaccgccagcuucaucuacaacggcagacugguggacagcguggugagcuggagcaaggagauccugagaacccaggagagcgagugcgugugcaucaacggcaccugcaccguggugaugaccgacggcagcgccagcggcaaggccgacaccaagauccuguucaucgaggagggcaagaucgugcacaccagcacccugagcggcagcgcccagcacguggaggagugcagcugcuaccccagauaccccggcgugagaugcgugugcagagacaacuggaagggcagcaacagacccaucguggacaucaacaugaaggaccacagcaucgugagcagcuacgugugcagcggccuggugggcgacacccccagaaagaacgacagcagcagcagcagccacugcuucgaccccaacgacgaggagggcggccacggcgugaagggcugggccuucgacgacggcaacgacguguggaugggcagaaccaucagcgagaagagcagacugggcuacgagaccuucaaggugaucgagggcuggagcaaccccaagagcaagcugcagaucaacagacaggugaucguggacagaggcgacagaagcggcuacagcggcaucuucagcguggagggcaagagcugcaucaacagaugcuucuacguggagcugaucagaggcagcaaggaggagaccgaggugcuguggaccagcaacagcaucgugguguucugcggcaccagcggcaccuacggcaccggcagcuggcccgacggcgccgacaucaaccugaugcccaucuga

SEQ ID NO: 181182 - RNA, 1410 nt, Artificial Sequence; identical to SEQ ID NO: 181181
  derived and/or modified CDS sequence (opt4) from neuraminidase__InfluenzaA__AEQ49786

SEQ ID NO: 181183 - RNA, 1410 nt, Artificial Sequence; identical to SEQ ID NO: 181181
  derived and/or modified CDS sequence (opt4) from neuraminidase__InfluenzaA__AEQ49788

SEQ ID NO: 181184 - RNA, 1410 nt, Artificial Sequence; identical to SEQ ID NO: 181181
  derived and/or modified CDS sequence (opt4) from neuraminidase__InfluenzaA__AEQ49789

SEQ ID NO: 181185 - RNA, 1410 nt, Artificial Sequence
  derived and/or modified CDS sequence (opt4) from neuraminidase__InfluenzaA__AEQ49790
augaaccccaaccagaagaucaucaccaucggcagcgugagccugaccaucagcaccaucugcuucuucaugcagaucgccauccugaucaccaccgugacccugcacuucaagcaguacgaguucuacagcccccccaacaaccaggugaugcugugcgagcccaccaucaucgagagaaacaucaccgagaucguguaccugaccaacaccaccaucgagaaggagaucugccccaagcuggccgaguacagaaacuggagcaagccccagugcgacaucaccggcuucgcccccuucagcaaggacaacagcaucagacugagcgccggcggcgacaucugggugaccagagagcccuacgugagcugcgaccccgacaagugcuaccaguucgcccugggccagggcaccacccugaacaacgugcacagcaacaacaccgugagaggcagaacccccuacagaacccugcugaugaacgagcugggcgugcccuuccaccugggcaccaagcaggugugcaucgccuggagcagcagcagcugccacgacggcaaggccuggcugcacgugugcaucaccggcgacgacaagaacgccaccgccagcuucaucuacaacggcagacugguggacagcguggugagcuggagcaaggagauccugagaacccaggagagcgagugcgugugcaucaacggcaccugcaccguggugaugaccgacggcagcgccagcggcaaggccgacaccaagauccuguucaucgaggagggcaagaucgugcacaccagcacccugagcggcagcgcccagcacguggaggagugcagcugcuaccccagauaccccggcgugagaugcgugugcagagacaacuggaagggcagcaacagacccaucguggacaucaacaucaaggaccacagcaucgugagcagcuacgugugcagcggccuggugggcgacacccccagaaagaacgacagcagcagcagcagccacugccuggaccccaacaacgaggagggcggccacggcgugaagggcugggccuucgacgacggcaacgacguguggaugggcagaaccaucaacgagaccagcagacugggcuacgagaccuucaaggugaucgagggcuggagcaaccccaagagcaagcugcagaucaacagacaggugaucguggacagaggcaacagaagcggcuacagcggcaucuucagcguggagggcaagagcugcaucaacagaugcuucuacguggagcugaucagaggcagaaaggaggagaccgaggugcuguggaccagcaacagcaucgugguguucugcggcaccagcggcaccuacggcaccggcagcuggcccgacggcgccgaccugaaccugaugcccaucuga

SEQ ID NO: 181186 - RNA, 1410 nt, Artificial Sequence
  derived and/or modified CDS sequence (opt4) from neuraminidase__InfluenzaA__AEQ49791
augaaccccaaccagaagaucaucaccaucggcagcgugagccugaccaucagcaccaucugcuucuucaugcagaucgccauccugaucaccaccgugacccugcacuucaagcaguacgaguucuaccccccccccaacaaccaggugaugcugugcgagcccaccaucaucgagagaaacaucaccgagaucguguaccugaccaacaccaccaucgagaaggagaucugccccaagcuggccgaguacagaaacuggagcaagccccagugcgacaucaccggcuucgcccccuucagcaaggacaacagcaucagacugagcgccggcggcgacaucugggugaccagagagcccuacgugagcugcgaccccgacaagugcuaccaguucgcccugggccagggcaccacccugaacaacgugcacagcaacaacaccgugagaaacagaacccccuacagaacccugcugaugaacgagcugggcgugcccuuccaccugggcaccaagcaggugugcaucgccuggagcagcagcagcugccacgacggcaaggccuggcugcacgugugcaucaccggcgacgacaagaacgccaccgccagcuucaucuacaacggcagacugguggacagcguggugagcuggagcaaggagauccugagaacccaggagagcgagugcgugugcaucaacggcaccugcaccguggugaugaccgacggcagcgccagcggcaaggccgacaccaagauccuguucaucgaggagggcaagaucgugcacaccagcacccugagcggcagcgcccagcacguggaggagugcagcugcuaccccagauaccccggcgugagaugcgugugcagagacaacuggaagggcagcaacagacccaucguggacaucaacaucaaggaccacagcaucgugagcagcuacgugugcagcggccuggugggcgacacccccagaaagaacgacagcagcagcagcagccacugccuggaccccaacaacgaggagggcggccacggcgugaagggcugggccuucgacgacggcaacgacguguggaugggcagaaccaucaacgagaccagcagacugggcuacgagaccuucaaggugaucgagggcuggagcaaccccaagagcaagcugcagaucaacagacaggugaucguggacagaggcaacagaagcggcuacagcggcaucuucagcguggagggcaagagcugcaucaacagaugcuucuacguggagcugaucagaggcagaaaggaggagaccgaggugcuguggaccagcaacagcaucgugguguucugcggcaccagcggcaccuacggcaccggcagcuggcccgacggcgccgaccugaaccugaugcccaucuga

SEQ ID NO: 181187 - RNA, 1410 nt, Artificial Sequence; identical to SEQ ID NO: 181181
  derived and/or modified CDS sequence (opt4) from neuraminidase__InfluenzaA__AEQ49792

SEQ ID NO: 181188 - RNA, 1410 nt, Artificial Sequence; identical to SEQ ID NO: 181181
  derived and/or modified CDS sequence (opt4) from neuraminidase__InfluenzaA__AEQ49793

SEQ ID NO: 181189 - RNA, 1410 nt, Artificial Sequence; identical to SEQ ID NO: 181181
  derived and/or modified CDS sequence (opt4) from neuraminidase__InfluenzaA__AEQ49794

SEQ ID NO: 181190 - RNA, 1410 nt, Artificial Sequence; identical to SEQ ID NO: 181181
  derived and/or modified CDS sequence (opt4) from neuraminidase__InfluenzaA__AEQ49795

SEQ ID NO: 181191 - RNA, 1410 nt, Artificial Sequence
  derived and/or modified CDS sequence (opt4) from neuraminidase__InfluenzaA__AEQ49796
augaaccccaaccagaagaucaucaccaucggcagcgugagccugaccaucagcaccaucugcuucuucaugcagaucgccauccugaucaccaccgugacccugcacuucaagcaguacgaguucaacagcccccccaacaaccaggugaugcugugcgagcccaccaucaucgagagaaacaucaccgagaucguguaccugaccaacaccaccaucgagaaggagaucugccccaagcuggccgaguacagaaacuggagcaagccccagugcgacaucaccggcuucgcccccuucagcaaggacaacagcaucagacugagcgccggcggcgacaucugggugaccagagagcccuacgugagcugcgaccccgacaagugcuaccaguucgcccugggccagggcaccacccugaacaacgugcacagcaacaacaccgugagaggcagaacccccuacagaacccugcugaugaacgagcugggcgugcccuuccaccugggcaccaagcaggugugcaucgccuggagcagcagcagcugccacgacggcaaggccuggcugcacgugugcaucaccggcgacgacaagaacgccaccgccagcuucaucuacaacggcagacugguggacagcguggugagcuggagcaaggagauccugagaacccaggagagcgagugcgugugcaucaacggcaccugcaccguggugaugaccgacggcagcgccagcggcaaggccgacaccaagauccuguucaucgaggagggcaagaucgugcacaccagcacccugagcggcagcgcccagcacguggaggagugcagcugcuaccccagauaccccggcgugagaugcgugugcagagacaacuggaagggcagcaacagacccaucguggacaucaacaucaaggaccacagcaucgugagcagcuacgugugcagcggccuggugggcgacacccccagaaagaacgacagcagcagcagcagccacugccuggaccccaacaacgaggagggcggccacggcgugaagggcugggccuucgacgacggcaacgacguguggaugggcagaaccaucaacgagaccagcagacugggcuacgagaccuucaaggugaucgagggcuggagcaaccccaagagcaagcugcagaucaacagacaggugaucguggacaagggcaacagaagcggcuacagcggcaucuucagcguggagggcaagagcugcaucaacagaugcuucuacguggagcugaucagaggcagaaaggaggagaccgaggugcuguggaccagcaacagcaucgugguguucugcggcaccagcggcaccuacggcaccggcagcuggcccgacggcgccgaccugaaccugaugcccaucuga

SEQ ID NO: 181192 - RNA, 1410 nt, Artificial Sequence; identical to SEQ ID NO: 181181
  derived and/or modified CDS sequence (opt4) from neuraminidase__InfluenzaA__AEQ49797

SEQ ID NO: 181193 - RNA, 1410 nt, Artificial Sequence; identical to SEQ ID NO: 181181
  derived and/or modified CDS sequence (opt4) from neuraminidase__InfluenzaA__AEQ49798

SEQ ID NO: 181194 - RNA, 1410 nt, Artificial Sequence; identical to SEQ ID NO: 181181
  derived and/or modified CDS sequence (opt4) from neuraminidase__InfluenzaA__AEQ49799

SEQ ID NO: 181195 - RNA, 1410 nt, Artificial Sequence; identical to SEQ ID NO: 181181
  derived and/or modified CDS sequence (opt4) from neuraminidase__InfluenzaA__AEQ49800

SEQ ID NO: 181196 - RNA, 1410 nt, Artificial Sequence; identical to SEQ ID NO: 181181
  derived and/or modified CDS sequence (opt4) from neuraminidase__InfluenzaA__AEQ49801

SEQ ID NO: 181197 - RNA, 1410 nt, Artificial Sequence; identical to SEQ ID NO: 181181
  derived and/or modified CDS sequence (opt4) from neuraminidase__InfluenzaA__AEQ49802

SEQ ID NO: 181198 - RNA, 1410 nt, Artificial Sequence
  derived and/or modified CDS sequence (opt4) from neuraminidase__InfluenzaA__AEQ49803
augaaccccaaccagaagaucaucaccaucggcagcgugagccugaccaucagcaccaucugcuucuucaugcagaucgccauccugaucaccaccgugacccugcacuucaagcaguacgaguucaacagcccccccaacaaccaggugaugcugugcgagcccaccaucaucgagagaaacaucaccgagaucguguaccugaccaacaccaccaucgagaaggagaucugccccaagcuggccgaguacagaaacuggagcaagccccagugcgacaucaccggcuucgcccccuucagcaaggacaacagcaucagacugagcgccggcggcgacaucugggugaccagagagcccuacgugagcugcgaccccaacaagugcuaccaguucgcccugggccagggcaccacccugaacaacgugcacagcaacaacaccgugagagacagaacccccuacagaacccugcugaugaacgagcugggcgugcccuuccaccugggcaccaagcaggugugcaucgccuggagcagcagcagcugccacgacggcaaggccuggcugcacgugugcaucaccggcgacgacaagaacgccaccgccagcuucaucuacaacggcagacugguggacagcguggugagcuggagcaaggagauccugagaacccaggagagcgagugcgugugcaucaacggcaccugcaccguggugaugaccgacggcagcgccagcggcaaggccgacaccaagauccuguucaucgaggagggcaagaucgugcacaccagcacccugagcggcagcgcccagcacguggaggagugcagcugcuaccccagauaccccggcgugagaugcgugugcagagacaacuggaagggcagcaacagacccaucguggacaucaacaucaaggaccacagcaucgugagcagcuacgugugcagcggccuggugggcgacacccccagaaagaacgacagcaccagcagcagccacugccuggaccccaacaacgaggagggcggccacggcgugaagggcugggccuucgacgacggcaacgacguguggaugggcagaaccaucagcgagaccagcagacugggcuacgagaccuucaaggugaucgagggcuggagcaaccccaagagcaagcugcagaucaacagacaggugaucguggacaagggcaacagaagcggcuacagcggcaucuucagcguggagggcaagagcugcaucaacagaugcuucuacguggagcugaucagaggcagaaaggaggagaccgaggugcuguggaccagcaacagcaucgugguguucugcggcaccagcggcaccuacggcaccggcagcuggcccgacggcgccgaccugaaccugaugaccaucuga

SEQ ID NO: 181199 - RNA, 1410 nt, Artificial Sequence
  derived and/or modified CDS sequence (opt4) from neuraminidase__InfluenzaA__AEQ49804
augaaccccaaccagaagaucaucaccaucggcagcgugagccugaccaucagcaccaucugcuucuucaugcagaucgccauccugaucaccaccgugacccugcacuucaagcaguacgaguucaacagcccccccaacaaccaggugaugcugugcgagcccaccaucaucgagagaaacaucaccgagaucguguaccugaccaacaccaccaucgagaaggagaucugccccaagcccgccgaguacagaaacuggagcaagccccagugcgacaucaccggcuucgcccccuucagcaaggacaacagcaucagacugagcgccggcggcgacaucugggugaccagagagcccuacgugagcugcgaccccgacaagugcuaccaguucgcccugggccagggcaccacccugaacaacgugcacagcaacaacaccgugagagacagaacccccuacagaacccugcugaugaacgagcugggcgugcccuuccaccugggcaccaagcaggugugcaucgccuggagcagcagcagcugccacgacggcaaggccuggcugcacgugugcaucaccggcgacgacaagaacgccaccgccagcuucaucuacaacggcagacugguggacagcguggugagcuggagcaaggacauccugagaacccaggagagcgagugcgugugcaucaacggcaccugcaccguggugaugaccgacggcagcgccagcggcaaggccgacaccaagauccuguucaucgaggagggcaagaucgugcacaccagcacccugagcggcagcgcccagcacguggaggagugcagcugcuaccccagauaccccggcgugagaugcgugugcagagacaacuggaagggcagcaacagacccaucguggacaucaacaucaaggaccacagcaucgugagcagcuacgugugcagcggccuggugggcgacacccccagaaagaacgacagcagcagcagcagccacugccuggaccccaacaacgaggagggcggccacggcgugaagggcugggccuucgacgacggcaacgacguguggaugggcagaaccaucaacgagaccagcagacugggcuacgagaccuucaaggugaucgagggcuggagcaaccccaagagcaagcugcagaucaacagacaggugaucguggacagaggcaacagaagcggcuacagcggcaucuucagcguggagggcaagagcugcaucaacagaugcuucuacguggagcugaucagaggcagaaaggaggagaccgaggugcuguggaccagcaacagcaucgugguguucugcggcaccagcggcaccuacggcaccggcagcuggcccgacggcgccgaccugaaccugaugcccaucuga

SEQ ID NO: 181200 - RNA, 1410 nt, Artificial Sequence
  derived and/or modified CDS sequence (opt4) from neuraminidase__InfluenzaA__AEQ49805
augaaccccaaccagaagaucaucaccaucggcagcgugagccugaccaucagcaccaucugcuucuucaugcagaucgccauccugaucaccaccgugacccugcacuucaagcaguacgaguucaacagcccccccaacaaccaggugaugcugugcgagcccaccaucaucgagagaaacaucaccgagaucguguaccugaccaacaccaccaucgagaaggagaucugccccaagcccgccgaguacagaaacuggagcaagccccagugcgacaucaccggcuucgcccccuucagcaaggacaacagcaucagacugagcgccggcggcgacaucugggugaccagagagcccuacgugagcugcgaccccgacaagugcuaccaguucgcccugggccagggcaccacccugaacaacgugcacagcaacaacaccgugagaaacagaacccccuacagaacccugcugaugaacgagcugggcgugcccuuccaccugggcaccaagcaggugugcaucgccuggagcagcagcagcugccacgacggcaaggccuggcugcacgugugcaucaccggcgacgacaagaacgccaccgccagcuucaucuacaacggcagacugguggacagcguggugagcuggagcaaggacauccugagaacccaggagagcgagugcgugugcaucaacggcaccugcaccguggugaugaccgacggcagcgccagcggcaaggccgacaccaagauccuguucaucgaggagggcaagaucgugcacaccagcacccugagcggcagcgcccagcacguggaggagugcagcugcuaccccagauaccccggcgugagaugcgugugcagagacaacuggaagggcagcaacagacccaucguggacaucaacaucaaggaccacagcaucgugagcagcuacgugugcagcggccuggugggcgacacccccagaaagaacgacagcagcagcagcagccacugccuggaccccaacaacgaggagggcggccacggcgugaagggcugggccuucgacgacggcaacgacguguggaugggcagaaccaucaacgagaccagcagacugggcuacgagaccuucaaggugaucgagggcuggagcaaccccaagagcaagcugcagaucaacagacaggugaucguggacagaggcaacagaagcggcuacagcggcaucuucagcguggagggcaagagcugcaucaacagaugcuucuacguggagcugaucagaggcagaaaggaggagaccgaggugcuguggaccagcaacagcaucgugguguucugcggcaccagcggcaccuacggcaccggcagcuggcccgacggcgccgaccugaaccugaugcccaucuga

SEQ ID NO: 181201 - RNA, 1410 nt, Artificial Sequence
  derived and/or modified CDS sequence (opt4) from neuraminidase__InfluenzaA__AEQ49806
augaaccccaaccagaagaucaucaccaucggcagcgugagccugaccaucagcaccaucugcuucuucaugcagaucgccauccugaucaccaccgugacccugcacuucaagcaguacgaguucaacagcccccccaacaaccaggugaugcugugcgagcccaccaucaucgagagaaacaucaccgagaucguguaccugaccaacaccaccaucgagaaggagaucugccccaagcuggccgaguacagaaacuggagcaagccccagugcgacaucaccggcuucgcccccuucagcaaggacaacagcaucagacugagcgccggcggcgacaucugggugaccagagagcccuacgugagcugcgaccccgacaagugcuaccaguucgcccugggccagggcaccacccugaacaacgugcacagcaacaacaccgugagagacagaacccccuacagaacccugcugaugaacgagcugggcgugcccuuccaccugggcaccaagcaggugugcaucgccuggagcagcagcagcugccacgacggcaaggccuggcugcacgugugcaucaccggcgacgacaagaacgccaccgccagcuucaucuacaacggcagacugguggacagcguggugagcuggagcaaggagauccugagaacccaggagagcgagugcgugugcaucaacggcaccugcaccguggugaugaccgacggcagcgccagcggcaaggccgacaccaagauccuguucaucgaggagggcaagaucgugcacaccagcacccugagcggcagcgcccagcacguggaggagugcagcugcuaccccagauaccccggcgugagaugcgugugcagagacaacuggaagggcagcaacagacccaucguggacaucaacaucaaggaccacagcaucgugagcagcuacgugugcagcggccuggugggcgacacccccagaaagaacgacagcuucagcagcagccacugccuggaccccaacaacgaggagggcggccacggcgugaagggcugggccuucgacgacggcaacgacguguggaugggcagaaccaucaacgagaccagcagacugggcuacgagaccuucaaggugaucgagggcuggagcaaccccaagagcaagcugcagaucaacagacaggugaucguggacagaggcaacagaagcggcuacagcggcaucuucagcguggagggcaagagcugcaucaacagaugcuucuacguggagcugaucagaggcagaaaggaggagaccgaggugcuguggaccagcaacagcaucgugguguucugcggcaccagcggcaccuacggcaccggcagcuggcccgacggcgccgaccugaaccugaugcccaucuga

SEQ ID NO: 181202 - RNA, 1410 nt, Artificial Sequence; identical to SEQ ID NO: 179578
  derived and/or modified CDS sequence (opt4) from neuraminidase__InfluenzaA__AEQ49807

SEQ ID NO: 181203 - RNA, 1410 nt, Artificial Sequence
  derived and/or modified CDS sequence (opt4) from neuraminidase__InfluenzaA__AEQ49809
augaaccccaaccagaagaucaucaccaucggcagcgugagccugaccaucagcaccaucugcuucuucaugcagaucgccauccugaucaccaccgugacccugcacuucaagcaguacgaguucaacagcccccccaacaaccaggugaugcugugcgagcccaccaucaucgagagaaacaucaccgagaucguguaccugaccaacaccaccaucgagaaggagaucugccccaagcuggccgaguacagaaacuggagcaagccccagugcgacaucaccggcuucgcccccuucagcaaggacaacagcaucagacugagcgccggcggcgacaucugggugaccagagagcccuacgugagcugcgaccccgacaagugcuaccaguucgcccugggccagggcaccacccugaacaacgugcacagcaacaacaccgugagagacagaacccccuacagaacccugcugaugaacgagcugggcgugcccuuccaccugggcaccaagcaggugugcaucgccuggagcagcagcagcugccacgacggcaaggccuggcugcacgugugcaucaccggcgacgacaagaacgccaccgccagcuucaucuacaacggcaagcugguggacagcguggugagcuggagcaaggagauccugagaacccaggagagcgagugcgugugcaucaacggcaccugcaccguggugaugaccgacggcagcgccagcggcaaggccgacaccaagauccuguucaucgaggagggcaagaucgugcacaccagcacccugagcggcagcgcccagcacguggaggagugcagcugcuaccccagauaccccggcgugagaugcgugugcagagacaacuggaagggcagcaacagacccaucguggacaucaacaucaaggaccacagcaucgugagcagcuacgugugcagcggccuggugggcgacacccccagaaagaacgacagcagcagcagcagccacugccuggaccccaacaacgaggagggcggccacggcgugaagggcugggccuucgacgacggcaacgacguguggaugggcagaaccaucaacgagaccagcagacugggcuacgagaccuucaaggugaucgagggcuggagcaaccccaagagcaagcugcagaucaacagacaggugaucguggacagaggcaacagaagcggcuacagcggcaucuucagcguggagggcaagagcugcaucaacagaugcuucuacguggagcugaucagaggcagaaaggaggagaccgaggugcuguggaccagcaacagcaucgugguguucugcggcaccagcggcaccuacggcaccggcagcuggcccgacggcgccgaccugaaccugaugcccaucuga

SEQ ID NO: 181204 - RNA, 1410 nt, Artificial Sequence; identical to SEQ ID NO: 181203
  derived and/or modified CDS sequence (opt4) from neuraminidase__InfluenzaA__AEQ49811

SEQ ID NO: 181205 - RNA, 1410 nt, Artificial Sequence; identical to SEQ ID NO: 179578
  derived and/or modified CDS sequence (opt4) from neuraminidase__InfluenzaA__AEQ49812

SEQ ID NO: 181206 - RNA, 1410 nt, Artificial Sequence; identical to SEQ ID NO: 179578
  derived and/or modified CDS sequence (opt4) from neuraminidase__InfluenzaA__AEQ49813

SEQ ID NO: 181207 - RNA, 1410 nt, Artificial Sequence; identical to SEQ ID NO: 179578
  derived and/or modified CDS sequence (opt4) from neuraminidase__InfluenzaA__AEQ49815

SEQ ID NO: 181208 - RNA, 1410 nt, Artificial Sequence
  derived and/or modified CDS sequence (opt4) from neuraminidase__InfluenzaA__AEQ49816
augaaccccaaccagaagaucaucaccaucggcagcgugagccugaccaucagcaccaucugcuucuucaugcagaucgccauccugaucaccaccgugacccugcacuucaagcaguacgaguucaacagcccccccaacaaccaggugaugcugugcgagcccaccaucaucgagagaaacaucaccgagaucguguaccugaccaacaccaccaucgagaaggagaucugccccaagcuggccgaguacagaaacuggagcaagccccagugcgacaucaccggcuucgcccccuucagcaaggacaacagcaucagacugagcgccggcggcgacaucugggugaccagagagcccuacgugagcugcgaccccaacaagugcuaccaguucgcccugggccagggcaccacccugaacaacgugcacagcaacaacaccgugagagacagaacccccuacagaacccugcugaugaacgagcugggcgugcccuuccaccugggcaccaagcaggugugcaucgccuggagcagcagcagcugccacgacggcaaggccuggcugcacgugugcaucaccggcgacgacaagaacgccaccgccagcuucaucuacaacggcagacugguggacagcguggugagcuggagcaaggagauccugagaacccaggagagcgagugcgugugcaucaacggcaccugcaccguggugaugaccgacggcagcgccagcggcaaggccgacaccaagauccuguucguggaggagggcaagaucgugcacaccagcacccugagcggcagcgcccagcacguggaggagugcagcugcuaccccagauaccccggcgugagaugcgugugcagagacaacuggaagggcagcaacagacccaucguggacaucaacaugaaggaccacagcaucgugagcagcuacgugugcagcggccuggugggcgacacccccagaaagaacgacagcagcagcagcagccacugcuucgaccccaacgacgaggagggcggccacggcgugaagggcugggccuucgacgacggcaacgacguguggaugggcagaaccaucagcgagaagagcagacugggcuacgagaccuucaaggugaucgagggcuggagcaaccccaagagcaagcugcagaucaacagacaggugaucguggacagaggcaacagaagcggcuacagcggcaucuucagcguggagggcaagagcugcaucaacagaugcuucuacguggagcugaucagaggcagaaaggaggagaccgaggugcuguggaccagcaacagcaucgugguguucugcggcaccagcggcaccuacggcaccggcagcuggcccgacggcgccgacaucaaccugaugcccaucuga

SEQ ID NO: 181209 - RNA, 1410 nt, Artificial Sequence; identical to SEQ ID NO: 180943
  derived and/or modified CDS sequence (opt4) from neuraminidase__InfluenzaA__AEQ49820

SEQ ID NO: 181210 - RNA, 1410 nt, Artificial Sequence; identical to SEQ ID NO: 180943
  derived and/or modified CDS sequence (opt4) from neuraminidase__InfluenzaA__AEQ49821

SEQ ID NO: 181211 - RNA, 1410 nt, Artificial Sequence; identical to SEQ ID NO: 181181
  derived and/or modified CDS sequence (opt4) from neuraminidase__InfluenzaA__AEQ49822

SEQ ID NO: 181212 - RNA, 1410 nt, Artificial Sequence; identical to SEQ ID NO: 181181
  derived and/or modified CDS sequence (opt4) from neuraminidase__InfluenzaA__AEQ49823

SEQ ID NO: 181213 - RNA, 1410 nt, Artificial Sequence; identical to SEQ ID NO: 181181
  derived and/or modified CDS sequence (opt4) from neuraminidase__InfluenzaA__AEQ49824

SEQ ID NO: 181214 - RNA, 1410 nt, Artificial Sequence; identical to SEQ ID NO: 181181
  derived and/or modified CDS sequence (opt4) from neuraminidase__InfluenzaA__AEQ49825

SEQ ID NO: 181215 - RNA, 1410 nt, Artificial Sequence; identical to SEQ ID NO: 181181
  derived and/or modified CDS sequence (opt4) from neuraminidase__InfluenzaA__AEQ49826

SEQ ID NO: 181216 - RNA, 1410 nt, Artificial Sequence; identical to SEQ ID NO: 181181
  derived and/or modified CDS sequence (opt4) from neuraminidase__InfluenzaA__AEQ49827

SEQ ID NO: 181217 - RNA, 1410 nt, Artificial Sequence; identical to SEQ ID NO: 181181
  derived and/or modified CDS sequence (opt4) from neuraminidase__InfluenzaA__AEQ49828

SEQ ID NO: 181218 - RNA, 1410 nt, Artificial Sequence
  derived and/or modified CDS sequence (opt4) from neuraminidase__InfluenzaA__AEQ49829
augaaccccaaccagaagaucaucaccaucggcagcgugagccugaccaucagcaccaucugcuucuucaugcagaucgccauccugaucaccaccgugacccugcacuucaagcaguacgaguucaacagcccccccaacaaccaggugaugcugugcgagcccaccaucaucgagagaaacaucaccgagaucguguaccugaccaacaccaccaucgagaaggagaucugccccaagcuggccgaguacagaaacuggagcaagccccagugcgacaucaccggcuucgcccccuucagcaaggacaacagcaucagacugagcgccggcggcgacaucugggugaccagagagcccuacgugagcugcgaccccaacaagugcuaccaguucgcccugggccagggcaccacccugaacaacgugcacagcaacaacaccgugagagacagaacccccuacagaacccugcugaugaacgagcugggcgugcccuuccaccugggcaccaagcaggugugcaucgccuggagcagcagcagcugccacgacggcaaggccuggcugcacgugugcaucaccggcgacgacaagaacgccaccgccagcuucaucuacaacggcagacugguggacagcguggugagcuggagcaaggagauccugagaacccaggagagcgagugcgugugcaucaacggcaccugcaccguggugaugaccgacggcagcgcccugggcaaggccgacaccaagauccuguucaucgaggagggcaagaucgugcacaccagcacccugagcggcagcgcccagcacguggaggagugcagcugcuaccccagauaccccggcgugagaugcgugugcagagacaacuggaagggcagcaacagacccaucguggacaucaacaugaaggaccacagcaucgugagcagcuacgugugcagcggccuggugggcgacacccccagaaagaacgacagcagcagcagcagccacugcuucgaccccaacgacgaggagggcggccacggcgugaagggcugggccuucgacgacggcaacgacguguggaugggcagaaccaucagcgagaagagcagacugggcuacgagaccuucaaggugaucgagggcuggagcaaccccaagagcaagcugcagaucaacagacaggugaucguggacagaggcgacagaagcggcuacagcggcaucuucagcguggagggcaagagcugcaucaacagaugcuucuacguggagcugaucagaggcagcaaggaggagaccgaggugcuguggaccagcaacagcaucgugguguucugcggcaccagcggcaccuacggcaccggcagcuggcccgacggcgccgacaucaaccugaugcccaucuga

SEQ ID NO: 181219 - RNA, 1410 nt, Artificial Sequence; identical to SEQ ID NO: 181181
  derived and/or modified CDS sequence (opt4) from neuraminidase__InfluenzaA__AEQ49830

SEQ ID NO: 181220 - RNA, 1410 nt, Artificial Sequence; identical to SEQ ID NO: 181181
  derived and/or modified CDS sequence (opt4) from neuraminidase__InfluenzaA__AEQ49831

SEQ ID NO: 181221 - RNA, 1410 nt, Artificial Sequence
  derived and/or modified CDS sequence (opt4) from neuraminidase__InfluenzaA__AEQ49832
augaaccccaaccagaagaucaucaccaucggcagcgugagccugaccaucagcaccaucugcuucuucaugcagaucgccauccugaucaccaccgugacccugcacuucaagcaguacgaguucaacagcccccccaacaaccaggugaugcugugcgagcccaccaucaucgagagaaacaucaccgagaucguguaccugaccaacaccaccaucgagaaggagaucugccccaagcuggccgaguacagaaacuggagcaagccccagugcgacaucaccggcuucgcccccuucagcaaggacaacagcaucagacugagcgccggcggcgacaucugggugaccagagagcccuacgugagcugcgaccccaacaagugcuaccaguucgcccugggccagggcaccacccugaacaacgugcacagcaacaacaccgugagagacagaacccccuacagaacccugcugaugaacgagcugggcgugcccuuccaccugggcaccaagcaggugugcaucgccuggagcagcagcagcugccacgacggcaaggccuggcugcacgugugcaucaccggcgacgacaagaacgccaccgccagcuucaucuacaacggcagacugguggacagcguggugagcuggagcaaggagauccugagaacccaggagagcgagugcgugugcaucaacggcaccugcaccguggugaugaccgacggcagcgccagcggcaaggccgacaccaagauccuguucaucgaggagggcaagaucgugcacaccagcacccugagcggcagcgcccagcacguggaggagugcagcugcuaccccagauaccccggcgugagaugcgugugcagagacaacuggaagggcagcaacagacccaucguggacaucaacaugaaggaccacagcaucgugagcagcuacgugugcagcggccuggugggcgacacccccagaaagaacgacagcagcagcagcagccacugcuucgaccccaacgacgaggagggcggccacggcgugaagggcugggccuucgacgacggcaacgacguguggaugggcagaaccaucagcgagaagagcagacugggcuacgagaccuucaaggugguggagggcuggagcaaccccaagagcaagcugcagaucaacagacaggugaucguggacagaggcgacagaagcggcuacagcggcaucuucagcguggagggcaagagcugcaucaacagaugcuucuacguggagcugaucagaggcagcaaggaggagaccgaggugcuguggaccagcaacagcaucgugguguucugcggcaccagcggcaccuacggcaccggcagcuggcccgacggcgccgacaucaaccugaugcccaucuga

SEQ ID NO: 181222 - RNA, 1410 nt, Artificial Sequence
  derived and/or modified CDS sequence (opt4) from neuraminidase__InfluenzaA__AEQ49833
augaaccccaaccagaagaucaucaccaucggcagcgugagccugaccaucagcaccaucugcuucuucaugcagaucgccauccugaucaccaccgugacccugcacuucaagcaguacgaguucaacagcccccccaacaaccaggugaugcugugcgagcccaccaucaucgagagaaacaucaccgagaucguguaccugaccaacaccaccaucgagaaggagaucugccccaagcuggccgaguacagaaacuggagcaagccccagugcgacaucaccggcuucgcccccuucagcaaggacaacagcaucagacugagcgccggcggcgacaucugggugaccagagagcccuacgugagcugcgaccccgacaagugcuaccaguucgcccugggccagggcaccacccugaacaacgugcacagcaacaacaccgugagagacagaacccccuacagaacccugcugaugaacgagcugggcgugcccuuccaccugggcaccaagcaggugugcaucgccuggagcagcagcagcugccacgacggcaaggccuggcugcacgugugcaucaccggcgacgacaagaacgccaccgccagcuucaucuacaacggcaagcugguggacagcguggugagcuggagcaaggagauccugagaacccaggagagcgagugcgugugcaucaacggcaccugcaccguggugaugaccgacggcagcgccagcggcaaggccgacaccaagauccuguucaucgaggagggcaagaucgugcacaccagcacccugagcggcagcgcccagcacguggaggagugcagcugcuaccccagauaccccggcgugagaugcgugugcagagacaacuggaagggcagcaacagacccaucguggacaucaacaucaaggaccacagcaucgugagcagcuacgugugcagcggccuggugggcgacacccccagaaagaacgacagcagcagcagcagccacugccuggaccccaacaacgaggagggcggccacggcgugaagggcugggccuucgacgacggcaacgacguguggaugggcagaaccaucaacgagaccagcagacugggcuacgagaccuucaaggugaucgagggcuggagcaaccccaagagcaagcugcagaucagcagacaggugaucguggacagaggcaacagaagcggcuacagcggcaucuucagcguggagggcaagagcugcaucaacagaugcuucuacguggagcugaucagaggcagaaaggaggagaccgaggugcuguggaccagcaacagcaucgugguguucugcggcaccagcggcaccuacggcaccggcagcuggcccgacggcgccgaccugaaccugaugcccaucuga

SEQ ID NO: 181223 - RNA, 1410 nt, Artificial Sequence
  derived and/or modified CDS sequence (opt4) from neuraminidase__InfluenzaA__AEQ49835
augaaccccaaccagaagaucaucaccaucggcagcgugagccugaccaucagcaccaucugcuucuucaugcagaucgccauccugaucaccaccgugacccugcacuucaagcaguacgaguucaacagcccccccaacaaccaggugaugcugugcgagcccaccaucaucgagagaaacaucaccgagaucguguaccugaccaacaccaccaucgagaaggagaucugccccaagcuggccgaguacagaaacuggagcaagccccagugcgacaucaccggcuucgcccccuucagcaaggacaacagcaucagacugagcgccggcggcgacaucugggugaccagagagcccuacgugagcugcgaccccaacaagugcuaccaguucgcccugggccagggcaccacccugaacaacgugcacagcaacaacaccgugagagacagaacccccuacagaacccugcugaugaacgagcugggcgugcccuuccaccugggcaccaagcaggugugcauggccuggagcagcagcagcugccacgacggcaaggccuggcugcacgugugcaucaccggcgacgacaagaacgccaccgccagcuucaucuacaacggcagacugguggacagcguggugagcuggagcaaggagauccugagaacccaggagagcgagugcgugugcaucaacggcaccugcaccguggugaugaccgacggcagcgccagcggcaaggccgacaccaagauccuguucaucgaggagggcaagaucgugcacaccagcacccugagcggcagcgcccagcacguggaggagugcagcugcuaccccagauaccccggcgugagaugcgugugcagagacaacuggaagggcagcaacagacccaucguggacaucaacaugaaggaccacagcaucgugagcagcuacgugugcagcggccuggugggcgacacccccagaaagaacgacagcagcagcagcagccacugcuucgaccccaacgacgaggagggcggccacggcgugaagggcugggccuucgacgacggcaacgacguguggaugggcagaaccaucagcgagaagagcagacugggcuacgagaccuucaaggugaucgagggcuggagcaaccccaagagcaagcugcagaucaacagacaggugaucguggacagaggcaacagaagcggcuacagcggcaucuucagcguggagggcaagagcugcaucaacagaugcuucuacguggagcugaucagaggcagaaaggaggagaccgaggugcuguggaccagcaacagcaucgugguguucugcggcaccagcggcaccuacggcaccggcagcuggcccgacggcgccgacaucaaccugaugcccaucuga

SEQ ID NO: 181224 - RNA, 1410 nt, Artificial Sequence; identical to SEQ ID NO: 181223
  derived and/or modified CDS sequence (opt4) from neuraminidase__InfluenzaA__AEQ49836

SEQ ID NO: 181225 - RNA, 1410 nt, Artificial Sequence; identical to SEQ ID NO: 181223
  derived and/or modified CDS sequence (opt4) from neuraminidase__InfluenzaA__AEQ49838

SEQ ID NO: 181226 - RNA, 1410 nt, Artificial Sequence; identical to SEQ ID NO: 181223
  derived and/or modified CDS sequence (opt4) from neuraminidase__InfluenzaA__AEQ49839

SEQ ID NO: 181227 - RNA, 1410 nt, Artificial Sequence
  derived and/or modified CDS sequence (opt4) from neuraminidase__InfluenzaA__AEQ49840
augaaccccaaccagaagaucaucaccaucggcagcgugagccugaccaucagcaccaucugcuucuucaugcagaucgccauccugaucaccaccgugacccugcacuucaagcaguacgaguucaacagcccccccaacaaccaggugaugcugugcgagcccaccaucaucgagagaaacaucaccgagaucguguaccugaccaacaccaccaucgagaaggagaucugccccaagcuggccgaguacagaaacuggagcaagccccagugcgacaucaccggcuucgcccccuucagcaaggacaacagcaucagacugagcgccggcggcgacaucugggugaccagagagcccuacgugagcugcgaccccaacaagugcuaccaguucgcccugggccagggcaccacccugaacaacgugcacagcaacaacaccgugagagacagaacccccuacagaacccugcugaugaacgagcugggcgugcccuuccaccugggcaccaagcaggugugcauggccuggagcagcagcagcugccacgacggcaaggccuggcugcacgugugcaucaccggcgacgacaagaacgccaccgccagcuucaucuacaacggcagacugguggacagcguggugagcuggagcaaggagauccugagaacccaggagagcgagugcgugugcaucaacggcaccugcaccguggugaugaccgacggcagcgccagcggcaaggccgacaccaagauccuguucaucgaggagggcaagaucgugcacaccagcacccugagcggcagcgcccagcacguggaggagugcagcugcuaccccagauaccccggcgugagaugcgugugcagagacaacuggaagggcagcaacagacccaucguggacaucaacaugaaggaccacagcaucgugagcagcuacgugugcagcggccuggugggcgacacccccagaaagaacgacagcagcagcagcagccacugcuucgaccccaacgacgaggagggcggccacggcgugaagggcugggccuucgacgacggcaacgacguguggaugggcagaaccaucagcgagaagagcagacugggcuacgagaccuucaaggugaucgagggcuggagcaaccacaagagcaagcugcagaucaacagacaggugaucguggacagaggcaacagaagcggcuacagcggcaucuucagcguggagggcaagagcugcaucaacagaugcuucuacguggagcugaucagaggcagaaaggaggagaccgaggugcuguggaccagcaacagcaucgugguguucugcggcaccagcggcaccuacggcaccggcagcuggcccgacggcgccgacaucaaccugaugcccaucuga

SEQ ID NO: 181228 - RNA, 1410 nt, Artificial Sequence; identical to SEQ ID NO: 181223
  derived and/or modified CDS sequence (opt4) from neuraminidase__InfluenzaA__AEQ49841

SEQ ID NO: 181229 - RNA, 1410 nt, Artificial Sequence; identical to SEQ ID NO: 181223
  derived and/or modified CDS sequence (opt4) from neuraminidase__InfluenzaA__AEQ49842

SEQ ID NO: 181230 - RNA, 1410 nt, Artificial Sequence; identical to SEQ ID NO: 181223
  derived and/or modified CDS sequence (opt4) from neuraminidase__InfluenzaA__AEQ49843

SEQ ID NO: 181231 - RNA, 1410 nt, Artificial Sequence; identical to SEQ ID NO: 181181
  derived and/or modified CDS sequence (opt4) from neuraminidase__InfluenzaA__AEQ49844

SEQ ID NO: 181232 - RNA, 1410 nt, Artificial Sequence
  derived and/or modified CDS sequence (opt4) from neuraminidase__InfluenzaA__AEQ49845
augaaccccaaccagaagaucaucaccaucggcagcgugagccugaccaucagcaccaucugcuucuucaugcagaucgccauccugaucaccaccgugacccugcacuucaagcaguacgaguucaacagcccccccaacaaccaggugaugcugugcgagcccaccaucaucgagagaaacaucaccgagaucguguaccugaccaacaccaccaucgagagagagaucugccccaagcuggccgaguacagaaacuggagcaagccccagugcgacaucaccggcuucgcccccuucagcaaggacaacagcaucagacugagcgccggcggcgacaucugggugaccagagagcccuacgugagcugcgaccccaacaagugcuaccaguucgcccugggccagggcaccacccugaacaacgugcacagcaacaacaccgugagagacagaacccccuacagaacccugcugaugaacgagcugggcgugcccuuccaccugggcaccaagcaggugugcauggccuggagcagcagcagcugccacgacggcaaggccuggcugcacgugugcaucaccggcgacgacaagaacgccaccgccagcuucaucuacaacggcagacugguggacagcguggugagcuggagcaaggagauccugagaacccaggagagcgagugcgugugcaucaacggcaccugcaccguggugaugaccgacggcagcgccagcggcaaggccgacaccaagauccuguucaucgaggagggcaagaucgugcacaccagcacccugagcggcagcgcccagcacguggaggagugcagcugcuaccccagauaccccggcgugagaugcgugugcagagacaacuggaagggcagcaacagacccaucguggacaucaacaugaaggaccacagcaucgugagcagcuacgugugcagcggccuggugggcgacacccccagaaagaacgacagcagcagcagcagccacugcuucgaccccaacgacgaggagggcggccacggcgugaagggcugggccuucgacgacggcaacgacguguggaugggcagaaccaucagcgagaagagcagacugggcuacgagaccuucaaggugaucgagggcuggagcaaccccaagagcaagcugcagaucaacagacaggugaucguggacagaggcaacagaagcggcuacagcggcaucuucagcguggagggcaagagcugcaucaacagaugcuucuacguggagcugaucagaggcagaaaggaggagaccgaggugcuguggaccagcaacagcaucgugguguucugcggcaccagcggcaccuacggcaccggcagcuggcccgacggcgccgacaucaaccugaugcccaucuga

SEQ ID NO: 181233 - RNA, 1410 nt, Artificial Sequence
  derived and/or modified CDS sequence (opt4) from neuraminidase__InfluenzaA__AEQ49846
augaaccccaaccagaagaucaucaccaucggcagcgugagccugaccaucagcaccaucugcuucuucaugcagaucgccauccugaucaccaccgugacccugcacuucaagcaguacgaguucaacagcccccccaacaaccaggugaugcugugcgagcccaccaucaucgagagaaacaucaccgagaucguguaccugaccaacaccaccaucgagaaggagaucugccccaagcuggccgaguacagaaacuggagcaagccccagugcgacaucaccggcuucgcccccuucagcaaggacaacagcaucagacugagcgccggcggcgacaucugggugaccagagagcccuacgugagcugcgaccccaacaagugcuaccaguucgcccugggccagggcaccacccugaacaacgugcacagcaacaacaccgugagagacagaacccccuacagaacccugcugaugaacgagcugggcgugcccuuccaccugggcaccaagcaggugugcauggccuggagcagcagcagcugccacgacggcaaggccuggcugcacgugugcaucaccggcgacgacaagaacgccaccgccagcuucaucuacaacggcagacugguggacagcguggugagcuggagcaaggagauccugagaacccaggagagcgagugcgugugcaucaacggcaccugcaccguggugaugaccgacggcagcgccagcggcaaggccgacaccaagauccuguucaucgaggagggcaagaucgugcacaccagcacccugagcggcagcgcccagcacguggaggagugcagcugcuaccccagauaccccggcgugagaugcgugugcagagacaacuggaagggcagcaacagacccaucguggacaucaaccugaaggaccacagcaucgugagcagcuacgugugcagcggccuggugggcgacacccccagaaagaacgacagcagcagcagcagccacugcuucgaccccaacgacgaggagggcggccacggcgugaagggcugggccuucgacgacggcaacgacguguggaugggcagaaccaucagcgagaagagcagacugggcuacgagaccuucaaggugaucgagggcuggagcaaccccaagagcaagcugcagaucaacagacaggugaucguggacagaggcaacagaagcggcuacagcggcaucuucagcguggagggcaagagcugcaucaacagaugcuucuacguggagcugaucagaggcagaaaggaggagaccgaggugcuguggaccagcaacagcaucgugguguucugcggcaccagcggcaccuacggcaccggcagcuggcccgacggcgccgacaucaaccugaugcccaucuga

SEQ ID NO: 181234 - RNA, 1410 nt, Artificial Sequence
  derived and/or modified CDS sequence (opt4) from neuraminidase__InfluenzaA__AEQ49850
augaaccccaaccagaagaucaucaccaucggcagcgugagccugaccaucagcaccaucugcuucuucaugcagaucgccauccugaucaccaccgugacccugcacuucaagcaguacgaguucaacagcccccccaacaaccaggugaugcugugcgagcccaccaucaucgagagaaacaucaccgagaucguguaccugaccaacaccaccaucgagaaggagaucugccccaagcuggccgaguacagaaacuggagcaagccccagugcgacaucaccggcuucgcccccuucagcaaggacaacagcaucagacugagcgccggcggcgacaucugggugaccagagagcccuacgugagcugcgaccccaacaagugcuaccaguucgcccugggccagggcaccacccugaacaacgugcacagcaacaacaccgugagagacagaacccccuacagaacccugcugaugaacgagcugggcgugcccuuccaccugggcaccaagcaggugugcaucgccuggagcagcagcagcugccacgacggcaaggccuggcugcacgugugcaucaccggcgacgacaagaacgccaccgccagcuucaucuacaacggcagacugguggacagcguggugagcuggagcaaggagauccugagaacccaggagagcgagugcgugugcaucaacggcaccugcaccguggugaugaccgacggcagcgccagcggcaaggccgacaccaagauccuguucaucgaggagggcaagaucgugcacaccagcacccugagcggcagcgcccagcacguggaggagugcagcugcuaccccagauaccccggcgugagaugcgugugcagagacaacuggaagggcagcaacagacccaucguggacaucaacaugaaggaccacagcaucgugagcagcuacgugugcagcggccuggugggcgacacccccagaaagaacgacagcagcagcagcagccacugcuucgaccccaacgacgaggagggcggccacggcgugaagggcugggccuucgacgacggcaacgacguguggaugggcagaaccaucagcgagaagagcagacugggcuacgagaccuucaaggugaucgagggcuggagcaaccccaagagcaagcugcagaucaacagacaggugaucguggacagaggcgacagaagcggcuacagcggcaucuucagcguggagggcaagagcugcaucaacagaugcuucuacguggagcugaucagaggcagcaaggaggagaccgaggugcuguggaccagcaacagcaucgugguguucugcggcaccagcggcaccuacggcaccggcagcuggcccgacggcgccgacaucaagaucaugcccaucuga

SEQ ID NO: 181235 - RNA, 1410 nt, Artificial Sequence
  derived and/or modified CDS sequence (opt4) from neuraminidase__InfluenzaA__AEQ49851
augaaccccaaccagaagaucaucaccaucggcagcgugagccugaccaucagcaccaucugcuucuucaugcagaucgccauccugaucaccaccgugacccugcacuucaagcaguacgaguucaacagcccccccaacaaccaggugaugcugugcgagcccaccaucauggagagaaacaucaccgagaucguguaccugaccaacaccaccaucgagaaggagaucugccccaagcuggccgaguacagaaacuggagcaagccccagugcgacaucaccggcuucgcccccuucagcaaggacaacagcaucagacugagcgccggcggcgacaucugggugaccagagagcccuacgugagcugcgaccccgacaagugcuaccaguucgcccugggccagggcaccacccugaacaacgugcacagcaacaacaccgugagagacagaacccccuacagaacccugcugaugaacgagcugggcgugcccuuccaccugggcaccaagcaggugugcaucgccuggagcagcagcagcugccacgacggcaaggccuggcugcacgugugcaucaccggcgacgacaagaacgccaccgccagcuucaucuacaacggcaagcugguggacagcguggugagcuggagcaaggagauccugagaacccaggagagcgagugcgugugcaucaacggcaccugcaccguggugaugaccgacggcagcgccagcggcaaggccgacaccaagauccuguucaucgaggagggcaagaucgugcacaccagcacccugagcggcagcgcccagcacguggaggagugcagcugcuaccccagauaccccggcgugagaugcgugugcagagacaacuggaagggcagcaacagacccaucguggacaucaacaucaaggaccacagcaucgugagcagcuacgugugcagcggccuggugggcgacacccccagaaagaacgacagcagcagcagcagccacugccuggaccccaacaacgaggagggcggccacggcgugaagggcugggccuucgacgacggcaacgacguguggaugggcagaaccaucaacgagaccagcagacugggcuacgagaccuucaaggugaucgagggcuggagcaaccccaagagcaagcugcagaucaacagacaggugaucguggacagaggcaacagaagcggcuacagcggcaucuucagcguggagggcaagagcugcaucaacagaugcuucuacguggagcugaucagaggcagaaaggaggagaccgaggugcuguggaccagcaacagcaucgugguguucugcggcaccagcggcaccuacggcaccggcagcuggcccgacggcgccgaccugaaccugaugcccaucuga

SEQ ID NO: 181236 - RNA, 1410 nt, Artificial Sequence; identical to SEQ ID NO: 181203
  derived and/or modified CDS sequence (opt4) from neuraminidase__InfluenzaA__AEQ49852

SEQ ID NO: 181237 - RNA, 1410 nt, Artificial Sequence; identical to SEQ ID NO: 181181
  derived and/or modified CDS sequence (opt4) from neuraminidase__InfluenzaA__AEQ49969

SEQ ID NO: 181238 - RNA, 1410 nt, Artificial Sequence; identical to SEQ ID NO: 181203
  derived and/or modified CDS sequence (opt4) from neuraminidase__InfluenzaA__AEQ49970

SEQ ID NO: 181239 - RNA, 1410 nt, Artificial Sequence
  derived and/or modified CDS sequence (opt4) from neuraminidase__InfluenzaA__AEQ54954
augaaccccaaccagaagaucaucaccaucggcagcgugagccugaccaucagcaccaucugcuucuucaugcagaucgccauccugaucaccaccgugacccugcacuucaagcaguacgaguucaacagcccccccaacaaccaggugaugcugugcgagcccaccaucaucgagagaaacaucaccgagaucguguaccugaccaacaccaccaucgagaaggagaucugccccaagcuggccgaguacagaaacuggagcaagccccagugcgacaucaccggcuucgcccccuucagcaaggacaacagcaucagacugagcgccggcggcgacaucugggugaccagagagcccuacgugagcugcgaccccgacaagugcuaccaguucgcccugggccagggcaccacccugaacaacgugcacagcaacaacaccgugagagacagaacccccuacagaacccugcugaugaacgagcugggcgugcccuuccaccugggcaccaagcaggugugcaucgccuggagcagcagcagcugccacgacggcaaggccuggcugcacgugugcaucaccggcgacgacaagaacgccaccgccagcuucaucuacaacggcaagcugguggacagcguggugagcuggagcaaggagauccugagaacccaggagagcgagugcgugugcaucaacggcaccugcaccguggugaugaccgacggcagcgccagcggcaaggccgacaccaagauccuguucaucgaggagggcaagaucgugcacaccagcacccugagcggcagcgcccagcacguggaggagugcagcugcuaccccagauaccccggcgugagaugcgugugcagagacaacuggaagggcagcaacagacccaucguggacaucaacaucaaggaccacagcaucgugagcagcuacgugugcagcggccuggugggcgacacccccagaaagaacgacagcagcagcagcagccacugccuggaccccaacaacgaggagggcggccacggcgugaagggcugggccuucgacgacggcaacgacguguggaugggcagaaccaucagcgagaccagcagacugggcuacgagaccuucaaggugaucgagggcuggagcaaccccaagagcaagcugcagaucaacagacaggugaucguggacagaggcaacagaagcggcuacagcggcaucuucagcguggagggcaagagcugcaucaacagaugcuucuacguggagcugaucagaggcagaaaggaggagaccgaggugcuguggaccagcaacagcaucgugguguucugcggcaccagcggcaccuacggcaccggcagcuggcccgacggcgccgaccugaaccugaugcccaucuga

SEQ ID NO: 181240 - RNA, 1410 nt, Artificial Sequence; identical to SEQ ID NO: 176659
  derived and/or modified CDS sequence (opt4) from neuraminidase__InfluenzaA__AER08645

SEQ ID NO: 181241 - RNA, 1410 nt, Artificial Sequence
  derived and/or modified CDS sequence (opt4) from neuraminidase__InfluenzaA__AER08649
augaaccccaaccagaagaucaucaccaucggcagcgugagccugaccaucagcaccaucugcuucuucaugcagaucgccauccugaucaccaccgugacccugcacuucaagcaguacgaguucaacagcccccccaacaaccaggugaugcugugcgagcccaccaucaucgagagaaacaucaccgagaucguguaccugaccaacaccaccaucgagaaggagaucugccccaagcuggccgaguacagaaacuggagcaagccccagugcgacaucaccggcuucgcccccuucagcaaggacaacagcaucagacugagcgccggcggcgacaucugggugaccagagagcccuacgugagcugcgaccccgacaagugcuaccaguucgcccugggccagggcaccacccugaacaacgugcacagcaacaacaccgugagagacagaacccccuacagaacccugcugaugaacgagcugggcgugcccuuccaccugggcaccaagcaggugugcaucgccuggagcagcagcagcugccacgacggcaaggccuggcugcacgugugcaucaccggcgacgacaagaacgccaccgccagcuucaucuacaacggcagacugguggacagcguggugagcuggagcaaggagauccugagaacccaggagagcgagugcgugugcaucaacggcaccugcaccguggugaugaccgacggcagcgccagcggcaaggccgacaccaagauccuguucaucgaggagggcaagcuggugcacaccagcacccugagcggcagcgcccagcacguggaggagugcagcugcuaccccagauaccccggcgugagaugcgugugcagagacaacuggaagggcagcaacagacccaucguggacaucaacaucaaggaccacagcaucgugagcagcuacgugugcagcggccuggugggcgacacccccagaaagaacgacagcagcagcagcagccacugccuggaccccaacaacgaggagggcggccacggcgugaagggcugggccuucgacgacggcaacgacguguggaugggcagaaccaucagcgagaagagcagacugggcuacgagaccuucaaggugaucgagggcuggagcaaccccaagagcaagcugcagaucaacagacaggugaucguggacagaggcaacagaagcggcuacagcggcaucuucagcguggagggcaagagcugcaucaacagaugcuucuacguggagcugaucagaggcagaaaggaggagaccgaggugcuguggaccagcaacagcaucgugguguucugcggcaccagcggcaccuacggcaccggcagcuggcccgacggcgccgacaucaaccugaugcccaucuga

SEQ ID NO: 181242 - RNA, 1410 nt, Artificial Sequence
  derived and/or modified CDS sequence (opt4) from neuraminidase__InfluenzaA__AER08657
augaaccccaaccagaagaucaucaccaucggcagcgugagccugaccaucagcaccgugugcuucuucaugcagaucgccauccugaucaccaccgugacccugcacuucaagcaguacgaguucaacagcccccccaacaaccaggugaugcugugcgagcccaccaucaucgagagaaacaucaccgagaucguguaccugaccaacaccaccaucgagaaggagaugugccccaagcuggccgaguacagaaacuggagcaagccccagugcgacaucaccggcuucgcccccuucagcaaggacaacagcaucagacugagcgccggcggcgacaucugggugaccagagagcccuacgugagcugcgaccccgacaagugcuaccaguucgcccugggccagggcaccacccugaacaacgugcacagcaacaacaccgugagagacagaacccccuacagaacccugcugaugaacgagcugggcgugcccuuccaccugggcaccaagcaggugugcaucgccuggagcagcagcagcugccacgacggcaaggccuggcugcacgugugcaucaccggcgacgacaagaacgccaccgccagcuucaucuacaacggcagacugguggacagcguggugagcuggagcaaggagauccugagaacccaggagagcgagugcgugugcaucaacggcaccugcaccguggugaugaccgacggcagcgccagcggcaaggccgacaccaagauccuguucaucgaggagggcaagaucgugcacaccagcacccugagcggcagcgcccagcacguggaggagugcagcugcuaccccagauaccccggcgugagaugcgugugcagagacaacuggaagggcagcaacagacccaucguggacaucaacaucaaggaccacagcaucgugagcagcuacgugugcagcggccuggugggcgacacccccagaaagaacgacagcagcagcagcagccacugccuggaccccaacaacgaggagggcggccacggcgugaagggcugggccuucgacgacggcaacgacguguggaugggcagaaccaucagcgagaagagcagacugggcuacgagaccuucaaggugaucgagggcuggagcaaccccaagagcaagcugcagaucaacagacaggugaucguggacagaggcaacagaagcggcuacagcggcaucuucagcguggagggcaagagcugcaucaacagaugcuucuacguggagcugaucagaggcagaaaggaggagaccgaggugcuguggaccagcaacagcaucgugguguucugcggcaccagcggcaccuacggcaccggcagcuggcccgacggcgccgacaucaaccugaugcccaucuga

SEQ ID NO: 181243 - RNA, 1410 nt, Artificial Sequence; identical to SEQ ID NO: 176659
  derived and/or modified CDS sequence (opt4) from neuraminidase__InfluenzaA__AER08659

SEQ ID NO: 181244 - RNA, 1410 nt, Artificial Sequence
  derived and/or modified CDS sequence (opt4) from neuraminidase__InfluenzaA__AER08661
augaaccccaaccagaagaucaucaccaucggcagcgugagccugaccaucagcaccaucugcuucuucaugcagaucgccauccugaucaccaccgugacccugcacuucaagcaguacgaguucaacagcccccccaacaaccaggugaugcugugcgagcccaccaucaucgagagaaacaucaccgagaucguguaccugaccaacaccaccaucgagaaggagaucugccccaagcuggccgaguacagaaacuggagcaagccccagugcgacaucaccggcuucgcccccuucagcaaggacaacagcaucagacugagcgccggcggcgacaucugggugaccagagagcccuacgugagcugcgaccccgacaagugcuaccaguucgcccugggccagggcaccacccugaacaacgugcacagcaacaacaccgugagagacagaacccccuacagaacccugcugaugaacgagcugggcgugcccuuccaccugggcaccaagcaggugugcaucgccuggagcagcagcagcugccacgacggcaaggccuggcugcacgugugcaucaccggcgacgacaagaacgccaccgccagcuucaucuacaacggcagacugguggacagcguggugagcuggagcaaggagauccugagaacccaggagagcgagugcgugugcaucaacggcaccugcaccguggugaugaccgacggcagcgccagcggcaaggccgacaccaagauccuguucaucgaggagggcaagaucgugcacaccagcacccugagcggcagcgcccagcacguggaggagugcagcugcuaccccagauaccccggcgugagaugcgugugcagagacaacuggaagggcagcaacagacccaucguggacaucaacaucaaggaccacagcaucgugagcagcuacgugugcagcggccuggugggcgacacccccagaaagaacgacagcagcagcagcagccacugccuggaccccaacaacgaggagggcgaccacggcgugaagggcugggccuucgacgacggcaacgacguguggaugggcagaaccaucaacgagaccagcagacugggcuacgagaccuucaaggugaucgagggcuggagcaaccccaagagcaagcugcagaucaacagacaggugaucguggacagaggcaacagaagcggcuacagcggcaucuucagcguggagggcaagagcugcaucaacagaugcuucuacguggagcugaucagaggcagaaaggaggagaccgaggugcuguggaccagcaacagcaucgugguguucugcggcaccagcggcaccuacggcaccggcagcuggcccgacggcgccgaccugaaccugaugcccaucuga

SEQ ID NO: 181245 - RNA, 1410 nt, Artificial Sequence; identical to SEQ ID NO: 179578
  derived and/or modified CDS sequence (opt4) from neuraminidase__InfluenzaA__AER08663

SEQ ID NO: 181246 - RNA, 1410 nt, Artificial Sequence; identical to SEQ ID NO: 179578
  derived and/or modified CDS sequence (opt4) from neuraminidase__InfluenzaA__AER08665

SEQ ID NO: 181247 - RNA, 1410 nt, Artificial Sequence
  derived and/or modified CDS sequence (opt4) from neuraminidase__InfluenzaA__AER08669
augaaccccaaccagaagaucaucaccaucggcagcgugagccugaccaucagcaccaucugcuucuucaugcagaucgccauccugaucaccaccgugacccugcacuucaagcaguacgaguucaacagcccccccaacaaccaggugaugcugugcgagcccaccaucaucgagagaaacaucaccgagaucguguaccugaccaacaccaccaucgagaaggagaucugccccacccuggccgaguacagaaacuggagcaagccccagugcgacaucaccggcuucgcccccuucagcaaggacaacagcaucagacugagcgccggcggcgacaucugggugaccagagagcccuacgugagcugcgaccccgacaagugcuaccaguucgcccugggccagggcaccacccugaacaacgugcacagcaacaacaccgugagagacagaacccccuacagaacccugcugaugaacgagcugggcgugcccuuccaccugggcaccaagcaggugugcaucgccuggagcagcagcagcugccacgacggcaaggccuggcugcacgugugcaucaccggcgacgacaagaacgccaccgccagcuucaucuacaacggcagacugguggacagcguggugagcuggagcaaggagauccugagaacccaggagagcgagugcgugugcaucaacggcaccugcaccguggugaugaccgacggcagcgccagcggcaaggccgacaccaagauccuguucaucgaggagggcaagaucgugcacaccagcacccugagcggcagcgcccagcacguggaggagugcagcugcuaccccagauaccccggcgugagaugcgugugcagagacaacuggaagggcagcaacagacccaucguggacaucaacaucaaggaccacagcaucgugagcagcuacgugugcagcggccuggugggcgacacccccagaaagaacgacagcagcagcagcagccacugccuggaccccaacaacgaggagggcggccacggcgugaagggcugggccuucgacgacggcaacgacguguggaugggcagaaccaucagcgagaccagcagacugggcuacgagaccuucaaggugaucgagggcuggagcaaccccaagagcaagcugcagaucaacagacaggugaucguggacagaggcaacagaagcggcuacagcggcaucuucagcguggagggcaagagcugcaucaacagaugcuucuacguggagcugaucagaggcagaaaggaggagaccgaggugcuguggaccagcaacagcaucgugguguucugcggcaccagcggcaccuacggcaccggcagcuggcccgacggcgccgaccugaaccugaugcccaucuga

SEQ ID NO: 181248 - RNA, 1410 nt, Artificial Sequence
  derived and/or modified CDS sequence (opt4) from neuraminidase__InfluenzaA__AER08671
augaaccccaaccagaagaucaucaccaucggcagcgugagccugaccaucagcaccaucugcuucuucaugcagaucgccauccugaucaccaccgugacccugcacuucaagcaguacggcuucaacagcccccccaacaaccaggugaugcugugcgagcccaccaucaucgagagaaacaucaccgagaucguguaccugaccaacaccaccaucgagaaggagaucugccccacccuggccgaguacagaaacuggagcaagccccagugcgacaucaccggcuucgcccccuucagcaaggacaacagcaucagacugagcgccggcggcgacaucugggugaccagagagcccuacgugagcugcgaccccgacaagugcuaccaguucgcccugggccagggcaccacccugaacaacgugcacagcaacaacaccgugagagacagaacccccuacagaacccugcugaugaacgagcugggcgugcccuuccaccugggcaccaagcaggugugcaucgccuggagcagcagcagcugccacgacggcaaggccuggcugcacgugugcaucaccggcgacgacaagaacgccaccgccagcuucaucuacaacggcagacugguggacagcguggugagcuggagcaaggagauccugagaacccaggagagcgagugcgugugcaucaacggcaccugcaccguggugaugaccgacggcagcgccagcggcaaggccgacaccaagauccuguucaucgaggagggcaagaucgugcacaccagcacccugagcggcagcgcccagcacguggaggagugcagcugcuaccccagauaccccggcgugagaugcgugugcagagacaacuggaagggcagcaacagacccaucguggacaucaacaucaaggaccacagcaucgugagcagcuacgugugcagcggccuggugggcgacacccccagaaagaacgacagcagcagcagcagccacugccuggaccccaacaacgaggagggcggccacggcgugaagggcugggccuucgacgacggcaacgacguguggaugggcagaaccaucaacgagaccagcagacugggcuacgagaccuucaaggugaucgagggcuggagcaaccccaagagcaagcugcagaucaacagacaggugaucguggacagaggcaacagaagcggcuacagcggcaucuucagcguggagggcaagagcugcaucaacagaugcuucuacguggagcugaucagaggcagaaaggaggagaccgaggugcuguggaccagcaacagcaucgugguguucugcggcaccagcggcaccuacggcaccggcagcuggcccgacggcgccgaccugaaccugaugcccaucuga

SEQ ID NO: 181249 - RNA, 1410 nt, Artificial Sequence; identical to SEQ ID NO: 179578
  derived and/or modified CDS sequence (opt4) from neuraminidase__InfluenzaA__AER08673

SEQ ID NO: 181250 - RNA, 1410 nt, Artificial Sequence; identical to SEQ ID NO: 179578
  derived and/or modified CDS sequence (opt4) from neuraminidase__InfluenzaA__AER08675

SEQ ID NO: 181251 - RNA, 1410 nt, Artificial Sequence; identical to SEQ ID NO: 179578
  derived and/or modified CDS sequence (opt4) from neuraminidase__InfluenzaA__AER08677

SEQ ID NO: 181252 - RNA, 1410 nt, Artificial Sequence; identical to SEQ ID NO: 179578
  derived and/or modified CDS sequence (opt4) from neuraminidase__InfluenzaA__AER08679

SEQ ID NO: 181253 - RNA, 1410 nt, Artificial Sequence
  derived and/or modified CDS sequence (opt4) from neuraminidase__InfluenzaA__AER08681
augaaccccaaccagaagaucaucaccaucggcagcgugagccugaccaucagcaccaucugcuucuucaugcagaucgccauccugaucaccaccgugacccugcacuucaagcaguacgaguucaacagcccccccaacaaccaggugaugcugugcgagcccaccaucaucgagagaaacaucaccgagaucguguaccugaccaacaccaccaucgagaaggagaucugccccaagcuggccgaguacagaaacuggagcaagccccagugcgacaucaccggcuucgcccccuucagcaaggacaacagcaucagacugagcgccggcggcgacaucugggugaccagagagcccuacgugagcugcgaccccgacaagugcuaccaguucgcccugggccagggcaccacccugaacaacgugcacagcaacaacaccgugagagacagaacccccuacagaacccugcugaugaacgagcugggcgugcccuuccaccugggcaccaagcaggugugcaucgccuggagcagcagcagcugccacgacggcaaggccuggcugcacgugugcaucaccggcgacgacaagaacgccaccgccagcuucaucuacaacggcagacugguggacagcguggugagcuggagcaaggagauccugagaacccaggagagcgagugcgugugcaucaacggcaccugcaccguggugaugaccgacggcagcgccagcggcaaggccgacaccaagauccuguucaucgaggagggcaagaucgugcacaccagcacccugagcggcagcgcccagcacguggaggagugcagcugcuaccccagauaccccggcgugagaugcgugugcagagacaacuggaagggcagcaacagacccaucguggacaucaacaucaaggaccacagcaucgugagcagcuacgugugcagcggccuggugggcgacacccccagaaagaacgacagcagcagcagcagccacugccuggaccccaacgacgaggagggcggccacggcgugaagggcugggccuucgacgacggcaacgacguguggaugggcagaaccaucaacgagaccagcagacugggcuacgagaccuucaaggugaucgagggcuggagcaaccccaagagcaagcugcagaucaacagacaggugaucguggacaagggcaacagaagcggcuacagcggcaucuucagcguggagggcaagagcugcaucaacagaugcuucuacguggagcugaucagaggcagaaaggaggagaccgaggugcuguggaccagcaacagcaucgugguguucugcggcaccagcggcaccuacggcaccggcagcuggcccgacggcgccgaccugaaccugaugcccaucuga

SEQ ID NO: 181254 - RNA, 1410 nt, Artificial Sequence; identical to SEQ ID NO: 179578
  derived and/or modified CDS sequence (opt4) from neuraminidase__InfluenzaA__AER08683

SEQ ID NO: 181255 - RNA, 1410 nt, Artificial Sequence; identical to SEQ ID NO: 181203
  derived and/or modified CDS sequence (opt4) from neuraminidase__InfluenzaA__AER08685

SEQ ID NO: 181256 - RNA, 1410 nt, Artificial Sequence; identical to SEQ ID NO: 181203
  derived and/or modified CDS sequence (opt4) from neuraminidase__InfluenzaA__AER08687

SEQ ID NO: 181257 - RNA, 1410 nt, Artificial Sequence
  derived and/or modified CDS sequence (opt4) from neuraminidase__InfluenzaA__AER08689
augaaccccaaccagaagaucaucaccaucggcagcgugagccugaccaucagcaccaucugcuucuucaugcagaucgccauccugaucaccaccgugacccugcacuucaagcaguacgaguucaacagcccccccaacaaccaggugacccugugcgagcccaccaucaucgagagaaacaucaccgagaucguguaccugaccaacaccaccaucgagaaggagaucugccccaagcuggccgaguacagaaacuggagcaagccccagugcgacaucaccggcuucgcccccuucagcaaggacaacagcaucagacugagcgccggcggcgacaucugggugaccagagagcccuacgugagcugcgaccccgacaagugcuaccaguucgcccugggccagggcaccacccugaacaacgugcacagcaacaacaccgugagagacagaacccccuacagaacccugcugaugaacgagcugggcgugcccuuccaccugggcaccaagcaggugugcaucgccuggagcagcagcagcugccacgacggcaaggccuggcugcacgugugcaucaccggcgacgacaagaacgccaccgccagcuucaucuacaacggcagacugguggacagcguggugagcuggagcaaggagauccugagaacccaggagagcgagugcgugugcaucaacggcaccugcaccguggugaugaccgacggcagcgccagcggcaaggccgacaccaagauccuguucaucgaggagggcaagaucgugcacaccagcacccugagcggcagcgcccagcacguggaggagugcagcugcuaccccagauaccccggcgugagaugcgugugcagagacaacuggaagggcagcaacagacccaucguggacaucaacaucaaggaccacagcaucgugagcagcuacgugugcagcggccuggugggcgacacccccagaaaggacgacagcagcagcagcagccacugccuggaccccaacaacgaggagggcggccacggcgugaagggcugggccuucgacgacggcaacgacguguggaugggcagaaccaucaacgagaccagcagacugggcuacgagaccuucaaggugaucgagggcuggagcaaccccaagagcaagcugcagaucaacagacaggugaucguggacagaggcaacagaagcggcuacagcggcaucuucagcguggagggcaagagcugcaucaacagaugcuucuacguggagcugaucagaggcagaaaggaggagaccgaggugcuguggaccagcaacagcaucgugguguucugcggcaccagcggcaccuacggcaccggcagcuggcccgacggcgccgaccugaaccugaugcccaucuga

SEQ ID NO: 181258 - RNA, 1410 nt, Artificial Sequence; identical to SEQ ID NO: 181203
  derived and/or modified CDS sequence (opt4) from neuraminidase__InfluenzaA__AER08691

SEQ ID NO: 181259 - RNA, 1410 nt, Artificial Sequence
  derived and/or modified CDS sequence (opt4) from neuraminidase__InfluenzaA__AER08693
augaaccccaaccagaagaucaucaccaucggcagcgugagccugaccaucagcaccaucugcuucuucaugcagaucgccauccugaucaccaccgugacccugcacuucaagcaguacgaguucaacagcccccccaagaaccaggugaugcugugcgagcccaccaucaucgagagaaacaucaccgagaucguguaccugaccaacaccaccaucgagaaggagaucugccccaagcuggccgaguacagaaacuggagcaagccccagugcgacaucaccggcuucgcccccuucagcaaggacaacagcaucagacugagcgccggcggcgacaucugggugaccagagagcccuacgugagcugcgaccccgacaagugcuaccaguucgcccugggccagggcaccacccugaacaacgugcacagcaacaacaccgugagagacagaacccccuacagaacccugcugaugaacgagcugggcgugcccuuccaccugggcaccaagcaggugugcaucgccuggagcagcagcagcugccacgacggcaaggccuggcugcacgugugcaucaccggcgacgacaagaacgccaccgccagcuucaucuacaacggcaagcugguggacagcguggugagcuggagcaaggagauccugagaacccaggagagcgagugcgugugcaucaacggcaccugcaccguggugaugaccgacggcagcgccagcggcaaggccgacaccaagauccuguucaucgaggagggcaagaucgugcacaccagcacccugagcggcagcgcccagcacguggaggagugcagcugcuaccccagauaccccggcgugagaugcgugugcagagacaacuggaagggcagcaacagacccaucguggacaucaacaucaaggaccacagcaucgugagcagcuacgugugcagcggccuggugggcgacacccccagaaagaacgacagcagcagcagcagccacugccuggaccccaacaacgaggagggcggccacggcgugaagggcugggccuucgacgacggcaacgacguguggaugggcagaaccaucaacgagaccagcagacugggcuacgagaccuucaaggugaucgagggcuggagcaaccccaagagcaagcugcagaucaacagacaggugaucguggacagaggcaacagaagcggcuacagcggcaucuucagcguggagggcaagagcugcaucaacagaugcuucuacguggagcugaucagaggcagaaaggaggagaccgaggugcuguggaccagcaacagcaucgugguguucugcggcaccagcggcaccuacggcaccggcagcuggcccgacggcgccgaccugaaccugaugcccaucuga

SEQ ID NO: 181260 - RNA, 1410 nt, Artificial Sequence
  derived and/or modified CDS sequence (opt4) from neuraminidase__InfluenzaA__AER08697
augaaccccaaccagaagaucaucaccaucggcagcgugagccugaccaucagcaccaucugcuucuucaugcagaucgccauccugaucaccaccgugacccugcacuucaagcaguacgaguucaacagcccccccaacaaccaggugaugcugugcgagcccaccaucaucgagagaaacaucaccgagaucguguaccugaccaacaccaccaucgagaaggagaccugccccacccuggccgaguacagaaacuggagcaagccccagugcgacaucaccggcuucgcccccuucagcaaggacaacagcaucagacugagcgccggcggcgacaucugggugaccagagagcccuacgugagcugcgaccccgacaagugcuaccaguucgcccugggccagggcaccacccugaacaacgugcacagcaacaacaccgugagagacagaacccccuacagaacccugcugaugaacgagcugggcgugcccuuccaccugggcaccaagcaggugugcaucgccuggagcagcagcagcugccacgacggcaaggccuggcugcacgugugcaucaccggcgacgacaagaacgccaccgccagcuucaucuacaacggcagacugguggacagcguggugagcuggagcaaggagauccugagaacccaggagagcgagugcgugugcaucaacggcaccugcaccguggugaugaccgacggcagcgccagcggcaaggccgacaccaagauccuguucaucgaggagggcaagaucgugcacaccagcacccugagcggcagcgcccagcacguggaggagugcagcugcuaccccagauaccccggcgugagaugcgugugcagagacaacuggaagggcagcaacagacccaucguggacaucaacaucaaggaccacagcaucgugagcagcuacgugugcagcggccuggugggcgacacccccagaaagaacgacagcagcagcagcagccacugccuggaccccaacaacgaggagggcggccacggcgugaagggcugggccuucgacgacggcaacgacguguggaugggcagaaccaucaacgugaccagcagacugggcuacgagaccuucaaggugaucgagggcuggagcaaccccaagagcaagcugcagaucaacagacaggugaucguggacagaggcaacagaagcggcuacagcggcaucuucagcguggagggcaagagcugcaucaacagaugcuucuacguggagcugaucagaggcagaaaggaggagaccgaggugcuguggaccagcaacagcaucgugguguucugcggcaccagcggcaccuacggcaccggcagcuggcccgacggcgccgaccugaaccugaugcccaucuga

SEQ ID NO: 181261 - RNA, 1410 nt, Artificial Sequence; identical to SEQ ID NO: 181057
  derived and/or modified CDS sequence (opt4) from neuraminidase__InfluenzaA__AER92714

SEQ ID NO: 181262 - RNA, 1410 nt, Artificial Sequence; identical to SEQ ID NO: 176798
  derived and/or modified CDS sequence (opt4) from neuraminidase__InfluenzaA__AER92721

SEQ ID NO: 181263 - RNA, 1410 nt, Artificial Sequence; identical to SEQ ID NO: 176798
  derived and/or modified CDS sequence (opt4) from neuraminidase__InfluenzaA__AER92724

SEQ ID NO: 181264 - RNA, 1413 nt, Artificial Sequence
  derived and/or modified CDS sequence (opt4) from neuraminidase__InfluenzaA__AET84165
augaaccccaaccagaagaucaucaccaucggcagcaucagcaucgccaucggcaucaucagccugaugcugcagaucggcaacaucaucagcaucugggccagccacagcauccagaccggcagccagaacaacaccggcaucugcaaccagagaaucaucaccuacgagaacagcaccugggugaaccacaccuacgugaacaucaacaacaccaacgugguggccggcgaggacaagaccagcgugacccuggccggcaacagcagccugugcagcaucagcggcugggccaucuacaccaaggacaacagcaucagaaucggcagcaagggcgacguguucgugaucagagagcccuucaucagcugcagccaccuggagugcagaaccuucuuccugacccagggcgcccugcugaacgacaagcacagcaacggcaccgugaaggacagaagccccuacagagcccugaugagcugcccccugggcgaggcccccagccccuacaacagcaaguucgagagcguggccuggagcgccagcgccugccacgacggcaugggcuggcugaccaucggcaucagcggccccgacaacggcgccguggccgugcugaaguacaacggcaucaucaccggcaccaucaagagcuggaagaagcagauccugagaacccaggagagcgagugcgugugcaugaacggcagcugcuucaccaucaugaccgacggccccagcaacaaggccgccagcuacaagaucuucaagaucgagaagggcaaggugaccaagagcaucgagcugagcgcccccaacuucuacuacgaggagugcagcugcuaccccgacaccggcaucgugaugugcgugugcagagacaacuggcacggcagcaacagacccugggugagcuucaaccagaaccuggacuaccagaucggcuacaucugcagcggcguguucggcgacaaccccagacccgaggacggcgagggcagcugcaaccccgugaccaucgacggcgccaacggcgugaagggcuucagcuacaaguacggcaacggcguguggaucggcagaaccaagagcaacagacugagaaagggcuucgagaugaucugggaccccaacggcuggaccaacaccgacagcgacuucagcgugaagcaggacgugguggccaucaccgacuggagcggcuacagcggcagcuucgugcagcaccccgagcugaccggccuggacugcaucagacccugcuucuggguggagcuggugagaggccugcccagagagaacaccaccaucuggaccagcggcagcagcaucagcuucugcggcgugaacagcgacaccgccaacuggagcuggcccgacggcgccgagcugcccuucaccaucgacaaguga

SEQ ID NO: 181265 - RNA, 1413 nt, Artificial Sequence; identical to SEQ ID NO: 178990
  derived and/or modified CDS sequence (opt4) from neuraminidase__InfluenzaA__AET84176

SEQ ID NO: 181266 - RNA, 1413 nt, Artificial Sequence
  derived and/or modified CDS sequence (opt4) from neuraminidase__InfluenzaA__AET84187
augaaccccaaccagaagaucaucaccaucggcagcaucagcaucgccaucggcaucaucagccugaugcugcagaucggcaacaucaucagcaucugggccagccacagcauccagaccggcagccagaacaacaccggcaucugcaaccagagaaucaucaccuacgagaacagcaccugggugaaccacaccuacgugaacaucaacaacaccaacgugguggccggcgaggacaagaccagcgugacccuggccggcaacagcagccugugcagcaucagcggcugggccaucuacaccaaggacaacagcaucagaaucggcagcaagggcgacguguucgugaucagagagcccuucaucagcugcagccaccuggagugcagaaccuucuuccugacccagggcgcccugcugaacgacaagcacagcaacggcaccgugaaggacagaagccccuacagagcccugaugagcugcccccugggcgaggcccccagccccuacaacagcaaguucgagagcguggccuggagcgccagcgccugccacgacggcauggacuggcugaccaucggcaucagcggccccgacaacggcgccguggccgugcugaaguacaacggcaucaucaccggcaccaucaagagcuggaagaagcagauccugagaacccaggagagcgagugcgugugcaugaacggcagcugcuucaccaucaugaccgacggccccagcaacaaggccgccagcuacaagaucuucaagaucgagaagggcaaggugaccaagagcaucgagcugaacgcccccaacuucuacuacgaggagugcagcugcuaccccgacaccggcaucgugaugugcgugugcagagacaacuggcacggcagcaacagacccugggugagcuucaaccagaaccuggacuaccagaucggcuacaucugcagcggcguguucggcgacaaccccagacccaaggacggcgagggcagcugcaaccccgugaccaucgacggcgccaacggcgugaagggcuucagcuacaaguacggcaacggcguguggaucggcagaaccaagagcaacagacugagaaagggcuucgagaugaucugggaccccaacggcuggaccaacaccgacagcgacuucagcgugaagcaggacgugguggccaucaccgacuggagcggcuacagcggcagcuucgugcagcaccccgagcugaccggccuggacugcaucagacccugcuucuggguggagcuggugagaggccugcccagagagaacaccaccaucuggaccagcggcagcagcaucagcuucugcggcgugaacagcgacaccgccaacuggagcuggcccgacggcgccgagcugcccuucaccaucgacaaguga

SEQ ID NO: 181267 - RNA, 1413 nt, Artificial Sequence
  derived and/or modified CDS sequence (opt4) from neuraminidase__InfluenzaA__AET84198
augaaccccaaccagaagaucaucaccaucggcagcaucagcaucgccaucggcaucaucagccugaugcugcagaucggcaacaucaucagcaucugggccagccacagcauccagaccggcagccagaacaacaccggcaucugcaaccagagaaucaucaccuacgagaacagcaccugggugaaccacaccuacgugaacaucaacaacaccaacgugguggccggcgaggacaagaccagcaugacccuggccggcaacagcagccugugcagcaucagcggcugggccaucuacaccaaggacaacagcaucagaaucggcagcaagggcgacguguucgugaucagagagcccuucaucagcugcagccaccuggagugcagaaccuucuuccugacccagggcgcccugcugaacgacaagcacagcaacggcaccgugaaggacagaagccccuacagagcccugaugagcugcccccugggcgaggcccccagccccuacaacagcaaguucgagagcguggccuggagcgccagcgccugccacgacggcaugggcuggcugaccaucggcaucagcggccccgacaacggcgccguggccgugcugaaguacaacggcaucaucaccggcaccaucaagagcuggaagaagcagauccugagaacccaggagagcgagugcgugugcaugaacggcagcugcuucaccaucaugaccgacggccccagcaacaaggccgccagcuacaagaucuucaagaucgagaagggcaaggugaccaagagcaucgagcugaacgcccccaacuucuacuacgaggagugcagcugcuaccccgacaccggcaucgugaugugcgugugcagagacaacuggcacggcagcaacagacccugggugagcuucaaccagaaccuggacuaccagaucggcuacaucugcagcggcguguucggcgacaaccccagacccaaggacggcgagggcagcugcaaccccgugaccguggacggcgccaacggcgugaagggcuucagcuacaaguacggcaacggcguguggaucggcagaaccaagagcaacagacugagaaagggcuucgagaugaucugggaccccaacggcuggaccaacaccgacagcgacuucagcgugaagcaggacgugguggccaucaccgacuggagcggcuacagcggcagcuucgugcagcaccccgagcugaccggccuggacugcaucagacccugcuucuggguggagcuggugagaggccugcccagagagaacaccaccaucuggaccagcggcagcagcaucagcuucugcggcgugaacagcgacaccgccaacuggagcuggcccgacggcgccgagcugcccuucaccaucgacaaguga

SEQ ID NO: 181268 - RNA, 1413 nt, Artificial Sequence
  derived and/or modified CDS sequence (opt4) from neuraminidase__InfluenzaA__AET84209
augaaccccaaccagaagaucaucaccaucggcagcaucagcaucgccaucggcaucaucagccugaugcugcagaucggcaacaucaucagcaucugggccagccacagcauccagaccggcagccagaacaacaccggcaucugcaaccagagaaucaucaccuacgagaacagcaccugggugaaccacaccuacgugaacaucaacaacaccaaggugguggccggcgaggacaagaccagcgugacccuggccggcaacagcagccugugcagcaucagcggcugggccaucaacaccaaggacaacagcaucagaaucggcagcaagggcgacguguucgugaucagagagcccuucaucagcugcagccaccuggagugcagaaccuucuuccugacccagggcgcccugcugaacgacaagcacagcaacggcaccgugaaggacagaagccccuacagagcccugaugagcugcccccugggcgaggcccccagccccuacaacagcaaguucgagagcguggccuggagcgccagcgccugccacgacggcaugggcuggcugaccaucggcaucagcggccccgacaacggcgccguggccgugcugaaguacaacggcaucaucaccggcaccaucaagagcuggaagaagcagauccugagaacccaggagagcgagugcgugugcaugaacggcagcugcuucaccaucaugaccgacggccccagcaacaaggccgccagcuacaagaucuucaagaucgagaagggcaaggugaccaagagcaucgagcugaacgcccccaacuucuacuacgaggagugcagcugcuaccccgacaccggcaucgugaugugcgugugcagagacaacuggcacggcagcaacagacccugggugagcuucaaccagaaccuggacuaccagaucggcuacaucugcagcggcguguucggcgacaaccccagacccaaggacggcgagggcagcugcaaccccgugaccguggacggcgccaacggcgugaagggcuucagcuacaaguacggcaacggcguguggaucggcagaaccaagagcaacagacugagaaagggcuucgagaugaucugggaccccaacggcuggaccaacaccgacagcgacuucagcgugaagcaggacgugguggccaucaccgacuggagcggcuacagcggcagcuucgugcagcaccccgagcugaccggccuggacugcaucagacccugcuucuggguggagcuggugagaggccugcccagagagaacaccaccaucuggaccagcggcagcagcaucagcuucugcggcgugaacagcgacaccgccaacuggagcuggcccgacggcgccgagcugcccuucaccaucgacaaguga

SEQ ID NO: 181269 - RNA, 1413 nt, Artificial Sequence
  derived and/or modified CDS sequence (opt4) from neuraminidase__InfluenzaA__AET84231
augaaccccaaccagaagaucaucaccaucggcagcaucagcaucgccaucggcaucaucagccugaugcugcagaucggcagcaucaucagcaucugggccagccacagcauccacaccggcagccagaacaacaccggcaucugcaaccagagaaucaucaccuacgagaacagcaccugggugaaccacaccuacgugaacaucaacaacaccaacgugguggccggcgaggacaagaccagcgugacccuggccggcaacagcagccugugcagcaucagcggcugggccaucuacaccaaggacaacagcaucagaaucggcagcaagggcgacguguucgugaucagagagcccuucaucagcugcagccaccuggagugcagaaccuucuuccugacccagggcgcccugcugaacgacaagcacagcaacggcaccgugaaggacagaagccccuacagagcccugaugagcugcccccugggcgaggcccccagccccuacaacagcaaguucgagagcguggccuggagcgccagcgccugccacgacggcaugggcuggcugaccaucggcaucagcggccccgacaacggcgccguggccgugcugaaguacaacggcaucaucaccggcaccaucaagagcuggaagaagcagauccugagaacccaggagagcgagugcgugugcaugaacggcagcugcuucaccaucaugaccgacggccccagcaacaaggccagcagcuacaagaucuucaagaucgagaagggcaaggugaccaagagcaucgagcugaacgcccccaacuucuacuacgaggagugcagcugcuaccccgacaccggcaucgugaugugcgugugcagagacaacuggcacggcagcaacagacccugggugagcuucaaccagaaccuggacuaccagaucggcuacaucugcagcggcguguucggcgacaaccccagacccgaggacggcgagggcagcugcaaccccgugaccguggacggcgccaacggcgugaagggcuucagcuacaaguacggcaacggcguguggaucggcagaaccaagagcaacagacugagaaagggcuucgagaugaucugggaccccaacggcuggaccaacaccgacagcgacuucagcgugaagcaggacgugguggccaucaccgacuggagcggcuacagcggcagcuucgugcagcaccccgagcugaccggccuggacugcaucagacccugcuucuggguggagcuggugagaggccugcccagagagaacaccaccaucuggaccagcggcagcagcaucagcuucugcggcgugaacagcgacaccgccaacuggagcuggcccgacggcgccgagcugcccuucaccaucgacaaguga

SEQ ID NO: 181270 - RNA, 1413 nt, Artificial Sequence; identical to SEQ ID NO: 177521
  derived and/or modified CDS sequence (opt4) from neuraminidase__InfluenzaA__AET84242

SEQ ID NO: 181271 - RNA, 1413 nt, Artificial Sequence
  derived and/or modified CDS sequence (opt4) from neuraminidase__InfluenzaA__AET84253
augaaccccaaccagaagaucaucaccaucggcagcaucagcaucgccaucggcaucaucagccugaugcugcagaucggcagcaucaucagcaucugggccagccacagcauccagaccggcagccagaacaacaccggcaucugcaaccagagaaucaucaccuacgagaacagcaccugggugaaccacaccuacgugaacaucaacaacaccaacgugguggccggcgaggacaagaccagcgugacccuggccggcaacagcagccugugcagcaucagcggcugggccaucuacaccaaggacaacagcaucagaaucggcagcaagggcgacguguucgugaucagagagcccuucaucagcugcagccaccuggagugcagaaccuucuuccugacccagggcgcccugcugaacgacaagcacagcaacggcaccgugaaggacagaagccccuacagagcccugaugagcugcccccugggcgaggcccccagccccuacaacagcaaguucgagagcguggccuggagcgccagcgccugccacgacggcaugggcuggcugaccaucggcaucagcggccccgacaacggcgccguggccgugcugaaguacaacggcaucaucaccgagaccaucaagagcuggaagaagcagauccugagaacccaggagagcgagugcgugugcaugaacggcagcugcuucaccaucaugaccgacggccccagcaacaaggccgccagcuacaagaucuucaagaucgagaagggcaaggugaccaagagcaucgagcugaacgcccccaacuucuacuacgaggagugcagcugcuaccccgacaccggcaucgugaugugcgugugcagagacaacuggcacggcagcaacagacccugggugagcuucaaccagaaccuggacuaccagaucggcuacaucugcagcggcguguucggcgacaaccccagacccgaggacggcgagggcagcugcaaccccgugaccguggacggcgccaacggcgugaagggcuucagcuacaaguacggcaacggcguguggaucggcagaaccaagagcaacagacugagaaagggcuucgagaugaucugggaccccaacggcuggaccaacaccgacagcgacuucagcgugaagcaggacgugguggccaucaccgacuggagcggcuacagcggcagcuucgugcagcaccccgagcugaccggccuggacugcaucagacccugcuucuggguggagcuggugagaggccugcccagagagaacaccaccaucuggaccagcggcagcagcaucagcuucugcggcgugaacagcgacaccgccaacuggagcuggcccgacggcgccgagcugcccuucaccaucgacaaguga

SEQ ID NO: 181272 - RNA, 1413 nt, Artificial Sequence
  derived and/or modified CDS sequence (opt4) from neuraminidase__InfluenzaA__AET84264
augaaccccaaccagaagaucaucaccaucggcagcaucagcaucgccaucggcaucaucagccugauguuccagaucggcagcaucaucagcaucugggccagccacagcauccagaccggcagccagaacaacaccggcaucugcaaccagagaaucaucaccuacgagaacagcaccugggugaaccacaccuacgugaacaucaacaacaccaacgugguggccggcgaggacaagaccagcgugacccuggccggcaacagcagccugugcagcaucagcggcugggccaucuacaccaaggacaacagcaucagaaucggcagcaagggcgacguguucgugaucagagagcccuucaucagcugcagccaccuggagugcagaaccuucuuccugacccagggcgcccugcugaacgacaagcacagcaacggcaccgugaaggacagaagccccuacagagcccugaugagcugcccccugggcgaggcccccagccccuacaacagcaaguucgagagcguggccuggagcgccagcgccugccacgacggcaugggcuggcugaccaucggcaucagcggccccgacaacggcgccguggccgugcugaaguacaacggcaucaucaccgagaccaucaagagcuggaagaagcagauccugagaacccaggagagcgagugcgugugcaugaacggcagcugcuucaccaucaugaccgacggccccagcaacaaggccgccagcuacaagaucuucaagaucgagaagggcaaggugaccaagagcaucgagcugaacgcccccaacuucuacuacgaggagugcagcugcuaccccgacaccggcaucgugaugugcgugugcagagacaacuggcacggcagcaacagacccugggugagcuucaaccagaaccuggacuaccagaucggcuacaucugcagcggcguguucggcgacaaccccagacccgaggacggcgagggcagcugcaaccccgugaccguggacggcgccaacggcgugaagggcuucagcuacaaguacggcaacggcguguggaucggcagaaccaagagcaacagacugagaaagggcuucgagaugaucugggaccccaacggcuggaccaacaccgacagcgacuucagcgugaagcaggacgugguggccaucaccgacuggagcggcuacagcggcagcuucgugcagcaccccgagcugaccggccuggacugcaucagacccugcuucuggguggagcuggugagaggccugcccagagagaacaccaccaucuggaccagcggcagcagcaucagcuucugcggcgugaacagcgacaccgccaacuggagcuggcccgacggcgccgagcugcccuucaccaucgacaaguga

SEQ ID NO: 181273 - RNA, 1413 nt, Artificial Sequence
  derived and/or modified CDS sequence (opt4) from neuraminidase__InfluenzaA__AET84275
augaaccccaaccagaagaucaucaccaucggcagcaucagcaucgccaucggcaucaucagccugaugcugcagaucggcaacaucaucagcaucugggccagccacagcauccagaccggcagccagaacaacaccggcaucugcaaccagagaaucaucaccuacgagaacagcaccugggugaaccacaccuacgugaacaucaacaacaccaacgugguggccggcgaggacaagaccagcgugacccuggccggcaacagcagccugugcagcaucagcggcugggccaucuacaccaaggacaacagcaucagaaucggcagcaagggcgacguguucgugaucagagagcccuucaucagcugcagccaccuggagugcagaaccuucuuccugacccagggcgcccugcugaacgacaagcacagcaacggcaccgugaaggacagaagccccuacagagcccugaugagcugcccccugggcgaggcccccagccccuacaacagcaaguucgagagcguggccuggagcgccagcgccugccacgacggcaugggcuggcugaccaucggcaucagcggccccgacaacggcgccguggccgugcugaaguacaacggcaucaucaccggcaccaucaagagcuggaagaagcagauccugagaacccaggagagcgagugcgugugcaugaacggcagcugcuucaccaucaugaccgacggccccagcaacaaggccgccagcuacaagaucuucaagaucgagaagggcaaggugaccaagagcaucgagcugaacgcccccaacuucuacuacgaggagugcagcugcuaccccgacaccggcaucgugaugugcgugugcagagacaacuggcacggcagcaacagacccugggugagcuucaaccagaaccuggacuaccagaucggcuacaucugcagcggcguguucggcgacaaccccagacccaaggacggcgagggcagcugcaaccccgugaccguggacggcgccaacggcgugaagggcuucagcuacaaguacggcaacggcguguggaucggcagaaccaagagcaacagacugagaaagggcuucgagaugaucugggaccccaacggcuggaccaacaccgacagcgacuucagcgugaagcaggacgugguggccaucaccgacuggagcggcuacagcggcagcuucgugcagcaccccgagcugaccggccuggacugcaucagacccugcuucuggguggagcuggugagaggccugcccagagagaacaccaccaucuggaccagcggcagcagcaucagcuucugcggcgugaacagcgacaccgccaacuggagcuggcccgacggcgccgagcugcccuucaccaucgacaaguga

SEQ ID NO: 181274 - RNA, 1413 nt, Artificial Sequence; identical to SEQ ID NO: 177521
  derived and/or modified CDS sequence (opt4) from neuraminidase__InfluenzaA__AET84286

SEQ ID NO: 181275 - RNA, 1413 nt, Artificial Sequence
  derived and/or modified CDS sequence (opt4) from neuraminidase__InfluenzaA__AET84297
augaaccccaaccagaagaucaucaccaucggcagcaucagcaucgccaucggcaucaucagccugaugcugcagaucggcaacaucaucagcaucugggccagccacagcauccagaccggcagccagaacaacaccggcaucugcaaccagagaaucaucaccuacgagaacagcaccugggugaaccacaccuacgugaacaucaacaacaccaacgugguggccggcgaggacaagaccagcgugacccuggccggcaacagcagccugugcagcaucagcggcugggccaucuacaccaaggacaacagcaucagaaucggcagcaagggcgacguguucgugaucagagagcccuucaucagcugcagccaccuggagugcagaaccuucuuccugacccagggcgcccugcugaacgacaagcacagcaacggcaccgugaaggacagaagccccuacagagcccugaugagcugcccccugggcgaggcccccagccccuacaacagcaaguucgagagcguggccuggagcgccagcgccugccacgacggcaugggcuggcugaccaucggcaucagcggccccgacaacggcgccguggccgugcugaaguacaacggcaucaucaccggcaccaucaagagcuggaagaagcagauccugagaacccaggagagcgagugcgugugcaugaacggcagcugcuucaccaucaugaccgacggccccagcaacaaggccgccagcuacaagaucuucaagaucgagaagggcaaggugaccaagagcaucgagcugaacgcccccaacuucuacuacgaggagugcagcugcuaccccgacaccggcaucgugaugugcgugugcagagacaacuggcacggcagcaacagacccugggugagcuucaaccagaaccuggacuaccagaucggcuacaucugcagcggcguguucggcgacaaccccagacccgaggacggcgagggcagcugcaaccccgugaccguggacggcgccaacggcgugaagggcuucagcuacaaguacgacaacggcguguggaucggcagaaccaagagcaacagacugagaaagggcuucgagaugaucugggaccccaacggcuggaccaacaccgacagcgacuucagcgugaagcaggacgugguggccaucaccgacuggagcggcuacagcggcagcuucgugcagcaccccgagcugaccggccuggacugcaucagacccugcuucuggguggagcuggugagaggccugcccagagagaacaccaccaucuggaccagcggcagcagcaucagcuucugcggcgugaacagcgacaccaccaacuggagcuggcccgacggcgccgagcugcccuucaccaucgacaaguga

SEQ ID NO: 181276 - RNA, 1413 nt, Artificial Sequence
  derived and/or modified CDS sequence (opt4) from neuraminidase__InfluenzaA__AET84308
augaaccccaaccagaagaucaucaccaucggcagcaucagcaucgccaucggcaucaucagccugaugcugcagaucggcaacaucaucagcaucugggccagccacagcauccagaccggcagccagaacaacaccggcaucugcaaccagagaaucaucaccuacgagaacagcaccugggugaaccacaccuacgugaacaucaacaacaccaacgugguggccggcgaggacaagaccagcgugacccuggccggcaacagcagccugugcagcaucagcggcugggccaucuacaccaaggacaacagcaucagaaucggcagcaagggcgacguguucgugaucagagagcccuucaucagcugcagccaccuggagugcagaaccuucuuccugacccagggcgcccugcugaacgacaagcacagcaacggcaccgugaaggacagaagccccuacagagcccugaugagcugcccccugggcgaggcccccagccccuacaacagcaaguucgagagcguggccuggagcgccagcgccugccacgacggcaugggcuggcugaccaucggcaucagcggccccgacaacggcgccguggccgugcugaaguacaacggcaucaucaccgagaccaucaagagcuggaagaagcagauccugagaacccaggagagcgagugcgugugcaugaacggcagcugcuucaccaucaugaccgacggccccagcaacaaggccgccagcuacaagaucuucaagaucgagaagggcaaggugaccaagagcaucgagcugaacgcccccaacuuccacuacgaggagugcagcugcuaccccgacaccggcaucgugaugugcgugugcagagacaacuggcacggcagcaacagacccugggugagcuucaaccagaaccuggacuaccagaucggcuacaucugcagcggcguguucggcgacaaccccagacccgaggacggcgagggcagcugcaaccccgugaccguggacggcgccaacggcgugaagggcuucagcuacaaguacgacaacggcguguggaucggcagaaccaagagcaacagacugagaaagggcuucgagaugaucugggaccccaacggcuggaccaacaccgacagcgacuucagcgugaagcaggacgugguggccaucaccgacuggagcggcuacagcggcagcuucgugcagcaccccgagcugaccggccuggacugcaucagacccugcuucuggguggagcuggugagaggccugcccagagagaacaccaccaucuggaccagcggcagcagcaucagcuucugcggcgugaacagcgacaccaccaacuggagcuggcccgacggcgccgagcugcccuucaccaucgacaaguga

SEQ ID NO: 181277 - RNA, 1413 nt, Artificial Sequence
  derived and/or modified CDS sequence (opt4) from neuraminidase__InfluenzaA__AET84319
augaaccccaaccagaagaucaucaccaucggcagcaucagcaucgccaucggcaucaucagccugaugcugcagaucggcaacaucaucagcaucugggccagccacagcauccagaccggcagccagaacaacaccggcaucugcaaccagagaaucaucaccuacgagaacagcaccugggugaaccacaccuacgugaacaucaacaacaccaacgugguggccggcgaggacaagaccagcaugacccuggccggcaacagcagccugugcagcaucagcggcugggccaucuacaccaaggacaacagcaucagaaucggcagcaagggcgacguguucgugaucagagagcccuucaucagcugcagccaccuggagugcagaaccuucuuccugacccagggcgcccugcugaacgacaagcacagcaacagaaccgugaaggacagaagccccuacagagcccugaugagcugcccccugggcgaggcccccagccccuacaacagcaaguucgagagcguggccuggagcgccagcgccugccacgacggcaugggcuggcugaccaucggcaucagcggccccgacaacggcgccguggccgugcugaaguacaacggcaucaucaccgagaccaucaagagcuggaagaagcagauccugagaacccaggagagcgagugcgugugcaugaacggcagcugcuucaccaucaugaccgacggccccagcaacaaggccgccagcuacaagaucuucaagaucgagaagggcaaggugaccaagagcaucgagcugaacgcccccaacuucuacuacgaggagugcagcugcuaccccgacaccggcaucgugaugugcgugugcagagacaacuggcacggcagcaacagacccugggugagcuucaaccagaaccuggacuaccagaucggcuacaucugcagcggcguguucggcgacaaccccagacccgaggacggcgagggcagcugcaaccccgugaccguggacggcgccaacggcgugaagggcuucagcuacaaguacggcaacggcguguggaucggcagaaccaagagcaacagacugagaaagggcuucgagaugaucugggaccccaacggcuggaccaacaccgacagcgacuucagcgugaagcaggacgugguggccaucaccgacuggagcggcuacagcggcagcuucgugcagcaccccgagcugaccggccuggacugcaucagacccugcuucuggguggagcuggugagaggccugcccagagagaacaccaccaucuggaccagcggcagcagcaucagcuucugcggcgugaacagcgacaccgccaacuggagcuggcccgacggcgccgagcugcccuucaccaucgacaaguga

SEQ ID NO: 181278 - RNA, 1413 nt, Artificial Sequence
  derived and/or modified CDS sequence (opt4) from neuraminidase__InfluenzaA__AET84330
augaaccccaaccagagaaucaucaccaucggcagcaucagcaucgccaucggcaucaucagccugaugcugcagaucggcaacaucaucagcaucugggccagccacagcauccagaucggcagccagaacaacaccggcaucugcaaccagagaaucaucaccuacgagaacagcaccugggugaaccacaccuacgugaacaucaacaacaccaacgugguggccggcgaggacaagaccagcgugacccuggccggcaacagcagccugugcagcaucagcggcugggccaucuacaccaaggacaacagcaucagaaucggcagcaagggcgacguguucgugaucagagagcccuucaucagcugcagccaccuggagugcagaaccuucuuccugacccagggcgcccugcugaacgacaagcacagcaacggcaccgccaaggacagaagccccuacagagcccugaugagcugcccccugggcgaggcccccagccccuacaacagcaaguucgagagcguggccuggagcgccagcgccugccacgacggcaugggcuggcugaccaucggcaucagcggccccgacaacggcgccguggccgugcugaaguacaacggcaucaucaccggcaccaucaagagcuggaagaagcagauccugagaacccaggagagcgagugcgugugcaugaacggcagcugcuucaccaucaugaccgacggccccagcaacaaggccgccagcuacaagaucuucaagaucgagaagggcaaggugaccaagagcaucgagcugaacgcccccaacuucuacuacgaggagugcagcugcuaccccgacaccggcaucgugaugugcgugugcagagacaacuggcacggcagcaacagacccugggugagcuucaaccagaaccuggacuaccagaucggcuacaucugcagcggcguguucggcgacaaccccagacccaaggacggcgagggcagcugcaaccccgugaccguggacggcgccaacggcgugaagggcuucagcuacaaguacggcaacggcguguggaucggcagaaccaagagcaacagacugagaaagggcuucgagaugaucugggaccccaacggcuggaccaacaccgacagcgacuucagcgugaagcaggacgugguggccaucaccgacuggagcggcuacagcggcagcuucgugcagcaccccgagcugaccggccuggacugcaucagacccugcuucuggguggagcuggugagaggccugcccagagagaacaccaccaucuggaccagcggcagcagcaucagcuucugcggcgugaacagcgacaccgccaacuggagcuggcccgacggcgccgagcugcccuucaccaucgacaaguga

SEQ ID NO: 181279 - RNA, 1413 nt, Artificial Sequence
  derived and/or modified CDS sequence (opt4) from neuraminidase__InfluenzaA__AET84341
augaaccccaaccagagaaucaucaccaucggcagcaucagcaucgccaucggcaucaucagccugaugcugcagaucggcaacaucaucagcaucugggccagccacagcauccagaucggcagccagaacaacaccggcaucugcaaccagagaaucaucaccuacgagaacagcaccugggugaaccacaccuacgugaacaucaacaacaccaacgugguggccggcgaggacaagaccagcgugacccuggccggcaacagcagccugugcagcaucagcggcugggccaucuacaccaaggacaacagcaucagaaucggcagcaagggcgacguguucgugaucagagagcccuucaucagcugcagccaccuggagugcagaaccuucuuccugacccagggcgcccugcugaacgacaagcacagcaacggcaccgccaaggacagaagccccuacagagcccugaugagcugcccccugggcgaggcccccagccccuacaacagcaaguucgagagcguggccuggagcgccagcgccugccacgacggcaugggcuggcugaccaucggcaucagcggccccgacaacggcgccguggccgugcugaaguacaacggcaucaucaccggcaccaucaagagcuggaagaagcagauccugagaacccaggagagcgagugcgugugcaugaacggcagcugcuucaccaucaugaccgacggccccagcaacaaggccgccagcuacaagaucuucaagaucgagaagggcaaggugaccaagagcaucgagcugaacgcccccaacuucuacuacgaggagugcagcugcuaccccgacaccggcaucgugaugugcgugugcagagacaacuggcacggcagcaacagacccugggugagcuucaaccagaaccuggacuaccagaucggcuacaucugcagcggcguguucggcgacaaccccagacccaaggacggcgagggcagcugcaaccccgugaccguggacggcgccaacggcgugaagggcuucagcuacaaguacggcaacggcguguggaucggcagaaccaagagcaacagacugagaaagggcuucgagaugaucugggaccccaacggcuggaccaacaccgacagcgacuucagcgugaagcaggacgugguggccaucaccgacuggagcggcuacagcggcagcuucgugcagcaccccgagcugaccggccuggacugcaucagacccugcuucuggguggagcuggugagaggccugcccaaggagaacaccaccaucuggaccagcggcagcagcaucagcuucugcggcgugaacagcgacaccgccaacuggagcuggcccgacggcgccgagcugcccuucaccaucgacaaguga

SEQ ID NO: 181280 - RNA, 1413 nt, Artificial Sequence
  derived and/or modified CDS sequence (opt4) from neuraminidase__InfluenzaA__AET84363
augaaccccaaccagagaaucaucaccaucggcagcaucagcaucgccaucggcaucaucagccugaugcugcagaucggcaacaucaucagcaucugggccagccacagcauccagaccggcagccagaacaacaccggcaucugcaaccagagaaucaucaccuacgagaacagcaccugggugaaccacaccuacgugaacaucaacaacaccaacgugguggccggcgaggacaagaccagcaugacccuggccggcaacagcagccugugcagcaucagcggcugggccaucuacaccaaggacaacagcaucagaaucggcagcaagggcgacguguucgugaucagagagcccuucaucagcugcagccaccuggagugcagaaccuucuuccugacccagggcgcccugcugaacgacaagcacagcaacggcaccgccaaggacagaagccccuacagagcccugaugagcugcccccugggcgaggcccccagccccuacaacagcaaguucgagagcguggccuggagcgccagcgccugccacgacggcaugggcuggcugaccaucggcaucagcggccccgacaacggcgccguggccgugcugaaguacaacggcaucaucaccggcaccaucaagagcuggaagaagcagauccugagaacccaggagagcgagugcgugugcaugaacggcagcugcuucaccaucaugaccgacggccccagcaacaaggccgccagcuacaagaucuucaagaucgagaagggcaaggugaccaagagcaucgagcugaacgcccccaacuucuacuacgaggagugcagcugcuaccccgacaccggcaucgugaugugcgugugcagagacaacuggcacggcagcaacagacccugggugagcuucaaccagaaccuggacuaccagaucggcuacaucugcagcggcguguucggcgacaaccccagacccaaggacggcgagggcagcugcaaccccgugaccguggacggcgccaacggcgugaagggcuucagcuacaaguacggcaacggcguguggaucggcagaaccaagagcaacagacugagaaagggcuucgagaugaucugggaccccaacggcuggaccaacaccgacagcgacuucagcgugaagcaggacgugguggccaucaccgacuggagcggcuacagcggcagcuucgugcagcaccccgagcugaccggccuggacugcaucagacccugcuucuggguggagcuggugagaggccugcccagagagaacaccaccaucuggaccagcggcagcagcaucagcuucugcggcgugaacagcgacaccgccaacuggagcuggcccgacggcgccgagcugcccuucaccaucgacaaguga

SEQ ID NO: 181281 - RNA, 1413 nt, Artificial Sequence
  derived and/or modified CDS sequence (opt4) from neuraminidase__InfluenzaA__AET84374
augaaccccaaccagagaaucaucaccaucggcagcaucagcaucgccaucggcaucaucagccugaugcugcagaucggcaacaucaucagcaucugggccagccacagcauccagaucggcagccagaacaacaccggcaucugcaaccagagaaucaucaccuacgagaacagcaccugggugaaccacaccuacgugaacaucaacaacaccaacgugguggccggcgaggacaagaccagcgugacccuggccggcaacagcagccugugcagcaucagcggcugggccaucuacaccaaggacaacagcaucagaaucggcagcaagggcgacguguucgugaucagagagcccuucaucagcugcagccaccuggagugcagaaccuucuuccugacccagggcgcccugcugaacgacaagcacagcaacggcaccgccaaggacagaagccccuacagagcccugaugagcugcccccugggcgaggcccccagccccuacaacagcaaguucgagagcguggccuggagcgccagcgccugccacgacggcaugggcuggcugaccaucggcaucagcggccccgacaacggcgccguggccgugcugaaguacaacggcaucaucaccgagaccaucaagagcuggaagaagcagauccugagaacccaggagagcgagugcgugugcaugaacggcagcugcuucaccaucaugaccgacggccccagcaacaaggccgccagcuacaagaucuucaagaucgagaagggcaaggugaccaagagcaucgagcugaacgcccccaacuucuacuacgaggagugcagcugcuaccccgacaccggcaucgugaugugcgugugcagagacaacuggcacggcagcaacagacccugggugagcuucaaccagaaccuggacuaccagaucggcuacaucugcagcggcguguucggcgacaaccccagacccaaggacggcgagggcagcugcaaccccgugaccguggacggcgccaacggcgugaagggcuucagcuacaaguacggcaacggcguguggaucggcagaaccaagagcaacagacugagaaagggcuucgagaugaucugggaccccaacggcuggaccaacaccgacagcgacuucagcgugaagcaggacgugguggccaucaccgacuggagcggcuacagcggcagcuucgugcagcaccccgagcugaccggccuggacugcaucagacccugcuucuggguggagcuggugagaggccugcccagagagaacaccaccaucuggaccagcggcagcagcaucagcuucugcggcgugaacagcgacaccgccaacuggagcuggcccgacggcgccgagcugcccuucaccaucgacaaguga

SEQ ID NO: 181282 - RNA, 1413 nt, Artificial Sequence
  derived and/or modified CDS sequence (opt4) from neuraminidase__InfluenzaA__AET84396
augaaccccaaccagagaaucaucaccaucggcagcaucagcaucgccaucggcaucaucagccugaugcugcagaucggcaacaucaucagcaucugggccagccacagcauccagaccggcagccagaacaacaccggcaucugcaaccagagaaucaucaccuacgagaacagcaccugggugaaccacaccuacgugaacaucaacaacaccaacgugguggccggcgaggacaagaccagcaugacccuggccggcaacagcagccugugcagcaucagcggcugggccaucuacaccaaggacaacagcaucagaaucggcagcaagggcgacguguucgugaucagagagcccuucaucagcugcagccaccuggagugcagaaccuucuuccugacccagggcgcccugcugaacgacaagcacagcaacggcaccgccaaggacagaagccccuacagagcccugaugagcugcccccugggcgaggcccccagccccuacaacagcaaguucgagagcguggccuggagcgccagcgccugccacgacggcaugggcuggcugaccaucggcaucagcggccccgacaacggcgccguggccgugcugaaguacaacggcaucaucaccgagaccaucaagagcuggaagaagcagauccugagaacccaggagagcgagugcgugugcaugaacggcagcugcuucaccaucaugaccgacggccccagcaacaaggccgccagcuacaagaucuucaagaucgagaagggcaaggugaccaagagcaucgagcugaacgcccccaacuucuacuacgaggagugcagcugcuaccccgacaccggcaucgugaugugcgugugcagagacaacuggcacggcagcaacagacccugggugagcuucaaccagaaccuggacuaccagaucggcuacaucugcagcggcguguucggcgacaaccccagacccaaggacggcgagggcagcugcaaccccgugaccguggacggcgccaacggcgugaagggcuucagcuacaaguacggcaacggcguguggaucggcagaaccaagagcaacagacugagaaagggcuucgagaugaucugggaccccaacggcuggaccaacaccgacagcgacuucagcgugaagcaggacgugguggccaucaccgacuggagcggcuacagcggcagcuucgugcagcaccccgagcugaccggccuggacugcaucagacccugcuucuggguggagcuggugagaggccugcccagagagaacaccaccaucuggaccagcggcagcagcaucagcuucugcggcgugaacagcgacaccgccaacuggagcuggcccgacggcgccgagcugcccuucaccaucgacaaguga

SEQ ID NO: 181283 - RNA, 1413 nt, Artificial Sequence
  derived and/or modified CDS sequence (opt4) from neuraminidase__InfluenzaA__AET84407
augaaccccaaccagagaaucaucaccaucggcagcaucagcaucgccaucggcaucaucagccugaugcugcagaucggcaacaucaucagcaucugggccagccacagcauccagaucggcagccagaacaacaccggcaucugcaaccagagaaucaucaccuacgagaacagcaccugggugaaccacaccuacgugaacaucaacaacaccaacgugguggccggcgaggacaagaccagcgugacccuggccggcaacagcagccugugcagcaucagcggcugggccaucuacaccaaggacaacagcaucagaaucggcagcaagggcgacguguucgugaucagagagcccuucaucagcugcagccaccuggagugcagaaccuucuuccugacccagggcgcccugcugaacgacaagcacagcaacggcaccgccaaggacagaagccccuacagagcccugaugagcugcccccugggcgaggcccccagccccuacaacagcaaguucgagagcguggccuggagcgccagcgccugccacgacggcaugggcuggcugaccaucggcaucagcggccccgacaacggcgccguggccgugcugaaguacaacggcaucaucaccggcaccaucaagagcuggaagaagcagauccugagaacccaggagagcgagugcgugugcaugaacggcagcugcuucaccaucaugaccgacggccccagcaacaaggccgccagcuacaagaucuucaagaucgagaagggcaaggugaccaagagcaucgagcugaacgcccccaacuucuacuacgaggagugcagcugcuaccccgacaccggcaucgugaugugcgugugcagagacaacuggcacggcagcaacagacccugggugagcuucaaccagaaccuggacuaccagaucggcuacaucugcagcggcguguucggcgacaaccccagacccgaggacggcgagggcagcugcaaccccgugaccguggacggcgccaacggcgugaagggcuucagcuacaaguacggcaacggcguguggaucggcagaaccaagagcaacagacugagaaagggcuucgagaugaucugggaccccaacggcuggaccaacaccgacagcgacuucagcgugaagcaggacgugguggccaucaccgacuggagcggcuacagcggcagcuucgugcagcaccccgagcugaccggccuggacugcaucagacccugcuucuggguggagcuggugagaggccugcccagagagaacaccaccaucuggaccagcggcagcagcaucagcuucugcggcgugaacagcgacaccgccaacuggagcuggcccgacggcgccgagcugcccuucaccaucgacaaguga

SEQ ID NO: 181284 - RNA, 1413 nt, Artificial Sequence
  derived and/or modified CDS sequence (opt4) from neuraminidase__InfluenzaA__AET84418
augaaccccaaccagagaaucaucgccaucggcagcaucagcaucgccaucggcaucaucagccugaugcugcagaucggcaacaucaucagcaucugggccagccacagcauccagaucggcagccagaacaacaccggcaucugcaaccagagaaucaucaccuacgagaacagcaccugggugaaccacaccuacgugaacaucaacaacaccaacgugguggccggcgaggacaagaccagcgugacccuggccggcaacagcagccugugcagcaucagcggcugggccaucuacaccaaggacaacagcaucagaaucggcagcaagggcgacguguucgugaucagagagcccuucaucagcugcagccaccuggagugcagaaccuucuuccugacccagggcgcccugcugaacgacaagcacagcaacggcaccgccaaggacagaagccccuacagagcccugaugagcugcccccugggcgaggcccccagccccuacaacagcaaguucgagagcguggccuggagcgccagcgccugccacgacggcaugggcuggcugaccaucggcaucagcggccccgacaacggcgccguggccgugcugaaguacaacggcaucaucaccgagaccaucaagagcuggaagaagcagauccugagaacccaggagagcgagugcgugugcaugaacggcagcugcuucaccaucaugaccgacggccccagcaacaaggccgccagcuacaagaucuucaagaucgagaagggcaaggugaccaagagcaucgagcugaacgcccccaacuucuacuacgaggagugcagcugcuaccccgacaccggcaucgugaugugcgugugcagagacaacuggcacggcagcaacagacccugggugagcuucaaccagaaccuggacuaccagaucggcuacaucugcagcggcguguucggcgacaaccccagacccgaggacggcgagggcagcugcaaccccgugaccguggacggcgccaacggcgugaagggcuucagcuacaaguacggcaacggcguguggaucggcagaaccaagagcaacagacugagaaagggcuucgagaugaucugggaccccaacggcuggaccaacaccgacagcgacuucagcgugaagcaggacgugguggccaucaccgacuggagcggcuacagcggcagcuucgugcagcaccccgagcugaccggccuggacugcaucagacccugcuucuggguggagcuggugagaggccugcccagagagaacaccaccaucuggaccagcggcagcagcaucagcuucugcggcgugaacagcgacaccgccaacuggagcuggcccgacggcgccgagcugcccuucaccaucgacaaguga

SEQ ID NO: 181285 - RNA, 1413 nt, Artificial Sequence
  derived and/or modified CDS sequence (opt4) from neuraminidase__InfluenzaA__AET84429
augaaccccaaccagaagaucaucaccaucggcagcaucagcaucgccaucggcaucaucagccugaugcugcagaucggcaacaucaucagcaucugggccagccacagcauccagaccggcagccagaacaacaccggcaucugcaaccagagaaucaucaccuacgagaacagcaccugggugaaccacaccuacgugagcaucaacaacaccaacgugguggccggcaaggacaagaccagcgugacccuggccggcaacagcagccugugcagcaucagcggcugggccaucuacaccaaggacaacagcaucagaaucggcagcaagggcgacguguucgugaucagagagcccuucaucagcugcagccaccuggagugcagaaccuucuuccugacccagggcgcccugcugaacgacaagcacagcaacggcaccgugaaggacagaagccccuacagagcccugaugagcugcccccugggcgaggcccccagccccuacaacagcaaguucgagagcguggccuggagcgccagcgccugccacgacggcaugggcuggcugaccaucggcaucagcggccccgacaacggcgccguggccgugcugaaguacaacggcaucaucaccggcaccaucaagagcuggaagaagcagauccugagaacccaggagagcgagugcgugugcaugaacggcagcugcuucaccaucaugaccgacggccccagcaacaaggccgccagcuacaagaucuucaagaucgagaagggcaaggugaccaagagcaucgagcugaacgcccccaacuucuacuacgaggagugcagcugcuaccccgacaccggcaucgugaugugcgugugcagagacaacuggcacggcagcaacagacccugggugagcuucaaccaggaccuggacuaccagaucggcuacaucugcagcggcguguucggcgacaaccccagacccaaggacggcgagggcagcugcaaccccgugaccguggacggcgccaacggcgugaagggcuucagcuacaaguacggcaacggcguguggaucggcagaaccaagagcaacagacugagaaagggcuucgagaugaucugggaccccaacggcuggaccaacaccgacagcgacuucagcgugaagcaggacgugguggccaucaccgacuggagcggcuacagcggcagcuucgugcagcaccccgagcugaccggccuggacugcaucagacccugcuucuggguggagcuggugagaggccugcccagagagaacaccaccaucuggaccagcggcagcagcaucagcuucugcggcgugaacagcgacaccgccaacuggagcuggcccgacggcgccgagcugcccuucaccaucgacaaguga

SEQ ID NO: 181286 - RNA, 1413 nt, Artificial Sequence
  derived and/or modified CDS sequence (opt4) from neuraminidase__InfluenzaA__AET84440
augaaccccaaccagaagaucaucaccaucggcagcaucagcaucgccaucggcaucaucagccugaugcugcagaucggcaacaucaucagcaucugggccagccacagcauccagaccggcagccagaacaacaccggcaucugcaaccagagaaucaucaccuacgagaacagcaccugggugaaccacaccuacgugaacaucaacaacaccaacgugguggccggcgaggacaagaccagcgugacccuggccggcaacagcagccugugcagcaucagcggcugggccaucuacaccaaggacaacagcaucagaaucggcagcaagggcgacguguucgugaucagagagcccuucaucagcugcagccaccuggagugcagaaccuucuuccugacccagggcgcccugcugaacgacaagcacagcaacggcaccgugaaggacagaagccccuacagagcccugaugagcugcccccugggcgaggcccccagccccuacaacagcaaguucgagagcguggccuggagcgccagcgccugccacgacggcaugggcuggcugaccaucggcaucagcggccccgacaacggcgccguggccgugcugaaguacaacggcaucaucaccgagaccaucaagagcuggaagaagcagauccugagaacccaggagagcgagugcgugugcaugaacggcagcugcuucaccaucaugaccgacggccccagcaacaaggccgccagcuacaagaucuucaagaucgagaagggcaaggugaccaagagcaucgagcugaacgcccccaacuucuacuacgaggagugcagcugcuaccccgacaccggcaucgugaugugcgugugcagagacaacuggcacggcagcaacagacccugggugagcuucaaccagaaccuggacuaccagaucggcuacaucugcagcggcguguucggcgacaaccccagacccaaggacggcgagggcagcugcaaccccgugaccguggacggcgccaacggcgugaagggcuucagcuacaaguacggcaacggcguguggaucggcagaaccaagagcaacagacugagaaagggcuucgagaugaucugggaccccaacggcuggaccaacaccgacagcgacuucagcgugaagcaggacgugguggccaucaccgacuggagcggcuacagcggcagcuucgugcagcaccccgagcugaccggccuggacugcaucagacccugcuucuggguggagcuggugagaggccugcccagagagaacaccaccaucuggaccagcggcagcagcaucagcuucugcggcgugaacagcgacaccgccaacuggagcuggcccgacggcgccgagcugcccuucaccaucgacaaguga

SEQ ID NO: 181287 - RNA, 1413 nt, Artificial Sequence
  derived and/or modified CDS sequence (opt4) from neuraminidase__InfluenzaA__AET84451
augaaccccaaccagaagaucaucaccaucggcagcaucagcaucgccaucggcaucaucagccugauccugcagaucggcaacaucaucagcaucugggccagccacagcauccagaccggcagccagaaccacaccggcaucugcaaccagagaaucaucaccuacgagaacagcaccugggugaacaacaccuacgugaacaucaacaacaccaacgugguggccgagaaggacaagaccagcgugacccuggccggcaacagcagccugugcagcaucagcggcugggccaucuacaccaaggacaacagcaucagaaucggcagcaagggcgacguguucgugaucagagagcccuucaucagcugcagccaccuggagugcagaaccuucuuccugaccaagggcgcccugcugaacgacaagcacagcaacggcaccgugaccgacagaagccccuacagagcccugaugagcugcccccugggcgaggcccccagccccuacaacagcagauucgagagcguggccuggagcgccagcgccugccacgacggcaugggcuggcugaccaucggcaucagcggccccgacaacggcgccguggccgugcugaaguacaacggcaucaucaccgagaccaucaagagcuggaagaagagaauccugagaacccaggagagcgagugcgugugcaugaacggcagcugcuucaccaucaugaccgacggccccagcaacggcgccgccagcuacaagaucuucaagaucgagaagggcaaggugaccaagaccaucgagcugaacgcccccaacuuccacuacgaggagugcagcugcuaccccgacaccggcaccgugaugugcgugugcagagacaacuggcacggcagcaacagacccugggugagcuucaaccagaaccuggacuaccagaucggcuacaucugcagcggcguguucggcgacaaccccagacccaaggacggcgagggcagcugcaaccccgugaccguggacggcgccgacggcgugaagggcuucagcuacaaguacggcaacggcguguggaucggcagaaccaagagcaacagacugagaaagggcuucgagaugaucugggaccccaacggcuggaccaacaccgacagcgacuucagcgugaagcaggacgugguggccaucaccgacuggagcggcuacagcggcagcuucgugcagcaccccgagcugaccggccuggacugcaucagacccugcuucuggguggagcuggugagaggccugcccagagagaacaccaccaucuggaccagcggcagcagcaucagcuucugcggcgugaacagcggcaccgccaacuggagcuggcccgacggcgccgagcugcccuucaccaucgacaaguga

SEQ ID NO: 181288 - RNA, 1410 nt, Artificial Sequence; identical to SEQ ID NO: 176798
  derived and/or modified CDS sequence (opt4) from neuraminidase__InfluenzaA__AEV53421

SEQ ID NO: 181289 - RNA, 1410 nt, Artificial Sequence; identical to SEQ ID NO: 176798
  derived and/or modified CDS sequence (opt4) from neuraminidase__InfluenzaA__AEV53423

SEQ ID NO: 181290 - RNA, 1410 nt, Artificial Sequence; identical to SEQ ID NO: 178260
  derived and/or modified CDS sequence (opt4) from neuraminidase__InfluenzaA__AEV53425

SEQ ID NO: 181291 - RNA, 1410 nt, Artificial Sequence; identical to SEQ ID NO: 176798
  derived and/or modified CDS sequence (opt4) from neuraminidase__InfluenzaA__AEV53427

SEQ ID NO: 181292 - RNA, 1410 nt, Artificial Sequence; identical to SEQ ID NO: 178260
  derived and/or modified CDS sequence (opt4) from neuraminidase__InfluenzaA__AEV53429

SEQ ID NO: 181293 - RNA, 1410 nt, Artificial Sequence
  derived and/or modified CDS sequence (opt4) from neuraminidase__InfluenzaA__AEV53431
augaaccccaaccagaagaucaucaccaucggcagcgugugcaugaccaucggcauggccaaccugauccugcagaucggcaacaucaucagcaucuggaucagccacagcauccagcugggcaaccagaaccagaucgagaccugcaaccagagcgugaucaccuacgagaacaacaccugggugaaccagaccuacgugaacaucagcaacaccaacuucgccgccggccagagcguggugcccgugaagcuggccggcaacagcagccugugccccgugagcggcugggccaucuacagcaaggacaacagcaucagaaucggcagcaagggcgacguguucgugaucagagagcccuucaucagcugcagcccccuggagugcagaaccuucuuccugacccagggcgcccugcugaacgacaagcacagcaacggcaccaucaaggacagaagccccuacagaacccugaugagcugccccaucggcgaggugcccagccccuacaacagcagauucgagagcguggccuggagcgccagcgccugccacgacggcaucaacuggcugaccaucggcaucagcggccccgacaacggcgccguggccgugcugaaguacaacggcaucaucaccgacaccaucaagagcuggagaaacaacauccugagaacccaggagagcgagugcgccugcgugaacggcagcugcuucaccgugaugaccgacggccccagcgacggccaggccagcuacaagaucuucagaaucgagaagggcaagaucgugaagagcguggagaugaacgcccccaacuaccacuacgaggagugcagcugcuaccccgacagcagcgagaucaccugcgugugcagagacaacuggcacggcagcaacagacccugggugagcuucaaccagaaccuggaguaccagaucggcuacaucugcagcggcaucuucggcgacaaccccagacccaacgacaagaccggcagcugcggccccgugagcagcaacggcgccaacggcgugaagggcuucagcuucaaguacggcaacggcguguggaucggcagaaccaagagcaucagcagcagaaacggcuucgagaugaucugggaccccaacggcuggaccggcaccgacaacaacuucagcaucaagcaggacaucgugggcaucaacgaguggagcggcuacagcggcagcuucgugcagcaccccgagcugaccggccuggacugcaucagacccugcuucuggguggagcugaucagaggcagacccaaggagaacaccaucuggaccagcggcagcagcaucagcuucugcggcgugaacagcggcaccgugggcuggagcuggcccgacggcgccgagcugcccuucaccaucgacaaguga

SEQ ID NO: 181294 - RNA, 1410 nt, Artificial Sequence; identical to SEQ ID NO: 176798
  derived and/or modified CDS sequence (opt4) from neuraminidase__InfluenzaA__AEV53435

SEQ ID NO: 181295 - RNA, 1410 nt, Artificial Sequence
  derived and/or modified CDS sequence (opt4) from neuraminidase__InfluenzaA__AEV53437
augaaccccaaccagaagaucaucaccaucggcagcgugugcaugaccaucggcauggccaaccugauccugcagaucggcaacaucaucagcaucuggaucagccacagcauccagcugggcaaccagaaccagaucgagaccugcaaccagagcgugaucaccuacgagaacaacaccugggugaaccagaccuacgugaacaucagcaacaccaacuucgccgccggccagagcguggugagcgugaagcuggccggcaacagcagccugugccccgugagcggcugggccaucuacagcaaggacaacagcaucagaaucggcagcaagggcgacguguucgugaucagagagcccuucaucagcugcagcccccuggagugcagaaccuucuuccugacccagggcgcccugcugaacgacaagcacagcaacggcaccaucaaggacagaagccccuacagaacccugaugagcugccccaucggcgaggugcccagccccuacaacagcagauucgagagcguggccuggagcgccagcgccugccacgacggcaucaacuggcugaccaucggcaucagcggccccgacaacggcgccguggccgugcugaaguacaacggcaucaucaccgacaccaucaagagcuggagaaacaacacccugagaacccaggagagcgagugcgccugcgugaacggcagcugcuucaccgugaugaccgacggccccagcgacggccaggccagcuacaagaucuucagaaucgagaagggcaagaucgugaagagcguggagaugaacgcccccaacuaccacuacgaggagugcagcugcuaccccgacagcagcgagaucaccugcgugugcagagacaacuggcacggcagcaacagacccugggugagcuucaaccagaaccuggaguaccagaucggcuacaucugcagcggcaucuucggcgacaaccccagacccaacgacaagaccggcagcugcggccccgugagcagcaacggcgccaacggcgugaagggcuucagcuucaaguacggcaacggcguguggaucggcagaaccaagagcaucagcagcagaaacggcuucgagaugaucugggaccccaacggcuggaccggcaccgacaacaacuucagcaucaagcaggacaucgugggcaucaacgaguggagcggcuacagcggcagcuucgugcagcaccccgagcugaccggccuggacugcaucagacccugcuucuggguggagcugaucagaggcagacccaaggagaacaccaucuggaccagcggcagcagcaucagcuucugcggcgugaacagcgacaccgugggcuggagcuggcccgacggcgccgagcugcccuucaccaucgacaaguga

SEQ ID NO: 181296 - RNA, 1410 nt, Artificial Sequence; identical to SEQ ID NO: 176798
  derived and/or modified CDS sequence (opt4) from neuraminidase__InfluenzaA__AEV53439

SEQ ID NO: 181297 - RNA, 1410 nt, Artificial Sequence; identical to SEQ ID NO: 176798
  derived and/or modified CDS sequence (opt4) from neuraminidase__InfluenzaA__AEV53441

SEQ ID NO: 181298 - RNA, 1410 nt, Artificial Sequence; identical to SEQ ID NO: 176798
  derived and/or modified CDS sequence (opt4) from neuraminidase__InfluenzaA__AEV53443

SEQ ID NO: 181299 - RNA, 1410 nt, Artificial Sequence
  derived and/or modified CDS sequence (opt4) from neuraminidase__InfluenzaA__AEV53445
augaaccccaaccagaagaucaucaccaucggcagcgugugcaugaccaucggcauggccaaccugauccugcagaucggcaacaucaucagcaucuggaucagccacagcauccagcugggcaaccagaaccagaucgagaccugcaaccagagcgugaucaccuacgagaacaacaccugggugaaccagaccuacgugaacaucagcaacaccaacuucgccgccggccagagcguggugagcgugaagcuggccggcaacagcagccugugccccgugagcggcugggccaucuacagcaaggacaacagcaucagaaucggcagcaagggcgacguguucgugaucagagagcccuucaucagcugcagcccccuggagugcagaaccuucuuccugacccagggcgcccugcugaacgacaagcacagcaacggcaccaucaaggacagaagccccuacagaacccugaugagcugccccaucggcgaggugcccagccccuacaacagcagauucgagagcguggccuggagcgccagcgccugccacgacggcaucaacuggcugaccaucggcaucagcggccccgacaacggcgccguggccgugcugaaguacaacggcaucaucaccgacaccaucaagagcuggagaaacaacauccugagaacccaggagagcgagugcgccugcgugaacggcagcugcuucaccgugaugaccgacggccccagcgacggccaggccagcuacaagaucuucagaaucgagaagggcaagaucgugaagagcguggagaugaacgcccccaacuaccacuacgaggagugcagcugcuaccccgacagcagcgagaucaccugcgugugcagagacaacuggcacggcagcaacagacccugggugagcuucaaccagaaccuggaguaccagaucggcuacaucugcagcggcaucuucggcgacaaccccagacccaacgacaagaccggcagcugcggccccgugagcagcaacggcgccaacggcgugaagggcuucagcuucaaguacggcaacggcguguggaucggcagaaccaagagcaucagcagcagaaacggcuucgagaugaucugggaccccaacggcuggaccggcaccgaccacaacuucagcaucaagcaggacaucgugggcaucaacgaguggagcggcuacagcggcagcuucgugcagcaccccgagcugaccggccuggacugcaucagacccugcuucuggguggagcugaucagaggcagacccaaggagaacaccaucuggaccagcggcagcagcaucagcuucugcggcgugaacagcgacaccgugggcuggagcuggcccgacggcgccgagcugcccuucaccaucgacaaguga

SEQ ID NO: 181300 - RNA, 1410 nt, Artificial Sequence; identical to SEQ ID NO: 176798
  derived and/or modified CDS sequence (opt4) from neuraminidase__InfluenzaA__AEV53447

SEQ ID NO: 181301 - RNA, 1410 nt, Artificial Sequence; identical to SEQ ID NO: 178700
  derived and/or modified CDS sequence (opt4) from neuraminidase__InfluenzaA__AEV53449

SEQ ID NO: 181302 - RNA, 1410 nt, Artificial Sequence
  derived and/or modified CDS sequence (opt4) from neuraminidase__InfluenzaA__AEV53451
augaaccccaaccagaagaucaucaccaucggcagcgugugcaugaccaucggcauggccaaccugauccugcagaucggcaacaucaucagcaucuggaucagccacagcauccagcugggcaaccagaaccagaucgagaccugcaaccagagcgugaucaccuacgagaacaacaccugggugaaccagaccuacgugaacaucagcaacaccaacuucgccgccggccagagcguggugagcgugaagcuggccggcaacagcagccugugccccgugagcggcugggccaucuacagcaaggacaacagcaucagaaucggcagcaagggcgacguguucgugaucagagagcccuucaucagcugcagcccccuggagugcagaaccuucuuccugacccagggcgcccugcugaacgacaagcacagcaacggcaccaucaaggacagaagccccuacagaacccugaugagcugccccaucggcgaggugcccagccccuacaacagcagauucgagagcguggccuggagcgccagcgccugccacgacggcaucaacuggcugaccaucggcaucagcggccccgacaacggcgccguggccgugcugaaguacaacggcaucaucaccgacaccaucaagagcuggagaaacaacauccugagaacccaggagagcgagugcgccugcgugaacggcagcugcuucaccgugaugaccgacggccccagcgacggccaggccagcuacaagaucuucaagaucgagaagggcaagaucgugaagagcguggagaugaacgcccccgacuaccacuacgaggagugcagcugcuaccccgacagcagcgagaucaccugcgugugcagagacaacuggcacggcagcaacagacccugggugagcuucaaccagaaccuggaguaccagaucggcuacaucugcagcggcaucuucggcgacaaccccagacccaacgacaagaccggcagcugcggccccgugagcagcaacggcgccaacggcgugaagggcuucagcuucaaguacggcaacggcguguggaucggcagaaccaagagcaucagcagcagaaacggcuucgagaugaucugggaccccaacggcuggaccggcaccgacaacaacuucagcaucaagcaggacaucgugggcaucaacgaguggagcggcuacagcggcagcuucgugcagcaccccgagcugaccggccuggacugcaucagacccugcuucuggguggagcugaucagaggcagacccaaggagaacaccaucuggaccagcggcagcagcaucagcuucugcggcgugaacagcgacaccgugggcuggagcuggcccgacggcgccgagcugcccuucaccaucgacaaguga

SEQ ID NO: 181303 - RNA, 1410 nt, Artificial Sequence; identical to SEQ ID NO: 176798
  derived and/or modified CDS sequence (opt4) from neuraminidase__InfluenzaA__AEV53453

SEQ ID NO: 181304 - RNA, 1410 nt, Artificial Sequence
  derived and/or modified CDS sequence (opt4) from neuraminidase__InfluenzaA__AEV53455
augaaccccaaccagaagaucaucaccaucggcagcgugugcaugaccaucggcauggccaaccugauccugcagaucggcaacaucaucagcaucuggaucagccacagcauccagcugggcaaccagaaccagaucgagaccugcaaccagagcgugaucaccuacgagaacaacaccugggugaaccagaccuacgugaacaucagcaacaccaacuucgccgccggccagagcguggugagcgugaagcuggccggcaacagcagccugugccccgugagcggcugggccaucuacagcaaggacaacagcaucagaaucggcagcaagggcgacguguucgugaucagagagcccuucaucagcugcagcccccuggagugcagaaccuucuuccugacccagggcgcccugcugaacgacaagcacagcaacggcaccaucaaggacagaagccccuacagaacccugaugagcugccccaucggcgaggugcccagccccuacaacagcagauucgagagcguggccuggagcgccagcgccugccacgacggcaucaacuggcugaccaucggcaucagcggccccgacaacggcgccguggccgugcugaaguacaacggcaucaucaccgacaccaucaagagcuggagaaacaacauccugagaacccaggagagcgagugcgccugcgugaacggcagcugcuucaccgugaugaccgacggccccagcgacggccaggccagcuacaagaucuucagaaucgagaagggcaagaucgugaagagcguggagaugaacgcccccaacuaccacuacgaggagugcagcugcuaccccgacagcagcgagaucaccugcgugugcagagacaacuggcacggcagcaacagacccugggugagcuucaaccagaaccuggaguaccagaucggcuacaucugcagcggcaucuucggcgacaaccccagacccaacgacaagaccggcagcugcggccccgugagcagcaacggcgccaacggcgugaagggcuucagcuucaaguacggcaacggcguguggaucggcagaaccaagagcaucagcagcagaaacggcuucgagaugaucugggaccccaacggcuggaccgagaccgacaacaacuucagcaucaagcaggacaucgugggcaucaacgaguggagcggcuacagcggcagcuucgugcagcaccccgagcugaccggccugaacugcaucagacccugcuucuggguggagcugaucagaggcagacccaaggagaacaccaucuggaccagcggcagcagcaucagcuucugcggcgugaacagcgacaccgugggcuggagcuggcccgacggcgccgagcugcccuucaccaucgacaaguga

SEQ ID NO: 181305 - RNA, 1410 nt, Artificial Sequence
  derived and/or modified CDS sequence (opt4) from neuraminidase__InfluenzaA__AEV53457
augaaccccaaccagaagaucaucaccaucggcagcgugugcaugaccaucggcauggccaaccugauccugcagaucggcaacaucaucagcaucuggaucagccacagcauccagcugggcaaccagaaccagaucgagaccugcaaccagagcgugaucaccuacgagaacaacaccugggugaaccagaccuacgugaacaucagcaacaccaacuucgccgccggccagagcguggugagcgugaagcuggccggcaacagcagccugugccccgugagcggcugggccaucuacagcaaggacaacagcaucagaaucggcagcaagggcgacguguucgugaucagagagcccuucaucagcugcagcccccuggagugcagaaccuucuuccugacccagggcgcccugcugaacgacaagcacagcaacggcaccaucaaggacagaagccccuacagaacccugaugagcugccccaucggcgaggugcccagccccuacaacagcagauucgagagcguggccuggagcgccagcgccugccacgacggcaucaacuggcugaccaucggcaucagcggccccgacaacggcgccguggccgugcugaaguacaacggcaucaucaccgacaccaucaagagcuggagaaacaacauccugagaacccaggagagcgagugcgccugcgugaacggcagcugcuucaccgugaugaccgacggccccagcgacggccaggccagcuacaagaucuucagaguggagaagggcaagaucgugaagagcguggagaugaacgcccccaacuaccacuacgaggagugcagcugcuaccccgacagcagcgagaucaccugcgugugcagagacaacuggcacggcagcaacagacccugggugagcuucaaccagaaccuggaguaccagaucggcuacaucugcagcggcaucuucggcgacaaccccagacccaacgacaagaccggcagcugcggccccgugagcagcaacggcgccaacggcgugaagggcuucagcuucaaguacggcaacggcguguggaucggcagaaccaagagcaucagcagcagaaacggcuucgagaugaucugggaccccaacggcuggaccggcaccgacaacaacuucagcaucaagcaggacaucgugggcaucaacgaguggagcggcuacagcggcagcuucgugcagcaccccgagcugaccggccuggacugcaucagacccugcuucuggguggagcugaucagaggcagacccaaggagaacaccaucuggaccagcggcagcagcaucagcuucugcggcgugaacagcgacaccgugggcuggagcuggcccgacggcgccgagcugcccuucaccaucgacaaguga

SEQ ID NO: 181306 - RNA, 1410 nt, Artificial Sequence
  derived and/or modified CDS sequence (opt4) from neuraminidase__InfluenzaA__AEV53459
augaaccccaaccagaagaucaucaccaucggcagcgugugcaugaccaucggcauggccaaccugauccugcagaucggcaacaucaucagcaucuggaucagccacagcauccagcugggcaaccagaaccagaucgagaccugcaaccagagcgugaucaccuacgagaacaacaccugggugaaccagaccuacgugaacaucagcaacaccaacuucgccgccggccagagcguggugagcgugaagcuggccggcaacagcagccugugccccgugagcggcugggccaucuacagcaaggacaacagcaucagaaucggcagcaagggcgacguguucgugaucagagagcccuucaucagcugcagcccccuggagugcagaaccuucuuccugacccagggcgcccugcugaacgacaagcacagcaacggcaccaucaaggacagaagccccuacagaacccugaugagcugccccaucggcgaggugcccagccccuacaacagcagauucgagagcguggccuggagcgccagcgccugccacgacggcaucaacuggcugaccaucggcaucagcggccccgacaacggcgccguggccgugcugaaguacaacggcaucaucaccgacaccaucaagagcuggagaaacaacauccugagaacccaggagagcgagugcgccugcgugaacggcagcugcuucaccgugaucaccgacggccccagcgacggccaggccagcuacaagaucuucagaaucgagaagggcaagaucgugaagagcguggagaugaacgcccccaacuaccacuacgaggagugcagcugcuaccccgacagcagcgagaucaccugcgugugcagagacaacuggcacggcagcaacagacccugggugagcuucaaccagaaccuggaguaccagaucggcuacaucugcagcggcaucuucggcgacaaccccagacccaacgacaagaccggcagcugcggccccgugagcagcaacggcgccaacggcgugaagggcuucagcuucaaguacggcaacggcguguggaucggcagaaccaagagcaucagcagcagaaacggcuucgagaugaucugggaccccaacggcuggaccgagaccgacaacaacuucagcaucaagcaggacaucgugggcaucaacgaguggagcggcuacagcggcagcuucgugcagcaccccgagcugaccggccugaacugcaucagacccugcuucuggguggagcugaucagaggcagacccaaggagaacaccaucuggaccagcggcagcagcaucagcuucugcggcgugaacagcgacaccgugggcuggagcuggcccgacggcgccgagcugcccuucaccaucgacaaguga

SEQ ID NO: 181307 - RNA, 1410 nt, Artificial Sequence; identical to SEQ ID NO: 176798
  derived and/or modified CDS sequence (opt4) from neuraminidase__InfluenzaA__AEV53461

SEQ ID NO: 181308 - RNA, 1410 nt, Artificial Sequence
  derived and/or modified CDS sequence (opt4) from neuraminidase__InfluenzaA__AEV53463
augaaccccaaccagaagaucaucaccaucggcagcgugugcaugaccaucggcauggccaaccugauccugcagaucggcaacaucaucagcaucuggaucagccacagcauccagcuggagaaccagaaccagaucgagaccugcaaccagagcgugaucaccuacgagaacaacaccugggugaaccagaccuacgugaacaucagcaacaccaacuucgccgccggccagagcguggugagcgugaagcuggccggcaacagcagccugugccccgugagcggcugggccaucuacagcaaggacaacagcaucagaaucggcagcaagggcgacguguucgugaucagagagcccuucaucagcugcagcccccuggagugcagaaccuucuuccugacccagggcgcccugcugaacgacaagcacagcaacggcaccaucaaggacagaagccccuacagaacccugaugagcugccccaucggcgaggugcccagccccuacaacagcagauucgagagcguggccuggagcgccagcgccugccacgacggcaucaacuggcugaccaucggcaucagcggccccgacaacggcgccguggccgugcugaaguacaacggcaucaucaccgacaccaucaagagcuggagaaacaacauccugagaacccaggagagcgagugcgccugcaucaacggcagcugcuucaccgugaugaccgacggccccagcgacggccaggccagcuacaagaucuucagaaucgagaagggcaagaucgugaagagcguggagaugaacgcccccaacuaccacuacgaggagugcagcugcuaccccgacagcagcgagaucaccugcgugugcagagacaacuggcacggcagcaacagacccugggugagcuucaaccagaaccuggaguaccagaucggcuacaucugcagcggcaucuucggcgacaaccccagacccaacgacaagaccggcagcugcggccccgugagcagcaacggcgccaacggcgugaagggcuucagcuucaaguacggcaacggcguguggaucggcagaaccaagagcaucagcagcagaaacggcuucgagaugaucugggaccccaacggcuggaccggcaccgacaacaacuucagcaucaagcaggacaucgugggcaucaacgaguggagcggcuacagcggcagcuucgugcagcaccccgagcugaccggccuggacugcaucagacccugcuucuggguggagcugaucagaggcagacccaaggagaacaccaucuggaccagcggcagcagcaucagcuucugcggcgugaacagcgacaccgugggcuggagcuggcccgacggcgccgagcugcccuucaccaucgacaaguga

SEQ ID NO: 181309 - RNA, 1410 nt, Artificial Sequence
  derived and/or modified CDS sequence (opt4) from neuraminidase__InfluenzaA__AEV53465
augaaccccaaccagaagaucaucaccaucggcagcgugugcaugaccaucggcauggccaaccugauccugcagaucggcaacaucaucagcaucuggaucagccacagcauccagcugggcaaccagaaccagaucgagaccugcaaccagagcgugaucaccuacgagaacaacaccugggugaaccagaccuacgugaacaucagcaacaccaacuucgccgccggccagagcguggugagcgugaagcuggccggcaacagcagccugugccccgugagcggcugggccaucuacagcaaggacaacagcaucagaaucggcagcaagggcgacguguucgugaucagagagcccuucaucagcugcagcccccuggagugcagaaccuucuuccugacccagggcgcccugcugaacgacaagcacagcaacggcaccaucaaggacagaagccccuacagaacccugaugagcugccccaucggcgaggugcccagccccuacaacagcagauucgagagcguggccuggagcgccagcgccugccacgacggcaucaacuggcugaccaucggcaucagcggccccgacaacggcgccguggccgugcugaaguacaacggcaucaucaccgacaccaucaagagcuggagaaacaacauccugagaacccaggagagcgagugcgccugcgugaacggcagcugcuucaccgugaugaccgacggccccagcgacagacaggccagcuacaagaucuucagaaucgagaagggcaagaucgugaagagcguggagaugaacgcccccaacuaccacuacgaggagugcagcugcuaccccgacagcagcgagaucaccugcgugugcagagacaacuggcacggcagcaacagacccugggugagcuucaaccagaaccuggaguaccagaucggcuacaucugcagcggcaucuucggcgacaaccccagacccaacgacaagaccggcagcugcggccccgugagcagcaacggcgccaacggcgugaagggcuucagcuacaaguacggcaacggcguguggaucggcagaaccaagagcaucagcagcagaaacggcuucgagaugaucugggaccccaacggcuggaccggcaccgacaacaacuucagcaucaagcaggacaucgugggcaucaacgaguggagcggcuacagcggcagcuucgugcagcaccccgagcugaccggccuggacugcaucagacccugcuucuggguggagcugaucagaggcagacccaaggagaacaccaucuggaccagcggcagcagcaucagcuucugcggcgugaacagcgacaccgugggcuggagcuggcccgacggcgccgagcugcccuucaccaucgacaaguga

SEQ ID NO: 181310 - RNA, 1410 nt, Artificial Sequence; identical to SEQ ID NO: 178599
  derived and/or modified CDS sequence (opt4) from neuraminidase__InfluenzaA__AEV53467

SEQ ID NO: 181311 - RNA, 1410 nt, Artificial Sequence; identical to SEQ ID NO: 178599
  derived and/or modified CDS sequence (opt4) from neuraminidase__InfluenzaA__AEV53469

SEQ ID NO: 181312 - RNA, 1410 nt, Artificial Sequence; identical to SEQ ID NO: 176798
  derived and/or modified CDS sequence (opt4) from neuraminidase__InfluenzaA__AEV53471

SEQ ID NO: 181313 - RNA, 1410 nt, Artificial Sequence; identical to SEQ ID NO: 176798
  derived and/or modified CDS sequence (opt4) from neuraminidase__InfluenzaA__AEV53473

SEQ ID NO: 181314 - RNA, 1410 nt, Artificial Sequence; identical to SEQ ID NO: 176798
  derived and/or modified CDS sequence (opt4) from neuraminidase__InfluenzaA__AEV53475

SEQ ID NO: 181315 - RNA, 1410 nt, Artificial Sequence; identical to SEQ ID NO: 176798
  derived and/or modified CDS sequence (opt4) from neuraminidase__InfluenzaA__AEV53477

SEQ ID NO: 181316 - RNA, 1410 nt, Artificial Sequence; identical to SEQ ID NO: 176798
  derived and/or modified CDS sequence (opt4) from neuraminidase__InfluenzaA__AEV53479

SEQ ID NO: 181317 - RNA, 1410 nt, Artificial Sequence; identical to SEQ ID NO: 176798
  derived and/or modified CDS sequence (opt4) from neuraminidase__InfluenzaA__AEV53481

SEQ ID NO: 181318 - RNA, 1410 nt, Artificial Sequence; identical to SEQ ID NO: 176798
  derived and/or modified CDS sequence (opt4) from neuraminidase__InfluenzaA__AEV53483

SEQ ID NO: 181319 - RNA, 1410 nt, Artificial Sequence
  derived and/or modified CDS sequence (opt4) from neuraminidase__InfluenzaA__AEV53485
augaaccccaaccagaagaucaucaccaucggcagcgugugcaugaccaucggcauggccaaccugauccugcagaucggcaacaucaucagcaucugggugagccacagcauccagcugggcaaccagaaccagaucgagaccugcaaccagagcgugaucaccuacgagaacaacaccugggugaaccagaccuacgugaacaucagcaacaccaacuucgccgccggccagagcguggugagcgugaagcuggccggcaacagcagccugugccccgugagcggcugggccaucuacagcaaggacaacagcaucagaaucggcagcaagggcgacguguucgugaucagagagcccuucaucagcugcagcccccuggagugcagaaccuucuuccugacccagggcgcccugcugaacgacaagcacagcaacggcaccaucaaggacagaagccccuacagaacccugaugagcugccccaucggcgaggugcccagccccuacaacagcagauucgagagcguggccuggagcgccagcgccugccacgacggcaucaacuggcugaccaucggcaucagcggccccgacaacggcgccguggccgugcugaaguacaacggcaucaucaccgacaccaucaagagcuggagaaacaacauccugagaacccaggagagcgagugcgccugcgugaacggcagcugcuucaccgugaugaccgacggccccagcgacggccaggccagcuacaagaucuucagaaucgagaagggcaagaucgugaagagcguggagaugaacgcccccaacuaccacuacgaggagugcagcugcuaccccgacagcagcgagaucaccugcgugugcagagacaacuggcacggcagcaacagacccugggugagcuucaaccagaaccuggaguaccagaucggcuacaucugcagcggcaucuucggcgacaaccccagacccaacgacaagaccggcagcugcggccccgugagcagcaacggcgccaacggcgugaagggcuucagcuucaaguacggcaacggcguguggaucggcagaaccaagagcaucagcagcagaaacggcuucgagaugaucugggaccccaacggcuggaccggcaccgacaacaacuucagcaucaagcaggacaucgugggcaucaacgaguggagcggcuacagcggcagcuucgugcagcaccccgagcugaccggccuggacugcaucagacccugcuucuggguggagcugaucagaggcagacccaaggagaacaccaucuggaccagcggcagcagcaucagcuucugcggcgugaacagcgacaccgugggcuggagcuggcccgacggcgccgagcugcccuucaccaucgacaaguga

SEQ ID NO: 181320 - RNA, 1410 nt, Artificial Sequence; identical to SEQ ID NO: 178599
  derived and/or modified CDS sequence (opt4) from neuraminidase__InfluenzaA__AEV53487

SEQ ID NO: 181321 - RNA, 1410 nt, Artificial Sequence; identical to SEQ ID NO: 177816
  derived and/or modified CDS sequence (opt4) from neuraminidase__InfluenzaA__AEV53489

SEQ ID NO: 181322 - RNA, 1410 nt, Artificial Sequence
  derived and/or modified CDS sequence (opt4) from neuraminidase__InfluenzaA__AEV53491
augaaccccaaccagaagaucaucaccaucggccuggugugcaugaccaucggcauggccaaccugauccugcagaucggcaacaucaucagcaucuggaucagccacagcauccagcugggcaaccagaaccagaucgagaccugcaaccagagcgugaucaccuacgagaacaacaccugggugaaccagaccuacgugaacaucagcaacaccaacuucgccgccggccagagcguggugagcgugaagcuggccggcaacagcagccugugccccgugagcggcugggccaucuacagcaaggacaacagcaucagaaucggcagcaagggcgacguguucgugaucagagagcccuucaucagcugcagcccccuggagugcagaaccuucuuccugacccagggcgcccugcugaacgacaagcacagcaacggcaccaucaaggacagaagccccuacagaacccugaugagcugccccaucggcgaggugcccagccccuacaacagcagauucgagagcguggccuggagcgccagcgccugccacgacggcaucaacuggcugaccaucggcaucagcggccccgacaacggcgccguggccgugcugaaguacaacggcaucaucaccgacaccaucaagagcuggagaaacaacauccugagaacccaggagagcgagugcgccugcgugaacggcagcugcuucaccgugaugaccgacggccccagcgacggccaggccagcuacaagaucuucagaaucgagaagggcaagaucgugaagagcguggagaugaacgcccccaacuaccacuacgaggagugcagcugcuaccccgacagcagcgagaucaccugcgugugcagagacaacuggcacggcagcaacagacccugggugagcuucaaccagaaccuggaguaccagaucggcuacaucugcagcggcaucuucggcgacaaccccagacccaacgacaagaccggcagcugcggccccgugagcagcaacggcgccaacggcgugaagggcuucagcuucaaguacggcaacggcguguggaucggcagaaccaagagcaucagcagcagaaacggcuucgagaugaucugggaccccaacggcuggaccggcaccgacaacaacuucagcaucaagcaggacaucgugggcaucaacgaguggagcggcuacagcggcagcuucgugcagcaccccgagcugaccggccuggacugcaucagacccugcuucuggguggagcugaucagaggcagacccaaggagaacaccaucuggaccagcggcagcagcaucagcuucugcggcgugaacagcgacaccgugggcuggagcuggcccgacggcgccgagcugcccuucaccaucgacaaguga

SEQ ID NO: 181323 - RNA, 1410 nt, Artificial Sequence; identical to SEQ ID NO: 176798
  derived and/or modified CDS sequence (opt4) from neuraminidase__InfluenzaA__AEV53493

SEQ ID NO: 181324 - RNA, 1410 nt, Artificial Sequence; identical to SEQ ID NO: 178260
  derived and/or modified CDS sequence (opt4) from neuraminidase__InfluenzaA__AEV53495

SEQ ID NO: 181325 - RNA, 1410 nt, Artificial Sequence
  derived and/or modified CDS sequence (opt4) from neuraminidase__InfluenzaA__AEV53497
augaaccccaaccagaagaucaucaccaucggcagcgugugcaugaccaucggcauggccaaccugauccugcagaucggcaacaucaucagcaucuggaucagccacagcauccagcuggagaaccagaaccagaucgagaccugcaaccagagcgugaucaccuacgagaacaacaccugggugaaccagaccuacgugaacaucagcaacaccaacuucgccgccggccagagcguggugagcgugaaccuggccggcaacagcagccugugccccgugagcggcugggccaucuacagcaaggacaacagcaucagaaucggcagcaagggcgacguguucgugaucagagagcccuucaucagcugcagcccccuggagugcagaaccuucuuccugacccagggcgcccugcugaacgacaagcacagcaacggcaccaucaaggacagaagccccuacagaacccugaugagcugccccaucggcgaggugcccagccccuacaacagcagauucgagagcguggccuggagcgccagcgccugccacgacggcaucaacuggcugaccaucggcaucagcggccccgacaacggcgccguggccgugcugaaguacaacggcaucaucaccgacaccaucaagagcuggagaaacaacauccugagaacccaggagagcgagugcgccugcgugaacggcagcugcuucaccgugaugaccgacggccccagcgacggccaggccagcuacaagaucuucagaaucgagaagggcaagaucgugaagagcguggagaugaacgcccccaacuaccacuacgaggagugcagcugcuaccccgacagcagcgagaucaccugcgugugcagagacaacuggcacggcagcaacagacccugggugagcuucaaccagaaccuggaguaccagaucggcuacaucugcagcggcaucuucggcgacaaccccagacccaacgacaagaccggcagcugcggccccgugagcagcaacggcgccaacggcgugaagggcuucagcuucaaguacggcaacggcguguggaucggcagaaccaagagcaucagcagcagaaacggcuucgagaugaucugggaccccaacggcuggaccggcaccgacaacaacuucagcaucaagcaggacaucgugggcaucaacgaguggagcggcuacagcggcagcuucgugcagcaccccgagcugaccggccuggacugcaucagacccugcuucuggguggagcugaucagaggcagacccaaggagaacaccaucuggaccagcggcagcagcaucagcuucugcggcgugaacagcgacaccgugggcuggagcuggcccgacggcgccgagcugcccuucaccaucgacaaguga

SEQ ID NO: 181326 - RNA, 1410 nt, Artificial Sequence; identical to SEQ ID NO: 177816
  derived and/or modified CDS sequence (opt4) from neuraminidase__InfluenzaA__AEV53499

SEQ ID NO: 181327 - RNA, 1410 nt, Artificial Sequence; identical to SEQ ID NO: 176798
  derived and/or modified CDS sequence (opt4) from neuraminidase__InfluenzaA__AEV53501

SEQ ID NO: 181328 - RNA, 1410 nt, Artificial Sequence; identical to SEQ ID NO: 176798
  derived and/or modified CDS sequence (opt4) from neuraminidase__InfluenzaA__AEV53503

SEQ ID NO: 181329 - RNA, 1410 nt, Artificial Sequence; identical to SEQ ID NO: 176798
  derived and/or modified CDS sequence (opt4) from neuraminidase__InfluenzaA__AEV53505

SEQ ID NO: 181330 - RNA, 1410 nt, Artificial Sequence; identical to SEQ ID NO: 176798
  derived and/or modified CDS sequence (opt4) from neuraminidase__InfluenzaA__AEV53507

SEQ ID NO: 181331 - RNA, 1410 nt, Artificial Sequence; identical to SEQ ID NO: 176798
  derived and/or modified CDS sequence (opt4) from neuraminidase__InfluenzaA__AEV53509

SEQ ID NO: 181332 - RNA, 1410 nt, Artificial Sequence; identical to SEQ ID NO: 178260
  derived and/or modified CDS sequence (opt4) from neuraminidase__InfluenzaA__AEV53511

SEQ ID NO: 181333 - RNA, 1410 nt, Artificial Sequence; identical to SEQ ID NO: 178260
  derived and/or modified CDS sequence (opt4) from neuraminidase__InfluenzaA__AEV53513

SEQ ID NO: 181334 - RNA, 1410 nt, Artificial Sequence; identical to SEQ ID NO: 178260
  derived and/or modified CDS sequence (opt4) from neuraminidase__InfluenzaA__AEV53515

SEQ ID NO: 181335 - RNA, 1410 nt, Artificial Sequence
  derived and/or modified CDS sequence (opt4) from neuraminidase__InfluenzaA__AEV53517
augaaccccaaccagagaaucaucaccaucggcagcgugugcaugaccaucggcauggccaaccugauccugcagaucggcaacaucaucagcaucugggugagccacagcauccagcugggcaaccagaaccagaucgagaccugcaaccagagcgugaucaccuacgagaacaacaccugggugaaccagaccuacgugaacaucagcaacaccaacuucgccgccggccagagcguggugagcgugaagcuggccggcaacagcagccugugccccgugagcggcugggccaucuacagcaaggacaacagcaucagaaucggcagcaagggcgacguguucgugaucagagagcccuucaucagcugcagcccccuggagugcagaaccuucuuccugacccagggcgcccugcugaacgacaagcacagcaacggcaccaucaaggacagaagccccuacagaacccugaugagcugccccaucggcgaggugcccagccccuacaacagcagauucgagagcguggccuggagcgccagcgccugccacgacggcaucaacuggcugaccaucggcaucagcggccccgacaacggcgccguggccgugcugaaguacaacggcaucaucaccgacaccaucaagagcuggagaaacaacauccugagaacccaggagagcgagugcgccugcgugaacggcagcugcuucaccgugaugaccgacggccccagcgacggccaggccagcuacaagaucuucagaaucgagaagggcaagaucgugaagagcguggagaugaacgcccccaacuaccacuacgaggagugcagcugcuaccccgacagcagcgagaucaccugcgugugcagagacaacuggcacggcagcaacagacccugggugagcuucaaccagaaccuggaguaccagaucggcuacaucugcagcggcaucuucggcgacaaccccagacccaacgacaagaccggcagcugcggccccgugagcagcaacggcgccaacggcgugaagggcuucagcuucaaguacggcaacggcguguggaucggcagaaccaagagcaucagcagcagaaacggcuucgagaugaucugggaccccaacggcuggaccggcaccgacaacaacuucagcaucaagcaggacaucgugggcaucaacgaguggagcggcuacagcggcagcuucgugcagcaccccgagcugaccggccuggacugcaucagacccugcuucuggguggagcugaucagaggcagacccaaggagaacaccaucuggaccagcggcagcagcaucagcuucugcggcgugaacagcgacaccgugggcuggagcuggcccgacggcgccgagcugcccuucaccaucgacaaguga

SEQ ID NO: 181336 - RNA, 1410 nt, Artificial Sequence; identical to SEQ ID NO: 176798
  derived and/or modified CDS sequence (opt4) from neuraminidase__InfluenzaA__AEV53519

SEQ ID NO: 181337 - RNA, 1410 nt, Artificial Sequence; identical to SEQ ID NO: 178260
  derived and/or modified CDS sequence (opt4) from neuraminidase__InfluenzaA__AEV53521

SEQ ID NO: 181338 - RNA, 1410 nt, Artificial Sequence; identical to SEQ ID NO: 178086
  derived and/or modified CDS sequence (opt4) from neuraminidase__InfluenzaA__AEV53523

SEQ ID NO: 181339 - RNA, 1410 nt, Artificial Sequence; identical to SEQ ID NO: 177152
  derived and/or modified CDS sequence (opt4) from neuraminidase__InfluenzaA__AEV53525

SEQ ID NO: 181340 - RNA, 1410 nt, Artificial Sequence; identical to SEQ ID NO: 176798
  derived and/or modified CDS sequence (opt4) from neuraminidase__InfluenzaA__AEV53527

SEQ ID NO: 181341 - RNA, 1410 nt, Artificial Sequence
  derived and/or modified CDS sequence (opt4) from neuraminidase__InfluenzaA__AEV53529
augaaccccaaccagaagaucaucaccaucggcagcgugugcaugaccaucggcauggccaaccugauccugcagaucggcaacaucaucagcaucuggaucagccacagcauccagcuggagaaccagaaccagaucgagaccugcaaccagagcgugaucaccuacgagaacaacaccugggugaaccagaccuacgugaacaucagcaacaccaacuucgccgccggccagagcguggugagcgugaagcuggccggcaacagcagccugugccccgugagcggcugggccaucuacagcaaggacaacagcaucagaaucggcagcaagggcgacguguucgugaucagagagcccuucaucagcugcagcccccuggagugcagaaccuucuuccugacccagggcgcccugcugaacgacaagcacagcaacggcaccaucaaggacagaagccccuacagaacccugaugagcugccccaucggcgaggugcccagccccuacaacagcagauucgagagcguggccuggagcgccagcgccugccacgacggcaucaacuggcugaccaucggcaucagcggccccgacaacggcgccguggccgugcugaaguacaacggcaucaucaccgacaccaucaagagcuggagaaacaacauccugagaacccaggagagcgagugcgccugcgugaacggcagcugcuucaccgugaugaccgacggccccagcgacggccaggccagcuacaagaucuucagaaucgagaagggcaagaucgugaagagcguggagaugaacgcccccaacuaccacuacgaggagugcagcugcuaccccgacagcagcgagaucaccugcgugugcagagacaacuggcacggcagcaacagacccugggugagcuucaaccagaaccuggaguaccagaucggcuacaucugcagcggcaucuucggcgacaaccccagacccaacgacaagaccggcagcugcggccccgugagcagcaacggcgccaacggcgugaagggcuucagcuucaaguacggcaacggcguguggaucggcagaaccaagagcaucagcagcagaaacggcuucgagaugaucugggaccccaacggcuggaccggcaccgacaacaacuucagcaucaagcaggacaucgugggcaucaaggaguggagcggcuacagcggcagcuucgugcagcaccccgagcugaccggccuggacugcaucagacccugcuucuggguggagcugaucagaggcagacccaaggagaacaccaucuggaccagcggcagcagcaucagcuucugcggcgugaacagcgacaccgugggcuggagcuggcccgacggcgccgagcugcccuucaccaucgacaaguga

SEQ ID NO: 181342 - RNA, 1410 nt, Artificial Sequence; identical to SEQ ID NO: 178260
  derived and/or modified CDS sequence (opt4) from neuraminidase__InfluenzaA__AEV53531

SEQ ID NO: 181343 - RNA, 1410 nt, Artificial Sequence
  derived and/or modified CDS sequence (opt4) from neuraminidase__InfluenzaA__AEV53533
augaaccccaaccagaagaucaucaccaucggcagcgugugcaugaccaucggcauggccaaccugauccugcagaucggcaacaucaucagcaucuggaucagccacagcauccagcugggcaaccagaaccagaucgagaccugcaaccagagcgugaucaccuacgagaacaacaccugggugaaccagaccuacgugaacaucagcaacaccaacuucgccgccggccagagcguggugagcgugaagcuggccggcaacagcagccugugccccgugagcggcugggccaucuacagcaaggacaacagcaucagaaucggcagcaagggcgacguguucgugaucagagagcccuucaucagcugcagcccccuggagugcagaaccuucuuccugacccagggcgcccugcugaacgacaagcacagcaacggcaccaucaaggacagaagccccuacagaacccugaugagcugccccaucggcgaggugcccagccccuacaacagcagauucgagagcguggccuggagcgccagcgccugccacgacggcaucaacuggcugaccaucggcaucagcggccccgacaacggcgccguggccgugcugaaguacaacggcaucaucaccgacaccaucaagagcuggagaaacaacauccugagaacccaggagagcgagugcgccugcgugaacggcagcugcuucaccgugaugaccgacggccccagcgacggccaggccagcuacaagaucuucagaaucgagaagggcaagaucgugaagagcguggagaugaacgcccccaacuacuacuacgaggagugcagcugcuaccccgacagcagcgagaucaccugcgugugcagagacaacuggcacggcagcaacagacccugggugagcuucaaccagaaccuggaguaccagaucggcuacaucugcagcggcaucuucggcgacaaccccagacccaacgacaagaccggcagcugcggccccgugagcagcaacggcgccaacggcgugaagggcuucagcuucaaguacggcaacggcguguggaucggcagaaccaagagcaucagcagcagaaacggcuucgagaugaucugggaccccaacggcuggaccggcaccgacaacaacuucagcaucaagcaggacaucgugggcaucaacgaguggagcggcuacagcggcagcuucgugcagcaccccgagcugaccggccugaacugcaucagacccugcuucuggguggagcugaucagaggcagacccaaggagaacaccaucuggaccagcggcagcagcaucagcuucugcggcgugaacagcgacaccgugggcuggagcuggcccgacggcgccgagcugcccuucaccaucgacaaguga

SEQ ID NO: 181344 - RNA, 1410 nt, Artificial Sequence; identical to SEQ ID NO: 176798
  derived and/or modified CDS sequence (opt4) from neuraminidase__InfluenzaA__AEV53535

SEQ ID NO: 181345 - RNA, 1410 nt, Artificial Sequence; identical to SEQ ID NO: 181319
  derived and/or modified CDS sequence (opt4) from neuraminidase__InfluenzaA__AEV53537

SEQ ID NO: 181346 - RNA, 1410 nt, Artificial Sequence; identical to SEQ ID NO: 176798
  derived and/or modified CDS sequence (opt4) from neuraminidase__InfluenzaA__AEV53539

SEQ ID NO: 181347 - RNA, 1410 nt, Artificial Sequence; identical to SEQ ID NO: 180237
  derived and/or modified CDS sequence (opt4) from neuraminidase__InfluenzaA__AEV53541

SEQ ID NO: 181348 - RNA, 1410 nt, Artificial Sequence; identical to SEQ ID NO: 180237
  derived and/or modified CDS sequence (opt4) from neuraminidase__InfluenzaA__AEV53543

SEQ ID NO: 181349 - RNA, 1410 nt, Artificial Sequence; identical to SEQ ID NO: 178446
  derived and/or modified CDS sequence (opt4) from neuraminidase__InfluenzaA__AEV53545

SEQ ID NO: 181350 - RNA, 1410 nt, Artificial Sequence; identical to SEQ ID NO: 180237
  derived and/or modified CDS sequence (opt4) from neuraminidase__InfluenzaA__AEV53547

SEQ ID NO: 181351 - RNA, 1410 nt, Artificial Sequence; identical to SEQ ID NO: 180237
  derived and/or modified CDS sequence (opt4) from neuraminidase__InfluenzaA__AEV53549

SEQ ID NO: 181352 - RNA, 1410 nt, Artificial Sequence; identical to SEQ ID NO: 180237
  derived and/or modified CDS sequence (opt4) from neuraminidase__InfluenzaA__AEV53551

SEQ ID NO: 181353 - RNA, 1410 nt, Artificial Sequence; identical to SEQ ID NO: 180237
  derived and/or modified CDS sequence (opt4) from neuraminidase__InfluenzaA__AEV53553

SEQ ID NO: 181354 - RNA, 1410 nt, Artificial Sequence; identical to SEQ ID NO: 181319
  derived and/or modified CDS sequence (opt4) from neuraminidase__InfluenzaA__AEV53555

SEQ ID NO: 181355 - RNA, 1410 nt, Artificial Sequence; identical to SEQ ID NO: 177816
  derived and/or modified CDS sequence (opt4) from neuraminidase__InfluenzaA__AEV53557

SEQ ID NO: 181356 - RNA, 1410 nt, Artificial Sequence; identical to SEQ ID NO: 176798
  derived and/or modified CDS sequence (opt4) from neuraminidase__InfluenzaA__AEV53559

SEQ ID NO: 181357 - RNA, 1410 nt, Artificial Sequence; identical to SEQ ID NO: 176798
  derived and/or modified CDS sequence (opt4) from neuraminidase__InfluenzaA__AEV53561

SEQ ID NO: 181358 - RNA, 1410 nt, Artificial Sequence; identical to SEQ ID NO: 178390
  derived and/or modified CDS sequence (opt4) from neuraminidase__InfluenzaA__AEV53563

SEQ ID NO: 181359 - RNA, 1410 nt, Artificial Sequence
  derived and/or modified CDS sequence (opt4) from neuraminidase__InfluenzaA__AEV53565
augaaccccaaccagaagaucaucaccaucggcagcgugugcaugaccaucggcauggccaaccugauccugcagaucggcaacaucaucagcaucuggaucagccacagcauccagcugggcaaccagaaccagaucgagaccugcaaccagagcgugaucaccuacgagaacaacaccugggugaaccagaccuacgugaacaucagcaacaccaacuucgccgccggccagagcguggugagcgugaagcuggccggcaacagcagccugugccccgugaacggcugggccaucuacagcaaggacaacagcaucagaaucggcagcaagggcgacguguucgugaucagagagcccuucaucagcugcagcccccuggagugcagaaccuucuuccugacccagggcgcccugcugaacgacaagcacagcaacggcaccaucaaggacagaagccccuacagaacccugaugagcugccccaucggcgaggugcccagccccuacaacagcagauucgagagcguggccuggagcgccagcgccugccacgacggcaucaacuggcugaccaucggcaucagcggccccgacaacggcgccguggccgugcugaaguacaacggcaucaucaccgacaccaucaagagcuggagaaacaacauccugagaacccaggagagcgagugcgccugcgugaacggcagcugcuucaccgugaugaccgacggccccagcgacggccaggccagcuacaagaucuucagaaucgagaagggcaagaucgugaagagcguggagaugaacgcccccaacuaccacuacgaggagugcagcugcuaccccgacagcagcgagaucaccugcgugugcagagacaacuggcacggcagcaacagacccugggugagcuucaaccagaaccuggaguaccagaucggcuacaucugcagcggcaucuucggcgacaaccccagacccaacgacaagaccggcagcugcggccccgugagcagcaacggcgccaacggcgugaagggcuucagcuucaaguacggcaacggcguguggaucggcagaaccaagagcaucagcagcagaaacggcuucgagaugaucugggaccccaacggcuggaccggcaccgacaacaacuucagcaucaagcaggacaucgugggcaucaacgaguggagcggcuacagcggcagcuucgugcagcaccccgagcugaccggccuggacugcaucagacccugcuucuggguggagcugaucagaggcagacccaaggagaacaccaucuggaccagcggcagcagcaucagcuucugcggcgugaacagcgacaccgugggcuggagcuggcccgacggcgccgagcugccccugaccaucgacaaguga

SEQ ID NO: 181360 - RNA, 1410 nt, Artificial Sequence
  derived and/or modified CDS sequence (opt4) from neuraminidase__InfluenzaA__AEV53567
augaaccccaaccagaagaucaucaccaucggcagcgugugcaugaccaucggcauggccaaccugauccugcagaucggcaacaucaucagcaucuggaucagccacagcauccagcugggcaaccagaaccagaucgagaccugcaaccagagcgugaucaccuacgagaacaacaccugggugaaccagaccuacgugaacaucagcaacaccaacuucgccgccggccagagcguggugagcgugaagcuggccggcaacagcagccugugccccgugagcggcugggccaucuacagcaaggacaacagcaucagaaucggcagcaagggcgacguguucgugaucagagagcccuucaucagcugcagcccccuggagugcagaaccuucuuccugacccagggcgcccugcugaacgacaagcacagcaacggcaccaucaaggacagaagccccuacagaacccugaugagcugccccaucggcgaggugcccagccccuacaacagcagauucgagagcguggccuggagcgccagcgccugccacgacggcaucaacuggcugaccaucggcaucagcggccccgacaacggcgccguggccgugcugaaguacaacggcaucaucaccgacaccaucaagagcuggagaaacaacauccugagaacccaggagagcgagugcgccugcgugaacggcagcugcuucaccgugaugaccgacggccccagcgacggccaggccagcuacaagaucuucagaaucgagaagggcaagaucgugaagagcguggagaugaacgcccccaacuaccacuacgaggagugcagcugcuaccccgacagcagcgagaucaccugcgugugcagagacaacuggcacggcagcaacagacccugggugagcuucaaccagaaccuggaguaccagaucggcuacaucugcagcggcaucuucggcgacaaccccagacccaacgacaagaccggcagcugcggccccgugagcagcaacggcgccaacggcgugaagggcuucagcuucaaguacggcaacggcgccuggaucggcagaaccaagagcaucagcagcagaaacggcuucgagaugaucugggaccccaacggcuggaccgagaccgacaacaacuucagcaucaagcaggacaucgugggcaucaacgaguggagcggcuacagcggcagcuucgugcagcaccccgagcugaccggccugaacugcaucagacccugcuucuggguggagcugaucagaggcagacccaaggagaacaccaucuggaccagcggcagcagcaucagcuucugcggcgugaacagcgacaccgugggcuggagcuggcccgacggcgccgagcugcccuucaccaucgacaaguga

SEQ ID NO: 181361 - RNA, 1410 nt, Artificial Sequence; identical to SEQ ID NO: 176798
  derived and/or modified CDS sequence (opt4) from neuraminidase__InfluenzaA__AEV53569

SEQ ID NO: 181362 - RNA, 1410 nt, Artificial Sequence; identical to SEQ ID NO: 180237
  derived and/or modified CDS sequence (opt4) from neuraminidase__InfluenzaA__AEV53571

SEQ ID NO: 181363 - RNA, 1410 nt, Artificial Sequence; identical to SEQ ID NO: 180237
  derived and/or modified CDS sequence (opt4) from neuraminidase__InfluenzaA__AEV53573

SEQ ID NO: 181364 - RNA, 1410 nt, Artificial Sequence; identical to SEQ ID NO: 178599
  derived and/or modified CDS sequence (opt4) from neuraminidase__InfluenzaA__AEV53575

SEQ ID NO: 181365 - RNA, 1410 nt, Artificial Sequence
  derived and/or modified CDS sequence (opt4) from neuraminidase__InfluenzaA__AEV53577
augaaccccaaccagaagaucaucaccaucggcagcgugugcaugaccaucggcauggccaaccugauccugcagaucggcaacaucaucagcaucuggaucagccacagcauccagcugggcaaccagaaccagaucgagaccugcaaccagagcgugaucaccuacgagaacaacaccugggugaaccagaccuacgugaacaucagcaacaccaacuucgccgccggccagagcguggugagcgugaagcuggccggcaacagcagccugugccccgugagcggcugggccaucuacagcaaggacaacagcaucagaaucggcagcaagggcgacguguucgugaucagagagcccuucaucagcugcagcccccuggagugcagaaccuucuuccugacccagggcgcccugcugaacgacaagcacagcaacggcaccaucaaggacagaagccccuacagaacccugaugagcugccccaucggcgaggugcccagccccuacaacagcagauucgagagcguggccuggagcgccagcgccugccacgacggcaucaacuggcugaccaucggcaucagcggccccgacaacggcgccguggccgugcugaaguacaacggcaucaucaccgacaccaucaagagcuggagaaacaacauccugagaacccaggagagcgagugcgccugcgugaacggcagcugcuucaccgugaugaccgacggccccagcgacggccaggccagcuacaagaucuucagaaucgagaagggcaagaucgugaagagcguggagaugaacgcccccaacuaccacuacgaggagugcagcugcuaccccgacagcagcgagaucaccugcgugugcagagacaacuggcacggcagcaacagacccugggugagcuucaaccagaaccuggaguaccagaucggcuacaucugcagcggcaucuucggcgacaaccccagacccaacgacaagaccggcagcugcggccccgugagcagcaacggcgccaacggcgugaagggcuucagcuucaaguacggcaacggcguguggaucggcagaaccaagagcaucagcagcagaaacggcuucgagaugaucugggaccccaacggcuggaccggcaccgacaacaacuucagcaucaagcaggacaucgugggcaucaacgaguggagcggcuacagcggcagcuucgugcagcagcccgagcugaccggccuggacugcaucagacccugcuucuggguggagcugaucagaggcagacccaaggagaacaccaucuggaccagcggcagcagcaucagcuucugcggcgugaacagcgacaccgugggcuggagcuggcccgacggcgccgagcugcccuucaccaucgacaaguga

SEQ ID NO: 181366 - RNA, 1410 nt, Artificial Sequence; identical to SEQ ID NO: 181304
  derived and/or modified CDS sequence (opt4) from neuraminidase__InfluenzaA__AEV53579

SEQ ID NO: 181367 - RNA, 1410 nt, Artificial Sequence; identical to SEQ ID NO: 178599
  derived and/or modified CDS sequence (opt4) from neuraminidase__InfluenzaA__AEV53581

SEQ ID NO: 181368 - RNA, 1410 nt, Artificial Sequence; identical to SEQ ID NO: 178260
  derived and/or modified CDS sequence (opt4) from neuraminidase__InfluenzaA__AEV53583

SEQ ID NO: 181369 - RNA, 1410 nt, Artificial Sequence; identical to SEQ ID NO: 178260
  derived and/or modified CDS sequence (opt4) from neuraminidase__InfluenzaA__AEV53585

SEQ ID NO: 181370 - RNA, 1410 nt, Artificial Sequence
  derived and/or modified CDS sequence (opt4) from neuraminidase__InfluenzaA__AEV76877
augaaccccaaccagaagaucaucaccaucggcagcgugugcaugaccaucggcauggccaaccugauccugcagaucggcaacaucaucagcaucuggaucagccacagcauccagcugggcaaccagagccagaucgagaccugcaaccagagcgugaucaccuacgagaacaacaccugggugaaccagaccuacgugaacaucagcaccaccaacuucgccgccggccagagcguggugagcgugaagcuggccggcaacagcagccugugccccgugagcggcugggccaucuacagcaaggacaacagcaucagaaucggcagcaagggcgacguguucgugaucagagagcccuucaucagcugcagcccccuggagugcagaaccuucuuccugacccagggcgcccugcugaacgacaagcacagcaacggcaccaucaaggacagaagccccuacagaacccugaugagcugccccaucggcgaggugcccagccccuacaacagcagauucgagagcguggccuggagcgccagcgccugccacgacggcaucaacuggcugaccaucggcaucagcggccccgacaacggcgccguggccgugcugaaguacaacggcaucaucaccgacaccaucaagagcuggagaaacaacauccugagaacccaggagagcgagugcgccugcgugaacggcagcugcuucaccaucaugaccgacggccccagcgacggccaggccagcuacaagaucuucagaaucgagaagggcaagaucgugaagagcguggagaugaacgcccccaacuaccacuacgaggagugcagcugcuaccccgacagcagcgagaucaccugcgugugcagagacaacuggcacggcagcaacagacccugggugagcuucaaccagaaccuggaguaccagaucggcuacaucugcagcggcaucuucggcgacaaccccagacccaacgacaagaccggcagcugcggccccgugagcagcaacggcgccaacggcgugaagggcuucagcuucaaguacggcaacggcguguggaucggcagaaccaagagcaucagcagcagaaagggcuucgagaugaucugggaccccaacggcuggaccggcaccgacaacaacuucagcaucaagcaggacaucgugggcaucaacgaguggagcggcuacagcggcagcuucgugcagcaccccgagcugaccggccuggacugcaucagacccugcuucuggguggagcugaucagaggcagacccaaggagaacaccaucuggaccagcggcagcagcaucagcuucugcggcgugaacagcgacaccgugggcuggagcuggcccgacggcgccgagcugcccuucaccaucgacaaguga

SEQ ID NO: 181371 - RNA, 1410 nt, Artificial Sequence; identical to SEQ ID NO: 176798
  derived and/or modified CDS sequence (opt4) from neuraminidase__InfluenzaA__AEW10576

SEQ ID NO: 181372 - RNA, 1410 nt, Artificial Sequence; identical to SEQ ID NO: 176798
  derived and/or modified CDS sequence (opt4) from neuraminidase__InfluenzaA__AEW10586

SEQ ID NO: 181373 - RNA, 1410 nt, Artificial Sequence; identical to SEQ ID NO: 176798
  derived and/or modified CDS sequence (opt4) from neuraminidase__InfluenzaA__AEW10596

SEQ ID NO: 181374 - RNA, 1410 nt, Artificial Sequence; identical to SEQ ID NO: 176798
  derived and/or modified CDS sequence (opt4) from neuraminidase__InfluenzaA__AEW10606

SEQ ID NO: 181375 - RNA, 1410 nt, Artificial Sequence; identical to SEQ ID NO: 177685
  derived and/or modified CDS sequence (opt4) from neuraminidase__InfluenzaA__AEW10616

SEQ ID NO: 181376 - RNA, 1410 nt, Artificial Sequence
  derived and/or modified CDS sequence (opt4) from neuraminidase__InfluenzaA__AEW10626
augaaccccaaccagaagaucaucaccaucggcagcgugugcaugaccaucggcauggccaaccugauccugcagaucggcaacaucaucagcaucuggaucagccacagcauccagcugggcaaccagaaccagaucgagaccugcaaccagagcgugaucaccuacgagaacaacaccugggugaaccagaccuacgugaacaucagcaacaccaacuucgccgccggccagagcguggugagcgugaagcuggccggcaacagcagccugugccccgugagcggcugggccaucuacagcaaggacaacagcaucagaaucggcagcaagggcgacguguucgugaucagagagcccuucaucagcugcagcccccuggagugcagaaccuucuuccugacccagggcgcccugcugaacgacaagcacagcaacggcaccaucaaggacagaagccccuacagaacccugaugagcugccccaucggcgaggugcccagccccuacaacagcagauucgagagcguggccuggagcgccagcgccugccacgacggcaucaacuggcugaccaucggcaucagcggccccgacaacggcgccauggccgugcugaaguacaacggcaucaucaccgacaccaucaagagcuggagaaacaacauccugagaacccaggagagcgagugcgccugcgugaacggcagcugcuucaccgugaugaccgacggccccagcgacggccaggccagcuacaagaucuucagaaucgagaagggcaagaucgugaagagcguggagaugaacgcccccaacuaccacuacgaggagugcagcugcuaccccgacagcagcgagaucaccugcgugugcagagacaacuggcacggcagcaacagacccugggugagcuucaaccagaaccuggaguaccagaucggcuacaucugcagcggcaucuucggcgacaaccccagacccaacgacaagaccggcagcugcggccccgugagcagcaacggcgccaacggcgugaagggcuucagcuucaaguacggcaacggcguguggaucggcagaaccaagagcaucagcagcagaaacggcuucgagaugaucugggaccccaacggcuggaccggcaccgacaacaacuucagcaucaagcaggacaucgugggcaucaacgaguggagcggcuacagcggcagcuucgugcagcaccccgagcugaccggccuggacugcaucagacccugcuucuggguggagcugaucagaggcagacccaaggagaacaccaucuggaccagcggcagcagcaucagcuucugcggcgugaacagcgacaccgugggcuggagcuggcccgacggcgccgagcugcccuucaccaucgacaaguga

SEQ ID NO: 181377 - RNA, 1410 nt, Artificial Sequence; identical to SEQ ID NO: 176798
  derived and/or modified CDS sequence (opt4) from neuraminidase__InfluenzaA__AEW10636

SEQ ID NO: 181378 - RNA, 1410 nt, Artificial Sequence; identical to SEQ ID NO: 176788
  derived and/or modified CDS sequence (opt4) from neuraminidase__InfluenzaA__AEW10646

SEQ ID NO: 181379 - RNA, 1410 nt, Artificial Sequence; identical to SEQ ID NO: 176798
  derived and/or modified CDS sequence (opt4) from neuraminidase__InfluenzaA__AEW10656

SEQ ID NO: 181380 - RNA, 1410 nt, Artificial Sequence; identical to SEQ ID NO: 176798
  derived and/or modified CDS sequence (opt4) from neuraminidase__InfluenzaA__AEW10666

SEQ ID NO: 181381 - RNA, 1410 nt, Artificial Sequence; identical to SEQ ID NO: 176798
  derived and/or modified CDS sequence (opt4) from neuraminidase__InfluenzaA__AEW10676

SEQ ID NO: 181382 - RNA, 1410 nt, Artificial Sequence; identical to SEQ ID NO: 176798
  derived and/or modified CDS sequence (opt4) from neuraminidase__InfluenzaA__AEW10686

SEQ ID NO: 181383 - RNA, 1410 nt, Artificial Sequence; identical to SEQ ID NO: 176798
  derived and/or modified CDS sequence (opt4) from neuraminidase__InfluenzaA__AEW10696

SEQ ID NO: 181384 - RNA, 1410 nt, Artificial Sequence; identical to SEQ ID NO: 176798
  derived and/or modified CDS sequence (opt4) from neuraminidase__InfluenzaA__AEW10706

SEQ ID NO: 181385 - RNA, 1410 nt, Artificial Sequence; identical to SEQ ID NO: 176788
  derived and/or modified CDS sequence (opt4) from neuraminidase__InfluenzaA__AEW10716

SEQ ID NO: 181386 - RNA, 1410 nt, Artificial Sequence; identical to SEQ ID NO: 176798
  derived and/or modified CDS sequence (opt4) from neuraminidase__InfluenzaA__AEW10726

SEQ ID NO: 181387 - RNA, 1410 nt, Artificial Sequence; identical to SEQ ID NO: 176798
  derived and/or modified CDS sequence (opt4) from neuraminidase__InfluenzaA__AEW10736

SEQ ID NO: 181388 - RNA, 1410 nt, Artificial Sequence; identical to SEQ ID NO: 176788
  derived and/or modified CDS sequence (opt4) from neuraminidase__InfluenzaA__AEW10746

SEQ ID NO: 181389 - RNA, 1410 nt, Artificial Sequence; identical to SEQ ID NO: 176788
  derived and/or modified CDS sequence (opt4) from neuraminidase__InfluenzaA__AEW10756

SEQ ID NO: 181390 - RNA, 1410 nt, Artificial Sequence; identical to SEQ ID NO: 176788
  derived and/or modified CDS sequence (opt4) from neuraminidase__InfluenzaA__AEW10766

SEQ ID NO: 181391 - RNA, 1410 nt, Artificial Sequence; identical to SEQ ID NO: 176788
  derived and/or modified CDS sequence (opt4) from neuraminidase__InfluenzaA__AEW10776

SEQ ID NO: 181392 - RNA, 1410 nt, Artificial Sequence; identical to SEQ ID NO: 176788
  derived and/or modified CDS sequence (opt4) from neuraminidase__InfluenzaA__AEW10786

SEQ ID NO: 181393 - RNA, 1410 nt, Artificial Sequence; identical to SEQ ID NO: 176788
  derived and/or modified CDS sequence (opt4) from neuraminidase__InfluenzaA__AEW10796

SEQ ID NO: 181394 - RNA, 1410 nt, Artificial Sequence; identical to SEQ ID NO: 176788
  derived and/or modified CDS sequence (opt4) from neuraminidase__InfluenzaA__AEW10806

SEQ ID NO: 181395 - RNA, 1410 nt, Artificial Sequence; identical to SEQ ID NO: 176788
  derived and/or modified CDS sequence (opt4) from neuraminidase__InfluenzaA__AEW10816

SEQ ID NO: 181396 - RNA, 1410 nt, Artificial Sequence; identical to SEQ ID NO: 176798
  derived and/or modified CDS sequence (opt4) from neuraminidase__InfluenzaA__AEW10826

SEQ ID NO: 181397 - RNA, 1410 nt, Artificial Sequence; identical to SEQ ID NO: 176788
  derived and/or modified CDS sequence (opt4) from neuraminidase__InfluenzaA__AEW10836

SEQ ID NO: 181398 - RNA, 1410 nt, Artificial Sequence; identical to SEQ ID NO: 176788
  derived and/or modified CDS sequence (opt4) from neuraminidase__InfluenzaA__AEW10846

SEQ ID NO: 181399 - RNA, 1410 nt, Artificial Sequence; identical to SEQ ID NO: 176788
  derived and/or modified CDS sequence (opt4) from neuraminidase__InfluenzaA__AEW10856

SEQ ID NO: 181400 - RNA, 1410 nt, Artificial Sequence; identical to SEQ ID NO: 176788
  derived and/or modified CDS sequence (opt4) from neuraminidase__InfluenzaA__AEW10866

SEQ ID NO: 181401 - RNA, 1410 nt, Artificial Sequence; identical to SEQ ID NO: 176788
  derived and/or modified CDS sequence (opt4) from neuraminidase__InfluenzaA__AEW10876

SEQ ID NO: 181402 - RNA, 1410 nt, Artificial Sequence; identical to SEQ ID NO: 176788
  derived and/or modified CDS sequence (opt4) from neuraminidase__InfluenzaA__AEW10886

SEQ ID NO: 181403 - RNA, 1410 nt, Artificial Sequence; identical to SEQ ID NO: 176788
  derived and/or modified CDS sequence (opt4) from neuraminidase__InfluenzaA__AEW10896

SEQ ID NO: 181404 - RNA, 1410 nt, Artificial Sequence; identical to SEQ ID NO: 176788
  derived and/or modified CDS sequence (opt4) from neuraminidase__InfluenzaA__AEW10906

SEQ ID NO: 181405 - RNA, 1410 nt, Artificial Sequence; identical to SEQ ID NO: 176788
  derived and/or modified CDS sequence (opt4) from neuraminidase__InfluenzaA__AEW10916

SEQ ID NO: 181406 - RNA, 1410 nt, Artificial Sequence
  derived and/or modified CDS sequence (opt4) from neuraminidase__InfluenzaA__AEW10926
augaaccccaaccagaagaucaucaccaucggcagcgugugcaugaccaucggcauggccaaccugauccugcagaucggcaacaucaucagcaucuggaucagccacagcauccagcugggcaaccagaaccagaucgagaccugcaaccagagcgugaucaccuacgagaacaacaccugggugaaccagaccuacgugaacaucagcaacaccaacuucgccgccggccagagcguggugagcgugaagcuggccggcaacagcagccugugccccgugagcggcugggccaucuacagcaaggacaacagcaucagaaucggcagcaagggcgacguguucaucaucagagagcccuucaucagcugcagcccccuggagugcagaaccuucuuccugacccagggcgcccugcugaacgacaagcacagcaacggcaccaucaaggacagaagccccuacagaacccugaugagcugccccaucggcgaggugcccagccccuacaacagcagauucgagagcguggccuggagcgccagcgccugccacgacggcaucaacuggcugaccaucggcaucagcggccccgacaacggcgccguggccgugcugaaguacaacggcaucaucaccgacaccaucaagagcuggagaaacaacauccugagaacccaggagagcgagugcgccugcgugaacggcagcugcuucaccgugaugaccgacggccccagcgacggccaggccagcuacaagaucuucagaaucgagaagggcaagaucgugaagagcguggagaugaacgcccccaacuaccacuacgaggagugcagcugcuaccccgacagcagcgagaucaccugcgugugcagagacaacuggcacggcagcaacagacccugggugagcuucaaccagaaccuggaguaccagaucggcuacaucugcagcggcaucuucggcgacaaccccagacccaacgacaagaccggcagcugcggccccgugagcagcaacggcgccaacggcgugaagggcuucagcuucaaguacggcaacggcguguggaucggcagaaccaagagcaucagcagcagaaacggcuucgagaugaucugggaccccaacggcuggaccggcaccgacaacaacuucagcaucaagcaggacaucgugggcaucaacgaguggagcggcuacagcggcagcuucgugcagcaccccgagcugaccggccuggacugcaucagacccugcuucuggguggagcugaucagaggcagacccaaggagaacaccaucuggaccagcggcagcagcaucagcuucugcggcgugaacagcgacaccgugggcuggagcuggcccgacggcgccgagcugcccuucaccaucgacaaguga

SEQ ID NO: 181407 - RNA, 1410 nt, Artificial Sequence; identical to SEQ ID NO: 176788
  derived and/or modified CDS sequence (opt4) from neuraminidase__InfluenzaA__AEW10936

SEQ ID NO: 181408 - RNA, 1410 nt, Artificial Sequence; identical to SEQ ID NO: 176788
  derived and/or modified CDS sequence (opt4) from neuraminidase__InfluenzaA__AEW10946

SEQ ID NO: 181409 - RNA, 1410 nt, Artificial Sequence; identical to SEQ ID NO: 176798
  derived and/or modified CDS sequence (opt4) from neuraminidase__InfluenzaA__AEW10956

SEQ ID NO: 181410 - RNA, 1410 nt, Artificial Sequence; identical to SEQ ID NO: 176798
  derived and/or modified CDS sequence (opt4) from neuraminidase__InfluenzaA__AEW10966

SEQ ID NO: 181411 - RNA, 1410 nt, Artificial Sequence; identical to SEQ ID NO: 176788
  derived and/or modified CDS sequence (opt4) from neuraminidase__InfluenzaA__AEW10976

SEQ ID NO: 181412 - RNA, 1410 nt, Artificial Sequence; identical to SEQ ID NO: 176798
  derived and/or modified CDS sequence (opt4) from neuraminidase__InfluenzaA__AEW10986

SEQ ID NO: 181413 - RNA, 1410 nt, Artificial Sequence; identical to SEQ ID NO: 176798
  derived and/or modified CDS sequence (opt4) from neuraminidase__InfluenzaA__AEW10996

SEQ ID NO: 181414 - RNA, 1410 nt, Artificial Sequence; identical to SEQ ID NO: 176798
  derived and/or modified CDS sequence (opt4) from neuraminidase__InfluenzaA__AEW11006

SEQ ID NO: 181415 - RNA, 1410 nt, Artificial Sequence; identical to SEQ ID NO: 176798
  derived and/or modified CDS sequence (opt4) from neuraminidase__InfluenzaA__AEW11016

SEQ ID NO: 181416 - RNA, 1410 nt, Artificial Sequence; identical to SEQ ID NO: 176798
  derived and/or modified CDS sequence (opt4) from neuraminidase__InfluenzaA__AEW11026

SEQ ID NO: 181417 - RNA, 1410 nt, Artificial Sequence; identical to SEQ ID NO: 176798
  derived and/or modified CDS sequence (opt4) from neuraminidase__InfluenzaA__AEW11036

SEQ ID NO: 181418 - RNA, 1410 nt, Artificial Sequence; identical to SEQ ID NO: 176788
  derived and/or modified CDS sequence (opt4) from neuraminidase__InfluenzaA__AEW11046

SEQ ID NO: 181419 - RNA, 1410 nt, Artificial Sequence; identical to SEQ ID NO: 176798
  derived and/or modified CDS sequence (opt4) from neuraminidase__InfluenzaA__AEW11056

SEQ ID NO: 181420 - RNA, 1410 nt, Artificial Sequence; identical to SEQ ID NO: 177602
  derived and/or modified CDS sequence (opt4) from neuraminidase__InfluenzaA__AEW11066

SEQ ID NO: 181421 - RNA, 1410 nt, Artificial Sequence; identical to SEQ ID NO: 177602
  derived and/or modified CDS sequence (opt4) from neuraminidase__InfluenzaA__AEW11076

SEQ ID NO: 181422 - RNA, 1410 nt, Artificial Sequence; identical to SEQ ID NO: 177602
  derived and/or modified CDS sequence (opt4) from neuraminidase__InfluenzaA__AEW11086

SEQ ID NO: 181423 - RNA, 1410 nt, Artificial Sequence; identical to SEQ ID NO: 177602
  derived and/or modified CDS sequence (opt4) from neuraminidase__InfluenzaA__AEW11096

SEQ ID NO: 181424 - RNA, 1410 nt, Artificial Sequence; identical to SEQ ID NO: 177602
  derived and/or modified CDS sequence (opt4) from neuraminidase__InfluenzaA__AEW11106

SEQ ID NO: 181425 - RNA, 1410 nt, Artificial Sequence; identical to SEQ ID NO: 176798
  derived and/or modified CDS sequence (opt4) from neuraminidase__InfluenzaA__AEW11116

SEQ ID NO: 181426 - RNA, 1410 nt, Artificial Sequence; identical to SEQ ID NO: 177602
  derived and/or modified CDS sequence (opt4) from neuraminidase__InfluenzaA__AEW11126

SEQ ID NO: 181427 - RNA, 1410 nt, Artificial Sequence; identical to SEQ ID NO: 177506
  derived and/or modified CDS sequence (opt4) from neuraminidase__InfluenzaA__AEW11136

SEQ ID NO: 181428 - RNA, 1410 nt, Artificial Sequence; identical to SEQ ID NO: 176798
  derived and/or modified CDS sequence (opt4) from neuraminidase__InfluenzaA__AEW11146

SEQ ID NO: 181429 - RNA, 1410 nt, Artificial Sequence; identical to SEQ ID NO: 176798
  derived and/or modified CDS sequence (opt4) from neuraminidase__InfluenzaA__AEW11156

SEQ ID NO: 181430 - RNA, 1410 nt, Artificial Sequence; identical to SEQ ID NO: 177602
  derived and/or modified CDS sequence (opt4) from neuraminidase__InfluenzaA__AEW11166

SEQ ID NO: 181431 - RNA, 1410 nt, Artificial Sequence; identical to SEQ ID NO: 177602
  derived and/or modified CDS sequence (opt4) from neuraminidase__InfluenzaA__AEW11176

SEQ ID NO: 181432 - RNA, 1410 nt, Artificial Sequence; identical to SEQ ID NO: 176798
  derived and/or modified CDS sequence (opt4) from neuraminidase__InfluenzaA__AEW11186

SEQ ID NO: 181433 - RNA, 1410 nt, Artificial Sequence; identical to SEQ ID NO: 177602
  derived and/or modified CDS sequence (opt4) from neuraminidase__InfluenzaA__AEW11196

SEQ ID NO: 181434 - RNA, 1410 nt, Artificial Sequence; identical to SEQ ID NO: 176798
  derived and/or modified CDS sequence (opt4) from neuraminidase__InfluenzaA__AEW11206

SEQ ID NO: 181435 - RNA, 1410 nt, Artificial Sequence; identical to SEQ ID NO: 176798
  derived and/or modified CDS sequence (opt4) from neuraminidase__InfluenzaA__AEW11216

SEQ ID NO: 181436 - RNA, 1410 nt, Artificial Sequence; identical to SEQ ID NO: 177506
  derived and/or modified CDS sequence (opt4) from neuraminidase__InfluenzaA__AEW11226

SEQ ID NO: 181437 - RNA, 1410 nt, Artificial Sequence; identical to SEQ ID NO: 176798
  derived and/or modified CDS sequence (opt4) from neuraminidase__InfluenzaA__AEW11236

SEQ ID NO: 181438 - RNA, 1410 nt, Artificial Sequence; identical to SEQ ID NO: 176798
  derived and/or modified CDS sequence (opt4) from neuraminidase__InfluenzaA__AEW11246

SEQ ID NO: 181439 - RNA, 1410 nt, Artificial Sequence; identical to SEQ ID NO: 177602
  derived and/or modified CDS sequence (opt4) from neuraminidase__InfluenzaA__AEW11255

SEQ ID NO: 181440 - RNA, 1410 nt, Artificial Sequence; identical to SEQ ID NO: 177602
  derived and/or modified CDS sequence (opt4) from neuraminidase__InfluenzaA__AEW11265

SEQ ID NO: 181441 - RNA, 1410 nt, Artificial Sequence; identical to SEQ ID NO: 176798
  derived and/or modified CDS sequence (opt4) from neuraminidase__InfluenzaA__AEW11275

SEQ ID NO: 181442 - RNA, 1410 nt, Artificial Sequence
  derived and/or modified CDS sequence (opt4) from neuraminidase__InfluenzaA__AEW11285
augaaccccaaccagaagaucaucaccaucggcagcgugugcaugaccaucggcauggccaaccugauccugcagaucggcaacaucaucagcaucuggaucagccacagcauccagcugggcaaccagaaccagaucgagaccugcaaccagagcgugaucaccuacgagaacaacaccugggugaaccagaccuacgugaacaucagcaacaccaacuucgccgccggccagagcguggugagcgugaagcuggccggcaacagcagccugugccccgugagcggcugggccaucuacagcaaggacaacagcgugagaaucggcagcaagggcgacguguucgugaucagagagcccuucaucagcugcagcccccuggagugcagaaccuucuuccugacccagggcgcccugcugaacgacaagcacagcaacggcaccaucaaggacagaagccccuacagaacccugaugagcugccccaucggcgaggugcccagccccuacaacagcagauucgagagcguggccuggagcgccagcgccugccacgacggcaucaacuggcugaccaucggcaucagcggccccgacaacggcgccguggccgugcugaaguacaacggcaucaucaccgacaccaucaagagcuggagaaacaacauccugagaacccaggagagcgagugcgccugcgugaacggcagcugcuucaccgugaugaccgacggccccagcaacggccaggccagcuacaagaucuucagaaucgagaagggcaagaucgugaagagcguggagaugaacgcccccaacuaccacuacgaggagugcagcugcuaccccgacagcagcgagaucaccugcgugugcagagacaacuggcacggcagcaacagacccugggugagcuucaaccagaaccuggaguaccagaucggcuacaucugcagcggcaucuucggcgacaaccccagacccaacgacaagaccggcagcugcggccccgugagcagcaacggcgccaacggcgugaagggcuucagcuucaaguacggcaacggcguguggaucggcagaaccaagagcaucagcagcagaaacggcuucgagaugaucugggaccccaacggcuggaccggcaccgacaacaacuucagcaucaagcaggacaucgugggcaucaacgaguggagcggcuacagcggcagcuucgugcagaaccccgagcugaccggccuggacugcaucagacccugcuucuggguggagcugaucagaggcagacccaaggagaacaccaucuggaccagcggcagcagcaucagcuucugcggcgugaacagcgacaccgugggcuggagcuggcccgacggcgccgagcugcccuucaccaucgacaaguga

SEQ ID NO: 181443 - RNA, 1410 nt, Artificial Sequence; identical to SEQ ID NO: 177602
  derived and/or modified CDS sequence (opt4) from neuraminidase__InfluenzaA__AEW11295

SEQ ID NO: 181444 - RNA, 1410 nt, Artificial Sequence; identical to SEQ ID NO: 176798
  derived and/or modified CDS sequence (opt4) from neuraminidase__InfluenzaA__AEW11305

SEQ ID NO: 181445 - RNA, 1410 nt, Artificial Sequence; identical to SEQ ID NO: 177602
  derived and/or modified CDS sequence (opt4) from neuraminidase__InfluenzaA__AEW11315

SEQ ID NO: 181446 - RNA, 1410 nt, Artificial Sequence; identical to SEQ ID NO: 176798
  derived and/or modified CDS sequence (opt4) from neuraminidase__InfluenzaA__AEW11325

SEQ ID NO: 181447 - RNA, 1410 nt, Artificial Sequence; identical to SEQ ID NO: 176798
  derived and/or modified CDS sequence (opt4) from neuraminidase__InfluenzaA__AEW25299

SEQ ID NO: 181448 - RNA, 1410 nt, Artificial Sequence; identical to SEQ ID NO: 176798
  derived and/or modified CDS sequence (opt4) from neuraminidase__InfluenzaA__AEW25308

SEQ ID NO: 181449 - RNA, 1410 nt, Artificial Sequence; identical to SEQ ID NO: 177871
  derived and/or modified CDS sequence (opt4) from neuraminidase__InfluenzaA__AEW25317

SEQ ID NO: 181450 - RNA, 1410 nt, Artificial Sequence; identical to SEQ ID NO: 176798
  derived and/or modified CDS sequence (opt4) from neuraminidase__InfluenzaA__AEW25324

SEQ ID NO: 181451 - RNA, 1410 nt, Artificial Sequence
  derived and/or modified CDS sequence (opt4) from neuraminidase__InfluenzaA__AEW25327
augaaccccaaccagaagaucaucaccaucggcagcgugugcaugaccaucggcauggccaaccugauccugcagaucggcaacaucaucagcaucuggaucagccacagcauccagcugggcaaccagaaccagaucgagaccugcaaccagagcgugaucaccuacgagaacaacaccugggugaaccagaccuacgugaacaucagcaacaccaacuucgccgccggccagagcguggugagcgugaagcuggccggcaacagcagccugugccccgugagcggcugggccaucuacagcaaggacaacagcaucagaaucggcagcaagggcgacguguucgugaucagagagcccuucaucagcugcagcccccuggagugcagaaccuucuuccugacccagggcgcccugcugaacgacaagcacagcaacggcaccaucaaggacagaagccccuacagaacccugaugagcugccccaucggcgaggugcccccccccuacaacagcagauucgagagcguggccuggagcgccagcgccugccacgacggcaucaacuggcugaccaucggcaucagcggccccgacaacggcgccguggccgugcugaaguacaacggcaucaucaccgacaccaucaagagcuggagaaacaacauccugagaacccaggagagcgagugcgccugcgugaacggcagcugcuucaccgugaugaccgacggccccagcgacggccaggccagcuacaagaucuucagaaucgagaagggcaagaucgugaagagcguggagaugaacgcccccaacuaccacugcgaggagugcagcugcuaccccgacagcagcgagaucaccugcgugugcagagacaacuggcacggcagcaacagacccugggugagcuucaaccagaaccuggaguaccagaucggcuacaucugcagcggcaucuucggcgacaaccccagacccaacgacaagaccggcagcugcggccccgugagcagcaacggcgccaacggcgugaagggcuucagcuucaaguacggcaacggcguguggaucggcagaaccaagagcaucagcagcagaaacggcuucgagaugaucugggaccccaacggcuggaccggcaccgacaacaacuucagcaucaagcaggacaucgugggcaucaacgaguggagcggcuacagcggcagcuucgugcagcaccccgagcugaccggccuggacugcaucagacccugcuucuggguggagcugaucagaggcagacccaaggagaacaccaucuggaccagcggcagcagcaucagcuucugcggcgugaacagcgacaccgugggcuggagcuggcccgacggcgccgagcugcccuucaccaucgacaaguga

SEQ ID NO: 181452 - RNA, 1410 nt, Artificial Sequence
  derived and/or modified CDS sequence (opt4) from neuraminidase__InfluenzaA__AEW25333
augaaccccaaccagaagaucaucaccaucggcagcgugugcaugaccaucggcauggccaaccugauccugcagaucggcaacaucaucagcaucuggaucagccacagcauccagcugggcaaccagaaccagaucgagaccugcaaccagagcgugaucaccuacgagaacaacaccugggugaaccacaccuacgugaacaucagcaacaccaacuucgccgccggccagagcguggugagcgugaagcuggccggcaacagcagccugugccccgugagcggcugggccaucuacagcaaggacaacagcaucagaaucggcagcaagggcgacguguucgugaucagagagcccuucaucagcugcagcccccuggagugcagaaccuucuuccugacccagggcgcccugcugaacgacaagcacagcaacggcaccaucaaggacagaagccccuacagaacccugaugagcugccccaucggcgaggugcccagccccuacaacagcagauucgagagcguggccuggagcgccagcgccugccacgacggcaucaacuggcugaccaucggcaucagcggccccgacaacggcgccguggccgugcugaaguacaacggcaucaucaccgacaccaucaagagcuggagaaacaacauccugagaacccaggagagcgagugcgccugcgugaacggcagcugcuucaccgugaugaccgacggccccagcgacggccaggccagcuacaagaucuucagaaucgagaagggcaagaucgugaagagcguggagaugaacgcccccaacuaccacuacgaggagugcagcugcuaccccgacagcagcgagaucaccugcgugugcagagacaacuggcacggcagcaacagacccugggugagcuucaaccagaaccuggaguaccagaucggcuacaucugcagcggcaucuucggcgacaaccccagacccaacgacaagaccggcagcugcggccccgugagcagcaacggcgccaacggcgugaagggcuucagcuucaaguacggcaacggcgugugggugggcagaaccaagagcaucagcagcagaaacggcuucgagaugaucugggaccccaacggcuggaccggcaccgacaacaacuucagcaucaagcaggacaucgugggcaucaacgaguggagcggcuacagcggcagcuucgugcagcaccccgagcugaccggccuggacugcaucagacacugcuucuggguggagcugaucagaggcagacccaaggagaacaccaucuggaccagcggcagcagcaucagcuucugcggcgugaacagcgacaccgugggcuggagcuggcccgacggcgccgagcugcccuucaccaucgacaaguga

SEQ ID NO: 181453 - RNA, 1410 nt, Artificial Sequence
  derived and/or modified CDS sequence (opt4) from neuraminidase__InfluenzaA__AEW25338
augaaccccaaccagaagaucaucaccaucggcagcgugugcauggccaucggcauggccaaccugauccugcagaucggcaacaucaucagcaucuggaucagccacagcauccagcugggcaaccagaaccagaucgagaccugcaaccagagcgugaucaccuacgagaacaacaccugggugaaccagaccuacgugaacaucagcaacaccaacuucgccgccggccagagcguggugagcgugaagcuggccggcaacagcagccugugccccgugagcggcugggccaucuacagcaaggacaacagcaucagaaucggcagcaagggcgacguguucgugaucagagagcccuucaucagcugcagcccccuggagugcagaaccuucuuccugacccagggcgcccugcugaacgacaagcacagcaacggcaccaucaaggacagaagccccuacagaacccugaugagcugccccaucggcgaggugcccagccccuacaacagcagauucgagagcguggccuggagcgccagcgccugccacgacggcaucaacuggcugaccaucggcaucagcggccccgacaacggcgccguggccgugcugaaguacaacggcaucaucaccgacaccaucaagagcuggagaaacaacauccugagaacccaggagagcgagugcgccugcgugaacggcagcugcuucaccgugaugaccgacggccccagcgacggccaggccagcuacaagaucuucagaaucgagaagggcaagaucgugaagagcguggagaugaacgcccccaacuaccacuacgaggagugcagcugcuaccccgacagcagcgagaucaccugcgugugcagagacaacuggcacggcagcaacagacccugggugagcuucaaccagaaccuggaguaccagaucggcuacaucagaagcggcaucuucggcgacaaccccagacccaacgacaagaccggcagcugcggccccgugagcagcaacggcgccaacggcgugaagggcuucagcuucaaguacggcaacggcguguggaucggcagaaccaagagcaucagcagcagaaacggcuucgagaugaucugggaccccaacggcuggaccggcaccgacaacaacuucagcaucaagcaggacaucgugggcaucaacgaguggagcggcuacagcggcagcuucgugcagcaccccgagcugaccggccuggacugcaucagacccugcuucuggguggagcugaucagaggcagacccaaggagaacaccaucuggaccagcggcagcagcaucagcuucugcggcgugaacagcgacaccgugggcuggagcuggcccgacggcgccgagcugcccuucaccaucgacaaguga

SEQ ID NO: 181454 - RNA, 1410 nt, Artificial Sequence
  derived and/or modified CDS sequence (opt4) from neuraminidase__InfluenzaA__AEW25343
augaaccccaaccagaagaucaucaccaucggcagcgugugcaugaccaucggcauggccaaccugauccugcagaucggcaacaucaucagcaucuggaucagccacagcauccagcugggcaaccagaaccagaucgagaccugcaaccagagcgugaucaccuacgagaacaacaccugggugaaccagaccuacgugaacaucagcaacaccaacuucgccgccggccagagcguggugagcgugaagcuggccggcaacagcagccugugccccgugagcggcugggccaucuacagcaaggacaacagcaucagaaucggcagcaagggcgacguguucgugaucagagagcccuucaucagcugcagcccccuggagugcagaaccuucuuccugacccagggcgcccugcugaacgacaagcacagcaacggcaccaucaaggacagaagccccuacagaacccugaugagcugccccaucggcgaggugcccagccccuacaacagcagaagcgagagcguggccuggagcgccagcgccugccacgacggcaucaacuggcugaccaucggcaucagcggccccgacaacggcgccguggccgugcugaaguacaacggcaucaucaccgacaccaucaagagcuggagaaacaacauccugagaacccaggagagcgugugcgccugcgugaacggcagcugcuucaccgugaugaccgacggccccagcgacggccaggccagcuacaagaucuucagaaucgagaagggcaagaucgugaagagcguggagaugaacgcccccaacuaccacuacgaggagugcagcugcuaccccgacagcagcgagaucaccugcgugugcagagacaacuggcacggcagcaacagacccugggugagcuucaaccagaaccuggaguaccagaucggcuacaucugcagcggcaucuucggcgacagccccagacccaacgacaagaccggcagcugcggccccgugagcagcaacggcgccaacggcgugaagggcuucagcuucaaguacggcaacggcguguggaucggcagaaccaagagcaucagcagcagaaacggcuucgagaugaucugggaccccaacggcuggaccggcaccgacaacaacuucagcaucaagcaggacaucgugggcaucaacgaguggagcggcuacagcggcagcuucgugcagcaccccgagcugaccggccuggacugcaucagacccugcuucuggguggagcugaucagaggcagacccaaggagaacaccaucuggaccagcggcagcagcaucagcuucugcggcgugaacagcgacaccgugggcuggagcuggcccgacggcgccgagcugcccuucaccaucgacaaguga

SEQ ID NO: 181455 - RNA, 1410 nt, Artificial Sequence
  derived and/or modified CDS sequence (opt4) from neuraminidase__InfluenzaA__AEW25351
augaaccccaaccagaagaucaucaccaucggcagcgugugcaugaccaucggcauggccaaccugauccugcagaucggcaacaucaucagcaucuggaucagccacagcauccagcugggcaaccagaaccagaucgagaccugcaaccagagcgugaucaccuacgagaacaacaccugggugaaccacaccuacgugaacaucagcaacaccaacuucgccgccggccagagcguggugagcgugaagcuggccggcaacagcagccugugccccgugagcggcugggccaucuacagcaaggacaacagcaucagaaucggcagcaagggcgacguguucgugaucagagagcccuucaucagcugcagcccccuggagugcagaaccuucuuccugacccagggcgcccugcugaacgacaagcacagcaacggcaccaucaacgacagaagccccuacagaacccugaugagcugccccaucggcgaggugcccagccccuacaacagcagauucgagagcguggccuggagcgccagcgccugccacgacggcaucaacuggcugaccaucggcaucagcggccccgacaacggcgccguggccgugcugaaguacaacggcaucaucaccgacaccaucaagagcuggagaaacaacauccugagaacccaggagagcgagugcgccugcgugaacggcagcugcuucaccgugaugaccgacggccccagcgacggccaggccagcuacaagaucuucagaaucgagaagggcaagaucgugaagagcguggagaugaacgcccccaacuaccacuacgaggagugcagcugcuaccccgacagcagcgagaucaccugcgugugcagagacaacuggcacggcagcaacagacccugggugagcuucaaccagaaccuggaguaccagaucggcuacaucugcagcggcaccuucggcgacaaccccagacccaacgacaagaccggcagcugcggccccgugagcagcaacggcgccaacggcgugaagggcuucagcuucaaguacggcaacggcguguggaucggcagaaccaagagcaucagcagcagaaacggcuucgagaugaucugggaccccaacggcuggaccggcaccgacaacaacuucagcaucaagcaggacaucgugggcaucaacgaguggagcggcuacagcggcagcuucgugcagcaccccgagcugaccggccuggacugcaucagacccugcuucuggguggagcugaucagaggcagacccaaggagaacaccaucuggaccagcggcagcagcaucagcuucugcggcgugaacagcgacaccgugggcuggagcuggcccgacggcgccgagcugcccuucaccaucgacaaguga

SEQ ID NO: 181456 - RNA, 1410 nt, Artificial Sequence
  derived and/or modified CDS sequence (opt4) from neuraminidase__InfluenzaA__AEW25358
augaaccccaaccagaagaucaucaccaucggcagcgugugcaugaccaucggcauggccaaccugauccugcagaucggcaacaucaucagcaucugggugagccacagcauccagcugggcaaccagaaccagaucgagaccugcaaccagagcgugaucaccuacgagaacaacaccugggugaaccagaccuacgugaacaucagcaacaccaacuucgccgccggccagagcguggugagcgugaagcuggccggcaacagcagccugugccccgugagcggcugggccaucuacagcaaggacaacagcaucagaaucggcagcaagggcgacguguucgugaucagagagcccuucaccagcugcagcccccuggagugcagaaccuucuuccugacccagggcgcccugcugaacgacaagcacagcaacggcaccaucaaggacagaagccccuacagaacccugaugagcugccccaucggcgaggugcccagccccuacaacagcagauucgagagcguggccuggagcgccagcgccugccacgacggcaucaacuggcugaccaucggcaucagcggccccgacaacggcgccguggccgugcugaaguacaacggcaucaucaccgacaccaucaagagcuggagaaacaacauccugagaacccaggagagcgagugcgccugcgugaacggcagcugcuucaccgugaugaccgacggccccagcgacggccaggccagcuacaagaucuucagaaucgagaagggcaagaucgugaagagcguggagaugaacgcccccaacuaccacuacgaggagugcagcugcuaccccgacagcagcgagaucaccugcgugugcagagacaacuggcacggcagcaacagacccugggugagcuucaaccagaaccuggaguaccagaucggcuacaucugcagcggcaucuucggcgacaaccccagacccaacgacaagaccggcagcugcggccccgugagcagcaacggcgccaacggcgugaagggcuucagcuucaaguacggcaacggcguguggaucggcagaaccaagagcaucagcagcagaaacggcuucgagaugaucugggaccccaacggcuggaccggcaccgacaacaacuucagcaucaagcaggacaucgugggcaucaacgaguggagcggcuacagcggcagcuucgugcagcaccccgagcugaccggccuggacugcaucagacccugcuucuggguggagcugaucagaggcagacccaaggagaacaccaucuggaccagcggcagcagcaucagcuucugcggcgugaacagcgacaccgugggcuggagcuggcccgacggcgccgagcugcccuucaccaucgugaaguga

SEQ ID NO: 181457 - RNA, 1410 nt, Artificial Sequence; identical to SEQ ID NO: 176798
  derived and/or modified CDS sequence (opt4) from neuraminidase__InfluenzaA__AEW25361

SEQ ID NO: 181458 - RNA, 1410 nt, Artificial Sequence
  derived and/or modified CDS sequence (opt4) from neuraminidase__InfluenzaA__AEW25379
augaaccccaaccagaagaucaucaccaucggcagcgugugcaugaccaucggcauggccaaccugauccugcagaucggcaacaucaucagcaucuggaccagccacagcauccagcugggcaaccagaaccagaucgagaccugcaaccagagcgugaucaccuacgagaacaacaccugggugaaccagaccuacgugaacaucagcaacaccaacuucgccgccggccagagcguggugagcgugaagcuggccggcaacagcagccugugccccgugagcggcugggccaucuacagcaaggacaacagcaucagaaucggcagcaagggcgacguguucgugaucagagagcccuucaucagcugcagcccccuggagugcagaaccuucuuccugacccagggcgcccugcugaacgacaagcacagcaacggcaccaucaaggacagaagccccuacagaacccugaugagcugccccaucggcgaggugcccagccccuacaacagcagauucgagagcguggccuggagcgccagcgccugccacgacggcaucaacuggcugaccaucggcaucagcggccccgacaacggcgccguggccgugcugaaguacaacggcaucaucaccgacaccaucaagagcuggagaaacaacauccugagaacccaggagagcgagugcgccugcgugaacggcagcugcuucaccgugaugaccgacggccccagcgacggccaggccagcuacaagaucuucagaaucgagaagggcaagaucgugaagagcguggagaugaacgcccccaacuaccacuacgaggagugcagcugcuaccccgacagcagcgaggugaccugcgugugcagagacaacuggcacggcagcaacagacccugggugagcuucaaccagaaccuggaguaccagaucggcuacaucugcagcggcaucuucggcgacaaccccagacccaacgacaagaccggcagcugcggccccgugagcagcgacggcgccaacggcgugaagggcuucagcuucaaguacggcaacggcguguggaucggcagaaccaagagcaucagcagcagaaacggcuucgagaugaucugggaccccaacggcuggaccggcaccgacaacaacuucagcaucaagcaggacaucgugggcaucaacgaguggagcggcuacagcggcagcuucgugcagcaccccgagcugaccggccuggacugcaucagacccugcuucuggguggagcugaucagaggcagacccaaggagaacaccaucuggaccagcggcagcagcaucagcuucugcggcgugaacagcgacaccgugggcuggagcuggcccgacggcgccgagcugcccuucaccaucgacaaguga

SEQ ID NO: 181459 - RNA, 1410 nt, Artificial Sequence
  derived and/or modified CDS sequence (opt4) from neuraminidase__InfluenzaA__AEW25387
augaaccccaaccagaagaucaucaccaucggcagcgugugcaugaccaucggcauggccaaccugauccugcagaucggcaacaucaucagcaucuggaucagccacagcauccagcugggcaaccagaaccagaucgagaccugcaaccagagcgugaucaccuacgagaacaacaccugggugaaccagaccuacgugaacaucagcaacaccaacuucgccgccggccagagcguggugagcgugaagcuggccggcaacagcagccugugccccgugagcggcugggccaucuacagcaaggacaacagcaucagaaucggcagcaagggcgacguguucgugaucagagagcccuucaucagcugcagcccccuggagugcagaaccuucuuccugacccagggcgcccugcugaacgacaagcacagcaacggcaccaucaaggacagaagccccuacagaacccugaugagcugccccaucggcgaggugcccagccccuacaacagcagauucgagagcguggccuggagcgccagcgccugccacgacggcaucaacuggcugaccaucggcaucagcggccccgacaacggcgccguggccgugcugaaguacaacggcaucaucaccgacaccaucaagagcuggagaaacaacauccugagaacccaggagagcgagugcgccugcguggacggcagcugcuucaccgugaugaccgacggccccagcgacggccaggccagcuacaagaucuucagaaucgagaagggcaagaucgugaagagcguggagaugaacgcccccaacuaccacuacgaggagugcagcugcuaccccgacagcagcgagaucaccugcgugugcagagacaacuggcacggcagcaacagacccugggugagcuucaaccagaaccuggaguaccagaucggcuacaucugcagcggcaucuucgaggacaaccccagacccaacgacaagaccggcagcugcggccccgugagcagcaacggcgccaacggcgugaagggcuucagcuucaaguacggcaacggcguguggaucggcagaaccaagagcaucagcagcagaaacggcuucgagaugaucugggaccccaacggcuggaccggcaccgacaacaacuucagcaucaagcaggacaucgugggcaucaacgaguggagcggcuacagcggcagcuucgugcagcaccccgagcugaccggccuggacugcaucagacccugcuucuggguggagcugaucagaggcagacccaaggagaacaccaucuggaccagcggcagcagcaucagcuucugcggcgugaacagcgacaccgugggcuggagcuggcccgacggcgccgagcugcccuucaccaucgacaaguga

SEQ ID NO: 181460 - RNA, 1410 nt, Artificial Sequence
  derived and/or modified CDS sequence (opt4) from neuraminidase__InfluenzaA__AEW25392
augaaccccaaccagaagaucaucaccaucggcagcgugugcaugaccaucggcauggccaaccugauccugcagaucggcaacaucaucagcaucuggaucagccacagcauccagcugggcaaccagaaccagaucgagaccugcaaccagagcgugaucaccuacgagaacaacaccugggugaaccagaccuacgugaacaucagcaacaccaacuucgccgccggccagagcguggugagcgugaagcuggccggcaacagcagccugugccccgugagcggcugggccaucuacagcaaggacaacagcaucagaaucggcagcaagggcgacguguucgugaucagagagcccuucaucagcugcagcccccuggagugcagaaccuucuuccugacccagggcgcccugcugaacgacaagcacagcaacggcaccaucaaggacagaagccccuacagaacccugaugagcugccccaucggcgaggugcccagccccuacaacagcagauucgagagcguggccuggagcgccagcgccugccacgacggcaucaacuggcugaccaucggcaucagcggccccgacaacggcgccguggccgugcugaaguacaacggcaucaucaccgacaccaucaagagcuggagaaacaacauccugagaacccaggagagcgagugcgccugcgugaacggcagcugcuucaccgugaugaccgacggccccagcgacggccaggccagcuacaagaucuucagaaucgagaagggcaagaucgugaagagcguggagaugaacgcccccaacuaccacuacgaggagugcagcugcuaccccgacagcagcgagaucaccugcgugugcagagacaacuggcacggcagcaacagacccugggugagcuucaaccagaaccuggaguaccagaucggcuacaucugcagcggcaucuucggcgacaaccccagacccaacgacaagaccggcagcugcggccccgugagcagcaacggcgccaacggcgugaagggcuucagcuucaaguacggcaacggcguguggaucggcagaaccaagagcaucagcagcagaaacggcuucgagaugaucugggaccccaacggcuggaccggcaccgacaacaacuucagcaucaagcacgacaucgugggcaucaacgaguggagcggcuacagcggcagcuucgugcagcaccccgagcugaccggccuggacugcaucagacccugcuucuggguggagcugaucagaggcagacccaaggagaacaccaucuggaccagcggcagcagcaucagcuucugcggcgugaacagcgacaccgugggcuggagcuggcccgacggcgccgagcugcccuucaccaucgacaaguga

SEQ ID NO: 181461 - RNA, 1410 nt, Artificial Sequence
  derived and/or modified CDS sequence (opt4) from neuraminidase__InfluenzaA__AEW25397
augaaccccaaccagaagaucaucaccaucggcagcgugugcaugaccaucggcauggccaaccugauccugcagaucggcaacaucaucagcaucuggaucagccacagcauccagcugggcaaccagaaccagaucgagaccugcaaccagagcgugaucaccuacgagaacaacaccugggugaaccagaccuacgugaacaucagcaacaccaacuucgccgccggccagagcguggugagcgugaagcuggccggcaacagcagccugugccccgugagcggcugggccaucuacagcaaggacaacagcaucagaaucggcagcaagggcgacguguucgugaucagagagcccuucaucagcugcagcccccuggagugcagaaccuucuuccugacccagggcgcccugcugaacgacaagcacagcaacggcaccaucaaggacagaagccccuacagaacccugaugagcugccccaucggcgaggugcccagccccuacaacagcagauucgagcccguggccuggagcgccagcgccugccacgacggcaucaacuggcugaccaucggcaucagcggccccgacaacggcgccguggccgugcugaaguacaacggcaucaucaccgacaccaucaagagcuggagaaacaacauccugagaacccaggagagcgagugcgccugcgugaacggcagcugcuucaccgugaugaccgacggccccagcgacggccaggccagcuacaagaucuucagaaucgagaagggcaagaucgugaagagcguggagaugaacgcccccaacuaccacuacgaggagugcagcugcuaccccgacagcagcgagaucaccugcgugugcagagacaacuggcacggcagcaacagacccugggugagcuucaaccagaaccuggaguaccagaucggcuacaucugcagcggcaucuucggcgacagccccagacccaacgacaagaccggcagcugcggccccgugagcagcaacggcgccaacggcgugaagggcuucagcuucaaguacggcaacggcguguggaucggcagaaccaagagcaucagcagcagaaacggcuucgagaugaucugggaccccaacggcuggaccggcaccgacaacaacuucagcaucaagcaggacaucgugggcaucaacgaguggagcggcuacagcggcagcuucgugcagcaccccgagcugaccggccuggacugcaucagacccugcuucuggguggagcugaucagaggcagacccaaggagaacaccaucuggaccagcggcagcagcaucagcuucugcggcgugaacagcgacaacgugggcuggagcuggcccgacggcgccgagcugcccuucaccaucgacaaguga

SEQ ID NO: 181462 - RNA, 1410 nt, Artificial Sequence; identical to SEQ ID NO: 176798
  derived and/or modified CDS sequence (opt4) from neuraminidase__InfluenzaA__AEW25402

SEQ ID NO: 181463 - RNA, 1410 nt, Artificial Sequence; identical to SEQ ID NO: 176798
  derived and/or modified CDS sequence (opt4) from neuraminidase__InfluenzaA__AEW25407

SEQ ID NO: 181464 - RNA, 1410 nt, Artificial Sequence
  derived and/or modified CDS sequence (opt4) from neuraminidase__InfluenzaA__AEW25418
augaaccccaaccagaagaucaucaccaucggcagcgugugcaugaccaucggcauggccaaccugauccugcagaucggcaacaucaucagcaucuggaucagccacagcauccagcugggcaaccagaaccagaucgagaccugcaaccagagcgugaucaccuacgagaacaacaccugggugaaccacaccuacgugaacaucagcaacaccaacuucgccgccggccagagcguggugagcgugaagcuggccggcaacagcagccugugccccgugagcggcugggccaucuacagcaaggacaacagcaucagaaucggcagcaagggcgacguguucgugaucagagagcccuucaucagcugcagcccccuggagugcagaaccuucuuccugacccagggcgcccugcugaacgacaagcacagcaacggcaccaucaaggacagaagccccuacagaacccugaugagcugccccaucggcgaggugcccagccccuacaacagcagauucgagagcguggccuggagcgccagcgccugccacgacggcaucaacuggcugaccaucggcaucagcggccccgacaacggcgccguggccgugcugaaguacaacggcaucaucaccgacaccaucaagagcuggagaaacaacauccugagaacccaggagagcgagugcgccugcgugaacggcagcugcuucaccgugaugaccgacggccccagcgacggccaggccagcuacaagaucuucagaaucggcaagggcaagaucgugaagagcguggagaugaacgcccccaacuaccacuacgaggagugcagcugcuaccccgacagcagcgagaucaccugcgugugcagagacaacuggcacggcagcaacagacccugggugagcuucaaccagaaccuggaguaccagaucggcuacaucugcagcggcaucuucggcgacaaccccagacccaacgacaagaccggcagcugcggccccgugagcagcaacggcgagaacggcgugaagggcuucagcuucaaguacggcaacggcguguggaucggcagaaccaagagcaucagcagcagaaacggcuucgagaugaucugggaccccaacggcuggaccggcaccgacaacaacuucagcaucaagcaggacaucgugggcaucaacgaguggagcggcuacagcggcagcuucgugcagcaccccgagcugaccggccuggacugcaucagacccugcuucuggguggagcugaucagaggcagacccaaggagaacaccaucuggaccagcggcagcagcaucagcuucugcggcgugaacagcgacaccgugggcugguucuggcccgacggcgccgagcugcccuucaccaucgacaaguga

SEQ ID NO: 181465 - RNA, 1410 nt, Artificial Sequence
  derived and/or modified CDS sequence (opt4) from neuraminidase__InfluenzaA__AEW25423
augaaccccaaccagaagaucaucaccaucggcagcgugugcaugaccaucggcauggccaaccugauccugcagaucggcaacaucaucagcaucuggaucagcaacagcauccagcugggcaaccagaaccagaucgagaccugcaaccagagcgugaucaccuacgagaacaacaccugggugaaccagaccuacgugaacaucagcaacaccaacuucgccgccggccagagcguggugagcgugaagcuggccggcaacagcagccugugccccgugagcggcugggccaucuacagcaaggacaacagcaucagaaucggcagcaagggcgacguguucgugaucagagagcccuucaucagcugcagcccccuggagugcagaaccuucuuccugacccagggcgcccugcugaacgacaagcacagcaacggcaccaucaaggacagaagccccuacagaacccugaugagcugccccaucggcgaggugcccagccccuacaacagcagauucgagagcguggccuggagcgccagcgccugccacgacggcaucaacuggcugaccaucggcaucagcggccccgacaacggcgccguggccgugcugaaguacaacggcaucaucaccgacaccaucaagagcuggagaaacaacauccugagaacccaggagagcgagugcgccugcgugaacggcagcugcuucaccgugaugaccgacggccccagcgacggccaggccagcuacaagaucuucagaaucgagaagggcaagaucgugaagagcguggagaugaacgcccccaacuaccacuacgaggagugcagcugcuaccccgacagcagcgagaucaccugcgugugcagagacaacuggcacggcagcaacagacccugggugagcuucaaccagaaccuggaguaccagaucggcuacaucugcagcggcaucuucggcgacaaccccagacccaacgacaagaccggcagcugcggccccgugagcagcaacggcgccaacggcgugaagggcuucagcuucaaguacggcaacggcguguggaucggcagaaccaagagcaucagcagcagaaacggcuucgagaugaucugggaccccaacggcuggaccggcaccgacaacaacuucagcaucaagcaggacaucgugggcaucaacgaguggagcggcuacagcggcagcuucgugcagcaccccgagcugaccggccuggacugcaucagacccugcuucuggguggagcugaucagaggcagacccaaggagaacaccaucuggaccagcggcagcagcaucagcuucugcggcgugaacagcgacaccgugggcuggagcuggcccgacggcgccgagcugcccuucaccaucgacaaguga

SEQ ID NO: 181466 - RNA, 1410 nt, Artificial Sequence; identical to SEQ ID NO: 176798
  derived and/or modified CDS sequence (opt4) from neuraminidase__InfluenzaA__AEW25426

SEQ ID NO: 181467 - RNA, 1410 nt, Artificial Sequence
  derived and/or modified CDS sequence (opt4) from neuraminidase__InfluenzaA__AEW25432
augaaccccaaccagaagaucaucaccaucggcagcgugugcaugaccaucggcauggccaaccugauccugcagaucggcaacaucaucagcaucuggaccagccacagcauccagcugggcaaccagaaccagaucgagaccugcaaccagagcgugaucaccuacgagaacaacaccugggugaaccagaccuacgugaacaucagcaacaccaacuucgccgccggccagagcguggugagcgugaagcuggccggcaacagcagccugugccccgugagcggcugggccaucuacagcaaggacaacagcaucagaaucggcagcaagggcgacguguucgugaucagagagcccuucaucagcugcagcccccuggagugcagaaccuucuuccugacccagggcgcccugcugaacgacaagcacagcaacggcaccaucaaggacagaagccccuacagaacccugaugagcugccccaucggcgaggugcccagccccuacaacagcagauucgagagcguggccuggagcgccagcgccugccacgacggcaucaacuggcugaccaucggcaucagcggccccgacaacggcgccguggccgugcugaaguacaacggcaucaucaccgacaccaucaagagcuggagaaacaacauccugagaacccaggagagcgagugcgccugcgugaacggcagcugcuucaccgugaugaccgacggccccagcgacggccaggccagcuacaagaucuucagaaucgagaagggcaagaucgugaagagcguggagaugaacgcccccaacuaccacuacgaggagugcagcugcuaccccgacagcagcgagaucaccugcgugugcagagacaacuggcacggcagcaacagacccugggugagcuucaaccagaaccuggaguaccagaucggcuacaucugcagcggcaucuucggcgacaaccccagacccaacgacaagaccggcagcugcggccccgugagcagcaacggcgccaacggcgugaagggcuucagcuucaaguacggcaacggcguguggaucggcagaaccaagagcaucagcagcagaaacggcuucgagaugaucugggaccccaacggcuggaccggcaccgacaacaacagcagcaucaagcaggacaucgugggcaucaacgaguggagcggcuacagcggcagcuucgugcagcaccccgagcugaccggccuggacugcaucagacccugcuucuggguggagcugaucagaggcagacccaaggagaacaccaucuggaccagcggcagcagcaucagcuucugcggcaucaacagcgacgccgugggcuggagcuggcccgacggcgccgagcugcccuucaccaucgacaaguga

SEQ ID NO: 181468 - RNA, 1410 nt, Artificial Sequence
  derived and/or modified CDS sequence (opt4) from neuraminidase__InfluenzaA__AEW25436
augaaccccaaccagaagaucaucaccaucggcagcgugugcaugaccaucggcauggccaaccugauccugcagaucggcaacaucaucagcaucuggaucagccacagcauccagcugggcaaccagaaccagaucgagaccugcaaccagagcaucaucaccuacgagaacaacaccugggugaaccagaccuacgugaacaucagcaacaccaacuucgccgccggccagagcguggugagcgugaagcuggccggcaacagcagccugugccccgugagcggcugggccaucuacagcaaggacaacagcaucagaaucggcagcaagggcgacguguucgugaucagagagcccuucaucagcugcagcccccuggagugcagaaccuucuuccugacccagggcgcccugcugaacgacaagcacagcaacggcaccaucaaggacagaagccccuacagaacccugaugagcugccccaucggcgaggugcccagccccuacaacagcagauucgagagcguggccuggagcgccagcgccugccacgacggcaucaacuggcugaccaucggcaucagcggccccgacaacggcgccguggccgugcugaaguacaacggcaucaucaccgacaccaucaagagcuggagaaacaacauccugagaacccaggagagcgagugcgccugcgugaacggcagcugcuucaccgugaugaccgacggccccagcgacggccaggccagcuacaagaucuucagaaucgagaagggcaagaucgugaagagcguggagaugaacgcccccaacuaccacuacgaggagugcagcugcuaccccgacagcagcgagaucaccugcgugugcagagacaacuggcacggcagcaacagacccugggugagcuucaaccagaaccuggaguacagaaucggcuacaucugcagcggcaucuucggcgacaaccccagacccaacgacaagaccggcagcugcggccccgugagcagcaacggcgccaacggcgugaagggcuucagcuucaaguacggcaacggcguguggaucggcagaaccaagagcaucagcagcagaaacggcuucgagaugaucugggaccccaacggcuggaccggcaccgacaacaacuucagcaucaagcaggacaucgugggcaccaacgaguggagcggcuacagcggcagcuucgugcagcaccccgagcugaccggccuggacugcaucagacccugcuucuggguggagcugaucagaggcagacccaaggagaacaccaucuggaccagcggcagcagcaucagcuucugcggcgugaacagcgacaccaugggcuggagcuggcccgacggcgccgagcugcccuucaccaucgacaaguga

SEQ ID NO: 181469 - RNA, 1410 nt, Artificial Sequence; identical to SEQ ID NO: 176798
  derived and/or modified CDS sequence (opt4) from neuraminidase__InfluenzaA__AEW25440

SEQ ID NO: 181470 - RNA, 1410 nt, Artificial Sequence
  derived and/or modified CDS sequence (opt4) from neuraminidase__InfluenzaA__AEW25448
augaaccccaaccagaagaucaucaccaucggcagcgugugcaugaccaucggcauggccaaccugauccugcagaucggcaacaucaucagcaucuggaucagccacagcauccagcugggcaaccagaaccagaucgagaccugcaaccagagcgugaucaccuacgagaacaacaccugggugaaccagaccuacgugaacaucagcaacaccaacuucgccgccggccagagcguggugagcgugaagcuggccggcaacagcagccugugccccgugagcggcugggccaucuacagcaaggacaacagcaucagaaucggcagcaagggcgacguguucgugaucagagagcccuucaucagcugcagcccccuggagugcagaaccuucuuccugacccagggcgcccugcugaacgacaagcacagcaacggcaccaucaaggacagaagccccuacagaacccugaugagcugccccaucggcgaggugcccagccccuacaacagcagauucgagagcguggccuggagcgccagcgccugccacgacggcaucaacuggcugaccaucggcaucagcggccccgacaacggcgccguggccgugcugaaguacaacggcaucaucaccgacaccaucaagagcuggagaaacaacauccugagaacccaggagagcgagugcgccugcgugaacggcagcugcuucaccgugaugaccgacggccccagcgacggccaggccagcuacaagaucuucagaaucgagaagggcaagaucgugaagagcguggagaugaacgcccccaacuaccacuacgaggagugcagcugcuaccccgacagcagcgagaucaccugcgugugcagagacaacuggcacggcagcaacagacccugggugagcuucaaccagaaccuggaguaccagaucggcuacaucugcagcggcaucuucggcgacaaccccagacccaacgacaagaccggcagcugcggccccgugagcagcaacggcgccaacggcgugaagggcuucagcuucaaguacggcaacggcguguggaucggcagaaccaagagcaucagcagcagaaacggcuucgagaugaucugggaccccaacggcuggaccggcaccgacaacaacuucagcaucaagcaggacaucgugggcaucaacgaguggagcggcuacagcggcagcuucgugcagcaccccgagcugaccggccuggacugcaucagacccugcuucuggguggagcugaucagaggcagacccaaggagaacaccaucuggaccagcggcagcagcaucagcuucugcggcgugaacagcgacaccgugggcuggagcuggcccgacggcgccgagcugcccuucaccaccgacaaguga

SEQ ID NO: 181471 - RNA, 1410 nt, Artificial Sequence; identical to SEQ ID NO: 176798
  derived and/or modified CDS sequence (opt4) from neuraminidase__InfluenzaA__AEW25456

SEQ ID NO: 181472 - RNA, 1410 nt, Artificial Sequence
  derived and/or modified CDS sequence (opt4) from neuraminidase__InfluenzaA__AEW25464
augaaccccaaccagaagaucaucaccaucggcagcgugugcaugaccaucggcauggccaaccugauccugcagaucggcaacaucaucagcaucuggaucagccacagcauccagcugggcaaccagaaccagaucgagaccugcaaccagagcgugaucaccuacgagaacaacaccugggugaaccagaccuacgugaacaucagcaacaccaacuucgccgccggccagagcguggugagcgugaagcuggccggcaacagcagccugugccccgugagcggcugggccaucuacagcaaggacaacagcaucagaaucggcagcaagggcgacguguucgugaucagagagcccuucaucagcugcagcccccuggagugcagaaccuucuuccugacccagggcgcccugcugaacgacaagcacagcaacggcaccaucaaggacagaagccccuacagaacccugaugagcugccccaucggcgaggugcccagccccuacaacagcagauucgagagcguggccuggagcgccagcgccugccacgacggcaucaacuggcugaccaucggcaucagcggccccgacaacggcgccguggccgugcugaaguacaacggcaucaucaccgacaccaucaagagcuggagaaacaacauccugagaacccaggagagcgagugcgccugcgugaacggcagcugcuucaccgugaugaccgacggccccagcgacggccaggccagcuacaagaucuucagaaucgagaagggcaagaucgugaagagcguggagcugaacgcccccaacuaccacuacgaggagugcagcugcuaccccgacagcagcgagaucaccugcgugugcagagacaacuggcacggcagcaacagacccugggugagcuucaaccagaaccuggaguaccagaucggcuacaucugcagcggcaucuucggcgacaaccccagacccaacgacaagaccggcagcugcggccccgugagcagcaacggcgccaacggcgugaagggcuucagcuucaaguacggcaacggcguguggaucggcagaaccaagagcaucagcagcagaaacggcuucgagaugaucugggaccccaacggcuggaccggcaccgacaacaacuucagcaucaagcaggacaucgugggcaucaacgaguggagcggcuacagcggcagcuucgugcagcaccccgagcugaccggccuggacugcaucagacccugcuucuggguggagcugaucagaggcagacccaaggagaacaccaucuggaccagcggcagcagcaucagcuucugcggcgugaacagcgacaccgugggcuggagcuggcccgacggcgccgagcugcccuucaccaucgacaaguga

SEQ ID NO: 181473 - RNA, 1410 nt, Artificial Sequence
  derived and/or modified CDS sequence (opt4) from neuraminidase__InfluenzaA__AEW25474
augaaccccaaccagaagaucaucaccaucggcagcgugugcaugaccaucggcauggccaaccugauccugcagaucggcaacaucaucagcaucuggaucagccacagcauccagcugggcaaccagaaccagaucgagaccugcaaccagagcgugaucaccuacgagaacaacaccugggugaaccagaccuacgugaacaucagcaacaccaacuucgccgccggccagagcguggugagcgugaagcuggccggcaacagcagccugugccccgugagcggcugggccaucuacagcaaggacaacagcaucagaaucggcagcaagggcgacguguucgugaucagagagcccuucaucagcugcagcccccuggagugcagaaccuucuuccugacccagggcgcccugcugaacgacaagcacagcaacggcaccaucaaggacagaagccccuacagaacccugaugagcugccccaucggcgaggugcccagccccuacaacagcagauucgagagcguggccuggagcgccagcgccugccacgacggcaucaacuggcugaccaucggcaucagcggccccgacaacggcgccguggccgugcugaaguacaacggcaucaucaccgacaccaucaagagcuggagaaacaacauccugagaacccaggagagcgagugcgccugcgugaacggcagcugcuucaccgugaugaccgacggccccagcgacggccaggccagcuacaagaucuucagaaucgagaagggcaagaucgugaagagcguggagaugaacgcccccaacuaccacuacgaggagugcagcugcuaccccgacagcagcgagaucaccugcgugugcagagacaacuggcacggcagcaacagacccugggugagcuucaaccagaaccuggaguaccagaucggcuacaucugcagcggcaucuucggcgacaaccccagacccaacgacaagaccggcagcugcggccccgugagcagcaacggcgccaacggcgugaagggcuucagcuucaaguacggcaacggcguguggaucggcagaaccaagagcaucagcagcagaaacggcuucgagaugaucugggaccccaacggcuggaccggcaccgacaacaacuucagcaucaagcaggacaucgugggcaucaacgaguggagcggcuacagcggcagcuucgugcagcaccccgagcugaccggccuggacugcaucagacccugcuucuggguggagcugaucagaggcagacccaaggagaacaccaucuggaccagcggcagcagcaucagcuucugcggcgugaacagcgacaccgugggcuggagcuggcccgacggcgccgagcugcccagcaccaucgacaaguga

SEQ ID NO: 181474 - RNA, 1410 nt, Artificial Sequence
  derived and/or modified CDS sequence (opt4) from neuraminidase__InfluenzaA__AEW25484
augaaccccaaccagaagaucaucaccaucggcagcgugugcaugaccaucggcauggccaaccugauccugcagaucggcaacaucaucagcaucuggaucagccacagcauccagcugggcaaccagaaccagaucgagaccugcaaccagagcgugaucaccuacgagaacaacaccuggaucaaccagaccuacgugaacaucagcaacaccaacuucgccgccggccagagcguggugagcgugaagcuggccggcaacagcagccugugccccgugagcggcugggccaucuacagcaaggacaacagcaucagaaucggcagcaagggcgacguguucgugaucagagagcccuucaucagcugcagccaccuggagugcagaaccuucuuccugacccagggcgcccugcugaacgacaagcacagcaacggcaccaucaaggacagaagccccuacagaacccugaugagcugccccaucggcgaggugcccagccccuacaacagcagauucgagagcguggccuggagcgccagcgccugccacgacggcaucaacuggcugaccaucggcaucagcggccccgaccacggcgccguggccgugcugaaguacaacggcaucaucaccgacaccaucaagagcuggagaaacaacauccugagaacccaggagagcgagugcgccugcgugaacggcagcugcuucaccgugaugaccgacggccccagcgacggccaggccagcuacaagaucuucagaaucgagaagggcaagaucgugaagagcguggagaugaacgcccccaacuaccacuacgaggagugcagcugcuaccccgacagcagcgagaucaccugcgugugcagagacaacuggcacggcagcaacagacccugggugagcuucaaccagaaccuggaguaccagaucggcuacaucugcagcggcaucuucggcgacaaccccagacccaacgacaagaccggcagcugcggccccgugagcagcaacggcgccaacggcgugaagggcuucagcuucaaguacggcaacggcguguggaucggcagaaccaagagcaucagcagcagaaacggcuucgagaugaucugggaccccaacggcuggaccggcaccgacaacaacuucagcaucaagcaggacaucgugggcaucaacgaguggagcggcuacagcggcagcuucgugcagcaccccgagcugaccggccuggacugcaucagacccugcuucuggguggagcugaucagaggcagacccaaggagaacaccaucuggaccagcggcagcagcaucagcuucugcggcgugaacagcgacaccgugggcuggagcuggcccgacggcgccgagcugcccuucaccaucgacaaguga

SEQ ID NO: 181475 - RNA, 1410 nt, Artificial Sequence
  derived and/or modified CDS sequence (opt4) from neuraminidase__InfluenzaA__AEW25494
augaaccccaaccagaagaucaucaccaucggcagcgugugcaugaccaucggcauggccaaccugauccugcagaucggcaacaucaucagcaucuggaucagccacagcauccagcugggcaaccagaaccagaucgagaccugcaaccagagcgugaucaccuacgagaacaacaccugggugaaccagaccuacgugaacaucagcaacaccaacuucgccgccggccagagcguggugagcgugaagcuggccggcaacagcagccugugccccgugagcggcugggccaucuacagcaaggacaacagcaucagaaucggcagcaagggcgacguguucgugaucagagagcccuucaucagcugcagcccccuggagugcagaaccuucuuccugacccagggcgcccugcugaacgacaagcacagcaacggcaccaucaaggacagaagccccuacagaacccugaugagcugccccaucggcgaggugcccagccccuacaacagcagauucgagagcguggccuggagcgccagcgccugccacgacggcaucaacuggcugaccaucggcaucagcggccccgacaacggcgccguggccgugcugaaguacaacggcaucaucaccgacagcaucaagagcuggagaaacaacauccugagaacccaggagagcgagugcgccugcgugaacggcagcugcuucaccgugaugaccgacggccccagcgacggccaggccagcuacaagaucuucagaaucgagaagggcaagaucgugaagagcguggagaugaacgcccccaacuaccacuacgaggagugcagcugcuaccccgacagcagcgagaucaccugcgugugcagagacaacuggcacggcagcaacagacccugggugagcuucaaccagaaccuggaguaccagaucggcuacaucugcagcggcaccuucggcgacaaccccagacccaacgacaagaccggcagcugcggccccgugagcagcaacggcgccaacggcgugaagggcuucagcuucaaguacggcaacggcguguggaucggcagaaccaagagcaucagcagcagaaacggcuucgagaugaucugggaccccaacggcuggaccggcaccgacaacaacuucagcaucaagcaggacaucgugggcaucaacgaguggagcggcuacagcggcagcuucgugcagcaccccgagcugaccggccuggacugcaucagacccugcuucuggguggagcugaucagaggcagacccaaggagaacaccaucuggaccagcggcagcagcaucagcuucugcggcgugaacagcgacaccgugggcuggagcuggcccgacggcgccgagcugcccuucaccaucgacaaguga

SEQ ID NO: 181476 - RNA, 1410 nt, Artificial Sequence
  derived and/or modified CDS sequence (opt4) from neuraminidase__InfluenzaA__AEW25503
augaaccccaaccagaagaucaucaccaucggcagcgugugcaugaccaucggcauggccaaccugauccugcagaucggcaacaucaucagcaucuggaucagccacagcauccagcugggcaaccagaaccagaucgagaccugcaaccagagcgugaucaccuacgagaacaacaccugggugaaccagaccuacgugaacaucagcaacaccaacuucgccgccggccagagcguggugagcgugaagcuggccggcaacagcagccugugccccgugagcggcugggccaucuacagcaaggacaacagcaucagaaucggcagcaagggcgacguguucgugaucagagagcccuucaucagcugcagcccccuggagugcagaaccuucuuccugacccagggcgcccugcugaacgacaagcacagcaacggcaccaucaaggacagaagccccuacagaacccugaugagcugccccaucggcgaggugcccagccccuacaacagcagauucgagagcguggccuggagcgccagcgccugccacgacggcaucaacuggcugaccaucggcaucagcggccccgacaacggcgccguggccgugcugaaguacaacggcaucaucaccgacaccaucaagagcuggagaaacaacauccugagaacccaggagagcgagugcgccugcgugaacggcagcugcuucaccgugaugaccgacggccccagcgacggccaggccagcuacaagaucuucagaaucgagaagggcaagaucgugaagagcguggagaugaacgcccccaacuaccacuacgaggagugcagcugcuaccccgacagcagcgagaucaccugcgugugcagagacaacuggcacggcagcaacagacccugggugagcuucaaccagaaccuggaguaccagaucggcuacaucugcagcggcaucuucggcgacaaccccagacccaacgacaagaccggcagcugcggccccgugagcagcaacggcgccaacggcgugaagggcuucagcuucaaguacggcaacggcgccuggaucggcagaaccaagagcaucagcagcagaaacggcuucgagaugaucugggaccccaacggcuggaccggcaccgacaacaacuucagcaucaagcaggacaucgugggcaucaacgaguggagcggcuacagcggcagcuucgugcagcaccccgagcugaccggccuggacugcaucagacccugcuucuggguggagcugaucagaggcagacccaaggagaacaccaucuggaccagcggcagcagcaucagcuucugcggcgugaacagcgacaccgugggcuggagcuggcccgacggcgccgagcugcccuucaccaucgacaaguga

SEQ ID NO: 181477 - RNA, 1410 nt, Artificial Sequence
  derived and/or modified CDS sequence (opt4) from neuraminidase__InfluenzaA__AEW25511
augaaccccaaccagaagaucaucaccaucggcagcgugugcaugaccaucggcauggccaaccugauccugcagaucggcaacaucaucagcaucuggaucagccacagcauccagcugggcaaccagaaccagaucgagaccugcaaccagagcgugaucaccuacgagaacaacaccugggugaaccacaccuacgugaacaucagcaacaccaacuucgccgccggccagagcguggugagcgugaagcuggccggcaacagcagccugugccccgugagcggcugggccaucuacagcaaggacaacagcaucagaaucggcagcaagggcgugguguucgugaucagagagcccuucaucagcugcagcccccuggagugcagaaccuucuuccugacccagggcgcccugcugaacgacaagcacagcaacggcaccaucaaggacagaagccccuacagaacccugaugagcugccccaucggcgaggugcccagccccuacaacagcagauucgagagcguggccuggagcgccagcgccugccacgacggcaucaacuggcugaccaucggcaucagcggccccgacaacggcgccguggccgugcugaaguacaacggcaucaucaccgacaccaucaagagcuggagaaacaacauccugagaacccaggagagcgagugcgccugcgugaacggcagcugcuucaccgugaugaccgacggccccagcgacggccaggccagcuacaagaucuucagaaucgagaagggcaagaucgugaagagcguggagaugaacgcccccaacuaccacuacgaggagugcagcugcuaccccgacagcagcgagaucaccugcgugugcagagacaacuggcacggcagcaacagacccugggugagcuucaaccagaaccuggaguaccagaucggcuacaucugcagcggcaucuucggcgacaaccccagacccaacgacaagaccggcagcugcggccccgugagcagcaacggcgccaacggcgugaagggcuucagcuucaaguacggcaacggcguguggaucggcagaaccaagagcaucagcagcagaaacggcuucgagaugaucugggaccccaacggcuggaccggcaccgacaacaacuucagcaucaagcaggacaucgugggcaucaacgaguggagcggcuacagcggcagcuucgugcagcaccccgagcugaccggccuggacugcaucagacccugcuucuggguggagcugaucagaggcagacccaaggagaacaccaucuggaccagcggcagcagcaucagcuucugcggcgugaacagcgacaccgugggcuggagcuggcccgacggcgccgagcugcccuucaccaucgacaaguga

SEQ ID NO: 181478 - RNA, 1410 nt, Artificial Sequence
  derived and/or modified CDS sequence (opt4) from neuraminidase__InfluenzaA__AEW25530
augaaccccaaccagaagaucaucaccaucggcagcgugugcaugaccaucggcauggccaaccugauccugcagaucggcaacaucaucagcaucuggaucagccacagcauccagcugggcaaccagaaccagaucgagaccugcaaccagagcgugaucaccuacgagaacaacaccugggugaaccacaccuacgugaacaucagcaacaccaacuucgccgccggccagagcguggugagcgugaagcuggccggcaacagcagccugugccccgugagcggcugggccaucuacagcaaggacaacagcaucagaaucggcagcaagggcgacguguucgugaucagagagcccuucaucagcugcagcccccuggagugcagaaccuucuuccugacccagggcgcccugcugaacgacaagcacagcaacggcaccaucaaggacagaagccccuacagaacccugaugagcugccccaucggcgaggugcccagccccuacaacagcagauucgagagcguggccuggagcgccagcgccugccacgacggcaucaacuggcugaccaucggcaucagcggccccgacaacggcgccguggccgugcugaaguacaacggcaucaucaccgacaccaucaagagcuggagauacaacauccugagaacccaggagagcgagugcgccugcgugaacggcagcugcuucaccgugaugaccgacggccccagcgacggccaggccagcuacaagaucuucagaaucgagaagggcaagaucgugaagagcguggagaugaacgcccccaacuaccacuacgaggagugcagcugcuaccccgacagcagcgagaucaccugcgugugcagagacaacuggcacggcagcaacagacccugggugagcuucaaccagaaccuggaguaccagaucggcuacaucugcagcggcaucuucggcgacaaccccagacccaacgacaagaccggcagcugcggccccgugagcagcaacggcgagaacggcgugaagggcuucagcuucaaguacggcaacggcguguggaucggcagaaccaagagcaucagcagcagaaacggcuucgagaugaucugggaccccaacggcuggaccggcaccgacaacaacuucagcaucaagcaggacaucgugggcaucaacgaguggagcggcuacagcggcagcuucgugcagcaccccgagcugaccggccuggacugcaucagacccugcuucuggguggagcugaucagaggcagacccaaggagaacaccaucuggaccagcggcagcagcaucagcuucugcggcgugaacagcgacaccgugggcuggagcuggcccgacggcgccgagcugcccuucaccaucgacaaguga

SEQ ID NO: 181479 - RNA, 1410 nt, Artificial Sequence
  derived and/or modified CDS sequence (opt4) from neuraminidase__InfluenzaA__AEW25537
augaaccccaaccagaagaucaucaccaucggcagcgugugcaugaccaucggcauggccaaccugauccugcagaucggcaacaucaucagcaucuggaucagccacagcauccagcugggcaaccagaaccagaucgagaccugcaaccagagcgugaucaccuacgagaacaacaccugggugaaccagaccuacgugaacaucagcaacaccaacuucgccgccggccagagcguggugagcgugaagcuggccggcaacagcagccugugccccgugagcggcugggccaucuacagcaaggacaacagcaucagaaucggcagcaagggcgacguguucgugaucagagagcccuucaucagcugcagcccccuggagugcagaaccuucuuccugacccagggcgcccugcugaacgacaagcacagcaacggcaccaucaaggacagaagccccuacagaacccugaugagcugccccaucggcgaggugcccagccccuacaacagcagauucgagagcguggccuggagcgccagcgccugccacgacggcaucaacuggcugaccaucggcaucagcggccccgacaacggcgccguggccgugcugaaguacaacggcaucaucaccgacaccaucaagagcuggagaaacaacauccugagaacccaggagagcgagugcgccugcgugaacggcagcugcuucaccgugaugaccgacggccccagcgacggccaggccagcuacaagaucuucagaaucgagaagggcaagaucgugaagagcguggagaugaacgcccccaaccaccacuacgaggagugcagcugcuaccccgacagcagcgagaucaccugcgugugcagagacaacuggcacggcagcaacagacccugggugagcuucaaccagaaccuggaguaccagaucggcuacaucugcagcggcaucuucggcgacaaccccagacccaacgacaagaccggcagcugcggccccgugagcagcaacggcgccaacggcgugaagggcuucagcuucaaguacggcaacggcguguggaucggcagaaccaagagcaucagcagcagaaacggcuucgagaugaucugggaccccaacggcuggaccggcaccgacaacaacuucagcaucaagcaggacaucgugggcaucaacgaguggagcggcuacagcggcagcuucgugcagcaccccgagcugaccggccuggacugcaucagacccugcuucuggguggagcugaucagaggcagacccaaggagaacaccaucuggaccagcggcagcagcaucagcuucugcggcgugaacagcgacaccgugggcuggagcuggcccgacggcgccgagcugcccuucaccaucgacaaguga

SEQ ID NO: 181480 - RNA, 1410 nt, Artificial Sequence; identical to SEQ ID NO: 176798
  derived and/or modified CDS sequence (opt4) from neuraminidase__InfluenzaA__AEW25547

SEQ ID NO: 181481 - RNA, 1410 nt, Artificial Sequence; identical to SEQ ID NO: 176798
  derived and/or modified CDS sequence (opt4) from neuraminidase__InfluenzaA__AEW25556

SEQ ID NO: 181482 - RNA, 1410 nt, Artificial Sequence; identical to SEQ ID NO: 176798
  derived and/or modified CDS sequence (opt4) from neuraminidase__InfluenzaA__AEW25566

SEQ ID NO: 181483 - RNA, 1410 nt, Artificial Sequence
  derived and/or modified CDS sequence (opt4) from neuraminidase__InfluenzaA__AEW25584
augaaccccaaccagaagaucaucaccaucggcagcgugugcaugaccaucggcauggccaaccugauccugcagaucggcaacaucaucagcaucuggaucagccacagcauccagcugggcaaccagaaccagaucgagaccugcaaccagagcgugaucaccuacgagaacaacaccugggugaaccagaccuacgugaacaucagcaacaccaacuucgccgccggccagagcguggugagcgugaagcuggccggcaacagcagccugugccccgugagcggcugggccaucuacagcaaggacaacagcaucagaaucggcagcaagggcgacguguucgugaucagagagcccuucaucagcugcagcccccuggagugcagaaccuucuuccugacccagggcgcccugcugaacgacaagcacagcaacggcaccaucaaggacagaagccccuacagaacccugaugagcugccccaucggcgaggugcccagccccuacaacagcagauucgagagcguggccuggagcgccagcgccugccacgacggcaucaacuggcugaccaucggcaucagcggccccgacaacggcgccguggccgugcugaaguacaacggcaucaucaccgacaccaucaagagcuggagaaacaacauccugagaacccaggagagcgagugcgccugcgugaacggcagcugcuucaccgugaugaccgacggccccagcgacggccaggccagcuacaagaucuucagaaucgagaagggcaagaucgugaagagcguggagaugaacgcccccaacuaccacuacgaggagugcagcugcuaccccgacagcagcgagaucaccugcgugugcagagacaacuggcacggcagcaacagacccugggugagcuucaaccagaaccuggaguaccagaucggcuacaucugcagcggcaucuucggcgacaaccccagacccaacgacaagaccggcagcugcggccccgugagcagcaacggcgccaacggcgugaagggcuucagcuucaaguacggcaacggcguguggaucggcagaaccaagagcaucagcagcagaaacggcuucgagaugaucugggaccccaacggcuggaccggcaccgacaacaacuucagcaucaagcagggcaucgugggcaucaacgaguggagcggcuacggcggcagcuucgugcagcaccccgagcugaccggccuggacugcaucagacccugcuucuggguggagcugaucagaggcagacccaaggagaacaccaucuggaccagcggcagcagcaucagcuucugcggcgugaacagcgacaccgugggcuggagcuggcccgacggcgccgagcugcccuucaccaucgacaaguga

SEQ ID NO: 181484 - RNA, 1410 nt, Artificial Sequence; identical to SEQ ID NO: 176798
  derived and/or modified CDS sequence (opt4) from neuraminidase__InfluenzaA__AEW25592

SEQ ID NO: 181485 - RNA, 1410 nt, Artificial Sequence
  derived and/or modified CDS sequence (opt4) from neuraminidase__InfluenzaA__AEW25602
augaaccccaaccagaagaucaucaccaucggcagcgugugcaugaccaucggcauggccaaccugauccugcagaucggcaacaucaucagcaucuggaucagccacagcauccagcugggcaaccagaaccagaucgagaccugcaaccagagcgugaucaccuacgagaacaacaccugggugaaccagaccuacgugaacaucagcaacaccaacuucgccgccggccagagcguggugagcgugaagcuggccggcaacagcagccugugccccgugagcggcugggccaucuacagcaaggacaacagcaucagaaucggcagcaagggcgacguguucgugaucagagagcccuucaucagcugcagcccccuggagugcagaaccuucuuccugacccagggcgcccugcugaacgacaagcacagcaacggcaccaucaaggacagaagccccuacagaacccugaugagcugccccaucggcgaggugcccagccccuacaacagcagauucgagagcguggccuggagcgccagcgccugccacgacggcaucaacuggcugaccaucggcaucagcggccccgacaacggcgccguggccgugcugaaguacaacggcaucaucaccgacaccaucaagagcuggagaaacaacauccugagaacccaggagagcgagugcgccugcgugaacggcagcugcuucaccgugaugaccgacggccccagcgacggccaggccagcuacaagaucuucagaaucgagaagggcaagaucgugaagagcguggagaugaacgcccccaacuaccacuacgaggagugcagcugcuaccccgacagcagcgagaucaccugcgugugcagagacaacuggcacggcagcaacagacccugggugagcuucaaccagaaccuggaguaccagaucggcuacaucugcagcggcaucuucggcgacaaccccagacccaacgacaagaccggcagcugcggccccgugagcagcaacggcgccaacggcgugaagggcuucagcuucaaguacggcaacggcguguggaucggcagaaccaagagcaucagcagcagaaacggcuucgagaugaucugggaccccaacggcuggaccggcaccgacaagaacuucagcaucaagcaggacaucgugggcaucaacgaguggagcggcuacagcggcagcuucgugcagcaccccgagcugaccggccuggacugcaucagacccugcuucuggguggagcugaucagaggcagacccaaggagaacaccaucuggaccagcggcagcagcaucagcuucugcggcgugaacagcgacaccgugggcuggagcuggcccgacggcgccgagcugcccuucaccaucgacaaguga

SEQ ID NO: 181486 - RNA, 1410 nt, Artificial Sequence
  derived and/or modified CDS sequence (opt4) from neuraminidase__InfluenzaA__AEW25612
augaaccccaaccagaagaucaucaccaucggcagcgugugcaugaccaucggcauggccaaccugauccugcagaucggcaacaucaucagcaucuggaucagccacagcauccagcugggcaaccagaaccagaucgagaccugcaaccagagcgugaucaccuacgagaacaacaccugggugaaccagaccuacgugaacaucagcaacaccaacuucgccgccggccagagcguggugagcgugaagcuggccggcaacagcagccugugccccgugagcggcugggccaucuacagcaaggacaacagcaucagaaucggcagcaagggcgacguguucgugaucagagagcccuucaucagcugcagcccccuggagugcagaaccuucuuccugacccagggcgcccugcugaacgacaagcacagcaacggcaccaucaaggacagaagccccuacagaacccugaugagcugccccaucggcgaggugcccagccccuacaacagcagauucgagagcguggccuggagcgccagcgccugccacgacggcaucaacuggcugaccaucggcaucagcggccccgacaacggcgccguggccgugcugaaguacaacggcaucaucaccgacaccaucaagagcuggagaaacaacauccugagaacccaggagagcgagugcgccugcgugaacggcagcugcuucaccgugaugaccgacggccccagcgacagacaggccagcuacaagaucuucagaaucgagaagggcaagaucgugaagagcguggagaugaacgcccccaacuaccacuacgaggagugcagcugcuaccccgacagcagcgagaucaccugcgugugcagagacaacuggcacggcagcaacagacccugggugagcuucaaccagaaccuggaguaccagaucggcuacaucugcagcggcaucuucggcgacaaccccagacccaacgacaagaccggcagcugcggccccgugagcagcaacggcgccaacggcgugaagggcuucagcuucaaguacggcaacggcguguggaucggcagaaccaagagcaucagcagcagaaacggcuucgagaugaucugggaccccaacggcuggaccggcaccgacaacaacuucagcaucaagcaggacaucgugggcaucaacgaguggagcggcuacagcggcagcuucgugcagcaccccgagcugaccggccuggacugcaucagacccugcuucuggguggagcugaucagaggcagacccaaggagaacaccaucuggaccagcggcagcagcaucagcuucugcggcgugaacagcgacaccgugggcuggagcuggcccgacggcgccgagcugcccuucaccaucgacaaguga

SEQ ID NO: 181487 - RNA, 1410 nt, Artificial Sequence
  derived and/or modified CDS sequence (opt4) from neuraminidase__InfluenzaA__AEW25622
augaaccccaaccagaagaucaucaccaucggcagcgugugcaugaccaucggcauggccaaccugauccugcagaucggcaacaucaucagcaucuggaucagccacagcauccagcugggcaaccagaaccagaucgagaccugcaaccagagcgugaucaccuacgagaacaacaccugggugaaccagaccuacgugaacaucagcaacaccaacuucgccgccggccagagcguggugagcgugaagcuggccggcaacagcagccugugccccgugagcggcugggccaucuacagcaaggacaacagcaucagaaucggcagcaagggcgacguguucgugaucagagagcccuucaucagcugcagcccccuggagugcagaaccuucuuccugacccagggcgcccugcugaacgacaagcacagcaacggcaccaucaaggacagaagccccuacagaacccugaugagcugccccaucggcgaggugcccagccccuacaacagcagauucgagagcguggccuggagcgccagcgccugccacgacggcaucaacuggcugaccaucggcaucagcggccccgacaacggcgccguggccgugcugaaguacaacggcaucaucaccgacaccaucaagagcuggagaaacaacauccugagaacccaggagagcgagugcgccugcgugaacggcagcugcuucaccgugaugaccgacggccccagcgacggccaggccagcuacaagaucuucagaaucgagaagggcaagaucgugaagagcguggagaugaacgcccccaacuaccacuacgaggagugcagcugcuaccccgacagcagcgagaucaccugcgugugcagagacaacuggcacggcagcaacagacccugggugagcuucaaccagaaccuggaguaccagaucggcuacaucugcagcggcaucuucggcgacaaccccagacccaacgacaagaccggcagcugcggccccgugagcagcaacggcgccaacggcgugaagggcuucagcuucaaguacggcaacggcguguggaucggcagaaccaagagcaucagcagcagaaacggcuucgagaugaucugggaccccaacggcuggaccggcaccgacaacaacuucagcaucaagcaggacaucgugggcaucaacgaguggagcggcuacagcggcagcuucgugcagcaccccgagcugaccggccuggacugcaucagacccugcuucuggguggagcugaucagaggcagacccaaggagaacagcaucuggaccagcggcagcagcaucagcuucugcggcgugaacagcgacaccgugggcuggagcuggcccgacggcgccgagcugcccuucaccaucgacaaguga

SEQ ID NO: 181488 - RNA, 1410 nt, Artificial Sequence
  derived and/or modified CDS sequence (opt4) from neuraminidase__InfluenzaA__AEW25631
augaaccccaaccagaagaucaucaccaucggcagcgugugcaugaccaucggcauggccaaccugauccugcagaucggcaacaucaucagcaucuggaucagccacagcauccagcugggcaaccagaaccagaucgagaccugcaaccagagcgugaucaccuacgagaacaacaccugggugaaccagaccuacgugaacaucagcaacaccaacuucgccgccggccagagcguggugagcgugaagcuggccggcaacagcagccugugccccgugagcggcugggccaucuacagcaaggacaacagcaucagaaucggcagcaagggcgacguguucgugaucagagagcccuucaucagcugcagcccccuggagugcagaaccuucuuccugacccagggcgcccugcugaacgacaagcacagcaacggcaccaucaaggacagaagccccuacagaacccugaugagcugccccaucggcgaggugcccagccccuacaacagcagauucgagagcguggccuggagcgccagcgccugccacgacggcaucaacuggcugaccaucggcaucagcggccccgacaacggcgccguggccgugcugaaguacaacggcaucaucaccgacaccaucaagagcuggagaaacaacauccugagaacccaggagagcgagugcgccugcgugaacggcagcugcuucaccgugaugaccgacggccccagcgacggccaggccagcuacaagaucuucagaaucgagaagggcaagaucgugaagagcguggagaugaacgcccccaacuaccacuacgaggagugcagcugcuaccccgacagcagcgagaucaccugcgugugcagagacaacuggcacggcagcaacagacccugggugagcuucaaccagaaccuggaguaccagaucggcuacaucugcagcggcaucuucggcgacaaccccagacccaacgacaagaccggcagcugcggccccgugagcagcaacggcgccagcggcgugaagggcuucagcuucaaguacggcaacggcguguggaucggcagaaccaagagcaucagcagcagaaacggcuucgagaugaucugggaccccaacggcuggaccggcaccgacaacaacuucagcaucaagcaggacaucgugggcaucaacgaguggagcggcuacagcggcagcuucgugcagcaccccgagcugaccggccuggacugcaucagacccugcuucuggguggagcugaucagaggcagacccaaggagaacaccaucuggaccagcggcagcagcaucagcuucugcggcgugaacagcgacaccgugggcuggagcuggcccgacggcgccgagcugcccuucaccaucgacaaguga

SEQ ID NO: 181489 - RNA, 1410 nt, Artificial Sequence; identical to SEQ ID NO: 176798
  derived and/or modified CDS sequence (opt4) from neuraminidase__InfluenzaA__AEW25639

SEQ ID NO: 181490 - RNA, 1410 nt, Artificial Sequence
  derived and/or modified CDS sequence (opt4) from neuraminidase__InfluenzaA__AEW25648
augaaccccaaccagaagaucaucaccaucggcagcgugugcaugaccaucggcauggccaaccugauccugcagaucggcaacaucaucagcaucuggaucagccacagcauccagcugggcaaccagaaccagaucgagaccugcaaccagagcgugaucaccuacgagaacaacaccugggugaaccacaccuacgugaacaucagcaacaccaacuucgccgccggccagagcguggugagcgugaagcuggccggcaacagcagccugugccccgugagcggcugggccaucuacagcaaggacaacagcaucagaaucggcagcaagggcgacguguucgugaucagagagcccuucaucagcugcagcccccuggagugcagaaccuucuuccugacccagggcgcccugcugaacgacaagcacagcaacggcaccaucaaggacagaagccccuacagaacccugaugagcugccccaucggcgaggugcccagccccuacaacagcagauucgagagcguggccuggagcgccagcgccugccacgacggcaucaacuggcugaccaucggcaucagcggccccgacaacggcgccguggccgugcugaaguacaacggcaucaucaccgacaccaucaagagcuggagaaacaacauccugagaacccaggagagcgagugcgccugcgugaacggcagcugcuucaccgugaugaccgacggccccagcgacggccaggccagcuacaagaucuucagaaucgagaagggcaagaucgugaagagcguggagaugaacgcccccaacuaccacuacgaggagugcagcugcuaccccgacagcagcgagaucaccugcgugugcagagacaacuggcacggcagcaacagacccugggugagcuucaaccagaaccuggaguaccagaucggcuacaucugcagcggcaucuucggcgacaaccccagacccaacgacaagaccggcagcugcggccccgugagcagcaacggcgccaacggcgugaagggcuucagcuucaaguacggcaacggcguguggaucggcagaaccaagagcaucagcagcagaaacggcuucgagaugaucugggaccccaacggcuggaccggcaccgacaacaacuucagcaucaagcaggacaucgugggcaucaacgaguggagcggcuacagcggcagcuucgugcagcaccccgagcugaccggccuggacugcaucagacccugcuucuggguggagcugaucagaggcagacccaaggagaacaccaucuggaccagcggcagcagcaucagcuucugcggcgugaacagcgacaccgugggcuggagcuggcccgacggcgccgagcugcccuucaccaucgacaaguga

SEQ ID NO: 181491 - RNA, 1410 nt, Artificial Sequence
  derived and/or modified CDS sequence (opt4) from neuraminidase__InfluenzaA__AEW25656
augaaccccaaccagaagaucaucaccaucggcagcgugugcaugaccaucggcauggccaaccugauccugcagaucggcaacaucaucagcaucuggaucagccacagcauccagcugggcaaccagaaccagaucgagaccugcaaccagagcgugaucaccuacgagaacaacaccugggugaaccagaccuacgugaacaucagcaacaccaacuucgccgccggccagagcguggugagcgugaagcuggccggcaacagcagccugugccccgugagcggcugggccaucuacagcaaggacaacagcaucagaaucggcagcaagggcgacguguucgugaucagagagcccuucaucagcugcagcccccuggagugcagaaccuucuuccugacccagggcgcccugcugaacgacaagcacagcaacggcaccaucaaggacagaagccccuacagaacccugaugagcugccccaucggcgaggugcccagccccuacaacagcagauucgagagcguggccuggagcgccagcgccugccacgacggcaucaacuggcugaccaucggcaucagcggccccgacaacggcgccguggccgugcugaaguacaacggcaucaucaccgacaccaucaagagcuggagaaacaacauccugagaacccaggagagcgagugcgccugcgugaacggcagcugcuucaccgugaugaccgacggccccagcgacggccaggccagcuacaagaucuucagaaucgagaagggcaagaucgugaagagcguggagaugaacgcccccaacuaccacuacgaggagugcagcugcuaccccgacagcagcgagaucaccugcgugugcagagacaacuggcacggcagcaacagacccugggugagcuucaaccagaaccuggaguaccagaucggcuacaucugcagcggcaucuucggcgacaaccccagacccaacgacaagaccggcagcugcggccccgugagcagcaacggcgccaacggcgugaagggcuucagcuucaaguacggcaacggcguguggaucggcagaaccaagagcaucagcagcagaaacggcuucgagaugaucugggaccccaacggcuggaccggcaccgacaacaacuuccccaucaagcaggacaucgugggcaucaacgaguggagcggcuacagcggcagcuucgugcagcaccccgagcugaccggccuggacugcaucagacccugcuucuggguggagcugaucagaggcagacccaaggagaacaccaucuggaccagcggcagcagcaucagcuucugcggcgugaacagcgacaccgugggcuggagcuggcccgacggcgccgagcugcccuucaccaucgacaaguga

SEQ ID NO: 181492 - RNA, 1410 nt, Artificial Sequence
  derived and/or modified CDS sequence (opt4) from neuraminidase__InfluenzaA__AEW25664
augaaccccaaccagaagaucaucaccaucggcagcgugugcaugaccaucggcauggccaaccugauccugcagaucggcaacaucaucagcaucuggaucagccacagcauccagcugggcaaccagaaccagaucgagaccugcaaccagagcgugaucaccuacgagaacaacaccugggugaaccagaccuacgugaacaucagcaacaccaacuucaccgccggccagagcguggugagcgugaagcuggccggcaacagcagccugugccccgugagcggcugggccaucuacagcaaggacaacagcaucagaaucggcagcaagggcgacguguucgugaucagagagcccuucaucagcugcagcccccuggagugcagaaccuucuuccugacccagggcgcccugcugaacgacaagcacagcaacggcaccaucaaggacagaagccccuacagaacccugaugagcugccccaucggcgaggugcccagccccuacaacagcagauucgagagcguggccuggagcgccagcgccugccacgacggcaucaacuggcugaccaucggcaucagcggccccgacaacggcgccguggccgugcugaaguacaacggcaucaucaccgacaccaucaagagcuggagaaacaacauccugagaacccaggagagcgagugcgccugcgugaacggcagcugcuucaccgugaugaccgacggccccagcgacggccaggccagcuacaagaucuucagaaucgagaagggcaagaucgugaagagcguggagaugaacgcccccaacuaccacuacgaggagugcagcugcuaccccgacagcagcgagaucaccugcgugugcagagacaacuggcacggcagcaacagacccugggugagcuucaaccagaaccuggaguaccagaucggcuacaucugcagcggcaucuucggcgacaaccccagacccaacgacaagaccggcagcugcggccccgugagcagcaacggcgccaacggcgugaagggcuucagcuucaaguacggcaacggcguguggaucggcagaaccaagagcaucagcagcagaaacggcuucgagaugaucugggaccccaacggcuggaccggcaccgacaacaacuucagcaucaagcaggacaucgugggcaucaacgaguggagcggcuacagcggcagcuucgugcagcaccccgagcugaccggccuggacugcaucagacccugcuucuggguggagcugaucagaggcagacccaaggagaacaccaucuggaccagcggcagcagcaucagcuucugcggcgugaacagcgacaccggcggcuggagcuggcccgacggcgccgagcugcccuucaccaucgacaaguga

SEQ ID NO: 181493 - RNA, 1410 nt, Artificial Sequence; identical to SEQ ID NO: 181487
  derived and/or modified CDS sequence (opt4) from neuraminidase__InfluenzaA__AEW25671

SEQ ID NO: 181494 - RNA, 1410 nt, Artificial Sequence; identical to SEQ ID NO: 177975
  derived and/or modified CDS sequence (opt4) from neuraminidase__InfluenzaA__AEW25680

SEQ ID NO: 181495 - RNA, 1410 nt, Artificial Sequence
  derived and/or modified CDS sequence (opt4) from neuraminidase__InfluenzaA__AEW25689
augaaccccaaccagaagaucaucaccaucggcagcgugugcaugaccaucggcauggccaaccugauccugcagaucggcaacaucaucagcaucuggaucagccacagcauccagcugggcaaccagaaccagaucgagaccugcaaccagagcgugaucaccuacgagaacaacaccugggugaaccagaccuacgugaacaucagcaacaccaacuucgccgccggccagagcguggugagcgugaagcuggccggcaacagcagccugugccccgugagcggcugggccaucuacagcaaggacaacagcaucagagugggcagcaagggcgacguguucgugaucagagagcccuucaucagcugcagcccccuggagugcagaaccuucuuccugacccagggcgcccugcugaacgacaagcacagcaacggcaccaucaaggacagaagccccuacagaacccugaugagcugccccaucggcgaggugcccagccccuacaacagcagauucgagagcguggccuggagcgccagcgccugccacgacggcaucaacuggcugaccaucggcaucagcggccccgacaacggcgccguggccgugcugaaguacaacggcaucaucaccgacaccaucaagagcuggagaaacaacauccugagaacccaggagagcgagugcgccugcgugaacggcagcugcuucaccgugaugaccgacggccccagcgacggccaggccagcuacaagaucuucagaaucgagaagggcaagaucgugaagagcguggagaugaacgcccccaacuaccacuacgaggagugcagcugcuaccccgacagcagcgagaucaccugcgugugcagagacaacuggcacggcagcaacagacccugggugagcuucaaccagaaccuggaguaccagaucggcuacaucugcagcggcaucuucggcgacaaccccagacccaacgacaagaccggcagcugcggccccgugagcagcaacggcgccaacggcgugaagggcuucagcuucaaguacggcaacggcguguggaucggcagaaccaagagcaucagcagcagaaacggcuucgagaugaucugggaccccaacggcuggaccggcaccgacaacaacuucagcaucaagcaggacaucgugggcaucaacgaguggagcggcuacagcggcagcuucgugcagcaccccgagcugaccggccuggacugcaucagacccugcuucuggguggagcugaucagaggcagacccaaggagaacaccaucuggaccagcggcagcagcaucagcuucugcggcgugaacagcgacaccgugggcuggagcuggcccgacggcgccgagcugcccuucaccaucgacaaguga

SEQ ID NO: 181496 - RNA, 1410 nt, Artificial Sequence; identical to SEQ ID NO: 181490
  derived and/or modified CDS sequence (opt4) from neuraminidase__InfluenzaA__AEW25698

SEQ ID NO: 181497 - RNA, 1410 nt, Artificial Sequence; identical to SEQ ID NO: 176798
  derived and/or modified CDS sequence (opt4) from neuraminidase__InfluenzaA__AEW25708

SEQ ID NO: 181498 - RNA, 1410 nt, Artificial Sequence; identical to SEQ ID NO: 176798
  derived and/or modified CDS sequence (opt4) from neuraminidase__InfluenzaA__AEX09177

SEQ ID NO: 181499 - RNA, 1413 nt, Artificial Sequence
  derived and/or modified CDS sequence (opt4) from neuraminidase__InfluenzaA__AEX33324
augaaccccaaccagaagaucaucaccaucggcagcaucagcaucgccaucggcaucaucagccugaugcugcagaucggcaacaucaucagcaucugggccagccacagcauccagaccggcagccagaaccacaccggcaucugcaaccagagaaucaucaccuacgagaacagcaccugggugaaccacaccuacgugaccaucaacaacaccaacgugguggccggcaaggacaagaccagcgugacccuggccggcaacagcagccugugcagcaucagcggcugggccaucuacaccaaggacaacagcaucagaaucggcagcaagggcgacguguucgugaucagagagcccuucaucagcugcagccaccuggagugcagaaccuucuuccugacccagggcgcccugcugaacgacaagcacagcaacggcaccgugaaggacagaagccccuacagagcccugaugagcugcccccugggcgaggcccccagccccuacaacagcaaguucgagagcguggccuggagcgccagcgccugccacgacggcaugggcuggcugaccaucggcaucagcggccccgacaacggcgccguggccgugcugaaguacaacggcaucaucaccgagaccaucaagagcuggaagaagagaauccugagaacccaggagagcgagugcgugugcgugaacggcagcugcuucaccaucaugaccgacggccccagcaacggcgccgccagcuacaagaucuucaagaucgagaagggcaaggugaccaagagcaucgagcugaacgcccccaacuuccacuacgaggagugcagcugcuaccccgacaccggcaccgugaugugcgugugcagagacaacuggcacggcagcaacagacccugggugagcuucaaccagaaccuggacuaccagaucggcuacaucugcagcggcguguucggcgacaaccccagacccaaggacggcgagggcagcugcaaccccgugaccguggacggcgccgacggcgugaagggcuucagcuacaaguacggcaacggcguguggaucggcagaaccaagagcaacagacugagaaagggcuucgagaugaucugggaccccaacggcuggaccgacaccgacagcgacuucagcgugaagcaggacgugguggccaucaccgacuggagcggcuacagcggcagcuucgugcagcaccccgagcugaccggccuggacugcaucagacccugcuucuggguggagcuggugagaggccugcccagagagaacaccaccaucuggaccagcggcagcagcaucagcuucugcggcgugaacagcgacaccgccaacuggagcuggcccgacggcgccgagcugcccuucaccaucgacaaguga

SEQ ID NO: 181500 - RNA, 1413 nt, Artificial Sequence
  derived and/or modified CDS sequence (opt4) from neuraminidase__InfluenzaA__AEX33368
augaaccccaaccagaagaucaucaccaucggcagcaucagcaucgccaucggcaucaucagccugaugcugcagaucggcaacaucaucagcaucugggccagccacagcauccagaccggcagccagaaccacaccggcaucugcaaccagagaaucaucaccuacgagaacagcaccugggugaaccacaccuacgugaacaucaacaacaccaacgugguggccggcaaggacaagaccagcgugacccuggccggcaacagcagccugugcgccaucagcggcugggccaucuacaccaaggacaacagcaucagaaucggcagcaagggcgacguguucgugaucagagagcccuucaucagcugcagccaccuggagugcagaaccuucuuccugacccagggcgcccugcugaacgacaagcacagcaacggcaccgugaaggacagaagccccuacagagcccugaugagcugcccccugggcgaggcccccagccccuacaacagcaaguucgagagcguggccuggagcgccagcgccugccacgacggcaugggcuggcugaccaucggcaucagcggccccgacaacggcgccguggccgugcugaaguacaacggcaucaucaccgagaccaucaagagcuggaagaagagaauccugagaacccaggagagcgagugcgugugcgugaacggcagcugcuucaccaucaugaccgacggccccagcaacggcgccgccagcuacaagaucuucaagaucgagaagggcaaggugaccaagagcaucgagcugaacgcccccaacuuccacuacgaggagugcagcugcuaccccgacaccggcaccgugaugugcgugugcagagacaacuggcacggcagcaacagacccugggugagcuucaaccagaaccuggacuaccagaucggcuacaucugcagcggcguguucggcgacaaccccagacccaaggacggcgagggcagcugcaaccccgugaccguggacggcgccgacggcgugaagggcuucagcuacaaguacggcaacggcguguggaucggcagaaccaagagcaacagacugagaaagggcuucgagaugaucugggaccccaacggcuggaccgacaccgacagcgacuucagcgugaagcaggacgugguggccaucaccgacuggagcggcuacagcggcagcuucgugcagcaccccgagcugaccggccuggacugcaucagacccugcuucuggguggagcuggugagaggccugcccagagagaacaccaccaucuggaccagcggcagcagcaucagcuucugcggcgugaacagcgacaccgccaacuggagcuggcccgacggcgccgagcugcccuucaccaucgacaaguga

SEQ ID NO: 181501 - RNA, 1413 nt, Artificial Sequence
  derived and/or modified CDS sequence (opt4) from neuraminidase__InfluenzaA__AEX33379
augaaccccaaccagaagaucaucaccaucggcagcaucagcaucgccaucggcaucaucagccugaugcugcagaucggcaacaucaucagcaucugggccagccacagcauccagaccggcauccagaaccacaccggcaucugcaaccagagaaucaucaccuacgagaacagcaccugggugaaccacaccuacgugaccaucaacaacaccaacgugguggccggcaaggacaagaccagcgugacccuggccggcaacagcagccugugcagcaucagcggcugggccaucuacaccaaggacaacagcaucagaaucggcagcaagggcgacguguucgugaucagagagcccuucaucagcugcagccaccuggagugcagaaccuucuuccugacccagggcgcccugcugaacgacaagcacagcaacggcaccgugaaggacagaagccccuacagagcccugaugagcugcccccugggcgaggcccccagccccuacaacagcaaguucgagagcguggccuggagcgccagcgccugccacgacggcaugggcuggcugaccaucggcaucagcggccccgacaacggcgccguggccgugcugaaguacaacggcaucaucaccgagaccaucaagagcuggaagaagagaauccugagaacccaggagagcgagugcgugugcgugaacggcagcugcuucaccaucaugaccgacggccccagcaacggcgccgccagcuacaagaucuucaagaucgagaagggcaaggugaccaagagcaucgagcugaacgcccccaacuuccacuacgaggagugcagcugcuaccccgacaccggcaccgugaugugcgugugcagagacaacuggcacggcagcaacagacccugggugagcuucaaccagaaccuggacuaccagaucggcuacaucugcagcggcguguucggcgacaaccccagacccagagacggcgagggcagcugcaaccccgugaccguggacggcgccgacggcgugaagggcuucagcuacaaguacggcaacggcguguggaucggcagaaccaagagcaacagacugagaaagggcuucgagaugaucugggaccccaacggcuggaccgacaccgacagcgacuucagcgugaagcaggacgugguggccaucaccgacuggagcggcuacagcggcagcuucgugcagcaccccgagcugaccggccuggacugcaucagacccugcuucuggguggagcuggugagaggccugcccagagagaacaccaccaucuggaccagcggcagcagcaucagcuucugcggcgugaacagcgacaccgccaacuggagcuggcccgacggcgccgagcugcccuucaccaucgacaaguga

SEQ ID NO: 181502 - RNA, 1413 nt, Artificial Sequence; identical to SEQ ID NO: 181501
  derived and/or modified CDS sequence (opt4) from neuraminidase__InfluenzaA__AEX33390

SEQ ID NO: 181503 - RNA, 1413 nt, Artificial Sequence; identical to SEQ ID NO: 181501
  derived and/or modified CDS sequence (opt4) from neuraminidase__InfluenzaA__AEX33401

SEQ ID NO: 181504 - RNA, 1413 nt, Artificial Sequence; identical to SEQ ID NO: 181501
  derived and/or modified CDS sequence (opt4) from neuraminidase__InfluenzaA__AEX33412

SEQ ID NO: 181505 - RNA, 1413 nt, Artificial Sequence; identical to SEQ ID NO: 181501
  derived and/or modified CDS sequence (opt4) from neuraminidase__InfluenzaA__AEX33423

SEQ ID NO: 181506 - RNA, 1413 nt, Artificial Sequence; identical to SEQ ID NO: 181501
  derived and/or modified CDS sequence (opt4) from neuraminidase__InfluenzaA__AEX33434

SEQ ID NO: 181507 - RNA, 1413 nt, Artificial Sequence; identical to SEQ ID NO: 181501
  derived and/or modified CDS sequence (opt4) from neuraminidase__InfluenzaA__AEX33445

SEQ ID NO: 181508 - RNA, 1410 nt, Artificial Sequence
  derived and/or modified CDS sequence (opt4) from neuraminidase__InfluenzaA__AEX33544
augaaccccaaccagaagaucaucaccaucggcagcuucagccugaccaucgccgccaucugcuuccugaugcagaucgccauccuggugaccaccgugacccugcacuucaagcagcacgagugcaacagcccccccaacaaccaggugaugcugugcgagcccaccaucaucgagagaaacaucaccgagaucguguaccugaccaacaccaccaucgagaaggagaucugccccaagcuggccgaguacagaaacuggagcaagccccagugcaacaucaccggcuucgcccccuucagcaaggacaacagcaucagacugagcgccggcggcgacaucugggugaccagagagcccuacgugagcugcgaccccgacaagugcuaccaguucgcccugggccagggcaccacccugaacaacggccacagcaacgacaccgugcacgacagaacccccuacagaacccugcugaugaacgagcugggcgugcccuuccaccugggcaccagacaggugugcaucgccuggagcagcagcagcugccacgacggcaaggccuggcugcacgugugcgugaccggcgacgacaagaacgccaccgccagcuucaucuacaacggcagacugguggacagcaucggcagcuggagcaagaagauccugagaacccaggagagcgagugcgugugcaucaacggcaccugcaccguggugaugaccgacggcagcgccagcggcaaggccgacaccaagauccuguucaucgaggagggcaagaucgugcacaucagcacccugagcggcagcgcccagcacguggaggagugcagcugcuaccccagauaccccggcgugagaugcgugugcagagacaacuggaagggcagcaacagacccaucguggacaucaacgugaaggacuacagcaucgugagcagcuacgugugcagcggccuggugggcgacacccccagaaagaacgacagcuucagcagcagccacugccuggaccccaacaacgaggagggcggccacggcgugaagggcugggccuucgacgacggcaacgacguguggaugggcagaaccaucagcgagaagcugagaagcggcuacgagaccuucaaggugaucgagggcuggagcaagcccaacagcaagcugcagaucaacagacaggugaucguggagagaggcaacagaagcggcuacagcggcaucuucagcguggagggcaagagcugcaucaacagaugcuucuacguggagcugaucagaggcagaaaggagaagaccgaggugugguggaccagcaacagcaucgugguguucugcggcaccagcggcaccuacggcaccggcagcuggcccgacggcgccgacaucaaccugaugcccaucuga

SEQ ID NO: 181509 - RNA, 1410 nt, Artificial Sequence; identical to SEQ ID NO: 174774
  derived and/or modified CDS sequence (opt4) from neuraminidase__InfluenzaA__AEX33555

SEQ ID NO: 181510 - RNA, 1410 nt, Artificial Sequence
  derived and/or modified CDS sequence (opt4) from neuraminidase__InfluenzaA__AEX33610
augaaccccaaccagaagaucaucaccaucggcagcgugagccugaccaucagcaccaucugcuucuucaugcagaucgccauccugaucaccaccgugacccugcacuucaagcaguacgaguucaaccccccccccaacaaccaggugaugcugugcgagcccaccaucaucgagagaaacaucaccgagaucguguaccugaccaacaccaccaucgagaaggagaucugccccaagcuggccgaguacagaaacuggagcaagccccagugcgacaucaccggcuucgcccccuucagcaaggacaacagcaucagacugagcgccggcggcgacaucugggugaccagagagcccuacgugagcugcgaccccgacaagugcuaccaguucgcccugggccagggcaccacccugaacaacgugcacagcaacgacaccgugcacgacagaacccccuacagaacccugcugaugaacgagcugggcgugcccuuccaccugggcaccaagcaggugugcaucgccuggagcagcagcagcugccacgacggcaaggccuggcugcacgugugcgugaccggcgacgacaagaacgccaccgccagcuucaucuacaacggcagacugguggacagcaucgugagcuggagcaagaagauccugagaacccaggagagcgagugcgugugcaucaacggcaccugcaccguggugaugaccgacggcagcgccagcggcaaggccgacaccaagauccuguucaucgaggagggcaagaucgugcacaccagcacccugagcggcagcgcccagcacguggaggagugcagcugcuaccccagauaccccggcgugagaugcgugugcagagacaacuggaagggcagcaacagacccaucguggacaucaacaucaaggacuacaacaucgugagcagcuacgugugcagcggccuggugggcgacacccccagaaagaacgacagcagcagcagcagccacugccuggaccccaacaacgaggagggcggccacggcgugaagggcugggccuucgacgacggcaacgacguguggaugggcagaaccaucagcgagaagcugagaagcggcuacgagaccuucaaggugaucggcggcuggagcaaccccaacagcaagcugcagaucaacagacaggugaucguggacagaggcaacagaagcggcuacagcggcaucuucagcguggagggcaagagcugcaucaacagaugcuucuacguggagcugaucagaggcagaaaggaggagaccgaggugcuguggaccagcaacagcaucgugguguucugcggcaccagcggcaccuacggcaccggcagcuggcccgacggcgccgacaucaaccugaugcccaucuga

SEQ ID NO: 181511 - RNA, 1410 nt, Artificial Sequence
  derived and/or modified CDS sequence (opt4) from neuraminidase__InfluenzaA__AEX33828
augaaccccaaccagaagaucaucaccaucggcagcgugagccugaccaucagcaccaucugcuucuucaugcagaucgccauccugaucaccaccgugacccugcacuucaagcaguacgaguucaaccccccccccaacaaccaggugaugcugugcgagcccaccaucaucgagagaaacaucaccgagaucguguaccugaccaacaccaccaucgagaaggagaucugccccaagcuggccgaguacagaaacuggagcaagccccagugcgacaucaccggcuucgcccccuucagcaaggacaacagcaucagacugagcgccggcggcgacaucugggugaccagagagcccuacgugagcugcgaccccgacaagugcuaccaguucgcccugggccagggcaccacccugaacaacgugcacagcaacgacaccgugcacgacagaacccccuacagaacccugcugaugaacgagcugggcgugcccuuccaccugggcaccaagcaggugugcaucgccuggagcagcagcagcugccacgacggcaaggccuggcugcacgugugcgugaccggcgacgacaagaacgccaccgccagcuucaucuacaacggcagacugguggacagcaucgugagcuggagcaaggagauccugagaacccaggagagcgagugcgugugcaucaacggcaccugcaccguggugaugaccgacggcagcgccagcggcaaggccgacaccaagauccuguucaucgaggagggcaagaucgugcacaccagcacccugagcggcagcgcccagcacguggaggagugcagcugcuaccccagauaccccggcgugagaugcgugugcagagacaacuggaagggcagcaacagacccaucguggacaucaacaucaaggacuacagcaucgugagcagcuacgugugcagcggccuggugggcgacacccccagaaagaacgacagcagcagcagcagccacugccuggaccccaacaacgaggagggcggccacggcgugaagggcugggccuucgacgacggcaacgacguguggaugggcagaaccaucagcgagaagcugagaagcggcuacgagaccuucaaggugaucgagggcuggagcaaccccaacagcaagcugcagaucaacagacaggugaucguggacagaggcaacagaagcggcuacagcggcaucuucagcguggagggcaagagcugcaucaacagaugcuucuacguggagcugaucagaggcagaaaggaggagaccgaggugcuguggaccagcaacagcaucgugguguucugcggcaccagcggcaccuacggcaccggcagcuggcccgacggcgccgacaucaaccugaugcccaucuga

SEQ ID NO: 181512 - RNA, 1410 nt, Artificial Sequence; identical to SEQ ID NO: 174772
  derived and/or modified CDS sequence (opt4) from neuraminidase__InfluenzaA__AEX33839

SEQ ID NO: 181513 - RNA, 1413 nt, Artificial Sequence
  derived and/or modified CDS sequence (opt4) from neuraminidase__InfluenzaA__AEX33861
augaaccccaaccagaagaucaucaccaucggcagcaucagcaucgccaucggcaccaucagccugaugcugcaggugggcaacaucaucagcaucugggccagccacagcauccagaccggcagccagaaccacaccggcaucugcaaccagagaaucaucaccuacgagaacagcaccugggugaaccacaccuacgugaacaucaacaacaccaacgugguggccggcaaggacaagaccagcguggcccuggccggcaacagcagccugugcagcaucagcggcugggccaucuacaccaaggacaacagcaucagaaucggcagcaagggcgacguguucgugaucagagagcccuucaucagcugcagccaccuggagugcagaaccuucuuccugacccagggcgcccugcugaacgacaagcacagcaacggcaccgugaaggacagaagccccuacagagcccugaugagcugcccccugggcgaggcccccagccccuacaacagcaaguucgagagcguggccuggagcgccagcgccugccacgacggcaugggcuggcugaccaucggcaucagcggccccgacaacggcgccguggccgugcugaaguacaacggcaucaucaccgagaccaucaagagcuggaagaagagaauccugagaacccaggagagcgagugcgugugcgugaacggcagcugcuucaccaucaugaccgacggccccagcaacggcgccgccagcuacaagaucuucaagaucgagaagggccaggugaccaagagcguggagcugaacgcccccaacuuccacuacgaggagugcagcugcuaccccgacaccggcaccgugaugugcgugugcagagacaacuggcacggcagcaacagacccugggugagcuucaaccagaaccuggacuaccagaucggcuacaucugcagcggcguguucggcgacaaccccagacccaaggacggcaagggcagcugcaaccccgugaccguggacggcgccgacggcgugaagggcuucagcuacaaguacggcaacggcguguggaucggcagaaccaagagcaacagacugagaaagggcuucgagaugaucugggaccccaacggcuggaccgacaccgacagcgacuucagcgugaagcaggacgugguggccaucaccgacuggagcggcuacagcggcagcuucgugcagcaccccgagcugaccggccuggacugcaucagacccugcuucuggguggagcuggugagaggccugcccagagagaacaccaccaucuggaccagcggcagcagcaucagcuucugcggcguggacagcgacaccgccaacuggagcuggcccgacggcgccgagcugcccuucaccaucgacaaguga

SEQ ID NO: 181514 - RNA, 1410 nt, Artificial Sequence
  derived and/or modified CDS sequence (opt4) from neuraminidase__InfluenzaA__AEX33872
augaaccccaaccagaagaucaucaccaucggcagcgugagccugaccaucagcaccaucugcuucuucaugcagaucgccauccugaucaccaccgugacccugcacuucaagcaguacgaguucaacagcccccccaacaaccaggugaugcagugcgagcccaccaucaucgagagaaacaucaccgagaucguguaccugaccaacaccaccaucgagaaggagaucugccccaagcuggccgaguacagaaacuggagcaagccccagugcgacaucaccggcuucgcccccuucagcaaggacaacagcaucagacugagcgccggcggcgacaucugggugaccagagagcccuacgugagcugcgaccccgacaagugcuaccaguucgcccugggccagggcaccacccugaacaacgugcacagcaacgacaccgugcacgacagaacccccuacagaacccugcugaugaacgagcugggcgugcccuuccaccugggcaccaagcaggugugcaucgccuggagcagcagcagcugccacgacggcaaggccuggcugcacgugugcgugaccggcgacgacaagaacgccaccgccagcuucaucuacaacggcagacugguggacagcaucgugagcuggagcaaggagauccugagaacccaggagagcgagugcgugugcaucaacggcaccugcaccguggugaugaccgacggcagcgccagcggcaaggccgacaccaagauccuguucaucgaggagggcaagaucgugcacaccagcacccugagcggcagcgcccagcacguggaggagugcagcugcuaccccagauaccccggcgugagaugcgugugcagagacaacuggaagggcagcaacagacccaucguggacaucaacaucaaggacuacagcaucgugagcagcuacgugugcagcggccuggugggcgacacccccagaaagaacgacagcagcagcagcagccacugccugaaccccaacaacgaggagggcggccacggcgugaagggcugggccuucgacgacggcaacgacguguggaugggcagaaccaucagcgagaagcugagacugggcuacgagaccuucaaggugaucgagggcuggagcaaccccaacagcaagcugcagaucaacagacaggugaucguggacagaggcaacagaagcggcuacagcggcaucuucagcguggagggcaagagcugcaucaacagaugcuucuacguggagcugaucagaggcagaaaggaggagaccgaggugcuguggaccagcaacagcaucgugguguucugcggcaccagcggcaccuacggcaccggcagcuggcccgacggcgccgacaucaaccugaugcccaucuga

SEQ ID NO: 181515 - RNA, 1410 nt, Artificial Sequence; identical to SEQ ID NO: 174772
  derived and/or modified CDS sequence (opt4) from neuraminidase__InfluenzaA__AEX33883

SEQ ID NO: 181516 - RNA, 1410 nt, Artificial Sequence
  derived and/or modified CDS sequence (opt4) from neuraminidase__InfluenzaA__AEX33894
augaaccccaaccagaagaucaucaccaucggcagcgugagccugaccaucagcaccaucugcuucuucaugcagaucgccauccugaucaccaccgugacccugcacuucaagcaguacgaguucaacagcccccccaacaaccaggugaugcugugcgagcccaccaucaucgagagaaacaucaccgagaucguguaccugaccaacaccaccaucgagaaggagaucugccccaagcuggccgaguacagaaacuggagcaagccccagugcaacaucaccggcuucgcccccuucagcaaggacaacagcaucagacugagcgccggcggcgacaucugggugaccagagagcccuacgugagcugcgaccccgacaagugcuaccaguucgcccugggccagggcaccacccugaacaacgugcacagcaacgacaccgugcacgacagaacccccuacagaacccugcugaugaacgagcugggcgugcccuuccaccugggcaccaagcaggugugcaucgccuggagcagcagcagcugccacgacggcaaggccuggcugcacgugugcgugaccggcgacgacaagaacgccaccgccagcuucaucuacaacggcagacugguggacagcaucgugagcuggagcaaggagauccugagaacccaggagagcgagugcgugugcaucgacggcaccugcaccguggugaugaccgacggcagcgccagcggcaaggccgacaccaagauccuguucaucgaggagggcaagaucgugcacaccagcacccugagcggcagcgcccagcacguggaggagugcagcugcuaccccagauaccccggcgugagaugcgugugcagagacaacuggaagggcagcaacagacccaucguggacaucaacaucaaggacuacagcaucgugagcagcuacgugugcagcggccuggugggcgacacccccagaaagaacgacagcagcagcagcagccacugccuggaccccaacaacgaggagggcggccacggcgugaagggcugggccuucgacgacggcaacgacguguggaugggcagaaccaucagcgagaagcugagaagcggcuacgagaccuucaaggugaucgagggcuggagcaaccccaacagcaagcugcagaucaacagacaggugaucguggacagaggcaacagaagcggcuacagcggcaucuucagcguggagggcaagagcugcaucaacagaugcuucuacguggagcugaucagaggcagaaaggaggagaccgaggugcuguggaccagcaacagcaucgugguguucugcggcaccagcggcaccuacggcaccggcagcuggcccgacggcgccgacaucaaccugaugcccaucuga

SEQ ID NO: 181517 - RNA, 1413 nt, Artificial Sequence
  derived and/or modified CDS sequence (opt4) from neuraminidase__InfluenzaA__AEX33916
augaaccccaaccagaagaucaucaccaucggcagcaucagcaucgccaucggcaucaucagccugauccugcagaucggcaacaucaucagcaucugggccagccacagcauccagaccggcagccagaaccacaccggcaucugcaaccagagaaucaucaccuacgagaacagcaccugggugaacaacaccuacgugaacaucaacaacaccaacgugguggccgagaaggacaagaccagcgugacccuggccggcaacagcagccugugcagcaucagcggcugggccaucuacaccaaggacaacagcaucagaaucggcagcaagggcgacguguucgugaucagagagcccuucaucagcugcagccaccuggagugcagaaccuucuuccugacccagggcgcccugcugaacgacaagcacagcaacggcaccgugaaggacagaagccccuacagagcccugaugagcugcccccugggcgaggcccccagccccuacaacagcagauucgagagcguggccuggagcgccagcgccugccacgacggcaugggcuggcugaccaucggcaucagcggccccgacaacggcgccguggccgugcugaaguacaacggcaucaucaccgagaccaucaagagcuggaagaagagaauccugagaacccaggagagcgagugcgugugcaugaacggcagcugcuucaccaucaugaccgacggccccagcaacggcgccgccagcuacaagaucuucaagaucgagaagggcaaggugaccaagaccaucgagcugaacgcccccaacuuccacuacgaggagugcagcugcuaccccgacaccggcaccgugaugugcgugugcagagacaacuggcacggcagcaacagacccugggugagcuucaaccagaaccuggacuaccagaccggcuacaucugcagcggcguguucggcgacaaccccagacccaaggacggcgagggcagcugcaaccccaugaccguggacggcgccgacggcgugaagggcuucagcuacaaguacggcaacggcguguggaucggcagaaccaagagcaacagacugagaaagggcuucgagaugaucugggaccccaacggcuggaccaacaccgacagcgacuucagcgugaagcaggacgugguggccaucaccgacuggagcggcuacagcggcagcuucgugcagcaccccgagcugaccggccuggacugcaucagacccugcuucuggguggagcuggugagaggccugcccagagagaacaccaccaucuggaccagcggcagcagcaucagcuucugcggcgugaacagcggcaccgccaacuggagcuggcccgacggcgccgagcugcccuucaccaucgacaaguga

SEQ ID NO: 181518 - RNA, 1413 nt, Artificial Sequence; identical to SEQ ID NO: 175929
  derived and/or modified CDS sequence (opt4) from neuraminidase__InfluenzaA__AEX33927

SEQ ID NO: 181519 - RNA, 1413 nt, Artificial Sequence
  derived and/or modified CDS sequence (opt4) from neuraminidase__InfluenzaA__AEX33938
augaaccccaaccagaagaucaucaccaucggcagcaucagcaucgccaucggcaucaucagccugauccugcagaucggcaacaucaucagcaucugggccagccacagcauccagaccggcagccagaaccacaccggcaucugcaaccagagaaucaucaccuacgagaacagcaccugggugaacaacaccuacgugaacaucaacaacaccaacguggugguggagaaggacaagaccagcgugacccuggccggcaacagcagccugugcagcaucagcggcugggccaucuacaccaaggacaacagcaucagaaucggcagcaagggcgacguguucgugaucagagagcccuucaucagcugcagccaccuggagugcagaaccuucuuccugacccagggcgcccugcugaacgacaagcacagcaacggcaccgugaaggacagaagccccuacagagcccugaugagcugcccccugggcgaggcccccagccccuacaacagcagauucgagagcguggccuggagcgccagcgccugccacgacggcaugggcuggcugaccaucggcaucagcggccccgacaacggcgccguggccgugcugaaguacaacggcaucaucaccgagaccaucaagagcuggaagaagagaauccugagaacccaggagagcgagugcgugugcaugaacggcagcugcuucaccaucaugaccgacggccccagcaacggcgccgccagcuacaagaucuucaagaucgagaagggcaaggugaccaagaccaucgagcugaacgcccccaacuuccacuacgaggagugcagcugcuaccccgacaccggcaccgugaugugcgugugcagagacaacuggcacggcagcaacagacccugggugagcuucaaccagaaccuggacuaccagaucggcuacaucugcagcggcguguucggcgacaaccccagacccaaggacggcgagggcagcugcaaccccgugaccguggacggcgccgacggcgugaagggcuucagcuacaaguacggcaacggcguguggaucggcagaaccaagagcaacagacugagaaagggcuucgagaugaucugggaccccaacggcuggaccaacaccgacagcgacuucagcgugaagcaggacgugguggccaucaccgacuggagcggcuacagcggcagcuucgugcagcaccccgagcugaccggccuggacugcaucagacccugcuucuggguggagcuggugagaggccugcccagagagaacaccaccaucuggaccagcggcagcagcaucagcuucugcggcgugaacagcggcaccaccaacuggagcuggcccgacggcgccgagcugcccuucaccaucgacaaguga

SEQ ID NO: 181520 - RNA, 1413 nt, Artificial Sequence
  derived and/or modified CDS sequence (opt4) from neuraminidase__InfluenzaA__AEX33949
augaaccccaaccagaagaucaucaccaucggcagcaucagcaucgccaucggcaucaucagccugauccugcagaucggcaacaucaucagcaucugggccagccacagcauccagaccggcagccagaaccacaccggcaucugcaaccagagaaucaucaccuacgagaacagcaccugggugaacaacaccuacgugaacaucaacaacaccaacguggugguggagaaggacaagaccagcgugacccuggccggcaacagcagccugugcagcaucagcggcugggccaucuacaccaaggacaacagcaucagaaucggcagcaagggcgacguguucgugaucagagagcccuucaucagcugcagccaccuggagugcagaaccuucuuccugacccagggcgcccugcugaacgacaagcacagcaacggcaccgugaaggacagaagccccuacagagcccugaugagcugcccccugggcgaggcccccagccccuacaacagcagauucgagagcguggccuggagcgccagcgccugccacgacggcaugggcuggcugaccaucggcaucagcggccccgacaacggcgccguggccgugcugaaguacaacggcaucaucaccgagaccgugaagagcuggaagaagagaauccugagaacccaggagagcgagugcgugugcaugaacggcagcugcuucaccaucaugaccgacggccccagcaacggcgccgccagcuacaagaucuucaagaucgagaagggcaaggugaccaagaccaucgagcugaacgcccccaacuuccacuacgaggagugcagcugcuaccccgacaccggcaccgugaugugcgugugcagagacaacuggcacggcagcaacagacccugggugagcuucaaccagaaccuggacuaccagaucggcuacaucugcagcggcguguucggcgacaaccccagacccaaggacggcgagggcagcugcaaccccgugaccguggacggcgccgacggcgugaagggcuucagcuacaaguacggcaacggcguguggaucggcagaaccaagagcaacagacugagaaagggcuucgagaugaucugggaccccaacggcuggaccaacaccgacagcgacuucagcgugaagcaggacgugguggccaucaccgacuggagcggcuacagcggcagcuucgugcagcaccccgagcugaccggccuggacugcaucagacccugcuucuggguggagcuggugagaggccugcccagagagaacaccaccaucuggaccagcggcagcagcaucagcuucugcggcgugaacagcggcaccgccaacuggagcuggcccgacggcgccgagcugcccuucaccaucgacaaguga

SEQ ID NO: 181521 - RNA, 1410 nt, Artificial Sequence
  derived and/or modified CDS sequence (opt4) from neuraminidase__InfluenzaA__AEX33971
augaaccccaaccagaagaucaucaccaucggcagcgugagccugaccaucagcaccaucugcuucuucaugcagaucgccauccugaucaccaccgugacccugcacuucaagcaguacgaguucagcagcccccccaacaaccaggugaugcugugcgagcccgccaucaucgagagaaacaucaccgagaccguguaccugaccaacaccaccaccgagaaggagaucugccccaagcuggccgaguacagaaacuggagcaagccccagugcgacaucaccggcuucgcccccuucagcaaggacaacagcaucagacugagcgccggcggcgacaucugggugaccagagagcccuacgugagcugcgaccccgacaagugcuaccaguucgcccugggccagggcaccacccugaacaacgugcacagcaacgacaccgugcacgacagaacccccuacagaacccugcugaugaacgagcugggcgugcccuuccaccugggcaccaagcaggugugcaucgccuggagcagcagcagcugccacgacggcaaggccuggcugcacgugugcgugaccggcgacgacaagaacgccaccgccagcuucaucuacaacggcagacugguggacagcaucgugagcuggagcaaggagauccugagaacccaggagagcgagugcgugugcaucaacggcaccugcaccguggugaugaccgacggcagcgccagcggcaaggccgacaccaagauccuguucaucgaggagggcaagaucgugcacaccagcacccugagcggcagcgcccagcacguggaggagugcagcugcuaccccagauaccccggcgugagaugcgugugcagagacaacuggaagggcagcaacagacccaucguggacaucaacaucaaggacuacagcaucgugagcagauacgugugcagcggcaucgugggcgacacccccagaaagaacgacagcagcagcagcagccacugccuggaccccaacaacgaggagggcggccacggcgugaagggcugggccuucgacgacggcaacgacguguggaugggcagaaccaucagcgagaagagcagaagcggcuacgagaccuucaaggugaucgagggcuggagcaaccccaacagcaagcugcagaucaacagacaggugaucguggacagaggcaacagaagcggcuacagcggcaucuucagcguggagggcaagagcugcaucaacagaugcuucuacguggagcugaucagaggcagaaaggaggagaccgaggugcuguggaccagcaacagcaucgugguguucugcggcaccagcggcaccuacggcaccggcagcuggcccgacggcgccgacaucaaccugaugcccaucuga

SEQ ID NO: 181522 - RNA, 1410 nt, Artificial Sequence
  derived and/or modified CDS sequence (opt4) from neuraminidase__InfluenzaA__AEX33993
augaaccccaaccagaagaucaucaccaucggcagcgugagccugaccaucagcaccaucugcuucuucaugcagaucgccauccugaucaccaccgugacccugcacuucaagcaguacgaguucaacagcccccccaacaaccaggugaugcugugcgagcccaccaucaucgagagaaacaucaccgagaucguguaccugaccaacaccaccaucgagaaggagaucugccccaagcuggccgaguacagaaacuggagcaagccccagugcgacaucaccggcuucgcccccuucagcaaggacaacagcaucagacugagcgccggcggcgacaucugggugaccagagagcccuacgugagcugcgaccccgacaagugcuaccaguucgcccugggccagggcaccacccugaacaacgugcacagcaacgacaccgugagagacagaacccccuacagaacccugcugaugaacgagcugggcgugcccuuccaccugggcaccaagcaggugugcaucgccuggagcagcagcagcugccacgacggcaaggccuggcugcacgugugcaucaccggcgacgacaagaacgccaccgccagcuucaucuacaacggcagacugguggacagcaucgugagcuggagcaaggagauccugagaacccaggagagcgagugcgugugcaucaacggcaccugcaccguggugaugaccgacggcagcgccagcggcgaggccgacaccaagauccuguucaucgaggagggcaagaucgugcacaccagcacccugagcggcagcgcccagcacguggaggagugcagcugcuaccccagauaccccggcgugagaugcgugugcagagacaacuggaagggcagcaacagacccaucguggacaucaacaucaaggaccacagcaucgugagcagcuacgugugcagcggccuggugggcgacacccccagaaagaacgacagcagcagcagcagccacugccuggaccccaacaacgaggagggcggccacggcgugaagggcugggccuucgacgacggcaacgacguguggaugggcagaaccaucagcgagaagagcagacugggcuacgagaccuucaaggugaucgagggcuggagcaaccccaagagcaagcugcagaucaacagacaggugaucguggacagaggcaacagaagcggcuacagcggcaucuucagcguggagggcaagagcugcaucaacagaugcuucuacguggagcugaucagaggcagaaaggaggagaccgaggugcuguggaccagcaacagcaucgugguguucugcggcaccagcggcaccuacggcaccggcagcuggcccgacggcgccgacaucaaccugaugcccguguga

SEQ ID NO: 181523 - RNA, 1410 nt, Artificial Sequence; identical to SEQ ID NO: 176572
  derived and/or modified CDS sequence (opt4) from neuraminidase__InfluenzaA__AEX34026

SEQ ID NO: 181524 - RNA, 1410 nt, Artificial Sequence
  derived and/or modified CDS sequence (opt4) from neuraminidase__InfluenzaA__AEX34036
augaaccccaaccagaagaucaucaccaucggcagcgugagccugaccaucagcaccaucugcuucuucaugcagaucgccauccugaucaccaccgugacccugcacuucaagcaguacgaguucagcagcccccccaacaaccaggugaugcugugcgagcccaccaucaucgagagaaacaucaccgagaucguguaccugaccaacaccaccaucgagaaggagaucugccccaagcuggccgaguacagaaacuggagcaagccccagugcgacaucaccggcuucgcccccuucagcaaggacaacagcaucagacugagcgccggcggcgacaucugggugaccagagagcccuacgugagcugcgaccccgacaagugcuaccaguucgcccugggccagggcaccacccugaacaacgugcacagcaacgacaccgugcacggcagaacccccuacagaacccugcugaugaacgagcugggcgugcccuuccaccugggcaccaagcaggugugcaucgccuggagcagcagcagcugccacgacggcaaggccuggcugcacgugugcgugaccggcgacgacaagaacgccaccgccagcuucaucuacaacggcagacugguggacagcaucgugagcuggagcaaggagauccugagaacccaggagagcgagugcgugugcaucaacggcaccugcgccguggugaugaccgacggcagcgccagcggcaaggccgacaccaagauccuguucaucgaggagggcaagaucgugcacaccagcacccugagcggcagcgcccagcacguggaggagugcagcugcuaccccagauaccccggcgugagaugcgugugcagagacaacuggaagggcagcaacagacccaucguggacaucaacaucaaggacuacagcaucgugagcagauacgugugcagcggccuggugggcgacacccccagaaagaacgacagcagcagcagcagccacugccuggaccccaacaacgaggagggcggccacggcgugaagggcugggccuucgacgacggcgacgacguguggaugggcagaaccaucagcgagaagagcagaagcggcuacgagaccuucaaggugaucgagggcuggagcaaccccaacagcaagcugcagaucaacagacaggugaucguggacagaggcaacagaagcggcuacagcggcaucuucagcguggagggcaagagcugcaucaacagaugcuucuacguggagcugaucagaggcagaaaggaggagaccgaggugcuguggaccagcaacagcaucgugguguucugcggcaccagcggcaccuacggcaccggcagcuggcccgacggcgccgacaucaaccugaugcccaucuga

SEQ ID NO: 181525 - RNA, 1410 nt, Artificial Sequence
  derived and/or modified CDS sequence (opt4) from neuraminidase__InfluenzaA__AEX34058
augaaccccaaccagaagaucaucaccaucggcagcgugagccugaccaucagcaccaucugcuucuucaugcagaucgccauccugaucaccaccgugacccugcacuucaagcaguacgaguucagcagcccccccaacaaccaggugaugcugugcgagcccgccaucaucgagagaaacaucaccgagaucguguaccugaccaacaccaccaucgagaaggagaucugccccaagcugaccgaguacagaaacuggagcaagccccagugcgacaucaccggcuucgcccccuucagcaaggacaacagcaucagacugagcgccggcggcgacaucugggugaccagagagcccuacgugagcugcgaccccgacaagugcuaccaguucgcccugggccagggcaccacccugaacaacgugcacagcaacgacaccgugcacgacagaacccccuacagaacccugcugaugaacgagcugggcgugcccuuccaccugggcaccaagcaggugugcaucgccuggagcagcagcagcugccacgacggcaaggccuggcugcacgugugcgugaccggcgacgacaagaacgccaccgccagcuucaucuacaacggcagacugguggacagcaucgugagcuggagcaaggagauccugagaacccaggagagcgagugcgugugcaucaacggcaccugcaccguggugaugaccgacggcagcgccagcggcaaggccgacaccaagauccuguucaucgaggagggcaagaucgugcacaccagcacccugagcggcagcgcccagcacguggaggagugcagcugcuaccccagauaccccggcgugagaugcgugugcagagacaacuggaagggcagcaacagacccaucguggacaucaacaucaaggacuacagcaucgugagcagauacgugugcagcggccuggugggcgacacccccagaaagaacgacagcagcagcagcagccacugccuggaccccaacaacgaggagggcggccacggcgugaagggcugggccuucgacgacggcaacgacguguggaugggcagaaccaucagcgagaagagcagaagcggcuacgagaccuucaaggugaucgagggcuggagcaaccccaacagcaagcugcagaucaacagacaggugaucguggacagaggcaacagaagcggcuacagcggcaucuucagcguggagggcaagagcugcaucaacagaugcuucuacguggagcugaucagaggcagaaaggaggagaccgaggugcuguggaccagcaacagcaucgugguguucugcggcaccagcggcaccuacggcaccggcagcuggcccgacggcgccgacaucaaccugaugcccaucuga

SEQ ID NO: 181526 - RNA, 1410 nt, Artificial Sequence
  derived and/or modified CDS sequence (opt4) from neuraminidase__InfluenzaA__AEX34103
augaaccccaaccagaagaucaucaccaucggcagcgugagccugaccaucagcaccaucugcuucuucaugcagaucgccauccugaucaccaccgugacccugcacuucaagcaguacgaguucagcagcccccccaacaaccaggugaugcugugcgagcccaccaucaucgagagaaacaucaccgagaucguguaccugaccaacaccaccaucgagaaggaggugugccccaagcuggccgaguacagaaacuggagcaagccccagugcgacaucaccggcuucgcccccuucagcaaggacaacagcaucagacugagcgccggcggcgacaucugggugaccagagagcccuacgugagcugcgaccccgacaagugcuaccaguucgcccugggccagggcaccacccugaacaacgugcacagcaacgacaccgugcacgacagaacccccuacagaacccugcugaugaacgagcugggcgugcccuuccaccugggcaccaagcaggugugcaucgccuggagcagcagcagcugccacgacggcaaggccuggcugcacgugugcgugaccggcgacgacaagaacgccaccgccagcuucaucuacaacggcagacugguggacagcaucgugagcuggagcaaggagauccugagaacccaggagagcgagugcgugugcaucaacggcaccugcaccguggugaugaccgacggcagcgccagcggcaaggccgacaccaagauccuguucaucgaggagggcaagaucgugcacaccagcacccugagcggcaacgcccagcacguggaggagugcagcugcuaccccagauaccccggcgugagaugcgugugcagagacaacuggaagggcagcaacagacccaucguggacaucaacaucaaggacuacagcaucgugagcagauacgugugcagcggccuggugggcgacacccccagaaagaacgacagcagcagcagcagccacugccuggaccccaacaacgaggagggcggccacggcgugaagggcugggccuucgacgacggcaacgacguguggaugggcagaaccaucagcgagaagagcagaagcggcuacgagaccuucaaggugaucgagggcuggagcaaccccaacagcaagcugcagaucaacagacaggugaucguggacagaggcaacagaagcggcuacagcggcaucuucagcguggagggcaagagcugcaucaacagaugcuucuacguggagcugaucagaggcagaaaggaggagaccaaggugcuguggaccagcaacagcaucgugguguucugcggcaccagcggcaccuacggcaccggcagcuggcccgacggcgccgacaucaaccugaugcccaucuga

SEQ ID NO: 181527 - RNA, 1410 nt, Artificial Sequence
  derived and/or modified CDS sequence (opt4) from neuraminidase__InfluenzaA__AEX34114
augaaccccaaccagaagaucaucaccaucggcagcgugagccugaccaucagcaccaucugcuucuucaugcagaucgccauccugaucaccaccgugacccugcacuucaagcaguacgaguucagcagcccccccaacaaccaggugaugcugugcgagcccgccaucaucgagagaaacaucaccgagaucguguaccccaccaacaccaccaucgagaaggagaucugccccaagcuggccgaguacagaaacuggagcaagccccagugcgacaucaccggcuucgcccccuucagcaaggacaacagcaucagacugagcgccggcggcgacaucugggugaccagagagcccuacgugagcugcgaccccgacaagugcuaccaguucgcccugggccagggcaccacccugaacaacgugcacagcaacgacaccgugcacgacagaacccccuacagaacccugcugaugaacgagcugggcgugcccuuccaccugggcaccaagcaggugugcaucgccuggagcagcagcagcugccacgacggcaaggccuggcugcacgugugcgugaccggcgacgacaagaacgccaccgccagcuucaucuacaacggcagacugguggacagcaucgugagcuggagcaaggagauccugagaacccaggagagcgagugcgugugcaucaacggcaccugcaccguggugaugaccgacggcagcgccagcggcaaggccgacaccaagauccuguucaucgaggagggcaagaucgugcacaccagcacccugagcggcagcgcccagcacguggaggagugcagcugcuaccccagauaccccggcgugagaugcgugugcagagacaacuggaagggcagcaacagacccaucguggacaucaacaucaaggacuacagcaucgugagcagauacgugugcagcggccuggugggcgacacccccagaaagaacgacagcagcagcagcagccacugccuggaccccaacaacgaggagggcggccacggcgugaagggcugggccuucgacgacggcaacgacguguggaugggcagaaccaucagcgagaagagcagaagcggcuacgagaccuucaaggugaucgagggcuggagcaaccccaacagcaagcugcagaucaacagacaggugaucguggacagaggcaacagaagcggcuacagcggcaucuucagcguggagggcaagagcugcaucaacagaugcuucuacguggagcugaucagaggcagaaaggaggagaccgaggugcuguggaccagcaacagcaucgugguguucugcggcaccagcggcaccuacggcaccggcagcuggcccgacggcgccgacaucaaccugaugcccaucuga

SEQ ID NO: 181528 - RNA, 1410 nt, Artificial Sequence
  derived and/or modified CDS sequence (opt4) from neuraminidase__InfluenzaA__AEX34137
augaaccccaaccagaagaucaucaccaucggcagcgugagccugaccaucagcaccaucugcuucuucaugcagaucgccauccugaucaccaccgugacccugcacuucaagcaguacgaguucaacagcccccccaacaaccaggugaugcugugcgagcccaccaucaucgagagaaacaucaccgagaucguguaccugaccaacaccaccaucgagaaggagaucugccccaagcuggccgaguacagaaacuggagcaagccccagugcgacaucaccggcuucgcccccuucagcaaggacaacagcaucagacugagcgccggcggcgacaucugggugaccagagagcccuacgugagcugcgaccccgacaagugcuaccaguucgcccugggccagggcaccacccugaacaacgugcacagcaacgacaccgugagaggcagaacccccuacagaacccugcugaugaacgagcugggcgugcccuuccaccugggcaccaagcaggugugcaucgccuggagcagcagcagcugccacgacggcaaggccuggcugcacgugugcaucaccggcgacgacaagaacgccaccgccagcuucaucuacaacggcagacugguggacagcaucgugagcuggagcaaggagauccugagaacccaggagagcgagugcgugugcaucaacggcaccugcaccguggugaugaccgacggcagcgccagcggcaaggccgacaccaagauccuguucaucgaggagggcaagaucgugcacaccagcacccugagcggcagcgcccagcacguggaggagugcagcugcuaccccagauaccccggcgugagaugcgugugcagagacaacuggaagggcagcaacagacccaucguggacaucaacaucaaggaccacagcaucgugagcagcuacgugugcagcggccuggugggcgacacccccagaaagaacgacagcagcagcagcagccacugccuggaccccaacaacgaggagggcggccacggcgugaagggcugggccuucgacgacggcaacgacguguggaugggcagaaccaucagcgagaagagcagacugggcuacgagaccuucaaggugaucgagggcuggagcaaccccaagagcaagcugcagaucaacagacaggugaucguggacagaggcaacagaagcggcuacagcggcaucuucagcguggagggcaagagcugcaucaacagaugcuucuacguggagcugaucagaggcagaaaggaggagaccgaggugcuguggaccagcaacagcaucgugguguucugcggcaccagcggcaccuacggcaccggcagcuggcccgacggcgccgacaucaaccugaugcccaucuga

SEQ ID NO: 181529 - RNA, 1410 nt, Artificial Sequence
  derived and/or modified CDS sequence (opt4) from neuraminidase__InfluenzaA__AEX34191
augaaccccaaccagaagaucaucaccaucggcagcgugagccugagcaucagcaccaucugcuucuucaugcagaucgccauccugaucaccaccgugacccugcacuucaagcaguacgaguucaacagcagccccaacaaccaggugaugcugugcgagcccaccaucaucgagagaaacaucaccgagaucguguaccugaccaacaccaccaucgagaaggagaucugccccaagcuggccgaguacagaaacuggagcaagccccagugcgacaucaccggcuucgcccccuucagcaaggacaacagcaucagacugagcgccggcggcgacaucugggugaccagagagcccuacgugagcugcgaccccgacaagugcuaccaguucgcccugggccagggcaccacccugaacaacgugcacagcaacaacaccgugagagacagaacccccuacagaacccugcugaugaacgagcugggcgugcccuuccaccugggcaccaagcaggugugcaucgccuggagcagcagcagcugccacgacggcaaggccuggcugcacgugugcaucaccggcgacgacaagaacgccaccgccagcuucaucuacaacggcagacugguggacagcaucgugagcuggagcaaggagauccugagaacccaggagagcgagugcgugugcaucaacggcaccugcaccguggugaugaccgacggcagcgccagcggcaaggccgacaccaagauccuguucaucgaggagggcaagaucgugcacaccagcacccugagcggcagcgcccagcacguggaggagugcagcugcuaccccagauaccccggcgugagaugcgugugcagagacaacuggaagggcagcaacagacccaucguggacaucaacaucaaggaccacagcaucgugagcagcuacgugugcagcggccuggugggcgacacccccagaaagaacgacagcagcagcagcagccacugccuggaccccaacaacgaggagggcggccacggcgugaagggcugggccuucgacgacggcaacgacguguggaugggcagaaccaucagcgagaagagcagacugggcuacgagaccuucaaggugaucgagggcuggagcaaccccaagagcaagcugcagaucaacagacaggugaucguggacagaggcaacagaagcggcuacagcggcaucuucagcguggagggcaagagcugcaucaacagaugcuucuacguggagcugaucagaggcagaaaggaggagaccgaggugcuguggaccagcaacagcaucgugguguucugcggcaccagcggcaccuacggcaccggcagcuggcccgacggcgccgacaucaaccugaugcccaucuga

SEQ ID NO: 181530 - RNA, 1410 nt, Artificial Sequence
  derived and/or modified CDS sequence (opt4) from neuraminidase__InfluenzaA__AEX34224
augaaccccaaccagaagaucaucaccaucggcagcgugagccugaccaucagcaccaucugcuucuucaugcagaucgccauccugaucaccaccgugacccugcacuucaagcaguacgaguucagcagcccccccaacaaccaggugaugcugugcgagcccaccaucaucgagagaaacaucaccgagaucguguaccugaccaacaccaccaucgagaaggagaucugccccaagcuggccgaguacagaaacuggagcaagccccagugcgacaucaccggcuucgcccccuucagcaaggacaacagcaucagacugagcgccggcggcgacaucugggugaccagagagcccuacgugagcugcgaccccgacaagugcuaccaguucgcccugggccagggcaccacccugaacaacgugcacagcaacgacaccgugcacggcagaacccccuacagaacccugcugaugaacgagcugggcgugcccuuccaccugggcaccaagcaggugugcaucgccuggagcagcagcagcugccacgacggcaaggccuggcugcacgugugcgugaccggcgacgacaagaacgccaccgccagcuucaucuacaacggcagacugguggacagcaucgugagcuggagcaaggagauccugagaacccaggagagcgagugcgugugcaucaacggcaccugcaccguggugaugaccgacggcagcgccagcggcaaggccgacaccaagauccuguucaucgaggagggcaagaucgugcacaccagcacccugagcggcagcgcccagcacguggaggagugcagcugcuaccccagauaccccggcgugagaugcgugugcagagacaacuggaagggcagcaacagacccaucguggacaucaacaucaaggacuacagcaucgugagcagauacgugugcagcggccuggugggcgacacccccagaaagaacgacagcagcagcagcagccacugccuggaccccaacaacgaggagggcggccacggcgugaagggcugggccuucgacgacggcaacgacguguggaugggcagaaccaucagcgagaagcugagaagcggcuacgagaccuucaaggugaucgagggcuggagcaaccccaacagcaagcugcagaucaacagacaggugaucguggacagaggcaacagaagcggcuacagcggcaucuucagcguggagggcaagagcugcaucaacagaugcuucuacguggagcugaucagaggcagaaaggaggagaccgaggugcuguggaccagcaacagcaucgugguguucugcggcaccagcggcaccuacggcaccggcagcuggcccgacggcgccgacaucaaccugaugcccaucuga

SEQ ID NO: 181531 - RNA, 1410 nt, Artificial Sequence
  derived and/or modified CDS sequence (opt4) from neuraminidase__InfluenzaA__AEX34235
augaaccccaaccagaagaucaucaccaucggcagcgugagccugaccaucagcaccaucugcuucuucaugcagaucgccauccugaucaccaccgugacccugcacuucaagcaguacgaguucagcagcccccccaacaaccaggugaugcugugcgagcccgccaucaucgagagaaacaucaccgagaucguguaccugaccaacaccaccaucgagaaggagaucugccccaagcuggccgaguacagaaacuggagcaagccccagugcgacaucaccggcuucgcccccuucagcaaggacaacagcaucagacugagcgccggcggcgacaucugggugaccagagagcccuacgugagcugcgaccccgacaagugcuaccaguucgcccugggccagggcaccacccugaacaacgugcacagcaacgacaccgugcacgacagaacccccuacagaacccugcugaugaacgagcugggcgugcccuuccaccugggcaccaagcaggugugcaucgccuggagcagcagcagcugccacgacggcaaggccuggcugcacgugugcgugaccggcgacgacaagaacgccaccgccagcuucaucuacaacggcagacugguggacagcaucgugagcuggagcaaggagauccugagaacccaggagagcgagugcgugugcaucaacggcaccugcaccguggugaugaccgacggcagcgccagcggcaaggccgacaccaagauccuguucaucgaggagggcaagaucgugcacaccagcacccugagcggcagcgcccagcacguggaggagugcagcugcuaccccagauaccccggcgugagaugcgugugcagagacaacuggaagggcagcaacagacccaucguggacaucaacaucaaggacuacagcaucgugagcagauacgugugcagcggccuggugggcgacacccccagaaagagcgacagcagcagcagcagccacugccuggaccccaacaacgaggagggcggccacggcgugaagggcugggccuucgacgacggcaacgacguguggaugggcagaaccaucagcgagaagagcagaagcggcuacgagaccuucaaggugaucgagggcuggagcaaccccaacagcaagcugcagaucaacagacaggugaucguggacagaggcaacagaagcggcuacagcggcaucuucagcguggagggcaagagcugcaucaacagaugcuucuacguggagcugaucagaggcagaaaggaggagaccgaggugcuguggaccagcaacagcaucgugguguucugcggcaccagcggcaccuacggcaccggcagcuggcccgacggcgccgacaucaaccugaugcccaucuga

SEQ ID NO: 181532 - RNA, 1410 nt, Artificial Sequence
  derived and/or modified CDS sequence (opt4) from neuraminidase__InfluenzaA__AEX34246
augaaccccaaccagaagaucaucaccaucggcagcgugagccugaccaucagcaccaucugcuucuucaugcagaucgccauccugaucaccaccgugacccugcacuucaagcaguacgaguucaacagcccccccaacaaccaggugaugcugugcgagcccaccaucaucgagagaaacaucaccgagaucguguaccugaccaacaccaccaucgagaaggagaucugccccaagcuggccgaguacagaaacuggagcaagccccagugcgacaucaccggcuucgcccccuucagcaaggacaacagcaucagacugagcgccggcggcgacaucugggugaccagagagcccuacgugagcugcgaccccgacaagugcuaccaguucgcccugggccagggcaccacccugaacaacgugcacagcaacgacaccgugagaggcagaacccccuacagaacccugcugaugaacgagcugggcgugcccuuccaccugggcaccaagcaggugugcaucgccuggagcagcagcagcugccacgacggcaaggccuggcugcacgugugcaucaccggcgacgacaagaacgccaccgccagcuucaucuacaacggcagacugguggacagcaucgugagcuggagcaaggagauccugagaacccaggagagcgagugcgugugcaucaacggcaccugcaccguggugaugaccgacggcagcgccagcggcaaggccgacaccaagauccuguucaucgaggagggcaagaucgugcacaccagcacccugagcggcagcgcccagcacguggaggagugcagcugcuaccccagauaccccggcgugagaugcgugugcagagacaacuggaagggcagcaacagacccaucguggacaucaacaucaaggaccacagcaucgugagcagcuacgugugcagcggccuggugggcgacacccccagaaagaacgacagcagcagcagcagccacugccuggaccccaacaacgaggagggcggccacggcgugaagggcugggccuucgacgacggcaacgacguguggaugggcagaaccaucagcgagaagagcagacugggcuacgagaccuucaaggugaucgagggcuggagcaaccccaagagcaagcugcaggugaacagacaggugaucguggacagaggcaacagaagcggcuacagcggcaucuucagcguggagggcaagagcugcaucaacagaugcuucuacguggagcugaucagaggcagaaaggaggagaccgaggugcuguggaccagcaacagcaucgugguguucugcggcaccagcggcaccuacggcaccggcagcuggcccgacggcgccgacaucaaccugaugcccaucuga

SEQ ID NO: 181533 - RNA, 1410 nt, Artificial Sequence
  derived and/or modified CDS sequence (opt4) from neuraminidase__InfluenzaA__AEX34257
augaaccccaaccagaagaucaucaccaucggcagcgugagccugaccaucagcaccaucugcuucuucaugcagaucgccauccugaucaccaccgugacccugcacuucaagcaguacgaguucaacagcagccccaacaaccaggugaugcugugcgagcccaccaucaucgagagaaacaucaccgagaucguguaccugaccaacaccaccaucgagaaggagaucugccccaagcuggccgaguacagaaacuggagcaagccccagugcgacaucaccggcuucgcccccuucagcaaggacaacagcaucagacugagcgccggcggcgacaucugggugaccagagagcccuacgugagcugcgaccccgacaagugcuaccaguucgcccugggccagggcaccacccugaacaacgugcacagcaacaacaccgugagaaacagaacccccuacagaacccugcugaugaacgagcugggcgugcccuuccaccugggcaccaagcaggugugcaucgccuggagcagcagcagcugccacgacggcaaggccuggcugcacgugugcaucaccggcgacgacaagaacgccaccgccagcuucaucuacaacggcagacugguggacagcaucgugagcuggagcaaggagauccugagaacccaggagagcgagugcgugugcaucaacggcaccugcaccguggugaugaccgacggcagcgccagcggcaaggccgacaccaagauccuguucaucgaggagggcaagaucgugcacaccagcacccugagcggcagcgcccagcacguggaggagugcagcugcuaccccagauaccccggcgugagaugcgugugcagagacaacuggaagggcagcaacagacccaucguggacaucaacaucaaggaccacagcaucgugagcagcuacgugugcagcggccuggugggcgacacccccagaaagaacgacagcagcagcagcagccacugccuggaccccaacaacgaggagggcggccacggcgugaagggcugggccuucgacgacggcaacgacguguggaugggcagaaccaucagcgagaagagcagacugggcuacgagaccuucaaggugaucgagggcuggagcaaccccaagagcaagcugcagaucaacagacaggugaucguggacagaggcaacagaagcggcuacagcggcaucuucagcguggagggcaagagcugcaucaacagaugcuucuacguggagcugaucagaggcagaaaggaggagaccgaggugcuguggaccagcaacagcaucgugguguucugcggcaccagcggcaccuacggcaccggcagcuggcccgacggcgccgacaucaaccugaugcccaucuga

SEQ ID NO: 181534 - RNA, 1410 nt, Artificial Sequence
  derived and/or modified CDS sequence (opt4) from neuraminidase__InfluenzaA__AEX34268
augaaccccaacaagaagaucaucaccaucggcagcgugagccugaccaucagcaccaucugcuucuucaugcagaucgccauccugaucaccaccgugacccugcacuucaagcaguacgaguucaacagcccccccaacaaccaggugaugcugugcgagcccaccaucaucgagagaaacaucaccgagaucguguaccugaccaacaccaccaucgagaaggagaucugccccaagcuggccgaguacagaaacuggagcaagccccagugcgacaucaccggcuucgcccccuucagcaaggacaacagcaucagacugagcgccggcggcgacaucugggugaccagagagcccuacgugagcugcgaccccgacaagugcuaccaguucgcccugggccagggcaccacccugaacaacgugcacagcaacgacaccgugagaaacagaacccccuacagaacccugcugaugaacgagcugggcgugcccuuccaccugggcaccaagcaggugugcaucgccuggagcagcagcagcugccacgacggcaaggccuggcugcacgugugcaucaccggcgacgacaagaacgccaccgccagcuucaucuacaacggcagacugguggacagcaucgugagcuggagcaaggagauccugagaacccaggagagcgagugcgugugcaucaacggcaccugcaccguggugaugaccgacggcagcgccagcggcaaggccgacaccaagauccuguucaucgaggagggcaagaucgugcacaccagcaagcugagcggcagcgcccagcacguggaggagugcagcugcuaccccagauaccccggcgugagaugcgugugcagagacaacuggaagggcagcaacagacccaucguggacaucaacaucaaggaccacagcaucgugagcagcuacgugugcagcggccuggugggcgacacccccagaaagaacgacagcagcagcagcagccacugccuggaccccaacaacgaggagggcggccacggcgugaagggcugggccuucgacgacggcaacgacguguggaugggcagaaccaucagcgagaagagcagacugggcuacgagaccuucaaggugaucgagggcuggagcaaccccaagagcaagcugcagaucaacagacaggugaucguggacagaggcaacagaagcggcuacagcggcaucuucagcguggagggcaagagcugcaucaacagaugcuucuacguggagcugaucagaggcagaaaggaggagaccgaggugcuguggaccagcaacagcaucgugguguucugcggcaccagcggcaccuacggcaccggcagcuggcccgacggcgccgacaucaaccugaugcccaucuga

SEQ ID NO: 181535 - RNA, 1410 nt, Artificial Sequence
  derived and/or modified CDS sequence (opt4) from neuraminidase__InfluenzaA__AEX34278
augaaccccaaccagaagaucaucaccaucggcagcgugagccugaccaucagcaccaucugcuucuucaugcagaucgccauccugaucaccaccgugacccugcacuucaagcaguacgaguucagcagcccccccaacaaccaggugaugcugugcgagcccgccaucaucgagagaaacaucaccgagaucguguaccugaccaacaccaccaucgagaaggagaucugccccaagcuggccgaguacagaaacuggagcaagccccagugcgacaucaccggcuucgcccccuucagcaaggacaacagcaucagacugagcgccggcggcgacaucugggugaccagagagcccuacgugagcugcgaccccgacaagugcuaccaguucgcccugggccagggcaccacccugaacaacgugcacagcaacgacaccgugcacgacagaacccccuacagaacccugcugaugaacgagcugggcgugcccuuccaccugggcaccaagcaggugugcaucgccuggagcagcagcagcugccacgacggcaaggccuggcugcacgugugcgugaccggcgacgacaagaacgccaccgccagcuucaucuacaacggcagacugguggacagcaucgugagcuggagcaaggagauccugagaacccaggagagcgagugcgugugcaucaacggcaccugcaccguggugaugaccgacggcagcgccagcggcaaggccgacaccaagauccuguucaucgaggagggcaagaucgugcacaccagcacccugagcggcagcgcccagcacguggaggagugcagcugcuaccccagauaccccggcgugagaugcgugugcagagacaacuggaagggcagcaacagacccaucguggacaucaacaucaaggacuacagcaucgugagcagauacgugugcagcggccuggugggcgacacccccagaaagaacgacagcagcagcagcagccacugccuggaccccaacaacgagaagggcggccacggcgugaagggcugggccuucgacgacggcaacgacguguggaugggcagaaccaucagcgagaagagcagaagcggcuacgagaccuucaaggugaucgagggcuggagcaaccccaacagcaagcugcagaucaacagacaggugaucguggacagaggcaacagaagcggcuacagcggcaucuucagcguggagggcaagagcugcaucaacagaugcuucuacguggagcugaucagaggcagaaaggaggagaccgaggugcuguggaccagcaacagcaucgugguguucugcggcaccagcggcaccuacggcaccggcagcuggcccgacggcgccgacaucaaccugaugcccaucuga

SEQ ID NO: 181536 - RNA, 1413 nt, Artificial Sequence
  derived and/or modified CDS sequence (opt4) from neuraminidase__InfluenzaA__AEX34310
augaaccccaaccagaagaucaucaccaucggcagcaucagcaucgccaucggcaucaucagccugaugcugcagaucggcaacaucaucagcaucugggccagccacagcauccagaccggcacccagaaccacaccggcaucugcaaccagagaaucaucaccuacgagaacagcaccugggugaaccacaccuacgugaacaucaacaacaccaacgugguggccggcaaggacaagacccccgugacccuggugggcaacagcagccugugcagcaucagcggcugggccaucuacaccaaggacaacagcaucagaaucggcagcaagggcgacguguucgugaucagagagcccuucaucagcugcagccaccuggagugcaagaccuucuuccugacccagggcgcccugcugaacgacaagcacagcaacggcaccgugaaggacagaagccccuacagagcccugaugagcugcccccugggcgaggcccccagccccuacaacagcaaguucgagagcguggccuggagcgccagcgccugccacgacggcaucggcuggcugaccaucggcaucagcggccccgacaacggcgccguggccgugcugaaguacaagggcaucaucaccggcaccaucaagagcuggaagaagcagauccugagaacccaggagagcgagugcgugugcaugaacggcagcugcuucaccaucaugaccgacggccccagcaacggcgccgccagcuacaagaucuucaagaucgagaagggcaaggugaccaagagcauggagcugaacgcccccaacuuccacuacgaggagugcagcugcuaccccgacaccggcaccgugaugugcgugugcagagacaacuggcacggcagcaacagacccugggugagcuucaaccagaaccuggacuaccagaucggcuacaucugcagcggcguguucggcgacaaccccagacccaaggacagagagggcagcugcaaccccgugaccguggacggcgccaacggcgugaagggcuucagcuacaaguacggcaacggcguguggaucggcagaaccaagagcaacagaaucagaaagggcuucgagaugaucugggaccccaacggcuggaccaacaccgacagcgacuucagcgugaagcaggacaucguggccaucaccgacuggagcggcuacagcggcagcuucgugcagcaccccgagcugaccggccuggacugcaucagacccugcuucuggguggagcuggugagaggccugcccggcgagaacaccaccaucuggaccagcggcagcagcaucagcuucugcggcgugaacggcgacaucgccaacuggagcuggcccgacggcgccgagcugcccuucaccaucgacaaguga

SEQ ID NO: 181537 - RNA, 1413 nt, Artificial Sequence
  derived and/or modified CDS sequence (opt4) from neuraminidase__InfluenzaA__AEX34321
augaaccccaaccagaagaucaucaccaucggcagcaucagcaucgccaucggcaucaucagccugaugcugcagaucggcaacaucaucagcaucugggugagccacagcauccagaccggcagccagaacaacaccggcaucugcaaccagagaaucaucaccuacgagaacagcaccugggugaaccacaccuacgugaacaucaacaacaccaacgugguggccggcgaggacaagaccagcgugacccuggccggcaacagcagccugugcagcaucagcggcugggccaucuacaccaaggacaacagcaucagaaucggcagcaagggcgacguguucgugaucagagagcccuucaucagcugcagccaccuggagugcagaaccuucuuccugacccagggcgcccugcugaacgacaagcacagcaacggcaccgugaaggacagaagccccuacagagcccugaugagcugcccccugggcgaggcccccagccccuacaacagcaaguucgagagcguggccuggagcgccagcgccugccacgacggcaugggcuggcugaccaucggcaucagcggccccgacaacggcgccguggccgugcugaaguacaacggcaucaucaccggcaccaucaagagcuggaagaagcagauccugagaacccaggagagcgagugcgugugcaugaacggcagcugcuucaccaucaugaccgacggccccagcaacaaggccgccagcuacaagaucuucaagaucgagaagggcaaggugaccaagagcaucgagcugaacgcccccaacuucuacuacgaggagugcagcugcuaccccgacaccggcaucgugaugugcgugugcagagacaacuggcacggcagcaacagacccugggugagcuucaaccagaaccuggacuaccagaucggcuacaucugcagcggcguguucggcgacaaccccagacccgaggacggcgagggcagcugcaaccccgugaccguggacggcgccaacggcgugaagggcuucagcuacaaguacggcaacggcguguggaucggcagaaccaagagcaacagacugagaaagggcuucgagaugaucugggaccccaacggcuggaccaacaccgacagcgacuucagcgugaagcaggacgugguggccaucaccgacuggagcggcuacagcggcagcuucgugcagcaccccgagcugaccggccuggacugcaucagacccugcuucuggguggagcuggugagaggccugcccagagagaacaccaccaucuggaccagcggcagcagcaucagcuucugcggcgugaacagcgacaccgccaacuggagcuggcccgacggcgccgagcugcccuucaccaucgacaaguga

SEQ ID NO: 181538 - RNA, 1410 nt, Artificial Sequence; identical to SEQ ID NO: 176117
  derived and/or modified CDS sequence (opt4) from neuraminidase__InfluenzaA__AEX34356

SEQ ID NO: 181539 - RNA, 1410 nt, Artificial Sequence
  derived and/or modified CDS sequence (opt4) from neuraminidase__InfluenzaA__AEX34367
augaaccccaaccagaagaucaucaccaucggcagcgugagccugaccaucagcaccaucugcuucuucaugcagaucgccauccugaucaccaccgugacccugcacuucaagcaguacgaguucaacagcccccccaacaaccaggugaugcugugcgagcccaccaucaucgagagaaacaucaccgagaucguguaccugaccaacaccaccaucgagaaggagaucugccccaagcuggccgaguacagaaacuggagcaagccccagugcgacaucaccggcuucgcccccuucagcaaggacaacagcaucagacugagcgccggcggcgacaucugggugaccagagagcccuacgugagcugcgaccccgacaagugcuaccaguucgcccugggccagggcaccacccugaacaacgugcacagcaacgacaccgugagagacagaacccccuacagaacccugcugaugaacgagcugggcgugcccuuccaccugggcaccaagcaggugugcaucgccuggagcagcagcagcugccacgacggcaaggccuggcugcacgugugcaucaccggcgacgacaagaacgccaccgccagcuucaucuacaacggcagacugguggacagcaucgugagcuggagcaaggagauccugagaacccaggagagcgagugcgugugcaucaacggcaccugcaccguggugaugaccgacggcagcgccagcggcaaggccgacaccaagauccuguucaucgaggagggcaagaucgugcacaccagcacccugagcggcagcgccaagcacguggaggagugcagcugcuaccccagacaccccggcgugagaugcgugugcagagacaacuggaagggcagcaacagacccaucguggacaucaacaucaaggaccacagcaucgugagcagcuacgugugcagcggccuggugggcgacacccccagaaagaacgacagcagcagcagcagccacugccuggaccccaacaacgaggagggcggccacggcgugaagggcugggccuucgacgacggcaacgacguguggaugggcagaaccaucagcgagaagagcagacugggcuacgagaccuucaaggugaucgagggcuggagcaaccccaagagcaagcugcagaucaacagacaggugaucguggacagaggcaacagaagcggcuacagcggcaucuucagcguggagggcaagagcugcaucaacagaugcuucuacguggagcugaucagaggcagaaaggaggagaccgaggugcuguggaccagcaacagcaucgugguguucugcggcaccagcggcaccuacggcaccggcagcuggcccgacggcgccgacaucaaccugaugcccaucuga

SEQ ID NO: 181540 - RNA, 1410 nt, Artificial Sequence
  derived and/or modified CDS sequence (opt4) from neuraminidase__InfluenzaA__AEX34378
augaaccccaaccagaagaucaucaccaucggcagcgugagccugaccaucagcaccaucugcuucuucaugcagaucgccauccugaucaccaccgugacccugcacuucaagcaguacgaguucaacagcccccccaacaaccaggugaugcugugcgagcccaccaucaucgagagaaacaucaccgagaucguguaccugaccaacaccaccaucgagaaggagaucugccccaaccuggccgaguacagaaacuggagcaagccccagugcgacaucaccggcuucgcccccuucagcaaggacaacagcaucagacugagcgccggcggcgacaucugggugaccagagagcccuacgugagcugcgaccccgacaagugcuaccaguucgcccugggccagggcaccacccugaacaacgugcacagcaacgacaccgugagagacagaacccccuacagaacccugcugaugaacgagcugggcgugcccuuccaccugggcaccaagcaggugugcaucgccuggagcagcagcagcugccacgacggcaaggccuggcugcacgugugcaucaccggcgacgacaagaacgccaccgccagcuucaucuacaacggcagacugguggacagcaucgugagcuggagcaaggagauccugagaacccaggagagcgagugcgugugcaucaacggcaccugcaccguggugaugaccgacggcagcgccagcggcaaggccgacaccaagauccuguucaucgaggagggcaagaucgugcacaccagcacccugagcggcagcgccaagcacguggaggagugcagcugcuaccccagacaccccggcgugagaugcgugugcagagacaacuggaagggcagcaacagacccaucguggacaucaacaucaaggaccacagcaucgugagcagcuacgugugcagcggccuggugggcgacacccccagaaagaacgacagcagcagcagcagccacugccuggaccccaacaacgaggagggcggccacggcgugaagggcugggccuucgacgacggcaacgacguguggaugggcagaaccaucagcgagaagagcagacugggcuacgagaccuucaaggugaucgagggcuggagcaaccccaagagcaagcugcagaucaacagacaggugaucguggacagaggcaacagaagcggcuacagcggcaucuucagcguggagggcaagagcugcaucaacagaugcuucuacguggagcugaucagaggcagaaaggaggagaccgaggugcuguggaccagcaacagcaucgugguguucugcggcaccagcggcaccuacggcaccggcagcuggcccgacggcgccgacaucaaccugaugcccaucuga

SEQ ID NO: 181541 - RNA, 1410 nt, Artificial Sequence
  derived and/or modified CDS sequence (opt4) from neuraminidase__InfluenzaA__AEX34400
augaaccccaaccagaagaucaucaccaucggcagcgugagccugaccaucagcaccaucugcuucuucaugcagaucgccauccugaucaccaccgugacccugcacuucaagcaguacgaguucaacagcccccccaacaaccaggugaugcugugcgagcccaccaucaucgagagaaacaucaccgagaucguguaccugaccaacaccaccaucgagaaggagaucugccccaagcuggccgaguacagaaacuggagcaagccccagugcgacaucaccggcuucgcccccuucagcaaggacaacagcaucagacugagcgccggcggcgacaucugggugaccagagagcccuacgugagcugcgaccccgacaagugcuaccaguucgcccugggccagggcaccacccugaacaacgugcacagcaacgacaccgugagaggcagaacccccuacagaacccugcugaugaacgagcugggcgugcccuuccaccugggcaccaagcaggugugcaucgccuggagcagcagcagcugccacgacggcaaggccuggcugcacgugugcaucaccggcgacgacaagaacgccaccgccagcuucaucuacaacggcagacugguggacagcguggugagcuggagcaaggagauccugagaacccaggagagcgagugcgugugcaucaacggcaccugcaccguggugaugaccgacggcagcgccagcggcaaggccgacaccaagauccuguucaucaaggagggcaagaucgugcacaccagcacccugagcggcagcgcccagcacguggaggagugcagcugcuaccccagauaccccggcgugagaugcgugugcagagacaacuggaagggcagcaacagacccaucguggacaucaacaucaaggaccacagcaucgugagcagcuacgugugcagcggccuggugggcgacacccccagaaagaacgacagcagcagcagcagccacugccuggaccccaacaacgaggagggcggccacggcgugaagggcugggccuucgacgacggcaacgacguguggaugggcagaaccaucagcgagaagagcagacugggcuacgagaccuucaaggugaucgagggcuggagcaaccccaagagcaagcugcagaucaacagacaggugaucguggacagaggcaacagaagcggcuacagcggcaucuucagcguggagggcaagagcugcaucaacagaugcuucuacguggagcugaucagaggcagaaaggaggagaccgaggugcuguggaccagcaacagcaucgugguguucugcggcaccagcggcaccuacggcaccggcagcuggcccgacggcgccgacaucaaccugaugcccaucuga

SEQ ID NO: 181542 - RNA, 1413 nt, Artificial Sequence
  derived and/or modified CDS sequence (opt4) from neuraminidase__InfluenzaA__AEX34432
augaaccccaaccagaagaucaucaccaucggcagcaucagcaucgccaucggcaucaucagccugauccugcagaucggcaacaucaucagcaucugggccagccacagcauccagaccggcagccagaaccacaccggcaucugcaaccagagaaucaucaccuacgagaacagcaccugggugaacaacaccuacgugaacaucaacaacaccaacguggugguggagaaggacaagaccagcgugacccuggccggcaacagcagccugugcagcaucagcggcugggccaucuacaccaaggacaacagcaucagaaucggcagcaagggcgacguguucgugaucagagagcccuucaucagcugcagccaccuggagugcagaaccuucuuccugacccagggcgcccugcugaacgacaagcacagcaacggcaccgugaaggacagaagccccuacagagcccugaugagcugcccccugggcgaggcccccagccccuacaacagcagauucgagagcguggccuggagcgccagcgccugccacgacggcaugggcuggcugaccaucggcaucagcggccccgacaacggcgccguggccgugcugaaguacaacggcaucaucaccgagaccaucaagagcuggaagaagagaauccugagaacccaggagagcgagugcgugugcaugaacggcagcugcuucaccaucaugaccgacggccccagcaacggcaccgccagcuacaagaucuucaagaucgagaagggcaaggugaccaagaccaucgagcugaacgcccccaacuuccacuacgaggagugcagcugcuaccccgacaccggcaccgugaugugcgugugcagagacaacuggcacggcagcaacagacccugggugagcuucaaccagaaccuggacuaccagaucggcuacaucugcagcggcguguucggcgacaaccccagacccaaggacggcgagggcagcugcaaccccgugaccguggacggcgccgacggcgugaagggcuucagcuacaaguacggcaacggcguguggaucggcagaaccaagagcaacagacugagaaagggcuucgagaugaucugggaccccaacggcuggaccaacaccgacagcgacuucagcgugaagcaggacgugguggccaucaccgacuggagcggcuacagcggcagcuucgugcagcaccccgagcugaccggccuggacugcaucagacccugcuucuggguggagcuggugagaggccugcccagagagaacaccaccaucuggaccagcggcagcagcaucagcuucugcggcgugaacagcggcaccgccaacuggagcuggcccgacggcgccgagcugcccuucaccaucgacaaguga

SEQ ID NO: 181543 - RNA, 1413 nt, Artificial Sequence; identical to SEQ ID NO: 181542
  derived and/or modified CDS sequence (opt4) from neuraminidase__InfluenzaA__AEX34443

SEQ ID NO: 181544 - RNA, 1410 nt, Artificial Sequence; identical to SEQ ID NO: 176663
  derived and/or modified CDS sequence (opt4) from neuraminidase__InfluenzaA__AEX34454

SEQ ID NO: 181545 - RNA, 1413 nt, Artificial Sequence
  derived and/or modified CDS sequence (opt4) from neuraminidase__InfluenzaA__AEX34465
augaaccccaaccagaagaucaucaccaucggcagcaucagcaucgccaucggcaucaucagccugaugcugcagaucggcaacaucaucagcaucugggccagccacagcauccagaccggcagccagaaccacaccggcaucugcaaccagagaaucaucaccuacgagaacagcaccugggugaaccacaccuacgugaacaucaacaacaccaacgugguggccggcaaggacaagaccagcgugacccuggccggcaacagcagccugugcagcaucagcggcugggccaucuacaccaaggacaacagcaucagaaucggcagcaagggcgacguguucgugaucagagagcccuucaucagcugcagccaccuggagugcagaaccuucuuccugacccagggcgcccugcugaacgacaagcacagcaacggcaccgugaaggacagaagccccuacagagcccugaugagcugcccccugggcgaggcccccagccccuacaacagcaaguucgagagcguggccuggagcgccagcgccugccacgacggcaugggcuggcugaccaucggcaucagcggccccgacaacggcgccguggccgugcugaaguacaacggcaucaucaccgagaccaucaagagcuggaagaagagaauccugagaacccaggagagcgagugcgugugcgugaacggcagcugcuucaccaucaugaccgacggccccagcaacggcgccgccagcuacaagaucuucaagaucgagaagggcaaggugaccaagagcaucgagcugaacgcccccaacuuccacuacgaggagugcagcugcuaccccgacaccggcaccgugaugugcgugugcagagacaacuggcacggcagcaacagacccugggugagcuucaaccagaaccuggacuaccagaucggcuacaucugcagcggcguguucggcgacaaccccagacccaaggacggcgagggcagcugcaaccccgugaccguggacggcgccgacggcaucaagggcuucagcuacaaguacggcaacggcguguggaucggcagaaccaagagcaacagacugagaaagggcuucgagaugaucugggaccccaacggcuggaccgacaccgacagcgacuucagcgugaagcaggacgugguggccaucaccgacuggagcggcuacagcggcagcuucgugcagcaccccgagcugaccggccuggacugcaugagacccugcuucuggguggagcuggugagaggccugcccagagagaacaccaccaucuggaccagcggcagcagcaucagcuucugcggcgugaacagcgacaccgccaacuggagcuggcccgacggcgccgagcugcccuucaccaucgacaaguga

SEQ ID NO: 181546 - RNA, 1413 nt, Artificial Sequence; identical to SEQ ID NO: 181499
  derived and/or modified CDS sequence (opt4) from neuraminidase__InfluenzaA__AEX34476

SEQ ID NO: 181547 - RNA, 1413 nt, Artificial Sequence; identical to SEQ ID NO: 181501
  derived and/or modified CDS sequence (opt4) from neuraminidase__InfluenzaA__AEX34487

SEQ ID NO: 181548 - RNA, 1413 nt, Artificial Sequence; identical to SEQ ID NO: 181501
  derived and/or modified CDS sequence (opt4) from neuraminidase__InfluenzaA__AEX34498

SEQ ID NO: 181549 - RNA, 1413 nt, Artificial Sequence; identical to SEQ ID NO: 181501
  derived and/or modified CDS sequence (opt4) from neuraminidase__InfluenzaA__AEX34509

SEQ ID NO: 181550 - RNA, 1413 nt, Artificial Sequence; identical to SEQ ID NO: 181501
  derived and/or modified CDS sequence (opt4) from neuraminidase__InfluenzaA__AEX34520

SEQ ID NO: 181551 - RNA, 1413 nt, Artificial Sequence; identical to SEQ ID NO: 181501
  derived and/or modified CDS sequence (opt4) from neuraminidase__InfluenzaA__AEX34531

SEQ ID NO: 181552 - RNA, 1413 nt, Artificial Sequence; identical to SEQ ID NO: 181501
  derived and/or modified CDS sequence (opt4) from neuraminidase__InfluenzaA__AEX34542

SEQ ID NO: 181553 - RNA, 1413 nt, Artificial Sequence; identical to SEQ ID NO: 181501
  derived and/or modified CDS sequence (opt4) from neuraminidase__InfluenzaA__AEX34553

SEQ ID NO: 181554 - RNA, 1413 nt, Artificial Sequence; identical to SEQ ID NO: 181501
  derived and/or modified CDS sequence (opt4) from neuraminidase__InfluenzaA__AEX34564

SEQ ID NO: 181555 - RNA, 1413 nt, Artificial Sequence; identical to SEQ ID NO: 181501
  derived and/or modified CDS sequence (opt4) from neuraminidase__InfluenzaA__AEX34575

SEQ ID NO: 181556 - RNA, 1413 nt, Artificial Sequence; identical to SEQ ID NO: 181501
  derived and/or modified CDS sequence (opt4) from neuraminidase__InfluenzaA__AEX34586

SEQ ID NO: 181557 - RNA, 1413 nt, Artificial Sequence; identical to SEQ ID NO: 181501
  derived and/or modified CDS sequence (opt4) from neuraminidase__InfluenzaA__AEX34597

SEQ ID NO: 181558 - RNA, 1413 nt, Artificial Sequence; identical to SEQ ID NO: 181501
  derived and/or modified CDS sequence (opt4) from neuraminidase__InfluenzaA__AEX34608

SEQ ID NO: 181559 - RNA, 1413 nt, Artificial Sequence; identical to SEQ ID NO: 181501
  derived and/or modified CDS sequence (opt4) from neuraminidase__InfluenzaA__AEX34619

SEQ ID NO: 181560 - RNA, 1413 nt, Artificial Sequence; identical to SEQ ID NO: 181501
  derived and/or modified CDS sequence (opt4) from neuraminidase__InfluenzaA__AEX34630

SEQ ID NO: 181561 - RNA, 1413 nt, Artificial Sequence; identical to SEQ ID NO: 181501
  derived and/or modified CDS sequence (opt4) from neuraminidase__InfluenzaA__AEX34641

SEQ ID NO: 181562 - RNA, 1413 nt, Artificial Sequence
  derived and/or modified CDS sequence (opt4) from neuraminidase__InfluenzaA__AEX34653
augaaccccaaccagaagaucaucaccaucggcagcaucagcaucgccaucggcaucaucagccugaugcugcaggugggcaacaucaucagcaucugggccagccacagcauccagaccggcagccagaaccacaccggcaucugcaaccagagaaucaucaccuacgagaacagcaccugggugaaccacaccuacgugaacaucaacaacaccaacgugguggccggcaaggacaagaccagcguggcccuggccggcaacagcagccugugcagcaucagcggcugggccaucuacaccaaggacaacagcaucagaaucggcagcaagggcgacguguucgugaucagagagcccuucaucagcugcagccaccuggagugcagaaccuucuuccugacccagggcgcccugcugaacgacaagcacagcaacggcaccgugaaggacagaagccccuacagagcccugaugagcugcccccugggcgaggcccccagccccuacaacagcaaguucgagagcguggccuggagcgccagcgccugccacgacggccugggcuggcugaccaucggcaucagcggccccgacaacggcgccguggccgugcugaaguacaacggcaucaucaccgagaccaucaagagcuggaagaagagaauccugagaacccaggagagcgagugcgugugcgugaacggcagcugcuucaccaucaugaccgacggccccagcaacggcgccgccagcuacaagaucuucaagaucgagaagggccaggugaccaagagcguggagcugaacgcccccaacuuccacuacgaggagugcagcugcuaccccgacaccggcaccgugaugugcgugugcagagacaacuggcacggcagcaacagacccugggugagcuucaaccaggaccuggacuaccagaucggcuacaucugcagcggcguguucggcgacaaccccagacccaaggacggcaagggcagcugcaaccccgugaccguggacggcgccgacggcgugaagggcuucagcuacaaguacggcaacggcguguggaucggcagaaccaagagcaacagacugagaaagggcuucgagaugaucugggaccccaacggcuggaccgacaccgacagcgacuucagcgugaagcaggacgugguggccaucaccgacuggagcggcuacagcggcagcuucgugcagcaccccgagcugaccggccuggacugcaucagacccugcuucuggguggagcuggugagaggccugcccagagagaacaccaccaucuggaccagcggcagcagcaucagcuucugcggcguggacagcgacaccgccaacuggagcuggcccgacggcgccgagcugcccuucaccaucgacaaguga

SEQ ID NO: 181563 - RNA, 1413 nt, Artificial Sequence
  derived and/or modified CDS sequence (opt4) from neuraminidase__InfluenzaA__AEX34664
augaaccccaaccagaagaucaucaccaucggcagcaucagcaucgccaucggcaucaucagccugaugcugcagaucggcaacaucaucagcaucugggccagccacagcauccagaccggcagccagaaccacaccggcaucugcaaccagagaaucaucaccuacgagaacagcaccugggugaaccacaccuacgugaacaucaacaacaccaacgugguggccggcaaggacaagaccagcgugacccuggccggcaacagcagccugugcagcaucagcggcugggccaucuacaccaaggacaacagcaucagaaucggcagcaagggcgacguguucgugaucagagagcccuucaucagcugcagccaccuggagugcagaaccuucuuccugacccagggcgcccugcugaacgacaagcacagcaacggcaccgugaaggacagaagccccuacagagcccugaugagcugcccccugggcgaggcccccagccccuacaacagcaaguucgagagcguggccuggagcgccagcgccugccacgacggcaugggcuggcugaccaucggcaucagcggccccgacaacggcgccguggccgugcugaaguacaacggcaucaucaccgagaccaucaagagcuggaagaagagaauccugagaacccaggagagcgagugcgugugcgugaacggcagcugcuucaccaucaugaccgacggccccagcaacggcgccgccagcuacaagaucuucaagaucgagaagggcaaggugaccaagagcagagagcugaacgcccccaacuuccacuacgaggagugcagcugcuaccccgacaccggcaccgugaugugcgugugcagagacaacuggcacggcagcaacagacccugggugagcuucaaccagaaccuggacuaccagaucggcuacaucugcagcggcguguucggcgacaaccccagacccaaggacggcaagggcagcugcaaccccgugaccgccgacggcgccgacggcgugaagggcuucagcuacaaguacggcaacggcguguggaucggcagaaccaagagcaacagacugagaaagggcuucgagaugaucugggaccccaacggcuggaccgacaccgacagcgacuucagcgugaagcaggacgugguggccaucaccgacuggagcggcuacagcggcagcuucgugcagcaccccgagcugaccggccuggacugcaucagacccugcuucuggguggagcuggugagaggccugcccagagagaacaccaccaucuggaccagcggcagcagcaucagcuucugcggcguggacagcgacaccgccaacuggagcuggcccgacggcgccgagcugcccuucaccaucgacaaguga

SEQ ID NO: 181564 - RNA, 1413 nt, Artificial Sequence; identical to SEQ ID NO: 181542
  derived and/or modified CDS sequence (opt4) from neuraminidase__InfluenzaA__AEX34686

SEQ ID NO: 181565 - RNA, 1413 nt, Artificial Sequence
  derived and/or modified CDS sequence (opt4) from neuraminidase__InfluenzaA__AEX34760
augaaccccaaccagaagaucaucaccaucggcagcaucagcaucgccaucggcaucaucagccugauccugcagaucggcaacaucaucagcaucugggccagccacagcauccagaccggcagccagaaccacaccggcaucugcaaccagagaaucaucaccuacgagaacagcaccugggugaacaacaccuacgugaacaucaacaacaccaacguggugguggagaaggacaagaccagcgugacccuggccggcaacagcagccugugcagcaucagcggcugggccaucuacaccaaggacaacagcaucagaaucggcagcaagggcgacguguucgugaucagagagcccuucaucagcugcagccaccuggagugcagaaccuucuuccugacccagggcgcccugcugaacgacaagcacagcaacggcaccgugaaggacagaagccccuacagagcccugaugagcugcccccugggcgaggcccccagccccuacaacagcagauucgagagcguggccuggagcgccagcgccugccacgacggcaugggcuggcugaccaucggcaucagcggccccgacaacggcgccguggccgugcugaaguacaacggcaucaucaccgagaccaucaagagcuggaagaagagaauccugagaacccaggagagcgagugcgugugcaugaacggcagcugcuucaccaucaugaccgacggccccagcaacggcgccgccagcuacaagaucuucaagaucgagaagggcaaggugaccaagaccaucgagcugaacgcccccaacuuccacuacgaggagugcagcugcuaccccgacaccggcaccgugaugugcgugugcagagacaacuggcacggcagcaacagacccugggugagcuucaaccagaaccuggacuaccagaucggcuacaucugcagcggcguguucggcgacaaccccagacccaaggacggcgagggcagcugcaaccccgugaccguggacggcgccgacggcgugaagggcuucagcuacaaguacggcaacggcguguggaucggcagaaccaagagcaacagacugagaaagggcuucgagaugaucugggaccccaacggcuggaccaacaccgacagcgacuucagcgugaagcaggacgugguggccaucaccgacuggagcggcuacagcggcagcuucgugcagcaccccgagcugaccggccuggacugcaucagacccugcuucuggguggagcuggugagaggccugcccagagagaacaccaccaucuggaccagcggcagcagcaucagcuucugcggcgugaacagcggcaccgugaacuggagcuggcccgacggcgccgagcugcccuucaccaucgacaaguga

SEQ ID NO: 181566 - RNA, 1413 nt, Artificial Sequence
  derived and/or modified CDS sequence (opt4) from neuraminidase__InfluenzaA__AEX34771
augaaccccaaccagaagaucaucaccaucggcagcaucagcaucgccaucggcaucaucagccugauccugcagaucggcaacaucaucagcaucugggccagccacagcauccagaccggcagccagaaccacaccggcaucugcaaccagagaaucaucaccuacgagaacagcaccugggugaacaacaccuacgugaacaucaacaacaccaacguggugguggagaaggacaagaccagcgugacccuggccggcaacagcagccugugcagcaucagcggcugggccaucuacaccaaggacaacagcaucagaaucggcagcaagggcgacguguucgugaucagagagcccuucaucagcugcagccaccuggagugcagaaccuucuuccugacccagggcgcccugcugaacgacaagcacagcaacggcaccgugaaggacagaagccccuacagagcccugaugagcugcccccugggcgaggcccccagccccuacaacagcagauucgagagcguggccuggagcgccagcgccugccacgacggcaugggcuggcugaccaucggcaucagcggccccgacaacggcgccguggccgugcugaaguacaacggcaucaucaccgagaccaucaagagcuggaagaagagaauccugagaacccaggagagcgagugcgugugcaugaacggcagcugcuucaccaucaugaccgacggccccagcaacggcgccgccagcuacaagaucuucaagaucgagaagggcaaggugaccaagaccaucgagcugaacgcccccaacuuccacuacgaggagugcagcugcuaccccgacaccggcaccgugaugugcgugugcagagacaacuggcacggcagcaacagacccugggugagcuucaaccagaaccuggacuaccagaucggcuacaucugcagcggcguguucggcgacaaccccagacccaaggacggcgagggcagcugcaaccccgugaccguggacggcgccgacggcgugaagggcuucagcuacaaguacggcaacggcguguggaucggcagaaccaagagcaacagacugagaaagggcuucgagaugaucugggaccccaacggcuggaccaacaccgacagcgacuucagcgugaagcaggacgugguggccaucaccgacuggagcggcuacagcggcagcuucgugcagcaccccgagcugaccggccuggacugcaucagacccugcuucuggguggagcuggugagaggccugcccagagagaacaccaccaucuggaccagcggcagcagcaucagcuucugcggcgugaacagcggcaccgccaacuggagcuggcccgacggcgccgagcugcccuucaccaucgacaaguga

SEQ ID NO: 181567 - RNA, 1413 nt, Artificial Sequence; identical to SEQ ID NO: 177521
  derived and/or modified CDS sequence (opt4) from neuraminidase__InfluenzaA__AEX34782

SEQ ID NO: 181568 - RNA, 1413 nt, Artificial Sequence
  derived and/or modified CDS sequence (opt4) from neuraminidase__InfluenzaA__AEX34793
augaaccccaaccagaagaucaucaccaucggcagcaucagcaucgccaucggcaucaucagccugaugcugcagaucggcaacaucaucagcaucugggccagccacagcauccagaccggcagccagaaccacaccggcaucugcaaccagagaaucaucaccuacgagaacagcaccugggugaaccacaccuacgugaacaucaacaacaccaacgugguggccggcaaggacaagacccccgugacccuggugggcaacagcagccugugcagcaucagcggcugggccaucuacaccaaggacaacagcaucagaaucggcagcaagggcgacguguucgugaucagagagcccuucaucagcugcagccaccuggagugcaagaccuucuuccugacccagggcgcccugcugaacgacaagcacagcaacggcaccgugaaggacagaagccccuacagagcccugaugagcugcccccugggcgaggcccccagccccuacaacagcaaguucgagagcguggccuggagcgccagcgccugccacgacggcaucggcuggcugaccaucggcaucagcggccccgacaacggcgccguggccgugcugaaguacaagggcaucaucaccggcaccaucaagagcuggaagaagcagauccugagaacccaggagagcgagugcgugugcaugaacggcagcugcuucaccaucaugaccgacggccccagcaacggcgccgccagcuacaagaucuucaagaucgagaagggcaaggugaccaagagcauggagcugaacgcccccaacuuccacuacgaggagugcagcugcuaccccgacaccggcaccgugaugugcgugugcagagacaacuggcacggcagcaacagacccugggugagcuucaaccagaaccuggacuaccagaucggcuacaucugcagcggcguguucggcgacaaccccagacccaaggacagagagggcagcugcaaccccgugaccguggacggcgccaacggcgugaagggcuucagcuacaaguacggcaacggcguguggaucggcagaaccaagagcaacagaaucagaaagggcuucgagaugaucugggaccccaacggcuggaccaacaccgacagcgacuucagcgugaagcaggacaucguggccaucaccgacuggagcggcuacagcggcagcuucgugcagcaccccgagcugaccggccuggacugcaucagacccugcuucuggguggagcuggugagaggccugcccagagagaacaccaccaucuggaccagcggcagcagcaucagcuucugcggcgugaacggcgacaucgccaacuggagcuggcccgacggcgccgagcugcccuucaccaucgacaaguga

SEQ ID NO: 181569 - RNA, 1413 nt, Artificial Sequence; identical to SEQ ID NO: 181568
  derived and/or modified CDS sequence (opt4) from neuraminidase__InfluenzaA__AEX34804

SEQ ID NO: 181570 - RNA, 1413 nt, Artificial Sequence
  derived and/or modified CDS sequence (opt4) from neuraminidase__InfluenzaA__AEX34815
augaaccccaaccagaagaucaucaccaucggcagcaucagcaucgccaucggcaucaucagccugaugcugcagaucggcaacaucaucagcaucugggccagccacagcauccagaccggcagccagaacaacaccggcaucugcaaccagagaaucaucaccuacgagaacagcaccugggugaaccacaccuacgugaacaucaacaacaccaacgugguggccggcgaggacaagaccagcgugacccugaccggcaacagcagccugugcagcaucagcggcugggccaucuacaccaaggacaacagcaucagaaucggcagcaagggcgacguguucgugaucagagagcccuucaucagcugcagccaccuggagugcagaaccuucuuccugacccagggcgcccugcugaacgacaagcacagcaacggcaccgugaaggacagaagccccuacagagcccugaugagcugcccccugggcgaggcccccagccccuacaacagcaaguucgagagcguggccuggagcgccagcgccugccacgacggcaugggcuggcugaccaucggcaucagcggccccgacaacggcgccguggccgugcugaaguacaacggcaucaucaccggcaccaucaagagcuggaagaagcagauccugagaacccaggagagcgagugcgugugcaugaacggcagcugcuucaccaucaugaccgacggccccagcaacaaggccgccagcuacaagaucuucaagaucgagaagggcaaggugaccaagagcaucgagcugaacgcccccaacuucuacuacgaggagugcagcugcuaccccgacaccggcaucgugaugugcgugugcagagacaacuggcacggcagcaacagacccugggugagcuucaaccagaaccuggacuaccagaucggcuacaucugcagcggcguguucggcgacaaccccagacccgaggacggcgagggcagcugcaaccccgugaccguggacggcgccaacggcgugaagggcuucagcuacaaguacggcaacggcguguggaucggcagaaccaagagcaacagacugagaaagggcuucgagaugaucugggaccccaacggcuggaccaacaccgacagcgacuucagcgugaagcaggacgugguggccaucaccgacuggagcggcuacagcggcagcuucgugcagcaccccgagcugaccggccuggacugcaucagacccugcuucuggguggagcuggugagaggccugcccagagagaacaccaccaucuggaccagcggcagcagcaucagcuucugcggcgugaacagcgacaccgccaacuggagcuggcccgacggcgccgagcugcccuucaccaucgacaaguga

SEQ ID NO: 181571 - RNA, 1413 nt, Artificial Sequence; identical to SEQ ID NO: 181568
  derived and/or modified CDS sequence (opt4) from neuraminidase__InfluenzaA__AEX34826

SEQ ID NO: 181572 - RNA, 1413 nt, Artificial Sequence; identical to SEQ ID NO: 181568
  derived and/or modified CDS sequence (opt4) from neuraminidase__InfluenzaA__AEX34837

SEQ ID NO: 181573 - RNA, 1413 nt, Artificial Sequence
  derived and/or modified CDS sequence (opt4) from neuraminidase__InfluenzaA__AEX34859
augaaccccaaccagaagaucaucaccaucggcagcaccagcaucgccaucggcaucaucagccugaugcugcagaucggcaacaucaucagcaucugggccagccacagcauccagaccggcagccagaaccacaccggcaucugcaaccagagaaucaucaccuacgagaacagcaccugggugaaccacaccuacgugaacaucaacaacaccaacgugguggccggcaaggacaagacccccgugacccugaucggcaacagcagccugugcagcaucagcggcugggccaucuacaccaaggacaacagcaucagaaucggcagcaagggcgacguguucgugaucagagagcccuucaucagcugcagccaccuggagugcaagaccuucuuccugacccagggcgcccugcugaacgacaagcacagcaacggcaccgugaaggacagaagccccuacagagcccugaugagcugcccccugggcgaggcccccagccccuacaacagcaaguucgagagcguggccuggagcgccagcgccugccacgacggcaucggcuggcugaccaucggcaucagcggccccgacaacggcgccguggccgugcugaaguacaagggcaucaucaccggcaccaucaagagcuggaagaagcagauccugagaacccaggagagcgagugcgugugcaugaacggcagcugcuucaccaucaugaccgacggccccagcaacggcgccgccagcuacaagaucuucaagaucgagaagggcaaggugaccaagagcauggagcugaacgcccccaacuuccacuacgaggagugcagcugcuaccccgacaccggcaccgugaugugcgugugcagagacaacuggcacggcagcaacagacccugggugagcuucaaccagaaccuggacuaccagaucggcuacaucugcagcggcguguucggcgacaaccccagacccaaggacagagagggcagcugcaaccccgugaccguggacggcgccaacggcgugaagggcuucagcuacaaguacggcaacggcguguggaucggcagaaccaagagcaacagaaucagaaagggcuucgagaugaucugggaccccaacggcuggaccaacaccgacagcgacuucagcgugaagcaggacaucguggccaucaccgacuggagcggcuacagcggcagcuucgugcagcaccccgagcugaccggccuggacugcaucagacccugcuucuggguggagcuggugagaggccugcccagagagaacaccaccaucuggaccagcggcagcagcaucagcuucugcggcgugaacggcgacaucgccaacuggagcuggcccgacggcgccgagcugcccuucaccaucgacaaguga

SEQ ID NO: 181574 - RNA, 1413 nt, Artificial Sequence
  derived and/or modified CDS sequence (opt4) from neuraminidase__InfluenzaA__AEX34870
augaaccccaaccagaagaucaucaccaucggcagcaucagcaucgccaucggcaucaucagccugaugcugcagaucggcaacaucaucagcaucugggccagccacagcauccagaccggcagccagaacaacaccggcaucugcaaccagagaaucaucaccuacgagaacagcaccugggugaaccacaccuacgugaacaucaacaacaccaacgugguggccggcgaggacaagaucagcgugacccuggccggcaacagcagccugugcagcaucagcggcugggccaucuacaccaaggacaacagcaucagaaucggcagcaagggcgacguguucgugaucagagagcccuucaucagcugcagccaccuggagugcagaaccuucuuccugacccagggcgcccugcugaacgacaagcacagcaacggcaccgugaaggacagaagccccuacagagcccugaugagcugcccccugggcgaggcccccagccccuacaacagcaaguucgagagcguggccuggagcgccagcgccugccacgacggcaucggcuggcugaccaucggcaucagcggccccgacaacggcgccguggccgugcugaaguacaacggcaucaucaccggcaccaucaagagcuggaagaagcagauccugagaacccaggagagcgagugcgugugcaugaacggcagcugcuucaccaucaugaccgacggccccagcaacaaggccgccagcuacaagaucuucaagaucgagaagggcaaggugaccaagagcaucgagcugaacgcccccaacuucuacuacgaggagugcagcugcuaccccgacaccggcaucgugaugugcgugugcagagacaacuggcacggcagcaacagacccugggugagcuucaaccagaaccuggacuaccagaucggcuacaucugcagcggcguguucggcgacaaccccagacccgaggacggcgagggcagcugcaaccccgugaccguggacggcgccaacggcgugaagggcuucagcuacaaguacggcaacggcguguggaucggcagaaccaagagcaacagacugagaaagggcuucgagaugaucugggaccccaacggcuggaccaacaccgacagcgacuucagcgugaagcaggacgugguggccaucaccgacuggagcggcuacagcggcagcuucgugcagcaccccgagcugaccggccuggacugcaucagacccugcuucuggguggagcuggugagaggccugcccagagagaacaccaccaucuggaccagcggcagcagcaucagcuucugcggcgugaacagcgacaccgccaacuggagcuggcccgacggcgccgagcugcccuucaccaucgacaaguga

SEQ ID NO: 181575 - RNA, 1413 nt, Artificial Sequence
  derived and/or modified CDS sequence (opt4) from neuraminidase__InfluenzaA__AEX34881
augaaccccaaccagaagaucaucaccaucggcagcaucagcaucgccaucggcaucaucagccugaugcugcagaucggcaacaucaucagcaucugggccagccacagcauccagaccggcagccagaaccacaccggcaucugcaaccagagaaucaucaccuacgagaacagcaccugggugaaccacaccuacgugaacaucaacaacaccaacgugguggccggcaaggacaaggcccccgugacccugaucggcaacagcagccugugcagcaucagcggcugggccaucuacaccaaggacaacagcaucagaaucggcagcaagggcgacguguucgugaucagagagcccuucaucagcugcagccaccuggagugcaagaccuucuuccugacccagggcgcccugcugaacgacaagcacagcaacggcaccgugaaggacagaagccccuacagagcccugaugagcugcccccugggcgaggcccccagccccuacaacagcaaguucgagagcguggccuggagcgccagcgccugccacgacggcaucggcuggcugaccaucggcaucagcggccccgacaacggcgccguggccgugcugaaguacaagggcaucaucaccggcaccaucaagagcuggaagaagcagauccugagaacccaggagagcgagugcgugugcaugaacggcagcugcuucaccaucaugaccgacggccccagcaacggcgccgccagcuacaagaucuucaagaucgagaagggcaaggugaccaagagcauggagcugaacgcccccaacuuccacuacgaggagugcagcugcuaccccgacaccggcaccgugaugugcgugugcagagacaacuggcacggcagcaacagacccugggugagcuucaaccagaaccuggacuaccagaucggcuacaucugcagcggcguguucggcgacaaccccagacccaaggacagagagggcagcugcaaccccgugaccguggacggcgccaacggcgugaagggcuucagcuacaaguacggcaacggcguguggaucggcagaaccaagagcaacagaaucagaaagggcuucgagaugaucugggaccccaacggcuggaccaacaccgacagcgacuucagcgugaagcaggacaucguggccaucaccgacuggagcggcuacagcggcagcuucgugcagcaccccgagcugaccggccuggacugcaucagacccugcuucuggguggagcuggugagaggccugcccagagagaacaccaccaucuggaccagcggcagcagcaucagcuucugcggcgugaacggcgacaucgccaacuggagcuggcccgacggcgccgagcugcccuucaccaucgacaaguga

SEQ ID NO: 181576 - RNA, 1413 nt, Artificial Sequence
  derived and/or modified CDS sequence (opt4) from neuraminidase__InfluenzaA__AEX34892
augaaccccaaccagaagaucaucaccaucggcagcaucagcaucgccaucggcaucaucagccugaugcugcagaucggcaacaucaucagcaucugggccagccacagcauccagaccggcagccagaacaacaccggcaucugcaaccagagaaucaucaccuacgagaacagcaccugggugaaccacaccuacgugaacaucaacaacaccaacgugguggccggcgaggacaagaccagcgugacccuggccggcaacagcagccugugcagcaucagcggcugggccaucuacaccaaggacaacagcaucagaaucggcagcaagggcgacguguucgugaucagagagcccuucaucagcugcagccaccuggagugcagaaccuucuuccugacccagggcgcccugcugaacgacaagcacagcaacggcaccgugaaggacagaagccccuacagagcccugaugagcugcccccugggcgaggcccccagccccuacaacagcaaguucgagagcguggccuggagcgccagcgccugccacgacggcaugggcuggcugaccaucggcaucagcggccccgacaacggcgccguggccgugcugaaguacaacggcaucaucaccggcaccaucaagagcuggaagaagcagauccugagaacccaggagagcgagugcgugugcaugaacggcagcugcuucaccaucaugaccgacggccccagcaacaaggccgccagcuacaagaucuucaagaucgagaagggcaaggugaccaagagcaucgagcugaacgcccccaacuucuacuacgaggagugcagcugcuaccccgacaccggcaucgugaugugcgugugcagagacaacuggcacggcagcaacagacccugggugagcuucaaccagaaccuggacuaccagaucggcuacaucugcagcggcguguucggcgacaaccccagacccgaggacggcgagggcagcugcaaccccgugaccguggacggcgccaacggcgugaagggcuucagcuacaaguacggcaacggcguguggaucggcagaaccaagagcaacagacugagaaagggcuucgagaugaucugggaccccaacggcuggaccaacaccgacagcgacuucagcgugaagcagaacgugguggccaucaccgacuggagcggcuacagcggcagcuucgugcagcaccccgagcugaccggccuggacugcaucagacccugcuucuggguggagcuggugagaggccugcccagagagaacaccaccaucuggaccagcggcagcagcaucagcuucugcggcgugaacagcgacaccgccaacuggagcuggcccgacggcgccgagcugcccuucaccaucgacaaguga

SEQ ID NO: 181577 - RNA, 1413 nt, Artificial Sequence
  derived and/or modified CDS sequence (opt4) from neuraminidase__InfluenzaA__AEX34903
augaaccccaaccagaagaucaucaccaucggcagcaucagcaucgccaucggcaucaucagccugaugcugcagaucggcaacaucaucagcaucugggccagcagaagcauccagaccggcagccagaaccacaccggcaucugcaaccagagaaucaucaccuacgagaacagcaccugggugaaccacaccuacgugaacaucaacaacaccaacgugguggccggcaaggacaagacccccgugacccuggugggcaacagcagccugugcagcaucagcggcugggccaucuacaccaaggacaacagcaucagaaucggcagcaagggcgacguguucgugaucagagagcccuucaucagcugcagccaccuggagugcaagaccuucuuccugacccagggcgcccugcugaacgacaagcacagcaacggcaccgugaaggacagaagccccuacagagcccugaugagcugcccccugggcgaggcccccagccccuacaacagcaaguucgagagcguggccuggagcgccagcgccugccacgacggcaucggcuggcugaccaucggcaucagcggccccgacaacggcgccguggccgugcugaaguacaagggcaucaucaccggcaccaucaagagcuggaagaagcagauccugagaacccaggagagcgagugcgugugcaugaacggcagcugcuucaccaucaugaccgacggccccagcaacggcgccgccagcuacaagaucuucaagaucgagaagggcaaggugaccaagagcauggagcugaacgcccccaacuuccacuacgaggagugcagcugcuaccccgacaccggcaccgugaugugcgugugcagagacaacuggcacggcagcaacagacccugggugagcuucaaccagaaccuggacuaccagaucggcuacaucugcagcggcguguucggcgacaaccccagacccaaggacagagagggcagcugcaaccccgugaccguggacggcgccaacggcgugaagggcuucagcuacaaguacggcaacggcguguggaucggcagaaccaagagcaacagaaucagaaagggcuucgagaugaucugggaccccaacggcuggaccaacaccgacagcgacuucagcgugagacaggacaucguggccaucaccgacuggagcggcuacagcggcagcuucgugcagcaccccgagcugaccggccuggacugcaucagacccugcuucuggguggagcuggugagaggccugcccagagagaacaccaccaucuggaccagcggcagcagcaucagcuucugcggcgugaacggcgacaucgccaacuggagcuggcccgacggcgccgagcugcccuucaccaucgacaaguga

SEQ ID NO: 181578 - RNA, 1413 nt, Artificial Sequence; identical to SEQ ID NO: 177521
  derived and/or modified CDS sequence (opt4) from neuraminidase__InfluenzaA__AEX34914

SEQ ID NO: 181579 - RNA, 1413 nt, Artificial Sequence; identical to SEQ ID NO: 177521
  derived and/or modified CDS sequence (opt4) from neuraminidase__InfluenzaA__AEX34925

SEQ ID NO: 181580 - RNA, 1413 nt, Artificial Sequence; identical to SEQ ID NO: 177521
  derived and/or modified CDS sequence (opt4) from neuraminidase__InfluenzaA__AEX34936

SEQ ID NO: 181581 - RNA, 1413 nt, Artificial Sequence; identical to SEQ ID NO: 177521
  derived and/or modified CDS sequence (opt4) from neuraminidase__InfluenzaA__AEX34947

SEQ ID NO: 181582 - RNA, 1413 nt, Artificial Sequence; identical to SEQ ID NO: 177521
  derived and/or modified CDS sequence (opt4) from neuraminidase__InfluenzaA__AEX34958

SEQ ID NO: 181583 - RNA, 1413 nt, Artificial Sequence; identical to SEQ ID NO: 177521
  derived and/or modified CDS sequence (opt4) from neuraminidase__InfluenzaA__AEX34969

SEQ ID NO: 181584 - RNA, 1413 nt, Artificial Sequence; identical to SEQ ID NO: 177521
  derived and/or modified CDS sequence (opt4) from neuraminidase__InfluenzaA__AEX34980

SEQ ID NO: 181585 - RNA, 1413 nt, Artificial Sequence; identical to SEQ ID NO: 177521
  derived and/or modified CDS sequence (opt4) from neuraminidase__InfluenzaA__AEX34991

SEQ ID NO: 181586 - RNA, 1413 nt, Artificial Sequence
  derived and/or modified CDS sequence (opt4) from neuraminidase__InfluenzaA__AEX35002
augaaccccaaccagaagaucaucaccaucggcagcaucagcaucgccaucggcaucaucagccugaugcugcagaucggcaacaucaucagcaucugggccagccacagcauccagaccggcagccagaaccacaccggcaucugcaaccagagaaucaucaccuacgagaacagcaccugggugaaccacaccuacgugaacaucaacaacaccaacgugguggccggcaaggacaagacccccgugacccugaucggcaacagcagccugugcagcaucagcggcugggccaucuacaccaaggacaacagcaucagaaucggcagcaagggcgacguguucgugaucagagagcccuucaucagcugcagccaccuggagugcaagaccuucuuccugacccagggcgcccugcugaacgacaagcacagcaacggcaccgugaaggacagaagccccuacagagcccugaugagcugcccccugggcgaggcccccagccccuacaacagcaaguucgagagcguggccuggagcgccagcgccugccacgacggcaucggcuggcugaccaucggcaucagcggccccgacaacggcgccguggccgugcugaaguacaagggcaucaucaccggcaccaucaagagcuggaagaagcagauccugagaacccaggagagcgagugcgugugcaugaacggcagcugcuucaccaucaugaccgacggccccagcaacggcgccgccagcuacaagaucuucaagaucgagaagggcaaggugaccaagagcauggagcugaacgcccccaacuuccacuacgaggagugcagcugcuaccccgacaccggcaccgugaugugcgugugcagagacaacuggcacggcagcaacagacccugggugagcuucaaccagaaccuggacuaccagaucggcuacaucugcagcggcguguucggcgacaaccccagacccaaggacagagagggcagcugcaaccccgugaccguggacggcgccaacggcgugaagggcuucagcuacaaguacggcaacggcguguggaucggcagaaccaagagcaacagaaucagaaagggcuucgagaugaucugggaccccaacggcuggaccaacaccgacagcgacuucagcgugaagcaggacaucguggccaucaccgacuggagcggcuacagcggcagcuucgugcagcaccccgagcugaccggccuggacugcaucagacccugcuucuggguggagcuggugagaggccugcccagagagaacaccaccaucuggaccagcggcagcagcaucagcuucugcggcgugaacggcgacaucgccaacuggagcuggcccgacggcgccgagcugcccuucaccaucgacaaguga

SEQ ID NO: 181587 - RNA, 1413 nt, Artificial Sequence; identical to SEQ ID NO: 177521
  derived and/or modified CDS sequence (opt4) from neuraminidase__InfluenzaA__AEX35013

SEQ ID NO: 181588 - RNA, 1413 nt, Artificial Sequence; identical to SEQ ID NO: 177521
  derived and/or modified CDS sequence (opt4) from neuraminidase__InfluenzaA__AEX35024

SEQ ID NO: 181589 - RNA, 1413 nt, Artificial Sequence; identical to SEQ ID NO: 177521
  derived and/or modified CDS sequence (opt4) from neuraminidase__InfluenzaA__AEX35035

SEQ ID NO: 181590 - RNA, 1413 nt, Artificial Sequence; identical to SEQ ID NO: 177521
  derived and/or modified CDS sequence (opt4) from neuraminidase__InfluenzaA__AEX35046

SEQ ID NO: 181591 - RNA, 1413 nt, Artificial Sequence; identical to SEQ ID NO: 177521
  derived and/or modified CDS sequence (opt4) from neuraminidase__InfluenzaA__AEX35057

SEQ ID NO: 181592 - RNA, 1413 nt, Artificial Sequence; identical to SEQ ID NO: 177521
  derived and/or modified CDS sequence (opt4) from neuraminidase__InfluenzaA__AEX35068

SEQ ID NO: 181593 - RNA, 1413 nt, Artificial Sequence
  derived and/or modified CDS sequence (opt4) from neuraminidase__InfluenzaA__AEX35079
augaaccccaaccagaagaucaucaccaucggcagcaucagcaucgccaucggcaucaucagccugaugcugcagaucggcaacaucaucagcaugugggccagccacagcauccagaccggcagccagaacaacaccggcaucugcaaccagagaaucaucaccuacgagaacagcaccugggugaaccacaccuacgugaacaucaacaacaccaacgugguggccggcgaggacaagaccagcgugacccuggccggcaacagcagccugugcagcaucagcggcugggccaucuacaccaaggacaacagcaucagaaucggcagcaagggcgacguguucgugaucagagagcccuucaucagcugcagccaccuggagugcagaaccuucuuccugacccagggcgcccugcugaacgacaagcacagcaacggcaccgugaaggacagaagccccuacagagcccugaugagcugcccccugggcgaggcccccagccccuacaacagcaaguucgagagcguggccuggagcgccagcgccugccacgacggcaugggcuggcugaccaucggcaucagcggccccgacaacggcgccguggccgugcugaaguacaacggcaucaucaccggcaccaucaagagcuggaagaagcagauccugagaacccaggagagcgagugcgugugcaugaacggcagcugcuucaccaucaugaccgacggccccagcaacaaggccgccagcuacaagaucuucaagaucgagaagggcaaggugaccaagagcaucgagcugaacgcccccaacuucuacuacgaggagugcagcugcuaccccgacaccggcaucgugaugugcgugugcagagacaacuggcacggcagcaacagacccugggugagcuucaaccaggaccuggacuaccagaucggcuacaucugcagcggcguguucggcgacaaccccagacccgaggacggcgagggcagcugcaaccccgugaccguggacggcgccaacggcgugaagggcuucagcuacaaguacggcaacggcguguggaucggcagaaccaagagcaacagacugagaaagggcuucgagaugaucugggaccccaacggcuggaccaacaccgacagcgacuucagcgugaagcaggacgugguggccaucaccgacuggagcggcuacagcggcagcuucgugcagcaccccgagcugaccggccuggacugcaucagacccugcuucuggguggagcuggugagaggccugcccagagagaacaccaccaucuggaccagcggcagcagcaucagcuucugcggcgugaacagcgacaccgccaacuggagcuggcccgacggcgccgagcugcccuucaccaucgacaaguga

SEQ ID NO: 181594 - RNA, 1413 nt, Artificial Sequence; identical to SEQ ID NO: 181568
  derived and/or modified CDS sequence (opt4) from neuraminidase__InfluenzaA__AEX35090

SEQ ID NO: 181595 - RNA, 1413 nt, Artificial Sequence
  derived and/or modified CDS sequence (opt4) from neuraminidase__InfluenzaA__AEX35101
augaaccccaaccagaagaucaucaccaucggcagcaucagcaucgccaucggcaucaucagccugaugcugcagaucggcaacaucaucagcaucugggccagccacagcauccagaccggcagccagaacaacaccggcaucugcaaccagagaaucaucaccuacgagaacagcaccugggugaaccacaccuacgugaacaucaacaacaccaacgugguggccggcgaggacaagaccagcgugacccuggccggcaacagcagccugugcagcaucagcggcugggccaucuacaccaaggacaacagcaucagaaucggcagcaagggcgacguguucgugaucagagagcccuucaucagcugcagccaccuggagugcagaaccuucuuccugacccagggcgcccugcugaacgacaagcacagcaacggcaccgugaaggacagaagccccuacagagcccugaugagcugcccccugggcgaggcccccagccccuacaacagcaaguucgagagcguggccuggagcgccagcgccugccacgacggcaugggcuggcugaccaucggcaucagcggccccgacaacggcgccguggccgugcugaaguacaacggcaucaucaccggcaccaucaagagcuggaagaagcagauccugagaacccaggagagcgagugcgugugcaugaacggcagcugcuucaccaucaugaccgacggccccagcaacaaggccgccagcuacaagaucuucaagaucgagaagggcaaggugaccaagagcaucgagcugaacgcccccaacuuccacuacgaggagugcagcugcuaccccgacaccggcaucgugaugugcgugugcagagacaacuggcacggcagcaacagacccugggugagcuucaaccagaaccuggacuaccagaucggcuacaucugcagcggcguguucggcgacaaccccagacccgaggacggcgagggcagcugcaaccccgugaccguggacggcgccaacggcgugaagggcuucagcuacaaguacgacaacggcguguggaucggcagaaccaagagcaacagacugagaaagggcuucgagaugaucugggaccccaacggcuggaccaacaccgacagcguguucagcgugaagcaggacgugguggccaucaccgacuggagcggcuacagcggcagcuucgugcagcaccccgagcugaccggccuggacugcaucagacccugcuucuggguggagcuggugagaggccugcccagagagaacaccaccaucuggaccagcggcagcagcaucagcuucugcggcgugaacagcgacaccgccaacuggagcuggcccgacggcgccgagcugcccuucaccaucgacaaguga

SEQ ID NO: 181596 - RNA, 1413 nt, Artificial Sequence
  derived and/or modified CDS sequence (opt4) from neuraminidase__InfluenzaA__AEX35112
augaaccccaaccagaagaucaucaccaucggcagcaucagcaucgccaucggcaucaucagccugaugcugcagaucggcaacaucaucagcaucugggccagccacagcauccagaccggcagccagaacaacaccggcaucugcaaccagagaaucaucaccuacgagaacagcaccugggugaaccacaccuacgugaacaucaacaacaccaacgugguggccggcgaggacaagaccagcgugacccuggccggcaacagcagccugugcagcaucagcggcugggccaucuacaccaaggacaacagcaucagaaucggcagcaagggcgacguguucgugaucagagagcccuucaucagcugcagccaccuggagugcagaaccuucuuccugacccagggcgcccugcugaacgacaagcacagcaacggcaccgugaaggacagaagccccuacagagcccugaugagcugcccccugggcgaggcccccagccccuacaacagcaaguucgagagcguggccuggagcgccagcgccugccacgacggcaugggcuggcugaccaucggcaucagcggccccgacaacggcgccguggccgugcugaaguacaacggcaucaucaccggcaccaucaagagcuggaagaagcagauccugagaacccaggagagcgagugcgugugcaugaacggcagcugcuucaccaucaugaccgacggccccagcaacaaggccgccagcuacaagaucuucaagaucgagaagggcaaggugaccaagagcaucgagcugaacgccagcaacuucuacuacgaggagugcagcugcuaccccgacaccggcaucgugaugugcgugugcagagacaacuggcacggcagcaacagacccugggugagcuucaaccagaaccuggacuaccagaucggcuacaucugcagcggcguguucggcgacaaccccagacccgaggacggcgagggcagcugcaaccccgugaccguggacggcgccaacggcgugaagggcuucagcuacaaguacggcaacggcguguggaucggcagaaccaagagcaacagacugagaaagggcuucgagaugaucugggaccccaacggcuggaccaacaccgacagcgacuucagcgugaagcaggacgugguggccaucaccgacuggagcggcuacagcggcagcuucgugcagcaccccgagcugaccggccuggacugcaucagacccugcuucuggguggagcuggugagaggccugcccagagagaacaccaccaucuggaccagcggcagcagcaucagcuucugcggcgugaacagcgacaccgccaacuggagcuggcccgacggcgccgagcugcccuucaccaucgacaaguga

SEQ ID NO: 181597 - RNA, 1413 nt, Artificial Sequence; identical to SEQ ID NO: 177521
  derived and/or modified CDS sequence (opt4) from neuraminidase__InfluenzaA__AEX35123

SEQ ID NO: 181598 - RNA, 1413 nt, Artificial Sequence
  derived and/or modified CDS sequence (opt4) from neuraminidase__InfluenzaA__AEX35145
augaaccccaaccagaagaucaucaccaucggcagcaucagcaucgccaucggcaucaucagccugaugcugcagaucggcaacaucaucagcaucugggccagccacagcauccagaccggcagccagaacaacaccggcaucugcaaccagagaaucaucaccuacgagaacagcaccugggugaaccacaccuacgugaacaucaacaacaccaacgugguggccggcgaggacaagaccagcgugacccuggccggcaacagcagccugugcagcaucagcggcugggccaucuacaccaaggacaacagcaucagaaucggcagcaagggcgacguguucgugaucagagagcccuucaucagcugcagccaccuggagugcagaaccuucuuccugacccagggcgcccugcugaacgacaagcacagcaacggcaccgugaaggacagaagccccuacagagcccugaugagcugcccccugggcgaggcccccagccccuacaacagcaaguucgagagcguggccuggagcgccagcgccugccacgacggcaugggcuggcugaccaucggcaucagcggccccgacaacggcgccguggccgugcugaaguacaacggcaucaucaccggcaccaucaagagcuggaagaagcagauccugagaacccaggagagcgagugcgugugcaugaacggcagcugcuucaccaucaugaccgacggccccagcaacaaggccgccagcuacaagaucuucaagaucgagaagggcaaggugaccaagagcaucgagcugaacgcccccaacuucuacuacgaggagugcagcugcuaccccgacaccggcaucgugaugugcgugugcagagacaacuggcacggcagcaacagacccugggugagcuucaaccagaaccuggacuaccagaucggcuacaucugcagcggcguguucggcgacaaccccagacccgaggacggcgagggcagcugcaaccccgugaccguggacggcgccaacggcgugaagggcuucagcuacaaguacggcaacggcguguggaucggcagaaccaagagcaacagacugagaaagggcuucgagaugaucugggaccccaacggcuggaccaacaccgacagcgacuucagcgugaagcaggacaucguggccaucaccgacuggagcggcuacagcggcagcuucgugcagcaccccgagcugaccggccuggacugcaucagacccugcuucuggguggagcuggugagaggccugcccagagagaacaccaccaucuggaccagcggcagcagcaucagcuucugcggcgugaacagcgacaccgccaacuggagcuggcccgacggcgccgagcugcccuucaccaucgacaaguga

SEQ ID NO: 181599 - RNA, 1413 nt, Artificial Sequence; identical to SEQ ID NO: 181568
  derived and/or modified CDS sequence (opt4) from neuraminidase__InfluenzaA__AEX35156

SEQ ID NO: 181600 - RNA, 1413 nt, Artificial Sequence; identical to SEQ ID NO: 177521
  derived and/or modified CDS sequence (opt4) from neuraminidase__InfluenzaA__AEX35167

SEQ ID NO: 181601 - RNA, 1413 nt, Artificial Sequence
  derived and/or modified CDS sequence (opt4) from neuraminidase__InfluenzaA__AEX35178
augaaccccaaccagaagaucaucaccaucggcagcaucagcaucgccaucggcaucaucagccugaugcugcagaucggcaacaucaucagcaucugggccagccacagcauccagaccggcagccagaaccacaccggcaucugcaaccagagaaucaucaccuacgagaacagcaccugggugaaccacaccuacgugaacaucaacaacaccaacgugguggccggcaaggacaagaccagcgugacccuggccggcaacagcagccugugcagcaucagcggcugggccaucuacaccaaggacaacagcaucagaaucggcagcaagggcgacguguucgugaucagagagcccuucaucagcugcagccaccuggagugcagaaccuucuuccugacccagggcgcccugcugaacgacaagcacagcaacggcaccgugaaggacagaagccccuacagagcccugaugagcugcccccugggcgaggcccccagccccuacaacagcaaguucgagagcguggccuggagcgccagcgccugccacgacggcaugggcuggcugaccaucggcaucagcggccccgacaacggcgccguggccgugcugaaguacaacggcaucaucaccgagaccaucaagagcuggaaggagagaauccugagaacccaggagagcgagugcgugugcgugaacggcagcugcuucaccaucaugaccgacggccccagcaacggcgccgccagcuacaagaucuucaagaucgagaagggcaaggugaccaagagcagagagcugaacgcccccaacuuccacuacgaggagugcagcugcuaccccgacaccggcaccgugaugugcgugugcagagacaacuggcacggcagcaacagacccugggugagcuucaaccagaaccuggacuaccagaucggcuacaucugcagcggcguguucggcgacaaccccagacccaaggacggcaagggcagcugcaaccccgugaccgccgacggcgccgacggcgugaagggcuucagcuacaaguacggcaacggcguguggaucggcagaaccaagagcaacagacugagaaagggcuucgagaugaucugggaccccaacggcuggaccgacaccgacagcgacuucagcgugaagcaggacgugguggccaucaccgacuggagcggcuacagcggcagcuucgugcagcaccccgagcugaccggccuggacugcaucagacccugcuucuggguggagcuggugagaggccugcccagagagaacaccaccaucuggaccagcggcagcagcaucagcuucugcggcguggacagcgacaccgccaacuggagcuggcccgacggcgccgagcugcccuucaccaucgacaaguga

SEQ ID NO: 181602 - RNA, 1413 nt, Artificial Sequence; identical to SEQ ID NO: 181542
  derived and/or modified CDS sequence (opt4) from neuraminidase__InfluenzaA__AEX35189

SEQ ID NO: 181603 - RNA, 1413 nt, Artificial Sequence; identical to SEQ ID NO: 181542
  derived and/or modified CDS sequence (opt4) from neuraminidase__InfluenzaA__AEX35200

SEQ ID NO: 181604 - RNA, 1413 nt, Artificial Sequence; identical to SEQ ID NO: 177521
  derived and/or modified CDS sequence (opt4) from neuraminidase__InfluenzaA__AEX35211

SEQ ID NO: 181605 - RNA, 1410 nt, Artificial Sequence
  derived and/or modified CDS sequence (opt4) from neuraminidase__InfluenzaA__AEX35222
augaaccccaaccagaagaucaucaccaucggcagcgugagccugaccaucagcaccaucugcuucuucaugcagaucgccauccuggugaccaccgugacccugcacuucaagcaguacgagugcaacagcccccccaacaaccaggugaugcugugcgagcccaccaucaucgagagaaacaucaccgagaucguguaccugaccaacaccaccaucgagaaggagaucugccccaagcuggccgaguacagaaacuggagcaagccccagugcaacaucaccggcuucgcccccuucagcaaggacaacagcaucagacugagcgccggcggcgacaucugggugaccagagagcccuacgugagcugcgaccccgacaagugcuaccaguucgcccugggccagggcaccacccugaacaacggccacagcaacgacaccgugcacgacagaacccccuacagaacccugcugaugaacgagcugggcgugcccuuccaccugggcaccaagcaggugugcaucgccuggagcagcagcagcugccacgacggcaaggccuggcugcacgugugcgugaccggcgacgacgagaacgccaccgccagcuucaucuacaacggcagacugguggacagcaucggcagcuggagcaagaagauccugagaacccaggagagcgagugcgugugcaucaacggcaccugcaccguggugaugaccgacggcagcgccagcggcaaggccgacaccaagauccuguucaucgaggagggcaagaucgugcacaccagcacccugagcggcagcgcccagcacguggaggagugcagcugcuaccccagauaccccggcgugagaugcgugugcagagacaacuggaagggcagcaacagacccaucguggacaucaacaucaaggacuacagcaucgugagcagcuacgugugcagcggccuggugggcgacacccccagaaagaacgacagcagcagcagcagccacugccuggaccccaacaacgaggagggcggccacggcgugaagggcugggccuucgacgacggcaacgacguguggaugggcagaaccaucagcgagaagcugagaagcggcuacgagaccuucaaggugaucgagggcuggagcaagcccaacagcaagcugcagaucaacagacaggugaucguggacagaggcaacagaagcggcuacagcggcaucuucagcguggagggcaagagcugcaucaacagaugcuucuacguggagcugaucagaggcagaaagcaggagaccgaggugcuguggaccagcaacagcaucgugguguucugcggcaccagcggcaccuacggcaccggcagcuggcccgacggcgccgacaucaaccugaugcccaucuga

SEQ ID NO: 181606 - RNA, 1413 nt, Artificial Sequence; identical to SEQ ID NO: 181501
  derived and/or modified CDS sequence (opt4) from neuraminidase__InfluenzaA__AEX35233

SEQ ID NO: 181607 - RNA, 1410 nt, Artificial Sequence
  derived and/or modified CDS sequence (opt4) from neuraminidase__InfluenzaA__AEX35244
augaaccccaaccagaagaucaucaccaucggcagcgugagccugaccaucagcaccaucugcuucuucaugcagaucgccauccugaucaacaccgugacccugcacuucaagcaguacgaguucaacagcccccccaacaaccaggugaugcugugcgagcccaccaucaucgagagaaacaucaccgagaucguguaccugaccaacaccaccaucgagaaggagaucugccccaagcuggccgaguacagaaacuggagcaagccccagugcaacaucaccggcuucgcccccuucagcaaggacaacagcaucagacugagcgccggcggcgacaucugggugaccagagagcccuacgugagcugcgaccccgacaagugcuaccaguucgcccugggccagggcaccacccugaacaacgugcacagcaacgacaccgugcacgacagaacccccuacagaacccugcugaugaacgagcugggcgugcccuuccaccugggcaccaagcaggugugcaucgccuggagcagcagcagcugccacgacggcaaggccuggcugcacgugugcgugaccggcgacgacaagaacgccaccgccagcuucaucuacaacggcagacugguggacagcaucgugagcuggagcaagaagauccugagaacccaggagagcgagugcgugugcaucaacggcaccugcaccguggugaugaccgacggcagcgccagcggcaaggccgacaccaagauccuguucaucgaggagggcaagaucgugcacaccagcacccugagcggcagcgcccagcacguggaggagugcagcugcuaccccagauaccccggcgugagaugcgugugcagagacaacuggaagggcagcaacagacccaucguggacaucaacaucaaggacuacagcaucgugagcagcuacgugugcagcggccuggugggcgacacccccagaaagaacgacagcagcagcagcagccacugccuggaccccaacaacgaggagggcggcaacggcgugaagggcugggccuucgacgacggcaacgacguguggaugggcagaaccaucagcgagaagcugagaagcggcuacgagaccuucaaggugaucgagggcuggagcaaccccaacagcaagcugcagaucaacagacaggugaucguggacagaggcaacagaagcggcuacagcggcaucuucagcguggagggcaagagcugcaucaacagaugcuucuacguggagcugaucagaggcagaaagcaggagaacgaggugcuguggaccagcaacagcaucgugguguucugcggcaccagcggcaccuacggcaccggcagcuggcccgacggcgccgacaucaaccugaugcccguguga

SEQ ID NO: 181608 - RNA, 1410 nt, Artificial Sequence; identical to SEQ ID NO: 175989
  derived and/or modified CDS sequence (opt4) from neuraminidase__InfluenzaA__AEX35255

SEQ ID NO: 181609 - RNA, 1413 nt, Artificial Sequence; identical to SEQ ID NO: 181501
  derived and/or modified CDS sequence (opt4) from neuraminidase__InfluenzaA__AEX35266

SEQ ID NO: 181610 - RNA, 1413 nt, Artificial Sequence; identical to SEQ ID NO: 181501
  derived and/or modified CDS sequence (opt4) from neuraminidase__InfluenzaA__AEX35277

SEQ ID NO: 181611 - RNA, 1410 nt, Artificial Sequence
  derived and/or modified CDS sequence (opt4) from neuraminidase__InfluenzaA__AEX35288
augaaccccaaccagaagaucaucaccaucggcagcgugagccugaccaucagcaccaucugcuucuucaugcagaucgccauccugaucaccaccgugacccugcacuucaagcaguacgaguucaacagcccccccaacaaccaggugaugcugugcgagcccaccaucaucgagagaaacaucaccgagaucguguaccugaccaacaccaccaucgagaaggagaucugccccaagcuggccgaguacagaaacuggagcaagccccagugcgacaucaccggcuucgcccccuucagcaaggacaacagcaucagacugagcgccggcggcgacaucugggugaccagagagcccuacgugagcugcgaccccgacaagugcuaccaguucgcccugggccagggcaccacccugaacaacgugcacagcaacgacaccgugcacaacagaacccccuacagaacccugcugaugaacgagcugggcgugcccuuccaccugggcaccaagcaggugugcaucgccuggagcagcagcagcugccacgacggcaaggccuggcugcacgugugcgugaccggcgacgacaagaacgccaccgccagcuucaucuacaacggcagacugguggacagcaucgugagcuggagcaagaagauccugagaacccaggagagcgagugcgugugcaucaacggcaccugcaccguggugaugaccgacggcagcgccagcggcaaggccgacaccaagauccuguucaucgaggagggcaagaucgugcacaccagcacccugagcggcagcgcccagcacguggaggagugcagcugcuaccccagauaccccggcgugagaugcgugugcagagacaacuggaagggcagcaacagacccaucguggacaucaacaucaaggacuacagcaucgugagcagcuacgugugcagcggccuggugggcgacacccccagaaagaacgacagcagcagcagcagccacugccuggaccccaacaacgaggagggcggccacggcgugaagggcugggccuucgacgacggcaacgacguguggaugggcagaaccaucagcgagaagcugagaagcggcuacgagaccuucaaggugaucgagggcuggagcaaccccaacagcaagcugcagaucaacagacaggugaucguggacagaggcaacagaagcggcuacagcggcaucuucagcguggagggcaagagcugcaucaacagaugcuucuacguggagcugaucagaggcagaaaggaggagaccgaggugcuguggaccagcaacagcaucgugguguucugcggcaccagcggcaccuacggcaccggcagcuggcccgacggcgccgacaucaaccugaugcccaucuga

SEQ ID NO: 181612 - RNA, 1410 nt, Artificial Sequence; identical to SEQ ID NO: 174774
  derived and/or modified CDS sequence (opt4) from neuraminidase__InfluenzaA__AEX35299
